United States Patent Application Publication US 2006/0228715 A1 - sequence listing, part 3

SEQ ID NO: 3609 - DNA, 201 bp, Homo sapiens
tgctgcctgcagtgggtgaatggggggattggttttgagagccagtcagtcagcacctggggtgtggccctaacagcaacagtccacatgttggtgcataygccttgctagctttggtgatgtgaggatgtagcatggggtatttgagggcatagcccagccacttttgaacccaggtgcttaagaggggtggtgttacta

SEQ ID NO: 3610 - DNA, 201 bp, Homo sapiens
gctccatggtctggcctctgtccccagggagtttattcattgactgctggcagaggagacaccaccacaagcacaaggaggctctcggtcttcagtcatgmgccctgtggtcacaggtgccagggagtcagctgccctgactaacgtgtcagggggcccacctcagccagcactggagtcagcgggttcctctgccacact

SEQ ID NO: 3611 - DNA, 201 bp, Homo sapiens
aagagctcgggagtgaggtaatgtggatttgaatcctggcttcagccacccctcaccattgtggccgggccatctgtgaagtgggaatgggagcatgaacygggcagggatggagggagaatgaagtaggacaaggatagggaagtctgccccctccccttgcagccccgctctcatcccagtagctcctatccgccccat

SEQ ID NO: 3612 - DNA, 201 bp, Homo sapiens
ggaggtagaggttgcagtgagtcaagatcacaccactgtactccagcctgggctacagagcaagattccctctcaaaaacaaaacaaaacaaaacacaacmcaacaaaccagcctggccaacatggtgaaaccctgtctccactaaaaatacaaaaattagccggatgtggtagcccatgcctgtactcccagctacttgg

SEQ ID NO: 3613 - DNA, 201 bp, Homo sapiens
ctcctcctcaggtgggctgggggctgttgcagacctctgagttttcaggcatagttgggaggttttggggacttttccaggatcccctttcaaatcctacsaggctggaggctttctgttagcctctgacttaggacagtcttaccaggccaagacctgctcctgggatacgtgcctcacagttaggagtccctgcaggac

SEQ ID NO: 3614 - DNA, 201 bp, Homo sapiens
agaaaaagcatctgaaatgaggtttgtgtgttacggtttgaatgtgtctcctagagttcatatgttaaaaacttaatccccagtgtaacagtatggagagrtgggatggtatgaaatgattaggtcatgagggctctgccttcatgaatagactaacgttgttatcagaggagtgagtaccttactgagaaagaattttta

SEQ ID NO: 3615 - DNA, 201 bp, Homo sapiens
atctgggaggtagaggttgcagtgagtcaagatcacaccactgtactccagcctgggctacagagcaagattccctctcaaaaacaaaacaaaacaaaacmcaacacaacaaaccagcctggccaacatggtgaaaccctgtctccactaaaaatacaaaaattagccggatgtggtagcccatgcctgtactcccagcta

SEQ ID NO: 3616 - DNA, 201 bp, Homo sapiens
atttttcacggtaatgttgcaaaatgtcatttttccatttcaaaataaaaataaaaagccctattgattgagattctctgtctggggagagccccggcgcygggccacactggcttgtgccccctaatccccctttccctcctctctccggctgggctctctgtactcaccagcaagtgccactcgctgtccggctccttc

SEQ ID NO: 3617 - DNA, 201 bp, Homo sapiens
tcacactttgttctgtcatcataattccctgagttacttaatgtttatctatatttaagtgaactctctgctcattcctccttcttctaccccaatgtctmaattcctatgtttatttttacgtatttctaatctgttaattgcttggatttaattgtgaatagttcattttattttcttgaaaaaggcttctgtgttcta

SEQ ID NO: 3618 - DNA, 201 bp, Homo sapiens
cacgtgaatctgggaggtagaggttgcagtgagtcaagatcacaccactgtactccagcctgggctacagagcaagattccctctcaaaaacaaaacaaamcaaaacacaacacaacaaaccagcctggccaacatggtgaaaccctgtctccactaaaaatacaaaaattagccggatgtggtagcccatgcctgtactc

SEQ ID NO: 3619 - DNA, 201 bp, Homo sapiens
tgaaaaagaaacatatcatatacttataaagcaaagatggcgatttatcgactcagtcaacaaaaggtcaggcttcaggcatggcttgatccaggggctgkctctctctctctctctctctctctctctctctctctctctgtgtgtgtgtgtgtgtgtgtgtgtgtgtgtgtgtgtgtctctctccctgtctatgtgtct

SEQ ID NO: 3620 - DNA, 201 bp, Homo sapiens
gcaggagaatcacgtgaatctgggaggtagaggttgcagtgagtcaagatcacaccactgtactccagcctgggctacagagcaagattccctctcaaaamcaaaacaaaacaaaacacaacacaacaaaccagcctggccaacatggtgaaaccctgtctccactaaaaatacaaaaattagccggatgtggtagcccat

SEQ ID NO: 3621 - DNA, 201 bp, Homo sapiens
ggcatggtggcacatgcctgtaatcacctagtcgggaggcggaggcaggagaatcacgtgaatctgggaggtagaggttgcagtgagtcaagatcacaccmctgtactccagcctgggctacagagcaagattccctctcaaaaacaaaacaaaacaaaacacaacacaacaaaccagcctggccaacatggtgaaaccct

SEQ ID NO: 3622 - DNA, 201 bp, Homo sapiens
atttctccctgggcgtttcactgaggccggtgagtgccctgtggtctgttttccacgtttgccgtatcccatctccatgtttttgcgtgtgtcgtgactgyctctcgttgtgctatcttcttctcgtttctgcttgacaatgagtaggcatctaggcccaggtgagaagccctgttttcaggaggcccccctagtactgtt

SEQ ID NO: 3623 - DNA, 201 bp, Homo sapiens
tgccagctggggagcatctgctattgttccaagtctaacactcagtcactgcttcagctgaggctgggaaaggcagccagagggttagaaggggagagggrgagagagagagagagagagagagagagagagagagagggagagagagagagagagagagagagagagagagagagagagagagagagagcgcatgtgagt

SEQ ID NO: 3624 - DNA, 201 bp, Homo sapiens
atgctctacctctctggacatggcatttggcctggggatggcatgtgacccaagatgggccagtgagaggggctgtcttctgctgaagctgccctccaccscaggatgaaactttcggtgcagggagttggcttgggagctgattccaggaagcatagggagaggagacgagaagtgagacagagaagggaaagaagccga

SEQ ID NO: 3625 - DNA, 201 bp, Homo sapiens
tttaatgtccataggttattgggaaacaggtggtgtttgattacgttagttaagctgtttagtggtgatttgtgagattttggtgcactcatcacccgagsagtatacactgcacccaatttgtagtcttttatctctcacctcttcccaccctttccccttgagtccccaaagtccattgtgtcattcttaatgccttgg

SEQ ID NO: 3626 - DNA, 201 bp, Homo sapiens
acctgcactagagaggaagtgtgatagcctggctcttctgatgacacgggcccggggagatgcttctcagccacatcatcaccttagcgccctgccttgckccagtgggctgctcttgggcaccaaatcagtgctctggggattagggagtcctgccttcccctcagaaggggacactgagccttcctgttcccatcttct

SEQ ID NO: 3627 - DNA, 201 bp, Homo sapiens
ggcgtgagcccccgcgcctggcccgtggtattagttttgattgcttgggtcagggggcaatttcaggagctggcgttcggcctttcctactatgttagctkctaggtatgtccatcctggtgatgtattccggaatggaggaaatgcccacttggtgggtctgtggacctgcgggacccactgagagaaagactggactgc

SEQ ID NO: 3628 - DNA, 201 bp, Homo sapiens
caagttcaagcgattctcctgcctcagcctcctgagtagctgggattataggctcctgccaccacaccctgctaattttggtacttttagtagagacgggrtttcgccatgttggccatgctggtctcgaactcctgacctcaggtcattcgcccgcctcggcctcccaaagtgttgggattacaggcgtgagcccccgcg

SEQ ID NO: 3629 - DNA, 201 bp, Homo sapiens
ctgcctctgccaatggctcctaccgccccagagctgcctaccagggggtagtcaagccatcattttctcctccttctgccttctcacatcccgccccccayccccaatcccttctcccagcctctcagctccctaagaaagcaagccttcccctctgggtgccttcctaacagtggcttagggctcagtccttactgcccc

SEQ ID NO: 3630 - DNA, 201 bp, Homo sapiens
ccagattggggtcatgcatctctcagaaccacagcgacttgagggtggtgaagcatgctgagcccaaggaatagcaaggtgtcgttttgggaggtggcagrtctgggcagtagaaagaccatgtgttctctgcaggggtgatggagcccaccgtccccactggcaggcatcccctccacagcctcctggacaggggtgtgt

SEQ ID NO: 3631 - DNA, 201 bp, Homo sapiens
agaagaaaagagggataatcagatgggagatttggaaaagcagagaaagacgatttagcaatttaggagacagacacacatgcacgcgtgcatgcatgtgygtgtgcacacacacagacagagagacagaaagagagagagagggagagaggtgtgaggggagagagggggcgcccctgtctggatccacatcgtgatgtg

SEQ ID NO: 3632 - DNA, 201 bp, Homo sapiens
tgagctcatctacacttcatcaaccagcagccaataatggggtctgacacggggggtgtgcctgggcctcgggtggaagcctctaccgtccagcccagtaycatgtgccatttttttttttttgagatggagtctcgctctgtcacccagtctggaatgctatagcgcaatctcggctcactacaacctccacctcctgga

SEQ ID NO: 3633 - DNA, 201 bp, Homo sapiens
tcctaggggatgtgagccacagagagaagcagctgcagatttgctccccacataggccccctccctgagcttgagtcccccagggggcctgaggctcttcyataggtgcacaggggaagaacagacggagacagtagagtcagggacaggtccccatctaggccttgagggtagcgtttatttctggctcttctgacttca

SEQ ID NO: 3634 - DNA, 201 bp, Homo sapiens
agcagccaataatggggtctgacacggggggtgtgcctgggcctcgggtggaagcctctaccgtccagcccagtaccatgtgccatttttttttttttgakatggagtctcgctctgtcacccagtctggaatgctatagcgcaatctcggctcactacaacctccacctcctggattcaagcgattctcctgcctcagac

SEQ ID NO: 3635 - DNA, 201 bp, Homo sapiens
catgctgttgaaggccactgcatccccactggccagccctgcctcatctctctccttgggctggcctgtgcactgagccaggtttcctcctcggcccatasatgaagggtttgctttgaacccgcattctatcaagtgctctgcaaacagcaccacacacagcatcaggaggccagcgctgtgccagtcctgactgtgcag

SEQ ID NO: 3636 - DNA, 201 bp, Homo sapiens
tctaccgtccagcccagtaccatgtgccatttttttttttttgagatggagtctcgctctgtcacccagtctggaatgctatagcgcaatctcggctcacyacaacctccacctcctggattcaagcgattctcctgcctcagactcccaagtagctgggattacaggtgtgtgccaccaagcccggataatttttgtatt

SEQ ID NO: 3637 - DNA, 201 bp, Homo sapiens
acccccagcccagggctctgaccactgtgacctcagggatggcccattgactcctgtcaattcctgtgttgatttctgaagtgaatccagggctatggaaragaaaaggggagacaaaagctgaacccttttcagacaaagtcatagcctgataaggagtctgttgtgtcaaatatccccccacctcctgaggcgcctcag

SEQ ID NO: 3638 - DNA, 201 bp, Homo sapiens
gttgggagaggtgtggacagtgccccactccctctgcaagcgcccctagagggctgcttcaagaacagtctggccccacagagaggtgtgtctggctaggygtgagtgtaccttaggagaggtttctaatccttcatgcctgtctgccaagggtgcctcagagcacctggtttgtccccatcagactctctgagtgttcag

SEQ ID NO: 3639 - DNA, 201 bp, Homo sapiens
gggatggcccattgactcctgtcaattcctgtgttgatttctgaagtgaatccagggctatggaaaagaaaaggggagacaaaagctgaacccttttcagrcaaagtcatagcctgataaggagtctgttgtgtcaaatatccccccacctcctgaggcgcctcagagagtcagagtcagagcagcccctggctggcgtca

SEQ ID NO: 3640 - DNA, 201 bp, Homo sapiens
gtgtggcactttgttgctgcagccccaggaaacagatttaccagatgtccttgctggagattgacagagtattaaagatacagaagatgctgacaagtccmgccgtaaggtttagaccaggttaaacccaggtgctggagactgatatcccataccccgagccgaagcagagcctgagacaatggcttgtgtgtagatagt

SEQ ID NO: 3641 - DNA, 201 bp, Homo sapiens
ggcccattgactcctgtcaattcctgtgttgatttctgaagtgaatccagggctatggaaaagaaaaggggagacaaaagctgaacccttttcagacaaartcatagcctgataaggagtctgttgtgtcaaatatccccccacctcctgaggcgcctcagagagtcagagtcagagcagcccctggctggcgtcaccaca

SEQ ID NO: 3642 - DNA, 201 bp, Homo sapiens
tgaagggtttgctttgaacccgcattctatcaagtgctctgcaaacagcaccacacacagcatcaggaggccagcgctgtgccagtcctgactgtgcagaygcagaggcgagactcaggaaggtcaagcagcttgcccagggccacagctggccacaggtccttttcacgccgaagcatgtgctcaggaccagtgggttcc

SEQ ID NO: 3643 - DNA, 201 bp, Homo sapiens
gccccctgctacccaggtaccaaagctggagaggagtcatggggacgggcagacatctccactcaagtagctgaaggcttgccataatcagaagagtcaamctgctgcgtgtggccccagagagatgggactgattgtgggaggtgagtttgggagtgtttagcagctgcagatatttgggaatgagaggggtcatctgag

SEQ ID NO: 3644 - DNA, 201 bp, Homo sapiens
caccacggaagctattagcagcattggtagcaggattcacaactgcaattgttggaaatgaaaattgtcgatggctctgtgcatgcgtgctttctctctcrattgcaatttaaaaactaacaccacttagctcatcaaaaataatcctagtgaggaaaatggctttgttttaaaagatccccaacattttgccttaatgtg

SEQ ID NO: 3645 - DNA, 201 bp, Homo sapiens; identical to SEQ ID NO: 495

SEQ ID NO: 3646 - DNA, 201 bp, Homo sapiens
gtagttctttaaaggaatgcaaagatggactaatacagtttcaagaactacatgaatgcaatttttgcattttatctcagtgctttaaaattattctagcygacctgcaggaacaggtaaaggccccttaaacaaaaatggagtgagtgctgttagttcttttgctgctccactgttacataactatggcacgatataaaa

SEQ ID NO: 3647 - DNA, 201 bp, Homo sapiens
cagtgctcctataaatcttgaacaaaacacaattatttacacacttccccttcaatcgcagagttagtttctgcccaaatccttgggagttcaccccttgyatcagcgtgccctggatatgaaacatggagtcaaaggagattattttggagatttaagatttaatgagtgccctgccaggttttggacttacatggggcc

SEQ ID NO: 3648 - DNA, 201 bp, Homo sapiens
gtctctctcgatgcctttgcctgtaccacacttctgtgtggtgtgtcctctgccctccccatctttccacactctaactgtcctgtccctgtcccagaggktgtccctgcctgctctgtgtccctgagagccaatgctgcagcatcctcccagagccagtcccaggtgacacagagccccttcctgtgtcttcctcatgtg

SEQ ID NO: 3649 - DNA, 201 bp, Homo sapiens
taggtgtgagtgtaccttaggagaggtttctaatccttcatgcctgtctgccaagggtgcctcagagcacctggtttgtccccatcagactctctgagtgytcaggaagtggagtggagggcttggttgagtagagggcttggtggagtggggagcttaatggagtggagggcttggtgcaggcccccattgaattcccag

SEQ ID NO: 3650 - DNA, 201 bp, Homo sapiens
ggcacgtgtgtatatgttttcctgtgcatgagtgtgtgtgcgcgtcagtgtgagtgtggcagcactgtgtgattgtgtgcacatgtgaatttgtacacatrtgtgagcatgtataagtatgtgagtggcatctgtgtgagcatatgagcatgtgtcaattatgagagcatggtgagaccatgtacagatgtgtgaattgta

SEQ ID NO: 3651 - DNA, 201 bp, Homo sapiens
ctcaaatgagttccgtaagctctctcggccgcggtttccttacctgggaaatgggccctccttcagagggttgatatgggcaggaaatgacagtgtgcaargagtgctcaggatggcacaggatggtacatgctctgctgtgagatgagtgctggcatcgcctccccaggcagtgggcaggccctggcacactgcactgag

SEQ ID NO: 3652 - DNA, 201 bp, Homo sapiens
tactcccgtgttcactgcagcattatacacaatagtcaagctatggcttttgtcacaacataagtgttgaaggatgaatagatgaatcatatgttgaaagrtatggtgtatatacacaaaggaatattattcagccataaaaagaaggaaatcccgtcacttgtgacaacatggatgaaacttgatgaaatcttgctaagc

SEQ ID NO: 3653 - DNA, 201 bp, Homo sapiens
gagtcagctggcagcccctggtgaggtcagaggtgcagctgacatgcgcatgctgcaaaggccgagatttaggccgaggaagaggccaggagctccagaasccctgccaggctcactctctgcctctgctgcctatagcctgagactgctagaggggatcccatgccctgccaggcctcacaggagtcctccccacacctc

SEQ ID NO: 3654 - DNA, 201 bp, Homo sapiens
gatgaaagaatgtggcccatatcattttatatgattttggaacttatagagggtattttttgtggtcaaaagtatttattttggtcatgaatgctgaaaawgtagatgcattttctgtagcaaatcaaatttattaacttatagtcagatttcctatattttttgttcatcttggtttttgctaacttatcctgtccatgg

SEQ ID NO: 3655 - DNA, 201 bp, Homo sapiens
tactgtcacatctttggggacttctgtgaatgcagctgggggtggggagagagagagaggcgtgaccagctgtaggtcgggggcctggggcaacctaaagmgaggcagtcggtctctggctggctggccttgtgccccccaccccgcagctgctccctggcgcacggccggaggggctagcaaagttcggggaagcggctg

SEQ ID NO: 3656 - DNA, 201 bp, Homo sapiens
attcaagtgaaagagaagcaaaaataaaagaaaaaagaataattatacacaattcaacatctcactatccagaaataattgttaaaattaactagtggtcrttccagatgtctctctaggaatatatcagatacatgaataggagcagtgtgataaagtggaacaatttcaatttaattttatttcttagagacagggtct

SEQ ID NO: 3657 - DNA, 201 bp, Homo sapiens
acactctccagcagccaccctggtccaggcggccagcgcagcacagctcagaggggaggagctgcaggccctctccaaggctgtcctcgccagcgggtgcyccgggccagcccttcttgcctccagtgcctgcctttcagtttcctcgtctatggcccaggagtcactcccaccccctggctcactgtggctcatctatca

SEQ ID NO: 3658 - DNA, 201 bp, Homo sapiens
tagacttgtagtctctttcctgtctgttcagcttggtctatctgttttctgccctgccttgtagactgtgatgagagcagctgacccaccttcactatggttttttttttttttttttttgacacggtctttttctgttgtccaggctggagtgcagtggcacgatcttagctcactgcacctcaacgtcctgagctcaag

SEQ ID NO: 3659 - DNA, 201 bp, Homo sapiens
ccctcagaaggggacactgagccttcctgttcccatcttcttagtgcatctagcacttccacaggtagctggaagaatcagaaatcgatgattcataaagyggtgatttaaacaataaaggcaaggtgggggcagctctagccccccgtgatggagaaagtcggtgtctgtggacccttttgtgctttcagagagcacaag

SEQ ID NO: 3660 - DNA, 201 bp, Homo sapiens
gctcactgcacctcaacgtcctgagctcaagcacctcagcctccagagttatcatgctgacaccaggaggattagcccaccatgccttgctaatatatatrtattttttttgtagagatggggtgttgctatgttgcctaggctggtcttgaacccctgggctcaagcgatccttctgcctcagccttccaagtagctagg

SEQ ID NO: 3661 - DNA, 201 bp, Homo sapiens
taatcaaatatgaaagtcatgcattttttaataacttctcagctgtttttaccactgaaaaattcatggcattacacagcccctttcaataatgtttactyattttacatttctcgtctacatgtttggtgctgtctgcccttaccgacaagctgttggcgctgtcttggagagtgttggggccagtctggggccatcttg

SEQ ID NO: 3662 - DNA, 201 bp, Homo sapiens
catcttcttagtgcatctagcacttccacaggtagctggaagaatcagaaatcgatgattcataaagcggtgatttaaacaataaaggcaaggtgggggcrgctctagccccccgtgatggagaaagtcggtgtctgtggacccttttgtgctttcagagagcacaagtggaaagccaaatcagtgtattatgggttggaa

SEQ ID NO: 3663 - DNA, 201 bp, Homo sapiens
actgcacctcaacgtcctgagctcaagcacctcagcctccagagttatcatgctgacaccaggaggattagcccaccatgccttgctaatatatatatatwttttttgtagagatggggtgttgctatgttgcctaggctggtcttgaacccctgggctcaagcgatccttctgcctcagccttccaagtagctaggacta

SEQ ID NO: 3664 - DNA, 201 bp, Homo sapiens
taaaggcaaggtgggggcagctctagccccccgtgatggagaaagtcggtgtctgtggacccttttgtgctttcagagagcacaagtggaaagccaaatcmgtgtattatgggttggaaataccattaattggagaggaaattgagaccagatattaggaaaatatatgatggtttttacacgagggccaggaaatcatca

SEQ ID NO: 3665 - DNA, 201 bp, Homo sapiens
ctttccaccccagaattttccttcctagcaattagtgggagagttgagacccttccctcgaggtcttttgaagcagaagtaggcccaggggcaaagagggyggcctctgtcaccttgccagaggtggcttttttgaagggtgagcctggtgactggatgggggcatgtgtttcggtcatgtgcagccagtacatggtagca

SEQ ID NO: 3666 - DNA, 201 bp, Homo sapiens
tcagtgctctgcaggtgtttatggggtgggtgtgtggacagcaaggggctgactgggagtgtgtgggatggacatgtggaaaagtgtgtcatcaggagccygggctcctggcctggctctgcttggtggccctgtctgaggctcagggtcctagctgggaacatgggaacagcacagcagccctgacccctccgggggcct

SEQ ID NO: 3667 - DNA, 201 bp, Homo sapiens
taccattaattggagaggaaattgagaccagatattaggaaaatatatgatggtttttacacgagggccaggaaatcatcagggctgacgctgataattcmcctaatgctgcacgtcctgtgagtcatgggctggcgggactgacacgctcgctctcgccctgcacactgcctgtctccactccagccccgctcaccgttc

SEQ ID NO: 3668 - DNA, 201 bp, Homo sapiens
cttacccagacctcagtgggaagggaggctcctgcctccctctgcggtgcatacatgagcacatggtgactcgatggggtcaaggaatttgtctaacatcyccaagtaagagtccaggctgagtttaaaaactcagtctggaggagtcaaaacttgagctctaatcaccaggctgacctgctggatgtgtgactctggact

SEQ ID NO: 3669 - DNA, 201 bp, Homo sapiens
caatagcctgagacgcactgaggcggctgctacagtgggtagagctaaatgagagacagaactgaactgatgtgccaggcagactgcaggctcaactgtcrgagggcttgagagttagccagggaggcaggatgagatggtgacactaaggacatgaagacctgccccagcggattctgcaggtagtccaggagcctgcag

SEQ ID NO: 3670 - DNA, 201 bp, Homo sapiens
tctcactatgttgcccaggttgatcttgaactcctggcctgaagtgagccaccttcctggaccttccaaagtgttgggattacaagcgtgagccactacamctggcctttaatatatttttatgcaacattgtatttctgagatatttatccctgttgagatgtacaccttcagttattttagtggtgcagttatatttta

SEQ ID NO: 3671 - DNA, 201 bp, Homo sapiens
tcggtgccatcacactgcatcttcagagccttgggctgtttgcttccttgtcacaggcaggatcagttgggtttggggatggtctagagaaggtgaacacyacaggagaaactccaggcagggcctgtttcaccccagacatttttccagccaacatgtcccgaagactgatcatttatctagcatgtgtctcatgatatg

SEQ ID NO: 3672 - DNA, 201 bp, Homo sapiens
ctcgaaggccagcacagggctggctctatgcgcatgcaagtctgtgccagagttgatgggctctgggaggcccaatgtccatgtgagaggcggtgtgctcrgggagggggctgggacctggcagggtctcatttcagcccactcccagcttctgcccaggtggggttacctggaaaaaaagatgcatgctctgagcccttc

SEQ ID NO: 3673 - DNA, 201 bp, Homo sapiens
aggccccttaaacaaaaatggagtgagtgacgttagttcttttgctgtttcactgttagtcatctagtggtctgggggagacaggaacctgggtccccagwgccatggcccatgggctcagcccatcctgctgttccagcccagtgccttccctgagctcccaggccccagggagggtaggaatgggagctcactgggtgc

SEQ ID NO: 3674 - DNA, 201 bp, Homo sapiens
gtgcacacacacaaataatgtctgctggcatagaggagtgacagctgatgtgagcagatgacacagtgtgtataatgacatgcccagagtgtgtgcaggcsgtatgtatgtatacagaatgtgtgtgtgtagggaaaaggcagcaaggtgtgttccagccaagaggccggcagtccgtgtgaggcaacaggaaagtggaga

SEQ ID NO: 3675 - DNA, 201 bp, Homo sapiens
gctgtgtactgcttaaacatcaaacacaaggggtgagagttggtgggaggaaaagcaggtttattcagaccagccagcaaaccacaaagatggcggactakcgtcctaaagtaccatctttagttaggacacatttcaggttctttttaagttaagggcagggaaaagaaaagggggctgggattaagaggtggtagagga

SEQ ID NO: 3676 - DNA, 201 bp, Homo sapiens
aggggcatagttcccccacacctgcctccctgtctctgggcctggggagggacccagaggttggccacccagaggttggccacccctgggtctcagcctcragcaccaccctttcccatggctatgtgtcccctaactcttctaggtgctggggtcccaggggtgtgacctcaggacacagacagcaggtatgcagagagg

SEQ ID NO: 3677 - DNA, 201 bp, Homo sapiens
gggacttttccaggatcccctttcaaatcctaccaggctggaggctttctgttagcctctgacttaggacagtcttaccaggccaagacctgctcctgggrtacgtgcctcacagttaggagtccctgcaggacttccaggcggtcagcaccacaccaatggggatcccgtagatatgggaagcagctgcagttgtaacag

SEQ ID NO: 3678 - DNA, 201 bp, Homo sapiens
cccttgcagccccgctctcatcccagtagctcctatccgccccataccatgcatccctgaaagctgcccctgcatccgggttgataaaagacagacagccytggaggtggagtaatgcagacctcctcctcaggtgggctgggggctgttgcagacctctgagttttcaggcatagttgggaggttttggggacttttcca

SEQ ID NO: 3679 - DNA, 201 bp, Homo sapiens
ggggacatctcttggctacaggtctgccctttctggaccatggcactggatgtagctccagggactccactccttgcagaacaaagggaggggaattatcytcattcagctccagcccagggagatgccttcacatctcccctctaggagtgcctgagctccctagagcctatgacacaggggacatcctggccctgcccc

SEQ ID NO: 3680 - DNA, 201 bp, Homo sapiens
ctctgagtctacttttggttgaatcctgtaagctttgattgatgctaagattgtcattcttttctaaatagtgtgcaaattctatttaacccaagagtttwgtaggagacttttagattttttaaattaaaaaaacctaaatgggctaggcgcagtggcacatgcctgtaatcccagcactatgggaagccgaggtgggtg

SEQ ID NO: 3681 - DNA, 201 bp, Homo sapiens
caaataatctgtgttggttacaacaaaccttatatgtatggtggtgatttagttagtttttgaatctggcatctggggttgagagagagagagagagagarcacacgcaggtgttctgtcagagatttttctgtctgattggttggacttgttctagtgggtggggtcaaggatactcattcacaagttttagtctggctc

SEQ ID NO: 3682 - DNA, 201 bp, Homo sapiens
tggggaatgccaagggagggagtgagcgcagcccagcagtgtcggaggtggcactgacctcccaccttcccctctcctactgctctgcccaccctcagccygataactgtcattcctgcacctgctacccctgcgccacgttgcccgtccttccctcccatgatgctaatactgtgtcccctttctgtactttcaggctgt

SEQ ID NO: 3683 - DNA, 201 bp, Homo sapiens
aatgccaagggagggagtgagcgcagcccagcagtgtcggaggtggcactgacctcccaccttcccctctcctactgctctgcccaccctcagcccgatamctgtcattcctgcacctgctacccctgcgccacgttgcccgtccttccctcccatgatgctaatactgtgtcccctttctgtactttcaggctgttttct

SEQ ID NO: 3684 - DNA, 201 bp, Homo sapiens
ccagagctggggccctgctgtgtgtggccctgaagccgggagccgggctgctctgctgaagatgggaggcgggagctccctgccggtcacagagccccgastgtgtgcgcacgtgcgtatgaaagaggggataaagggcgatttgttggattagaggctgaaatgccaaatgtaagctagaaggggtttatctacctttta

SEQ ID NO: 3685 - DNA, 201 bp, Homo sapiens
cccagcctgcttgctggcacagtgtctatgacaggtaccacgccaggtcctgggctgcagcattggacaggacagaggtggccttcgtcctcttggggaayactggtgaacacacattttcctgaagagcaccagtcctgagaggtactctggtggataaaaaagttttaccatcaaagaagtgtaagaaatgccactcac

SEQ ID NO: 3686 - DNA, 201 bp, Homo sapiens
ccctgtccttcgtttcctcctcttccacctcccctacttcctcagcatctcttattattttggccttgcttcttgataagagtgggatctttccaatagtrctaacgttttgtagagattattatttgacgtgcactcacttcaggccccacatgacagtaagcttcctggagggctccatggtctggcctctgtccccag

SEQ ID NO: 3687 - DNA, 201 bp, Homo sapiens
tgcaccctcaggaaaggtgaagaggggtggagggagaccatggtgggtgactggagaccctctggggcagcgtgtagaacatgcatcagaattgcccactkgagtcgctgtggattttaactcccctgcacttcctagggtggatatgcaccagatggctgagtggcttcctgggtatccggggtatcccagaggcaaaag

SEQ ID NO: 3688 - DNA, 201 bp, Homo sapiens
caggcgtgtgtcgccacgttgatctctgtgtgaaataggacggactcagtacctgcagctagacaacgctggagaaactccaaaggactgagtgccgcccwggcttcaggagagtaagacaacagacactatgcacttttctaatgtggccggcactctgtgcttgcaatcacatatgtgccacagacaggatttctatca

SEQ ID NO: 3689 - DNA, 201 bp, Homo sapiens
ctcgctctcgccctgcacactgcctgtctccactccagccccgctcaccgttcccctgcccaggccgtgtctgcactggcaccataaacctccattatcaraggtttaaaactgggccataaaaactctagggctgagacgtggcatgtaaggtctcagtctgatcatggccatccccttccagctggggacttaaaaagt

SEQ ID NO: 3690 - DNA, 201 bp, Homo sapiens
tagagatggggtgttgctatgttgcctaggctggtcttgaacccctgggctcaagcgatccttctgcctcagccttccaagtagctaggactacaggcatscaccatcacacttggctaattttgtgcttaaaatttttgtagaggtgagttcttgctctgttgcccaggttggtcttgaacccctgggctcaagccatct

SEQ ID NO: 3691 - DNA, 201 bp, Homo sapiens
tgtgtgagaatttatgtgtgagtgtgggtggagacgaggccgggggaggtgtgtgcgagtgtatgtgtgagtgtgggtggagaggaggccggggaaggtgygtgtgagtgtatgtgtgagtgtgggtggagatgaggccgggggaggtgtgtgtgagtgtatgtgtgagtgtgggtggagaggaggctgggggaggtgtgt

SEQ ID NO: 3692 - DNA, 201 bp, Homo sapiens
gaaaggtttgcccaaagtcaccacaagtcagtggacaaaggacaggagcctaggtaccctgatggccagataacgagaagatccccagcgtccctggatgyctgctcctcctgagacatgacccccttgccaaggtcaggggcagttcctcttgttcccagccagtccgtcagctctgtcagctttgatccaaaacactcc

SEQ ID NO: 3693 - DNA, 201 bp, Homo sapiens
tgggattttcccattcctattcatttagccctttccaaggtacttaaacttctcatctattcacattaactgtctgagagttgagcacgggaagtgggagrtgggaggacagggtgggcaccgtgaatgtggcagcttctctagcttacaaggacccctgtgggctgagggggattggaggactggagtcaggggacagga

SEQ ID NO: 3694 - DNA, 201 bp, Homo sapiens
ggatcttgctctgttgccaggctggagtgctgtggcacaatcatggctcactgtagcctcgaacacctgggctcaagggatcctcccacatcagcttcctragtagctaagactacaggtgtgccctgccacatctggatcatttttaaacttttttcagtggtggagtcttgccgtgttgcccaggtggggcaaacttct

SEQ ID NO: 3695 - DNA, 201 bp, Homo sapiens
catgtgagaggcggtgtgctcggggagggggctgggacctggcagggtctcatttcagcccactcccagcttctgcccaggtggggttacctggaaaaaargatgcatgctctgagcccttccagggcaggagctgtgctctggtcatcctcgtacctgcctagtcaccttgcctggcacatggcaggggtcagtgggtgc

SEQ ID NO: 3696 - DNA, 201 bp, Homo sapiens
aagccctgcgtggccagctgccccagtgtttcagatgaagctggaaacccagatttttatgtaaaatctaattgttatatgttggttctactgcaaaaataaacgctgctgggtctgcaggctgatgtgagggcccagcttgccacctctgttcagcctgcatggggctctaggcctcctctgtccagccccagctgtggc

SEQ ID NO: 3697 - DNA, 201 bp, Homo sapiens
agccctgcgtggccagctgccccagtgtttcagatgaagctggaaacccagatttttatgtaaaatctaattgttatatgttggttctactgcaaaaataaacgctgctgggtctgcaggctgatgtgagggcccagcttgccacctctgttcagcctgcatggggctctaggcctcctctgtccagccccagctgtggct

SEQ ID NO: 3698 - DNA, 201 bp, Homo sapiens
gagacagggtttctccatgttgggcaggctggtctagaactcctgaccccaggtgatctgcctgcctcggcctcccaaagtgctgggattataggcatgasctactgtgcccggccactagtgggtagttttgcactgtgtgtaaccccaaacctgggaccctgggatacagactgatgaccaagacaaatccagtgaaga

SEQ ID NO: 3699 - DNA, 201 bp, Homo sapiens
gccctgcgtggccagctgccccagtgtttcagatgaagctggaaacccagatttttatgtaaaatctaattgttatatgttggttctactgcaaaaataaacgctgctgggtctgcaggctgatgtgagggcccagcttgccacctctgttcagcctgcatggggctctaggcctcctctgtccagccccagctgtggctc

SEQ ID NO: 3700 - DNA, 201 bp, Homo sapiens
tagagatgggtgtcttgctatgttgcccaggctggtctctaacttctggcctcaagagatcctcctgcctcagcctcccaaaatactggaattacaggcakgagccactgtgcctggcccacatactcctttaaaataaaatggttgaatttttcttagttaatagcagcaatgaaatatctgaagtgaaactgagacaat

SEQ ID NO: 3701 - DNA, 201 bp, Homo sapiens
gctctccttcctcctcattccctatcttcttcctccttatcctccctctccttcatcctcatcctcactctctttgctcctcatcaccccctccttcctcmtcatcctcctttccttcctcctcatccccctctccttcctcatcctccctctccttccaactcatcctcgctcttcttcctcctcatccccctcctttct

SEQ ID NO: 3702 - DNA, 201 bp, Homo sapiens
acggcagacagccgaagccggtgtgagatgtcattgccctggacgcgtacggtctgcaagagagcagggttagaggccgggctgggcagctcccaaacctrctcttctggccaccctggccgtcgcgccccctcatccgcgcaccccaacacttcccggatcctggtttgcccaccatcacgatccggcttccctttcacc

SEQ ID NO: 3703 - DNA, 201 bp, Homo sapiens
agccggccctcctcacctcccggagcacggagggcctgcccgaatcgcttcctaaggaaagccaccctgtcaccggaccccgccctttacagctaacactstgctttcttaagaaggcaagcaacgctgaggctgctgcctggctccctggccacctgctaccaacccgcctttccgcgggatctccagaagccccccagc

SEQ ID NO: 3704 - DNA, 201 bp, Homo sapiens
gggtacctgcgggtttaaattcagcaatcaccagccacagaaagccctggttttatttgcaaaacatctgtgatgcttcagatctagcttaatttttcacrgtaatgttgcaaaatgtcatttttccatttcaaaataaaaataaaaagccctattgattgagattctctgtctggggagagccccggcgccgggccacac

SEQ ID NO: 3705 - DNA, 201 bp, Homo sapiens
tttacatgcaaatataaaaacaaaggggatgccatggccctgcagaagggatcccgcaggacctgctgttctgacctcacagagcttcagggctggtagcyggggaagagggagcttatttgtgtaggaccaccagtcctcagccccctgaggtcacacccaggcctggccttagcaacaggttctagattccagcaaaat

SEQ ID NO: 3706 - DNA, 201 bp, Homo sapiens
tcaaagccgatatagagtgatggtagatttgtgttccggtccgaagttggcaaaaggtcaccgtgcctggggagctggggctgcctggcctcgtgtacatrtggctgctgtccccctaggctctgtaggcagaccacgcttccccagaagcgcagggtcaggtggacacagactgctcccccggggcctgctggctgggcc

SEQ ID NO: 3707 - DNA, 201 bp, Homo sapiens
tggtttaatatcaattctggaggttttattgcctttccccctgttttccgatgggattttgatccaatcaaagccgatatagagtgatggtagatttgtgytccggtccgaagttggcaaaaggtcaccgtgcctggggagctggggctgcctggcctcgtgtacatgtggctgctgtccccctaggctctgtaggcagac

SEQ ID NO: 3708 - DNA, 201 bp, Homo sapiens
tgtcggaggtggcactgacctcccaccttcccctctcctactgctctgcccaccctcagcccgataactgtcattcctgcacctgctacccctgcgccacsttgcccgtccttccctcccatgatgctaatactgtgtcccctttctgtactttcaggctgttttctggattcttcctccttttccaccaagttaagtgct

SEQ ID NO: 3709 - DNA, 201 bp, Homo sapiens
agtgcattctaacagtggaattcaggcggcgagagtcgggtagggggttttccctgttcctggtgggttatggtcttcagggcagctgcagtgatgattcwggcccctggaacagggaaataagggggctctcttttttgttcttttgagaggggtggggtagtgcatagctgaagagtaattggagataatgtaactgtt

SEQ ID NO: 3710 - DNA, 201 bp, Homo sapiens
atcaagaccaaaatgcaccaggcagtcgttagaaaagcaaataatactcgctcctcatttgcctaaaactgtcaaacgatcgtgcaatctgtgaatagcaytctgtctatcccctgagtcctgtgtgcatttgggaaattaattatgactctcttataagcacataaaagtgatgcacatggccatcagtttgttccattt

SEQ ID NO: 3711 - DNA, 201 bp, Homo sapiens
ggacccaaatttaggacacttggaccaacaaaagatattttcttctcagtcatgcatgcaaatatatggaagatcttagaaaattgtggaaagtggggcayactgaacaaaatcactgccatcagagagaatgaagtgatgcaagatcaggatgtgtcaggaagcccaggcgtgtgtcgccacgttgatctctgtgtgaaa

SEQ ID NO: 3712 - DNA, 201 bp, Homo sapiens
ccctctttctgtcctgctaaggacacaacccaagtctactcccttcaacaaagcctgcaacacttagaaagttgtgtgtgcggccaggagcggtggcttgygcctactgtaatcccagcactttgggaggccgaggcaggtggatcacctgaggtcaggagttagagacccacctggccaacatggtgaaaccctgtctct

SEQ ID NO: 3713 - DNA, 201 bp, Homo sapiens
gagagtgcaggccaaggctgttttaagaacagtggtgcctgatgctaagtgtgtctttgcaatgagagctagagagccccatctccacctcctcccctgcrgcaggtactggtggtgcccagattagccccagttcctgagctgctgctccctgccctggctgctgtgtgttggctgttgcccttcatatagtttggatgt

SEQ ID NO: 3714 - DNA, 201 bp, Homo sapiens
ggatcttaaccaaaacactaagctcttccctcctccaggtgagcccctggtcctgatgcctcgagttggtgtggagagcaaggccctacccttgactgatrggagcaaggagcagcctgagctagacttgtagtctctttcctgtctgttcagcttggtctatctgttttctgccctgccttgtagactgtgatgagagca

SEQ ID NO: 3715 - DNA, 201 bp, Homo sapiens
cagggagatgccttcacatctcccctctaggagtgcctgagctccctagagcctatgacacaggggacatcctggccctgccccttactgaatgtgtcgcyttcactctctgagtctccgttgtctcattcacaaagtcagcatgataataatcatacctgcctgggttcttgtgaacaacaacaaaaaccaaacaaaacc

SEQ ID NO: 3716 - DNA, 201 bp, Homo sapiens
gggggactttcagctctaaaactggcaacctgggatgggggtcgccacattgagggtgttggcagcagctcagcaacagaggaattaaagaatgattaaaytgttctgcagaagaaaatgagttttttttttgttgttgttctctagagggagggagacgagagaaagagaggcagaggattgaggaaaggggcaagaggg

SEQ ID NO: 3717 - DNA, 201 bp, Homo sapiens
caaagactacggtgaatgaaactcaatttaggaacaaacattactgataaaatattagtctatcaaatcaagaatgtgatcacaagaaaaatacatacagygtgttccagtgtgacttattccagcaacaaaggaatggcattaggaaatctactaatgtaatttactccattggtagattaaaccatgtgactccaaata

SEQ ID NO: 3718 - DNA, 201 bp, Homo sapiens
cccttcttttactttaggagggccagtatttcctagttagaccttactgagactccaccctggttattgttcttgtggccagtgggggtgagggtagagtrtggtgaaggaagatcttgaggaggaaagacagtcttacaagagattgtcaccactgaggcctctgagtagatttcaagcaagggcatttgctgtctcccg

SEQ ID NO: 3719 - DNA, 201 bp, Homo sapiens
catgggaacagcacagcagccctgacccctccgggggcctgcaccgcaatggatgtgactcctcatgtgagcagacgctttcctgcctcttcctggattcycggtgctggactcccctgctgaagctgaggtcatgagggatgggacagtttataacagatcttcaggcccagacggaaagaactgggattttagcccaag

SEQ ID NO: 3720 - DNA, 201 bp, Homo sapiens
acagtgggttagtgtcacaaaggtcgtctcaagtcagcacacatttcaggctcttttgatgttgagggcagggggaaaagaagggagttgggatcaagacrtgtgaccagctgcagacatctgggtgcctgtgaaggtcccaggaggttgggaactcctctgtcctaggtcaggtcacagtgctcctataaatcttgaaca

SEQ ID NO: 3721 - DNA, 201 bp, Homo sapiens
tgttgaaaggtatggtgtatatacacaaaggaatattattcagccataaaaagaaggaaatcccgtcacttgtgacaacatggatgaaacttgatgaaatyttgctaagcaaaataagtctgacagaaaaagacaaatactatctcatctcacttatatatggaatctcaaaaagacaagttcatggaaataaaggtggag

SEQ ID NO: 3722 - DNA, 201 bp, Homo sapiens
tccctggcctccacactctagatgccaatagtattcccccaggtgtgacaacaagaatgcctccagacatcatccagtatcccctgactgagaaccatgarcaagcaagaggatcgggggctgtggagtacaagttgtgccaagattctcggcaggagggattctggcctttcagaggcactccaaggaggccagtgtggc

SEQ ID NO: 3723 - DNA, 201 bp, Homo sapiens
catgcatcagaattgcccactggagtcgctgtggattttaactcccctgcacttcctagggtggatatgcaccagatggctgagtggcttcctgggtatcyggggtatcccagaggcaaaagcagagaaagccacgtggattgccacagaggcactgccagcacctccttctggtttctcctgcaactgctggagcaaaag

SEQ ID NO: 3724 - DNA, 201 bp, Homo sapiens
tacctggtgtttacctcccacttgtaagtgagaatatgtggtatttggttttctgttttggtgttaattcccttaggatatagcctccagctgcatccacrttgctgcaaaggacacaatttcattcttttttatggctgcatagtattccatgcactatcacttattgagtacctactgtgtacctgacagagaggaggt

SEQ ID NO: 3725 - DNA, 201 bp, Homo sapiens
ggttggagaagtagatgccacctcctcagggagtagctgcaaaatgtccttgggggcctggaggcagggaggggtggagaactgtggctattttttttgcwgtcaattcaccgtaccatgtggactccccagtgtggagcagaatctgaggactgacttgctaagaatctctgggcaccctggatagaaccttccctttgg

SEQ ID NO: 3726 - DNA, 201 bp, Homo sapiens
ccctgcgtggccagctgccccagtgtttcagatgaagctggaaacccagatttttatgtaaaatctaattgttatatgttggttctactgcaaaaataaacgctgctgggtctgcaggctgatgtgagggcccagcttgccacctctgttcagcctgcatggggctctaggcctcctctgtccagccccagctgtggctcc

SEQ ID NO: 3727 - DNA, 201 bp, Homo sapiens
cacctctgcaagtcaggttctgtgctctcctttcaccctcatgccaatgctgtgcctagaattcctctcctttttacagacaagaaaccgagctcgacgcaagaagaagtagctggagccccagccctgaggtccctgccactgcctacttagctcctcactcctgggcttgagggtcccaggctggagaggacaaagggc

SEQ ID NO: 3728 - DNA, 201 bp, Homo sapiens
acctctgcaagtcaggttctgtgctctcctttcaccctcatgccaatgctgtgcctagaattcctctcctttttacagacaagaaaccgagctcgacgcaagaagaagtagctggagccccagccctgaggtccctgccactgcctacttagctcctcactcctgggcttgagggtcccaggctggagaggacaaagggct

SEQ ID NO: 3729 - DNA, 201 bp, Homo sapiens
gtgccagtccctgcattgcatggagacaagagagggccccctgctgtcaccagggccatcagggaggcagcctgccctttcccgtgtgcgctcgcacttgrcaaagcaggcctgctcgtggtcagccaggggttggccagcagcagcaagaggactcacagctgccaggccccagggtctggcctgacattgctgcatcgg

SEQ ID NO: 3730 - DNA, 201 bp, Homo sapiens
cctctgcaagtcaggttctgtgctctcctttcaccctcatgccaatgctgtgcctagaattcctctcctttttacagacaagaaaccgagctcgacgcaagaagaagtagctggagccccagccctgaggtccctgccactgcctacttagctcctcactcctgggcttgagggtcccaggctggagaggacaaagggctt

SEQ ID NO: 3731 - DNA, 201 bp, Homo sapiens
gatttatcgactcagtcaacaaaaggtcaggcttcaggcatggcttgatccaggggctggctctctctctctctctctctctctctctctctctctctctstgtgtgtgtgtgtgtgtgtgtgtgtgtgtgtgtgtgtctctctccctgtctatgtgtctgtctactttgctgtttgggtttaatccagagattctccctt

SEQ ID NO: 3732 - DNA, 201 bp, Homo sapiens
caaagcattaattaattaattaattaattttttttttgagacagagtctcactctgtctcccaggctggagtacagtggtgagatcttggctcactgcaamctccacctgccgggttcaagcgattcttgtgcctcagcctcccgagtagctgggattacaggcacgcaccaccataccgggctaatttttgtatttttag

SEQ ID NO: 3733 - DNA, 201 bp, Homo sapiens
tggggcgtgggtctaccctccaatcagacggagttctgaaggctctgtctggccttgttccaccatgtcctgctaccctcctcacttagggagtccaaacttttatttatttatttatttatttatttatttatttatttatttatttttgagacagagtctcactctgtcacccaggctggagtgcaatggcgtgatctc

SEQ ID NO: 3734 - DNA, 201 bp, Homo sapiens
gggaagggaagggcattctacacacagggctcagcacaatcacaggtgtgaaggtgaggagcagcacagcacatgacagggagcctggtatggcagaggaygggcttagggcaggggctgggctagtgatgaagccagaaaagcagcccgggcatggggaaagggcttggaccgacagcatccaaaggtctcctctcacac

SEQ ID NO: 3735 - DNA, 201 bp, Homo sapiens
gggtctaccctccaatcagacggagttctgaaggctctgtctggccttgttccaccatgtcctgctaccctcctcacttagggagtccaaacttttatttatttatttatttatttatttatttatttatttatttatttttgagacagagtctcactctgtcacccaggctggagtgcaatggcgtgatctcggctcact

SEQ ID NO: 3736 - DNA, 201 bp, Homo sapiens
gatgaacttggaggctggtccaggggtctgcccaggactaggggcaggtggagctcagatccctgactctgcatcacagagctcaccacgctgcctgccayggccaccccgatgggcacatgccccatcaccttggcaggttatgattactcagggaagtgttagatagaaccctgctgggctgcatggagctaaaacaat

SEQ ID NO: 3737 - DNA, 201 bp, Homo sapiens
gtgcccctcctccaggacaattacatcacccagcactgagcatggcttggggttgggtggtacaagggctgagctgcaaggacaagagcaggtccacactsagggcagtggccctgaccctggagaaggagaaagaggctgctttgaggaggctggacagggagctggcccttgtgagcccctcctgtgggcctgacactt

SEQ ID NO: 3738 - DNA, 201 bp, Homo sapiens
tctaccctccaatcagacggagttctgaaggctctgtctggccttgttccaccatgtcctgctaccctcctcacttagggagtccaaacttttatttattyatttatttatttatttatttatttatttatttatttttgagacagagtctcactctgtcacccaggctggagtgcaatggcgtgatctcggctcactgca

SEQ ID NO: 3739 - DNA, 201 bp, Homo sapiens
ctaccctccaatcagacggagttctgaaggctctgtctggccttgttccaccatgtcctgctaccctcctcacttagggagtccaaacttttatttatttatttatttatttatttatttatttatttatttatttttgagacagagtctcactctgtcacccaggctggagtgcaatggcgtgatctcggctcactgcaa

SEQ ID NO: 3740 - DNA, 201 bp, Homo sapiens
ccctccaatcagacggagttctgaaggctctgtctggccttgttccaccatgtcctgctaccctcctcacttagggagtccaaacttttatttatttattyatttatttatttatttatttatttatttatttttgagacagagtctcactctgtcacccaggctggagtgcaatggcgtgatctcggctcactgcaacct

SEQ ID NO: 3741 - DNA, 201 bp, Homo sapiens
ataatttttgtatttttagtagagatggggtttcaccatgttggccaggctggacttgaactcctgaccttaggtgatccacctgcctcagcctcccaaaktgttgggattataggtgtgagccagcatgcccggcccatatgcctattcttaatttaccattgctaatgagagttcactgcatgctggaacctcagagcc

SEQ ID NO: 3742 - DNA, 201 bp, Homo sapiens
cttgggcgcatctcctcccagagttagcaaccccatgacccgggcccctcgcagcctggcacaaccaccccctaccccgtcccctgcaagcctgcaacacmccgcacccagacccgcaatccaggcggaggataaagggttgcagcggagggcgcagagcagatgctcagggcggggcagagggggcgggaagctggcgcc

SEQ ID NO: 3743 - DNA, 201 bp, Homo sapiens
cgcatctcctcccagagttagcaaccccatgacccgggcccctcgcagcctggcacaaccaccccctaccccgtcccctgcaagcctgcaacaccccgcasccagacccgcaatccaggcggaggataaagggttgcagcggagggcgcagagcagatgctcagggcggggcagagggggcgggaagctggcgccacggtc

SEQ ID NO: 3744 - DNA, 201 bp, Homo sapiens
atgctcagggcggggcagagggggcgggaagctggcgccacggtcgcggcgagggcgagcagccgcgcgctcccggtgctaggaggaatgcccgcagagcrgaggctggcaggcgcgagaggccctaagcgcgcagtccgaccaaggggagttttacaggtcagcgccgagccgaattaggggactcaagccttggaccct

SEQ ID NO: 3745 - DNA, 201 bp, Homo sapiens
gagaccatatgtcaggctaattgttccccaaacagaatttaaacatttgaatatgcttgcaacagggaagggcaggaaagaaaatggtgttgcagggggtrgaggtagtagagtctggctctgtccctgggatgtgctacaggggtacccttgccttcagggccatggggctgcctggggcagcaagaggtctgtcaaact

SEQ ID NO: 3746 - DNA, 201 bp, Homo sapiens
agcagagaaagccacgtggattgccacagaggcactgccagcacctccttctggtttctcctgcaactgctggagcaaaaggatgagctgagatgtggtgmagggcgctgtccagcatatcaggttgcccatacgccttgaagcctgtaacaccttcttttggtcatccctgggcatccacgggacataggttccaggacc

SEQ ID NO: 3747 - DNA, 201 bp, Homo sapiens
ctgccagcacctccttctggtttctcctgcaactgctggagcaaaaggatgagctgagatgtggtgcagggcgctgtccagcatatcaggttgcccatacrccttgaagcctgtaacaccttcttttggtcatccctgggcatccacgggacataggttccaggacctgctttggttccccaaatccaaggatgctcaaat

SEQ ID NO: 3748 - DNA, 201 bp, Homo sapiens
aggggtgatgagtttatctgcacagcctctcaaaactcagggatcatttaggcttctttttctacatccttgcagattaaggatcctggaagtgttgggcycaattaaggatcctagaagtgttgggctcaaggctgtctctaaaataatattttccagaaagaaagagtgtagaggaagggtcacgcatagaactccatg

SEQ ID NO: 3749 - DNA, 201 bp, Homo sapiens
cggacttggacttctgagttaatgctggaaagagttaagactttgggggactgttgggaaggcatgactggttttgaaaggcaaaaaggacatgagatttkggaggggccggggcagaatgatatggtttggctctgtgtccccacccaaatctcatgtcaaattgtaatccccacatgttagggagggacctggtgggag

SEQ ID NO: 3750 - DNA, 201 bp, Homo sapiens
gagtgaattttatggtatgtaaattatgcctcaataaatttgttaaaaataaagtggttattaagttaattataatcaacacagacatgtgtgggtcacayagacaatcactgctgcaggccaagggtggatcatatgagatgaggatgatctggaaggttctgaggtggacactgaaggattctaaaaattgcttagcag

SEQ ID NO: 3751 - DNA, 201 bp, Homo sapiens
taagagtccaggctgagtttaaaaactcagtctggaggagtcaaaacttgagctctaatcaccaggctgacctgctggatgtgtgactctggactggctcygtcccctctctgggcttcagtttccccaaggaggctacaggaccagggagcctccaggagcatttccacttctgatgccagttttggaggaagtgctgtg

SEQ ID NO: 3752 - DNA, 201 bp, Homo sapiens
atccttgctctccttcctcctcattccctatcttcttcctccttatcctccctctccttcatcctcatcctcactctctttgctcctcatcaccccctccwtcctcctcatcctcctttccttcctcctcatccccctctccttcctcatcctccctctccttccaactcatcctcgctcttcttcctcctcatccccctc

SEQ ID NO: 3753 - DNA, 201 bp, Homo sapiens
aaaagtatttattttggtcatgaatgctgaaaaagtagatgcattttctgtagcaaatcaaatttattaacttatagtcagatttcctatattttttgttmatcttggtttttgctaacttatcctgtccatggcagaccaggtgggctgagtgggggctctgtgtcccaggggccacggtggtggactggtgacaatgtg

SEQ ID NO: 3754 - DNA, 201 bp, Homo sapiens
tgtgatgagaaatggagcatgagcaagatccagcatacctggagataacaacccctgtcttcgggtagaccaggaaggacagactcagggtcatgtgagaraataatggtgacaggggagggactagtttagacagggaagccagggcaggcctttctcagaaggtgacatttgagctgaggtctcatcccttggaaaagc

SEQ ID NO: 3755 - DNA, 201 bp, Homo sapiens
aatgtttggattctcttctgcagagtttcttttaattctacattttgttgcattcagttctcatcatttttttcatgacttttccattccaaggctttttsctctatgttgaggctctattttattgtgaaatggtttttctttcttttcaagcatcatgggttctgtgttgcctgtgtccttcatgctagagaatgcctg

SEQ ID NO: 3756 - DNA, 201 bp, Homo sapiens
aataaaatggttgaatttttcttagttaatagcagcaatgaaatatctgaagtgaaactgagacaatggttgaatttcagagcaatgtttctttgcctcaraaaaccatcgttcttaaaagagttctgaagattgagggaaaaaaggttatggaaaaaataagctgggagtcattttatttaaaggatgtttccattctag

SEQ ID NO: 3757 - DNA, 201 bp, Homo sapiens
aggtttcttttgtggatggccctaatcaggtttagaaagttctcttaaattcctaggttgctgagtattaaaaaaagtcatggtggtaaacttttgttaartgctttttctgcatctattaagataatcacatggtttttcttctttagtctgctaatacgatacattgattgcaaggttaaactaaccttgcatcctcag

SEQ ID NO: 3758 - DNA, 201 bp, Homo sapiens
taggtggattttttattttaatttaatttctatttttaagagttggggtcttgctctgtcgcccaggctggaggtgcagtggcatgatcacggctcactamagcctcgatttgctgggctcaggtgatcctcctgcctcagcatcctgagtaactgggactacaggtgcatcctaccacatccggctaattttttaatttt

SEQ ID NO: 3759 - DNA, 201 bp, Homo sapiens
ccaggtgtttgagcctgacctcagctccccttgtctgggccttgtagaggtatctggctgcccccagggcagagaggtttcttttctctttggagagaggratgggggcatgacaagcctcctggatcaactgatttgcagcacacagcaggaagcagggctcagagtcacctgtgccttttaacgtcctggaatgatagg

SEQ ID NO: 3760 - DNA, 201 bp, Homo sapiens
aggtgcttaagaggggtggtgttactaagaggagaggaatggccagaacttggaggtgactggtggagctgagcacccccaaattgattttattacagccyctgtgtgtgtgtgtgtgtgtgtgtgtgtgtgttatttaatcatttgccaagataaatcttatagacccatgaagagtttattttttttatttttaatatt

SEQ ID NO: 3761 - DNA, 201 bp, Homo sapiens
tccgcatcccccctccttccccctcatccccatctccttcttcctcatacctcctccgtcctactcatcctccctacttcctcctcatcccccctccttcrccctcatactccctgtccttcctcttcatcctctttctccttcctcctcaccctccctcttcttcctcttcatccccctttccttcctccttttctcccc

SEQ ID NO: 3762 - DNA, 201 bp, Homo sapiens
gagggggatgtaggggggtgggtgggaaacagaggcagagaggactggaaggaggtgccactgccctggagagggcatcacgggagctttgtggaggcggyactgagctggcctgggtggggtgactggtggcctaggtttggctgggcaggtagagtcttccttggggtcactgggctggagctggttggggtccacctt

SEQ ID NO: 3763 - DNA, 201 bp, Homo sapiens
caaagaagtgtaagaaatgccactcactgaacgtcctgtgcagactagtgttcctccagaagaatttcgaagtcccaactcctggtacttataaataggayctttcttggaaataaggtttttgcaaatgtaattaaataaatgatctgcagatgagatcattctggattgggggggcacaaatccaattagtggtgtcag

SEQ ID NO: 3764 - DNA, 201 bp, Homo sapiens
gtagacatatattaccggcacttaatttgcgagaaatgtacctactgtaagaggatgtaaaaccagcaggatcctggaagaatgattacgtgaggatgacrtcttatcagagatgagatgagctattagacaactgtgctgcacatcaaaaagcaaaaagaaagacaaacatctcttaaaatgaattttgtaatagtggaa

SEQ ID NO: 3765 - DNA, 201 bp, Homo sapiens
tgaacacacattttcctgaagagcaccagtcctgagaggtactctggtggataaaaaagttttaccatcaaagaagtgtaagaaatgccactcactgaacrtcctgtgcagactagtgttcctccagaagaatttcgaagtcccaactcctggtacttataaataggacctttcttggaaataaggtttttgcaaatgtaa

SEQ ID NO: 3766 - DNA, 201 bp, Homo sapiens
cttgagagggcacgtgtgtatatgttttcctgtgcatgagtgtgtgtgcgcgtcagtgtgagtgtggcagcactgtgtgattgtgtgcacatgtgaatttktacacatgtgtgagcatgtataagtatgtgagtggcatctgtgtgagcatatgagcatgtgtcaattatgagagcatggtgagaccatgtacagatgtgt

SEQ ID NO: 3767 - DNA, 201 bp, Homo sapiens
tcacttctctcagaaacatttctcaggtgacaggtagtccctgcaaagagccagaggtctgggcctggagtgaggaggattggggttccaggtagagtggwgcctctgattttctgggtggacatctgtgacccattctccccagttcatgtctccctaggcacatgagaaatgtcatgccacctcctggattggcagcac

SEQ ID NO: 3768 - DNA, 201 bp, Homo sapiens
gcacttgcaatcttcaaaggactgctgttgggcactggagccacctgctggtatggagagctaaaggtgcctgaggcttacatgcttcccacctcagacawcctgtagccagtaactggctagatatagtatatctcaactcttttgccgtaagacagaacaaatcttctctgtatttactgtgttttcccacttccttac

SEQ ID NO: 3769 - DNA, 201 bp, Homo sapiens
cgaattaggggactcaagccttggacccttgatttacacaaaagagaacccgaccctgcaaccggcgacagatggcgcccggacacgccgagcagccaccratgcaaggctgcgatcgctgccctacttgcgcggccccacatgcgcggccgccgcggcttgctaagggagggagctgcgggacccgaggcggccagaagg

SEQ ID NO: 3770 - DNA, 201 bp, Homo sapiens
accactgctgactttgaagatgctttgggatgcgaaggtggaagatgggctgcgccacagggcggcgccctgcgcgagtgaagcccgctgcttccctcccygggttagccttcgccgccccgggcgcgagccgggcgcgcgccggtaccgcgtgggcggcgggttaccttgctccgggcgcccggcacgctgagcgccagc

SEQ ID NO: 3771 - DNA, 201 bp, Homo sapiens
tggggcgtcctaactggccagattggggtcatgcatctctcagaaccacagcgacttgagggtggtgaagcatgctgagcccaaggaatagcaaggtgtcrttttgggaggtggcagatctgggcagtagaaagaccatgtgttctctgcaggggtgatggagcccaccgtccccactggcaggcatcccctccacagcct

SEQ ID NO: 3772 - DNA, 201 bp, Homo sapiens
cctgggtggagcccgcatccttgtaattggcagaggggtcaggacatgtgttttgccccatggacagttgtgcaagttaatgtaatgttctctctcaagcytggagcatgctttggtggaattcagtgcagtgtttgcatggaatcataacaaggtctgtatttgattttcagccaatattgactgaagtcccacagagcg

SEQ ID NO: 3773 - DNA, 201 bp, Homo sapiens
ccttgtgctcctgcgtgtcgtcgtcgctgtagtccgacacgcggcactcgtacacgccctcgtcctgcagccgcacggcagacagccgaagccggtgtgaratgtcattgccctggacgcgtacggtctgcaagagagcagggttagaggccgggctgggcagctcccaaacctactcttctggccaccctggccgtcgcg

SEQ ID NO: 3774 - DNA, 201 bp, Homo sapiens
ttggagcatgctttggtggaattcagtgcagtgtttgcatggaatcataacaaggtctgtatttgattttcagccaatattgactgaagtcccacagagcrctctcagacctgaattagggggggcctatgtaactaatatacataatttttccaacgagactcatgaaggttttcctggaactgctgctgatggaatgcc

SEQ ID NO: 3775 - DNA, 201 bp, Homo sapiens
ttgacaggtttgggggtaaccactgctgactttgaagatgctttgggatgcgaaggtggaagatgggctgcgccacagggcggcgccctgcgcgagtgaarcccgctgcttccctccctgggttagccttcgccgccccgggcgcgagccgggcgcgcgccggtaccgcgtgggcggcgggttaccttgctccgggcgccc

SEQ ID NO: 3776 - DNA, 201 bp, Homo sapiens
ttctcacccacaggagaggagaccattttctgcaaagtgaaacacttgccaagcaccctgactcactgcctgggggcgctggggcaggctggaagcacccycattttacagaataaacccaggtctgcagtaatgggagctttcctcaaagtcatagagctgggccctgcaggctaagtccttgcctccacacctctgatc

SEQ ID NO: 3777 - DNA, 201 bp, Homo sapiens
gtcagagaccgtgtggctcttgggggcccacagagctggcagcagtgaacattggatggatggactgtcattttgtagcaacaggagcctcccgactcccrtccatgcccctacaatggattagtctgtagggcccagccctttctgtgggcgctcagcacagcatggtcacccgctagccctggccgggcagcccctcct

SEQ ID NO: 3778 - DNA, 201 bp, Homo sapiens
gaggttgggaactcctctgtcctaggtcaggtcacagtgctcctataaatcttgaacaaaacacaattatttacacacttccccttcaatcgcagagttartttctgcccaaatccttgggagttcaccccttgcatcagcgtgccctggatatgaaacatggagtcaaaggagattattttggagatttaagatttaatg

SEQ ID NO: 3779 - DNA, 201 bp, Homo sapiens
aacccaaagactgagcagcagcaagatttactgcaaagagccaaagaacaaagctttcacagtgtgggaaaagactggagtgagcaggttaccgctgctgyctcgggcagcctgcttttattcccttatctgaccccacccacatcctgctgattggtccattttacagagagctgattggtccattttacagagagctga

SEQ ID NO: 3780 - DNA, 201 bp, Homo sapiens
ggctaagtccttgcctccacacctctgatctcttggcggctctcctgacggtcccatgtagacagattgattatggtagactctcaactgggggacccagmctgtgttcatggagggaaggcagtgctgggccttattttagggttggccagagtaatgcttgtgccacaactagaaatccaaaacctgcagtcctgtgtt

SEQ ID NO: 3781 - DNA, 201 bp, Homo sapiens
aaacacaatttcgtctttggtttttagagatagagtcttgctctgttgcccaggctagagtgcagtggggcaatcatagctcaatgcagcctccaattccygggctcaagtgagccctcacacctcagcctccccagtagctggaactacaggcatgtgccaccgagcctggtcaattttaaataattttttgtagagatg

SEQ ID NO: 3782 - DNA, 201 bp, Homo sapiens
catcttgggggagcccaagcctgtgttctgttccctctctgagcatcttctctctgagcatcttctctgccctggcggctgtcactgttgcatgtcggggkagggctgtgtgggtgtctgaacctttgtcaggctccccaaatcctccccaccctcaccaggaccctttctagctgtccagaggtgcctggttctgcctcc

SEQ ID NO: 3783 - DNA, 201 bp, Homo sapiens
gaggtgagttcttgctctgttgcccaggttggtcttgaacccctgggctcaagccatcttcgtgtctcagccttctaagtagctgagactacaggcatgcrccaccatacccagctaatttttaaaatgttttttgtagagatggggtcttgctgttgcccaggctggtcttgaatgcctgggctcaagcgatccttctgc

SEQ ID NO: 3784 - DNA, 201 bp, Homo sapiens
gcttccccagggctcctggcatctgggagggtcaagttatataaacaatggcatctctgagaccctgcgggttctgtcctatatcagatgatgtgggaccmttggagaaagatgccaccatcatccctcagggagctcactctccatctccgtgggctccctcattccagcctgggatacagaaacactgagccggaagtt

SEQ ID NO: 3785 - DNA, 201 bp, Homo sapiens
caggacaggtcttcgctactccccaagagagctcagtcctctgcctccgcctctggtgtaaccacagttcactttcccatctggaaacccttacctacacyggctctgctctctgcattctcactctctttctctctctggcaaactgggctccatctgtacaatcctaaccatccttcaaggtaaagctcaaatgccaga

SEQ ID NO: 3786 - DNA, 201 bp, Homo sapiens
agccacccagcctcctgaggcagagccagttgtgctgtgggatagtggggtggacttcccgtggctctgcccctcagccccagcaccaagtaacccctgayggcgggcggcgggggacaggcattcactcccagctcactcacttctggtgccctgaaccactgacttagtgcagcctctgctagaattccacccgaatgc

SEQ ID NO: 3787 - DNA, 201 bp, Homo sapiens
atgtgagtgagatcccaggagccgtgggaaaaatgcttctcagaaagcctgtctctgggtccttgtgcacagtgagggactggggcagggagctttgctcrtcttccctcctgggccaagcctggaggcttggttcctccttcccaaggctacctgctccagagacaggtccattctttcaagcctgaagcaggaggcgcc

SEQ ID NO: 3788 - DNA, 201 bp, Homo sapiens
tgtttcgggtgggtctgaccccatcccttggtccagggcaggcatggggcccaggtctggcctatccatgctctacctctctggacatggcatttggcctrgggatggcatgtgacccaagatgggccagtgagaggggctgtcttctgctgaagctgccctccaccccaggatgaaactttcggtgcagggagttggctt

SEQ ID NO: 3789 - DNA, 201 bp, Homo sapiens
aggagacggaggttgcagtgagccaagaccataccattgcactccagcacgagcgacagagcgagactctctcaaaaaaaaaaaaaaaaagagctgacacrgagatgctctgaggccatggccctgaagtgggcatcatgcactttgctgagtgctgtcttcttgttggcaccagcagcatccttcctcttgggggggaca

SEQ ID NO: 3790 - DNA, 201 bp, Homo sapiens
atgagagttcactgcatgctggaacctcagagccgcaggccctcttattcaataggggaaaacagagtcccagagactgggggagacttgcccagggtcgygcagtgaggccagggaaagcctggtcttctgacccccagcccagggctctgaccactgtgacctcagggatggcccattgactcctgtcaattcctgtgt

SEQ ID NO: 3791 - DNA, 201 bp, Homo sapiens
actctccagcagccaccctggtccaggcggccagcgcagcacagctcagaggggaggagctgcaggccctctccaaggctgtcctcgccagcgggtgcccsgggccagcccttcttgcctccagtgcctgcctttcagtttcctcgtctatggcccaggagtcactcccaccccctggctcactgtggctcatctatcaag

SEQ ID NO: 3792 - DNA, 201 bp, Homo sapiens
gggttccaggaaagcaggctcatttggggactgattccaagcagggttctgaagaaagagctagcccactgcgcagtggcccacctggagaggtagcagtytcctttcctgatgccagatccaagcagaggctaatgctggagaccagcgatgcccgtgggagaatccctgtagctagagggaattatctggaagtaattt

SEQ ID NO: 3793 - DNA, 201 bp, Homo sapiens
gcagcctgagctagacttgtagtctctttcctgtctgttcagcttggtctatctgttttctgccctgccttgtagactgtgatgagagcagctgacccacyttcactatggttttttttttttttttttttgacacggtctttttctgttgtccaggctggagtgcagtggcacgatcttagctcactgcacctcaacgtc

SEQ ID NO: 3794 - DNA, 201 bp, Homo sapiens
gtaaactgccttctgctacttactagttctgcaactttgagcaaattccttaacctttctgagactcaatttcctccactgtaaaatagaggaagtggtarcaacagtctcacagtgtaaatggaaggattaactagaataataaaggcaaaattctcagtctcatgcccgacacagacaaagtgcacagtaaaggccagt

SEQ ID NO: 3795 - DNA, 201 bp, Homo sapiens
atggtcttcagggcagctgcagtgatgattctggcccctggaacagggaaataagggggctctcttttttgttcttttgagaggggtggggtagtgcatarctgaagagtaattggagataatgtaactgtttacacagtaagtgatgttgtttcattttgtgctacattttgccctaacgctagaaaacatcgtgctgaa

SEQ ID NO: 3796 - DNA, 201 bp, Homo sapiens
gtctctcctcctccaggaagacttcctcctgcttgcttcctcctaacatgttggactgcccttgtttttgtccctacatgaagaactgccctcgtgtctgsctttaagctcttatttcaggaaggccctagacctgctttcatctcaggccagctcccagagtctgaggctgcacctgggcttagcaggagagtgtaccat

SEQ ID NO: 3797 - DNA, 201 bp, Homo sapiens
tgtggataccatttcttctcattagttggcaacacgagatgtttaaaggaagcatgtgctgggaagtgttggcaaatctttaaccaatggctctgttcatatgccctgcaatgccttctgcctatgaacgcacatagtagtgactgtattagtccatttggcattgctataaaggaatccctgaggctgggcaatttattt

SEQ ID NO: 3798 - DNA, 201 bp, Homo sapiens
ggtgccagtctcctttaaactcctgaactaatagagcgagaagtcactcatgaccacgaggagggcaccaagccattcatgagggatctgccccaataatycaaatgcctcctaccaggcctcacctccaacattggaggtcacatttattttaacatgagatttggagaggacaatatccaaactatactaaagaccaag

SEQ ID NO: 3799 - DNA, 201 bp, Homo sapiens
ctatacccctgcacgccagccttggcaacagaatgagaccctgtctctaaaaagaacaaagaacaaaaccaaaaccattcgtgtagacaggcattgtcaagacccccttgattcacctcccacacatctgcaggcttgttcataatgggacttcaccctgtgcctcgccttcccactctgcactcagcagggtcctcagag

SEQ ID NO: 3800 - DNA, 201 bp, Homo sapiens
ggaaacccttacctacactggctctgctctctgcattctcactctctttctctctctggcaaactgggctccatctgtacaatcctaaccatccttcaagrtaaagctcaaatgccagattctaagggtcagcagggcatggtgggtggggcctgggctctggaaccagacagagtgcctcagtccaaatccaggttccac

SEQ ID NO: 3801 - DNA, 201 bp, Homo sapiens
cctttaatatatttttatgcaacattgtatttctgagatatttatccctgttgagatgtacaccttcagttattttagtggtgcagttatattttattatrtgaatatgccacgatcatttacctattcttccattgctgaactttaccttgaagcagccaacatctttgagcaggtcctcttgacttgtatgccatgttc

SEQ ID NO: 3802 - DNA, 201 bp, Homo sapiens
cactacaactggcctttaatatatttttatgcaacattgtatttctgagatatttatccctgttgagatgtacaccttcagttattttagtggtgcagttrtattttattatgtgaatatgccacgatcatttacctattcttccattgctgaactttaccttgaagcagccaacatctttgagcaggtcctcttgacttg

SEQ ID NO: 3803 - DNA, 201 bp, Homo sapiens
tagggagaggagacgagaagtgagacagagaagggaaagaagccgataagcaggttactgccgtgggccattgacaccactgaggccactgaggctcagcycctgggcagcccgggagatggggtggcacacactggggagtgtttccacctgcagggccaggaagctgtgtgttgtcctccagctcccactcatcacgtg

SEQ ID NO: 3804 - DNA, 201 bp, Homo sapiens
tgaggctcagcccctgggcagcccgggagatggggtggcacacactggggagtgtttccacctgcagggccaggaagctgtgtgttgtcctccagctcccrctcatcacgtgctgagggctgctcctggagatgtgcactccagcgccccattgctgtgttgtgctcaggcctctgacctagtgtgtccctgtgaccagag

SEQ ID NO: 3805 - DNA, 201 bp, Homo sapiens
ctgatggcagcatagggggcagtgggagctgggaaactgccatcccctagaggggcggtggctgggagctgagggcagaagccacgtggttgccacagacycctccttattgggtcctggctctgaggagagaccatttaatgtgtcctcacctcccaccttcctctgctggccaccccctttgcctgcagatctggcccc

SEQ ID NO: 3806 - DNA, 201 bp, Homo sapiens
tgatggcagcatagggggcagtgggagctgggaaactgccatcccctagaggggcggtggctgggagctgagggcagaagccacgtggttgccacagaccyctccttattgggtcctggctctgaggagagaccatttaatgtgtcctcacctcccaccttcctctgctggccaccccctttgcctgcagatctggcccca

SEQ ID NO: 3807 - DNA, 201 bp, Homo sapiens
tgccctcccttgggtgccagcctctgtgttctatagggaaagcccagacgctgtctctgatgagtgtcatcaaagcaagatcctgcctcacggcctgggcygtgtatggccaaatggacaattaagtaaaaagcaaaacaaagcaaagcagaacgaagcagagtggggtccagggctatggagtctgatggacgttggctc

SEQ ID NO: 3808 - DNA, 201 bp, Homo sapiens
gccagcctctgtgttctatagggaaagcccagacgctgtctctgatgagtgtcatcaaagcaagatcctgcctcacggcctgggctgtgtatggccaaatrgacaattaagtaaaaagcaaaacaaagcaaagcagaacgaagcagagtggggtccagggctatggagtctgatggacgttggctcagatcctggctttgc

SEQ ID NO: 3809 - DNA, 201 bp, Homo sapiens
gagtgacagagctgggggaggcctggtgagagatgagaaagggagcggcaagtgcacctggagggttggcaggggctagagttcccccacacctggagtgygcctggagggtcggtaggggcatagttcccccacacctgcctccctgtctctgggcctggggagggacccagaggttggccacccagaggttggccaccc

SEQ ID NO: 3810 - DNA, 201 bp, Homo sapiens
gagctagacttgtagtctctttcctgtctgttcagcttggtctatctgttttctgccctgccttgtagactgtgatgagagcagctgacccaccttcactrtggttttttttttttttttttttgacacggtctttttctgttgtccaggctggagtgcagtggcacgatcttagctcactgcacctcaacgtcctgagct

SEQ ID NO: 3811 - DNA, 201 bp, Homo sapiens
ggctggacctgcgtgcatcatgatggtgagcttggccagagtcaccaggaaagtggcactcctttgtccccagcaaggcgggctgtgaggatggccagagycggctctgcaccatttggggacaagccggagcagagatcccgagagctgactcccgcgatgcagccgtgctgggagagaggtgcaccctgcattcctcaa

SEQ ID NO: 3812 - DNA, 201 bp, Homo sapiens
tctcactgacttcaagaacaaagccatggaccctcgtggtgagtgttacagttcttaaagacagtgcgtccagagtttgttccttctgacgtttggacggkttcacaatttctttcttctggtgggttagtggtctggctggcttcaagagtagaactgcagacttttgaagtgagtgttccagctcataaaagcagtgga

SEQ ID NO: 3813 - DNA, 201 bp, Homo sapiens
atccctgagctagacacagagtgctgattggtgcatttacagtcctctagctagacaaaagttctccaagtccccactagattagctagacacagagcacygattggtgcatttacaaaccttgagctagacacagggtgctgattgatgcatttacaaaccttcagctagacacagagtgctgattggtgcatttacaat

SEQ ID NO: 3814 - DNA, 201 bp, Homo sapiens
tggagcatccacaaaaccccagctagacacagagtgccagagtgctgattggtgcatatacaatcctccggctagacataaaagttctccaagtccccacyggactcaggagcccagctagctttgcctagtggatcctgcgctggggccgagcgagggtggagctgcctgccagtcttgtgcagagtacctgcactcctc

SEQ ID NO: 3815 - DNA, 201 bp, Homo sapiens
tactggagggagctaacggcttcttgcactgtccctcgaaggccagcacagggctggctctatgcgcatgcaagtctgtgccagagttgatgggctctggraggcccaatgtccatgtgagaggcggtgtgctcggggagggggctgggacctggcagggtctcatttcagcccactcccagcttctgcccaggtggggtt

SEQ ID NO: 3816 - DNA, 201 bp, Homo sapiens
gggtgagcaacaggccagctgtctcctcctggagccaggggtcaaagactggtcacctctgagtgctggggggtcccttaccaaggctggcagggcagggygggcttgcagtaccgacgtctgctcttggagctcagaatcatgcacagggtcatgttgagcatttccacagcataaaaagtcacattccaggagctgtgt

SEQ ID NO: 3817 - DNA, 201 bp, Homo sapiens
tctttgtttcccatcttgctccacctctgtgggggttctcgtgccggaacctggttgtgtcaggcctctccgatgtctggaatctcgagctgtttcctggrgacagatggcattggttttgcatttgttccacaatgccgtctctcagaaaatattaacatcagctattgacacggagctcctcaaaatatcagcaatgat

SEQ ID NO: 3818 - DNA, 201 bp, Homo sapiens
ctcgtgccggaacctggttgtgtcaggcctctccgatgtctggaatctcgagctgtttcctggagacagatggcattggttttgcatttgttccacaatgycgtctctcagaaaatattaacatcagctattgacacggagctcctcaaaatatcagcaatgatttgatctgcaactttggaagctatttggtaggctgtt

SEQ ID NO: 3819 - DNA, 201 bp, Homo sapiens
gcatatacaatcctccggctagacataaaagttctccaagtccccactggactcaggagcccagctagctttgcctagtggatcctgcgctggggccgagygagggtggagctgcctgccagtcttgtgcagagtacctgcactcctcagcccttgggtggtagatgggactggtgccacggagcaggggtcagtgtctgt

SEQ ID NO: 3820 - DNA, 201 bp, Homo sapiens
tgtcagggaggctccagtcacgcggcagcccaccgcacggggctcgggcatggtgggctgcaggtcccaagccctgccccctggggaggcggctgaagccyggcaagaatttgagcgtggcgccggcaggccaacagtgctgggggatccggggccccctctgcagctgctggcccgggtgctaagcacttcactgcccag

SEQ ID NO: 3821 - DNA, 201 bp, Homo sapiens
tttctctctctggcaaactgggctccatctgtacaatcctaaccatccttcaaggtaaagctcaaatgccagattctaagggtcagcagggcatggtgggwggggcctgggctctggaaccagacagagtgcctcagtccaaatccaggttccaccactcaacagctgcgtgaccttgggaaagtcacttaccttctctgt

SEQ ID NO: 3822 - DNA, 201 bp, Homo sapiens
tggcctctgtcaccttgccagaggtggcttttttgaagggtgagcctggtgactggatgggggcatgtgtttcggtcatgtgcagccagtacatggtagcrttttgttcccccaggtgtcggctcagggacttttgccacgtgttgactgctttacttcataattagccttgagaattgagcaggtgagatcaatcagaaa

SEQ ID NO: 3823 - DNA, 201 bp, Homo sapiens
aatacaaaaaattagctgggcatggtggcaggcgcctgcaatcccagctacttgggaggctgaggcaggagaatcacttgaacttaggaggcagaggttgsagtaagctgagattacaccattgcactccagcctgggcaacaacatagaaactccgtctcagaaaaaaaacaaaaacaaaaaaccaaaacacacacacac

SEQ ID NO: 3824 - DNA, 201 bp, Homo sapiens
atttttatattttaagtacaacttgaagcatatttggttttccctttaaagctgcctttccatgggttttgcactagtgtgaggattccctccccctcccyttctttccctgcatcttccctcccccaaccccaatatccagtttccttttccttgtgattcactttgcccagatgtaactatcacagagattttaaagac

SEQ ID NO: 3825 - DNA, 201 bp, Homo sapiens
ctctagatgccaatagtattcccccaggtgtgacaacaagaatgcctccagacatcatccagtatcccctgactgagaaccatgagcaagcaagaggatcrggggctgtggagtacaagttgtgccaagattctcggcaggagggattctggcctttcagaggcactccaaggaggccagtgtggctggagctgagagtga

SEQ ID NO: 3826 - DNA, 201 bp, Homo sapiens
cctctgggagcccatttcttcagacctctgctttctctcacacccgggggctggtaccggcagaggggagggacactgaggctgaggctgaggctgaggcyggagagcagggcctgctcccttatcactcctaggggatgtgagccacagagagaagcagctgcagatttgctccccacataggccccctccctgagcttg

SEQ ID NO: 3827 - DNA, 201 bp, Homo sapiens
gccttcgagtgcttgggccacattgcagggctggctctgaggtctgggacagaatgtgtctggtgcttaataaattttgtagcttgattgatttcatcctrgccctggaggaaagtgaagggaagatttcttggtttgagaagaccaaattaggaacagatgtcttttcaagctattaataggcggttggggaacaatggg

SEQ ID NO: 3828 - DNA, 201 bp, Homo sapiens
aagctcttatttcaggaaggccctagacctgctttcatctcaggccagctcccagagtctgaggctgcacctgggcttagcaggagagtgtaccatgttgygatgtctgctgagggcttgggggctgggggaggtggcaggattcgctacctctagagtggctttctgggtctccctgagtactggagggagctaacggct

SEQ ID NO: 3829 - DNA, 201 bp, Homo sapiens
cagcacctcagcaggagttttcaactgggggctgagaaaaggccttgccccagccttcatcaccctagggaggctgggagcttgtgagctgggacctgtgkctgccacagccaagctcttcagaggggacaggtctgcaagcgtggtgctgatcctgggaaaggcggatgagagatggagactatcctggtgatcccagct

SEQ ID NO: 3830 - DNA, 201 bp, Homo sapiens
cgagggaacggggtggcggtgagctgttggcgtccggtcaccaccatggtgcccagctgcactgtcttggagagccctgactccggcagaggttggagcarggagggctggggctgccctgtgtgttggttcagcccatgacactgatgctcagggcagctgggagcacagagctgcccgggtgtactgggacggtccacc

SEQ ID NO: 3831 - DNA, 201 bp, Homo sapiens
ctggatgtagaactcaactgctttgtaaggaaggagttggctagcatggaaagtcacctgggcttatttgaccttgagcacctgagtggccttctttacakgcaaatataaaaacaaaggggatgccatggccctgcagaagggatcccgcaggacctgctgttctgacctcacagagcttcagggctggtagctggggaa

SEQ ID NO: 3832 - DNA, 201 bp, Homo sapiens
cagtgagatggtgggagggtcaccggtgcctggatgtagaactcaactgctttgtaaggaaggagttggctagcatggaaagtcacctgggcttatttgaycttgagcacctgagtggccttctttacatgcaaatataaaaacaaaggggatgccatggccctgcagaagggatcccgcaggacctgctgttctgacctc

SEQ ID NO: 3833 - DNA, 201 bp, Homo sapiens
aggacagctgggggaccacgttgggtccaatctctgcatgaactcaggaatcacaagggctgcctcctcccacgggcttctcatcccccaagacttcaccrtgcttttctgtgtcattctgctcagggaagtttgaaatgccatgcctggggcagacacttgaagaaatcagcttggacaggagacatttagtgctagtta

SEQ ID NO: 3834 - DNA, 201 bp, Homo sapiens
agccaaacccaatgtaagcaagcttgggtgcaccggccagggccactgagccccagggacaatgggaccaagcatcgggctatctcagggatcagttcccyaccctgctccgtgtctctctctttaatgcataccacctctgagagctacttgccccaccccctcaggagtgatgggtggcctctcttccctagttccggt

SEQ ID NO: 3835 - DNA, 201 bp, Homo sapiens
cgcggcagcccaccgcacggggctcgggcatggtgggctgcaggtcccaagccctgccccctggggaggcggctgaagcctggcaagaatttgagcgtggygccggcaggccaacagtgctgggggatccggggccccctctgcagctgctggcccgggtgctaagcacttcactgcccagggcgggtggcgctggccggc

SEQ ID NO: 3836 - DNA, 201 bp, Homo sapiens
tcagctccttcttgcactctctctcaccaatatgatgccctgtaccatgttatggcccaacacaaaggccctcaccagatgtcagtgctgtgccattggayttcacagtcactaaaatcatgagaaataagtttcagttgtttataagctacccagtttatggtattctgttatagcagcatgaaatggattaagataatg

SEQ ID NO: 3837 - DNA, 201 bp, Homo sapiens
ctgaaaaagaaacatatcatatacttataaagcaaagatggcgatttatcgactcagtcaacaaaaggtcaggcttcaggcatggcttgatccaggggctsgctctctctctctctctctctctctctctctctctctctctgtgtgtgtgtgtgtgtgtgtgtgtgtgtgtgtgtgtgtctctctccctgtctatgtgtc

SEQ ID NO: 3838 - DNA, 201 bp, Homo sapiens
aaaaagaaacatatcatatacttataaagcaaagatggcgatttatcgactcagtcaacaaaaggtcaggcttcaggcatggcttgatccaggggctggckctctctctctctctctctctctctctctctctctctctgtgtgtgtgtgtgtgtgtgtgtgtgtgtgtgtgtgtgtctctctccctgtctatgtgtctgt

SEQ ID NO: 3839 - DNA, 201 bp, Homo sapiens
ggctcccacagtgcagcggcaggctgaagggctcctcaagcatggccagagcagacacgaggctgaggaggtgctgagagcaagcgagggccaccagcacrttgtcacctctcattgggtctctgtctacctggagcatgggctggcatcatctaaacaatggctggtgttgactagtcaccttgagctaaccactgggat

SEQ ID NO: 3840 - DNA, 201 bp, Homo sapiens
ctagcatgcagtttggtaaatgtgatgtgaatctacagtgggaaagggaccaacctggagtctattttgaggttaagggaaaaggcctctgcagtttgttycaaggttatatctcaagactaaagagaaagggaaataaaattttgcattttgaagttaagctggtccatgataattctgggtctgtcaccgctaaggcag

SEQ ID NO: 3841 - DNA, 201 bp, Homo sapiens
tttcccatcaccataagatgttatcctcacaaatcattctcctaggaacatgctgagtttacatcctccagagtaggtacatttctcataaagtaaggggragtattagtctgttttcatgctgctgataaagacatacccgagactgggcaatttacaaaagaaagaggtttattgggcttatagttccacatggctggg

SEQ ID NO: 3842 - DNA, 201 bp, Homo sapiens
ctcttctttatgagccttctgttcatccccagccagtggggtctggggaagggcggctcccgtcttcccattgtagagcaaaggcctcagcgcctgccctyggggcctgctgcagctctggggctggcacaggtctcgctggcccctagagggagctcgaagcccctccagctctgatctgtcccttccaaggagaagagc

SEQ ID NO: 3843 - DNA, 201 bp, Homo sapiens
tgaacccaggttcagctgctccacacttgaaagccaactttgggagacaagacttggtagaaggaaaagcaggtttattcaagagacagcaacctgagaaracagtgggttagtgtcacaaaggtcgtctcaagtcagcacacatttcaggctcttttgatgttgagggcagggggaaaagaagggagttgggatcaagac

SEQ ID NO: 3844 - DNA, 201 bp, Homo sapiens
agagcttctccagagctcccagaggccagaaaatcagttttattttagattctgagaatgaaatttagaaacccttctctctccaaccttttcctggaatrcttagtagttttctgactgtaccatggctaggttaattttccttattttattttttattttttgctcttgtcatttcctgtttccaaaccttccacagat

SEQ ID NO: 3845 - DNA, 201 bp, Homo sapiens
tttaatattttttgtagagatggggtcttgctgtgttgtgcaggctggtctcaaactcctggcctcaaacagtcctcctgcctctgcctcccaaagcactrggattataggagtgagccaccacactggctttctctgtgtctttaactcccagctgggcctgcccatagttagagcctagcaaatattcggacagggaac

SEQ ID NO: 3846 - DNA, 201 bp, Homo sapiens
atcctcactctctttgctcctcatcaccccctccttcctcctcatcctcctttccttcctcctcatccccctctccttcctcatcctccctctccttccamctcatcctcgctcttcttcctcctcatccccctcctttctcctcatccccgctgttctccttatttcccctcttcttcctcctcatcccccctctccttt

SEQ ID NO: 3847 - DNA, 201 bp, Homo sapiens
ttgaaaaaggcttctgtgttctacatttcctgaagtatttaacatttcagaatggatgcttcttgcctttatacatgaataactttggctgggtgtaataytctttgctgccttttctttccctccaaacacagacattaatacctttttgtcgggctctgagtgttgctgtagagaagtcagtgtcttgcctgattttcc

SEQ ID NO: 3848 - DNA, 201 bp, Homo sapiens
cactcagtcactgcttcagctgaggctgggaaaggcagccagagggttagaaggggagagggggagagagagagagagagagagagagagagagagagagrgagagagagagagagagagagagagagagagagagagagagagagagagagcgcatgtgagtgagatcccaggagccgtgggaaaaatgcttctcagaaa

SEQ ID NO: 3849 - DNA, 201 bp, Homo sapiens
atatttacttgagtctgtttcagcgctttctccttgttccgctaatctatttgtctgttcctgtataatgccacattgtttcagtgatgccaactctatarcaaatcttattactggttacatcctctttacattgtttacactttcttttaaaaattgtcttgtctgtccttcctgtcactcagcacgaatttaggatca

SEQ ID NO: 3850 - DNA, 201 bp, Homo sapiens
ggatcaaacatgatggaggctgagggactttggaaagggttggggggacatcgaggggctctgagtaatggcagagaaagcaccttagggtttctgggccyggctgcctgcacccatcactcaagcatccatcctgacccctggagactccagctgttttaaaggaatatgtctccatcctaggtcacctttgtcactgct

SEQ ID NO: 3851 - DNA, 201 bp, Homo sapiens
ttctattgcttttataaaaatgaatcatgcatatcataaagacgttaaatgaggcaaaaatgtacagtgaagaaaatcttttaaaaaaccctaaatctcaytaacttaggcaaacataattccagacacctatgtatgctgatagaaagtaacatggatacctggacaaatacttatctttataaaaaatgaccatctcta

SEQ ID NO: 3852 - DNA, 201 bp, Homo sapiens
tccttggtgagtcctttccttttataattacatggagttctttatctccataaatgctttttgccttaagttagattttatctgctactaatattgctatyctgctttgttgttgttgtgccagcgatattctttccattcctctatttttgaccttcctgggtcatttattttcgtgtgtctcttataagcaaaatatca

SEQ ID NO: 3853 - DNA, 201 bp, Homo sapiens
agacttttgttgcaagatttgttatttgtaaatattccttatcttcttgaaaataatgcacactttgtatttgttgacggattctttgtatatctattagrccaagcttgctacgatgttgtacaagttttctatgttataagtaatttttgtctgctggagcaatttccaatacagtgagccagaatctcccactctgat

SEQ ID NO: 3854 - DNA, 201 bp, Homo sapiens
ttttctgaaatttgttgagacttttgttgcaagatttgttatttgtaaatattccttatcttcttgaaaataatgcacactttgtatttgttgacggattytttgtatatctattagaccaagcttgctacgatgttgtacaagttttctatgttataagtaatttttgtctgctggagcaatttccaatacagtgagcca

SEQ ID NO: 3855 - DNA, 201 bp, Homo sapiens
tgacagtgtgcaaggagtgctcaggatggcacaggatggtacatgctctgctgtgagatgagtgctggcatcgcctccccaggcagtgggcaggccctggmacactgcactgaggggcgggggggtggtgccctccagcctttctctttccccagattttatcatgatgagtgggattgttcctggggagcacagtgggaa

SEQ ID NO: 3856 - DNA, 201 bp, Homo sapiens
gccaactctgtctaggcatcctctttgcttcgaatattgtacctgagacctcctggtcctccctcttagctacagtgtaatggctgcatagtttctttctmttcactgtttgagatggtggaaaaggcagagtaagagtgcctctgggtggtatgcaggctttgtcagacgataccatttatgtggaggatgccctaggct

SEQ ID NO: 3857 - DNA, 201 bp, Homo sapiens
ctacagtgtaatggctgcatagtttctttctattcactgtttgagatggtggaaaaggcagagtaagagtgcctctgggtggtatgcaggctttgtcagamgataccatttatgtggaggatgccctaggctttggaacatttccccattcagtaggtgtccttgggccttcattctgatacatgggaggctcagccctgt

SEQ ID NO: 3858 - DNA, 201 bp, Homo sapiens
gtgtccccacccaaatctcatgtcaaattgtaatccccacatgttagggagggacctggtgggaggtgactggatcatggtgagggttggggggttccccygtgctgttctcatcatagtgagggagttctcatgagatttgatggtttaaaagtggcacttcccccttcactctctctctcctgctgccttgtgaagacg

SEQ ID NO: 3859 - DNA, 201 bp, Homo sapiens
ccccactccctgcaggggagccatttccttctcactaagtcctggtgggatgtggtctctcagttggagactctaaagaaggtggctggggaggagcatgygtgtcacttctcccaaagggacactaagctctgcggacacagccattcaggtctacctactgtggtatctcttgggctcctacaaagatgacctgtttgc

SEQ ID NO: 3860 - DNA, 201 bp, Homo sapiens
aacactcagtcactgcttcagctgaggctgggaaaggcagccagagggttagaaggggagagggggagagagagagagagagagagagagagagagagagrgggagagagagagagagagagagagagagagagagagagagagagagagagagcgcatgtgagtgagatcccaggagccgtgggaaaaatgcttctcaga

SEQ ID NO: 3861 - DNA, 201 bp, Homo sapiens
catcctcactctctttgctcctcatcaccccctccttcctcctcatcctcctttccttcctcctcatccccctctccttcctcatcctccctctccttccwactcatcctcgctcttcttcctcctcatccccctcctttctcctcatccccgctgttctccttatttcccctcttcttcctcctcatcccccctctcctt

SEQ ID NO: 3862 - DNA, 201 bp, Homo sapiens
tgtttatataaattttaattcccaccaacaacttgtgaatgtttttatttcccttcaactataactacccttgatattgccagatttaaaaattttagctwatctggtgatgtgttctgatgtggtatttcatctcattgttttgatttgcatattttctgagtattagtgaaatgaagtagcattttatacacattcagt

SEQ ID NO: 3863 - DNA, 201 bp, Homo sapiens
ccctccctgtcactggggcttgtctcagccctgcagaagtgcctgcctggagacacagtggatgctgttggcatgccccctgtacctcctggacacgcacrgccaccctgcacaccagccaccttaccctcggttcctgtgactcagcctgtgggctccctatagccacggaggcgtgtgggcatcggcatcccaggagtg

SEQ ID NO: 3864 - DNA, 201 bp, Homo sapiens
tgcagaagtgcctgcctggagacacagtggatgctgttggcatgccccctgtacctcctggacacgcacggccaccctgcacaccagccaccttaccctcrgttcctgtgactcagcctgtgggctccctatagccacggaggcgtgtgggcatcggcatcccaggagtggctccagccagtgacggatgaatggagtgga

SEQ ID NO: 3865 - DNA, 201 bp, Homo sapiens
tacagccgggtagggggttggagaggccgagaggatggggggcatctggtggggtcgggaggtctggctgctgctctgtgggcgtggtagggtgcctgggkctgggcactgcccagtgacttgaagggtacatcacctgccggcttctccctccgaccccactcatgggggctcctggcatgctcagtggatgagtgtgtg

SEQ ID NO: 3866 - DNA, 201 bp, Homo sapiens
acactgttctccttcctacaatgcagcacactgggcatgcttctaccccagggcccttgcaccagccgcaccatctggttgacatgcttctcccacagatwcttgcttggctaactccgttgtgctctggtttttgtcaagcagtcaccttctccatgaggcccacctgggccaccatatttaacactgcagtctacactg

SEQ ID NO: 3867 - DNA, 201 bp, Homo sapiens
tcgggaggcggaggcaggagaatcacgtgaatctgggaggtagaggttgcagtgagtcaagatcacaccactgtactccagcctgggctacagagcaagaytccctctcaaaaacaaaacaaaacaaaacacaacacaacaaaccagcctggccaacatggtgaaaccctgtctccactaaaaatacaaaaattagccgga

SEQ ID NO: 3868 - DNA, 201 bp, Homo sapiens
gaacaccacaggagaaactccaggcagggcctgtttcaccccagacatttttccagccaacatgtcccgaagactgatcatttatctagcatgtgtctcaygatatgctggtgcaggggatgctgccataagcaagacacacaggcttcctgcctgcagggaattcggatttgcacccgggagcgggtggagacagacccc

SEQ ID NO: 3869 - DNA, 201 bp, Homo sapiens
ctccctccgaccccactcatgggggctcctggcatgctcagtggatgagtgtgtgcttctctgaggctgaggggttgagggccctgctcagggcacatctytctggggaggggcacctttgcccccactttctttccactgcacatcagtgcagttcgggatgaagccaggaaaacaccctgagatggtttgtgtgtgcgt

SEQ ID NO: 3870 - DNA, 201 bp, Homo sapiens
acttcctcctcatcccccctccttcgccctcatactccctgtccttcctcttcatcctctttctccttcctcctcaccctccctcttcttcctcttcatcyccctttccttcctccttttctcccctccttcctcctcatccttgctctccttcctcctcattccctatcttcttcctccttatcctccctctccttcatc

SEQ ID NO: 3871 - DNA, 201 bp, Homo sapiens
cacttgcaatcttcaaaggactgctgttgggcactggagccacctgctggtatggagagctaaaggtgcctgaggcttacatgcttcccacctcagacatyctgtagccagtaactggctagatatagtatatctcaactcttttgccgtaagacagaacaaatcttctctgtatttactgtgttttcccacttccttact

SEQ ID NO: 3872 - DNA, 201 bp, Homo sapiens
cctggggtcctagcctgtgtccactctcctgggaaggggcgacgaggaaggggagtgagacccccagcgtgacagtctgcagggaggcaagcctcgcacgmcgcctgcctcacacccagaccctcgcctgcccatgagccccgctcgctccagacatcctgagcagatcagctctccgccctgcgtcttgaggcaatgggg

SEQ ID NO: 3873 - DNA, 201 bp, Homo sapiens
acatttccccattcagtaggtgtccttgggccttcattctgatacatgggaggctcagccctgttgttcactctcccagtcccctacatctcctcgaaaayattttccactccgttagggtgagaaaacaaacaaacaaaaagtaatgatgtagtattagtttgttctcatgctgttataaagacatatgcgagactgggt

SEQ ID NO: 3874 - DNA, 201 bp, Homo sapiens
atttctgagttaattgcattggggtctgagaataatatttgttgatatttgattttctgaaatttgttgagacttttgttgcaagatttgttatttgtaartattccttatcttcttgaaaataatgcacactttgtatttgttgacggattctttgtatatctattagaccaagcttgctacgatgttgtacaagttttc

SEQ ID NO: 3875 - DNA, 201 bp, Homo sapiens
tctggcataaagtgattcatgttttttcttatggttaaaaaatatctcttctgaatctgtcatgctgtctctctttcattctcagtatttttttcaaatcrtttttatttatttttaatttatatacagttgaatttatcctttttggtctatagttctactagttctgacaaatgtaaccaccagcacaccaagtctgtt

SEQ ID NO: 3876 - DNA, 201 bp, Homo sapiens
aacttatgttttgtagaaccctgttttcctttagcccctgatattttaatgtttcggtaatttgcacttttaacacacaagtaatttaggagtgtaatttwaaaatattctatatttttgtcttttaattgtcaatttctgagttaattgcattggggtctgagaataatatttgttgatatttgattttctgaaatttgt

SEQ ID NO: 3877 - DNA, 201 bp, Homo sapiens
tcactctttttatgtaaatgaatttatcaagaacagtattgaatttattccacaacttatgttttgtagaaccctgttttcctttagcccctgatattttwatgtttcggtaatttgcacttttaacacacaagtaatttaggagtgtaatttaaaaatattctatatttttgtcttttaattgtcaatttctgagttaat

SEQ ID NO: 3878 - DNA, 201 bp, Homo sapiens
agatgattagctgtcttagccagttcctacttactgtccatttgggagggagcctggagagccaccgtggctgctggaagagcagtttggagagtggccarttgttccagtttgcttgggactgagggttttcctgggatgggggactttcagctctaaaactggcaacctgggatgggggtcgccacattgagggtgttg

SEQ ID NO: 3879 - DNA, 201 bp, Homo sapiens
atgataggaggggcatgggaagggagctgccctccatggattctggggcagggactgtgcctggctgggagctggctgtgcctggtggtaaggctgtcaaygcttcagtccctaccgtggcacctggggctggggatgtgggtgaggtgggtgaggctgcacggtgcaacccattgttcttgctcagcaaaggcgcccacc

SEQ ID NO: 3880 - DNA, 201 bp, Homo sapiens
tggagcccaccgtccccactggcaggcatcccctccacagcctcctggacaggggtgtgtctgggccctgcctggacccatgagtgatggggcagctctcygggccctcctcacgtcggtcctgcccagcactgtcctggctgcagctcctctcacttgccactatcccagttccatgctgggacctgcacttcaggcctt

SEQ ID NO: 3881 - DNA, 201 bp, Homo sapiens
atcatgaaccctatctcctcctgacaatcctgccagtatgggaaatcctttcttttcctgctgacctactggtatgggagccccaaatgaccgggtgacarctgtactttcacatttagtgggacttttacaatgtctccgggtggaaacttcatcttcagggaaacaagacctctaaagttgggagggggtaaatggaag

SEQ ID NO: 3882 - DNA, 201 bp, Homo sapiens
caccaagttaagtgctggtattttttgcaggaaagtgaccactgttcctggaggatttgcattgctggagaagtgcattctaacagtggaattcaggcggygagagtcgggtagggggttttccctgttcctggtgggttatggtcttcagggcagctgcagtgatgattctggcccctggaacagggaaataagggggct

SEQ ID NO: 3883 - DNA, 201 bp, Homo sapiens
gggaaatcctttcttttcctgctgacctactggtatgggagccccaaatgaccgggtgacagctgtactttcacatttagtgggacttttacaatgtctcygggtggaaacttcatcttcagggaaacaagacctctaaagttgggagggggtaaatggaaggtcactgggagtgaggtacagcagggtatgcccactgtc

SEQ ID NO: 3884 - DNA, 201 bp, Homo sapiens
acgatcattttcttccttttccttttttgagtttaatcttcttcttgagttgtataacatttattttcactctttttatgtaaatgaatttatcaagaacwgtattgaatttattccacaacttatgttttgtagaaccctgttttcctttagcccctgatattttaatgtttcggtaatttgcacttttaacacacaagt

SEQ ID NO: 3885 - DNA, 201 bp, Homo sapiens
ttttggggttatctccaagtgaacacctcaggctggcagcttctaggtgataggatgtgttttcctttgtcataaagtgggtcttttggtgcaagttgatrccatgtgcaatccaatgaccaatcatgtacttgccccttggatagtggtcctggctgagacattatgagcaaaaaaggcaaagcgattctggaactatgt

SEQ ID NO: 3886 - DNA, 201 bp, Homo sapiens
gttgggcactggagccacctgctggtatggagagctaaaggtgcctgaggcttacatgcttcccacctcagacatcctgtagccagtaactggctagatayagtatatctcaactcttttgccgtaagacagaacaaatcttctctgtatttactgtgttttcccacttccttacttgtttcttctgggagtacttcctta

SEQ ID NO: 3887 - DNA, 201 bp, Homo sapiens
gttgtgggtaattttcttctgttccctgagtaatgtttttgtataggttggactccttgactgctgcgttcctatctctcttctttgtcttttgtgctcamatggcttccacgctgagacatttcatctagttcatgagtgccaactctgtctaggcatcctctttgcttcgaatattgtacctgagacctcctggtcctc

SEQ ID NO: 3888 - DNA, 201 bp, Homo sapiens
gctgactggctgagcatttatttactgggcagattcggggtggctgatggtgctgctggacacctctgagtaagagctcccatgtacctggttgtctaatrcctcccttgaagtggctgcttgtggtgggcattgatgtgtgatcccaaaatccacacacttgacttgcatagttctagccacatgacgcttgccaaaatc

SEQ ID NO: 3889 - DNA, 201 bp, Homo sapiens
ctggagtgcagtggcgcgaccttggctcactgcaagctccacctcccgggttcacgccattctcctgcctcagcctcccgagtagctgggactataggcamctgctaccacgcctggctaattttttgtatttttagtagagatggggtttcaccatgttggccaggatggtctcgatctcttgacctcatgatccacctg

SEQ ID NO: 3890 - DNA, 201 bp, Homo sapiens
ccacagacccctccttattgggtcctggctctgaggagagaccatttaatgtgtcctcacctcccaccttcctctgctggccaccccctttgcctgcagakctggccccagcaaacagcagtgcatctggtgcagtgaaggtgggtgggtttcagagcaggcccctgtgcccaagtcccagggccagcctgcctcgcccca

SEQ ID NO: 3891 - DNA, 201 bp, Homo sapiens
aggcccccattgaattcccagtcagggctaaccaggcattccccgaggcaggaaggcactggtgccagcagccaggctgtggctggaggaggctctgcccrcagggaagcggggaggccagcccggggctggctcagctctcagtccagcccgctctctggagctccagataggcagcccaggagctctcaagggaccatg

SEQ ID NO: 3892 - DNA, 201 bp, Homo sapiens
ctggagctggaaaaaggcatgattagaaagtgagttggttttttttgttttgtgttgttttttgagaaggagtctcactctgtcacgtaggctggaagtgrtgccatctctgctcactgcaagctccgcctcctgggttcaagcaattctcatgcctcagcctcccgagtagctggaattacaggcgtgtgccacatgcct

SEQ ID NO: 3893 - DNA, 201 bp, Homo sapiens
ttacaaagtggaataggctgcattactgctggtttgtagttggtggaaagagggagaaaagagcctggcacatcctctgtccttcctcttctttttttttycccttttctgttgtcaccatcacattccttgatgtcattcctgccattgtgagctgacaggccctcccagccctggtggacagcccgtaagtaaatgggg

SEQ ID NO: 3894 - DNA, 201 bp, Homo sapiens
ctgagaaggataactaatacttcatccctcttcaacttgatgcaacctgaagagcaagtccttgggtgaaagtttcttgtccggtaccaaagataggagayagcaggtaaagggaacaagttggtaccatggcaatggtgtcccagtaaatttttattttgttttgttttgtttgcaagaacagtatgggataaacaatag

SEQ ID NO: 3895 - DNA, 201 bp, Homo sapiens
cgaggtcaggagatcgagaccatcctggctaacacagtgaaaccccgtctctactaaaaatacaaaaaattagccgggcgtggtggcgggcgcctgtagtyccagctactcaggaggctgaggtgggagaatggcgtgaaccccgggggcagagcctgcagtgagccgagatcgcgccactgcactctagcctcggcggca

SEQ ID NO: 3896 - DNA, 201 bp, Homo sapiens
aggtaccctcgtggagctcagggccagctgtctttctgtttccaaaacctgttcctaggggttggttaggagatgctgtggccttttaaagccctgggggaagggggggcggggggacaaagaagccaccaaagctagagaaaaccagaaggtctgggtcccaagttcacctccatttgtgcctaccgtatgatagagcta

SEQ ID NO: 3897 - DNA, 201 bp, Homo sapiens
atggagtgggaaagtagccaggggttataggagagaaggtgggaacagtttgaggtgggtcttgggcttaatttggagactcttcacagagcagcgagctrctccctaatggagtccccggattttggagagctgtgtttatggctcctgccgctccacggtccctttgctgtgccccaggagatgtgtagttgggtgatc

SEQ ID NO: 3898 - DNA, 201 bp, Homo sapiens
attcaaatggagtgggaaagtagccaggggttataggagagaaggtgggaacagtttgaggtgggtcttgggcttaatttggagactcttcacagagcagygagctgctccctaatggagtccccggattttggagagctgtgtttatggctcctgccgctccacggtccctttgctgtgccccaggagatgtgtagttgg

SEQ ID NO: 3899 - DNA, 201 bp, Homo sapiens
gaaaggaggtagttgctgctagacaccatccttctctgtatattccacactgaccttgctctaggcaaaggcccccaccacaaaaacaatagggtcactgytgaacaccagctctttttttttttttttttttttttgagacggagtctcgctctgtcgcccaggctggagtgcagtggcgggatctcggctcactgccag

SEQ ID NO: 3900 - DNA, 201 bp, Homo sapiens
tctttttttttttttttttttttttgagacagagccatgccctgtcacccaggctggagtgcaatggcgcgatctcggctcactgcagcttccacctcccraattcaagcgattcttgtgcctcagcctccagagtagctgggattacaggtgtgtgccaccatgcctggctaatttttgtatttttagtagagatggggt

SEQ ID NO: 3901 - DNA, 201 bp, Homo sapiens
ctctccagcctctccactggccactgctgccatagaatcttatgctcccaccatgccaaatttcttgtggttccctaaatgcgccatgtttgaagatactytgaggacattgtatatacttttgttctacctgagatacatttgcttactttctccacatattgccctcatgacacttatccttattgatggatttcttca

SEQ ID NO: 3902 - DNA, 201 bp, Homo sapiens
tcagttccttctttgtattctttgtattttagatagtcatgcacatggctttttctgtcaattttattgtaagcctgcctttgaaaacaaggtctttggcyctttgatctgaatattcacttcttaggcaaactccagtgttttctaatgacaggtgttcaataaaaggaatgagggatgagaaaattaattcaaagaagt

SEQ ID NO: 3903 - DNA, 201 bp, Homo sapiens
ccagccaagtttatatcatttaagttttaaaggctgggcttggtggctcatgactgtaatcccagcactttgggaggccgaggtgggtggatcgcctgagrtcaggtgttccagaccagcctgaccaacatggagaaaccctgtctctactaaaaatacaaaattatccgggtgtggtggtgcatgcctgtaatcccagct

SEQ ID NO: 3904 - DNA, 201 bp, Homo sapiens
catgactgtaatcccagcactttgggaggccgaggtgggtggatcgcctgaggtcaggtgttccagaccagcctgaccaacatggagaaaccctgtctctrctaaaaatacaaaattatccgggtgtggtggtgcatgcctgtaatcccagctactcgggaggctgaggcaggagaattgcttgaagatgggaggcggagg

SEQ ID NO: 3905 - DNA, 201 bp, Homo sapiens
tgtttctcgtagttcgggtctactggaaacaatttttctcagcttttatttgtctgaaaaattctttttttttttttttttttttttgagatggagtctcmctctgtcacccaggctggagtgcagtggcgcgattttggctcactgcaacctccgcctcccgggttcaagcgattctcctgcctcagcctcctgagtagc

SEQ ID NO: 3906 - DNA, 201 bp, Homo sapiens
aggctggagtgcagtgatctcggctcactgcaacctccacctcccaggttcaagcaattctcctgccttagcctcccgagtagctgggattaaaggcacgygccaccacatccagctaatttttgtatttttagtagagatggggtttcactaggttggccaggatggtctcgatctcctgacctcatgatctgcccacct

SEQ ID NO: 3907 - DNA, 201 bp, Homo sapiens
tccataaatatcataccaaattatactctcaccaatcatatgagtgtctgtagtctggatgcagtggctcacgcctgtaatcctaacactttgggaggccraggcaggtggatcacctcaggtcaggagttcgagaccagcctgcccaacatggtgaaaccctgtctctactaaaaatacaaaaattagccaggcatggtg

SEQ ID NO: 3908 - DNA, 201 bp, Homo sapiens
ggtggatattcaagtcgtctggtcttttgctattgcaaataatgttgcagtaaagtaaaatgtaaaataaaagtaaatgtcttacttacttaaaaacctaytttaaaagtaaatgatggactttaggaggttaagaattaaaaattaataaacatataaataaatgaggtactctagcacttggggtcatgctgatgttct

SEQ ID NO: 3909 - DNA, 201 bp, Homo sapiens
tcatttcttacttccctcctatactaccattccaggtacctcttgctttgactgggttcattccctggtagggagtccacaaactttcactcctgaaaatsctaagcccttgatggttttgcacatgtagagttgtgtgatcttcttttgactgggcaagagctgtaaagaggcatctcagtttcctctgagtaccattcc

SEQ ID NO: 3910 - DNA, 201 bp, Homo sapiens
gtctcccctgatgagaagagaagtgctaggagattgagcctcagtcacaggcagatgtgtgtcttgacagccacggtgtgtgtcttgagagtttaaaagaygtgaaagaatgatttgacccattggcttgctcgctgaataagcaccaaggcaagagagcctggtagttgtcctgcatagtctaggaaggacattctgaga

SEQ ID NO: 3911 - DNA, 201 bp, Homo sapiens
ccccacagtctccctctccctctctttccaccgtctccctctgatgccgagccgaagctggactgtgctgccgccatctctgctcactgcaacctccctgyctgattctcctgcctcagcctgccgagtgcctgcgattgcaggcgcgcgccaccacgcctgactggttttcgtatttttttggtggagacggggtttcgc

SEQ ID NO: 3912 - DNA, 201 bp, Homo sapiens
tatatataagtatatatgtaagtgtctgtgtatatatatagacttgtttccatgtcttttaaaagctctttgtaaatatcattttgataatttctattcaktagtatgaatgaattaaaatttatttgaccagtccctaatattaagacatttagaaatgtttctttttttttttttttttttttttgagacagagccatg

SEQ ID NO: 3913 - DNA, 201 bp, Homo sapiens
ttttttgagatgggagtctcattctgtcacccaagctggagcgcagtggcacaatctctgctcactgcaacctctgccttctggactcaagtgatcctccmacctcagcctcccaaatagctgggaccacagggcgtgccaccacacccgggtaatttttgtattttttgtagagacgaggttttaccatgttgcccaggc

SEQ ID NO: 3914 - DNA, 201 bp, Homo sapiens
ttttctaaaaaaagtgtagagcattgggagaaggccctctggccttgggaacataggcgtccctcctcatatgttccttatccaggtccctgtggctcctwagtggccacagctctggtgcttttctgccagccgtgcacagtgaggtggggggtgtcttagctgagacacagtgcccagtggtgggcatccagtctttct

SEQ ID NO: 3915 - DNA, 201 bp, Homo sapiens
tgcttcctctctcccccttcctgcacatcaccatcactatcatcatctcaaagcagcattacccacaaacatttattgagcacttactctcaatgtgtacraccctttgtgttttgcagaggatatgaatttcattcctcaacaagggctccaagaagtgtcacttttttttttcaaaatcaaaattcacttttctgggaa

SEQ ID NO: 3916 - DNA, 201 bp, Homo sapiens
agcccctccgcccggcagccgccccgtctgagaagtgaggagcccctccgcccggcagccaccccgtctgggaagtgaggagcccctccgcccgacagccrccccgtctgggaagtgaggagcccctccgcccgacagccgccccgtctgggaagtgaggagcgtccccgcccggcagccaccccgtccgggagggaggtg

SEQ ID NO: 3917 - DNA, 201 bp, Homo sapiens
aaaggggaagggaaaaaaggtgaagattaaacccttcccttccatggctggaagttctgtgccccagaattcccttggttcctgcatgttctccaagctgwtctacatctaagagctcatcacgtctggtttccaggtgggtttggccagtgggaaacccaggcaggagatcagagaggatgaggagaatggggtcaggac

SEQ ID NO: 3918 - DNA, 201 bp, Homo sapiens
ttttttttttttttggagacagagtttcactcttgttgcccaggctggagtgcaatggcgtgatgtcagctcactgcaaactccacctcctgggttcaagygattctcttgcctcagcctcccaagtagctgggattacaggcgaccgccaccacacccggctaattttttgttatttttagtagagacagggtttcacca

SEQ ID NO: 3919 - DNA, 201 bp, Homo sapiens
tgcccatcaccagaaattctgattaatttgactgtttcttacccagaacctaatgaaagtgaactggaagacatggcatctttgagtattgggaatggggyaggagctttggccaacctttatacacatagggaatacttacaaggaaaataccatgactcctttttttttttttttgagacagtcttgttctgttgccta

SEQ ID NO: 3920 - DNA, 201 bp, Homo sapiens
ctggtggtggttttcttcctcctgaagaactcttagtgtttctcgtagttcgggtctactggaaacaatttttctcagcttttatttgtctgaaaaattctttttttttttttttttttttttgagatggagtctcactctgtcacccaggctggagtgcagtggcgcgattttggctcactgcaacctccgcctcccggg

SEQ ID NO: 3921 - DNA, 201 bp, Homo sapiens
ggtaccctcgtggagctcagggccagctgtctttctgtttccaaaacctgttcctaggggttggttaggagatgctgtggccttttaaagccctgggggargggggggcggggggacaaagaagccaccaaagctagagaaaaccagaaggtctgggtcccaagttcacctccatttgtgcctaccgtatgatagagctac

SEQ ID NO: 3922 - DNA, 201 bp, Homo sapiens
tggtggtggttttcttcctcctgaagaactcttagtgtttctcgtagttcgggtctactggaaacaatttttctcagcttttatttgtctgaaaaattctttttttttttttttttttttttgagatggagtctcactctgtcacccaggctggagtgcagtggcgcgattttggctcactgcaacctccgcctcccgggt

SEQ ID NO: 3923 - DNA, 201 bp, Homo sapiens
agtcaaaggatgagataagaggttggcacaagatacaggtcacaaagacaccactggccaagacccaccaacactaagatggtgataaaagggacctctgktcgtccccactgctcattatatgctcattataatgcattagcatgcgaaagggctgctattctctaataaacttgctttcactttatggactgaccctga

SEQ ID NO: 3924 - DNA, 201 bp, Homo sapiens
taatttggagactcttcacagagcagcgagctgctccctaatggagtccccggattttggagagctgtgtttatggctcctgccgctccacggtccctttrctgtgccccaggagatgtgtagttgggtgatcagctggcaaacctgaggcgagctcattcctaacatacccttggtggagacagagcaataacatgggaa

SEQ ID NO: 3925 - DNA, 201 bp, Homo sapiens
ccgccccgtctgggaagtgaggagcccctccgcccgacagccgccccgtctgggaagtgaggagcgtccccgcccggcagccaccccgtccgggagggagrtgggggtcagcccccgccggccagccaccccgtccgggagggaggtggggggtcagcccccgcccagccagccgccccgtccgggaggtggggggcacct

SEQ ID NO: 3926 - DNA, 201 bp, Homo sapiens
ttagctattgactatttccaatccaagctcacaaggatccctggggtaaaaccctagttctctttgcctcatctgcctcttcttttttagttttctttttyctttctttctttctttttttttttttttggagacagagtttcactcttgttgcccaggctggagtgcaatggcgtgatgtcagctcactgcaaactccac

SEQ ID NO: 3927 - DNA, 201 bp, Homo sapiens
attttctttttctttctttctttttttttttttagacagagattcactgtgtggcccaggctggagtacagtggcacaatcttggctcactgcaacctcckcctcccgggttcaaatggttcttttgccacagcctcctgagtagctgggaatacaggcgcatgccaccacacccagctaatttttgtatttttagtagag

SEQ ID NO: 3928 - DNA, 201 bp, Homo sapiens
ggattcttttttctttcttttttttttttaggtggagttttgttcttgttgtccatgctggagtgcaataatggtgtgatctcagctcactgcaacttccrcctcccaggttcaagtgattctcctacctcagcctcccgagtagctgggattacagatgcctgccaccacgcccggctaattttttatatttttagtaga

SEQ ID NO: 3929 - DNA, 201 bp, Homo sapiens
tttcctaggggggaactgggttgtcactcttctctttctgtttcctaatatttaaagctaccttttttctcttaggagctttctttcttttttctttttcyttctttctctcgtttctttctttctcttttatttccccctcccctcctctcccctcccctcccctcccctctcctctcctcctttcctctgctctcctct

SEQ ID NO: 3930 - DNA, 201 bp, Homo sapiens
cttctggactcaagtgatcctcccacctcagcctcccaaatagctgggaccacagggcgtgccaccacacccgggtaatttttgtattttttgtagagacraggttttaccatgttgcccaggctgatcttgaactcctaagttcaaacaatccacccaccttggcctcctgaagtgctgggattacaggcgtgagccact

SEQ ID NO: 3931 - DNA, 201 bp, Homo sapiens
cttggccttccaaagtgccgagattgcagcttctgcccagccgccaccccgtctgggaagtgagaagcgtctctgcctagccgcccatcgtctgggatgcsaggagcccctctgcccggctgcccagtctgggaagtgaggagcacctcttaccggccgccatcccatctaggaactgaggagcatctctgcccggccgcc

SEQ ID NO: 3932 - DNA, 201 bp, Homo sapiens
ctcttaccggccgccatcccatctaggaactgaggagcatctctgcccggccgcccatcgtctgagatgtggggagcgcctctgccccgtctgggatgtgrggagcgcctctgcccggccgtgaccccgactgggaggtgaggagcgtctctgcctggccgccccatctgagaagtgaggagcccctccgcccggcagccg

SEQ ID NO: 3933 - DNA, 201 bp, Homo sapiens
cactgctgccttggcataactttgggagggtcattttttccatttggggtaaggctgaatgtttacaaagtggaataggctgcattactgctggtttgtakttggtggaaagagggagaaaagagcctggcacatcctctgtccttcctcttctttttttttccccttttctgttgtcaccatcacattccttgatgtcat

SEQ ID NO: 3934 - DNA, 201 bp, Homo sapiens
cggccgcccatcgtctgagatgtggggagcgcctctgccccgtctgggatgtgaggagcgcctctgcccggccgtgaccccgactgggaggtgaggagcgyctctgcctggccgccccatctgagaagtgaggagcccctccgcccggcagccgccccgtctgagaagtgaggagcccctccgcccggcagccgccccgtc

SEQ ID NO: 3935 - DNA, 201 bp, Homo sapiens
caactgacaagcaagtatagttctgacatgaatattggttgatattttgatttacattaatgagcaaggcaaaagtgaaataacaaagttgtgtattggarctttactcatttgtcaatgacgtgggcaacttcttcgctaaattaggtaagtcttcaaatactggaaggctattttctcagatttttctatgcccaaaat

SEQ ID NO: 3936 - DNA, 201 bp, Homo sapiens
catcgtctgagatgtggggagcgcctctgccccgtctgggatgtgaggagcgcctctgcccggccgtgaccccgactgggaggtgaggagcgtctctgccyggccgccccatctgagaagtgaggagcccctccgcccggcagccgccccgtctgagaagtgaggagcccctccgcccggcagccgccccgtctgagaagt

SEQ ID NO: 3937 - DNA, 201 bp, Homo sapiens
tgaccagggagcaggtgtgaccctgccaggggtctcatttcttgttggatgattctcgggacttaatgctgaaggaacaggttcccagggttagggtgtgwaactcaactgtaatatcacaaaccccttcaaagttctaccccgaggaggccaagaactctctgagcagacctagccatctgacgctaaatttctccatcc

SEQ ID NO: 3938 - DNA, 201 bp, Homo sapiens
tgctgggatagggcagtacccagtccttgtctcgagcctggtttttgagaatcttggcttccttttctgtaaatgtgtgtgtgtgtgtaagtgtgtgtgtrtatatgtgtgtgtgtgtatatagacacgtttccatgtcttttaaaatctttttgtaaatatcatttcgataatttctttagtaatatgagtgaattaaaa

SEQ ID NO: 3939 - DNA, 201 bp, Homo sapiens
atgaagttcctgaacacaccctgggaagagatatgcagcagcccaccactgtatactgtttcttttcttttcttttttttgagacagagtcttgctttgtygcttaggctggagtgcagtggcaccatcttggctcatcacaacctccacctcccagattcaagcgatcgccctgccccagcctcccaagtagctggacta

SEQ ID NO: 3940 - DNA, 201 bp, Homo sapiens
gaggatcgcttgaagccaggagttcaagaccaacctgggcaacatagggagatcctgttactaccaaaaaataccaaaaaaattaggtgggtgtactggcrtacacctgtattcctactaaagtcctggaaattggagaagagtcagtcttagtaatcacccccactttcattacatgagctttctcccttcagcatcccc

SEQ ID NO: 3941 - DNA, 201 bp, Homo sapiens
gatagggcagtacccagtccttgtctcgagcctggtttttgagaatcttggcttccttttctgtaaatgtgtgtgtgtgtgtaagtgtgtgtgtatatatrtgtgtgtgtgtatatagacacgtttccatgtcttttaaaatctttttgtaaatatcatttcgataatttctttagtaatatgagtgaattaaaattcact

SEQ ID NO: 3942 - DNA, 201 bp, Homo sapiens; identical to SEQ ID NO: 499

SEQ ID NO: 3943 - DNA, 201 bp, Homo sapiens
cccatgagatggggtagggaagatgaactccctttttcctatccttagacttccctgggcaggtgaacaagtcccatggaagtttggtgaggggcttcackgggaggcaagaggattaaagcctgtatgttcccgagagccttccttgcatctggccagctcactgctgccttggcataactttgggagggtcattttttc

SEQ ID NO: 3944 - DNA, 201 bp, Homo sapiens
tcatacttatcttggcagggcacagtggctcacatctgtaatcctagctctttgggaggctgaggtgggaggatcgcttgaagccaggagttcaagaccarcctgggcaacatagggagatcctgttactaccaaaaaataccaaaaaaattaggtgggtgtactggcatacacctgtattcctactaaagtcctggaaat

SEQ ID NO: 3945 - DNA, 201 bp, Homo sapiens
cgcctctgcccggccgtgaccccgactgggaggtgaggagcgtctctgcctggccgccccatctgagaagtgaggagcccctccgcccggcagccgccccrtctgagaagtgaggagcccctccgcccggcagccgccccgtctgagaagtgaggagcccctccgcccggcagccaccccgtctgggaagtgaggagcccc

SEQ ID NO: 3946 - DNA, 201 bp, Homo sapiens
atccacctgcctcggcctcccaaagtgctgggattacaggcgtgagccaccgcgcctgaccttatttatttagtatctatatttaccaagcactgtgcttygtgctgggatagggcagtacccagtccttgtctcgagcctggtttttgagaatcttggcttccttttctgtaaatgtgtgtgtgtgtgtaagtgtgtgtg

SEQ ID NO: 3947 - DNA, 201 bp, Homo sapiens
ctcttgaactggggaggcagaggttgcagtgagccgagatcactccactgcgctctagcctgggcaacagagcaagattccatctcaaaaaaaaaaaaaawatatctgactgagtttcctccttaataaaaccagaccctttgacatgaaatgactagacccctgcctctctctccagcctctccactggccactgctgcc

SEQ ID NO: 3948 - DNA, 201 bp, Homo sapiens
cccagtccttgtctcgagcctggtttttgagaatcttggcttccttttctgtaaatgtgtgtgtgtgtgtaagtgtgtgtgtatatatgtgtgtgtgtgtrtatagacacgtttccatgtcttttaaaatctttttgtaaatatcatttcgataatttctttagtaatatgagtgaattaaaattcacttgacaagtccct

SEQ ID NO: 3949 - DNA, 201 bp, Homo sapiens
agcccctccgcccggcagccgccccgtctgagaagtgaggagcccctccgcccggcagccgccccgtctgagaagtgaggagcccctccgcccggcagccrccccgtctgggaagtgaggagcccctccgcccgacagccgccccgtctgggaagtgaggagcccctccgcccgacagccgccccgtctgggaagtgagga

SEQ ID NO: 3950 - DNA, 201 bp, Homo sapiens
gaatataaaaggtcctttggtccatttaaattgcaaaagcagcctcaattctgaaattaaaatatctaatgtctgaaaactatcaaaaccctgaacttatmacatcttcttaccctcagtctggctccctatcaaggtgacctttcctaggggggaactgggttgtcactcttctctttctgtttcctaatatttaaagct

SEQ ID NO: 3951 - DNA, 201 bp, Homo sapiens
tcccaagtagctggactacaggtacccacaccacacccggctaatttttgtagttttagttgagacggggtttcacccgttgaccaggctagtctcgaacrcctgacctcaggcgatccacccacctcggcctcccaaagtgctgggattacagtcatgagccaccaagcccagccaagtttatatcatttaagttttaaa

SEQ ID NO: 3952 - DNA, 201 bp, Homo sapiens
cccggcagccgccccgtctgagaagtgaggagcccctccgcccggcagccgccccgtctgagaagtgaggagcccctccgcccggcagccaccccgtctgrgaagtgaggagcccctccgcccgacagccgccccgtctgggaagtgaggagcccctccgcccgacagccgccccgtctgggaagtgaggagcgtccccgc

SEQ ID NO: 3953 - DNA, 201 bp, Homo sapiens
aaaaaaaaaaaaagaataaattaggtcttcattgccctgtgttagtgtaaagctatgaaggctcccctggctcatacaacatttcattgctaatgaaaacrtggtgaggaagatattgactgcccatcaccagaaattctgattaatttgactgtttcttacccagaacctaatgaaagtgaactggaagacatggcatct

SEQ ID NO: 3954 - DNA, 201 bp, Homo sapiens
atctcaagaagtacagttatctccaaatgagcgtcatctacatgtccacaactctgatcagaccactcttagagccagtaatgattattttaatacctacyatactttgtgtatatttactcctcagtaaatatttgtagagctgcacatagggaatttctttaacacctttaaagtttatttatttaaataagaaataca

SEQ ID NO: 3955 - DNA, 201 bp, Homo sapiens
tctgttttggttcattgaatctctgtctactttgggcacctatgtgatcatggtaaatcaacctgcttgcttgcctagtcatttttttagagtattgttaygccttgacatcctctatgagacctagattcttctcggacactgtccaaacccacatacaatctttttttttttttggagatgaagtcttgctctgtcgcc

SEQ ID NO: 3956 - DNA, 201 bp, Homo sapiens
gtgaggagcccctccgcccggcagccgccccgtctgagaagtgaggagcccctccgcccggcagccaccccgtctgggaagtgaggagcccctccgcccgrcagccgccccgtctgggaagtgaggagcccctccgcccgacagccgccccgtctgggaagtgaggagcgtccccgcccggcagccaccccgtccgggagg

SEQ ID NO: 3957 - DNA, 201 bp, Homo sapiens
tggaaattggagaagagtcagtcttagtaatcacccccactttcattacatgagctttctcccttcagcatcccccaagcagagaggtaggaggccagtgwcgctgagccacctctaggtgggcacccacatggtcgattgaaaccacgggctcagccgggcgtggtggctcacgcctgtaatcccagcactttgggaggc

SEQ ID NO: 3958 - DNA, 201 bp, Homo sapiens
tctgcccacctcggcctcccaaagtgctgggattacaggcgtgagccaccgcgcctggcccccctggtttcttccttacctttgtatcacaaaacttctaraccaaacagtaaatataaacgccacaagcataccctatgcacaaaatgagagaaggatttaatttaaataacatacatcactgcaaagaaagaaatacag

SEQ ID NO: 3959 - DNA, 201 bp, Homo sapiens
aagtgaggagcccctccgcccgacagccgccccgtctgggaagtgaggagcccctccgcccgacagccgccccgtctgggaagtgaggagcgtccccgccsggcagccaccccgtccgggagggaggtgggggtcagcccccgccggccagccaccccgtccgggagggaggtggggggtcagcccccgcccagccagccg

SEQ ID NO: 3960 - DNA, 201 bp, Homo sapiens
taatcccagcactttgggaggccgaggcgggcggatcacgaggtcaggagatcgagaccatcctggctaacacagtgaaaccccgtctctactaaaaatayaaaaaattagccgggcgtggtggcgggcgcctgtagtcccagctactcaggaggctgaggtgggagaatggcgtgaaccccgggggcagagcctgcagtg

SEQ ID NO: 3961 - DNA, 201 bp, Homo sapiens
catgagccatcacagctggccaggagctttcttgggttctttgaaatctcctttctggcccctcaactgcaacacctccctttcatctggccacactgcamccctcccccacaacccccctggccatggctctgcagggaccatgctcccccaggcactagctatcccctttaaggagtcctcctgggtaaggcttacagt

SEQ ID NO: 3962 - DNA, 201 bp, Homo sapiens
gagccatcacagctggccaggagctttcttgggttctttgaaatctcctttctggcccctcaactgcaacacctccctttcatctggccacactgcacccctcccccacaacccccctggccatggctctgcagggaccatgctcccccaggcactagctatcccctttaaggagtcctcctgggtaaggcttacagtggc

SEQ ID NO: 3963 - DNA, 201 bp, Homo sapiens
ggtggtggttttcttcctcctgaagaactcttagtgtttctcgtagttcgggtctactggaaacaatttttctcagcttttatttgtctgaaaaattctttttttttttttttttttttttgagatggagtctcactctgtcacccaggctggagtgcagtggcgcgattttggctcactgcaacctccgcctcccgggtt

SEQ ID NO: 3964 - DNA, 201 bp, Homo sapiens
agccatcacagctggccaggagctttcttgggttctttgaaatctcctttctggcccctcaactgcaacacctccctttcatctggccacactgcacccctcccccacaacccccctggccatggctctgcagggaccatgctcccccaggcactagctatcccctttaaggagtcctcctgggtaaggcttacagtggct

SEQ ID NO: 3965 - DNA, 201 bp, Homo sapiens
gtcacctcctcggtgccctccctgccactccccaatgtcctcctgatggccaatgttacctggccccagggtccatttaccacctggagcacacctggtgwcgccccagtcatcaacctcagcaggtaaaggcttgagggagggcgggaagggatggaatgattgactgggatatgcattgctttgtagctggattttaga

SEQ ID NO: 3966 - DNA, 201 bp, Homo sapiens
atttcttttacaaggaaaagagaaaaacatgtcaagaatagggagtactattataagaaagcaaaagtaacaactttgaaggtttgaatttctggtgttayaaactttgtatgctaaaaagataaatgttagtttccacttctaatgatcaagtcttaggaagatataagccaataagatataagctgcttctgatggtac

SEQ ID NO: 3967 - DNA, 201 bp, Homo sapiens
tggtggaatgatttttgtgcacctggtgaaatcactttcacccttaggtattaaaatctccaaacttcatacatgcaattaaaaattattttttatttttwaaaaatctttttccacatgttctatgcaatttttcatacaactcttccttaagaaactcctagaggatgtacgcaattaaaatgaagtcaactcagaaaa

SEQ ID NO: 3968 - DNA, 201 bp, Homo sapiens
gcatgttctccaagctgatctacatctaagagctcatcacgtctggtttccaggtgggtttggccagtgggaaacccaggcaggagatcagagaggatgargagaatggggtcaggacaactatttcctcccttgtggtgacataaggtaggctgttaacagagggaaactgtcagaagtatttgaaccagagcaactcca

SEQ ID NO: 3969 - DNA, 201 bp, Homo sapiens
tgaatggacactaagtgacctgggtagcagcaaacttagaatgtgctagggagaggctgacccgcacagaaaagttcaaagtttgattttttaaaaaaaawtttttgatagagacagggtctcactatgttgcccaggctggtcttgaactcctggcttcaagtgatactccggctttggactcccaaagtgctgggatta

SEQ ID NO: 3970 - DNA, 201 bp, Homo sapiens
gcctgtccatcaccaccaaagacccgagaatcaaattcactcactgcctggtgcccaagatgcccaccaactccacagaaacaacagtaagtgggcctccytccgggacctgtcgagaaataagtatatataagtatatatgtaagtgtctgtgtatatatatagacttgtttccatgtcttttaaaagctctttgtaaat

SEQ ID NO: 3971 - DNA, 201 bp, Homo sapiens
tgaatgcactgagagacttacgcttatggcaaagtttaggggtgtgttaggaataggactattaagccaagcaaacaaaaaataatataaatattaactcygagaggaagaagttgtacaaaaaaagaaatataattcaagtatgtactatatctttgactattcataatactgtacacatcgaatatagattgaatcaaa

SEQ ID NO: 3972 - DNA, 201 bp, Homo sapiens
gctcattataatgcattagcatgcgaaagggctgctattctctaataaacttgctttcactttatggactgaccctgagttcttcttgtaccaggtccaaraaccctctcttggggtctggatcgggacccctttccggtaacaaaactgctcctctcgtggtggcttcctctactagactctcctgtatccagtaaccac

SEQ ID NO: 3973 - DNA, 201 bp, Homo sapiens
agatggggtagggaagatgaactccctttttcctatccttagacttccctgggcaggtgaacaagtcccatggaagtttggtgaggggcttcactgggagscaagaggattaaagcctgtatgttcccgagagccttccttgcatctggccagctcactgctgccttggcataactttgggagggtcattttttccatttg

SEQ ID NO: 3974 - DNA, 201 bp, Homo sapiens
ctgggatggggccactgggagtggaaggtggtcgttttcgtaagtatcaagtcttaacgcgggtgctgcctgcctccctctagcggtctagcctgaacccrtgctcctgcgcaggagagcataaccagttaatcagccagtaagcacacactaaacatctactgagtgcagggcaggaggtgcagagaaaaatcagagtgt

SEQ ID NO: 3975 - DNA, 201 bp, Homo sapiens
accaagcccagccaagtttatatcatttaagttttaaaggctgggcttggtggctcatgactgtaatcccagcactttgggaggccgaggtgggtggatcrcctgaggtcaggtgttccagaccagcctgaccaacatggagaaaccctgtctctactaaaaatacaaaattatccgggtgtggtggtgcatgcctgtaat

SEQ ID NO: 3976 - DNA, 201 bp, Homo sapiens
caaaaaaaaaaaaaaaagaaaccacgggctctcccatggaaatgtcctgattatgtccaggcttctccccctgaagtacgtggagctacgaatctacgacyggctccagcgcatcctgagggttaggacagtgaccgaaaagatctactatctgaagctccacgaaaaacacccagagattgtgtttcaattctgggtccg

SEQ ID NO: 3977 - DNA, 201 bp, Homo sapiens
cccagggttagggtgtgaaactcaactgtaatatcacaaaccccttcaaagttctaccccgaggaggccaagaactctctgagcagacctagccatctgaygctaaatttctccatccagcctgaaaacagcctcctgtcatccccccagcccagcgagcccctcgtgctgctggcggctgagcagaccagtggcagtttc

SEQ ID NO: 3978 - DNA, 201 bp, Homo sapiens
gtgaggagcccctccgcccgacagccgccccgtctgggaagtgaggagcccctccgcccgacagccgccccgtctgggaagtgaggagcgtccccgcccgscagccaccccgtccgggagggaggtgggggtcagcccccgccggccagccaccccgtccgggagggaggtggggggtcagcccccgcccagccagccgcc

SEQ ID NO: 3979 - DNA, 201 bp, Homo sapiens
ctccgcccgacagccgccccgtctgggaagtgaggagcgtccccgcccggcagccaccccgtccgggagggaggtgggggtcagcccccgccggccagccrccccgtccgggagggaggtggggggtcagcccccgcccagccagccgccccgtccgggaggtggggggcacctctgcccggccgcccctactaggaagtg

SEQ ID NO: 3980 - DNA, 201 bp, Homo sapiens
ctatttcttgttaaataaatccctttctgccatagccagctgtggctgctccacattgtttctccttcaaaatgagggaagaaacaacagcccttgctgamtgggctcatccttgaagttgatttctcagaatctatttcttagatgaaaacaccacacggattggtgaaatttctaatggccaatacacacaccatttaa

SEQ ID NO: 3981 - DNA, 201 bp, Homo sapiens
tgtgagccaagtgaccttgggagaggtaagatggtgtttccaacaaggtgcttctctacttccaccaataaacttccaagtgagtccctaatttttgcagrttgggctatagggaggctccagtttgggaaaggactgactgagaacaggagcagtttttggaaaaataggtgggaaaagttactgtctgtgtgtacagag

SEQ ID NO: 3982 - DNA, 201 bp, Homo sapiens
gcctcctgtcatccccccagcccagcgagcccctcgtgctgctggcggctgagcagaccagtggcagtttctcacagctctcaggaaagccccagctcacrgcagacaggtgggtcctctgtggggtcagctccagatcccttcctccagtgtgaagtcatggggtcaacgaacctatctcagttccttctttgtattctt

SEQ ID NO: 3983 - DNA, 201 bp, Homo sapiens
cagggttcacaggccctttctgggccacttgtccaaagtggatggttacagggaatgaaggttgctgttagaaactctgctctgaaatccatcctcctcastctgggatggtttagaaacagccttgtttgaaagcaaagacactgggtaaataggtgttgcccagatcctaccattccctaaaaggatggtggtgacatg

SEQ ID NO: 3984 - DNA, 201 bp, Homo sapiens
aagtttatatcatttaagttttaaaggctgggcttggtggctcatgactgtaatcccagcactttgggaggccgaggtgggtggatcgcctgaggtcaggwgttccagaccagcctgaccaacatggagaaaccctgtctctactaaaaatacaaaattatccgggtgtggtggtgcatgcctgtaatcccagctactcgg

SEQ ID NO: 3985 - DNA, 201 bp, Homo sapiens
cccaagatgcccaccaactccacagaaacaacagtaagtgggcctccttccgggacctgtcgagaaataagtatatataagtatatatgtaagtgtctgtrtatatatatagacttgtttccatgtcttttaaaagctctttgtaaatatcattttgataatttctattcagtagtatgaatgaattaaaatttatttgac

SEQ ID NO: 3986 - DNA, 201 bp, Homo sapiens
cttcagggaaacaccagtgagaagcacgtgtctcccctgatgagaagagaagtgctaggagattgagcctcagtcacaggcagatgtgtgtcttgacagcyacggtgtgtgtcttgagagtttaaaagatgtgaaagaatgatttgacccattggcttgctcgctgaataagcaccaaggcaagagagcctggtagttgtc

SEQ ID NO: 3987 - DNA, 201 bp, Homo sapiens
aggcaagaggattaaagcctgtatgttcccgagagccttccttgcatctggccagctcactgctgccttggcataactttgggagggtcattttttccatktggggtaaggctgaatgtttacaaagtggaataggctgcattactgctggtttgtagttggtggaaagagggagaaaagagcctggcacatcctctgtcc

SEQ ID NO: 3988 - DNA, 201 bp, Homo sapiens
cttaaactcaggaagcaaaggttgcagtgagctgaaattatgccactttactccagcctgggcgaaagagtgaaactccatctcaaaaaaaaaaaaaaaarattagtatgttactgtgtatcttattacaattaagaagtaaatgttttaatgcatttcctagtataataggtaaagaagtggcatctctgattttcaatg

SEQ ID NO: 3989 - DNA, 201 bp, Homo sapiens
gagtctcactccgttgccctggcatggtctaggctcactgcaacctctgcctcctgggttcaagcaattctcctatctcagcctcccgagtagctaggacyacaggcgtgcaccacctcgcccagctaatttttttgtgttttagtagagatggggtttcaccatgttggccaagatggtcttgatctcttgacctcatga

SEQ ID NO: 3990 - DNA, 201 bp, Homo sapiens
agcggggaggatatcccagacagaggggcttcaaagtacctaaggaaaggcagggaggctggaatgcaaggtctgcaagacacagacccattcaaatggartgggaaagtagccaggggttataggagagaaggtgggaacagtttgaggtgggtcttgggcttaatttggagactcttcacagagcagcgagctgctccc

SEQ ID NO: 3991 - DNA, 201 bp, Homo sapiens
ggacactaagtgacctgggtagcagcaaacttagaatgtgctagggagaggctgacccgcacagaaaagttcaaagtttgattttttaaaaaaaatttttygatagagacagggtctcactatgttgcccaggctggtcttgaactcctggcttcaagtgatactccggctttggactcccaaagtgctgggattataggc

SEQ ID NO: 3992 - DNA, 201 bp, Homo sapiens
gtgatccacccgcctcggccttccaaagtgctgggattacaggtgtgaaccactgcacctagccctttttctctttttaaatatacaattttaggatccctttttttttttttttgagatgggagtctcattctgtcacccaagctggagcgcagtggcacaatctctgctcactgcaacctctgccttctggactcaagt

SEQ ID NO: 3993 - DNA, 201 bp, Homo sapiens
gccaccacatccagctaatttttgtatttttagtagagatggggtttcactaggttggccaggatggtctcgatctcctgacctcatgatctgcccacctyggcctcccaaagtgctgggattacaggcgtgagccaccgcgcctggcccccctggtttcttccttacctttgtatcacaaaacttctagaccaaacagta

SEQ ID NO: 3994 - DNA, 201 bp, Homo sapiens
gaagagctccccaatagtcttccaataaattcccttcggcttgggttggctgcatgttttctacgtgtacacccatgaagtctaattgatgtggttctgtrcccagaaacatggaagctgcgtagggaaacgtgccagccatatgtgtgtacctgccagtgcctgggtcctactagactgacccagttaaagtgtctattt

SEQ ID NO: 3995 - DNA, 201 bp, Homo sapiens
acggggtttcaccatgttggccaggctggtcttgaactcctgacctcaagtgatccgcccacctcggcctcccaaagtgctaggattacaggtgtgagccrctgcacccagctgaaagtggtttttaagttaaattttaacaatgttttctttttcttctattgctttcaataaccccaaaattccctgggctcctacagg

SEQ ID NO: 3996 - DNA, 201 bp, Homo sapiens
cctattctccatgcctggttcttttaaccttcagttggtatgaagagctccccaatagtcttccaataaattcccttcggcttgggttggctgcatgtttyctacgtgtacacccatgaagtctaattgatgtggttctgtgcccagaaacatggaagctgcgtagggaaacgtgccagccatatgtgtgtacctgccagt

SEQ ID NO: 3997 - DNA, 201 bp, Homo sapiens
tcactgccccacatttccatatttctacatgtccttaaagcactggagctggaaaaaggcatgattagaaagtgagttggttttttttgttttgtgttgtyttttgagaaggagtctcactctgtcacgtaggctggaagtggtgccatctctgctcactgcaagctccgcctcctgggttcaagcaattctcatgcctca

SEQ ID NO: 3998 - DNA, 201 bp, Homo sapiens
gctcctttctgacccatgtacctgaggctgatttccaggtcactaagcccgggaactggagagatgtctgtgaagggtctgccaccgtgatcctcggggtsacctcctcggtgccctccctgccactccccaatgtcctcctgatggccaatgttacctggccccagggtccatttaccacctggagcacacctggtgtcg

SEQ ID NO: 3999 - DNA, 201 bp, Homo sapiens
agtggtttttaagttaaattttaacaatgttttctttttcttctattgctttcaataaccccaaaattccctgggctcctacaggaacaatgacactgccrttgaaatagacaactgcagcagctacaagataccctctccagtggcatctccaatcaatttgaatatacccatgagagctgccttgagccacagcctctg

SEQ ID NO: 4000 - DNA, 201 bp, Homo sapiens
aatagctaacatctttagaaatttgctatcttctaagcactatgctgactttacaaagatcacataaaccacaccacaagccattgagaagtagatcttaytattacattttataaatgataaaccggagccacagagaggttcaagaacttgcttaaggtcacacaggtagtaagtagcagagccaggacttgaagccag

SEQ ID NO: 4001 - DNA, 201 bp, Homo sapiens
tgtatcttattacaattaagaagtaaatgttttaatgcatttcctagtataataggtaaagaagtggcatctctgattttcaatgagtttcagcattgttrcatacatatatacatatgtaacaatcgttacatacatatatacatatgtaacgattgttacatacatatatacttatgtaacgattgttacatatatacg

SEQ ID NO: 4002 - DNA, 201 bp, Homo sapiens
taaatgttttaatgcatttcctagtataataggtaaagaagtggcatctctgattttcaatgagtttcagcattgttgcatacatatatacatatgtaacratcgttacatacatatatacatatgtaacgattgttacatacatatatacttatgtaacgattgttacatatatacgtatgtaacgattgttacatatat

SEQ ID NO: 4003 - DNA, 201 bp, Homo sapiens
atgttttaatgcatttcctagtataataggtaaagaagtggcatctctgattttcaatgagtttcagcattgttgcatacatatatacatatgtaacaatygttacatacatatatacatatgtaacgattgttacatacatatatacttatgtaacgattgttacatatatacgtatgtaacgattgttacatatatacg

SEQ ID NO: 4004 - DNA, 201 bp, Homo sapiens
tagtataataggtaaagaagtggcatctctgattttcaatgagtttcagcattgttgcatacatatatacatatgtaacaatcgttacatacatatatacwtatgtaacgattgttacatacatatatacttatgtaacgattgttacatatatacgtatgtaacgattgttacatatatacgtatgtaacaatcgttaca

SEQ ID NO: 4005 - DNA, 201 bp, Homo sapiens
gtctctactaaaaatacaaaaaattagccgggcgtggtggcgggcgcctgtagtcccagctactcaggaggctgaggtgggagaatggcgtgaaccccggsggcagagcctgcagtgagccgagatcgcgccactgcactctagcctcggcggcagcgagactccgtctcaaaaaaaaaaaaaaaagaaaccacgggctct

SEQ ID NO: 4006 - DNA, 201 bp, Homo sapiens
gcatacatatatacatatgtaacaatcgttacatacatatatacatatgtaacgattgttacatacatatatacttatgtaacgattgttacatatatacktatgtaacgattgttacatatatacgtatgtaacaatcgttacattgttatgtatttgtagttatatataacacaagattgtttttatatatatatatat

SEQ ID NO: 4007 - DNA, 201 bp, Homo sapiens
gttgaccagggagcaggtgtgaccctgccaggggtctcatttcttgttggatgattctcgggacttaatgctgaaggaacaggttcccagggttagggtgwgaaactcaactgtaatatcacaaaccccttcaaagttctaccccgaggaggccaagaactctctgagcagacctagccatctgacgctaaatttctccat

SEQ ID NO: 4008 - DNA, 201 bp, Homo sapiens
atgacacttatccttattgatggatttcttcaatgctactattgtgccttacatgtgccttgtattatagcatttttatagcatttctcacccaattgtgrctatttgtttacatgtctgtctccttggtggaactgtgaactctgtcataacagatgccattttatgtcagttagacttctttggttgccagtaagagaa

SEQ ID NO: 4009 - DNA, 201 bp, Homo sapiens
ttttttgagaaggagtctcactctgtcacgtaggctggaagtggtgccatctctgctcactgcaagctccgcctcctgggttcaagcaattctcatgcctyagcctcccgagtagctggaattacaggcgtgtgccacatgcctggctaatttttgtatttttagtacagacggggtttcaccatgttggccaggctggtc

SEQ ID NO: 4010 - DNA, 201 bp, Homo sapiens
tgaacgttcagatctgcactcaggacagagcagccactgcagttgaccagggagcaggtgtgaccctgccaggggtctcatttcttgttggatgattctcrggacttaatgctgaaggaacaggttcccagggttagggtgtgaaactcaactgtaatatcacaaaccccttcaaagttctaccccgaggaggccaagaac

SEQ ID NO: 4011 - DNA, 201 bp, Homo sapiens
ccaattgtggctatttgtttacatgtctgtctccttggtggaactgtgaactctgtcataacagatgccattttatgtcagttagacttctttggttgccmgtaagagaagctgactctaatctaaaccaaaaggaattcattggacggatgtgggttggctcacaaaatcaaagggacaactgcggagccgatcttggaa

SEQ ID NO: 4012 - DNA, 201 bp, Homo sapiens
gtaagagaagctgactctaatctaaaccaaaaggaattcattggacggatgtgggttggctcacaaaatcaaagggacaactgcggagccgatcttggaadgctctgacaccagaacagctctgtgaattcagataggggtagtgaattgaccatttcatcaaatgctgcagcaagctaggtggtttccccaaaggaaatt

SEQ ID NO: 4013 - DNA, 201 bp, Homo sapiens
tcattgagaacgggccatgatgacgatggcggttttgtggaatagaaaagggggaaaggtggggaaaagttagagaaatcagattgttgctgtgtctgtgyagaaagaagtagacatgggagacttcattttgttctgtactaagaaaaattcttctgccttgggatgctgttgatctatgaccttacccccaaccccatg

SEQ ID NO: 4014 - DNA, 201 bp, Homo sapiens
tcccatgagatggggtagggaagatgaactccctttttcctatccttagacttccctgggcaggtgaacaagtcccatggaagtttggtgaggggcttcamtgggaggcaagaggattaaagcctgtatgttcccgagagccttccttgcatctggccagctcactgctgccttggcataactttgggagggtcatttttt

SEQ ID NO: 4015 - DNA, 201 bp, Homo sapiens
atggggtttcaccatgttggccaggctgctcttgaactcctgacctcgtgatccaaccgcttcagcctcccaaagtgctgggattacagacatgagccacmgagctcagccgcatttttaatattctcaaatactttaagaatctgagaataatgaaggcactgaacaacccaccactaccaacaccaaccattcaggggt

SEQ ID NO: 4016 - DNA, 201 bp, Homo sapiens
gtggacaatatagcctaccctcatggagcttacattctactgaaggagagagacttagaacaaataatcccacacagatttttttgttttttttttaaacrgagtatcctctgttgcacaggctggagtgcagtggcacatcttggctcactgcagccgctgcctcctgggttcaagcgattctcctgcttcagcctcctg

SEQ ID NO: 4017 - DNA, 201 bp, Homo sapiens
tgttgaagatgccaaggcagccatccccgctgtagagagtagagcagtaggcttagacgcaaggtctatttgaggaagacatttcacacagggaggggagrggaggcaaggcagctttgaagttgtacctggctgtcagcagcagctttttggctggatccagagccatgtctgcgatgtactcttcatgttgcctcatat

SEQ ID NO: 4018 - DNA, 201 bp, Homo sapiens
gtgtctttgaaaatttccatactatagtgttaagattatgctagagagttaatatccattttagtattaacaatagaaaactcagtattgtggggacaagrctctttcaagggatcttcatggtcaaaactatttctataataattcttttgttttgttttgttttgttttgttttgttttgttttgtttgagacggagtc

SEQ ID NO: 4019 - DNA, 201 bp, Homo sapiens
aggttccttttgctcggtatttggcaatgaataaactgaccaacattaaacgctaccacatagcaaaggtatatcggcgggataacccagccatgacccgwggccgataccgggaattctaccagtgtgtgagtgttgggaaaccgtggggcaggatgagttacttggggctctctcaagccagcagaatctattgagtac

SEQ ID NO: 4020 - DNA, 201 bp, Homo sapiens
catgactattgcaggtcatgtaagaaaagagattcccccctcactatgcattggttccttgcaggtaaacgatcgacgcattctagatgggatgtttgctrtctgtggtgtttctgacagcaagttccgtaccatctgctcctcagtagacaagctggacaaggtaacaacccaagtacttgacttcttttcccagatccc

SEQ ID NO: 4021 - DNA, 201 bp, Homo sapiens
gcccaggggtccctgactggtgtctgtctgcctaggtgtcctgggaagaggtgaagaatgagatggtgggagagaagggccttgcacctgaggtggctgaycgcattggggactatgtccagcaacatggtgaggaacagaaccaagcctccccagcagccgtcccactgccctcagtcctaaagttgaaactgttctgtg

SEQ ID NO: 4022 - DNA, 201 bp, Homo sapiens
atttttttttttttttcagatagagtcttactctgtcgcccaggctggagtgcagtggcacgatctcagctcctgcaacctccgcctcccgggttcaagcrattctcctgtctctgcctcccgagtagctgggattacaggcacatgccaccacgcccggctaatttttgtatttttagtagatacggggtttcgccatac

SEQ ID NO: 4023 - DNA, 201 bp, Homo sapiens
tccaggcaagaaggtcaaccctccttaccttttttgtttccttgtcagcctcactcacaagtctgtctccccaggtggggtatccctggtggaacagctgstccaggatcctaaactatcccaaaacaagcaggccttggagggcctgggagacctgaagttgctctttgagtacctgaccctatttggcattgatgacaa

SEQ ID NO: 4024 - DNA, 201 bp, Homo sapiens
cccttcagcggcctcatctgggttgtgctgaccctagatggccgggatgggcatgaggtggccaaggatgctgtgtctgtacggctgctgcaggcactcaktgagtctggggccaacctcctgtggtctgctggggctgaggcaggtaccatggttaaacagtgactccattctttctccacaggcaccctgaatgggcat

SEQ ID NO: 4025 - DNA, 201 bp, Homo sapiens
tcatccccagtctcctccttttcttcctgagccatggagtcttctccctcttccctcagtcctgcgaagaagtcatcggtgctccaagtcttgctgctcaragcccgcagtggtcctcccttttttttgcgccgacggtagtcatccaccaccacagctcgcagctgggccatgtcccaaaacttgaggcgctggtcatgg

SEQ ID NO: 4026 - DNA, 201 bp, Homo sapiens
agacagagtctcactctgtcaccaggctggagtgcagtggcatgaccttggctcactgcagcctccacctcctgggttcaagcaattctcctgcctcagcstcccaggtagctgggactacaggtgtgtgccaccacgcccagctaatttttgtattttttagtagagatggggtttcaccatgttggccaggatagtctc

SEQ ID NO: 4027 - DNA, 201 bp, Homo sapiens
agatcatgtgcgagatcctgagttcacttcagataggcgacttcctggtcaaggtcagagctgacaaggctgggagggcaaagttgggcctggcctctcayaagagaagatccttgtgcagagggaccagtagcctaagtgaccatgactattgcaggtcatgtaagaaaagagattcccccctcactatgcattggttcc

SEQ ID NO: 4028 - DNA, 201 bp, Homo sapiens
gttatgtttattattatgaccacatttatttatgttttctccaggaaacactgatgggaaagtatggggaagactccaagcttatctatgacctgaaggaycagggcggggagctcctgtcccttcgctatgacctcactgtatctttctaaacttgggctcttgagactttggatggattggcactcacttggctcaggt

SEQ ID NO: 4029 - DNA, 201 bp, Homo sapiens
ccaaaacaagcaggccttggagggcctgggagacctgaagttgctctttgagtacctgaccctatttggcattgatgacaaagtgagtcaagttggggacrggatcccttctgagctctggggcttcaggtccctgatcttaatctggcactgaccattttcttatctccacagatctcctttgacctgagccttgctcga

SEQ ID NO: 4030 - DNA, 201 bp, Homo sapiens
agtgggcatgttcgaccccaaagggcgcaaggtgccatgtgtggggctcagcattggggtggagcggattttctccatcgtggaacagagactagaggtaggtcctaggaggtaggtagaagatagtctgagcaggtggtggcacctaagctatctgatctccaagggagcaagtggtgctgctttgggcagggagcatct

SEQ ID NO: 4031 - DNA, 201 bp, Homo sapiens
acaacagctctccaccttgatccttcagatcatacatgagcccagagtcctctccatacttctcagtcagggtttcctataggggtcaaacagaatgagcsacagttgaaagcatgactccaaaacacagatgagaagccctttgggacactgaacgccattgaagaagtgagtgaggttgcacgtactctttcttctccc

SEQ ID NO: 4032 - DNA, 201 bp, Homo sapiens
cacaaagcatctgctaagagagcattagaatctttccgaagtaaggcaaaacttaatcagtgacattaccagcacgctgtatgcccttccaaaaatagagratgtggtggttccatactatggcgattatctgccctaagagaagtccaagttcaagtacacaatcccttatctgcaattccaaaatccaaaactctctga

SEQ ID NO: 4033 - DNA, 201 bp, Homo sapiens
acagggacctatggcacctgggggcagcttaggtttgggttaagttgtggtgaggggccttgccctcccgctcccagcccagggtccaacctgacccagtkatcttccatggccgttccttgtcccacccccacccgatcataccttcccccctctgccacagcttagcatgaatcttctttattgtcctgatttgtcctc

SEQ ID NO: 4034 - DNA, 201 bp, Homo sapiens
aagttcaagtacacaatcccttatctgcaattccaaaatccaaaactctctgacatctgaaaatgtttttctgagattcattttgaggtaaattctaagaygaactcagtctacttctgatctttagtcatctcatttactaggaatattcatatatttcgcttaaaaatgttactgtttgagtccaagagtttcaggaaa

SEQ ID NO: 4035 - DNA, 201 bp, Homo sapiens
cacctgggggcagcttaggtttgggttaagttgtggtgaggggccttgccctcccgctcccagcccagggtccaacctgacccagtgatcttccatggccrttccttgtcccacccccacccgatcataccttcccccctctgccacagcttagcatgaatcttctttattgtcctgatttgtcctctttgttggttttta

SEQ ID NO: 4036 - DNA, 201 bp, Homo sapiens
acaatgtggaagctgcctcagactaagcccccagcacacacccctccatcccaccataaccagctgtactttcatgagagtgacagaggtcaggtccccaractgaggttctgagagcagctcaaaccgacgcctcttaatgttgaagatgccaaggcagccatccccgctgtagagagtagagcagtaggcttagacgca

SEQ ID NO: 4037 - DNA, 201 bp, Homo sapiens
tctcaagattcaattcattccttcagtcactgtcatccccagtctcctccttttcttcctgagccatggagtcttctccctcttccctcagtcctgcgaaraagtcatcggtgctccaagtcttgctgctcagagcccgcagtggtcctcccttttttttgcgccgacggtagtcatccaccaccacagctcgcagctggg

SEQ ID NO: 4038 - DNA, 201 bp, Homo sapiens
cctggtgaggacccgtctcaagattcaattcattccttcagtcactgtcatccccagtctcctccttttcttcctgagccatggagtcttctccctcttcyctcagtcctgcgaagaagtcatcggtgctccaagtcttgctgctcagagcccgcagtggtcctcccttttttttgcgccgacggtagtcatccaccacca

SEQ ID NO: 4039 - DNA, 201 bp, Homo sapiens
ctcagtcccaccccaaagaatctatgttgtatttacaattacacgtgtaatatatatgaggtcaggtcttcaccacacaagcttcctcactgtatatggatttttttttttttttttgagacagagtctcggtctgttgcccaggctggagtacagtggcacaatcacggctcactgcaatctctgcctcctggttcaagc

SEQ ID NO: 4040 - DNA, 201 bp, Homo sapiens
ggacccagcctgagatggtcccatctgcagggccccgcaccagttggagcagatgcctccccaccaccaattgccaaaggtccaataaaatgcctcaaccmcggagtctgcgtgtgtcagtgatgcctagccccgccttccccagcagaccaatgtagggatggaaaagggagaaaaacagtaaacttgtgaccctgaggt

SEQ ID NO: 4041 - DNA, 201 bp, Homo sapiens
tgtcttgccctagcttagagtttgtttacactggtagagtgaatagctgctacggggcaagtacttcctcacatcagtgctttgagtgcatcttcttgtgytgcactgtagggtattataaattcatatccaggccgggtgtgttggcttttgcctgtaatcccagcactttgggaggctgaggcgggtggatcacctgag

SEQ ID NO: 4042 - DNA, 201 bp, Homo sapiens
gtactggctagctgggtctgcccttcctgtgacctaagggctgtccaggcttccctcacctgatgactccatcagtggagccagtacacagcagactctckgtgactggaaccatgcagtcgatagattcagctctcagggcaaagcggtcacttgtggccccaaagccattccaattgaagaggtagatggtaccttcac

SEQ ID NO: 4043 - DNA, 201 bp, Homo sapiens
tgagccttggaaacacgtctttccagttggccctgctccacatctagaacatggatggctttgtccttggagacagtaatgagctctggggaaaaggtgcycaggtcatggtgctgctcactgctcccttccaccacattgctggttgtcttccccagtactcactctgcccatcttcagagaaggccacagctcggcagg

SEQ ID NO: 4044 - DNA, 201 bp, Homo sapiens
cactgccctcagtcctaaagttgaaactgttctgtgttatgtatgtaggggagtgagtgtgtctatgcatatgtacacacacatgcatgggcgactagagkccaggcaagaaggtcaaccctccttaccttttttgtttccttgtcagcctcactcacaagtctgtctccccaggtggggtatccctggtggaacagctgc

SEQ ID NO: 4045 - DNA, 201 bp, Homo sapiens
gagctgagttgggcctggtctcaaaatcccgactagagcctgctttgtttgctccttgaaggtgttagcccagctctcttttatctgccccttccccaggytttggaggagaagatacggaccacggagacacaggtgcttgtggcatctgcacagaagaagctgctagaggaaagactaaagcttgtctcagaactgtgg

SEQ ID NO: 4046 - DNA, 201 bp, Homo sapiens
agcagaccaatgtagggatggaaaagggagaaaaacagtaaacttgtgaccctgaggttcttgtctccagcgtccaccctgcggcttgggagctcctcctsgggaggcagcccccgtacatacgcacccgcgactttgcagctttcacctgaaggtctgagcgaagcccgggcggcgcacgtgcagtggatacctccaccc

SEQ ID NO: 4047 - DNA, 201 bp, Homo sapiens
tagcccagctctcttttatctgccccttccccaggctttggaggagaagatacggaccacggagacacaggtgcttgtggcatctgcacagaagaagctgstagaggaaagactaaagcttgtctcagaactgtgggatgctgggatcaaggtatgggaggcaagccccagggtggcagcaaacttaggtgtgctggacac

SEQ ID NO: 4048 - DNA, 201 bp, Homo sapiens
taggtttgggttaagttgtggtgaggggccttgccctcccgctcccagcccagggtccaacctgacccagtgatcttccatggccgttccttgtcccaccsccacccgatcataccttcccccctctgccacagcttagcatgaatcttctttattgtcctgatttgtcctctttgttggtttttatttgtggggaagggc

SEQ ID NO: 4049 - DNA, 201 bp, Homo sapiens
tctaaggcattataaacactctagagactatttaaagtatataggaggatgtgcatataattttatgtcaagggcttgagcatccatggatttttggtatycacatggggcccagaacaaatctcctgtggatactgagggatgattctatttaatacatgtatttgaaattgaattccaaaggagaggggagatggtctg

SEQ ID NO: 4050 - DNA, 201 bp, Homo sapiens
ctaagcccaaaaagtttaccatctcatttctccattttcagtgagtttgaaatgttaggtcctgcttttttcaatatatgttagttcaaggtatatttgcrcaagatttctttgtgatcccacccaacccctctttatcatctttgaaagccccagcctggacaaagattgggtctggaccactgtggaggagatatttgt

SEQ ID NO: 4051 - DNA, 201 bp, Homo sapiens
aagctgattcaaataaatcaaccataaaaagatattattgaggcaactggggaaaactgaccatggcttagcattagataatattaaggagttgctgttasttttgttagttataataaagatagagtctttggggttttttaaatgtccgtatgagttagagattcatactgaagtatttatggatgaaatgatatgacg

SEQ ID NO: 4052 - DNA, 201 bp, Homo sapiens
aggtcatagcggagggacaacagctctccaccttgatccttcagatcatacatgagcccagagtcctctccatacttctcagtcagggtttcctatagggstcaaacagaatgagccacagttgaaagcatgactccaaaacacagatgagaagccctttgggacactgaacgccattgaagaagtgagtgaggttgcacg

SEQ ID NO: 4053 - DNA, 201 bp, Homo sapiens
tttcctataggggtcaaacagaatgagccacagttgaaagcatgactccaaaacacagatgagaagccctttgggacactgaacgccattgaagaagtgartgaggttgcacgtactctttcttctccccttaccttcagctcaaatgctggggtgtccatcccctttgctccatgacgtttaaagcagctgataaccaaa

SEQ ID NO: 4054 - DNA, 201 bp, Homo sapiens
atgtaagaaaagagattcccccctcactatgcattggttccttgcaggtaaacgatcgacgcattctagatgggatgtttgctatctgtggtgtttctgayagcaagttccgtaccatctgctcctcagtagacaagctggacaaggtaacaacccaagtacttgacttcttttcccagatcccaccctgccttgggaaat

SEQ ID NO: 4055 - DNA, 201 bp, Homo sapiens
tagtacttctgtgtgaatgctttggtggacccttaaggtactacatggaccagcctgggcaacatgatgagaccctgtctctacagattaaaaaaaaaaatttttttttttttttaaattagctgagtatggtggtgtgtgcctgtagtcaggaggctgaggtgggaggatcacttgagcttgggaggtcgaagctgcagt

SEQ ID NO: 4056 - DNA, 201 bp, Homo sapiens
atgggatgtttgctatctgtggtgtttctgacagcaagttccgtaccatctgctcctcagtagacaagctggacaaggtaacaacccaagtacttgacttyttttcccagatcccaccctgccttgggaaatggaaaacaagattgagagagagagaggtgcatgcctctatacccaccagaggaaggttagccccaggat

SEQ ID NO: 4057 - DNA, 201 bp, Homo sapiens
tgtgctcaaaacccccaaggtaatatcattcctgtagggagccactgagaaagtctctaactctactcacggggcgcttatgtctgcctccctaaaccagstcattgaggaggatctgaaatgctgcagaggagaggacagtcgctctgggcgctgggctggactggactctacctgagtcattctgggatggcaaagtga

SEQ ID NO: 4058 - DNA, 201 bp, Homo sapiens
gtgggcatttgaataacaaagaagatgacaacaagagagtgagggtccaaagggcccactcctgttgtggacacagaccagtctttgctccaataagaagrgggacaagaatggcttggagggagaggccctgtcttttattatcttggttgtggccagcagattccaaaagagagccattctttggaatggtaattgttc

SEQ ID NO: 4059 - DNA, 201 bp, Homo sapiens
gacatcacagggcaaggactgctgtaatgcccttaagacattccccagtttttacttttgacattattcgaatctcaggcatcaaaaaacatttatgtttrttggtctgataacctattcctagtagtttatcatcaagaaaaatacttttttttaaaaaaaaaaagagctatatacctaaatattagatattgaaatgtt

SEQ ID NO: 4060 - DNA, 201 bp, Homo sapiens
tcaaattcagctcgcaccgggccgctgccatggccaaaaaggccctggtggaaggtaggctggggcgggggtgctggttggggccaaacgcgttctgcccrgcactttatactgagcatagctgttaaagttacaagatcttagagtcaaacatgccagaatttgcaaccttttactatttgatctcagatttttaaaact

SEQ ID NO: 4061 - DNA, 201 bp, Homo sapiens
tccctgaagaccgctggctaaccctctccctgcaggattttgacattgctgggaactttgatcccatgatccctgatgcagagtgcctgaagatcatgtgygagatcctgagttcacttcagataggcgacttcctggtcaaggtcagagctgacaaggctgggagggcaaagttgggcctggcctctcacaagagaagat

SEQ ID NO: 4062 - DNA, 201 bp, Homo sapiens
ccagcctggacgatggcaaaaccctgtcttttcaaaaaataattcatatcctctctggggatgcagcccaataagcaagactcttgcctggtgaggacccrtctcaagattcaattcattccttcagtcactgtcatccccagtctcctccttttcttcctgagccatggagtcttctccctcttccctcagtcctgcgaa

SEQ ID NO: 4063 - DNA, 201 bp, Homo sapiens
aagtctctgctgttcactcacatgtgtttcattcaaaattatccctaatgtgctctagctagtcttcctcattttctttaaaaaaaaaaaaaaaaaaaaargatcccagtctcacatgacaagaccctcctcctttgcctctagctttgccatctgaagacacaaagtcgttacaataagtaaaagagaaattaaattcag

SEQ ID NO: 4064 - DNA, 201 bp, Homo sapiens
aaccaaatcaagaattttctccctcacaaccatatgctgaggactaagatccctggtaccctggaaaccaaaagcagccatagtgaaaacaaaaacaaaamataagtccatttcagacaaggagttaaactacacttattatgtaatctcaggtctggagctgaaatctactgagttcaaatgactctgagccgcacctag

SEQ ID NO: 4065 - DNA, 201 bp, Homo sapiens
tgctggtgccttagcatacattaagacagtgacactaaactgtactaatagccagtgtgttcttcactgccatgcactcacagtaagtaaataaataaatwaattaattaattaatttaaaaaattcagttttacttaactatgtcattgataaaatggtaaaactttgtttgttttggggtttctttggagacagaatct

SEQ ID NO: 4066 - DNA, 201 bp, Homo sapiens
atttcttgaatgagctaaaaaactcagactgataagatgctgtgattgaatatcaataaaagatctgtgccctattgttcacgatagcacaaagcatctgytaagagagcattagaatctttccgaagtaaggcaaaacttaatcagtgacattaccagcacgctgtatgcccttccaaaaatagaggatgtggtggttcc

SEQ ID NO: 4067 - DNA, 201 bp, Homo sapiens
tgggattacaggcgggtaccaccacatgcagctaattttttgtatttttacagaaatacaaaaaacatacaagaaacctacaacatgtttcaccatgttgmccaggctggtttggaactcttgagctcaggcaatctgcccaccttggcctcccaaagtgctaggctgagccaccatgcctggccaaaaacttactgattt

SEQ ID NO: 4068 - DNA, 201 bp, Homo sapiens
gcagacatttttacaacaataaacgaagtgagcctcgtcacctcaaggaaaacatctgacagtacttgtaggcagtgaaaaaattcaagtattcaggtgamagttagaattttagaaaacttagtcagggcatggtggctcaagcctataatcccagcactttgggagaccaaggcgggcggatcacctgaggtcgggagt

SEQ ID NO: 4069 - DNA, 201 bp, Homo sapiens
ttgttttttttttaaacagagtatcctctgttgcacaggctggagtgcagtggcacatcttggctcactgcagccgctgcctcctgggttcaagcgattcycctgcttcagcctcctgagtagctgggactacaggtgcccaccaccatgcccagctaatttttgtatttttagtagagacggggtttcaccatattggcc

SEQ ID NO: 4070 - DNA, 201 bp, Homo sapiens
taaaagctcacccataatggatcctgccattacttctcaaaagtagagctaagaacagggtgccagcttggacaccctctgtccctgaggacagcagaagscagccttcatcttctgctcttgtcccctgcaggctgagctgctgtacaagaagaacccaaagctactgaaccagttacagtactgtgaggaggcaggcat

SEQ ID NO: 4071 - DNA, 201 bp, Homo sapiens
ggtgcggaagctgcccaggggtccctgactggtgtctgtctgcctaggtgtcctgggaagaggtgaagaatgagatggtgggagagaagggccttgcaccwgaggtggctgaccgcattggggactatgtccagcaacatggtgaggaacagaaccaagcctccccagcagccgtcccactgccctcagtcctaaagttga

SEQ ID NO: 4072 - DNA, 201 bp, Homo sapiens
atctgccttggcctcccgaagtgctgggattacaggcgtgagccactgtgcctggcctcaggtaggtgtttgttattaggccaggaaatgttctgttatcygagagagagtgtttagaaaaatggcttaaagaaaagagttctaagaattttagaaaatagacccaaacttaaaagggaatggagtttggaaggcagatag

SEQ ID NO: 4073 - DNA, 201 bp, Homo sapiens
caggtttagagagaggaaaactgtaacttgaagacaagggaaccagctcaaggacacagaacaagcctgtggaatgataagatatggatttcttgaatgarctaaaaaactcagactgataagatgctgtgattgaatatcaataaaagatctgtgccctattgttcacgatagcacaaagcatctgctaagagagcatta

SEQ ID NO: 4074 - DNA, 201 bp, Homo sapiens
ggacctaccttcatcctctgctccacaatgtagaagattcgctcaaccccaatgctgagtcccacacatggcaccttgtggcccttggggtcaaacatgcscaccagcccatcatagcgcccaccagcagccacactgcccacattcaggggctcctccccagcctgagttggggtctgcagcagcactgcttcatagatc

SEQ ID NO: 4075 - DNA, 201 bp, Homo sapiens
ctgaaagagcaaaaataatttttttttttttttcagatagagtcttactctgtcgcccaggctggagtgcagtggcacgatctcagctcctgcaacctccrcctcccgggttcaagcgattctcctgtctctgcctcccgagtagctgggattacaggcacatgccaccacgcccggctaatttttgtatttttagtagat

SEQ ID NO: 4076 - DNA, 201 bp, Homo sapiens
cagacatataggaaatacaacagctttactaggaaagtcctacagttgcaggcttaagggttggagtcacccaagtttgggacttgcataaacagtattargccaaatccagacttctcccacagttctcagccctggcctcaccttaatgagaaagtctcccaactgcaatccacttaggatttcacacatgatcttcaa

SEQ ID NO: 4077 - DNA, 201 bp, Homo sapiens
gattctcctgtctctgcctcccgagtagctgggattacaggcacatgccaccacgcccggctaatttttgtatttttagtagatacggggtttcgccatayaggtcaggctggtctcaaactcctgacctcaggtgatccaccccccttggcctcccaaagtgatgggattacaggcatgagccactgtgcccggacaaaa

SEQ ID NO: 4078 - DNA, 201 bp, Homo sapiens
cagcctcactcacaagtctgtctccccaggtggggtatccctggtggaacagctgctccaggatcctaaactatcccaaaacaagcaggccttggagggcytgggagacctgaagttgctctttgagtacctgaccctatttggcattgatgacaaagtgagtcaagttggggacgggatcccttctgagctctggggctt

SEQ ID NO: 4079 - DNA, 201 bp, Homo sapiens
ccagggtggcagcaaacttaggtgtgctggacacaaactgaataaaagctcacccataatggatcctgccattacttctcaaaagtagagctaagaacagrgtgccagcttggacaccctctgtccctgaggacagcagaagccagccttcatcttctgctcttgtcccctgcaggctgagctgctgtacaagaagaaccc

SEQ ID NO: 4080 - DNA, 201 bp, Homo sapiens
gcctgatgatgaccttcagcggcctgaaccgcggcttcgcctatgcccgctacagctcgaggcgcggcgcgcaggccgccatcgccacgctgcacaaccayccgctgcggccgtcctgcccgctgctcgtgtgccgcagcaccgagaagtgtgagctgagcgttgacggcctgccgccgaatctgacccgcagcgcgctgc

SEQ ID NO: 4081 - DNA, 201 bp, Homo sapiens
agcagcagctttttggctggatccagagccatgtctgcgatgtactcttcatgttgcctcatatccattaaggggccctccttccgctggtcccagagacrgataccacctgtgtcatccccagtggccagaacattctcatccaccagcagaagactattgatgggggcactagagacacagatgtagaacttcttggag

SEQ ID NO: 4082 - DNA, 201 bp, Homo sapiens
caaaaacggccaggtacaacacctttttcatacaaggcccaggaggcttagtccagtctgtgctcctgggctacaaggacccagcctgagatggtcccatytgcagggccccgcaccagttggagcagatgcctccccaccaccaattgccaaaggtccaataaaatgcctcaaccacggagtctgcgtgtgtcagtgatg

SEQ ID NO: 4083 - DNA, 201 bp, Homo sapiens
tcatatccattaaggggccctccttccgctggtcccagagacggataccacctgtgtcatccccagtggccagaacattctcatccaccagcagaagactrttgatgggggcactagagacacagatgtagaacttcttggagcatctctgtcccagtggggacctcctggtccttacccttcacctccatgcacatacac

SEQ ID NO: 4084 - DNA, 201 bp, Homo sapiens
cgcctttttctggtctgtggccaacctgcccagccccttgccatgctcaaaaaagtccagtcaacactacaaaagggaaaggtgccttaatcttttttgarccttcagctacctcatgtggtagcacagctgatgctttctgatgtttgtaagtgctattaatcttatgggtggcagttttacccacatagggaggggtta

SEQ ID NO: 4085 - DNA, 201 bp, Homo sapiens
cccagaacaaatctcctgtggatactgagggatgattctatttaatacatgtatttgaaattgaattccaaaggagaggggagatggtctgttttccttgwgttaaggttaattctttgggatcctaaattcattgagctgtttctttctacatataactaatttttgaaggttaaagagacagtgtaaaatcccaaagtg

SEQ ID NO: 4086 - DNA, 201 bp, Homo sapiens
acacagcagactctcggtgactggaaccatgcagtcgatagattcagctctcagggcaaagcggtcacttgtggccccaaagccattccaattgaagaggyagatggtaccttcactggagccacaggctaccttcttcccccactgcagggaaatagagaaaacaatgtggaagctgcctcagactaagcccccagcaca

SEQ ID NO: 4087 - DNA, 201 bp, Homo sapiens
agaaggccagcgccgagctggtgagatttaggcagcaggggagagggccaaggcaaagcctgggaggacgtaaagccagggtgttcgggacatagggtagrgatgtgagggaagcgaccagtcttgtagggaggagagtgggctgcgtggggagacatccggggtgggtcccgagagaaacaaagctaggcctgagcagag

SEQ ID NO: 4088 - DNA, 201 bp, Homo sapiens
tgatttttcaaactattagatgaaaagcttactgtggaatttatgatggatcagtctgtcctcactagtgatcagttttaacatcactaaaagtaggacarctagacattatgttcctgctgatgtgatgcaagaagaagtacacagcaccacctgggaagtattcttgccaagtaaattgaacttgaatctaatcagatc

SEQ ID NO: 4089 - DNA, 201 bp, Homo sapiens
agagaaacaaagctaggcctgagcagagagatgtgatgagggaggaatattgaatgaatggcgggggagggaggagagtgacagatggatagctcagcgcmttctttccctccacagatcgaggaggaggtggcgaaactcctgaaactgaaggcacagctgggtcctgatgaaagcaaacagaaatttgtgctcaaaacc

SEQ ID NO: 4090 - DNA, 201 bp, Homo sapiens
ccttctataataattctaagacattatctgcctttttcgttgtgttaacatttgcactgaaggcacaaaagcgctggtgagtagaactgctggtgccttakcatacattaagacagtgacactaaactgtactaatagccagtgtgttcttcactgccatgcactcacagtaagtaaataaataaattaattaattaatta

SEQ ID NO: 4091 - DNA, 201 bp, Homo sapiens
aaattcaagtattcaggtgaaagttagaattttagaaaacttagtcagggcatggtggctcaagcctataatcccagcactttgggagaccaaggcgggcrgatcacctgaggtcgggagtttgagaccaacctgaccaacatagagaaaccccatctctactaaaaattagctgggcgtggtggcgcatgcttgtaatgc

SEQ ID NO: 4092 - DNA, 201 bp, Homo sapiens
ccccatctctactaaaaattagctgggcgtggtggcgcatgcttgtaatgccagctactagggaagctaaggcacaagaatcgcttgaacctgggaagcaraggttgtggtgagccgagatcgcgtcattgcactccagcctaggcaacgagtgaaactacatctcaaaaaaaaaaaaaaaagaattttagaaaacttgca

SEQ ID NO: 4093 - DNA, 201 bp, Homo sapiens
gcacctgccaccacgcccggctaatttttttgtatttttagtagagacggggtttcacagtgttcgccaggatggtcttgatctcctgacttcgtgatcckcccgcctcggcctccccaagtgctggcattacaggtgtgagccaccgcgcccggctggttggtttgttttgtttttgagacagagtctcgctctgtctct

SEQ ID NO: 4094 - DNA, 201 bp, Homo sapiens
aactagaagtataggcaatggacctctaagatcccaaagtcacgttctccacttttgtcagagaaagcccgctggatttggaaagagacaggtcaggctcyagtactcaaaaggatacagtaaggtcatagcggagggacaacagctctccaccttgatccttcagatcatacatgagcccagagtcctctccatacttct

SEQ ID NO: 4095 - DNA, 201 bp, Homo sapiens
tggtcaacatagtgaaacccctggtctctaccaaaaaaaaatcacaaaaattagtcaagcatggtggcagatgcctgttaagtctcagctaccaggcaggstgaggtggatcacttgagcccaggaagtcaaggatgcagtgagccatgatcaacccactgtactccagcctgggtgacagagtgagaccttgtctcaaaa

SEQ ID NO: 4096 - DNA, 201 bp, Homo sapiens
gctccttggtttctccctcttggcaagagtaggaaaagctggggagagggcaaggagggtaaatgactccagacccagcctgggttgcattgagtgcagaraccaactagacagagcagccttcccacctacctaagagttcctgcttctacacctctaagcccaaaaagtttaccatctcatttctccattttcagtgag

SEQ ID NO: 4097 - DNA, 201 bp, Homo sapiens
gcctaccctcatggagcttacattctactgaaggagagagacttagaacaaataatcccacacagatttttttgttttttttttaaacagagtatcctctrttgcacaggctggagtgcagtggcacatcttggctcactgcagccgctgcctcctgggttcaagcgattctcctgcttcagcctcctgagtagctgggac

SEQ ID NO: 4098 - DNA, 201 bp, Homo sapiens
tgcttcagcctcctgagtagctgggactacaggtgcccaccaccatgcccagctaatttttgtatttttagtagagacggggtttcaccatattggccagratggtcttgaacttctgacctcaagtgatctgcccgcctcagtctcccaaagtgctgggattacagacgtgtgccaccgcacccggccaccacatgtggt

SEQ ID NO: 4099 - DNA, 201 bp, Homo sapiens
cgaagtgagcctcgtcacctcaaggaaaacatctgacagtacttgtaggcagtgaaaaaattcaagtattcaggtgaaagttagaattttagaaaacttaktcagggcatggtggctcaagcctataatcccagcactttgggagaccaaggcgggcggatcacctgaggtcgggagtttgagaccaacctgaccaacata

SEQ ID NO: 4100 - DNA, 201 bp, Homo sapiens
cgggagtttgagaccaacctgaccaacatagagaaaccccatctctactaaaaattagctgggcgtggtggcgcatgcttgtaatgccagctactagggargctaaggcacaagaatcgcttgaacctgggaagcagaggttgtggtgagccgagatcgcgtcattgcactccagcctaggcaacgagtgaaactacatct

SEQ ID NO: 4101 - DNA, 201 bp, Homo sapiens
ggcctttcttcaccaccatctcatgtctcacatctttccaagccatctgcataaacacccaaacattagcccagccccaagatctttctttctcaaactgmaaaaggacaactcaacttccattcagtatatacatcacaagtagctaactgtatactcagcaaagtcagagacagcttaagaaatccagtcacaatcccc

SEQ ID NO: 4102 - DNA, 201 bp, Homo sapiens
catgccaccacgcccggctaatttttgtatttttagtagatacggggtttcgccatacaggtcaggctggtctcaaactcctgacctcaggtgatccaccmcccttggcctcccaaagtgatgggattacaggcatgagccactgtgcccggacaaaaaaataataatttttaataaggtagcactggttatcaggtttag

SEQ ID NO: 4103 - DNA, 201 bp, Homo sapiens
ccaggaggcttagtccagtctgtgctcctgggctacaaggacccagcctgagatggtcccatctgcagggccccgcaccagttggagcagatgcctccccmccaccaattgccaaaggtccaataaaatgcctcaaccacggagtctgcgtgtgtcagtgatgcctagccccgccttccccagcagaccaatgtagggatg

SEQ ID NO: 4104 - DNA, 201 bp, Homo sapiens
ctccccttccccaccctcagccatgactattgtgaaaaggttccttttccgaggattaaattcaaacttctgcttggctcatgtggtctcatgcccacccyagcccatctttctagattcagtcatgctactctcctgctacaaggaaccctcctcattccttatctctgctgcctccagtatctggcccttgctctctgc

SEQ ID NO: 4105 - DNA, 201 bp, Homo sapiens
atatgaggcaacatgaagagtacatcgcagacatggctctggatccagccaaaaagctgctgctgacagccaggtacaacttcaaagctgccttgcctccyctcccctccctgtgtgaaatgtcttcctcaaatagaccttgcgtctaagcctactgctctactctctacagcggggatggctgccttggcatcttcaaca

SEQ ID NO: 4106 - DNA, 201 bp, Homo sapiens
gagttggagaccagcctggccaacatggtgaaatcctgtctctactaaaaatagaaaaattagctgggtgtggtggcgggcacctgtaatcccagcttctygggaggctgaggcaggagaatcgcttgaacctgggaggtggaggtggcagtgagccgagatcgtgccattgcactccagcctgggcaacaagagcaaaac

SEQ ID NO: 4107 - DNA, 201 bp, Homo sapiens
gttatttcccaccgattattatttatttacttacctatttatttttgagacggagtctcgctctgtcgccgaggctggagtgcagtggcgcgatctgggcwcactgcaacctcccccttccgggttcaagcagttctcttcctcagcctcccgagtagctgggattataagcgcccgccaccacgcccggctaattttttt

SEQ ID NO: 4108 - DNA, 201 bp, Homo sapiens
ggtttcaccaagccacgaaggactagcgtccctctctcctatcccaagggcattaagcctgtctggatgaagtaggagaggaaagatttacacgcagttcycaactttacgtgacgtgactagggagggaattgacggtcgcaccgtctacctagcccaaacggggtcacagcaggacaaggaagtagccgatctcccaga

SEQ ID NO: 4109 - DNA, 201 bp, Homo sapiens
gtactcaatagattctgctggcttgagagagccccaagtaactcatcctgccccacggtttcccaacactcacacactggtagaattcccggtatcggccwcgggtcatggctgggttatcccgccgatatacctttgctatgtggtagcgtttaatgttggtcagtttattcattgccaaataccgagcaaaaggaacct

SEQ ID NO: 4110 - DNA, 201 bp, Homo sapiens
gggatctgggaaaagaagtcaagtacttgggttgttaccttgtccagcttgtctactgaggagcagatggtacggaacttgctgtcagaaacaccacagayagcaaacatcccatctagaatgcgtcgatcgtttacctgcaaggaaccaatgcatagtgaggggggaatctcttttcttacatgacctgcaatagtcatg

SEQ ID NO: 4111 - DNA, 201 bp, Homo sapiens
ggaagtagccgatctcccagatgcggtctcttcgctccgctccacccgcaccagcagcggcccacccacctctcctgtaagaggaagaacgtcccggagayacttccggccccgccccccgaggcggaagcggagtgccaggctactcctcccgcagtgtgggtggttccgaggctgactaccctgcggcggcgcggctcg

SEQ ID NO: 4112 - DNA, 201 bp, Homo sapiens
cacagaacagtttcaactttaggactgagggcagtgggacggctgctggggaggcttggttctgttcctcaccatgttgctggacatagtccccaatgcgrtcagccacctcaggtgcaaggcccttctctcccaccatctcattcttcacctcttcccaggacacctaggcagacagacaccagtcagggacccctgggc

SEQ ID NO: 4113 - DNA, 201 bp, Homo sapiens
ttgtcatcaatgccaaatagggtcaggtactcaaagagcaacttcaggtctcccaggccctccaaggcctgcttgttttgggatagtttaggatcctggascagctgttccaccagggataccccacctggggagacagacttgtgagtgaggctgacaaggaaacaaaaaaggtaaggagggttgaccttcttgcctgga

SEQ ID NO: 4114 - DNA, 201 bp, Homo sapiens
atgcccattcagggtgcctgtggagaaagaatggagtcactgtttaaccatggtacctgcctcagccccagcagaccacaggaggttggccccagactcamtgagtgcctgcagcagccgtacagacacagcatccttggccacctcatgcccatcccggccatctagggtcagcacaacccagatgaggccgctgaaggg

SEQ ID NO: 4115 - DNA, 201 bp, Homo sapiens; identical to SEQ ID NO: 542

SEQ ID NO: 4116 - DNA, 201 bp, Homo sapiens
ggaattgacggtcgcaccgtctacctagcccaaacggggtcacagcaggacaaggaagtagccgatctcccagatgcggtctcttcgctccgctccacccrcaccagcagcggcccacccacctctcctgtaagaggaagaacgtcccggagacacttccggccccgccccccgaggcggaagcggagtgccaggctactc

SEQ ID NO: 4117 - DNA, 201 bp, Homo sapiens
aggatggtgggcgcctttgggcagttattatttgttttacatgtatctccttccccactcctaaaaaatctatctcatttactgggccccaccctcctttrgctgcagcagtagaaacagcagcattgagggtcatgagcagcttaactatttcagagtctttgcacaagatcaaatgacatagggtcaaaaatctatttt

SEQ ID NO: 4118 - DNA, 201 bp, Homo sapiens
aagctttgcccaagtgagtcggtactgaatatgggcagggtgtgaggaggggtgtggggatttggtggaatagtgcatataaggttagagggtgtggtctrgctgagatgttccccactaagttctttgcccacaggactctgggaaaacctcgccactgctatgcaatctctgatgcattctttcccaactgcttttttc

SEQ ID NO: 4119 - DNA, 201 bp, Homo sapiens
acctgagccaagtgagtgccaatccatccaaagtctcaagagcccaagtttagaaagatacagtgaggtcatagcgaagggacaggagctccccgccctgrtccttcaggtcatagataagcttggagtcttccccatactttcccatcagtgtttcctggagaaaacataaataaatgtggtcataataataaacataac

SEQ ID NO: 4120 - DNA, 201 bp, Homo sapiens
ggaaccaatgcatagtgaggggggaatctcttttcttacatgacctgcaatagtcatggtcacttaggctactggtccctctgcacaaggatcttctcttrtgagaggccaggcccaactttgccctcccagccttgtcagctctgaccttgaccaggaagtcgcctatctgaagtgaactcaggatctcgcacatgatct

SEQ ID NO: 4121 - DNA, 201 bp, Homo sapiens
agatgctccctgcccaaagcagcaccacttgctcccttggagatcagatagcttaggtgccaccacctgctcagactatcttctacctacctcctaggacctacctctagtctctgttccacgatggagaaaatccgctccaccccaatgctgagccccacacatggcaccttgcgccctttggggtcgaacatgcccact

SEQ ID NO: 4122 - DNA, 201 bp, Homo sapiens
tcgagcaaggctcaggtcaaaggagatctgtggagataagaaaatggtcagtgccagattaagatcagggacctgaagccccagagctcagaagggatccygtccccaacttgactcactttgtcatcaatgccaaatagggtcaggtactcaaagagcaacttcaggtctcccaggccctccaaggcctgcttgttttgg

SEQ ID NO: 4123 - DNA, 201 bp, Homo sapiens
aagtttgctgggtctgctggctgggaaggcacagaatcatatcctttattttaatacgttcctgggttccagagaactggtctctttactccaaccccccmtgcctccctgctccctcctaccctgcccctctccttcccttttacgctgaattttgacagaatgaaaccatcccttgttccttcccagagcacccataac

SEQ ID NO: 4124 - DNA, 201 bp, Homo sapiens
gaggacaaatcaggacaataaagaagattcatgctaagctgtggcagaggggggaaggtatgatcgggtgggggtgggacaaggaacggccatggaagatmactgggtcaggttggaccctgggctgggagcgggagggcaaggcccctcaccacaacttaacccaaacctaagctgcccccaggtgccataggtccctgt

SEQ ID NO: 4125 - DNA, 201 bp, Homo sapiens
tgcgtctaagcctactgctctactctctacagcggggatggctgccttggcatcttcaacattaagaggcgtcggtttgagctgctctcagaacctcagtytggggacctgacctctgtcactctcatgaaagtacagctggttatggtgggatggaggggtgtgtgctgggggcttagtctgaggcagcttccacattgt

SEQ ID NO: 4126 - DNA, 201 bp, Homo sapiens
taaaaaccaacaaagaggacaaatcaggacaataaagaagattcatgctaagctgtggcagaggggggaaggtatgatcgggtgggggtgggacaaggaayggccatggaagatcactgggtcaggttggaccctgggctgggagcgggagggcaaggcccctcaccacaacttaacccaaacctaagctgcccccaggtg

SEQ ID NO: 4127 - DNA, 201 bp, Homo sapiens; identical to SEQ ID NO: 545

SEQ ID NO: 4128 - DNA, 201 bp, Homo sapiens; identical to SEQ ID NO: 546

SEQ ID NO: 4129 - DNA, 201 bp, Homo sapiens
cgcagcgtgggattttgcggcttcctgacagcccaggctgtcgcttgacttgatcttgggtttcaccaagccacgaaggactagcgtccctctctcctatsccaagggcattaagcctgtctggatgaagtaggagaggaaagatttacacgcagttctcaactttacgtgacgtgactagggagggaattgacggtcgca

SEQ ID NO: 4130 - DNA, 201 bp, Homo sapiens; identical to SEQ ID NO: 550

SEQ ID NO: 4131 - DNA, 201 bp, Homo sapiens
ctcaggtgatccacccgcctcagcctcccaaagtgctgggattacaggcaaaagccaacacacccggcctggatatgaatttataataccctacagtgcarcacaagaagatgcactcaaagcactgatgtgaggaagtacttgccccgtagcagctattcactctaccagtgtaaacaaactctaagctagggcaagaca

SEQ ID NO: 4132 - DNA, 201 bp, Homo sapiens
acacgcagttctcaactttacgtgacgtgactagggagggaattgacggtcgcaccgtctacctagcccaaacggggtcacagcaggacaaggaagtagcmgatctcccagatgcggtctcttcgctccgctccacccgcaccagcagcggcccacccacctctcctgtaagaggaagaacgtcccggagacacttccggc

SEQ ID NO: 4133 - DNA, 201 bp, Homo sapiens
aggtatgtagttagaaggatggtgggcgcctttgggcagttattatttgttttacatgtatctccttccccactcctaaaaaatctatctcatttactggrccccaccctcctttagctgcagcagtagaaacagcagcattgagggtcatgagcagcttaactatttcagagtctttgcacaagatcaaatgacataggg

SEQ ID NO: 4134 - DNA, 201 bp, Homo sapiens
gtgaaggtaccatctacctcttcaattggaatggctttggggccacaagtgaccgctttgccctgagagctgaatctatcgactgcatggttccagtcacmgagagtctgctgtgtactggctccactgatggagtcatcaggtgagggaagcctggacagcccttaggtcacaggaagggcagacccagctagccagtac

SEQ ID NO: 4135 - DNA, 201 bp, Homo sapiens
tggacggggacgtgttcgtgtgagagcggggcagggccggggcgccgggtctggaagcttcccgggggtggacctgggaacaggagagatgagagaaagtkgcagggagacaaattttgcaagattctttgggtccaatttattcagtaacattcggctcttctatcacaccaatctgttgaaagaactggaatgtcgtga

SEQ ID NO: 4136 - DNA, 201 bp, Homo sapiens
actgacccatttctccttccattgcagggttgaagtcaaaagaccaaaatactaatcactagttacaaccagagatgctccacaaggatatgctccccackgttttctttctacaatttccaaaggttgcaagatgtttttttgtggatgaatataaaattttattgtgtaattacttggttccattaaaattggttaact

SEQ ID NO: 4137 - DNA, 201 bp, Homo sapiens
gttcttcccctgagttcactgtattgaaatagcatggtttaatcttggagccttgtttaatcctgcctctactgtttattagttttgtgaacttgccaagytctttcactgtttatgcctcagtttcctcatcaggaaaatggagagaaatatagttccctcttcatagattttatgagaattaagtgagatatgcattta

SEQ ID NO: 4138 - DNA, 201 bp, Homo sapiens
tggatgaactattttattaggctctaagtgggaggtctagggggtggtcattcctatgcagataacctcttagtcgggtaggtttccagatgaagcatagsgtcagggtatgcaacatctgtttaactcttgcttctccttaggatggatgacatggctgtggatagtgatgaggaggtggattatagcaaaatggaccag

SEQ ID NO: 4139 - DNA, 201 bp, Homo sapiens
cctgccgagctgtggccttctctgaagatgggcagagtgagtactggggaagacaaccagcaatgtggtggaagggagcagtgagcagcaccatgacctgrgcaccttttccccagagctcattactgtctccaaggacaaagccatccatgttctagatgtggagcagggccaactggaaagacgtgtttccaaggctca

SEQ ID NO: 4140 - DNA, 201 bp, Homo sapiens
agccacgaaggactagcgtccctctctcctatcccaagggcattaagcctgtctggatgaagtaggagaggaaagatttacacgcagttctcaactttacrtgacgtgactagggagggaattgacggtcgcaccgtctacctagcccaaacggggtcacagcaggacaaggaagtagccgatctcccagatgcggtctct

SEQ ID NO: 4141 - DNA, 201 bp, Homo sapiens
atgtcatcgcgcagcgtgggattttgcggcttcctgacagcccaggctgtcgcttgacttgatcttgggtttcaccaagccacgaaggactagcgtccctstctcctatcccaagggcattaagcctgtctggatgaagtaggagaggaaagatttacacgcagttctcaactttacgtgacgtgactagggagggaattg

SEQ ID NO: 4142 - DNA, 201 bp, Homo sapiens
gcagctgttccaccagggataccccacctggggagacagacttgtgagtgaggctgacaaggaaacaaaaaaggtaaggagggttgaccttcttgcctggmctctagtcgcccatgcatgtgtgtgtacatatgcatagacacactcactcccctacatacataacacagaacagtttcaactttaggactgagggcagtg

SEQ ID NO: 4143 - DNA, 201 bp, Homo sapiens; identical to SEQ ID NO: 561

SEQ ID NO: 4144 - DNA, 201 bp, Homo sapiens
ccacagttctgagacaagctttagtctttcctctagcagcttcttctgtgcagatgccacaagcacctgtgtctccgtggtccgtatcttctcctccaaarcctggggaaggggcagataaaagagagctgggctaacaccttcaaggagcaaacaaagcaggctctagtcgggattttgagaccaggcccaactcagctc

SEQ ID NO: 4145 - DNA, 201 bp, Homo sapiens
gtgtccagcacacctaagtttgctgccaccctggggcttgcctcccataccttgatcccagcatcccacagttctgagacaagctttagtctttcctctascagcttcttctgtgcagatgccacaagcacctgtgtctccgtggtccgtatcttctcctccaaagcctggggaaggggcagataaaagagagctgggcta

SEQ ID NO: 4146 - DNA, 201 bp, Homo sapiens
gcccttccccacaaataaaaaccaacaaagaggacaaatcaggacaataaagaagattcatgctaagctgtggcagaggggggaaggtatgatcgggtggsggtgggacaaggaacggccatggaagatcactgggtcaggttggaccctgggctgggagcgggagggcaaggcccctcaccacaacttaacccaaaccta

SEQ ID NO: 4147 - DNA, 201 bp, Homo sapiens
atgtacacaaaatgctgatcgtagcttactagtccgttatatgactagaatgtgaaaaaacactgttctggagtgtaatctgtcatcggttttgttctctrttttatctccaacctctagtctagggtagatgctcaacacatgtttgattttgaacaaaagatacaggttagaggcagtggaaaagttgaagatgttatg

SEQ ID NO: 4148 - DNA, 201 bp, Homo sapiens
acaaatatctcctccacagtggtccagacccaatctttgtccaggctggggctttcaaagatgataaagaggggttgggtgggatcacaaagaaatcttgygcaaatataccttgaactaacatatattgaaaaaagcaggacctaacatttcaaactcactgaaaatggagaaatgagatggtaaactttttgggcttag

SEQ ID NO: 4149 - DNA, 201 bp, Homo sapiens
cggggcgccgggtctggaagcttcccgggggtggacctgggaacaggagagatgagagaaagttgcagggagacaaattttgcaagattctttgggtccartttattcagtaacattcggctcttctatcacaccaatctgttgaaagaactggaatgtcgtgacagagcccagataccgtagtaggccaaaaagcccttt

SEQ ID NO: 4150 - DNA, 201 bp, Homo sapiens
gaacgtcccggagacacttccggccccgccccccgaggcggaagcggagtgccaggctactcctcccgcagtgtgggtggttccgaggctgactaccctgmggcggcgcggctcgcagtccttctcagcatggaccgcacttgtgaggagaggcccgctgaggatgggagcgacgaggaggacccagactccatggaagcc

SEQ ID NO: 4151 - DNA, 201 bp, Homo sapiens
atttcccaaggcagggtgggatctgggaaaagaagtcaagtacttgggttgttaccttgtccagcttgtctactgaggagcagatggtacggaacttgctrtcagaaacaccacagatagcaaacatcccatctagaatgcgtcgatcgtttacctgcaaggaaccaatgcatagtgaggggggaatctcttttcttacat

SEQ ID NO: 4152 - DNA, 201 bp, Homo sapiens
ggaggacccagactccatggaagccccaacccggatccgggacactccggaagacatcgtgctggaagctccggctagtgggctggcgttccatccggccygtgacctactggctgcaggggacgtggacggggacgtgttcgtgtgagagcggggcagggccggggcgccgggtctggaagcttcccgggggtggacctg

SEQ ID NO: 4153 - DNA, 201 bp, Homo sapiens
actgcagcttcgacctcccaagctcaagtgatcctcccacctcagcctcctgactacaggcacacaccaccatactcagctaatttaaaaaaaaaaaaaaatttttttttttaatctgtagagacagggtctcatcatgttgcccaggctggtccatgtagtaccttaagggtccaccaaagcattcacacagaagtacta

SEQ ID NO: 4154 - DNA, 201 bp, Homo sapiens
atgatttatgaattgtggaacctgggattatgggagagtctggcttcaatcaagggctgaaattccatttccactgacatctcttccttccccatcccccrattctgtcctgcaacagggtaacaagaaggggcccttaggccgttgggactttgatacccaggaagaatacagcgagtatatgaacaacaaagaagcttt

SEQ ID NO: 4155 - DNA, 201 bp, Homo sapiens
tgacccatttctccttccattgcagggttgaagtcaaaagaccaaaatactaatcactagttacaaccagagatgctccacaaggatatgctccccactgwtttctttctacaatttccaaaggttgcaagatgtttttttgtggatgaatataaaattttattgtgtaattacttggttccattaaaattggttaacttg

SEQ ID NO: 4156 - DNA, 201 bp, Homo sapiens
atcctggggctaaccttcctctggtgggtatagaggcatgcacctctctctctctcaatcttgttttccatttcccaaggcagggtgggatctgggaaaaraagtcaagtacttgggttgttaccttgtccagcttgtctactgaggagcagatggtacggaacttgctgtcagaaacaccacagatagcaaacatcccat

SEQ ID NO: 4157 - DNA, 201 bp, Homo sapiens
ttcagagtctttgcacaagatcaaatgacatagggtcaaaaatctattttttacttcctatagcaaagtgccaggctttgattcccatggtaggcagtaarcaagcatcaatgcataagtagaaagggcagaaaaaattgcagtctttggaaaataactaaattttattctagccaggattgaagttttcctctaagtctt

SEQ ID NO: 4158 - DNA, 201 bp, Homo sapiens
agttttaaaaatctgagatcaaatagtaaaaggttgcaaattctggcatgtttgactctaagatcttgtaactttaacagctatgctcagtataaagtgcygggcagaacgcgtttggccccaaccagcacccccgccccagcctaccttccaccagggcctttttggccatggcagcggcccggtgcgagctgaatttga

SEQ ID NO: 4159 - DNA, 201 bp, Homo sapiens
ttattttaatacgttcctgggttccagagaactggtctctttactccaaccccccctgcctccctgctccctcctaccctgcccctctccttcccttttaygctgaattttgacagaatgaaaccatcccttgttccttcccagagcacccataacagctcacagcccactcagaattttcatgttggggcttctagccct

SEQ ID NO: 4160 - DNA, 201 bp, Homo sapiens
tgctgacatgagaatctggagaaatggtcagggggagtgaaggtgtatgtgtgaatttggccagctagtgatctccattttcccagtatttttgaagacaytggggattacgtaccctccacaaccaagacacctcgggacaaggagcgggagagatatcgggaacgggagcgtgatcgggaaagagacagagaccgtgac

SEQ ID NO: 4161 - DNA, 201 bp, Homo sapiens
atcttctcttgtgagaggccaggcccaactttgccctcccagccttgtcagctctgaccttgaccaggaagtcgcctatctgaagtgaactcaggatctcrcacatgatcttcaggcactctgcatcagggatcatgggatcaaagttcccagcaatgtcaaaatcctgcagggagagggttagccagcggtcttcaggga

SEQ ID NO: 4162 - DNA, 201 bp, Homo sapiens
tggagtttgtttaaaactttgttagacaaaagggttctatgccttaaaaatgttttttaagtgtgttgtggggaggaggttgtgagagcctcagttcaagrtctgggctgagttctcttttctcctaggacctgggtctaccaaggagttgatcaagtccatcaatgaaaagtttgctgggtctgctggctgggaaggcac

SEQ ID NO: 4163 - DNA, 201 bp, Homo sapiens
ttcgcaggactgagggaagagggagaagactccatggctcaggaagaaaaggaggagactggggatgacagtgactgaaggaatgaattgaatcttgagaygggtcctcaccaggcaagagtcttgcttattgggctgcatccccagagaggatatgaattattttttgaaaagacagggttttgccatcgtccaggctgg

SEQ ID NO: 4164 - DNA, 201 bp, Homo sapiens
atgcctgcctcctcacagtactgtaactggttcagtagctttgggttcttcttgtacagcagctcagcctgcaggggacaagagcagaagatgaaggctgscttctgctgtcctcagggacagagggtgtccaagctggcaccctgttcttagctctacttttgagaagtaatggcaggatccattatgggtgagctttta

SEQ ID NO: 4165 - DNA, 201 bp, Homo sapiens
tcaactttaggactgagggcagtgggacggctgctggggaggcttggttctgttcctcaccatgttgctggacatagtccccaatgcggtcagccacctcwggtgcaaggcccttctctcccaccatctcattcttcacctcttcccaggacacctaggcagacagacaccagtcagggacccctgggcagcttccgcacc

SEQ ID NO: 4166 - DNA, 201 bp, Homo sapiens
aaacaaagcaaaacaaaaaagaaaaaaaaattcttggtaactgagcactgcttgtccagcccattgagtttctgtagacaaattgtaggaactggcacagyaaactggccacaaagacgttaggggcgtggacaccagctgcttgagctgcctgctgtcccagactcccgtatgtcatcgcgcagcgtgggattttgcggc

SEQ ID NO: 4167 - DNA, 201 bp, Homo sapiens
cattccagtatggtatcaaaatgtctgaagggcggaaaaccaggcgcttcaaggaaaccaatgacaaagcagagcttgatcgccagtggaagaagattagygcagtaagtaggatggccccttgggtgggagggtttcagctgggagaagacattagcctgcagattcaggaacaggcaaggggctggagagccatggaaa

SEQ ID NO: 4168 - DNA, 201 bp, Homo sapiens; identical to SEQ ID NO: 580

SEQ ID NO: 4169 - DNA, 201 bp, Homo sapiens
aagccccagagctcagaagggatcccgtccccaacttgactcactttgtcatcaatgccaaatagggtcaggtactcaaagagcaacttcaggtctcccargccctccaaggcctgcttgttttgggatagtttaggatcctggagcagctgttccaccagggataccccacctggggagacagacttgtgagtgaggctg

SEQ ID NO: 4170 - DNA, 201 bp, Homo sapiens
gggttcttcttgtacagcagctcagcctgcaggggacaagagcagaagatgaaggctggcttctgctgtcctcagggacagagggtgtccaagctggcacyctgttcttagctctacttttgagaagtaatggcaggatccattatgggtgagcttttattcagtttgtgtccagcacacctaagtttgctgccaccctgg

SEQ ID NO: 4171 - DNA, 201 bp, Homo sapiens; identical to SEQ ID NO: 551

SEQ ID NO: 4172 - DNA, 201 bp, Homo sapiens
ctccaagaagttctacatctgtgtctctagtgcccccatcaatagtcttctgctggtggatgagaatgttctggccactggggatgacacaggtggtatcygtctctgggaccagcggaaggagggccccttaatggatatgaggcaacatgaagagtacatcgcagacatggctctggatccagccaaaaagctgctgct

SEQ ID NO: 4173 - DNA, 201 bp, Homo sapiens; identical to SEQ ID NO: 553

SEQ ID NO: 4174 - DNA, 201 bp, Homo sapiens
gtgtatgtgcatggaggtgaagggtaaggaccaggaggtccccactgggacagagatgctccaagaagttctacatctgtgtctctagtgcccccatcaayagtcttctgctggtggatgagaatgttctggccactggggatgacacaggtggtatccgtctctgggaccagcggaaggagggccccttaatggatatga

SEQ ID NO: 4175 - DNA, 201 bp, Homo sapiens
cttggctcatgtggtctcatgcccaccccagcccatctttctagattcagtcatgctactctcctgctacaaggaaccctcctcattccttatctctgctscctccagtatctggcccttgctctctgccaggcaaattctactcttgtatgatccaacccacatgtcaccaccttagctttccagggctctcttctccct

SEQ ID NO: 4176 - DNA, 201 bp, Homo sapiens
taacccctccctatgtgggtaaaactgccacccataagattaatagcacttacaaacatcagaaagcatcagctgtgctaccacatgaggtagctgaaggytcaaaaaagattaaggcacctttcccttttgtagtgttgactggacttttttgagcatggcaaggggctgggcaggttggccacagaccagaaaaaggcg

SEQ ID NO: 4177 - DNA, 201 bp, Homo sapiens; identical to SEQ ID NO: 566

SEQ ID NO: 4178 - DNA, 201 bp, Homo sapiens
ttttgagacaaggtctcactctgtcacccaggctggagtacagtgggttgatcatggctcactgcatccttgacttcctgggctcaagtgatccacctcascctgcctggtagctgagacttaacaggcatctgccaccatgcttgactaatttttgtgatttttttttggtagagaccaggggtttcactatgttgacca

SEQ ID NO: 4179 - DNA, 201 bp, Homo sapiens
ctcactgaaaatggagaaatgagatggtaaactttttgggcttagaggtgtagaagcaggaactcttaggtaggtgggaaggctgctctgtctagttggtytctgcactcaatgcaacccaggctgggtctggagtcatttaccctccttgccctctccccagcttttcctactcttgccaagagggagaaaccaaggagc

SEQ ID NO: 4180 - DNA, 201 bp, Homo sapiens
cattaattggagtttgtttaaaactttgttagacaaaagggttctatgccttaaaaatgttttttaagtgtgttgtggggaggaggttgtgagagcctcasttcaaggtctgggctgagttctcttttctcctaggacctgggtctaccaaggagttgatcaagtccatcaatgaaaagtttgctgggtctgctggctggg

SEQ ID NO: 4181 - DNA, 201 bp, Homo sapiens
aaagtttgctgggtctgctggctgggaaggcacagaatcatatcctttattttaatacgttcctgggttccagagaactggtctctttactccaacccccmctgcctccctgctccctcctaccctgcccctctccttcccttttacgctgaattttgacagaatgaaaccatcccttgttccttcccagagcacccataa

SEQ ID NO: 4182 - DNA, 201 bp, Homo sapiens
agacacttccggccccgccccccgaggcggaagcggagtgccaggctactcctcccgcagtgtgggtggttccgaggctgactaccctgcggcggcgcggytcgcagtccttctcagcatggaccgcacttgtgaggagaggcccgctgaggatgggagcgacgaggaggacccagactccatggaagccccaacccggat

SEQ ID NO: 4183 - DNA, 201 bp, Homo sapiens
aggctcagttctgcctacctggaactcactggcaattaagcatgtattcattctgccctttttgaggatctgctctgaggcaggcacttgggggtattccrtaaacagtactcacctcaaagttgtttacaggctggtgcctctcccccacctccattttgatcttgcctctttttcagcacgtactctcaatgtactgta

SEQ ID NO: 4184 - DNA, 201 bp, Homo sapiens; identical to SEQ ID NO: 565

SEQ ID NO: 4185 - DNA, 201 bp, Homo sapiens; identical to SEQ ID NO: 4104

SEQ ID NO: 4186 - DNA, 201 bp, Homo sapiens
ttttgtcttttcaggaaagatgaggatcctgaaaataaaattgaatttaaaacacgtctgggtgagtacagtttctatactagtgactatgcattctggawgaattgtacggaatttaatgctctgggaaggatatgcttctcctttcccccaacctcctttcttctttctttctttttgagacagtgtctcacttaatcg

SEQ ID NO: 4187 - DNA, 201 bp, Homo sapiens; identical to SEQ ID NO: 4106

SEQ ID NO: 4188 - DNA, 201 bp, Homo sapiens; identical to SEQ ID NO: 4107

SEQ ID NO: 4189 - DNA, 201 bp, Homo sapiens; identical to SEQ ID NO: 4108

SEQ ID NO: 4190 - DNA, 201 bp, Homo sapiens
tttgggtcccagctcctccccttccactcagcactatccaggcaggaggaccaaaagggactcagtgtggtctacttactctggggccctagaatccctgmccccccgccacccttcatgtttgcttcagcagctggtagcttttgatgagacagaataaagttttatttttatattaagctactttgcctcagtggttgc

SEQ ID NO: 4191 - DNA, 201 bp, Homo sapiens; identical to SEQ ID NO: 4111

SEQ ID NO: 4192 - DNA, 201 bp, Homo sapiens
aggttaggagttcaataccaggtgggccaacattgtaaaacctgatctctactaaaaattagccaggcgtggcggcatgtgcccgtaatcccagttactcrgaaggctgaggcatgagaattgcttgaacccagaaggtggaggttgcagtgagccaagatcgtgccactgcattctagcctgggcgacagaatgagactc

SEQ ID NO: 4193 - DNA, 201 bp, Homo sapiens; identical to SEQ ID NO: 4116

SEQ ID NO: 4194 - DNA, 201 bp, Homo sapiens; identical to SEQ ID NO: 4117

SEQ ID NO: 4195 - DNA, 201 bp, Homo sapiens; identical to SEQ ID NO: 4118

SEQ ID NO: 4196 - DNA, 201 bp, Homo sapiens
ggctaaagtccgagttctagtttctccacgggtttctgcacgaccttgggcggtcccttctcttctcaaacccttgttcccctaccggagccccagacccytggcgtcccgcactcaccgtagcgggcccagagcttgggctgcacatcggagcattcgcggattaggatgggtaggtcgggattcgccttcttcagctcc

SEQ ID NO: 4197 - DNA, 201 bp, Homo sapiens
ttgggctgcacatcggagcattcgcggattaggatgggtaggtcgggattcgccttcttcagctccacgtagcgtttctcaatgaagtccctgcggggccsgagagagcgccgcgcgtgctgtgggcgggggcttccctcaacttcagggaggtcgaggtcgtgaccctggcgtcccgaagcccgcccgcctcaccacgcc

SEQ ID NO: 4198 - DNA, 201 bp, Homo sapiens; identical to SEQ ID NO: 4123

SEQ ID NO: 4199 - DNA, 201 bp, Homo sapiens
aattcatgtgtctggctaggaagggctttgggtttggacactttcccatctgggcagggctttgggtttggacactctcccacctgctatcagggtttggyaagaaccactggcatcttcgtggttcctacttacagccctgcttctgccagcagctccatcttggcctccactctccctcagcacatgctacaaatgttg

SEQ ID NO: 4200 - DNA, 201 bp, Homo sapiens
gcctgaatgatttccaaagctgttgcacattttaaattcatgtgtctggctaggaagggctttgggtttggacactttcccatctgggcagggctttgggwttggacactctcccacctgctatcagggtttggtaagaaccactggcatcttcgtggttcctacttacagccctgcttctgccagcagctccatcttggc

SEQ ID NO: 4201 - DNA, 201 bp, Homo sapiens
tgatccacccgcctcggcctgctgaagtgctgggattacaggcgtgagccaccgcacctggccccccaaccccctttcccccaccccctttttttttttttggagacagagtcttgctcttgttgcccaggctggagtgcagtagcgcgatctcagctcactgcagcctccgcctcccatgttcaggcgattctcttgcct

SEQ ID NO: 4202 - DNA, 201 bp, Homo sapiens
atttgccacccacaaagggctgttcttttttttttttttttttgagatggagtctcgctctgtcacccaggctggactgcagtggcacgatcttggctcayggcaagctccgcctcccaggttcatgccattctcctgcctcagcctcccgagtagctgggactacaggcgcccgccaccacgcccggctaattttttgta

SEQ ID NO: 4203 - DNA, 201 bp, Homo sapiens
gtttcagactgattcttttcttttttttatttttttgagacagagtcttgctctttttgcccaggctggagtgtaatacctagatctcggctcactgcaawctccgcctcccaggttcaagcgattttcctgcctcagcctcctgagtagctaggattacaggcgcccaccacaacgcccagctaatttttttgtattttt

SEQ ID NO: 4204 - DNA, 201 bp, Homo sapiens
gcactttgggaggccgaggtgggtggatcacaaggtcaggagttcaagaccagcctggccaatatgggtgacagtgagactccgtctcaaaaaaaaaaaaacagtgtcatatctttgttttaatttgtatttccctgatttctgttaatttaatcatgatttttacttgttcctttttcatttcttattgagtcctaatat

SEQ ID NO: 4205 - DNA, 201 bp, Homo sapiens; identical to SEQ ID NO: 4129

SEQ ID NO: 4206 - DNA, 201 bp, Homo sapiens
tttgtgtttcattctttgtagactatatatgtgtctatctgcaggtgctcacagttctgtgcaatgttgcagaaaagggtcctgcttactgccagcggctrtggccagggcccctgcttcccgccttgctgcacacactagccttttctgacactgaagtagtaggccagagtttggagctgctgcatctgctgttcctgt

SEQ ID NO: 4207 - DNA, 201 bp, Homo sapiens
gggtagttgtaggagtatgagaacatgtatgtagaagagcttggcatggtgcctgggcatgtggtcaccatgtcatatattttagctattgttatgatctktgtgtttcattctttgtagactatatatgtgtctatctgcaggtgctcacagttctgtgcaatgttgcagaaaagggtcctgcttactgccagcggctgt

SEQ ID NO: 4208 - DNA, 201 bp, Homo sapiens
ggcatatcttttcctcccgttgcccaggctggagttcaatggcattatttctgctcacagcaacctttgcctcctgggctcaagcaattcttctgcctcaktttccccagtagctgggattacaggcatgccccaccatgcttggctaatttttgtattagtagagacagggtttcgctatgttggccaggctggtcttga

SEQ ID NO: 4209 - DNA, 201 bp, Homo sapiens
ctataagctggaagaagttgtagttctgattttgagtaactacgaagaggtggccagcagttctatcaggacagacatgagcttttccccatagagagtasgttggagatgtagggaagcaagcaggaacagttctgttgaccttgaggtagcagctgatgagccttatacatttgcctttctctggtcacagttattatg

SEQ ID NO: 4210 - DNA, 201 bp, Homo sapiens
aaaatcatctttttattttttttgagactgagtttcgctcttgttgctcaggctggaatgcagtggtgcgatctcggctcaccacaacctccgcctcccgrgttcaagcaattctcctgcctcagccttccgagtagctgggattacaggcatgttccactacgcccggctaattttgtatttttagtagagatggggttt

SEQ ID NO: 4211 - DNA, 201 bp, Homo sapiens
ttcttccccatggcacttggggcacttggcgcattattgtagcttctgagcttaagccgggtgtgtgtgtgtgtgtgtgtgtgtgtgtgtgtgtgtgtgtrtgtatgtatgtgtgacgcttgagcccggagaagccacagggtcctaagtgaggccgacagctccaaactccgtccccagtcctcactcctactccaagtg

SEQ ID NO: 4212 - DNA, 201 bp, Homo sapiens
caccatatagttaaaagctgtgattaaaatcctgttattcagtatgtataaacatttattgcatacctacaatgtgttaggcaacatgataggaaaatttsattttgcaatacattgccatgccagtcttagaggggtaagtgcattctaggaaggggaataaatgtaaaggctcaatcctgttaaactctagctgcatct

SEQ ID NO: 4213 - DNA, 201 bp, Homo sapiens; identical to SEQ ID NO: 4132

SEQ ID NO: 4214 - DNA, 201 bp, Homo sapiens
tcctcctgtagtctactggcttttggaaggagaagcttttttccttctccaattattagtgcatgtctaatgtctactgtgtctcacagatatctactctsagaaccaatctgcttaaggtggtcactctcctccacctcctcccgtcattcccagggcaccatatagttaaaagctgtgattaaaatcctgttattcagt

SEQ ID NO: 4215 - DNA, 201 bp, Homo sapiens
ggctacacccatcatctccccaccctcttgtgagccgcaaggatagctgctccagcgtccccatcacctcccctccccatctccccacacgcagcctggcwtgaaacaggccaagcccagtgcttttgttgcctgttctcaggagctgtgtctgtatacactgggtaacctgatcgtggagagtgaggctgtgagaaggca

SEQ ID NO: 4216 - DNA, 201 bp, Homo sapiens; identical to SEQ ID NO: 4133

SEQ ID NO: 4217 - DNA, 201 bp, Homo sapiens; identical to SEQ ID NO: 4135

SEQ ID NO: 4218 - DNA, 201 bp, Homo sapiens
tcttccggaagtcttctctgatcctccagcgcaggattagggtcctctgctttgtgctcccacagcttcttgtagtttcctatttcagcacttattacatygtgttgacactgtcgctgttctaacttttgttctgtattgttcactactatatctcaaatttttgcataggatctgacacgtaagagactgattaaatta

SEQ ID NO: 4219 - DNA, 201 bp, Homo sapiens; identical to SEQ ID NO: 4136

SEQ ID NO: 4220 - DNA, 201 bp, Homo sapiens
tgttctagactcctgactttcttgaatggtcttgattcattttgatgcagggcttttgtgcaggctgttttatctctggaatatcctttcacagcacttcstttccctcccttcacctactgtattgtaattcagtctttagtttgttaagtgaatgaatgaataaatgaagagatttctgctgagtggtttaacattctt

SEQ ID NO: 4221 - DNA, 201 bp, Homo sapiens
gggagtacaggcgtgagccaccgtgcctggcccccgataaaatcatctttgataacatccccaattccagtccatttctttttttttttcttttcttttcytttctttctttttttttttttttgagacggagtctcactgttacccaggctggagtgcagtgatgcaatcttggctcactgcaacctctgcctcctgagt

SEQ ID NO: 4222 - DNA, 201 bp, Homo sapiens; identical to SEQ ID NO: 4137

SEQ ID NO: 4223 - DNA, 201 bp, Homo sapiens
aatatccacttcatagggctgttgcaaagattaaatgacgcaaagcttgcatagcacttggcatggtggctagcacagagtaagcacataagtgacagctrttcttgtagatcctggctacttgctgctcttctccttattgtaggccgcaatgtttaccgaatgctttttaagagcaaagcatatgagcggaatgagttg

SEQ ID NO: 4224 - DNA, 201 bp, Homo sapiens
gcctaggcaactgcttctcttcttaaaggtggaattgactatatacctagggactgcttgcttcctgttgcccagccaggtcagcaatcctctgctcattrgccatggggctctgtctactctggggttgctgctgttggacttggctggggctgtccagaaaaccgaggatgcaggactggagctggtaggtgaagatgt

SEQ ID NO: 4225 - DNA, 201 bp, Homo sapiens; identical to SEQ ID NO: 4138

SEQ ID NO: 4226 - DNA, 201 bp, Homo sapiens; identical to SEQ ID NO: 4139

SEQ ID NO: 4227 - DNA, 201 bp, Homo sapiens; identical to SEQ ID NO: 4140

SEQ ID NO: 4228 - DNA, 201 bp, Homo sapiens; identical to SEQ ID NO: 4141

SEQ ID NO: 4229 - DNA, 201 bp, Homo sapiens
ggcacgatctccactcactgcaacctccacctcctgggttcaagcaattctcctgcctcagcctcctgagtagctgggattacaggtgcccgccaccacayccggctaatttttgtatgtttagtagagacggggttttaccatgttggccaggctggtcttgaactcctgacctcaggtgatccacctgcttcagcctcc

SEQ ID NO: 4230 - DNA, 201 bp, Homo sapiens
gtggcacgatctccactcactgcaacctccacctcctgggttcaagcaattctcctgcctcagcctcctgagtagctgggattacaggtgcccgccaccayacccggctaatttttgtatgtttagtagagacggggttttaccatgttggccaggctggtcttgaactcctgacctcaggtgatccacctgcttcagcct

SEQ ID NO: 4231 - DNA, 201 bp, Homo sapiens
tctgtgcaatgttgcagaaaagggtcctgcttactgccagcggctgtggccagggcccctgcttcccgccttgctgcacacactagccttttctgacactraagtagtaggccagagtttggagctgctgcatctgctgttcctgtatcagccagaggtataggtttctggcccacatcctcagtcacccctgttctgaag

SEQ ID NO: 4232 - DNA, 201 bp, Homo sapiens; identical to SEQ ID NO: 4147

SEQ ID NO: 4233 - DNA, 201 bp, Homo sapiens; identical to SEQ ID NO: 4148

SEQ ID NO: 4234 - DNA, 201 bp, Homo sapiens; identical to SEQ ID NO: 4149

SEQ ID NO: 4235 - DNA, 201 bp, Homo sapiens; identical to SEQ ID NO: 4150

SEQ ID NO: 4236 - DNA, 201 bp, Homo sapiens
ggtcggagggaaaaacaggaagcggaaaggctgcgaacgcaaagcagtgtgggttgattctgaggtgcactgtgggaaagagcttgtcgctgcggtgttgytgttggagactcgattgttggtgacagcgaaagaacgataacaaaatgccggagcgagatagtaaggctcaggccatccgttatttcttccccatggcac

SEQ ID NO: 4237 - DNA, 201 bp, Homo sapiens
aaagctgttgcacattttaaattcatgtgtctggctaggaagggctttgggtttggacactttcccatctgggcagggctttgggtttggacactctcccrcctgctatcagggtttggtaagaaccactggcatcttcgtggttcctacttacagccctgcttctgccagcagctccatcttggcctccactctccctca

SEQ ID NO: 4238 - DNA, 201 bp, Homo sapiens; identical to SEQ ID NO: 4152

SEQ ID NO: 4239 - DNA, 201 bp, Homo sapiens
gtattcttatcagtaaaaaggataataatatccacttcatagggctgttgcaaagattaaatgacgcaaagcttgcatagcacttggcatggtggctagcrcagagtaagcacataagtgacagctgttcttgtagatcctggctacttgctgctcttctccttattgtaggccgcaatgtttaccgaatgctttttaaga

SEQ ID NO: 4240 - DNA, 201 bp, Homo sapiens; identical to SEQ ID NO: 4154

SEQ ID NO: 4241 - DNA, 201 bp, Homo sapiens
ggctggagtgtaatacctagatctcggctcactgcaaactccgcctcccaggttcaagcgattttcctgcctcagcctcctgagtagctaggattacaggygcccaccacaacgcccagctaatttttttgtatttttagtagagatgggatatcaccatgttggccatgctggtcttgaactcctgacctcgggtgatcc

SEQ ID NO: 4242 - DNA, 201 bp, Homo sapiens
gaagtccctgcggggccggagagagcgccgcgcgtgctgtgggcgggggcttccctcaacttcagggaggtcgaggtcgtgaccctggcgtcccgaagccygcccgcctcaccacgccgcgcctcacctgacgccctggctgccgggcgagcgctgacataagtggatgcgaatctcacgcaggcccagctttgccccgac

SEQ ID NO: 4243 - DNA, 201 bp, Homo sapiens; identical to SEQ ID NO: 4155

SEQ ID NO: 4244 - DNA, 201 bp, Homo sapiens
tttattattaactacggtgagcaatgtattgcatgggtccagcctcagctgggagcccattctctctctttttttttttttttttttgagacggagtctcrctctgtcacccaggctggagtgtggtggcacgatctccactcactgcaacctccacctcctgggttcaagcaattctcctgcctcagcctcctgagtagc

SEQ ID NO: 4245 - DNA, 201 bp, Homo sapiens; identical to SEQ ID NO: 4157

SEQ ID NO: 4246 - DNA, 201 bp, Homo sapiens
attagcaagctgacccagatcctttcatacctgaggcagggaacccgtaacaagaagcttaagaagaaggataaaggtacctggagggttagagagagaarccttacccacagaggacgtttggggataaaaccaaggtctcctggagctttctgtctccagaatattgagaggctcctgggaagcagagaaaaatgggag

SEQ ID NO: 4247 - DNA, 201 bp, Homo sapiens
ggaataggcctatctatattttaatctcatcttcgctagtttcttggtggataacctagacatttgcttagcctctctaatccacagatagaatggagatmcagtagcaataataacttttatcaggatgtcatgaggatcagctgtgaaagtacatgtaggcatttagcaccaatgcctggcatatggtaaccacccaat

SEQ ID NO: 4248 - DNA, 201 bp, Homo sapiens
tcatatgtcatttatgtctcctcaggtagattgaaagatttttcagtttggggcttatgagttaaaagaagtaacatggttagtgattaaaagttcaaaayttggagtcagagagacctgagtttaaaccttgatgatgaaacagcactaagtgtatgattttaggcaactgactttgctgtttgttcatctgtaaaaatt

SEQ ID NO: 4249 - DNA, 201 bp, Homo sapiens; identical to SEQ ID NO: 4160

SEQ ID NO: 4250 - DNA, 201 bp, Homo sapiens; identical to SEQ ID NO: 4159

SEQ ID NO: 4251 - DNA, 201 bp, Homo sapiens
attgcccttcaaattggttatactggtttacattctcatcagcattatatgagagagtccccttcccaaattctcactcacacttgatttatcaaactttytggtagttaacactctgatgcattaaaagtggcatggcatatctggtcgggcgtggtggcttacacctataatcccagcactttgggaggctgaggtggg

SEQ ID NO: 4252 - DNA, 201 bp, Homo sapiens
tccttcctatttctttctactaagtagaatgacttttaatagtccctcaggtatttatgatactctctaaagtttgagaactgcccacctacaaatattgrtgtggatttctgcttgattgaaagtgttactttgatcagtattctaggtctttctaaaaatcctcaaggagacttcttggggtttctggggctgtggcaa

SEQ ID NO: 4253 - DNA, 201 bp, Homo sapiens
caggccaagtgctccggtctgaccaaccgcggaccctaaagcctagcccataggctgcatgaggcaggggcggggtaaagcttggccaatgatataaaagyattgtaggaccgctgcgaggtcaatttctttgcgctcggggttggtcggagggaaaaacaggaagcggaaaggctgcgaacgcaaagcagtgtgggttga

SEQ ID NO: 4254 - DNA, 201 bp, Homo sapiens; identical to SEQ ID NO: 4162

SEQ ID NO: 4255 - DNA, 201 bp, Homo sapiens
cgtcccgaagcccgcccgcctcaccacgccgcgcctcacctgacgccctggctgccgggcgagcgctgacataagtggatgcgaatctcacgcaggcccasctttgccccgactcctcgacttgctgcggccgccgccatccttgttaatatcgaagtcgccaattccaggtcttcaggccaagtgctccggtctgaccaa

SEQ ID NO: 4256 - DNA, 201 bp, Homo sapiens
gggagaagaggaacttgattagatatcaagttggattggatatcaagagtgggaaaactttctgtgaactgacttaggattcctttttaaaactgaggtcrgcaggccaaggaagagccctagtcagaagagagctttaaaggagtctgactttaatttgatcaagagaggagtctttgttagtgtaccaattaaaataat

SEQ ID NO: 4257 - DNA, 201 bp, Homo sapiens
cacagttttaacaaagaaatcaaccaccgctccacccccatacctaaccaagttgcttttagtaattttctataaattctcacttgtccctgttgtattcrgaattaagttcagtctctctactctattacaatggtcttgactcttgttacagtagtcttcaataaagtcttccttggggagaagaggaacttgattaga

SEQ ID NO: 4258 - DNA, 201 bp, Homo sapiens
tgcctcccaaagtggtgggagtacaggcgtgagccaccgtgcctggcccccgataaaatcatctttgataacatccccaattccagtccatttcttttttyttttcttttcttttcttttctttctttttttttttttttgagacggagtctcactgttacccaggctggagtgcagtgatgcaatcttggctcactgcaa

SEQ ID NO: 4259 - DNA, 201 bp, Homo sapiens
ctgttgcccagccaggtcagcaatcctctgctcattggccatggggctctgtctactctggggttgctgctgttggacttggctggggctgtccagaaaascgaggatgcaggactggagctggtaggtgaagatgtcaggtgaaattctgggagatgtttcttgatactctggaatgcaggtaacctcttccttcttaca

SEQ ID NO: 4260 - DNA, 201 bp, Homo sapiens
catgactttaggtaaattacttaaatctcagccatagtattcttatcagtaaaaaggataataatatccacttcatagggctgttgcaaagattaaatgaygcaaagcttgcatagcacttggcatggtggctagcacagagtaagcacataagtgacagctgttcttgtagatcctggctacttgctgctcttctcctta

SEQ ID NO: 4261 - DNA, 201 bp, Homo sapiens; identical to SEQ ID NO: 4166

SEQ ID NO: 4262 - DNA, 201 bp, Homo sapiens; identical to SEQ ID NO: 4167

SEQ ID NO: 4263 - DNA, 201 bp, Homo sapiens; identical to SEQ ID NO: 580

SEQ ID NO: 4264 - DNA, 201 bp, Homo sapiens
tccttggacaaatcaactaaccaccttaagcttcagtctcctcacttataactgaggataatcttgcatcatagggtagttgtaggagtatgagaacatgyatgtagaagagcttggcatggtgcctgggcatgtggtcaccatgtcatatattttagctattgttatgatctttgtgtttcattctttgtagactatata

SEQ ID NO: 4265 - DNA, 200 bp, Homo sapiens
ggtggagggaggagttggggctctgagggatggaccacaagctaagcagggctctggtactcactcacataggctggagggcagcatgcggaccctggtygggctcctgaccagcaaccaggccctgctgcagcttgaggcggctcggtgcctgcatgagctctctcactccgagcagtccactgttgctgaggcctgcc

SEQ ID NO: 4266 - DNA, 201 bp, Homo sapiens
tcacgcaggcccagctttgccccgactcctcgacttgctgcggccgccgccatccttgttaatatcgaagtcgccaattccaggtcttcaggccaagtgcyccggtctgaccaaccgcggaccctaaagcctagcccataggctgcatgaggcaggggcggggtaaagcttggccaatgatataaaagtattgtaggaccg

SEQ ID NO: 4267 - DNA, 201 bp, Homo sapiens
aactaatgaagattaaatgagttaggcagggaagcactcagcacagggcccagctctatgtgcaaaattactgagattctcacacactacctggactgacwctggctacacgttatttggagaaactatattgactaacttctctcctgtctgaagcccattcttaactacaaaaacgtcagctcctggtccctacgcagg

SEQ ID NO: 4268 - DNA, 201 bp, Homo sapiens; identical to SEQ ID NO: 4172

SEQ ID NO: 4269 - DNA, 201 bp, Homo sapiens
gtggtgggagtacaggcgtgagccaccgtgcctggcccccgataaaatcatctttgataacatccccaattccagtccatttctttttttttttcttttcytttcttttctttctttttttttttttttgagacggagtctcactgttacccaggctggagtgcagtgatgcaatcttggctcactgcaacctctgcctcc

SEQ ID NO: 4270 - DNA, 201 bp, Homo sapiens
tccccatggcacttggggcacttggcgcattattgtagcttctgagcttaagccgggtgtgtgtgtgtgtgtgtgtgtgtgtgtgtgtgtgtgtgtatgtrtgtatgtgtgacgcttgagcccggagaagccacagggtcctaagtgaggccgacagctccaaactccgtccccagtcctcactcctactccaagtgatga

SEQ ID NO: 4271 - DNA, 201 bp, Homo sapiens; identical to SEQ ID NO: 4174

SEQ ID NO: 4272 - DNA, 201 bp, Homo sapiens; identical to SEQ ID NO: 4175

SEQ ID NO: 4273 - DNA, 201 bp, Homo sapiens
ttctagaatgttctagactcctgactttcttgaatggtcttgattcattttgatgcagggcttttgtgcaggctgttttatctctggaatatcctttcacrgcacttcgtttccctcccttcacctactgtattgtaattcagtctttagtttgttaagtgaatgaatgaataaatgaagagatttctgctgagtggttta

SEQ ID NO: 4274 - DNA, 201 bp, Homo sapiens
gatcaaaatacatttggtatgcctagaattaatacaataggtctcaaacacatctaggaagcccaagtccaaatagaattttggctgattctggatggccrcaatgggttgtttcagggaagctttcgggggcactgtaggcatttattattaactacggtgagcaatgtattgcatgggtccagcctcagctgggagccc

SEQ ID NO: 4275 - DNA, 201 bp, Homo sapiens
atccagtcctaactatagttgtttctctgggcctggctaacctatataggttccatgtcagaaacttcatcctcttgttggggaatgcaccctctggagtrggctgacccatgaggctgtgggaattgagtcttaggacacagagaccaggtgtgttgaattttcttccctgcccctaggctgttcaggtcttcctgcagc

SEQ ID NO: 4276 - DNA, 201 bp, Homo sapiens
gtttctggcccacatcctcagtcacccctgttctgaagccacacagtggctcccttcccatccagtcctaactatagttgtttctctgggcctggctaacytatataggttccatgtcagaaacttcatcctcttgttggggaatgcaccctctggagtaggctgacccatgaggctgtgggaattgagtcttaggacaca

SEQ ID NO: 4277 - DNA, 201 bp, Homo sapiens
ccctggatctgattgagcctctcttacagctgttgccagtatctaacgtggtgagcgtaatggtatgtattggggttacttgaatccaagatctggtagtyggattgtatgggacagcagtcctgagccctcagatgtacccttagttgagagccagcaggtggtggtgtgtggcctcagggcccaaccaatctaggtgtg

SEQ ID NO: 4278 - DNA, 201 bp, Homo sapiens; identical to SEQ ID NO: 4179

SEQ ID NO: 4279 - DNA, 201 bp, Homo sapiens; identical to SEQ ID NO: 4180

SEQ ID NO: 4280 - DNA, 201 bp, Homo sapiens
agaaaaatgggagtactggagcattggcaaggagacagttacagccagattctgtctccttaacctacctaagaagcagtggtcaggtctgaagcatgagkgatggagagtgggtagcttatgtcctatttatttattttttttaaaagagattttttggtgaaaaccagaaaacctagacagattctaaaaaggctctaa

SEQ ID NO: 4281 - DNA, 201 bp, Homo sapiens
accatgcttggctaatttttgtattagtagagacagggtttcgctatgttggccaggctggtcttgaactcctgacctcaaatgatctgcccgtctcggcrgcccaaagtgctgggattacaggcgtgagccactgcgcctggccctcctactcttttttaaatgcatttatacacatacatgcatatctgaggaaaacac

SEQ ID NO: 4282 - DNA, 201 bp, Homo sapiens; identical to SEQ ID NO: 4183

SEQ ID NO: 4283 - DNA, 201 bp, Homo sapiens; identical to SEQ ID NO: 4182

SEQ ID NO: 4284 - DNA, 201 bp, Homo sapiens; identical to SEQ ID NO: 4181

SEQ ID NO: 4285 - DNA, 201 bp, Homo sapiens
gcattaagagctggagaggatggtgaagttcagtggaaattaactgaggagtatgttcctgactcctctctttaaatttcagggaagctggaagagaagaracctcctgaggctgacatgaagtatgtatcctagcccctggcatctgatcagagggagggggtctgtacatttcttgtgtctggcattttggggaggtgc

SEQ ID NO: 4286 - DNA, 201 bp, Homo sapiens
catttcttgtgtctggcattttggggaggtgctgacatgagaatctggagaaatggtcagggggagtgaaggtgtatgtgtgaatttggccagctagtgakctccattttcccagtatttttgaagacattggggattacgtaccctccacaaccaagacacctcgggacaaggagcgggagagatatcgggaacgggagc

SEQ ID NO: 4287 - DNA, 201 bp, Homo sapiens
tgaaaagtgcctgttcatgtcttttgctcgtttttaaaggggttatttgttttctgcttgttcaattgtttccattccttatagatttgggatattagacscttgttgcatgcatagtttgcaaatcttacattctataggttgtctgtttactctgttgatagtttatacaatgtgtgcagaaattctttagtttaatta

SEQ ID NO: 4288 - DNA, 201 bp, Homo sapiens
tctcagctcactgctgcctccacctcccaggttcaagcgattcttctgcctcagcctcccaagtagctgggattacaggcaggtgccaggacgcccggctratttttgtatttttagtagagacagagtttcaccatgttggccaggctggtcttgaactgctgaccacaggtatctgcccaccttgacctcccaaagtgc

SEQ ID NO: 4289 - DNA, 201 bp, Homo sapiens
catttttatcattaatttctctgaactctcttgtagtttatttacccaatagcatctttcaatatctgtcagtattttcacctctgcactcatatggtccscacaaaaaacactataatagttaaggactgagtctggagtcagaggtacaattctcaattctatcacttagtagtgttagttaaaattgtatagttccta

SEQ ID NO: 4290 - DNA, 201 bp, Homo sapiens
aaagcctaatttcattttctctgctgtcagaacaggttctttggtgataccacatgcatttttagtaacctgtttcaatagtactatctacttgagcattstcattttctctcttttattttctttttagaaaggacctcccaaatgggtttgcttaaaagttaggtaagtgagaggagtagtatgatcatttttatcatt

SEQ ID NO: 4291 - DNA, 201 bp, Homo sapiens
acattaaaaacttttaatgaagttcaataatcaactattttcctgtaagaaaattatttttaactttttttgctttcaaaattcaaagatattttatggawcagttggaataaatatttgcaataaggcacagttatccttgagtataaggacagaaagcctaatttcattttctctgctgtcagaacaggttctttggtg

SEQ ID NO: 4292 - DNA, 201 bp, Homo sapiens
agtgtctttcaaagagaggacattaaaaacttttaatgaagttcaataatcaactattttcctgtaagaaaattatttttaactttttttgctttcaaaaytcaaagatattttatggaacagttggaataaatatttgcaataaggcacagttatccttgagtataaggacagaaagcctaatttcattttctctgctgt

SEQ ID NO: 4293 - DNA, 201 bp, Homo sapiens
atactgagtaatgggatgactaggttgaatggtagtttattttaagttctttgagaaatctccaaactgctttctacagtggctgacgtaatttgcatgcycaccaacagggtacaagcgttcccattgctccacagcttcactagcatctgttttttttttttttaactttttgatagtagctattctgactggtgtgag

SEQ ID NO: 4294 - DNA, 201 bp, Homo sapiens
ttttcagttcagactgctgaaaaagtttttctgtgatgctccctagcatctattctctttctcttatagaagtgagagactacatctctttgattaaattyatatttttaaatgttttctcttatggaaacacaccaggaaaatgcagctcagaaccgcaagcctgttatccattctctatgtctttgtcatgtgttatat

SEQ ID NO: 4295 - DNA, 201 bp, Homo sapiens
ggatacacattattttcagcaaacacaaaacatttatcaaaattgaccatatatgcataacataaattttagcagagaaaattttatgtaaatggaaactygaacatatattttaaaaatagtctatggtggaagaaaaatcacaataaatttagaaaatatttaaaattaagtataataaaatatagtaaaaccttgtga

SEQ ID NO: 4296 - DNA, 201 bp, Homo sapiens
tctttttataggtttggaggtacttgtttcatgaatctgggtgctccaatgctgagtgcatgtatatttggggcagttaagtcttcttgttgaattgaacmctttattattatgtagtgcctttctgtgtcatttttttactgttgttggtttaaaatctgttttatcttatataggaatagtgattctttctttttttct

SEQ ID NO: 4297 - DNA, 201 bp, Homo sapiens
ctaacgctctatgcactcatcagcatggcatcaaaatatgtaaagtaaaagttgacaggacttctaaaagacatagataaacctatactcatagcaggatrgtttaacattaaatctcaagaaataatagaataaaaagacaaaactcagaaaaggtaaataggatttaaataacatgattacaaatagatctagtggatg

SEQ ID NO: 4298 - DNA, 201 bp, Homo sapiens
ttacgacctctatgctatgtacaagatatatatctaaatcctaataacaaagagaagttaaaagtaaaatttagaaaaatcacaccataaaacactaacawaaataagctaatgtaatcattttaatatatactaaatagattttttttttttgagacggagtctcgctttgtcacccacactggagtgcagtggtgtgat

SEQ ID NO: 4299 - DNA, 201 bp, Homo sapiens
accacccccatcattcaattatctcccactgagtccctcccataacacatgggaattatgggagctacaattcaagatgagatttgggtggggacacagcmagaccatatcattctgaatataagttctttatcagacatatgttttataaatattttctgccagccagaggcttgtcatttcattttctttacagtgtct

SEQ ID NO: 4300 - DNA, 201 bp, Homo sapiens
aatgacagccaagcgaaaggggaaaccccttataaaaacatcaagtttcatgagacttattcactaccatgagaacagtatgggggaaaccacccccatcwttcaattatctcccactgagtccctcccataacacatgggaattatgggagctacaattcaagatgagatttgggtggggacacagccagaccatatcat

SEQ ID NO: 4301 - DNA, 201 bp, Homo sapiens
aagaaaaagaggtttaattgactgacagttccacatggctggaaaggcctcacaataatggcagagacaaaagtcacgtcttacatggtggcagtgaagasagaatgacagccaagcgaaaggggaaaccccttataaaaacatcaagtttcatgagacttattcactaccatgagaacagtatgggggaaaccaccccca

SEQ ID NO: 4302 - DNA, 201 bp, Homo sapiens
ctttgtcatgtgttatatcacaagttctaaaaactgtggtattttttcatataccagcaagtacagtaccattcctcaggcctatttgtacagatttgggrtattatcaagttgtgaccggcatccccaaacccttttctctagataggtaggaagaacaccctaaaatgaaaaagtataaaagatctcttcagccctggg

SEQ ID NO: 4303 - DNA, 201 bp, Homo sapiens
cggataaaatgtgaaggcatttggtgcctatggagggatggtggtgagcactgctaagtagtgatgaggcagggaatgagaaagatggatgctttgtaaaygagtttctctttagtcacagtattgaccagatccagctttagctccacaagaaattgagcactcttttgaaatagcataggtaagtctttgcatatttta

SEQ ID NO: 4304 - DNA, 201 bp, Homo sapiens
tattttagatacagggtctccctatgttgcccaggccggtctcaaacttttgggctcgagcggtcttcccgcctcaatctcccaaattgctaggattacarggatgagccacaacccctggcaacttttattatagtatattgttttaattgttctattttattattagttatttttgtaatcttttactgtgcttgattt

SEQ ID NO: 4305 - DNA, 201 bp, Homo sapiens
acatttttttactttttatttttttaatttttatttattttagatacagggtctccctatgttgcccaggccggtctcaaacttttgggctcgagcggtcytcccgcctcaatctcccaaattgctaggattacaaggatgagccacaacccctggcaacttttattatagtatattgttttaattgttctattttattat

SEQ ID NO: 4306 - DNA, 201 bp, Homo sapiens
ccaaggttaattatctcaaaacaattatgtaatcttcctcttttagaaatccttgtcttttctaatgtccctgaatacacacataatttactatggcacawgtattctcattgcaatattactcccaaataaatatcattttcttttagagcatctccctctgtttgctatttagctagacagtaggcaattattttctaa

SEQ ID NO: 4307 - DNA, 201 bp, Homo sapiens
acgttttcagaattttggtaatccactttttttcggtagtttttgaaagagtggggcggggtgaggaaccttgactcttcacaatgaacacattagtcccygcttatctgcagtttcagtgacccaaggtcaaccacagtccaaaaataggtgtgtacagtacagtaaggtatcttgagagagtgagagacaccacactat

SEQ ID NO: 4308 - DNA, 201 bp, Homo sapiens
  misc_feature (1)...(201): n = A,T,C or G, or insertion/deletion polymorphism (see Tables 1-2)
acccttgttcctgatccttggatccaaggttaattatctcaaaacaattatgtaatcttcctcttttagaaatccttgtcttttctaatgtccctgaatanacacataatttactatggcacaagtattctcattgcaatattactcccaaataaatatcattttcttttagagcatctccctctgtttgctatttagcta

SEQ ID NO: 4309 - DNA, 201 bp, Homo sapiens
  misc_feature (1)...(201): n = A,T,C or G, or insertion/deletion polymorphism (see Tables 1-2)
ataacaagagctaccagaaaagactctacaaaacaacaacattgcacaaaggccactgcaaccctacacaaaaagatacttctgcaaggacatctgctcanaacctccttgtctaaccttagacaggtgtcacccttgttcctgatccttggatccaaggttaattatctcaaaacaattatgtaatcttcctcttttaga

SEQ ID NO: 4310 - DNA, 201 bp, Homo sapiens
gtaataaaatacaaacattcataattcacaaattatatctttattaaataaaaatagctttgtattcatctagctaaatggctacttattatcttataatyaagataaagtgttttatttatattaattttgaattagacaatctttcttgagtctccacgttttcagaattttggtaatccactttttttcggtagtttt

SEQ ID NO: 4311 - DNA, 201 bp, Homo sapiens
ataagttaggtgttttgttttagtaacataccagttcaagaggccagtctcatacttgccaagatagcttagtctatgctgtactaacaagatccccaaakctcagggactccacgtaggagaagtttttgttgtttgtttttgtttttgatttctgttacatgtcctgtgctcatagtggtcacaaaagaatccaggctg

SEQ ID NO: 4312 - DNA, 201 bp, Homo sapiens
cttcagccctgggtcaagaatgcaaatggaagaccacatgccacatagctacatatttaaaggtcataaatatacaaacctaacaaactgttaaaggagayattttctattctatcttgacaaatataccattataacaacaaaatagaaaatatctacctattttaagttataattgaaacttgcaaatcattaaagatg

SEQ ID NO: 4313 - DNA, 201 bp, Homo sapiens
tgcctgccaccatgcccggctaattttttgtagttttagtagagacttggtttcaccatgtgttagccatgctggtctcgatctcctgacctcatgatccrcccgcctcggcctcccaaagtgctgggatttcaggcgtgaggctaaatagattttaaggaaaaagacattagaatagataatgtcacctcatgtgagtag

SEQ ID NO: 4314 - DNA, 201 bp, Homo sapiens
cctcccagtagctgggactacaggtgcccgccaccatgccaggctaattgtttgtattaatagtagagatggggtttcaccgtgttagccagggtggtctygatctcctgaccttgtgatgcacctgccttagcctcccaaagtgctgggattacaggcgtgagccaccgtgcccagccatggctgagttttaaccaggct

SEQ ID NO: 4315 - DNA, 201 bp, Homo sapiens; identical to SEQ ID NO: 601

SEQ ID NO: 4316 - DNA, 201 bp, Homo sapiens; identical to SEQ ID NO: 602

SEQ ID NO: 4317 - DNA, 201 bp, Homo sapiens
tgtatttctacattattaggaatttgaaacttatttgaggaaattattggcagattctattgtaaattaaaaacatatactacagcatacttagatgttarttgtaaatctacaatcttttgtttggcaatggctcttcaattctaaatcattcattgagatgggtgatttaggtaattattttattatctcaagtactcc

SEQ ID NO: 4318 - DNA, 201 bp, Homo sapiens
cttgtctataaaagattttatttctccttcagttataaaggttagtttgatggaatatacaattattggttggaaaattttctttcctttaagaatgcttwaagtaggcctccaatctctcctggcttgtaaggtttctgctgagctatatacttggccttatggggttccctttgtatgtgatctgatctttttctctag

SEQ ID NO: 4319 - DNA, 201 bp, Homo sapiens
gcttgtctataaaagattttatttctccttcagttataaaggttagtttgatggaatatacaattattggttggaaaattttctttcctttaagaatgctktaagtaggcctccaatctctcctggcttgtaaggtttctgctgagctatatacttggccttatggggttccctttgtatgtgatctgatctttttctcta

SEQ ID NO: 4320 - DNA, 201 bp, Homo sapiens
atctgtccaatcttctcagtggggtgttgaagtcccccaatattattgagtgggtatctaaatctttttataggtttggaggtacttgtttcatgaatctkggtgctccaatgctgagtgcatgtatatttggggcagttaagtcttcttgttgaattgaaccctttattattatgtagtgcctttctgtgtcattttttt

SEQ ID NO: 4321 - DNA, 201 bp, Homo sapiens
gctgtagttttgtcatagatggctcttattattttgaggtatgttccttcaatgcctaattatttgagcgttttttcaagagtccagaatttccttgttarttttctgcctcaatgatctgtccaatcttctcagtggggtgttgaagtcccccaatattattgagtgggtatctaaatctttttataggtttggaggtac

SEQ ID NO: 4322 - DNA, 201 bp, Homo sapiens
ggagtgatgggagtggggacccttttcttgttccagttctcaaggggaatgctttcagtttttgcatgttcagtgtaatgttagctgtagttttgtcataratggctcttattattttgaggtatgttccttcaatgcctaattatttgagcgttttttcaagagtccagaatttccttgttaattttctgcctcaatgat

SEQ ID NO: 4323 - DNA, 201 bp, Homo sapiens
cagttctctttcacctccttggttagctgtagtcctagttgttttttttttttttttttttttttttttttttttttttttgaggctattgtaaatgggaytgcattcttgatttggctctcagcttgaagatttttattgtatagaaatgctactgatttttgtgaattgatttgtatcctgaaactttacagaagtcct

SEQ ID NO: 4324 - DNA, 201 bp, Homo sapiens
aaggtaaaggttcagtttaattattttgcttatggctagccagatatcccagcaccatttactgaatacggagtcctttccccattgtttatttttgtcarttttgtcaaacatcagatggctgtagttgtgtgtctttatttctgggttctctattctgttccattggtctatgtgtctgtttttataatattaccatgc

SEQ ID NO: 4325 - DNA, 201 bp, Homo sapiens
cccatcctgagttaatttttgtatatggtgaaaggtaaaggttcagtttaattattttgcttatggctagccagatatcccagcaccatttactgaatacrgagtcctttccccattgtttatttttgtcaattttgtcaaacatcagatggctgtagttgtgtgtctttatttctgggttctctattctgttccattggt

SEQ ID NO: 4326 - DNA, 201 bp, Homo sapiens
gaggcaggagaatggcatgagcctgggaggcggagcttgcggtgagccgagattgcaccactgcactccagcctgggcgagagagcaagactccgtctcaraaaaaaaaaaaaaaaaagggcagggtagagggatagacaatggctgcaaagttgagggatctaatttagatggaggatcaggggagtaaaatatgggcag

SEQ ID NO: 4327 - DNA, 201 bp, Homo sapiens
ggtgggcggatcatgaggtcaggagatcgagaccatcctggctaacacggtgaaaccccgtctctactaaaaatacaaaaaaattagccaggcgtggtggygggcgcctgtagtctcagctacttgggaggctgaggcaggagaatggcatgagcctgggaggcggagcttgcggtgagccgagattgcaccactgcactc

SEQ ID NO: 4328 - DNA, 201 bp, Homo sapiens
gaaccaatgcgcctggccagtttccacttataagcgagaacatgtggtacttagttttctgtgcctgtattaatttgcttaggataatggcctccagccayatccatgttgctgcaaaggataaaattttgttcttttttatggctgcatagtatctcatggtgtgtatgtaccacattttcctatcacctttatattctg

SEQ ID NO: 4329 - DNA, 201 bp, Homo sapiens
gcattctttttgcttccctcataatcctggacctgcacaggattagaatttcagtcattctttcctaatgaaccatgtttaagttttatcactttgtaatrctctcttattcttctccaaactcagtcttatttccctgtggttttcatttataagggaagaaaagaaaggacgacaagtctatttttagggatccattaa

SEQ ID NO: 4330 - DNA, 201 bp, Homo sapiens
gaaaagcacctttatttataaaatatgaattcaacttgctctacttggcaggaaggtacctagacctcactcacctattcaaggaaactgagtcacttccwgtttcaaaccacagtttttccaggttaactcaatctctgtagcatttaccatatccagcctcaaaggaccccacccatccatcctttctttgttcctttg

SEQ ID NO: 4331 - DNA, 201 bp, Homo sapiens
atattctattctagtgtcagtggcattctttttgcttccctcataatcctggacctgcacaggattagaatttcagtcattctttcctaatgaaccatgtktaagttttatcactttgtaatgctctcttattcttctccaaactcagtcttatttccctgtggttttcatttataagggaagaaaagaaaggacgacaag

SEQ ID NO: 4332 - DNA, 201 bp, Homo sapiens
gtctattcaatgcatgatgagaagccacaagaaaattccaagcaaggaagttatgtgatctaatttaattttttaaatagcacactttgcagctgcatgawgaatagtctggaggtagcgagaaagccagcaagaccccttgaagggttactgtagttcaggccagaaaccatggtggcttgtggggtggaagtagttagt

SEQ ID NO: 4333 - DNA, 201 bp, Homo sapiens
aggtcaggagatcgagaccatcctggctaacacggtgaaaccccgtctctactaaaaatacaaaaaaattagccaggcgtggtggtgggcgcctgtagtcycagctacttgggaggctgaggcaggagaatggcatgagcctgggaggcggagcttgcggtgagccgagattgcaccactgcactccagcctgggcgagag

SEQ ID NO: 4334 - DNA, 201 bp, Homo sapiens
agtttacattttagtctgggagacagttaataggaaaacaagtataaaacaatataatgtgggatattgttaagtactaaaaagaaaagggtggccgggcscagtggctcacgtctgtaatcccagcacttcgggaggctgaggtgggcggatcatgaggtcaggagatcgagaccatcctggctaacacggtgaaacccc

SEQ ID NO: 4335 - DNA, 201 bp, Homo sapiens
ccaaacccacccctttgtctctctctctcccccgaccctctcctcctcttcccttgcttctgagttgggagggatttgagaagaatgaacccataccaacyccgccctagccagcattcaagatggccccatgaatcttgtctcctggtattcatgctttttctgtagtctcctcccatatggactcagagttggtctgtg

SEQ ID NO: 4336 - DNA, 201 bp, Homo sapiens
tccctccctccttcccctgcttcctgaccccccaaacccacccctttgtctctctctctcccccgaccctctcctcctcttcccttgcttctgagttgggrgggatttgagaagaatgaacccataccaactccgccctagccagcattcaagatggccccatgaatcttgtctcctggtattcatgctttttctgtagtc

SEQ ID NO: 4337 - DNA, 201 bp, Homo sapiens
gagaaatttagagagtgaaaagagtaagagagaagagaaacaagaggaggagaagaaagaggaggcagcctagacttgtgaccaaagcttttacatggggkgaaaaaaagctaaactatattaagagtacatttatgagacaatggcaaagcgaacaagcaagagaaaggattttgacatatctcagttgacattatgaaa

SEQ ID NO: 4338 - DNA, 201 bp, Homo sapiens; identical to SEQ ID NO: 603

SEQ ID NO: 4339 - DNA, 201 bp, Homo sapiens
gagttcatccttaaaggaaatgacattgaacttgtttcaaattcagctgctttgactcagcaaaccacaacagctaaaaaccaggatatcagaacattttrgatggtatctatgtctctgaaaaagggacagttcagcaggctgatgagtaaaatctaagagttgtacagctacagaaacaagatgtcagataattcctaa

SEQ ID NO: 4340 - DNA, 201 bp, Homo sapiens
gtacagttctgtgttctgagattaggtggcattgtgtttcctttttacgttttttattctgtttccacagagaacatttacacactttcaaatgatcctgrtaactattccatacatatgatatcattggcatctatatactttgaaaatatggtagtaatttttttttgccatttatatctactggtgacccccataact

SEQ ID NO: 4341 - DNA, 201 bp, Homo sapiens
cacacttgtaatctcagcactttgggagccaatccaggcaaatggcttgagtccaggagtttgagaccagcctggccatcataatggaaccccatctctaytaaaaatacaaaaatgagccaggtatggtggcatgtgcctgtcatcccagctcctggggaggctgaggtaggaggattgcctgagcctgggaggttgagg

SEQ ID NO: 4342 - DNA, 201 bp, Homo sapiens; identical to SEQ ID NO: 604

SEQ ID NO: 4343 - DNA, 201 bp, Homo sapiens
cttgcagtcatctaatcagttcccataactttcttgataaaaggcagatgttgcttttccatagaatagagatggttatcttggccaaggtgtttatgcargagtgcgggtactaagatgattctagatttgtacctttttaaaagtctgttgtacagttctgtgttctgagattaggtggcattgtgtttcctttttacg

SEQ ID NO: 4344 - DNA, 201 bp, Homo sapiens
ctcccgggctcaagcgattctcctgcctcagcctcctgagtagtggggactacacgcacacaccaccacgcccagctatttttgttgttgttgtttgtttkttttttttttttttgtagttgtttgttttggtagagacggggtttcaccatgtttccgcggctgatctcaaactcctgggctcaagtgatccactgcctc

SEQ ID NO: 4345 - DNA, 201 bp, Homo sapiens; identical to SEQ ID NO: 605

SEQ ID NO: 4346 - DNA, 201 bp, Homo sapiens
tgagcctgggaggcggagcttgcggtgagccgagattgcaccactgcactccagcctgggcgagagagcaagactccgtctcaaaaaaaaaaaaaaaaaaagggcagggtagagggatagacaatggctgcaaagttgagggatctaatttagatggaggatcaggggagtaaaatatgggcagggacttgaattatatag

SEQ ID NO: 4347 - DNA, 201 bp, Homo sapiens
ggcgtttcaccatgttggccaggctggtctcaaactcctgacctcaagtgattcacccacctcaccctcccaaagtgctgggattacaggcgtgaaccaaygcgcctggccagtttccacttataagcgagaacatgtggtacttagttttctgtgcctgtattaatttgcttaggataatggcctccagccatatccatg

SEQ ID NO: 4348 - DNA, 201 bp, Homo sapiens
tcagtcccccttgccaaatgtaggaattcacaagatcaggctcaaacttaaaagtcaatttcttgtaggctgggtgctcacggctgtaatcccagcacttygggaggccgaggcgggtggattgcttgagcacaggaattcaagaccagcctgagcaacatggtgcaactctgtctctacaaaaaagtccaaaaattagct

SEQ ID NO: 4349 - DNA, 201 bp, Homo sapiens
gctactctggagtctctggcttattagcatgtaaaactcggagattctttccctccagttaaagtcatatccacaggatttacatgaaatatattatatayggcacctttctttgtaaggtagctagaaagtggctttgggaattttttttctgagacgagtctctctccgtcacccaggctggagtgccatggtgcagtc

SEQ ID NO: 4350 - DNA, 201 bp, Homo sapiens
cagggttgtcaggttctttggccttctcatctcacagccacaggagcgtttgtgaacttgtgatcctccctagttcccggctctggcagtgggtgcggggaggcctcaacacagccagccccttggttactctactgtgactacctccttttggctccgggctcggtgacctacttccaaataccaaattgcagcatggga

SEQ ID NO: 4351 - DNA, 201 bp, Homo sapiens
tcttggctgcagggttgtcaggttctttggccttctcatctcacagccacaggagcgtttgtgaacttgtgatcctccctagttcccggctctggcagtgkgtgcggggaggcctcaacacagccagccccttggttactctactgtgactacctccttttggctccgggctcggtgacctacttccaaataccaaattgc

SEQ ID NO: 4352 - DNA, 201 bp, Homo sapiens
gtgagaagaagaaaaccacagggaaataagactttgagtttggagaagaataagagagcattataaagtgataaaacctaaacatggttcattaggaaaaagtgactgaaattctaatcctgtgcaggtccaggattatgagggaagcaaaaagaatgccactgacactagaatagagtatttcctgctgggcatggtggc

SEQ ID NO: 4353 - DNA, 201 bp, Homo sapiens
gatgttataacagatccgggctctgtcgaacactcagtcccccttgccaaatgtaggaattcacaagatcaggctcaaacttaaaagtcaatttcttgtargctgggtgctcacggctgtaatcccagcacttcgggaggccgaggcgggtggattgcttgagcacaggaattcaagaccagcctgagcaacatggtgcaa

SEQ ID NO: 4354 - DNA, 201 bp, Homo sapiens
aaaagcaattaattttaggtattgggacacactaaaatctatccagtgtagatttccacactgggagagcaatagcctgtcatagcagctttgcaatcagrtagccctgagatccatgcctgacatctccaattaatggctgtgtgacctggagcaagaaacttaatgtcgctaaatctcactttccttaatagagtcatt

SEQ ID NO: 4355 - DNA, 201 bp, Homo sapiens
tgaacagaagcttggcatgtgggagcttaagagtaagagatgagagaggctgtcagagtacatagggcatgatggggaagggggatacagtagaagatgasattggagaaataaacaggaaacttgcaagcccgggtaaggacttcggtgtctattcaatgcatgatgagaagccacaagaaaattccaagcaaggaagtt

SEQ ID NO: 4356 - DNA, 201 bp, Homo sapiens
ccaacctcaggtgatctgcccacctcagcctcccaaagtgctgggattacaggtgtaagccaccgtgcccagtccacatattatatttttgaagcctctcmggcagtataatatatgctaacataaggtttgatgaattataaaagcaattaattttaggtattgggacacactaaaatctatccagtgtagatttccaca

SEQ ID NO: 4357 - DNA, 201 bp, Homo sapiens
tgtgccaccatgcctggctaattttgtatttttagtagagacagggtttctccatgttggtcaggctggtctcaaacgcccaacctcaggtgatctgcccrcctcagcctcccaaagtgctgggattacaggtgtaagccaccgtgcccagtccacatattatatttttgaagcctctccggcagtataatatatgctaac

SEQ ID NO: 4358 - DNA, 201 bp, Homo sapiens
tgctattgttgcccaggctggagtgtaatggcacaatcttggctcaccgtaacctccacttcccaggttcaagcgattctcctgcctcagcctcccgagtrgctgggattataggcatgtgccaccatgcctggctaattttgtatttttagtagagacagggtttctccatgttggtcaggctggtctcaaacgcccaac

SEQ ID NO: 4359 - DNA, 201 bp, Homo sapiens
tgtacccagtgcttagtttccacttttttttttttcaagttggagtctcgctctgtcacccaggctggagtgcagtggcaatatctctgctcactgcaacytccaccttcgaggttcaagcaattctccctgcctcaacctcctgagtagctgggattacaggcacctgccaccacacccagctaatttctgtatttttgt

SEQ ID NO: 4360 - DNA, 201 bp, Homo sapiens
acaggattcaaccgagatatggagtatctcaaagtaaaatgtgctattcccatctttctattctgtgtttggctccaagtccttaaacattcattcaatayacactatacagatgttcaaagaatgcctagtgtgcattgcttagtgctcaactgtgctaagcattattccacacatggggatggaacaatgaacaagaca

SEQ ID NO: 4361 - DNA, 201 bp, Homo sapiens
tgctcaactgtgctaagcattattccacacatggggatggaacaatgaacaagacaaacaaaggttctgccctcatgaagtttacattttagtctgggagrcagttaataggaaaacaagtataaaacaatataatgtgggatattgttaagtactaaaaagaaaagggtggccgggcgcagtggctcacgtctgtaatcc

SEQ ID NO: 4362 - DNA, 201 bp, Homo sapiens
aataagagagcattataaagtgataaaacctaaacatggttcattaggaaaaagtgactgaaattctaatcctgtgcaggtccaggattatgagggaagcmaaaagaatgccactgacactagaatagagtatttcctgctgggcatggtggctaatgcctgtaatcccagcactttgggaggtggaggcagtggatcgct

SEQ ID NO: 4363 - DNA, 201 bp, Homo sapiens
aatgcacagtaccattcatgtgcagaaaagcacctttatttataaaatatgaattcaacttgctctacttggcaggaaggtacctagacctcactcacctrttcaaggaaactgagtcacttcctgtttcaaaccacagtttttccaggttaactcaatctctgtagcatttaccatatccagcctcaaaggaccccaccc

SEQ ID NO: 4364 - DNA, 201 bp, Homo sapiens
ctctgtacagactctgccctcctcatcttggctgcagggttgtcaggttctttggccttctcatctcacagccacaggagcgtttgtgaacttgtgatccyccctagttcccggctctggcagtgggtgcggggaggcctcaacacagccagccccttggttactctactgtgactacctccttttggctccgggctcggt

SEQ ID NO: 4365 - DNA, 201 bp, Homo sapiens
gtctctgtacagactctgccctcctcatcttggctgcagggttgtcaggttctttggccttctcatctcacagccacaggagcgtttgtgaacttgtgatyctccctagttcccggctctggcagtgggtgcggggaggcctcaacacagccagccccttggttactctactgtgactacctccttttggctccgggctcg

SEQ ID NO: 4366 - DNA, 201 bp, Homo sapiens
gagaaccactactggggaaaggacaaattcagggaaacagtgagctcaatggtgacgccagagctcacgtagcactgggggataccggggttctgatcagyccgaggagagacacctcattgaacatctcgggcattcagtagagaccccagaaaagtcatactttaggagtaggatttatgccttcttagaataaagact

SEQ ID NO: 4367 - DNA, 201 bp, Homo sapiens
tgcaaggtttttatgtctgtccctgactgatgaccaaataccctatagcctgcacagctgcaagctgtatagccatacaatttgcaggacacacacacatacacacacacacacacacacacacacactaacatataatataatataatataatataatataatataatataatataatataattaatatatataaacctg

SEQ ID NO: 4368 - DNA, 201 bp, Homo sapiens
cgcctgtagtcccagctactcaggagactgaggcaggagaatggcttgaacccaggaggcagaccttgcagtgagccgagattgcgccactgcactccagyctgggcgacagagcgagactccgtcacaaaaaaaaaaaaaaatctaaaatgcactcttcaaaatctatgtcatttattctggaggaatgcagttggcaga

SEQ ID NO: 4369 - DNA, 201 bp, Homo sapiens
gcaaggtttttatgtctgtccctgactgatgaccaaataccctatagcctgcacagctgcaagctgtatagccatacaatttgcaggacacacacacatacacacacacacacacacacacacacactaacatataatataatataatataatataatataatataatataatataatataattaatatatataaacctgt

SEQ ID NO: 4370 - DNA, 201 bp, Homo sapiens
tatatatacatatatatgttcatataagttagtattcatatatatgttcatatatatatgttcatacagactagtattcatatatatatacatatatatayacacacacacatatatatatatatatatgttctagggaaacatgcaaggtttttatgtctgtccctgactgatgaccaaataccctatagcctgcacagc

SEQ ID NO: 4371 - DNA, 201 bp, Homo sapiens
accaaataccctatagcctgcacagctgcaagctgtatagccatacaatttgcaggacacacacacatacacacacacacacacacacacacacactaacwtataatataatataatataatataatataatataatataatataatataattaatatatataaacctgtgtgaacacactgggttctaagctccagtttt

SEQ ID NO: 4372 - DNA, 201 bp, Homo sapiens
agaaagtaataaggaataagaatgaaatttatgaacaaacatgtggaaggttggaagcaagagtggggccaacacgcatggggaggaagcatttgggcagygactccgcagacccagactcaagctgagctatacaacctccttacgcctcagtttcctcaactgaagaacaggaatgacaagtgcctgtttcataggacc

SEQ ID NO: 4373 - DNA, 201 bp, Homo sapiens
taatataatataatataatataatataattaatatatataaacctgtgtgaacacactgggttctaagctccagttttctgaagggatatgggttgccagkagaggaagagcaaaagcaagaatgtagatgagaattaggaagtaaacagatatggagattaaaatgggcaggtacatggacaaaaaaccaggtctgacaa

SEQ ID NO: 4374 - DNA, 201 bp, Homo sapiens
accgtcaccatatttccaggacatttttctcatccccaaaggaaacctcatgcccattaagcagtcactcctcattaaaatattagttatgaagactgtakcatttttttaaaaactcatgatataacattgattgaaaaaatcagtataggaaattgtgcattatgatgtaatagtaaaagaagcatataaaaatctgaa

SEQ ID NO: 4375 - DNA, 201 bp, Homo sapiens
attagtttatacattacagaagaaaaagtgaaccagaagataactcaatgaaagccatacaatctgtaagacacacacacacgcacacgcgcgcgcgcgcrcacacacacacacacagagagagagagagagagaaagagagagagagaaaggctgaaaaaaataaatagaaccttaaggatatcagtgaaaatagcaaaa

SEQ ID NO: 4376 - DNA, 201 bp, Homo sapiens
tagtttatacattacagaagaaaaagtgaaccagaagataactcaatgaaagccatacaatctgtaagacacacacacacgcacacgcgcgcgcgcgcacrcacacacacacacagagagagagagagagagaaagagagagagagaaaggctgaaaaaaataaatagaaccttaaggatatcagtgaaaatagcaaaaga

SEQ ID NO: 4377 - DNA, 201 bp, Homo sapiens
ccctccatgggtttgattactttgctagagtggctcacagaactcagggaaacacgttacttttatttacccatttattataaaagatattaaaaaggatmctggtgaacagccaggtggaagagatgcacagggcaaggcacgtgggaaggggctcagagcctctatgccctctccagtgcaccagtccccagtacccta

SEQ ID NO: 4378 - DNA, 201 bp, Homo sapiens
ttttatttacccatttattataaaagatattaaaaaggatcctggtgaacagccaggtggaagagatgcacagggcaaggcacgtgggaaggggctcagakcctctatgccctctccagtgcaccagtccccagtaccctaagtgttcagcaacccagaagctctccaagtgcagtcttgttgggtttttatggaggcttc

SEQ ID NO: 4379 - DNA, 201 bp, Homo sapiens
tttgtgttgtggcaattgtatgatacctttaatgggaatatttcaaagacacttgttaagactttgttagaacaaaatgtagagggtgctggatgtccctsaatattcttccgcctcctgtaacttgtattgctttggaatttccagtggcctgacaatgaactactgcaggaatccagatgccgatacaggcccttggtg

SEQ ID NO: 4380 - DNA, 201 bp, Homo sapiens
ggtgttctgatggcttgaacaagtcacttaggaaatgtggggttttggaggcattctctgataggctgatacgttttgagtttagagttcccaccgcacawccccacacccctagagtctagggcatttagtgctccatgagggaacctgtagagtgaggacatctgcatcacaggctgggccttctagtgtccagaagca

SEQ ID NO: 4381 - DNA, 201 bp, Homo sapiens
ggcttgaacaagtcacttaggaaatgtggggttttggaggcattctctgataggctgatacgttttgagtttagagttcccaccgcacatccccacacccytagagtctagggcatttagtgctccatgagggaacctgtagagtgaggacatctgcatcacaggctgggccttctagtgtccagaagcagaaagtgtgtc

SEQ ID NO: 4382 - DNA, 201 bp, Homo sapiens
acaagtcacttaggaaatgtggggttttggaggcattctctgataggctgatacgttttgagtttagagttcccaccgcacatccccacacccctagagtstagggcatttagtgctccatgagggaacctgtagagtgaggacatctgcatcacaggctgggccttctagtgtccagaagcagaaagtgtgtctgcttca

SEQ ID NO: 4383 - DNA, 201 bp, Homo sapiens
ccatgttggataaatgcatattgtgcactgcccaaaacaaagaaactggaaagtgtaagactttggaatcagcaggcttatgtagcaacagaggtgacccraaagaattaggtataagaagaatagaagaattgcatgaaaatttgacatatgactaagataactatttcaaatatttaaaaaaagatgaatatgtaataa

SEQ ID NO: 4384 - DNA, 201 bp, Homo sapiens
acacactgggttctaagctccagttttctgaagggatatgggttgccaggagaggaagagcaaaagcaagaatgtagatgagaattaggaagtaaacagayatggagattaaaatgggcaggtacatggacaaaaaaccaggtctgacaaaaactggctttctgccataaatgactataaaagatattaaaaaacactttc

SEQ ID NO: 4385 - DNA, 201 bp, Homo sapiens
ctaggacgacatgtccagccaaaacaaacaaataaacaaaaaaaccctttaaaataaacgtgatgtaaatacgtattctgccacctccagaggaaacaagsaaaaaaacaaaagaatgtttccaaggcaggcttctgtattaaaagattttaaggaaagttattcaggtagaagaaaaataataccagatgggaactttaa

SEQ ID NO: 4386 - DNA, 201 bp, Homo sapiens
ctaagaagcgtttgctactttagatttttttttataataataatcttttaagtatgagaaatgtgcagacaggattagtgattgagagccatttgtgcttstggcaatcatatggtacttttatgggaatattagaaaggcactggtaatgaccttgttgcagcacaaaggagagggtgtggggtgcccctgcatattgtc

SEQ ID NO: 4387 - DNA, 201 bp, Homo sapiens
gtaactcggtcctgacactctatctggagacagtgtcagatcccacaagttaaggctcagtcctacaagactgccccactgcagatgccaatcccaagttscaggctgtgacctgtacttctgcccagctggataaagatctgtttttctatatgaccctccatgggtttgattactttgctagagtggctcacagaactc

SEQ ID NO: 4388 - DNA, 201 bp, Homo sapiens
cacaaatgactgatgccttctcatcagaaacaatgaaagtcagaaacaataaagtaacatctttaaagtaatagaagaaaaacccaagaggtgagggatcrtggcagacaggaggcaggactagattgcagctctggacagagcagcatgcagaggctcatattgtgaattttagccccatattgactgcaagaacagacc

SEQ ID NO: 4389 - DNA, 201 bp, Homo sapiens
ggtgtctcttaggaagaacacataggacacagacccatctgcctgcatgttttgcttcctcatctcctttctacaccagggcacctgtgctcaattgctgttctcctctaaagagacttccttctgtaagtttgtgaaatgccatcgacaaacctgatcgcatcgcatttcactctgctgttgagttgatttttctttact

SEQ ID NO: 4390 - DNA, 201 bp, Homo sapiens
tgtctcttaggaagaacacataggacacagacccatctgcctgcatgttttgcttcctcatctcctttctacaccagggcacctgtgctcaattgctgttctcctctaaagagacttccttctgtaagtttgtgaaatgccatcgacaaacctgatcgcatcgcatttcactctgctgttgagttgatttttctttacttt

SEQ ID NO: 4391 - DNA, 201 bp, Homo sapiens
tctcttaggaagaacacataggacacagacccatctgcctgcatgttttgcttcctcatctcctttctacaccagggcacctgtgctcaattgctgttctcctctaaagagacttccttctgtaagtttgtgaaatgccatcgacaaacctgatcgcatcgcatttcactctgctgttgagttgatttttctttactttat

SEQ ID NO: 4392 - DNA, 201 bp, Homo sapiens
gtttcctcagctgatgtgggctgcagggctgttatgggggaaataataagaaagtgcatcaagtgctgagcacatcctaagcactccatcatggcagctcstactactaataaagaatagaattatatctaacatgattctttcttgcaagtgacagaaaatccaactcaaattggattaagcaaaacaagggaaattctt

SEQ ID NO: 4393 - DNA, 201 bp, Homo sapiens
tgctgagtctgggagcactgaggccaggtaaaaggaaacttggcaaatgaggggcacctatgggtgtgggaggctgctcctggtgtttgcatattttaaartttaaatgctacaaaccactgtgagttaggtattattgttcctattttaccattgaggaagctggggctcagagaaggtggagggtggtacagacaaacc

SEQ ID NO: 4394 - DNA, 201 bp, Homo sapiens
atttttatttttttctacagactgtatgtttgggaatgggaaaggataccggggcaagaaggcaaccactgttactgggacgccatgccaggaatgggctkcccaggagccccatagacacagcacgttcattccagggacaaataaatgggcaggtctggaaaaaaatgtaagccactttgatttggactctttttccct

SEQ ID NO: 4395 - DNA, 201 bp, Homo sapiens
tccgcctcctgtaacttgtattgctttggaatttccagtggcctgacaatgaactactgcaggaatccagatgccgatacaggcccttggtgttttaccayggaccccagcatcaggtgggagtactgcaacctgacgcgatgctcagacacagaagggactgtggtcgctcctccgactgtcatccaggttccaagccta

SEQ ID NO: 4396 - DNA, 201 bp, Homo sapiens
cttgcacgtgagcacagtttccattgagaagccctctcatttgtcctttttttctaagcttttatgtgaaatatttctaagaacttactacagttctaaartgttaggaatttgtttctttggtgtttttgtttgttggttggttgttgcttttctcaagtccatctgcctacaaataaagaaacaagaatgttacttgtc

SEQ ID NO: 4397 - DNA, 201 bp, Homo sapiens
catgtcgtcatgaacactctgtagagattcctagaaatgagcttccatgttagtggagtttccgatgagaagcaatctgatatttcttttccactaagttktacatgaaatatttctaagaacttactacagttctagaatggtaggcatctcttactttcgtgtttgtttgtgtgttttctcatgtccatttgcctatta

SEQ ID NO: 4398 - DNA, 201 bp, Homo sapiens
aaatttctatatctttttaaatgagagttgactacttgaagcaaaatgatagcaatatatttaactttagcatatgtagaggtaaaaatttgaacatataractaaatcatgtggggaataattggaagtgtaccattgtaagtttcttaccttatccacgatggtatgtaatattaatgaaaggttgaatttgtgggtcc

SEQ ID NO: 4399 - DNA, 201 bp, Homo sapiens
atattatataataagaattttccatgtatccaaaagagggaagccaaggaagaaaaagaagtctttcaagtactcaagctctgagcacatccagttgctcwttgaaccagcttcctggaatggagggtctgggcttgagactaggtcacatgtgtagagtctctagagagacagtgttggatccccatggcccataataca

SEQ ID NO: 4400 - DNA, 201 bp, Homo sapiens
cgttttctgccccatggcctggaagccagaggccttggctttcatgatcaacgatctagggaaacatgcaaaatttccatgtctttcccctcctctgcccycgacagccaattaccacctgcatcctgcattgccaaatgcagtgccctttgtatgaacattcagtagagtttcatagaaaggtgctacttcgtgagcgca

SEQ ID NO: 4401 - DNA, 201 bp, Homo sapiens
tcgtcatgaacactctgtagagattcctagaaatgagcttccatgttagtggagtttccgatgagaagcaatctgatatttcttttccactaagttttacrtgaaatatttctaagaacttactacagttctagaatggtaggcatctcttactttcgtgtttgtttgtgtgttttctcatgtccatttgcctattaataa

SEQ ID NO: 4402 - DNA, 201 bp, Homo sapiens
aaggaagggccaatggaagtttctgttagaagagtcatgcttcaaggtgactgctcaggactcaacttggctcagatgcagaggaacatttcctgtgagcmaaagttcttagagaagactttgtttttttgagacagagtcttgctttgttgcccaggctggagtgcagtggcatgatctcggctcactgcaagctccgcc

SEQ ID NO: 4403 - DNA, 201 bp, Homo sapiens
ttcacaattcaccttgttctaaaatgggctacctcagtgtcccagccaaaatttttattgtaacgtgctgtcaggtgtgtgactctttcagtccagtaagsttttccggggatttcttcaagtagccagcattcagtgcaatcttcagcattgcagattcagagaaatgtggctctggagcctgtcatcctcgagaaacct

SEQ ID NO: 4404 - DNA, 201 bp, Homo sapiens
aagtttctgttagaagagtcatgcttcaaggtgactgctcaggactcaacttggctcagatgcagaggaacatttcctgtgagcaaaagttcttagagaakactttgtttttttgagacagagtcttgctttgttgcccaggctggagtgcagtggcatgatctcggctcactgcaagctccgcctcccgggttcacacca

SEQ ID NO: 4405 - DNA, 201 bp, Homo sapiens
gccattgctatagcatcctccaggtgtgaaagctgagaagtagatattgagatcaactgtatgtaaataaattcatgaatgtagatcatgtggatggattscttaggtaaataacaaatcagcaaatcaaacactgaatagatcatgcagttttatagagacttacagacagcctgacagataaacatttgtatgtacgtg

SEQ ID NO: 4406 - DNA, 201 bp, Homo sapiens
ctgcctcagcctcccaaagtgctgggattacaggcgtgagccaccgtgcctggctgagaagacattttttaagctggctctccttcctcctagttttatgkaagcagaaggatatatggagttgagaagatcttattaataaaacagccgggatgacaaatgaccaaagagttagagtatccttctacaacatcggctgag

SEQ ID NO: 4407 - DNA, 201 bp, Homo sapiens
ctaggaaaaatccacacatttaatatatgtgttaggcaagtcacagaaggagaagaaaaagatatcatgacagacattatacttgaagcgatgatggctcrcaacacgccaaatatacagaaaacaagaaactcatagtcaagaagctaaatgactcaggtatagaattttaaagagcaaaactctatgatttactgggat

SEQ ID NO: 4408 - DNA, 201 bp, Homo sapiens
aacttactacagttctagattggtaggaatctgtaggtttgctgtatgttttttggttggttttctcccatccatctgcctacaggtaagggaaagataamgttcgtaattctcatagactcctttctggttgtgtcataaatggcttcacatatttcgttattctcagagatactcagtttatttcttgtgttttcattt

SEQ ID NO: 4409 - DNA, 201 bp, Homo sapiens
cacagcagtcttgcttaactgaggagagagactggagtctgcgatgcctcaggcagctgatgtgttctaggctggctaagaatgagaagggatttgtggargaaaggagctccaggaatacacacagaagtctcctcaaggctttggctaaatacaaagctgcgtatgcacagggagagttttcataaagaaagaacaaca

SEQ ID NO: 4410 - DNA, 201 bp, Homo sapiens
gtaggtttgctgtatgttttttggttggttttctcccatccatctgcctacaggtaagggaaagataacgttcgtaattctcatagactcctttctggttktgtcataaatggcttcacatatttcgttattctcagagatactcagtttatttcttgtgttttcatttcagcaccgactgagcagaggcctggggtgcag

SEQ ID NO: 4411 - DNA, 201 bp, Homo sapiens
ggacatgtcagtcttggtcctctatgacaccacactggcatcagagaaccacagaatactacccaaatgggtatgtctttgagttttctcccaagagaaasagccacccacttaaatttctcctggaagagccatgcttccagctaacttcttatgacccaatttctctcagacccagaatgttggacagaatgtctcagg

SEQ ID NO: 4412 - DNA, 201 bp, Homo sapiens
gtcttagccagaagaatattctaacattttgccaaatttgtgaagatttaccaagctcatgataagcctttcatggtatttcttcaagtagtcagtgttcrttgcatctttggctttgcggtttcggaggaatgcggtttttgagtctgtcatccttgagaaacctaatatgacttttcttagttccatatacttctgggt

SEQ ID NO: 4413 - DNA, 201 bp, Homo sapiens
atgtagaacagagcatggtcgtcattttcagagatgatgtcctgtttctatcatggattttttttctcatgcttctgtgttctggaaattactcagtttgwtttctcctctttgaatttcagcaccaacggagcaaagccccacagtccaggactgctaccatggtgatggacagagttatcgaggctcattctccaccac

SEQ ID NO: 4414 - DNA, 201 bp, Homo sapiens
ttgaaggaatgccatttttgaggctgttgttcttgagaaacctaacatgtcttcattagatccgtattgtcctgagactttgaagcagtacatagccaccraattgtttatctccccagcctaccttcatcttgggcatgccttccacacctaggatttgagggaagggatttctcagtgttctcatccctgcttctcatg

SEQ ID NO: 4415 - DNA, 201 bp, Homo sapiens
aggtatgtaactgaatattcatttacacacacaaatatatgtgtgcatgtgtgtatatatatatatacccatatatatatatatatatacacatatatatrtatatatatatagtatatatatatatatatatatatacacatatatatatatatatatatgtatatatatatatatatatatatacacacacacacacac

SEQ ID NO: 4416 - DNA, 201 bp, Homo sapiens
tcccagtgtcagatgggagtactgcaacctgacgcaatgtccagtgatggaatcaactctcctcacaactcccacggtggtcccagttccaagcacagagsttccttctgaagaaggtaagaagcctgcagtcagacaaccataccctcggacattgggataaaaagatttgcaaaatctttgtgatgcagaaaacttcca

SEQ ID NO: 4417 - DNA, 201 bp, Homo sapiens
tttacactttgttacagcaaaatgtagagggcgctaagtgcccttgaatcttctcccatctctggtgacctgtgttgttttgaaatttgcagtggcctgascaggaactactgcaggaatccagatgctgagattcgcccttggtgttacaccatggatcccagtgtcaggtgggagtactgcaacctgacacaatgcctg

SEQ ID NO: 4418 - DNA, 201 bp, Homo sapiens
aatttctatatctttttaaatgagagttgactacttgaagcaaaatgatagcaatatatttaactttagcatatgtagaggtaaaaatttgaacatatagmctaaatcatgtggggaataattggaagtgtaccattgtaagtttcttaccttatccacgatggtatgtaatattaatgaaaggttgaatttgtgggtcca

SEQ ID NO: 4419 - DNA, 201 bp, Homo sapiens
ttctaacattttgccaaatttgtgaagatttaccaagctcatgataagcctttcatggtatttcttcaagtagtcagtgttcattgcatctttggctttgyggtttcggaggaatgcggtttttgagtctgtcatccttgagaaacctaatatgacttttcttagttccatatacttctgggtccaggtagcagtacatag

SEQ ID NO: 4420 - DNA, 201 bp, Homo sapiens
tctccatcttaagccagtcctgcacaactaggctttgatgggagggatctctcagtgttcttgcccctccttctcatggaacatatatctgtgttggtctytgagaagaagagtagtggatatctactttgttgcaatgcagaatcctgggccaaagataccagccatccctccaagggaataaaattttggccagtagcc

SEQ ID NO: 4421 - DNA, 201 bp, Homo sapiens
agttttcttataaagcatagattactttgaatgtgttacaataagaatcataagctgtctttgaaatgttgacagttgtttagaagttgaggaccatttgygagtgttatgggactttagtgagaatatttcaaatttgcttgtttacactttgttacaagaaaacatagagggtgccaggtggtgctgtatcttctccaa

SEQ ID NO: 4422 - DNA, 201 bp, Homo sapiens
ttcttataaagcatagattactttgaatgtgttacaataagaatcataagctgtctttgaaatgttgacagttgtttagaagttgaggaccatttgtgagygttatgggactttagtgagaatatttcaaatttgcttgtttacactttgttacaagaaaacatagagggtgccaggtggtgctgtatcttctccaatctc

SEQ ID NO: 4423 - DNA, 201 bp, Homo sapiens
tagcacgcttatacaaagcctgagaagataaacagagcctcaaggacatctatgaaaatatcaaaatatttaatatttgtttaaagcaagtcacagaggargggaaagagatattggaacagaaaaaatacttgaagcagtgatggctgatgactttctaaatatggaaaaaatgataaactcacatagtcaagaagctca

SEQ ID NO: 4424 - DNA, 201 bp, Homo sapiens
atgggtcatttcagtgtcctagccaaaatggatattctaacagcctgccaaatatgtgaagatttccaagccaataagcctttccagtgatttaaagtagrcttttttcattgcaatctacagtttgcagtttcttaagaacatggcctttgagtatgatatcctagagaaacctaaggagactgcattatttttctattg

SEQ ID NO: 4425 - DNA, 201 bp, Homo sapiens
acggctgacaaatttccaaacatacagaaaatgagaaattcatagtcatgaagctcaatgactcaggtatagatttttaaagagcaaaactctgatttacyggggtacatcatagttaaattgtctgatttcaaagctaagaagaaaaaaagggggttcctatgaacaaacattttgacagttgatctaagaccacagctt

SEQ ID NO: 4426 - DNA, 201 bp, Homo sapiens
gtttgctgagaatgatggtttccagcttcatccacatccctacaaaggacatgaagtcatccttctttatggctgcatagtattccatggtgtatatgtgycacattttcttaatccagtctaccattgatggacgtttgtgttggttccaagtctttgctattgtgaatagtgccgcaataaacatatgtgtgcatgtgt

SEQ ID NO: 4427 - DNA, 201 bp, Homo sapiens
gagcaaagccccggggtccaggattgctaccatggtgatggacagagttatcgaggctcattctctaccactgtcacaggaaggacatgtcagtcttggtyctctatgacaccacactggcatcagaggacaacagaatattatccaaatgggtacaaccttgagttttcttcaaagacagacagcagcccccttacattt

SEQ ID NO: 4428 - DNA, 201 bp, Homo sapiens
atagctcttattattttgagatatgtcccatcaatacatagtttattgagagttcagcatggagagctgttgaattttgtcaaaggccttttctgcatctrttgagataatcatgtggtttttgtctttggttctgtttatatgatggattacatttattgatttgcatatgttgaaccagccttgcatcccagggataaa

SEQ ID NO: 4429 - DNA, 201 bp, Homo sapiens
cacatttcccttttctaggcaatactgagcttgattttctcttttaatttcagcaccaactgaaaacagcactggggtccaggactgctaccgaggtgatrgacagagttatcgaggcacactctccaccactatcacaggaagaacatgtcagtcttggtcgtctatgacaccacattggcatcggaggatcccattata

SEQ ID NO: 4430 - DNA, 201 bp, Homo sapiens
ttctctgctcatgcaattactgagtatgatttattttattttaatttcagcaccacctgagaaaagccctgtggtccaggattgctaccatggtgatggayggagttatcgaggcatatcctccaccactgtcacaggaaggacctgtcaatcttggtcatctatgataccacactggcatcagaggaccccagaaaacta

SEQ ID NO: 4431 - DNA, 201 bp, Homo sapiens
tgctggattcagtttgccagtattttattgaggatttttgcatcaatgttcatcatggatgttggtctaaaattctcatttttgttgtgtctctgccaggmtttggtatcaggatgatgctggcctcataaaatgagttagggaggattccctctttttctatgattggaatagtttcagaagaattggtaccagctcctc

SEQ ID NO: 4432 - DNA, 201 bp, Homo sapiens
ttgcaatcttagtctttgatgaaacagactttaaaccatcaaagatcaaaagagacaaaggagggcattacctaatggtaaaagtatcaatgcaacaagargatctgactgtcctacttatatatgcacccaatacaggagcacccagattaataaagcaagttcttagagacctacaaagagacttagacttccacacaa

SEQ ID NO: 4433 - DNA, 201 bp, Homo sapiens
cctcagtgtcccagccaaaatttttattgtaacgtgctgtcaggtgtgtgactctttcagtccagtaagcttttccggggatttcttcaagtagccagcaktcagtgcaatcttcagcattgcagattcagagaaatgtggctctggagcctgtcatcctcgagaaacctaacagggctgcattaattccatatggtcctg

SEQ ID NO: 4434 - DNA, 201 bp, Homo sapiens
ctttgctgtttgctgccccatagtcctcatgaacattcagtagaaattcccataaatgtgcttgcacgtgagcacagtttccattgagaagccctctcatytgtcctttttttctaagcttttatgtgaaatatttctaagaacttactacagttctaaagtgttaggaatttgtttctttggtgtttttgtttgttggtt

SEQ ID NO: 4435 - DNA, 201 bp, Homo sapiens
actcaggatgtgggtcatgagaggatttcatctctcctgcaggggagtaagctgttcgcctccacccatccctgataactgaagtgtctttgtctgcagtyctagacgaaggactgttgtctctcccatggcccagaagctgaagaccttgccttttgttatgaaacgttcattgttttcatgtctgtccgtttctctgcc

SEQ ID NO: 4436 - DNA, 201 bp, Homo sapiens
agcaccaggtaatgtataaaggaaaccctatcagattaacagccagtttttcagcaggaactgtacaagctataaaggattggagccctatcatagcctcytcaaacaaaacaattatcagtcaagaattttgtatccagcgaaagtaagcatcatatatgaaggaaagatacagtcgtttttggacaaacaaatgctaag

SEQ ID NO: 4437 - DNA, 201 bp, Homo sapiens
catggtttagaaagaacttatatttccttgaaaggagagtgtcctttgttgtttactaccactttttaaacttagaaagaaaaatctaaagagtgtttatsattttaccatttaatttcacctttgagatgtgaaaaactagtgcttggaattcgtcctgaattaaacgacacaattgctaacttggactcaaatgcgact

SEQ ID NO: 4438 - DNA, 201 bp, Homo sapiens
gcacatgagtctttgttccaattgtaagagcactgataggtccttttcccaccaggttttgaatataaaatttctaagaacttattaaaatattagaatgytattaatctattgtttttgcttcagcatgtccttctgcttgtgagtatactaaagagaacagtcataattctgaaactactgtcctgtttgtgtcataaa

SEQ ID NO: 4439 - DNA, 201 bp, Homo sapiens
tttaactttagcatatgtagaggtaaaaatttgaacatatagactaaatcatgtggggaataattggaagtgtaccattgtaagtttcttaccttatccaygatggtatgtaatattaatgaaaggttgaatttgtgggtccaaagggatattgtaaatcctaaagcaatcataaaattttgaattctgagggatattata

SEQ ID NO: 4440 - DNA, 201 bp, Homo sapiens
gaaggttttggcgtgcacacatccttgagaagcaaagtgtctttgccttcagtcagatatataggatcgttttctgccccatggcctggaagccagaggcyttggctttcatgatcaacgatctagggaaacatgcaaaatttccatgtctttcccctcctctgcccccgacagccaattaccacctgcatcctgcattgc

SEQ ID NO: 4441 - DNA, 201 bp, Homo sapiens
ccttcagtcagatatataggatcgttttctgccccatggcctggaagccagaggccttggctttcatgatcaacgatctagggaaacatgcaaaatttccrtgtctttcccctcctctgcccccgacagccaattaccacctgcatcctgcattgccaaatgcagtgccctttgtatgaacattcagtagagtttcataga

SEQ ID NO: 4442 - DNA, 201 bp, Homo sapiens
gcaaaatttccatgtctttcccctcctctgcccccgacagccaattaccacctgcatcctgcattgccaaatgcagtgccctttgtatgaacattcagtakagtttcatagaaaggtgctacttcgtgagcgcactttgcagtgagaagatctgttctgttctgtttttctaaggatttcaggtgaaatatttcctagaac

SEQ ID NO: 4443 - DNA, 201 bp, Homo sapiens
gtgtcccagccaaaatttttattgtaacgtgctgtcaggtgtgtgactctttcagtccagtaagcttttccggggatttcttcaagtagccagcattcagwgcaatcttcagcattgcagattcagagaaatgtggctctggagcctgtcatcctcgagaaacctaacagggctgcattaattccatatggtcctgggtct

SEQ ID NO: 4444 - DNA, 201 bp, Homo sapiens
cagcacctgtactacattttatggattccttcttctctttgcggtatgccctgacaataattatatccgtcagccttacccccttggcagtaggaaaactraaactgtcttaaagtctcagctctactttctcagaggtgcaggcaagggcactgggagtctggggccctggaaaactgttctgactctgccacttgccag

SEQ ID NO: 4445 - DNA, 201 bp, Homo sapiens
gtggcctgaccaggaactactgcaggaatccagatgctgagattcgcccttggtgttataccatggatcccagtgtcagatgggagtactgcaacctgacrcaatgtccagtgatggaatcaactctcctcacaactcccacggtggtcccagttccaagcacagagcttccttctgaagaaggtaagaagcctgcagtca

SEQ ID NO: 4446 - DNA, 201 bp, Homo sapiens
cattgcagattcagagaaatgtggctctggagcctgtcatcctcgagaaacctaacagggctgcattaattccatatggtcctgggtctatggagcagtayatgagctcccaatgctctaaggctcttcagtcctaggctttgaagggagtgatttctcagtgttcttaaacctctttctgatggcacttgtacctgtgag

SEQ ID NO: 4447 - DNA, 201 bp, Homo sapiens
aacatggcaaaaccccatctctacgaaaaattaaaaaattagccggtcatggtggtgggtacctgtaattccaactacttgggaggctgaggcaggagaarcacttgagcctgggattcagagtttgctgtgagccgagaacatgccactgcactccagcctgggtgacagagcaagactcaatctcaaaaaaaaaaaaaa

SEQ ID NO: 4448 - DNA, 201 bp, Homo sapiens
aggaaggcagatgagagtcagcaaagagagagatcctgtaaagtaaaagggtggatagatggacagaagcccaggtctgaccagcccatggccaggctttmggccataagtgacaccaaagacatggaaaaatggtttctacatgttggacaacagacagtagtggaccaaaagaatagtgacagggggaacaatgagatc

SEQ ID NO: 4449 - DNA, 201 bp, Homo sapiens
atctatctctttctatatctacgtctattccaatatgtagaaacacagtcggttctgaccaccagtggtctgaagggatactggttgttagagaataaaartggcaggaaggcagatgagagtcagcaaagagagagatcctgtaaagtaaaagggtggatagatggacagaagcccaggtctgaccagcccatggccagg

SEQ ID NO: 4450 - DNA, 201 bp, Homo sapiens
gccgtcgcgcctccgactgttaccccggttccaagcctagaggctccttccgaacaaggtaaggagtctgtggccagacatctacacgcttcgatgctggratgaaaagccatggaaattcccactgatgcagccgccttcaatggtaaacggatgctcgagtgttgcctgagttctaccatgttgggggaagcctccgtg

SEQ ID NO: 4451 - DNA, 201 bp, Homo sapiens
ataattcaatagaatctacagaaatagctgcacatatatacacacaatggcacacgtgcacacacccacacccacacaggtgtgaatcctagagccacacsagcattgaaacatagagaagtaaaaattgttcattgaggaatatgtagcaatgctcaatgtgttttaccctaataagagcttttgtgatgtatgattgaa

SEQ ID NO: 4452 - DNA, 201 bp, Homo sapiens
agacagtagtggaccaaaagaatagtgacagggggaacaatgagatcaactccatagataccttggctttcttcctggaggcccttcttgcactgaagagyaaggtgatggagcccagatggactgtagccatcttcctgaatgcaggagagagattggaatttgggactactgtggtagctaggattttataggcctgct

SEQ ID NO: 4453 - DNA, 201 bp, Homo sapiens
gaattaaagtcatacagagtgtgtcactttattctcccagaataaagtgagatatgaataatgagaagtttgccagcttctcaaatatttgggagtcatayggtgcatttcaaaatactctttgggacaaagaaaacatcactaaggaatttagaaaagttttgaactgagtaagaatataacacaatttatccaaactta

SEQ ID NO: 4454 - DNA, 201 bp, Homo sapiens
atactataaatattcatcttgtgttttgaaaaagaaaagctctttggaatcccctatgaacaaagactttgacagttgttgatctaagaccacagcttaartatctacacaagaaaaaaaaaaaaagcaaataagagccaaggaaagcagatggaaggaagtagtccaaaccagtgacattcagtgaacaagaaaagagac

SEQ ID NO: 4455 - DNA, 201 bp, Homo sapiens
agaggtgccattactatagcatcttccagttctgaaagctgaaaagaagattttgagaacaattgtatgtgaataaattcaggaatgttaatcatgtgggmcaattcctgaggaagacaacaaatcagcaaaccagatgctgaatagttagtgtagtcctgtagagagacatacagagaggctgacagagaaatatttgta

SEQ ID NO: 4456 - DNA, 201 bp, Homo sapiens
agagtggtaagaaggaaaacaagataaaatcagaaacaatgaaataacacctttagagtagtaagaagaagaaaagatcaggtcagaaaaaatggaataayatgctaagaagaaaaaaaaagatcaagtcagaaacaatggaataacacctttagagtgaaaagaaggaaaaaaacccagcaagcttaaacgctatgcaca

SEQ ID NO: 4457 - DNA, 201 bp, Homo sapiens
tagtacagaacagagcatggtagtctttctcagagacaatgatcctgtttcagtcacagatttcttctgatgcttctgtgttctagaaattactcagcttkatttctcctctttgaatttcagcaccaacggagcaaagccccggggtccaggattgctaccatggtgatggacagagttatcgaggctcattctctacca

SEQ ID NO: 4458 - DNA, 201 bp, Homo sapiens
ttacctaatggtaaaagtatcaatgcaacaagaagatctgactgtcctacttatatatgcacccaatacaggagcacccagattaataaagcaagttcttrgagacctacaaagagacttagacttccacacaaaaatagtgggagactttaacaccccacagccaatattagatcgacgtgacagaaaattaacaaggat

SEQ ID NO: 4459 - DNA, 201 bp, Homo sapiens
taataatttggaatcagcaggcttgtgtaacaagagatgttgcccaaagaaaattagctagaagaagaatagttcaagaggagaactttctgcagcccacrtaatgaagaacccagcaaatggcaaatgtagatgtaaatgcaaaatattttcttgatcaaatttctatatctttttaaatgagagttgactacttgaagc

SEQ ID NO: 4460 - DNA, 201 bp, Homo sapiens
catgatcaagttggcttcatccctgggatgcaaggctggttcaacatattcaaatcaataaacataatccatcacataaacagaaccaatgacaaaaaccrtatgattatcgcaatagacgcagaaaaggcctttgataaaattcaatacccaatcatgctaaaaactcttaataaactaggtattgatggagcatgtctc

SEQ ID NO: 4461 - DNA, 201 bp, Homo sapiens
tacaaatgcaaataataatattattgttgtcttctttgattttctctttcctggtgaaattttgttttattaagcctgacaaagtgatacctttgcttacrtcacttaaagttagtctatttggacctaggtgacagtacaatcagctaagaaacagtatttgtaggagaggcaggtttgggacaggtgacaaggcatgtg

SEQ ID NO: 4462 - DNA, 201 bp, Homo sapiens
agcctagaggctttttttgaacaaggtaagaagttgtgccagacatttacctgcttggatgctgggatgaaaagccatggatacccccactgacgcacaasccttcagtgctacactggttctcgtgtgttggttctgggtctgccatgtgggaggaagccttagcgcactctctgggggagccagaggtgtgatttttgg

SEQ ID NO: 4463 - DNA, 201 bp, Homo sapiens
aactctcacggtggtcccagatccaagcacagaggcttcttctgaagaaggtaggaagtctatggccagacaaccacaccctaggacgttgggatgaaaasagttgcaaaatcttagtgatatagaagccttccatgctcacacaattccaagtagaatgtggactcagggtcagccactgggaaggaacactcagcgcct

SEQ ID NO: 4464 - DNA, 201 bp, Homo sapiens
catgaacacccagaagaggtgtaagcaaaagaccattcacatgagtgtaattttgaagtataggcactctgatctgttttttgtttgtttctttgtttgtytgttttccagggttgaattaaaatatttatgactacttattaaatttctagaatcctataagtctatttgtatttttattctacatttcaatttgcatgc

SEQ ID NO: 4465 - DNA, 201 bp, Homo sapiens
agctgttgcggggttgggggcatggtgggagtaagaccagcccttcagtttgcatgggtgctgggtgaggcctgtgactgacagcttccctccacttcccygacaactcagatgactcagcagaggcagccataatcctcctaggtacacaactccagtgacctgggaacttcacccccacaccatacagaagcttcagta

SEQ ID NO: 4466 - DNA, 201 bp, Homo sapiens
tatgttttttggttggttttctcccatccatctgcctacaggtaagggaaagataacgttcgtaattctcatagactcctttctggttgtgtcataaatgkcttcacatatttcgttattctcagagatactcagtttatttcttgtgttttcatttcagcaccgactgagcagaggcctggggtgcaggagtgctaccac

SEQ ID NO: 4467 - DNA, 201 bp, Homo sapiens
cccagccaaaatttttattgtaacgtgctgtcaggtgtgtgactctttcagtccagtaagcttttccggggatttcttcaagtagccagcattcagtgcartcttcagcattgcagattcagagaaatgtggctctggagcctgtcatcctcgagaaacctaacagggctgcattaattccatatggtcctgggtctatgg

SEQ ID NO: 4468 - DNA, 201 bp, Homo sapiens
gcataaatttatatatttttaatatttcactaaaaattatattgtttcactatgtatgtctgagtatttttatatattttaatataacattttaaatattyatatataaatattcaggtatgtaactgaatattcatttacacacacaaatatatgtgtgcatgtgtgtatatatatatatacccatatatatatatatat

SEQ ID NO: 4469 - DNA, 201 bp, Homo sapiens
ccctacctctgtttagggtgacagtggagggcctctggtttgcttcgagaaggacaaatacattttacaaggagtcacttcttggggtcttggctgtgcaygccccaataagcctggtgtctatgctcgtgtttcaaggtttgttacttggattgagggaatgatgagaaataattaattggacgggagacagagtgaagc

SEQ ID NO: 4470 - DNA, 201 bp, Homo sapiens
aaagggaattccctgaccccttacacttcccgggtgaggcaatatcccgccttgcttcggctcactctccgtgggctgcacccactgtctgacaagccccrgtgagatgaacccagtacctcagctggaaatgcagaaaccacccatcttctgctttgctcatgctgggaactgtggactggagctgttcctattcggcca

SEQ ID NO: 4471 - DNA, 201 bp, Homo sapiens
agctttataacaaaggagaagtaaaatcctttacaaacaagcaaatgctgaggaattttgtcaacaccaggcctgccttacaagaggtcctgaagaaaacmctaaatatggaaaggaaaaaccagtaacagctactgcaaaaacataccaaattgtaaacaccatcaacactataaagaaactgcatcaactaatgggcaa

SEQ ID NO: 4472 - DNA, 201 bp, Homo sapiens
acatgctgtcaactgtgtgattatttccaagccaataagcatttccagtaatttcttaaaatagtgttcattgcagtcttcagcgttgtggctcctgaggratgtggcccctgattctgtcgtcctagagaagcctgacatgactgcattgattctgtatcgtcctgggtctatgtggctgcctggctgtctgtaatcatc

SEQ ID NO: 4473 - DNA, 201 bp, Homo sapiens
agaagcctgacatgactgcattgattctgtatcgtcctgggtctatgtggctgcctggctgtctgtaatcatctgttttatttttatttttttctacagaytgtatgtttgggaatgggaaaggataccggggcaagaaggcaaccactgttactgggacgccatgccaggaatgggctgcccaggagccccatagacaca

SEQ ID NO: 4474 - DNA, 201 bp, Homo sapiens
ttctacaacatcggctgagggttaatacaaccttttcaccttggaattctatcattctaagctctagtccctgaagtgaatgttgtgttggccttttgcaycttgggtcacagggaattgatacttgcacatctatggagaggcaaatctttttctatctacttctttttcaatgggtacaaacacacttggtcctgagca

SEQ ID NO: 4475 - DNA, 201 bp, Homo sapiens
ctgatggcacttgtacctgtgaggggtctagagagaaaggttagtagacttctcctttactgcaattcaggatgcagggcatgagaggattccctccctcstccaagggaagaaggttttggcgtgcacacatccttgagaagcaaagtgtctttgccttcagtcagatatataggatcgttttctgccccatggcctgga

SEQ ID NO: 4476 - DNA, 201 bp, Homo sapiens
tatgtccttgcctcctccccaaaaaaccattttaatgcttggagacttgcttttcagctttgccaaatgcatcaccctttcttctatgctgttccatgtcrtcatgaacactctgtagagattcctagaaatgagcttccatgttagtggagtttccgatgagaagcaatctgatatttcttttccactaagttttacatg

SEQ ID NO: 4477 - DNA, 201 bp, Homo sapiens
taaatattcaggtatgtaactgaatattcatttacacacacaaatatatgtgtgcatgtgtgtatatatatatatacccatatatatatatatatatacayatatatatatatatatatatagtatatatatatatatatatatatacacatatatatatatatatatatgtatatatatatatatatatatatacacaca

SEQ ID NO: 4478 - DNA, 201 bp, Homo sapiens
catatattgaggaacaacaactacaagggaacagtgagcttaataaaggtgacagagctcacatagtgctctggaatattggagttttgaccagctagagrgaagagacctcattgaaaatcttgggcattcagtagagacctcagaaaagtcagactttatgagtagactttgtatattcctagaataaaggcagctcca

SEQ ID NO: 4479 - DNA, 201 bp, Homo sapiens
cagtgttcttgcccctccttctcatggaacatatatctgtgttggtctctgagaagaagagtagtggatatctactttgttgcaatgcagaatcctgggcsaaagataccagccatccctccaagggaataaaattttggccagtagccctctctgagagacaatttgtctttgcctacgagtcctagatgcaggaccgct

SEQ ID NO: 4480 - DNA, 201 bp, Homo sapiens
tgtgatccataaccaggagaaaaatcattcaatacaaatagacccagaaatgacagaaatgatagaattagcaaaaacatttaaaatatacatatgatcayttgatcttgtgatcagatatcacaagagaagaaagagatacttgaacagaaaaaatgcctgaagcaatgatggctgaaaactttccaaatatgaagaaaa

SEQ ID NO: 4481 - DNA, 201 bp, Homo sapiens
cacagcagtcttgcttaactgaggagagagactggagtttgtgatgcctcaggcatctgacgtattctaggctggctaagaatgagaggggatttgtggargaaaggagctccaagaatacacaccgaagtcttctcaaggctttggctaaatacaaagctgcgtatgcacaaggagagttttcacaaagaaagaacaata

SEQ ID NO: 4482 - DNA, 201 bp, Homo sapiens
catgtacctagaagtcacctcagtgtaatataaatctgcatatgcacagggagtgattccacaatgaaagtaggacaaagaacagctactggggaaagaayaactacaagggaacaatgagttcaatggagatggcagagctcacaaagcactgggggatatttgagttcttaccagctagaaaagagacctcattgcaaa

SEQ ID NO: 4483 - DNA, 201 bp, Homo sapiens
ccacagtccaggactgctaccatggtgatggacagagttatcgaggctcattctccaccactgttacaggaaggacatgtcagtcttggtcctctatgacmccacactggcatcagagaaccacagaatactacccaaatgggtatgtctttgagttttctcccaagagaaacagccacccacttaaatttctcctggaag

SEQ ID NO: 4484 - DNA, 201 bp, Homo sapiens
acacatttaatatatgtgttaggcaagtcacagaaggagaagaaaaagatatcatgacagacattatacttgaagcgatgatggctcgcaacacgccaaayatacagaaaacaagaaactcatagtcaagaagctaaatgactcaggtatagaattttaaagagcaaaactctatgatttactgggatatatcatagttaa

SEQ ID NO: 4485 - DNA, 201 bp, Homo sapiens
atatatctgacaaatggcctgtatccagagtatagaaacatttctcccactcactaatcagaggacaaacaacctaatcaaaatgggcaacaggcttgaayagtcatttcttaggagaagatgcacacagagccaacaatcacctgaaaaagtgcacaacatcttagccatcaaaaatcaagagttataaccctcataaga

SEQ ID NO: 4486 - DNA, 201 bp, Homo sapiens
ttgacatcctcatcttttctaggtcctcaaggccttcatcctacaaggtcatcctgggtgcacaccaagaagtgaacctcgaatctcatgttcaggaaatrgaagtgtctaggctgttcttggagcccacacaagcagatattgccttgctaaagctaagcaggtactcgctcacctgtggtcttcaccccacgctggtga

SEQ ID NO: 4487 - DNA, 201 bp, Homo sapiens
caagcacagagcttccttctgaagaaggtaagaagcctgcagtcagacaaccataccctcggacattgggataaaaagatttgcaaaatctttgtgatgcrgaaaacttccatgctgcacaggaagtcgaaggtgaagtcatggacagccaatgggaaggaagcttcagtgccttctctggggggaccagagctgggatgt

SEQ ID NO: 4488 - DNA, 201 bp, Homo sapiens
ggactacaggcacccaccaccacacccggctaattttttgtatttttagtagagacagggtttcactgttctagccaggatggtcttggtctcctgacctygtgatccgcctgcctcagcctcccaaagtgctgggattacaggcgtgagccaccgtgcctggctgagaagacattttttaagctggctctccttcctcct

SEQ ID NO: 4489 - DNA, 201 bp, Homo sapiens
aatttacaaatcagatctaattaaaataaagagcttctgcacagcaaaaaactctcatcagagtgaaaaagcaacctatggagaaaaattctgtggtctakccatctgacaaagggctaatgtttagaatgtacaagcaacttaaacaaatgtacaagaaaaaaaaaacaaccccatcaaaaagtgggcaaaggatatgaa

SEQ ID NO: 4490 - DNA, 201 bp, Homo sapiens
aagaaaatgataaactcacagtcaagaagctcaatgaatcagaaatagtatttttaaaagcaaaactctatgatttacttgggtacattatagataaatcrtccaacatcaaagataacaaggataatcttataagccagaggaaaacaatatcatttacatagagggacagtaatgaaagtgaccgatgccttctccttg

SEQ ID NO: 4491 - DNA, 201 bp, Homo sapiens
cctccaatggtaaacggatgctcgagtgttgactgagttctgtcatgtaggaggaagcctccgtgcactctctgggggagccagcggattgatttctggtrcaacgttgggtgggctgtgtctttagaattggcacaaaccctccagggtgatcgacttcacaactcacctcgttgaaaaatgggctatctcagtgtctta

SEQ ID NO: 4492 - DNA, 201 bp, Homo sapiens
ggattgctaccatggtgatggacggagttatcgaggcatatcctccaccactgtcacaggaaggacctgtcaatcttggtcatctatgataccacactggyatcagaggaccccagaaaactacccaaatgcgtatgtatttgattaaaaccataagaggagcaacagccaactcaaatattggttagaagacccatgctt

SEQ ID NO: 4493 - DNA, 201 bp, Homo sapiens
gctgtatgttttttggttggttttctcccatccatctgcctacaggtaagggaaagataacgttcgtaattctcatagactcctttctggttgtgtcataratggcttcacatatttcgttattctcagagatactcagtttatttcttgtgttttcatttcagcaccgactgagcagaggcctggggtgcaggagtgcta

SEQ ID NO: 4494 - DNA, 201 bp, Homo sapiens
tcccagcaagagaagatccaaggaaggaaggcagatgagagtcagcacagagagggatgctgaaaagtaaaagggatgggtagatggatagaagccctggyctgaccaccccatggccaatcatttggccataatcaacaaccaaagacatggaaaaatggtttctacatgtgggacaacagatggtagaggacctagaga

SEQ ID NO: 4495 - DNA, 201 bp, Homo sapiens
caacagatggtagaggacctagagaattgagagagggccaatgatgagctcaactccatagatgccttggctttcttcctggatacccttcctgcactgartagcaaggagatggagctcaagcagcctgtagccatctagctgagcagaggagagggattggagtttgggatgactctggtattttctaggtccgctaca

SEQ ID NO: 4496 - DNA, 201 bp, Homo sapiens
tgcatcaactaatgggcaaaatagccagctagcatcataatgacaggatcaaattcacacataacaatattaaccttaaatgtaaatgggctaaatgcccyaattaaaagacacagactgggaaattgaataaagagtcaagacccattggtttgctgtgttcagaagacccatctcagggtgaaaagacatacatgggct

SEQ ID NO: 4497 - DNA, 201 bp, Homo sapiens
gtgttcctccgtagctgtccgacctcttcagatctcttagtctaccctgccatcttcctttatgccatgggtcccactgttctttcaactcatcccccttwccctcagtgcagagtagctgcggccagcagagggtagactgagagcaggagagaaggtcctgcccaggaacccattctagagatgctgcattctgcctgg

SEQ ID NO: 4498 - DNA, 201 bp, Homo sapiens
ggtctatgtggctgcctggctgtctgtaatcatctgttttatttttatttttttctacagactgtatgtttgggaatgggaaaggataccggggcaagaargcaaccactgttactgggacgccatgccaggaatgggctgcccaggagccccatagacacagcacgttcattccagggacaaataaatgggcaggtctgg

SEQ ID NO: 4499 - DNA, 201 bp, Homo sapiens
ttatgtgcttacttatggacaggtgaattgatctgtttctatttctacctgtattccaatagggagaaaatctcttggtcctaagtaccagtggcctgaarggatagaggttcccagcaagagaagatccaaggaaggaaggcagatgagagtcagcacagagagggatgctgaaaagtaaaagggatgggtagatggata

SEQ ID NO: 4500 - DNA, 201 bp, Homo sapiens
gaaaatctcttggtcctaagtaccagtggcctgaaaggatagaggttcccagcaagagaagatccaaggaaggaaggcagatgagagtcagcacagagagkgatgctgaaaagtaaaagggatgggtagatggatagaagccctggtctgaccaccccatggccaatcatttggccataatcaacaaccaaagacatggaa

SEQ ID NO: 4501 - DNA, 201 bp, Homo sapiens
caaccataccctcggacattgggataaaaagatttgcaaaatctttgtgatgcagaaaacttccatgctgcacaggaagtcgaaggtgaagtcatggacarccaatgggaaggaagcttcagtgccttctctggggggaccagagctgggatgttgagtgccttgtgagggatggtgtctttaaaaggggcacagaccctc

SEQ ID NO: 4502 - DNA, 201 bp, Homo sapiens
ccaagatggtctcgctctgttgacctcgtgatccacccgccttggcttcccaaagtgctgggattacaggcgtgagccaaagcacccagcctgtgcctctyacttactcaattgtttttctgaaccctccatagctggtggaccttttcagatcccatagtctagccagccctctcactttatgccttgggtcccactgtt

SEQ ID NO: 4503 - DNA, 201 bp, Homo sapiens
tgtttgggaatgggaaaggataccggggcaagaaggcaaccactgttactgggacgccatgccaggaatgggctgcccaggagccccatagacacagcacrttcattccagggacaaataaatgggcaggtctggaaaaaaatgtaagccactttgatttggactctttttccctttgctgacaaatcttttcaaacagaa

SEQ ID NO: 4504 - DNA, 201 bp, Homo sapiens
gacattcagtgaacaagaaaatagaccaacaaaggagtaaatccatgaaacagaaagttggttctttgaaaagattcatgtgattgaccacagtctggctraacagatgacagaccaaggagggagtacaaccatcaccatttgaagtaacaggggagaggagccattgctataccatactccaggtctgaaagctgacaa

SEQ ID NO: 4505 - DNA, 201 bp, Homo sapiens
gagtatgatatcctagagaaacctaaggagactgcattatttttctattgtcctggggctgcatagcaggaggtaaccaacgaatgctgtctctccctggyctatctcagtctttcacaggctctgttcacctcagctttgaagttagaaatttctaggtgttcttgcctcttcttctcatgaaacctgcattggcagtga

SEQ ID NO: 4506 - DNA, 201 bp, Homo sapiens
ctgaacctcttgggaatacagtagagactccagaaaagtcatactttaggagtagaattagtaaatttctagaaaaaaaggcagctctagacaaaccctgrcaaaactgaaaagcaagtctccaagcattaaaatcatttccaagtcaattaactgcctgggagaggaaaaccctctttagaggtaaacaacaaagtcaag

SEQ ID NO: 4507 - DNA, 201 bp, Homo sapiens
tagatgtaaatgcaaaatattttcttgatcaaatttctatatctttttaaatgagagttgactacttgaagcaaaatgatagcaatatatttaactttagmatatgtagaggtaaaaatttgaacatatagactaaatcatgtggggaataattggaagtgtaccattgtaagtttcttaccttatccacgatggtatgta

SEQ ID NO: 4508 - DNA, 201 bp, Homo sapiens
ccttggcatgttttctttctaggtttggaaagcacttctgtggaggcaccttaatatccccagagtgggtgctgactgctgctcactgcttgaagaagtaygtttaagggaaaactgacatggggtcttatcttcaagacttttttcctccctctcttcctccatcccttctttcttcccaccctccccttccttcctccc

SEQ ID NO: 4509 - DNA, 201 bp, Homo sapiens
ctgtagctcattgaaccagcttcctggaatggagggtctgggattgacactaggccacatgtatagagtctctagagagacagtgtttcatccccatggcycgtaatacatttcccattttctcaggcagccacaggtcatgaatgtgaggatagagagaggttggagcaacgttcttgggaggcataaggaagagcaaat

SEQ ID NO: 4510 - DNA, 201 bp, Homo sapiens
ggaaactgcttccttaatatggatttggaaaaaaaaaagcaaaaaaaacagaaaatggcttttgagctgagtgcttctggggaggagatggctgccctctscaccagagcctgcttttcatcatggccaccttgaacctgccctactattggccccatttgttaggaaaacacccgcccctcccaccacacacacataaat

SEQ ID NO: 4511 - DNA, 201 bp, Homo sapiens
gtcttaaatgaagaaattactgtatgtccgcctgaaaaatttagatgtttcagaagaaaaaattaaccaaaaacaattctgcagaacctacagaatgagcyacacacacacacattcaaaacacacccatacacacacacatgcaaaaactcacaagttctaacacacacacaaacacacacacacatgcacatccctaaa

SEQ ID NO: 4512 - DNA, 201 bp, Homo sapiens
caattctgtcattctaaatttcaattcccgaaggtttgtttgccatttttgtcatgggtaataagtaaaaaaaaaaaaattaagatgtgtatatatatatrtatatatatatatatacacacacacacacacacacaaacatctgaatatttatatatatgtctgaatatttatatacttgtgtataaaacttatatttaa

SEQ ID NO: 4513 - DNA, 201 bp, Homo sapiens
acagttgtttagaagttgaggacgatttgtgattgttacaggacctttagtgagaatatttcaaagtcactttttaccactttgttacaacaaaatgtagrggatgtctggtgcccttgtatcttctcccatctctggtgaactgtattgttttgtaatttgcagtggcctgaccaggaactactgcaggaatccagatgc

SEQ ID NO: 4514 - DNA, 201 bp, Homo sapiens
agcccagctgaccacagcagtcttgcttaactgaggagagagactggagtctgcgatgcctcaggcagctgatgtgttctaggctggctaagaatgagaakggatttgtggaagaaaggagctccaggaatacacacagaagtctcctcaaggctttggctaaatacaaagctgcgtatgcacagggagagttttcataaa

SEQ ID NO: 4515 - DNA, 201 bp, Homo sapiens
ccaaatggaaatttaaaaactgagaaaagttatatctgtaatgaggaattcactggatggccttataaccagtttagatattatggtaggaaaaggtgaaygagaaaatgattcaattaaagctagacaaaccacaagacagacagacagacacaaatacacatacacacaatgactgaaccaattaatcaacagagcctc

SEQ ID NO: 4516 - DNA, 201 bp, Homo sapiens
cacctacaacctgcacagcctgatgcatagcagtctagtttcctgccttattctcaggaacacccagaagatgtctatattaaagagcatgcacatgagtrcaattttgactgataggcactctgatctttcctttggtgcctgtgttttaaaggaaatctttctaagaactcgttaaagttctagaatgctatgaatctt

SEQ ID NO: 4517 - DNA, 201 bp, Homo sapiens
aaacatctgaatatttatatatatgtctgaatatttatatacttgtgtataaaacttatatttaaatttttgcataaatttatatatttttaatatttcaytaaaaattatattgtttcactatgtatgtctgagtatttttatatattttaatataacattttaaatatttatatataaatattcaggtatgtaactgaa

SEQ ID NO: 4518 - DNA, 201 bp, Homo sapiens
aagaaaactttttgactactgtgatatccctctctgtggtaagttgccttctgttttggtaaggaaactgcttccttaatatggatttggaaaaaaaaaarcaaaaaaaacagaaaatggcttttgagctgagtgcttctggggaggagatggctgccctctccaccagagcctgcttttcatcatggccaccttgaacct

SEQ ID NO: 4519 - DNA, 201 bp, Homo sapiens
ccaaacacaacaggctagaacaaatatgcagaaaattagacatagtatctttgttctcaataaaaacgtcgacctatttaacattataccgaactaccgartacacattaaagtgtgcatggagcattcactgaggtgtactctacacatgaccttccagcaagtctccatagatttaaaagaattaaagtcatacagagt

SEQ ID NO: 4520 - DNA, 201 bp, Homo sapiens
aagtagaaaaaataaattcagagctcaaagacaaggacttcaaattaacccaatccaacaaagacaaagaataaaggataagaaaatatgaacaaagcctycaagatgtctgggattatgttaaatgaccaaatataagaataatcgtggctcctgaggaaaaagacaatactaaaagcttggaaaacatatttgggggaa

SEQ ID NO: 4521 - DNA, 201 bp, Homo sapiens
caggcttatgtagcaacagaggtgacccgaaagaattaggtataagaagaatagaagaattgcatgaaaatttgacatatgactaagataactatttcaawtatttaaaaaaagatgaatatgtaataaaacagataaaatatcaaaagaaagtaacagtattgactagccaaatcaaattaaagacttagtgtaaaaagc

SEQ ID NO: 4522 - DNA, 201 bp, Homo sapiens
acatcaaagataacaaggataatcttataagccagaggaaaacaatatcatttacatagagggacagtaatgaaagtgaccgatgccttctccttggaaayaatggcataacatctttaaagtgataaagagaaataaaaacagatcaacctaggacgacatgtccagccaaaacaaacaaataaacaaaaaaacccttta

SEQ ID NO: 4523 - DNA, 201 bp, Homo sapiens
agaatattcatagcagctttattttttataaccccaaactgtagacaatttcaatgtcaatcaataagaaaatgaataaataatttgtgaactagtcatayaatggcatactgttcagcaataaaagggagcatgtttttgatactctcaaatagtatggaagatgctcaaaaatattacattaaagaaagatgccagata

SEQ ID NO: 4524 - DNA, 201 bp, Homo sapiens
aatgtgaggattctgagaggttggagcaacattcctgggaggaacgaaggggagcacattctccaagatcccccaccaccggggtcctcaccggctgtgcttttttttttttttttcttgacagagtctcgctctgtcgccaggcaggagtgtaatggcccaatctcggctgattgcagcctccaactccagggttcaaga

SEQ ID NO: 4525 - DNA, 201 bp, Homo sapiens
cctgacacaatgcctggtgacagaatcaagtgtccttgcaactctcacggtggtcccagatccaagcacagaggcttcttctgaagaaggtaggaagtctrtggccagacaaccacaccctaggacgttgggatgaaaagagttgcaaaatcttagtgatatagaagccttccatgctcacacaattccaagtagaatgtg

SEQ ID NO: 4526 - DNA, 201 bp, Homo sapiens
aaaaacaattttataccacctacagaaccagctacacatacacaaatgacacacacatatacacacatactcacacatgcacaggcttagaaacatgcacrcacacacacacacacacacacacacacctccacaaatactaaaaaatgaaatccactgatcctcacagacaggcgggaaaatataaaaagatttcctgca

SEQ ID NO: 4527 - DNA, 201 bp, Homo sapiens
gtgtgtctttccaagccagtaaacttttccagggatttcttcaagtagacagcattcagtgcaatcttcagcattgcagattccgagaaatgtggctctaratcctgttatccttgagaaacctaactgggttgcattaattccatatctccctgggtctgtggagtagtacatgagctcccgaagctctatctctcaggt

SEQ ID NO: 4528 - DNA, 201 bp, Homo sapiens
attacatttattgatttgcatatgttgaaccagccttgcatcccagggataaagccaacttgatcatggtggataagctttttgatgtgctgctggattcrgtttgccagtattttattgaggatttttgcatcaatgttcatcatggatgttggtctaaaattctcatttttgttgtgtctctgccaggatttggtatca

SEQ ID NO: 4529 - DNA, 201 bp, Homo sapiens
acatcacacaccagggcttgtcagggggtgggaagctggtgaagggatagcattaggagaaatatctaatgtaaatgacgagttgatgggtgcagcaaacyaacacggcacatgtatacctatgtaacaaacctgcacgttgtgcacatgtaccccagaacttaaagtataataataaaaaaagaaatatttgtttttgat

SEQ ID NO: 4530 - DNA, 201 bp, Homo sapiens
gaatccagatgctgagattcgcccttggtgttataccatggatcccagtgtcagatgggagtactgcaacctgacgcaatgtccagtgatggaatcaactstcctcacaactcccacggtggtcccagttccaagcacagagcttccttctgaagaaggtaagaagcctgcagtcagacaaccataccctcggacattggg

SEQ ID NO: 4531 - DNA, 201 bp, Homo sapiens
cggttttcttatggagtatagacgagtttggatgtgttacaataagaatgataatctgtctttgaaatgttcacagttgtttagaagttgaggacgatttrtgattgttacaggacctttagtgagaatatttcaaagtcactttttaccactttgttacaacaaaatgtagaggatgtctggtgcccttgtatcttctcc

SEQ ID NO: 4532 - DNA, 201 bp, Homo sapiens
tatttccaagccaataagcatttccagtaatttcttaaaatagtgttcattgcagtcttcagcgttgtggctcctgaggaatgtggcccctgattctgtcrtcctagagaagcctgacatgactgcattgattctgtatcgtcctgggtctatgtggctgcctggctgtctgtaatcatctgttttatttttatttttttc

SEQ ID NO: 4533 - DNA, 201 bp, Homo sapiens
gttacaccatggatcccagtgtcaggtgggagtactgcaacctgacacaatgcctggtgacagaatcaagtgtccttgcaactctcacggtggtcccagayccaagcacagaggcttcttctgaagaaggtaggaagtctatggccagacaaccacaccctaggacgttgggatgaaaagagttgcaaaatcttagtgata

SEQ ID NO: 4534 - DNA, 201 bp, Homo sapiens
agtgaccttgcatagatcttgtcataaaaaatgaaagagaccttgggaaggtcttgggctggtcacttttgtcagagtccagggctgtggggtgaaagccrcagctatagagcttcattctggagtcacttagctttgctctcctggggacaggctgtgcctattcttgcctcaggcatcaaaaaaagtggcacagatggg

SEQ ID NO: 4535 - DNA, 201 bp, Homo sapiens
tagtctgcccagctgtctccctttatgccatgagtgccactgttctttcaactcatcccccattccctcagtcccggaattgctgtggccagcagaggatrgactgagagcaggagaggaagtcctgaccaggaacccatcctagagatactgcatcctgcctgaaagctaggtttccagggcagctttgagaagtcttgc

SEQ ID NO: 4536 - DNA, 201 bp, Homo sapiens
tcctttgctttgggaatatgaacatgatcaaaactgagtgaacttgtcttcctggctttctgtacaatgaagtagaacaaaccatccaatttgaccaaagycttggcatgttttctttctaggtttggaaagcacttctgtggaggcaccttaatatccccagagtgggtgctgactgctgctcactgcttgaagaagtac

SEQ ID NO: 4537 - DNA, 201 bp, Homo sapiens
aggaaaagcaaataagacacaaggaaaggggatggatggaaatagtccaaaccaatgacattcagtgaacaagaaaatagaccaacaaaggagtaaatccrtgaaacagaaagttggttctttgaaaagattcatgtgattgaccacagtctggctgaacagatgacagaccaaggagggagtacaaccatcaccatttga

SEQ ID NO: 4538 - DNA, 201 bp, Homo sapiens
atttcaattcccgaaggtttgtttgccatttttgtcatgggtaataagtaaaaaaaaaaaaattaagatgtgtatatatatatatatatatatatatatayacacacacacacacacacaaacatctgaatatttatatatatgtctgaatatttatatacttgtgtataaaacttatatttaaatttttgcataaattta

SEQ ID NO: 4539 - DNA, 201 bp, Homo sapiens
atttttgtataagtaatgcccttctttgtctcttttgatctttgttggcttaaagtatattttatcagagactagaattgcaatccctgcttttttttttytttttgctttccttttgcttggtaaatattcttccatccctttattttgagcctatgtatgtctgcacatgagataggtttcctgaatacagcacaccaa

SEQ ID NO: 4540 - DNA, 201 bp, Homo sapiens
gggggaatattggaaaatccacaaatagatagaaattaatcaatatgctcctgaacaatcaatgagtcgaagaagatattaaaagaggaaattttaaaaamtcaagacatgagttcatgtcctttgcagggacatgaatgaagctggaaaccatcattctcagcaaactatcataaggacagaaatccaaacaccgcatgt

SEQ ID NO: 4541 - DNA, 201 bp, Homo sapiens
ataacattttaaatatttatatataaatattcaggtatgtaactgaatattcatttacacacacaaatatatgtgtgcatgtgtgtatatatatatatacmcatatatatatatatatatacacatatatatatatatatatatagtatatatatatatatatatatatacacatatatatatatatatatatgtatatat

SEQ ID NO: 4542 - DNA, 201 bp, Homo sapiens
gacagagaaacatttgtacgtgcataaaacaatctacaagactcacttcaaaatctctcagttaatccaaagtaacatatttggcagaaggtggaaggagrgtattctgatcctttcttgtacacattgatgttttctctcggttttcttatggagtatagacgagtttggatgtgttacaataagaatgataatctgtct

SEQ ID NO: 4543 - DNA, 201 bp, Homo sapiens
actacagttctagattggtaggaatctgtaggtttgctgtatgttttttggttggttttctcccatccatctgcctacaggtaagggaaagataacgttcrtaattctcatagactcctttctggttgtgtcataaatggcttcacatatttcgttattctcagagatactcagtttatttcttgtgttttcatttcagca

SEQ ID NO: 4544 - DNA, 201 bp, Homo sapiens
atgcgacttcttttcccaccttgtgccacagcatcctcttcatttgattgtgggaagcctcaagtggagccgaagaaatgtcctggaagcattgtaggggkgtgtgtggcccacccacattcctggccctggcaagtcagtctcagaacaaggtaagaacaggcccagaaaccatctatactgtccttccatgtaagcccc

SEQ ID NO: 4545 - DNA, 201 bp, Homo sapiens
gaggcacactctccaccactatcacaggaagaacatgtcagtcttggtcgtctatgacaccacattggcatcggaggatcccattatactatccaaatgcrtatgtctatcatgttagccataaaaggaacaatagtcaactaaaatttctcttagctggcccatgctacaagctcacttcctaggtccaaatttctcata

SEQ ID NO: 4546 - DNA, 201 bp, Homo sapiens
gaagagaaatgttaagctgcctcaccttcctcctagttttgtggagcagaagggaaatgaggaggcgaggagatcaccttatgaagaaagtcagaatgacraaccaccaaacacttagattacccttgcccaacacccactaagcgtcaatgaagactttccagttggaattccgttattctgacttccaattcctgaagg

SEQ ID NO: 4547 - DNA, 201 bp, Homo sapiens
gaagggatttctcagtgttctcatccctgcttctcatggaacatttatctccgttgttttttgagaagaagagtagtggatgtcagctttcttgtaatgakggatcctgggcccaagattccctgtctcccctcctaggctataaaattttggcctgtactccttctccctgagaggcaatgtgtctttacctacaagtcc

SEQ ID NO: 4548 - DNA, 201 bp, Homo sapiens
gacaggatcaaattcacacataacaatattaaccttaaatgtaaatgggctaaatgccccaattaaaagacacagactgggaaattgaataaagagtcaakacccattggtttgctgtgttcagaagacccatctcagggtgaaaagacatacatgggctcaaaataaagaaatgaaggaatatttaccaagcaaatggaa

SEQ ID NO: 4549 - DNA, 201 bp, Homo sapiens
aggttgtgtttgccatgtttgtcttgggtaacaagtgaaggatatctatattgacttcgagatcttccgatcactttctcctctaacctgtataaacacaytgggttctgagaacaaggtgtctgaaaagctatgtgttgccagcccatgaggggcaaaaggaggaaggcagctgagagtcaggaagtatagagatgctga

SEQ ID NO: 4550 - DNA, 201 bp, Homo sapiens
ttccctttttctgtcattttcctattatttttaaaacctcacctccttgactccttgttccctttttctgcactgctgagtctgggagcactgaggccagrtaaaaggaaacttggcaaatgaggggcacctatgggtgtgggaggctgctcctggtgtttgcatattttaaaatttaaatgctacaaaccactgtgagtt

SEQ ID NO: 4551 - DNA, 201 bp, Homo sapiens
tgtcacaggaaggacctgtcaatcttggtcatctatgataccacactggcatcagaggaccccagaaaactacccaaatgcgtatgtatttgattaaaacmataagaggagcaacagccaactcaaatattggttagaagacccatgctttaagctcacttcctagggacaaatttctcttagactcacattttggcaaaa

SEQ ID NO: 4552 - DNA, 201 bp, Homo sapiens
ttagtctgattggcttccctttccgggtaacccaacctttctctctggctgcccttagaaatttttccttcatttcaaccttggtgaatctgacgattatstcttgaggtggctcttctcgaggagtatctttgtggtgttctctgtatttcctgaatttgaatgttggtctgtcttgctaggttggggaagctctccttg

SEQ ID NO: 4553 - DNA, 201 bp, Homo sapiens
gaagaagaagaagaagaagagtaagagaaattttttggagccgcaggaggagccagaagaagaagaagaagaagaagaagaagaagaagaagaagaaggargaagaagaagaagaagaagaagaagaagaagaagaagaagaagaagaagaagaagaagaagaagaagaaaatagaaatgagtgcatatatttatatatga

SEQ ID NO: 4554 - DNA, 201 bp, Homo sapiens
aaatttcaattcccgaaggtttgtttgccatttttgtcatgggtaataagtaaaaaaaaaaaaattaagatgtgtatatatatatatatatatatatatayacacacacacacacacacacaaacatctgaatatttatatatatgtctgaatatttatatacttgtgtataaaacttatatttaaatttttgcataaatt

SEQ ID NO: 4555 - DNA, 201 bp, Homo sapiens
cccatcccatgacaggccccggtgtgtgatgttccccactctgtgtccatgtactctcattgttcaattcccacctatgagtgagaacattcggtgtttgratttctgtccttgtgatagtttgctgagaatgatggtttccagcttcatccacatccctacaaaggacatgaagtcatccttctttatggctgcatagta

SEQ ID NO: 4556 - DNA, 201 bp, Homo sapiens
acacacctccacaaatactaaaaaatgaaatccactgatcctcacagacaggcgggaaaatataaaaagatttcctgcatgtgggtaggaagtcacagaasgagaggaaggagagattgctacaggaacaaatactggaagcaaggatagctaaaaacttttcaaataagaagaatattaaaaaccacagattcaagaagc

SEQ ID NO: 4557 - DNA, 201 bp, Homo sapiens
aacaaatactggaagcaaggatagctaaaaacttttcaaataagaagaatattaaaaaccacagattcaagaagctgaatgaatcagacagggaatttccaaaaaaaaaaaaaaaaaactgtatgattcacttttgtacatcaccgttcaacagtcagaaggcaaagatataataacaagaaacatctcatgagaaactgg

SEQ ID NO: 4558 - DNA, 201 bp, Homo sapiens
ccccagtctaagtgttgctcagaaactccccagatctgtccctgaatgcatattcagatcatctaaggagacgtcttggggcttgagttccagatccatarcaagggagccgtaagtgccataactacctcaggccactcaccttcctggtgtgtgctggtcaccagtgactgaagtggtggcttttccagtagagaggaa

SEQ ID NO: 4559 - DNA, 201 bp, Homo sapiens
agaggtgatctaatcagcccgggatagtcccaccgaacccttctttgtctagcgtgggatgcatgaaaaacaaatttagagtcattatgatgaaaaactgycctcttctgcagctgagaagaaaaaaaaaatacgagcagcaggaaacagctaagcatgtaatgcacattgtaaacctcagatggccatcctaggaaatca

SEQ ID NO: 4560 - DNA, 201 bp, Homo sapiens
gcaatactgagcttgattttctcttttaatttcagcaccaactgaaaacagcactggggtccaggactgctaccgaggtgatggacagagttatcgaggcmcactctccaccactatcacaggaagaacatgtcagtcttggtcgtctatgacaccacattggcatcggaggatcccattatactatccaaatgcgtatgt

SEQ ID NO: 4561 - DNA, 201 bp, Homo sapiens
tctgaagttgacctgggacgctcaagcttggtgggaggaggggtatccacaaatactggggcttgagtaggaggttttcccctcacagtgtaagcaaaacygctaggaagtttgaactgggcagggtgcactgcagcttggcaaagccattgtagcaagagtgcctctctagattcctcctctctgggcagggcatctctg

SEQ ID NO: 4562 - DNA, 201 bp, Homo sapiens
ccgaacccttctttgtctagcgtgggatgcatgaaaaacaaatttagagtcattatgatgaaaaactgtcctcttctgcagctgagaagaaaaaaaaaatwcgagcagcaggaaacagctaagcatgtaatgcacattgtaaacctcagatggccatcctaggaaatcaatgaagggtagtgcagctctttagccccagat

SEQ ID NO: 4563 - DNA, 201 bp, Homo sapiens
tagacagatagagatacttttgtatgtgcataaccaattccacaatacacacgtcaaaatccataccagttattccagagagatggattgggcagaaggcrgaaggaggatattctgatccctttttggccacatgtatgtataatctcagtgtttctaggaagtgtgtgctgcattagattttttttctttaaaaaaagt

SEQ ID NO: 4564 - DNA, 201 bp, Homo sapiens
ggaagaacttgccaagcttggtcatctatgacaccacaccagcatagtcggaccccagaaaactacccaaatgcgtacgtctttgttctttaccataagcraaggaagggccaatggaagtttctgttagaagagtcatgcttcaaggtgactgctcaggactcaacttggctcagatgcagaggaacatttcctgtgagc

SEQ ID NO: 4565 - DNA, 201 bp, Homo sapiens
caaatgcgacttcttttcccaccttgtgccacagcatcctcttcatttgattgtgggaagcctcaagtggagccgaagaaatgtcctggaagcattgtagsggggtgtgtggcccacccacattcctggccctggcaagtcagtctcagaacaaggtaagaacaggcccagaaaccatctatactgtccttccatgtaagc

SEQ ID NO: 4566 - DNA, 201 bp, Homo sapiens
gtgttttcatttcagcaccgactgagcagaggcctggggtgcaggagtgctaccacggtaatggacagagttatcgaggcacatactccaccactgtcacyggaagaacctgccaagcttggtcatctatgacaccacactcgcatagtcggaccccagaatactacccaaatgcgtatgtctttgttctttaccataaga

SEQ ID NO: 4567 - DNA, 201 bp, Homo sapiens
tgttacaatatgaatgataatttgtctttgagatgttcgcagttgtttagaagttgaggaccatttgtgcatattatgggacctttagtgaaaatatttcaaagtctctttttacactttgttacagcaaaatgtagagggcgctaagtgcccttgaatcttctcccatctctggtgacctgtgttgttttgaaatttgca

SEQ ID NO: 4568 - DNA, 201 bp, Homo sapiens
gttacaatatgaatgataatttgtctttgagatgttcgcagttgtttagaagttgaggaccatttgtgcatattatgggacctttagtgaaaatatttcaaagtctctttttacactttgttacagcaaaatgtagagggcgctaagtgcccttgaatcttctcccatctctggtgacctgtgttgttttgaaatttgcag

SEQ ID NO: 4569 - DNA, 201 bp, Homo sapiens
ccttccgaacaaggtaaggagtctgtggccagacatctacacgcttcgatgctgggatgaaaagccatggaaattcccactgatgcagccgccttcaatgktaaacggatgctcgagtgttgcctgagttctaccatgttgggggaagcctccgtgtactctctgggggagccagcggagtgatttctggtgcaacgtggt

SEQ ID NO: 4570 - DNA, 201 bp, Homo sapiens
ctgtgttgttttgaaatttgcagtggcctgaccaggaactactgcaggaatccagatgctgagattcgcccttggtgttacaccatggatcccagtgtcaggtgggagtactgcaacctgacacaatgcctggtgacagaatcaagtgtccttgcaactctcacggtggtcccagatccaagcacagaggcttcttctgaa

SEQ ID NO: 4571 - DNA, 201 bp, Homo sapiens
tctttaccataagagaataaagggccaactgaagtttctgtgacaagagacatgcttcaagctgagttctccgaactcaacttgtgtcagattcagatggygtagcaaaatgtctcaggatgatttccttggagctaagggtctgagagaagagaaatgttaagctgcctcaccttcctcctagttttgtggagcagaagg

SEQ ID NO: 4572 - DNA, 201 bp, Homo sapiens
accgatccgtgtgtgaggtgggagtactgcaatctgacacaatgctcagaaacagaatcaggtgtcctagagactcccactgttgttccagttccaagcayggaggctcattctgaagcaggtaagaagtctgtggccagatatctacacatttgaacattgggatgaaaagagatggaaaatctgactgatgcagaagcc

SEQ ID NO: 4573 - DNA, 201 bp, Homo sapiens
agaaatgttaagctgcctcaccttcctcctagttttgtggagcagaagggaaatgaggaggcgaggagatcaccttatgaagaaagtcagaatgacgaacsaccaaacacttagattacccttgcccaacacccactaagcgtcaatgaagactttccagttggaattccgttattctgacttccaattcctgaagggaag

SEQ ID NO: 4574 - DNA, 201 bp, Homo sapiens
ctgtaatgaggaattcactggatggccttataaccagtttagatattatggtaggaaaaggtgaacgagaaaatgattcaattaaagctagacaaaccacaagacagacagacagacacaaatacacatacacacaatgactgaaccaattaatcaacagagcctcaaggacatctaggaaaacatccacacatttaatat

SEQ ID NO: 4575 - DNA, 201 bp, Homo sapiens
aagaaaatgaaaaaagaatttccagtatatttatacaaaggaatactattcatcaacaaggaacaagttactgatagtctcagaagcatgaacaaacctcraaaatatattaaggaaagaagccagacgtcaaagtgtatagtctgtatgagtccattcatgtgagtttatagaaaacacaatttatggtgaaagaaacca

SEQ ID NO: 4576 - DNA, 201 bp, Homo sapiens
tgtaatgaggaattcactggatggccttataaccagtttagatattatggtaggaaaaggtgaacgagaaaatgattcaattaaagctagacaaaccacaagacagacagacagacacaaatacacatacacacaatgactgaaccaattaatcaacagagcctcaaggacatctaggaaaacatccacacatttaatata

SEQ ID NO: 4577 - DNA, 201 bp, Homo sapiens
aagggactgccgtcgcgcctccgactgttaccccggttccaagcctagaggctccttccgaacaaggtaaggagtctgtggccagacatctacacgcttcsatgctgggatgaaaagccatggaaattcccactgatgcagccgccttcaatggtaaacggatgctcgagtgttgcctgagttctaccatgttgggggaag

SEQ ID NO: 4578 - DNA, 201 bp, Homo sapiens
cataacattggtgagaagaaaattagaagatctaaataaagacacatcatgcttatagattaaaaaatccaatgtcacttttcacaaaactgatctttagyttcaacccacacccaagcagaattcctgcagtcttttcttgaaaacctaacagaatgtatatgctagaatcaccaagacaatctttaaaaagaataaaaa

SEQ ID NO: 4579 - DNA, 201 bp, Homo sapiens
tggtctatcaattttgttgatcttttcaaaaaaccagctcctggattcattgatgttttgaaggtttttttgtgtctctatctccttcagttctgctctgrtcttagttatttcttgccttctgctagctttttaatgtgtttgctcttgcttctctagttcttttaatggtgatgttagggtgtcaattttagatctttc

SEQ ID NO: 4580 - DNA, 201 bp, Homo sapiens
gttttccagtgacattttccactgtcacacccttttagagaataatttggcaatgttactgtgagatagaaatatgtctatataattatgggaactgagayttcagaaagtaataaggaataagaatgaaatttatgaacaaacatgtggaaggttggaagcaagagtggggccaacacgcatggggaggaagcatttggg

SEQ ID NO: 4581 - DNA, 201 bp, Homo sapiens
gtaatgaggaattcactggatggccttataaccagtttagatattatggtaggaaaaggtgaacgagaaaatgattcaattaaagctagacaaaccacaagacagacagacagacacaaatacacatacacacaatgactgaaccaattaatcaacagagcctcaaggacatctaggaaaacatccacacatttaatatat

SEQ ID NO: 4582 - DNA, 201 bp, Homo sapiens
tagaaagaaataactttgtcaaaaaatataataatgatagaaaggaagaaggaacgctcccttttgtcttctaagaatagatgtgaaatgtgtgtgccttrgaatatcttctccctctcctgctccacgtgagctggagcttacatgcctgcttgttttcagtactgccgtaaccctgatggtgacatcaatggtccctgg

SEQ ID NO: 4583 - DNA, 201 bp, Homo sapiens
tccatctggaaaaacagcatttcctctggcactttagcagaggttctgtttcaatttggcgaaggaaattaagcagtttttcacaaaagaagaactacaaygaggagaattgtccctagtatttcttctccctaattgtcaaggaagtgtaaattagaaaatgaatcaggacaatttccacctactatgttagctaatatt

SEQ ID NO: 4584 - DNA, 201 bp, Homo sapiens
aatgaggaattcactggatggccttataaccagtttagatattatggtaggaaaaggtgaacgagaaaatgattcaattaaagctagacaaaccacaagacagacagacagacacaaatacacatacacacaatgactgaaccaattaatcaacagagcctcaaggacatctaggaaaacatccacacatttaatatatgt

SEQ ID NO: 4585 - DNA, 201 bp, Homo sapiens
agctgggcttgcaacattggaaacttggattatttgtgagagcactgagaaatccctgggcatgtccatctggaaaaacagcatttcctctggcactttarcagaggttctgtttcaatttggcgaaggaaattaagcagtttttcacaaaagaagaactacaacgaggagaattgtccctagtatttcttctccctaatt

SEQ ID NO: 4586 - DNA, 201 bp, Homo sapiens
gcttcttgctttgggcacagggtctgagaggagagaaatgtcaggccagctctcttttctcatagttgatagaagtaggaggatacttggaggtggtgagktctcatgaatagaaagctcagaagaacatatgaccatgtgcttagaaatagcaccattccacaatgcccactaaagaccagtgaaatagttcaaccaggg

SEQ ID NO: 4587 - DNA, 201 bp, Homo sapiens
tggatagaagccctggtctgaccaccccatggccaatcatttggccataatcaacaaccaaagacatggaaaaatggtttctacatgtgggacaacagatsgtagaggacctagagaattgagagagggccaatgatgagctcaactccatagatgccttggctttcttcctggatacccttcctgcactgaatagcaagg

SEQ ID NO: 4588 - DNA, 201 bp, Homo sapiens
aacagttacacaaatgactgatgccttctcatcagaaacaatgaaagtcagaaacaataaagtaacatctttaaagtaatagaagaaaaacccaagaggtragggatcatggcagacaggaggcaggactagattgcagctctggacagagcagcatgcagaggctcatattgtgaattttagccccatattgactgcaag

SEQ ID NO: 4589 - DNA, 201 bp, Homo sapiens
acccttcctgcactgaatagcaaggagatggagctcaagcagcctgtagccatctagctgagcagaggagagggattggagtttgggatgactctggtatwttctaggtccgctacaaataagaactggtttgtggaggaaaggagctctacaaatacgcatagaagtctcctccagtagttggcctcacatgacactgca

SEQ ID NO: 4590 - DNA, 201 bp, Homo sapiens
gtttgggatgactctggtattttctaggtccgctacaaataagaactggtttgtggaggaaaggagctctacaaatacgcatagaagtctcctccagtagytggcctcacatgacactgcatgtgcacagaaaatggttctacagaaagtgtggcaaagaacatttactgagaaacagcaactacaagagaacagcaagct

SEQ ID NO: 4591 - DNA, 201 bp, Homo sapiens
agcaagtgtccaagcatcaaatgggtttccaatcaatgaagtgcctgtgagaggaaatctcaactctcttcagaagtaaacaacaaagtcaattgcctcarctatgcggtatccccagagtgagtcctaaattaaaaatttgactacgtgtagaaaagaatttcgtgtgatccatgaccagaaaataaatcaggcaataca

SEQ ID NO: 4592 - DNA, 201 bp, Homo sapiens
ccactgttgttccagttccaagcatggaggctcattctgaagcaggtaagaagtctgtggccagatatctacacatttgaacattgggatgaaaagagatrgaaaatctgactgatgcagaagccttccatgctacacagaaacttgagggtatggcaggtggaaagaagcctcagcactctctctggtggagcaattttt

SEQ ID NO: 4593 - DNA, 201 bp, Homo sapiens
gtgcatgtgtgtatatatatatatacccatatatatatatatatatacacatatatatatatatatatatagtatatatatatatatatatatatacacayatatatatatatatatatgtatatatatatatatatatatatacacacacacacacacacacatacatacaggtataaacacactgggcctgaagcacca

SEQ ID NO: 4594 - DNA, 201 bp, Homo sapiens
aacaaagtcaattgcctcagctatgcggtatccccagagtgagtcctaaattaaaaatttgactacgtgtagaaaagaatttcgtgtgatccatgaccagraaataaatcaggcaatacaaacaggctcagaaatgacatcgataattagaattgcatgaaaatttgacatatcagtatgataactgatttcagatattta

SEQ ID NO: 4595 - DNA, 201 bp, Homo sapiens
tctgtcattctaaatttcaattcccgaaggtttgtttgccatttttgtcatgggtaataagtaaaaaaaaaaaaattaagatgtgtatatatatatatatrtatatatatatacacacacacacacacacacaaacatctgaatatttatatatatgtctgaatatttatatacttgtgtataaaacttatatttaaattt

SEQ ID NO: 4596 - DNA, 201 bp, Homo sapiens
tcttgtgatcagatatcacaagagaagaaagagatacttgaacagaaaaaatgcctgaagcaatgatggctgaaaactttccaaatatgaagaaaaaaaarctcacagattcaagaaaactaatcaatcagaaatatgattttgaaaagtaaaaatgtatgatttactttggcaaatcttcttggttaaattgtctaaaat

SEQ ID NO: 4597 - DNA, 201 bp, Homo sapiens
ttacctacagtctatcacaggcacagatttttttttacacttttgtgaatcattgaattcaatgccgaggctattcatctattcacaaacacatgaacaarttatgggttgtgatccccataaatgaagagtaatcagtccgaacccacagaacctggacattttgggtatcgtttcagtggaacatgcaattcgtaagtt

SEQ ID NO: 4598 - DNA, 201 bp, Homo sapiens
cactttgcagtgagaagatctgttctgttctgtttttctaaggatttcaggtgaaatatttcctagaacttactacagttctagattggtaggaatctgtrggtttgctgtatgttttttggttggttttctcccatccatctgcctacaggtaagggaaagataacgttcgtaattctcatagactcctttctggttgtg

SEQ ID NO: 4599 - DNA, 201 bp, Homo sapiens
atatacacatatatatatatatatatatagtatatatatatatatatatatatacacatatatatatatatatatatgtatatatatatatatatatatayacacacacacacacacacacatacatacaggtataaacacactgggcctgaagcaccagtggtctgaaaggacatgtgttgccaggacttgaagagcaaa

SEQ ID NO: 4600 - DNA, 201 bp, Homo sapiens
ctccttctgaacaaggtaaggagcctgtggccagaaacctacacgtttcgatgctgggatgaaaagccatggaaattcccactgatgcagcagcctccaayggtaaacggatgctcgagtgttgactgagttctgtcatgtaggaggaagcctccgtgcactctctgggggagccagcggattgatttctggtgcaacgtt

SEQ ID NO: 4601 - DNA, 201 bp, Homo sapiens
tgggactatgtgaaaagattgaacctacgtttgattggtgtacctgaaagtgatgggagaatggaaccaagttggaaaacactcttcaggatattatccaggagaacttccccaacctagcaagacaggccaacattcaaattaaggaaatacagagaataccacattcaaattcaggaaatacagagaacaccacaaaga

SEQ ID NO: 4602 - DNA, 201 bp, Homo sapiens
ggaaatacagagaacaccacaaagatactcctcaagaagagcaacctgaagacacataatcgtcagattcaccaaggttgaaatgaaggaaaaaaatgttragggcagccagagagaaagtttgggttacccacaaagggaaccccatcagactaacagtggatcttcctgcagaaactctacaagccagaagagagtggg

SEQ ID NO: 4603 - DNA, 201 bp, Homo sapiens
caaggaagaaaaagaagtctttcaagtactcaagctctgagcacatccagttgctcattgaaccagcttcctggaatggagggtctgggcttgagactagstcacatgtgtagagtctctagagagacagtgttggatccccatggcccataatacatttcccgttttcccaggcagccacaggtcacgaatgggaggatt

SEQ ID NO: 4604 - DNA, 201 bp, Homo sapiens
ttatatggttttaggtctaacatttaagtctttaatccatcttgaattaatttttatataaggtgtaaggaagggatccagtttcagctttctacatatgkctaggcagttttcccagcaccatgtattaaatagggaaacctttccctatttcttgtttttgtcaggtttgtcatagatcagatggttgtagatgtgtgg

SEQ ID NO: 4605 - DNA, 201 bp, Homo sapiens
ttggtctaaaattctcatttttgttgtgtctctgccaggatttggtatcaggatgatgctggcctcataaaatgagttagggaggattccctctttttctmtgattggaatagtttcagaagaattggtaccagctcctctttgtatctgtggtagaattcggctatgaatctctcctggactttttttggttggtaggct

SEQ ID NO: 4606 - DNA, 201 bp, Homo sapiens
actttttttggttggtaggctcttaattattgcctcaatttcagagcctgttattggtctattcaaggattcaatttctttctggtttagtcttggtaggktgtatgtgtccaggaatttttccatttcttctagattttctagtttatttgcacagaggtgtttataatattctctgatggtagtttgtatttctgtggg

SEQ ID NO: 4607 - DNA, 201 bp, Homo sapiens
aaaaccaaccgaacctcacagacatgttgcaaaataggaaaagatttcctgcatatgggaagcaagtcacagaaaagagaacgggagattggaaacagaarcaaataccggaatcaaggatggccgaaaacttttcattgatcaagaatattaacaaaatcgcaaaaacacgaaattcaatgcatcaaataggcgtttcga

SEQ ID NO: 4608 - DNA, 201 bp, Homo sapiens
tgcactgtggtctgagagacagtttgttataatttctgttcttttacatttgctgaggaatgcctcacttccaactatctggtcaatttcagaataagtgygatgtggtgctgagaagaatgtatattctgttgatttggggtggagagttctgtagatgtctattaggtctgcttggtgcagagctgagttcaattcctg

SEQ ID NO: 4609 - DNA, 201 bp, Homo sapiens
cttcctccatccctttattttgagcctatgtgtgtctctgcacgtgagatgtgtcttcagaatacagcacactgatggatcttgactctttatccaatttkccagtctgtgtcttttaattggagcatttagcccatttacatttaaggttaatatttttatgtgtgaatttgatcctgtcatcatgatgttcgctggtta

SEQ ID NO: 4610 - DNA, 201 bp, Homo sapiens
gttataaccctcataagatgacactgaacatccagtgtacatggatatcattaagaagacacaataataagtggtgtcaccgatttggagctagaatgtgycactctctcatatgctggtggaagttcaaaatcatacaacaaattaaaaaatcagtctgatgctttcttataaagttcgataaatatgcatctatcctac

SEQ ID NO: 4611 - DNA, 201 bp, Homo sapiens
ttttttctctaaacttctcttctcgcttcatttcattcatttgatctttaatcactgataccctttcttccacttgattgaatcaactactgaaacttgtkcatgtgtcacgtagttctcgtgccatggttttcagctccattagatcatttaaggtcttctctatgctgtttattttagtctgccattcatctaaacttt

SEQ ID NO: 4612 - DNA, 201 bp, Homo sapiens
aaaaaaaaattaagatgtgtatatatatatatatatatatatatatacacacacacacacacacacaaacatctgaatatttatatatatgtctgaatatwtatatacttgtgtataaaacttatatttaaatttttgcataaatttatatatttttaatatttcactaaaaattatattgtttcactatgtatgtctgag

SEQ ID NO: 4613 - DNA, 201 bp, Homo sapiens
gttttcagctccattagatcatttaaggtcttctctatgctgtttattttagtctgccattcatctaaactttttcaaggtttttagcttctttgcaatgrgttcgaacatccttctttagctcggagaaatttgttattacagatcgtctgaagccttcttctctcaactcatcaaagtcattctctgtccagctttgtt

SEQ ID NO: 4614 - DNA, 201 bp, Homo sapiens
gtatatatatatatacccatatatatatatatatatacacatatatatatatatatatatagtatatatatatatatatatatatacacatatatatatayatatatatgtatatatatatatatatatatatacacacacacacacacacacatacatacaggtataaacacactgggcctgaagcaccagtggtctgaa

SEQ ID NO: 4615 - DNA, 201 bp, Homo sapiens
tatatatacccatatatatatatatatatacacatatatatatatatatatatagtatatatatatatatatatatatacacatatatatatatatatatrtgtatatatatatatatatatatatacacacacacacacacacacatacatacaggtataaacacactgggcctgaagcaccagtggtctgaaaggacat

SEQ ID NO: 4616 - DNA, 201 bp, Homo sapiens
tatatatatatatatacacatatatatatatatatatatagtatatatatatatatatatatatacacatatatatatatatatatatgtatatatatatrtatatatatatacacacacacacacacacacatacatacaggtataaacacactgggcctgaagcaccagtggtctgaaaggacatgtgttgccaggact

SEQ ID NO: 4617 - DNA, 201 bp, Homo sapiens
caatggttgaactagtttacagtcccaccaccagtgtaaaaatgttcctatttctccacatcctctctagcatctgttgtttcctgactttttaatgatcmccattctaactggtatgagatggtatctcattgtggttttgatttgcatttctctgatggccagtgatggtgagcactttttcatgtgtctcttgactgc

SEQ ID NO: 4618 - DNA, 201 bp, Homo sapiens
actgcccaaagtgatttatagattcaatgttatccccatcaagctaccattgatttcttcacataattagaaaaaactactttcaatttcatatggaataraaaaagggcctgtatatccaagacaacctaagcaaaaagaacaaagctggaggcatcatgctatctgacttcaaaatatactacaaggctacagtaacaa

SEQ ID NO: 4619 - DNA, 201 bp, Homo sapiens
atgtaagacctaaaaccataaaaaccctagaagacactttgggaggccgaggtggatggatcacgaggtcaggagatcgagaccatcttggctaacacagkgaaagcccatctctactaaaaatacaaaaaattagctgggtgtggtcgtgggcacctgtagtcccagctacttgggaggctgaggcaggagaatggcatg

SEQ ID NO: 4620 - DNA, 201 bp, Homo sapiens
ggctaacacagtgaaagcccatctctactaaaaatacaaaaaattagctgggtgtggtcgtgggcacctgtagtcccagctacttgggaggctgaggcagragaatggcatgagctgaggaggttgagcttgcagcaagccaagattgtgccactgcactccagcctgggcaacagagtgagactccatcaaaaaaacaaa

SEQ ID NO: 4621 - DNA, 201 bp, Homo sapiens
taagtttcttacctcatgcacaatggtatgtaatattaataaaatgttactgtgtgggttcaaggagatattgcaaatcctagagcaatcacaaagttttsaactctgaggtatattgtataataagaatattccatgtattcaaaagagagaagccaaggaagaaagaaatttgtcacgagtttgggctcttagtacatc

SEQ ID NO: 4622 - DNA, 201 bp, Homo sapiens
agggcttgtcagggggtgggaagctggtgaagggatagcattaggagaaatatctaatgtaaatgacgagttgatgggtgcagcaaaccaacacggcacakgtatacctatgtaacaaacctgcacgttgtgcacatgtaccccagaacttaaagtataataataaaaaaagaaatatttgtttttgatttatatgccaat

SEQ ID NO: 4623 - DNA, 201 bp, Homo sapiens
ctcaagtgcacagggaatattctccagaatagatcatatgttaggtcacaaaactagtcaaaaaatgtaagaagattgaaatcatatcaggttttttttttagatcataatcgtatgaaactagaaatcaataatgggggaatattggaaaatccacaaatagatagaaattaatcaatatgctcctgaacaatcaatgag

SEQ ID NO: 4624 - DNA, 201 bp, Homo sapiens
gcttttttttttctttttgctttccttttgcttggtaaatattcttccatccctttattttgagcctatgtatgtctgcacatgagataggtttcctgaayacagcacaccaatgggtcttgactctttattcaatttgccagtctgtgtcttttaattgggggcatttagtccatttacatttaaggttaatattgttat

SEQ ID NO: 4625 - DNA, 201 bp, Homo sapiens
tttcgagaaaaaaaactacatgatgcacttctctacatcacagttcaaaggtaacaaggcaaggatataagaagaagaaacatctcacgagaaactggagraaaaagagctgtgtcttcctagagtacagtgatacaaattgctaatgcgttcacctcagaaacactggaagccagataccagggaatattattaaaatga

SEQ ID NO: 4626 - DNA, 201 bp, Homo sapiens
ctcagactactgtgctagcagttcaatctcagactgctgtactagcagtgagcaaggctctgtgggcatgggaccctctgagccatgtgcaggatataatmtcctggtgtgccgtttgctaagaccattggaaaagtgcaatattagggtgggagtgtcccgattttccgggtacatctgtcatggcttcccttggctagg

SEQ ID NO: 4627 - DNA, 201 bp, Homo sapiens
attgtaaacaccatcaacactataaagaaactgcatcaactaatgggcaaaatagccagctagcatcataatgacaggatcaaattcacacataacaataytaaccttaaatgtaaatgggctaaatgccccaattaaaagacacagactgggaaattgaataaagagtcaagacccattggtttgctgtgttcagaagac

SEQ ID NO: 4628 - DNA, 201 bp, Homo sapiens
atcatgctaaaaactcttaataaactaggtattgatggagcatgtctcaaaataataagagctacttatgacaaatgcatagccaatatcatactgaatgrgcagaagctggaagcattccctttgaaaaccagcacaagacaaggatgccctctctcaccactcctattcaacatagtattggaaattctgtccagggca

SEQ ID NO: 4629 - DNA, 201 bp, Homo sapiens
caaactggacaaaaataagcaatggggaaaggattccctatttaataaatggtgttgggaaaactggctagccatatgcagaaaactgaaactggatcccytccttacaccttatacacaaattaactcaagatagattaaagaattaaatgtaagacctaaaaccataaaaaccctagaagacactttgggaggccgagg

SEQ ID NO: 4630 - DNA, 201 bp, Homo sapiens
cttctatttaaaaatttaatagagacacaagaagctttcactgtgatacataactgggagaaaaaatcactcaacacaaacaggcccagaaattatagaaytgatgacattggtgagaacatttaaaatgcacctctgagaactgtgtttcaggaaaatgtcagcaaaagctgaccatgagagaaacaaaagcagaatagc

SEQ ID NO: 4631 - DNA, 201 bp, Homo sapiens
gaaaaccaaacaccatatgttctcactcataagtgtgagttgaacaatgagaacacatggacacaggaaggggaacatcacacacaggggcctgttggggwgttgaggctaggggagggattggattaggagaaatacctaatgtagatgatgggttgctgggtgcagcaaaccaccatgacacgtgtatacctatgtaac

SEQ ID NO: 4632 - DNA, 201 bp, Homo sapiens
ataatttgcaacctactggtacacttgaatactattcagcactgagtatcttaaatagcatggatggagctcaaaaatatactcaggaaagaagccatgtrtattctgtatgagttcatttacatgagatcatttacatttcctccaaaagaggaaaaactaatttctgttgaaagaaaccaatgtatttgcctctggcag

SEQ ID NO: 4633 - DNA, 201 bp, Homo sapiens
ggattgacactaggccacatgtatagagtctctagagagacagtgtttcatccccatggcccgtaatacatttcccattttctcaggcagccacaggtcaygaatgtgaggatagagagaggttggagcaacgttcttgggaggcataaggaagagcaaatgcttcaagatccccgcagcccaaactcctacctgctttgc

SEQ ID NO: 4634 - DNA, 201 bp, Homo sapiens
tatatatgttcatataagttagtattcatatatatgttcatatatatatgttcatacagactagtattcatatatatatacatatatatatacacacacayatatatatatatatatatgttctagggaaacatgcaaggtttttatgtctgtccctgactgatgaccaaataccctatagcctgcacagctgcaagctgt

SEQ ID NO: 4635 - DNA, 201 bp, Homo sapiens
atatatagatatataaatagatatatttatatatctatttatatctatctatatctatatctatctatctatctatctatctatctatctatctatctatyatcatctatttatgtagagagcaagatccccctaaatccttcacaataaatgtgcttatacatttgttgatttaggggggtcttgctgtgttgcataggc

SEQ ID NO: 4636 - DNA, 201 bp, Homo sapiens
caatgggccaataaagtgttatttttttcctcctctccaatgagataatttgatcatttgttcttataaggtaacattacaaattatccttaaatgtggcrtagctattttaataacatcattgctattgagatgatgaagaactttagaaatccatgcaacaaaagttaaataaaatgaaaaaagaacctaaataaatat

SEQ ID NO: 4637 - DNA, 201 bp, Homo sapiens
cctacctgaaaatatttttttgaaggaaattatttgaaactctaaatttggccatctataatataaacatgaacatagtaacaaaaacataactcaatggmttcaattaaaaatggtcactctgtgatatccaaattagaattatcataagttaaaatttaagggaaaagattattctacttcaatagtcttgcaacaaat

SEQ ID NO: 4638 - DNA, 201 bp, Homo sapiens
agatatatagatatataaatagatatatttatatatctatttatatctatctatatctatatctatctatctatctatctatctatctatctatctatctatcatcatctatttatgtagagagcaagatccccctaaatccttcacaataaatgtgcttatacatttgttgatttaggggggtcttgctgtgttgcatag

SEQ ID NO: 4639 - DNA, 201 bp, Homo sapiens
agaattgccattagggagtactagttctgagctcattttagtattattaacttctacttattagcaatgaaggatcaatttaattagatttagttattatraagtactgaccatatagattcaatgtaattatttatgtataacatttaagtcatattttaaaatttagctgacttttaagtttaaaaacatgaatactat

SEQ ID NO: 4640 - DNA, 201 bp, Homo sapiens
gcaataaaagccaaatatggcaaatttaactcgtaagatatatagatatataaatagatatatttatatatctatttatatctatctatatctatatctahctatctatctatctatctatctatctatctatctatcatcatctatttatgtagagagcaagatccccctaaatccttcacaataaatgtgcttatacat

SEQ ID NO: 4641 - DNA, 201 bp, Homo sapiens
tgcagaattgccattagggagtactagttctgagctcattttagtattattaacttctacttattagcaatgaaggatcaatttaattagatttagttatkataaagtactgaccatatagattcaatgtaattatttatgtataacatttaagtcatattttaaaatttagctgacttttaagtttaaaaacatgaatac

SEQ ID NO: 4642 - DNA, 201 bp, Homo sapiens
tgcactgaacagaacatctcctatgttgttcaaaatatcacagaataatttaaaatgaattatcttagtttctgcatgcaggaatcaaattagtacatggwaaaaagaaatgtacataattaaatgaaatattctgaaaatttgcagaattgccattagggagtactagttctgagctcattttagtattattaacttcta

SEQ ID NO: 4643 - DNA, 201 bp, Homo sapiens
atgtctctactgactccactccaggtaccaaaatctgtattagtcaaggttctctggagggacagaactaataggatagatatatatataaaagacagttkattaaagagtattaactcacacaatcacaatgtccctcaacaggctctctgcaagctgagaagcaaggaagccagtctgagtcccaaagctgaagaactt

SEQ ID NO: 4644 - DNA, 201 bp, Homo sapiens
gtttccatagagttatcaagatccttaattttgagactcagcttcctacaccggctaattctctgccttttcaggacttaaaagtttgttttaactcagtyttctatgtgttcaactttcctttagatccaaccccacatatgattttgcaactaatttattttacttttattttttctttggcctttttggcattcttat

SEQ ID NO: 4645 - DNA, 201 bp, Homo sapiens
tcatatgggctaacactgaaatgggtaagtgttttgcactgaacagaacatctcctatgttgttcaaaatatcacagaataatttaaaatgaattatcttwgtttctgcatgcaggaatcaaattagtacatggaaaaaagaaatgtacataattaaatgaaatattctgaaaatttgcagaattgccattagggagtact

SEQ ID NO: 4646 - DNA, 201 bp, Homo sapiens
tggcagccttttgggtcactcgataaatgggccaaagtaacacatccaactgaggaatgtattgcctccaaatcaaataggcccattaggcgctgtgcctytttcttggttgtaggaggggccaaatgcagcaacttatccttcaccttagaaggaatgtctctactgactccactccaggtaccaaaatctgtattagtc

SEQ ID NO: 4647 - DNA, 201 bp, Homo sapiens
ttcttaaaaaaaaaatacccgaagggtcaggtaagaagaccacacacattcattctaaacaatatgatcttactgcaggttttaaagcatatggattttaraaattgtttccatgactctttttttttaaaaacaagagctttatttcttaattgacagactttggtacaacatattagaccaatttttaaagacttattt

SEQ ID NO: 4648 - DNA, 201 bp, Homo sapiens
acacgtgttcctgtaaccctctatagattgcattaaatgaacgttgagtcatatgggctaacactgaaatgggtaagtgttttgcactgaacagaacatcycctatgttgttcaaaatatcacagaataatttaaaatgaattatcttagtttctgcatgcaggaatcaaattagtacatggaaaaaagaaatgtacataa

SEQ ID NO: 4649 - DNA, 201 bp, Homo sapiens
cagaaagcacccagttcatgataggcagttcaagtgataggcagacgtggtgacttgatgacccatagtcaaatattcagtttccaccaaagcccagtaaygggacaagagctatctctcaaaaggagagtagttatctgcaggagatggcagagccttgttccaaaatcctagaggcctctgctgtgattcacctgtggg

SEQ ID NO: 4650 - DNA, 201 bp, Homo sapiens
ccaatttagactggtacctgtctaggtggacagcacagcttgcatcctaggatctcccttgactgccgttctgaggatattcttcgcatctttttgtggtrgattcacatcttttttgtggcgtatctcctatttcctgtagccaactccccctcttccttcacttattttcttatttaggttcagcacatcaactaggtt

SEQ ID NO: 4651 - DNA, 201 bp, Homo sapiens
gaaacagtaccatatataggacgccgattcagagcatacacagccttccagaggactttgccccagccctgcaaagtattgtcacctagttggcattttarttgtgacttcaaaaggccattctgccattctgtcaatccagctgcttcaggatgatggggaacatggtaagaccagtgaattccatgagcatgagcccac

SEQ ID NO: 4652 - DNA, 201 bp, Homo sapiens
tacattaggcatttctcctaatgctatccctcctcatccctccaccccacgacaggccccagtgtgtgatgttaaagttcatgttcttagagagtctctcyggcttctccaatttagactggtacctgtctaggtggacagcacagcttgcatcctaggatctcccttgactgccgttctgaggatattcttcgcatcttt

SEQ ID NO: 4653 - DNA, 201 bp, Homo sapiens
cttcattcctgaagggtcttggccatttgtagtcctgcctggattgggctgttgtagtttcccattgacctgaatcacagggcatggtaatactaagagaygccgcaattgatctactgtattccatgcatactcttctttaccttcattgtggagcagtagactgatttcatcttgatagtctgggtcagtcaccccagc

SEQ ID NO: 4654 - DNA, 201 bp, Homo sapiens
gtctcctttggcaacaccctcacagacacacccagtatcaatatgttgcatccttcaatccaatcaagttgacactcagtattaatcattgtaagtctacsccttgtcgacttgaacccatacgcatctgagatcacacattatcttcaaataaagacaataataaggtcataattacacgtaacataatgcagctatcct

SEQ ID NO: 4655 - DNA, 201 bp, Homo sapiens
ttatgaaacagaagccctcttttgtgtatttgtacctgtgaaagggagcagtggtatagctgatccaaagtagcagaaaaacaaataattcatattgactyaggatgctcacctaccccctcttttgcaggagtgttagtttgcatgtcaatacatggacagcctccttggattctggcatgatgctttccataggggttt

SEQ ID NO: 4656 - DNA, 201 bp, Homo sapiens
tgggtaatcactggagataagggtgatgatgatgataatttgatataaataagcagagagtaagatttgtcaaaaaggggcaaactcattgctgttctcamtatctcccttctttcacttcaagcacagacactcacaacatgttctgtttctgataacttcctaagcacacaggaactccaggatttctcaaggaccaca

SEQ ID NO: 4657 - DNA, 201 bp, Homo sapiens
ctgtggccaaaaatctttttccttgactgctctctgggcagctcagtagtatctttaacatggcaaatataaagatagtagattcactacaaagacacctygagaaaaatactgcctgcatttgtaaaccatacacagtcttattattcaatttgtctttatggaagctatcagttagctacacgtttcctttcctatgtc

SEQ ID NO: 4658 - DNA, 201 bp, Homo sapiens
ttcctggcaataatgtggggaagctcagatttacttttcagtgcatgttagtatgtaaaatgacccctatcttcaatatctctatgttttaacacctgctktgtttttacaatagaggcccttgtttggaacaaagccacttaagctgaacgtcattgtacctgcacagttacctgggttatctgtggttgtgatgaaaat

SEQ ID NO: 4659 - DNA, 201 bp, Homo sapiens
accaccataatcaccccaggctacttacaaggcaccttcatagaaattatactgtgccaagtgccacaaagaatatcaaaatgcagcccctgcttcaggcrcttatgtttccaaggggaaaaaaactggcctttggatttagataagaaactttattgtgattacaaattggatttcctgtttttatttcaggaaagttat

SEQ ID NO: 4660 - DNA, 201 bp, Homo sapiens
taaaattaaatcagatttgttatatggaatcatttaaacctaatttcttaattaaagacattttaagttcactttctgttccttaggtgtaaacatctcawgctacaaaaaacaagaatagattccactgctggggtgaaaagccacgacttttcttcctgtgttctgtttcccaggcctatcaaagatatttaagtactg

SEQ ID NO: 4661 - DNA, 201 bp, Homo sapiens
aacaaaaaacattttcactctactctggaacttgtcaatttgtcatttttctaacagttttttttttattgctgtttgctttgttgcccataaaacaacaygcaagttatattttcattgagacctgggtgcttggatctagattattcttattatattcttacatttacattatatatccttcataactattgttgataa

SEQ ID NO: 4662 - DNA, 201 bp, Homo sapiens
atttctgtgaaataaatggtttgaatgaatccccctaattgaatattgaattgcctgttttagtaaggatcaccctctccttgccttttttttttttttttggagacaggatctcactctgtcacccaggatggagtgcagtggcaatcgtagctcactgcagcctcaaactcctgggatcaagtgatcctccacctcagc

SEQ ID NO: 4663 - DNA, 201 bp, Homo sapiens
tgagaggcataactttttattattattattattaatgataaacacagctactctgtgaacacaagcatctccaacatgcagaaataacccctctctgtcccaactgttaactctgatcttcttttagtggctgtggttctgtttggtaggtcttttgtttttttatttttttatttttgagacagagtcttgctttgtcat

SEQ ID NO: 4664 - DNA, 201 bp, Homo sapiens
cctatgccttattttcctcacctaaaaaaatgaagacagtgcctcatggatttctcttgaagaataaataatagaaaccattgtagcactcagtaaatatraattgctgtacgaacattactaaatcacagccattgtgctgtctacataagcacttttcatttgggttccttgctaatgcattaatctgttgccagaggt

SEQ ID NO: 4665 - DNA, 201 bp, Homo sapiens
ggttatttttgtgtgtacaggcacaacctgacttgatctctgtgattccatattaatttccctatgccttattttcctcacctaaaaaaatgaagacagtrcctcatggatttctcttgaagaataaataatagaaaccattgtagcactcagtaaatatgaattgctgtacgaacattactaaatcacagccattgtgct

SEQ ID NO: 4666 - DNA, 201 bp, Homo sapiens
tttacataaagtatattcctccattccagttccttagagcacatacatcatccctggttccctggtgtaaaaagttgaagtattttgctccagttgatctrgaatgtggtcttcttataaactgttaacagataaacccaatgccacaggattcatcttggaccaggttgcagtattgagtggactgtggacatagataac

SEQ ID NO: 4667 - DNA, 201 bp, Homo sapiens
tttttcccaaggccaatgaccagaattgtatttcctaagttttcttctaggattcttatagtttgaggtcttatatttaactttttaatctatcttcaatwatttgttgtatatagtgaaaggtaggggtccagtttcattcttccacatatggctagccagttatcccaggaccatatattgaacagggagccttttttc

SEQ ID NO: 4668 - DNA, 201 bp, Homo sapiens
tttttgagatggagtcttgctctgctctgtcaccaggctggagtacagtggcactacctcggctcactgcaacctctgccttcagggttcaagtgattctyctgcctcagcctcccaagtaactgggactacaggcacacgccaccactcccagctaatttttgtatttttaatagagacggggtttcaccatgttggcca

SEQ ID NO: 4669 - DNA, 201 bp, Homo sapiens
atgcttgaaagtaagaacagacacaccacgttattagaaaacatgtatcaaaatgaaacaaggggaggggtaaggatagctcaaaaatcccaaggccttttaccagtttgcatagggagagggaagccaaaagccctactggaagaggaactttacccttttgccagcatgttgtgcttctgggttcctttcccgctgagc

SEQ ID NO: 4670 - DNA, 201 bp, Homo sapiens
cctaaaagtcctttaattactcaccacagctttaaagaataaagtctggaaactagatgctgcttacaaagcccttcgttatatggtcactgactgtcttrtattgatacacaccatgttctaatcatgccatattgcttacagtgattacaatgtacatttgcttatgggattcatccaacctgaaatgcctttctttgt

SEQ ID NO: 4671 - DNA, 201 bp, Homo sapiens
ataaggactttgacttcagttccatttgcgcatctcactcattgtgcaatctggggtgagcctcctatttattaagttccatcttcatctttttttttttttctgagatggagtcctgctctcttgcccaggctgccaggctggagtgcactggagcaatcttggctcactgcaacctccacctcctgggttcaagcgatt

SEQ ID NO: 4672 - DNA, 201 bp, Homo sapiens
agttattgatatgcttaaaataataatttttaagtagcacttttatttactaactgcttccggtggaatttcagattatcagttatttttattcttatttsttttacttgtctaattgcattggttagcacatctggaatgacatggaatactgattgtgatgctgggcattcctgttttgaccctaatcctctaatactg

SEQ ID NO: 4673 - DNA, 201 bp, Homo sapiens
gtcagatctctttcactgtctcagttataattttgcaatggtggtttcaaggttatcattagggggagaatgagaaagactgtattttattgaaatggtastaagtggagagatgattttgaatctctagaaactcaacagtattactgtgatgccaacaacattgacttaaagattttccaatgagatgactctttggat

SEQ ID NO: 4674 - DNA, 201 bp, Homo sapiens
taattaaagacattttaagttcactttctgttccttaggtgtaaacatctcatgctacaaaaaacaagaatagattccactgctggggtgaaaagccacgrcttttcttcctgtgttctgtttcccaggcctatcaaagatatttaagtactgagttaggtctggctagggaactctcctgactgctttaggggcacagat

SEQ ID NO: 4675 - DNA, 201 bp, Homo sapiens
cccaggcctatcaaagatatttaagtactgagttaggtctggctagggaactctcctgactgctttaggggcacagatgatagggaagaaaagagtagacygtgggggttagtcttggaatgatttcagtactcccctttgatggtgatagctgcttcctgttaggaacttctgttggaagcatacttcttacctgaagaa

SEQ ID NO: 4676 - DNA, 201 bp, Homo sapiens
cctacccagatccctgtaaagccagcgtggttctgcaaccatcattcatggataaggaccaagactgagctgctctggttgaagaagctgttggatgatayggggtttgtgccagagtgtggtgaattcattttccaagatatgctgggctcactctcagcaaggccagctgaaagctgagtctgctttggatgcagaggt

SEQ ID NO: 4677 - DNA, 201 bp, Homo sapiens
aaatatcaattttaaagatattattaaagtttagcaaaatcatgtataaagtttacacttaccaataaaaatactacatctcacattctgtacttcatttygtcactttacatttttaaaaacaaaaattccattaatcatgtggaatgatgaatttacttgtttctttttttttgcaagtaatatcctataattatttat

SEQ ID NO: 4678 - DNA, 201 bp, Homo sapiens
agccacagaactcccatataaacatttctatctttgacaaaggtttatgcaattgatctggctgctcatttttcccccgtgatttcctttttttaattcayaggtgaatgacatttagttctcggttgtggaaaatgctcttaatgcctccatcttttaaggagatgttcctatagctcagttactttgaatatagttttt

SEQ ID NO: 4679 - DNA, 201 bp, Homo sapiens
atgacatttagttctcggttgtggaaaatgctcttaatgcctccatcttttaaggagatgttcctatagctcagttactttgaatatagttttttgttttstttttaatttatggcatcagcaaatgatttacaccatagtgttaaccagtgctcatgaggatgctgattttagcagaatcctagggaactaatagaaaaa

SEQ ID NO: 4680 - DNA, 201 bp, Homo sapiens
tcggttgtggaaaatgctcttaatgcctccatcttttaaggagatgttcctatagctcagttactttgaatatagttttttgttttgtttttaatttatgrcatcagcaaatgatttacaccatagtgttaaccagtgctcatgaggatgctgattttagcagaatcctagggaactaatagaaaaaaatcacagctaatt

SEQ ID NO: 4681 - DNA, 201 bp, Homo sapiens
agtgctcatgaggatgctgattttagcagaatcctagggaactaatagaaaaaaatcacagctaattttagtatttgtagggccttatgacagatagatcygaatactattattcacccttaataacttcttgctaaattatctgttttgtctcctgtctaattttatttctttcatgaatacacatattttatacatctg

SEQ ID NO: 4682 - DNA, 201 bp, Homo sapiens
ggctcagacccttcaggaatgaaggtttgggtcactccaggaaaaaaaccatgacctgctgaggtgcttgctaaaggcaaagggaatacagaatgggtagkagaagaaggtagtcatcaataccagctatgaccacgtgaccagttgcagaaatgaggactgtaattgtcatatttcttccttctttgttaaaaacatgtt

SEQ ID NO: 4683 - DNA, 201 bp, Homo sapiens
atgccctgtgattaaggtcaatgggaaactacagcagcccaatccaggcaggactgcagatggctcagacccttcaggaatgaaggtttgggtcactccakgaaaaaaaccatgacctgctgaggtgcttgctaaaggcaaagggaatacagaatgggtagtagaagaaggtagtcatcaataccagctatgaccacgtga

SEQ ID NO: 4684 - DNA, 201 bp, Homo sapiens
ataattggtagagccagaaagcagactctagtccctgcatcccaagcccatattcttcccctgcgcaatattcaaaagagccaacatttgaaaaaaaaaaycttcattgaatatatcattttccctacaaaaccatgttggagtgcttgagatgcctacgaataaaaatatactttttcacacatttcttattgaacagaa

SEQ ID NO: 4685 - DNA, 201 bp, Homo sapiens
gtgtggtggaagaatttattggaaactgggagtataattatcaggaaacttttaattacataaaatgaggcatatgcaggtatatatcacatgaaccaaarggtgcatccgcctgaaaggtctaaaatcattttcagaaccaaacaggttataattcttactcctaagtaaaatggtaaaaataacagaattattcaattt

SEQ ID NO: 4686 - DNA, 201 bp, Homo sapiens
agtttatcttttatgtcatcctcgggccaacttccttataatctgctctatagagaatctcccactttacagcttaaacacaggaaaacagaccctccccrccagaacgtatttattcagtccaactactgtaatagaaacatatagcctctctgagtccagtagcataagaacaattttacccatggtcatgcagaagct

SEQ ID NO: 4687 - DNA, 201 bp, Homo sapiens
acccattgacgtgcatttctccattccccatcccctccttgtccctgataaccactgttgtactatctttttctatgggcttgacttttttttttttttttaattccacacataagtgagaacatacagtatttgtctttctgtgcctggcttatttcacttagcataatgtcttccaggtttgtccattttgtcacaaat

SEQ ID NO: 4688 - DNA, 201 bp, Homo sapiens
caactttggtgaatctgacaattatgtgtcttggagttgctcttctcgaggagtatctttgtggtgttctctgtatttcctgaatttgaatgttgtcctgycttgctaggttggggaagttctcctggataatatcctgcagagtgttttccaacttggttccattctccctgtcactttcaggtacaccaatcagacgta

SEQ ID NO: 4689 - DNA, 201 bp, Homo sapiens
ttcagtgatatttctcccatttgcttttgaaagaagagaaatagggctctgttccgcccggctcactggtggtcagagtttaaggttatctcttttattcyctgaacattgctgttatcctgttcttttatcgaggtgcccagatttcatattgttcaaacacacatgctctacaatttgtgcagttaacacaatcatcac

SEQ ID NO: 4690 - DNA, 201 bp, Homo sapiens
atctctccttctttcctcccctactcctcttcctccccctcctcctttttttccttcttttccttctcctcttctagcaattaaatatttgtagtctatcwaccactcatgctttcctcaacgtagaatttcccagggctctatgctggttcctctgttcttctttctgcatcccccaaccccccactcaccccccacact

SEQ ID NO: 4691 - DNA, 201 bp, Homo sapiens
agaattcagtgatatttctcccatttgcttttgaaagaagagaaatagggctctgttccgcccggctcactggtggtcagagtttaaggttatctcttttrttccctgaacattgctgttatcctgttcttttatcgaggtgcccagatttcatattgttcaaacacacatgctctacaatttgtgcagttaacacaatca

SEQ ID NO: 4692 - DNA, 201 bp, Homo sapiens
gagaagaaacctatttattttaggtgttgtaatttgataagaagttagtttaactctctggctgttgagtaatttataatcatgctttgtctgctcaggtrcatgtgttggagataaaactgtaaacaagaaggccgggcgccgtggctcacgcctgtaatcccagcactttgggaggccgaggcgggcgaatcacgaggt

SEQ ID NO: 4693 - DNA, 201 bp, Homo sapiens
acatcaacctcagccacaatggtattgatgattatgattataatgataaaacttgcatatgtaatgggcttagcaagtttgtgcagcaaggagattggcawgatggcccatggtatcctgcaatgctaggattatatttataagaatagcaagtcagctttccagatagtaattatagcaaagtaagcagacttcaactta

SEQ ID NO: 4694 - DNA, 201 bp, Homo sapiens
atggagacagtaaaggagaatattttacttctctttaaggttttaatccaattttccgcccgagggcttcggggtgcttttctctgccttcctatcccccwttttttttttgagtcagggtcttgctctgtcacccaggctggagtgcagtggctcactgcaacctctacctcctgggctcaggtgatcctcccacctcag

SEQ ID NO: 4695 - DNA, 201 bp, Homo sapiens
aatcatttcaacttaaagattagatgtttaaatattttgaggctctccaatgttttccaacagtgaaaaatcttaacagttttacatctcttaatgactatgagttcaaataacacattcatgataacctgttagtttaatatacatacatgttaacctatgtatattaacctaactttttaactgattacatattagttt

SEQ ID NO: 4696 - DNA, 201 bp, Homo sapiens
gaatcatttcaacttaaagattagatgtttaaatattttgaggctctccaatgttttccaacagtgaaaaatcttaacagttttacatctcttaatgactatgagttcaaataacacattcatgataacctgttagtttaatatacatacatgttaacctatgtatattaacctaactttttaactgattacatattagtt

SEQ ID NO: 4697 - DNA, 201 bp, Homo sapiens
tagtggaatatatgtatgaattttaaaggcaatgactgaaatggagacagtaaaggagaatattttacttctctttaaggttttaatccaattttccgccmgagggcttcggggtgcttttctctgccttcctatcccccattttttttttgagtcagggtcttgctctgtcacccaggctggagtgcagtggctcactgc

SEQ ID NO: 4698 - DNA, 201 bp, Homo sapiens
cttttcatgtacctgttagacatttgtctattttctttggaaatacgtctattcagagcctttccttgttttttcaaaactttttatttgacaaaaaattktatatatttattttgtataacatattgtttgtaatacacatacatcatggaatggttaaattgagctaattaacatatgcattacttcacatattttgca

SEQ ID NO: 4699 - DNA, 201 bp, Homo sapiens
cactagtggaatatatgtatgaattttaaaggcaatgactgaaatggagacagtaaaggagaatattttacttctctttaaggttttaatccaattttccrcccgagggcttcggggtgcttttctctgccttcctatcccccattttttttttgagtcagggtcttgctctgtcacccaggctggagtgcagtggctcac

SEQ ID NO: 4700 - DNA, 201 bp, Homo sapiens
aatgtgtaaagtgccaagcacaacatctggcacaaagtaagcactttgtaggtagatactatttattattattattattattattattattattattattattattatttgagatggagtcttgctctgtcacccagacgggagtagagtggcacgatctaggctcaccacaacctctgcctcctggcttcaagcaatccc

SEQ ID NO: 4701 - DNA, 201 bp, Homo sapiens
ccacattttctttatccagtccactgctgatgggcacctaggttgattccacgtctttgctattgtaatagtgctgtggggaacatataggtgcatgtgtstttttggtagaagaatttcttttcctttgggtagatatcaagtaatggggttgctgggttgaatggtagttctgtttttggttctttgagaaatcttcat

SEQ ID NO: 4702 - DNA, 201 bp, Homo sapiens
aagtgaaatctatgtttgtgttaataacaactactttcaaaatatccttttatatcactcagtaagttaaaacgattaatgcatactgtgataatttattdtgtgccaaaaattatgcaaaatacttttatcccatcaatattatctcatttattaatttatattttatgataactttgcaaagtgtctattattataata

SEQ ID NO: 4703 - DNA, 201 bp, Homo sapiens
attatgctgggcatggtggcttccacctgtaatcccagcactttgggaggcagaggcagtagtattgcctgaggccaggagttcgagaccagctggccaamatagcaagacccctatctccacaaaaaacaaaaatattagccaggcatggtggcacacacctgtagtcctagctacttgggaggccaggataggatcatc

SEQ ID NO: 4704 - DNA, 201 bp, Homo sapiens
ttgacacaatctgaaaagaaagttctgttatcatggtatatttataatataaggtagaactgatggtgttaagtataatcacatacacaagtatatacatrtacattctaaatccaagattgtttctgagacagattcaagaaggaatctttcagcagtgaattttggcttctctgaagatacaactctttaaaggcagca

SEQ ID NO: 4705 - DNA, 201 bp, Homo sapiens
aggatattgtttttcattaataaatggagctatttttagattttgccggtgtgtatacattttacttgcttgcttttcatatctcagtcaccattatgtgscagtctccaggaccacctgcataatctgtggggcccagtgttcaaaaattattgacacttttaagacattgacagtagatcattagctaagtgtacctcc

SEQ ID NO: 4706 - DNA, 201 bp, Homo sapiens
ggaaaaggtaatagaatcgtgtgtgtgtgtgcgtgtccatgtgtgtgtgtgtgtgtgtgtgtgtggttggaggaggtccttgcatctcaagctactaattrtcttctattttgaataaaatctagtccaaaatgtattttgacaagagtccttcaaagaattatgctgggcatggtggcttccacctgtaatcccagcact

SEQ ID NO: 4707 - DNA, 201 bp, Homo sapiens
taataacttcttgctaaattatctgttttgtctcctgtctaattttatttctttcatgaatacacatattttatacatctgatatttcagaaaatgtgctwaaaaatgtctatttttccatttcttcattgattatcagtttatctaatctgtgtatcatccatctctaaacctaatttttggatacatatacaaccaata

SEQ ID NO: 4708 - DNA, 201 bp, Homo sapiens
aaaaatgtctatttttccatttcttcattgattatcagtttatctaatctgtgtatcatccatctctaaacctaatttttggatacatatacaaccaatasacatgggatataccaacaatataattgcatgatagtcttagttaaaaagtttagtctgtctctgtgaatttgattcttctgctttgcatgattctggctg

SEQ ID NO: 4709 - DNA, 201 bp, Homo sapiens
ctccttttcttcctccctgtaccaatatttccttcagatctgatttgcacgttgctgaaggctccaaacatttgtgctgctcatcctaagttatgttgttmaagcatctgagacacttaaccttcttggagtttttcatcaacatctgtggatctctccttctttcctcccctactcctcttcctccccctcctccttttt

SEQ ID NO: 4710 - DNA, 201 bp, Homo sapiens
ctggggcctgggaatgagtatggttggccaaacaacagtgtctgaggcaatggatattaaataatgctgattctcttaggttagcactagtggaatatatrtatgaattttaaaggcaatgactgaaatggagacagtaaaggagaatattttacttctctttaaggttttaatccaattttccgcccgagggcttcgggg

SEQ ID NO: 4711 - DNA, 201 bp, Homo sapiens
tatagaaatcagtaaataccttgtatttcttttttttttttttcaagactaaagactatcttttaaactaacagctgctgctttaaagaaaaaaaaaaaaatccacccactcttcaagtctctgtctatttgtgatttcccagctccctggaggcctggtgaattgtgtggcatttttgcacagaaagattaccctgctaa

SEQ ID NO: 4712 - DNA, 201 bp, Homo sapiens
cctgttttttattatgtatatgcctacaaatggaattcttgggtcatataggcctagtgggattttatttctgattatactgagtttatagaaaaatctgsagtgaattcgtatcttaaattttaacctcaagtcgtctgatccatgagcactgtatatctctgtcttagtcagcttgggatgccataacaaaatatcata

SEQ ID NO: 4713 - DNA, 201 bp, Homo sapiens
aaaaaacataacattggaattagaagaagtaagggaaaagaaaaaatatagaacttgctatagaaatcagtaaataccttgtatttcttttttttttttttcaagactaaagactatcttttaaactaacagctgctgctttaaagaaaaaaaaaaaaatccacccactcttcaagtctctgtctatttgtgatttcccag

SEQ ID NO: 4714 - DNA, 201 bp, Homo sapiens
ttttccaattctaggtatttatacaccatataagtggaatcatacaatattttctttttgcatctggcgtatgccacctagtgtaatggttcttaaaatgktttttatttttaatttttgtaggtacatagtaagtgtatatatttatggggcatgtgaaatactttgatacaggcatgcaatgtatatcgtcatagtaaa

SEQ ID NO: 4715 - DNA, 201 bp, Homo sapiens
tgcaaagcttcccaaagtattgctgttaacaagaacactgattcccttgatatctttggcagtgggtgtcctgttgcctaaagtgaaacttttttttttttggttcgcctctgagcattaataattacaaattgttgagccattgttctgattctgtcatgttctgaattctagcatccatgggggtctttaattcttggc

SEQ ID NO: 4716 - DNA, 201 bp, Homo sapiens
gtgatttttcacttctttttaaagtactgcttaaaatcagttttgaagataacaggagatgtattaaaacagtcaaagccccccaatttttttttttttttgcaaatagtttattatacatatgtacatgttttcagctgtcccttttcaggcacatattttaaaatgtgctttacataaaagtgttcttaagttacacac

SEQ ID NO: 4717 - DNA, 201 bp, Homo sapiens
ccactgaagtaggggcttgcctgctctccaagaatcacagaacaaggggtctgtgactgccactagaatggggacttccctatcctctacgttttttttttaacctgatccatgaatgataaccatgatatagtggatggcatggagtttactattcatcagacactcttaaaagagtttaacatgtattaattatattac

SEQ ID NO: 4718 - DNA, 201 bp, Homo sapiens
cattttcaaaactaaaagcagatataattgtagaaaacaattagtctgtctaccattgttcaagtttagactttgacgtgttacctcttcattaactcaayttctgtagtttagtatctgttctatttgacacgacacagctacacataatatggagtgctccagagagttgcagtactcttctagtacacaaattgcaaa

SEQ ID NO: 4719 - DNA, 201 bp, Homo sapiens
gagatagatattgagtgtggagaggcaaacagcaggggaggacctatagttttgtttttttaggggtgtgtgtgtgtgtgtgtgtgtgtgtgtgtgtgtgkatgatttcagatgagcaagtgttttctgttctgggcaatccaccaggtatgctttaaaatccactttaagccattttgaaattctttccagatcctggaa

SEQ ID NO: 4720 - DNA, 201 bp, Homo sapiens
tttcattaaggaaaaggtaatagaatcgtgtgtgtgtgtgcgtgtccatgtgtgtgtgtgtgtgtgtgtgtgtggttggaggaggtccttgcatctcaagstactaattgtcttctattttgaataaaatctagtccaaaatgtattttgacaagagtccttcaaagaattatgctgggcatggtggcttccacctgtaat

SEQ ID NO: 4721 - DNA, 201 bp, Homo sapiens
ggagatagatattgagtgtggagaggcaaacagcaggggaggacctatagttttgtttttttaggggtgtgtgtgtgtgtgtgtgtgtgtgtgtgtgtgtgtatgatttcagatgagcaagtgttttctgttctgggcaatccaccaggtatgctttaaaatccactttaagccattttgaaattctttccagatcctgga

SEQ ID NO: 4722 - DNA, 201 bp, Homo sapiens
ctagatttttcacaattccaaatcagtagggcagtaatttgtgacattttagcactctgtaatttttgtgataaagtaaaaattttctgttcatttttacytttctttaaaacatactcagaattaagaacataggttagagtgaagcttccattttcctgcggtgcatttatttcctgctcagtgggttacatgagcaat

SEQ ID NO: 4723 - DNA, 201 bp, Homo sapiens
ggagaaaatagcttgcaataggctcttttgagaggatgtcggtcaatgaaatttctgtccaacttgaaccagaccaaaaaacatttatctaaactgtgcakccttgatgatgtaaaactttgaagttcgcattttgaatataccaccttacctgttgatgttgtatttaattatgtacattgaggcaacctaatgaccaag

SEQ ID NO: 4724 - DNA, 201 bp, Homo sapiens
agtggttctgcacagatagcattccaagcagcgctgtcagcaagggcacagacaggaggagctttgtgtggcacagcactgtgagaatggccttagttcaygtgtttctcccttccttgatttgctacccatgtgctgcagtcccctactggatctgtgaagagagcactaatggcagtggggagggtgcgtggcggatag

SEQ ID NO: 4725 - DNA, 201 bp, Homo sapiens
tattttttcttgtttggttttatatatagttacttcctgacatccagccatttttactactttcatgattttttgacatacttgcttaccacctgtacggktatttcccaatattctctttaaattgattcactttgcaatctaaattcatttaaagagaaaacttatattagtaccgtgaacagaaaaccagtattctct

SEQ ID NO: 4726 - DNA, 201 bp, Homo sapiens
acactgttttttgtggaataaatgcttctttgatactgtatattgtttttaatataatattagatttaattttacttaatatttagtattttattgagaaytttttgcattaatatttataaatgagacttagttacagggctttatttttttttcctcttttttttccgagcaagccacttatttttttaattaggaaga

SEQ ID NO: 4727 - DNA, 201 bp, Homo sapiens
taagttcatgtttactattatatcttgttcacaggtcaatctttgaactgggaaattcgttttaaactaaaatagccatagtaagctttcaggacttttaraaatacgtattttcttgtagctttttcatgatgtcattttaataatgaaacattgaattcatcttcattttgtgttgtaagttatgaaatagacatctaa

SEQ ID NO: 4728 - DNA, 201 bp, Homo sapiens
atgttatatatggttaagctataacgcatttgcaaggagaatgagttttatctagaagtcactgcatgaatggaaattgtggaaattatatcacagaaatktatgaagtaacaaattgttatccttttgtcatttgcagttctgatcggttttcatttttgtgcttgggtgatgttgggattgttgaaagcttaacgttct

SEQ ID NO: 4729 - DNA, 201 bp, Homo sapiens
atttttgaaatagtttgagtaagattggtattagttctttacatgtctggtggaattcagcactgaagccattggttcccaggcttttctttactggcagkcttttcattacagcttcaatcttgttactttgttattggtctgttccatttttgggtttcttcatggttcaatctgggtaggttgtttgagcctaggaat

SEQ ID NO: 4730 - DNA, 201 bp, Homo sapiens
ttgaagtcacacagttaccaagttagtaaaccacctgttgaaatttaacctatatctgttagaatatttactaccttagtgtcactcaaccacactcatcygtggttgaatcttactgtgggtctctggggttcccccaagttcatgcttctcttgggttcaggacagcatttacgcactgagccagccatgagtggcagt

SEQ ID NO: 4731 - DNA, 201 bp, Homo sapiens
agcttgaaggtagggcatcactgaggaccttcccccttctgcccaggagcctgtctgccgcctgtcaccattcatcgcacccagaccgttcatgccaaggkgcgcctgcaggccagtaccccgctgtcctcagcaccccttgtgcctccctcctgtgcttgtccacagccaaagtttagagggagccgaggcagcaagggg

SEQ ID NO: 4732 - DNA, 201 bp, Homo sapiens
ctttcattaaatcctacacaacaagtggctttgaatatcatatctactcaaaaaacagcttttgaattaatgagtggatacctaaatgtttttgtccctcmtcaaatctggctcactgtgttgggtatactgagtgattgataagcatttgttcaatgaagtttctgaattacagaattttttcactaaggagctgaattt

SEQ ID NO: 4733 - DNA, 201 bp, Homo sapiens
ataaggtgtaaaaggaataaaagggaagtgacaaatcttacagaatattaaaaatagcttcatggtaaaataattttgaagtatttatttccaattaccasgaaactccagtgattctatatgatggcaccattaaggaagccagcaacccaagaccatcatagaagctgtgatgtgaactgaaggaaaaacattgcaaga

SEQ ID NO: 4734 - DNA, 201 bp, Homo sapiens
ttctttttcctgaagcaaggatattattttctccttaaataaggtgtaaaaggaataaaagggaagtgacaaatcttacagaatattaaaaatagcttcawggtaaaataattttgaagtatttatttccaattaccaggaaactccagtgattctatatgatggcaccattaaggaagccagcaacccaagaccatcata

SEQ ID NO: 4735 - DNA, 201 bp, Homo sapiens
acgtaacaccgtggtcttatcaaagatgtaagatgctaagaggtgaatataacatatttatttatactttactaatataaactatgttttgtatgtggtgtgtgtgtgtgtgtgtgtgtgtgcaaacacaattttgagtaactttggatggaatctcaaggtgattcactctaattcccagctactgctcctgttctcact

SEQ ID NO: 4736 - DNA, 201 bp, Homo sapiens
tcaaaaacaaaaacagctcctgaaaaagaactcattaaattattatctggctttccagagtcaatagttaaatgttcaggaatattgtcagcaggttactratctgttagcagtttgacatctatggtaagattacttataccacaaaacttgggaaaggctacacatcagggtaactcttcatccctgcccactgccccc

SEQ ID NO: 4737 - DNA, 201 bp, Homo sapiens
taaacgtaacaccgtggtcttatcaaagatgtaagatgctaagaggtgaatataacatatttatttatactttactaatataaactatgttttgtatgtggtgtgtgtgtgtgtgtgtgtgtgtgcaaacacaattttgagtaactttggatggaatctcaaggtgattcactctaattcccagctactgctcctgttctc

SEQ ID NO: 4738 - DNA, 201 bp, Homo sapiens
gcatttataatcatcttaccttataagcaagtgattcttgcttctgtattgcatgttgctgaacttgcagctggactataagctccatgaagagaggattwgattataggttttatgcttgacattccttcagtagagttccctcttagttcacaggattctctcaaaaacaaaaacagctcctgaaaaagaactcattaa

SEQ ID NO: 4739 - DNA, 201 bp, Homo sapiens
taactaaacgtaacaccgtggtcttatcaaagatgtaagatgctaagaggtgaatataacatatttatttatactttactaatataaactatgttttgtatgtggtgtgtgtgtgtgtgtgtgtgtgtgcaaacacaattttgagtaactttggatggaatctcaaggtgattcactctaattcccagctactgctcctgt

SEQ ID NO: 4740 - DNA, 201 bp, Homo sapiens
gctgatgcactttgtcttaggtgcttatatgtcaatttgctttacattaatttgcatttataatcatcttaccttataagcaagtgattcttgcttctgtmttgcatgttgctgaacttgcagctggactataagctccatgaagagaggatttgattataggttttatgcttgacattccttcagtagagttccctctta

SEQ ID NO: 4741 - DNA, 201 bp, Homo sapiens
gaatatgatgactactagtgtagttcggcaccactgtctgcctcattgtaaaatatcagtgattttaccattgttgctttttctttttcttatttttttttaccataagtgcaaatgtcaacacaatggaagaggcacatacaattttaatattgctatgaaaatgtttttcacctggcagatcactggaaagggtctggg

SEQ ID NO: 4742 - DNA, 201 bp, Homo sapiens
ttctcatctacaatctcatttggacctttcagccaccttatgagatgggctgatgcactttgtcttaggtgcttatatgtcaatttgctttacattaattygcatttataatcatcttaccttataagcaagtgattcttgcttctgtattgcatgttgctgaacttgcagctggactataagctccatgaagagaggatt

SEQ ID NO: 4743 - DNA, 201 bp, Homo sapiens
tgagactgatacaagtgctaacatttattgagtccttatgatgtgtcaggtagatttctaggcattatttctatattatttaatcctcaaaataatataaagtagggataatttttatccttatttctgcagatgaggaaactgaagcatacatctagtacccatacaagttaagtggtgaagccaggatttgtgactttg

SEQ ID NO: 4744 - DNA, 201 bp, Homo sapiens
agcatcctagccaatttagaaccatcttatttaaaggcaggtggcaaaactaatttaattgcctataatttctttaccatttaagaattttaagccaaatwttgaatgttatactcttaaaatcaataccaataatatctatcagctatagagttcttactatgtgctaggcattgtcctaggtaatttatatttatgtct

SEQ ID NO: 4745 - DNA, 201 bp, Homo sapiens
taggtataagaaatatccttctaagaaataatgtttaaattgttctctccattgtaatacagagcagaaacttaagaatgcaacaatattttcttttttttcaaaaaagaagccatacaaaaaagaggcacagaaaatgactcttctgttgactattgatgttaagtaaaattcctagatttaaaatctcattttgtggcc

SEQ ID NO: 4746 - DNA, 201 bp, Homo sapiens
tccttcttctccttctttctttcttcttcttcttcttcttcttcttcttcttcttcttcttcttcttcttcttcttcttcttcttctttcttcttcttctycctcttctccttcttcttcctcttcttcttcttctctctctctttctctctctctctctctccttctctttcctttctcccctcccatgttggatgtgcc

SEQ ID NO: 4747 - DNA, 201 bp, Homo sapiens
ataatgcaagttgcttacacagctccaattaatgcaagtcctctgaagagccccaaattaactttaagacaaggtaaatttaactacatgtacatacataacatgcacaaggcaaacacacacacaatagaaaaggtagtaataggtataagaaatatccttctaagaaataatgtttaaattgttctctccattgtaata

SEQ ID NO: 4748 - DNA, 201 bp, Homo sapiens
tgtgtatgtgtgtatatacatttgtgtgtacatatatgtgtgtatatatgtgtgtgtatatatacgtatatacgtgtgtctatctatctatatatatatawgcctgtgtgtgcgtgcgtatattctgtcattagccctaattgtcctgtgtagtagagcaactaagagtgttattatgccatttgacaacagacatatata

SEQ ID NO: 4749 - DNA, 201 bp, Homo sapiens
ctatacttgccatttgtaggttaacagcctagtatccatccccttacctttttctcttcctacttgaacctccgttttcccaaagaaacattccagctccrtcctatcagcatatcacaaatctctggacacagtggtttggtctatgtgatgtaataggaggacacatatattggatgctcagaatgactcttcctcttt

SEQ ID NO: 4750 - DNA, 201 bp, Homo sapiens
tgcttttagttttaatatgtgtgtgtatgtgtgtatatacatttgtgtgtacatatatgtgtgtatatatgtgtgtgtatatatacgtatatacgtgtgtmtatctatctatatatatatatgcctgtgtgtgcgtgcgtatattctgtcattagccctaattgtcctgtgtagtagagcaactaagagtgttattatgcc

SEQ ID NO: 4751 - DNA, 201 bp, Homo sapiens
ttcagaaatcttaatgcttttagttttaatatgtgtgtgtatgtgtgtatatacatttgtgtgtacatatatgtgtgtatatatgtgtgtgtatatatacrtatatacgtgtgtctatctatctatatatatatatgcctgtgtgtgcgtgcgtatattctgtcattagccctaattgtcctgtgtagtagagcaactaag

SEQ ID NO: 4752 - DNA, 201 bp, Homo sapiens
tgaatgaattctccaattttatggtcattttcatttgttttgctttctgaaatgttttctctacttgctcttataccttatctattgagatatttctatcrtctcctttttaatttctaggagcttcttcttgccctctgaatgtttctattcttttagcctcctattcttgttgcatggacacacttcttgtctctgagg

SEQ ID NO: 4753 - DNA, 201 bp, Homo sapiens
ggcaagtctgctatataataatatatttctaataaaagtataaattggtataaatcttttggaaaacaatttggcactatgtaccaaaagctataaatacrttcaacctgccatgaatttatatcaaggatacagaaaacagaatataagaagaaagctatatcagggaaatatgtattgcagtgatatttagaactgtga

SEQ ID NO: 4754 - DNA, 201 bp, Homo sapiens
tggcaagtctgctatataataatatatttctaataaaagtataaattggtataaatcttttggaaaacaatttggcactatgtaccaaaagctataaataygttcaacctgccatgaatttatatcaaggatacagaaaacagaatataagaagaaagctatatcagggaaatatgtattgcagtgatatttagaactgtg

SEQ ID NO: 4755 - DNA, 201 bp, Homo sapiens
agaaccagaatgagaaattccatatgtcttcttatcatacaattcaatcctgtgaattgttgattatttgctttactactctaaatgacttatgcatgtcrttttatttgtctttctagcatcaaaatagaagaaggcctatttcttcttcttctaccagttgcatagttaaaatgaggctgaacattctcttgtaaattc

SEQ ID NO: 4756 - DNA, 201 bp, Homo sapiens
tacctgaggccagcctttagttctattttgatcaaactgtcttatagacacagccttcagccttccctgtgacctttgaaaactgccccagggtaaaggcraattacaaatactattaaggttgatgagtaatcaactcagtaatgaggatactatttcacattcttaggggtagatgctttttctctgtgggatgcctga

SEQ ID NO: 4757 - DNA, 201 bp, Homo sapiens
atttcacattcttaggggtagatgctttttctctgtgggatgcctgagtaggaaattttgatggctccaaatgtggccacaacaaacatcaggaggctctsctattgtagagatttccctgaaactgaactctggaggatgaaacatttggtgtagatacttgaccttctaaaaataaagctttatgtatgtgtgtatcta

SEQ ID NO: 4758 - DNA, 201 bp, Homo sapiens
aataagaagtagctcaaaaagagcagaatgacctcttccttacccccttagtgatacagacaaatagagtatttgttcatgttatattttggcttttattkttaaatcaaggaggttgaattagagacagagcaaaataagcaaaaacctgaagctataaatttctaggtcaatccaaatacataaaacattaaaaaatgt

SEQ ID NO: 4759 - DNA, 201 bp, Homo sapiens
tttggcttttatttttaaatcaaggaggttgaattagagacagagcaaaataagcaaaaacctgaagctataaatttctaggtcaatccaaatacataaarcattaaaaaatgtcagatgcgaagctagatgcaaactgacagggaaaaaaaaaacctgtttgtgtacttaaagccccaaaccaaaagcaaaattaaaatt

SEQ ID NO: 4760 - DNA, 201 bp, Homo sapiens
aaaacctgtttgtgtacttaaagccccaaaccaaaagcaaaattaaaatttgtgctgacccttctcccttggggctgcagatgtcactgctgtccagggcrccgtctgttactgagtggaaggaagaggaatggcatccaagtcactagtgtaagataaaattgtctgcctgccaaatcctgaagatgtcctgccatattt

SEQ ID NO: 4761 - DNA, 201 bp, Homo sapiens
gtattcttattgccatcacctaggagtacaacgtgtagggttgtgggtgctggtacatgtgggatggcaagatcaagggtgaacaggagtcagctgatcartgttctccatcaagcagtacactcatttatataccatgttttggtgctcatgactcatggaataatcaatttagataatttgggattactttgtagtaaa

SEQ ID NO: 4762 - DNA, 201 bp, Homo sapiens
tttgtgacatcatttatttatatcactaagggctatttctgcagcttggcaaatagctctagctgttctgtattcttattgccatcacctaggagtacaaygtgtagggttgtgggtgctggtacatgtgggatggcaagatcaagggtgaacaggagtcagctgatcaatgttctccatcaagcagtacactcatttata

SEQ ID NO: 4763 - DNA, 201 bp, Homo sapiens
ggtttttaaatactgcattctgaatggccccatgggaaaggtgtttaattgacatatacaagtttaggtattctatttgataacacaagggactatgccaacagattcaatctaacataaaaaattaaccctgtgcatttcaagcgttccttgaaataataatacctgattagcctatccatttctaatgtttggtttgaa

SEQ ID NO: 4764 - DNA, 201 bp, Homo sapiens
ggaccttgtttttgtttttgatttttttcttttttgcgtatttattacaattactcttattggtctgtatgtgtgtatgtgtgtgttatttgtccagtgcyttgctctgttcttcactaggctataaattccttgaggccagcggccatatttactttgaatctgtatattcctccttgccccagtgtctaacacggtgcc

SEQ ID NO: 4765 - DNA, 201 bp, Homo sapiens
tctaggaaacagcattcttacatctgtttcagtttcaattgacaccatcagaaaataatctaatcccgtcagtctctgtcctaggcactgaggagaaagaagaaaatcatactctcccagctaattctctagggtagttccaaagtactaaaaacatcagtataaggttaccaactttttctttctcttagcatgtaattg

SEQ ID NO: 4766 - DNA, 201 bp, Homo sapiens
ttctaggaaacagcattcttacatctgtttcagtttcaattgacaccatcagaaaataatctaatcccgtcagtctctgtcctaggcactgaggagaaagaagaaaatcatactctcccagctaattctctagggtagttccaaagtactaaaaacatcagtataaggttaccaactttttctttctcttagcatgtaatt

SEQ ID NO: 4767 - DNA, 201 bp, Homo sapiens
tcttaggctcaagtggctgagaagctataggatttggccaagtttctacaaaggagctgattcctctcaggaagggggagttgacatagcactgttagggraaatggccttatgtttatgtcctcgtaagcagagatttttccataaaattattacataaataaaaacaacaacaaaaacataggaggaagtgaaggaaat

SEQ ID NO: 4768 - DNA, 201 bp, Homo sapiens
cttctaggaaacagcattcttacatctgtttcagtttcaattgacaccatcagaaaataatctaatcccgtcagtctctgtcctaggcactgaggagaaagaagaaaatcatactctcccagctaattctctagggtagttccaaagtactaaaaacatcagtataaggttaccaactttttctttctcttagcatgtaat

SEQ ID NO: 4769 - DNA, 201 bp, Homo sapiens
tcttctaggaaacagcattcttacatctgtttcagtttcaattgacaccatcagaaaataatctaatcccgtcagtctctgtcctaggcactgaggagaaagaagaaaatcatactctcccagctaattctctagggtagttccaaagtactaaaaacatcagtataaggttaccaactttttctttctcttagcatgtaa

SEQ ID NO: 4770 - DNA, 201 bp, Homo sapiens
accataaaaaccgtagaagaaaacctagacaataccattcaggacataggcatgggcaaagacttcatgactaaaacaccaaaagcaatgatgacaaaagycaaaattgacaaatgggatctaattaaagagcttctgcacagcagaagcaactatcatcagagtgaacaggcaacctacagaatgggagaaaagttttgc

SEQ ID NO: 4771 - DNA, 201 bp, Homo sapiens
tactgctgagatgggcatctaatgaatctagaatggaccaggtggggttcattctttcattatttcttcttgtttcttcaaaattatatattactttttttattgatggaacgtatttaatggaattgcgcccatgttattagggataattattttcttagcagtagcagtattttgcttcagaaagaatctactcaaaaa

SEQ ID NO: 4772 - DNA, 201 bp, Homo sapiens
taaaaccataaaaaccgtagaagaaaacctagacaataccattcaggacataggcatgggcaaagacttcatgactaaaacaccaaaagcaatgatgacaraagccaaaattgacaaatgggatctaattaaagagcttctgcacagcagaagcaactatcatcagagtgaacaggcaacctacagaatgggagaaaagtt

SEQ ID NO: 4773 - DNA, 201 bp, Homo sapiens
tggagataattcagtattttagtatatatactattgatatgatcaacttgacactactttctatttcatctactttttttttttttaattttttaagagayagagtctcgctttgtcacccaggctggagtgcagtggtgcgatctccgctcactgcaacctccgcctcctgagttcaagcaattctctttcctcagcctc

SEQ ID NO: 4774 - DNA, 201 bp, Homo sapiens
tttgattagaagtgtgagtttttccacctgcttttgaatctcaaacatattttttatgctaccattaatctatgcgtgaaggaggcaaaagtttaaaataagcctctgtcaatcaaaatgttttacttaaatatcactattgaagagatcacttagaaggcttatttgaaaccattgacattagatttctttgaaaatgtt

SEQ ID NO: 4775 - DNA, 201 bp, Homo sapiens
tccaggaccagacagattcacagccaaattctaccacaggtacaaagaagagctggtaccactccttctgaaactattccaatcaatagaaaaagagggartcctccctaactcattttatgaggccagcatcatcctgacaacaaagcctggcagagacacaacaaaaaaagaggattttaggccaatatccctgatgaa

SEQ ID NO: 4776 - DNA, 201 bp, Homo sapiens
ctttgattagaagtgtgagtttttccacctgcttttgaatctcaaacatattttttatgctaccattaatctatgcgtgaaggaggcaaaagtttaaaataagcctctgtcaatcaaaatgttttacttaaatatcactattgaagagatcacttagaaggcttatttgaaaccattgacattagatttctttgaaaatgt

SEQ ID NO: 4777 - DNA, 201 bp, Homo sapiens
agaagacctcaggtgttagagcagctccacttgtaggcatctggggagtggccaaggtgcaggagctggaccaatgtgtaggagtaggagtttgaagcacwcaacttgaggaaaggcaaaagaatcatcgccaccccctggaagggtagcagagagggtgctgccttcagaaaaccccactcctcacctgggcagatttct

SEQ ID NO: 4778 - DNA, 201 bp, Homo sapiens
tctttgattagaagtgtgagtttttccacctgcttttgaatctcaaacatattttttatgctaccattaatctatgcgtgaaggaggcaaaagtttaaaataagcctctgtcaatcaaaatgttttacttaaatatcactattgaagagatcacttagaaggcttatttgaaaccattgacattagatttctttgaaaatg

SEQ ID NO: 4779 - DNA, 201 bp, Homo sapiens
tgatagcttacactaataatcttaaaatataatacgggtaacatttaacacttacatagtatgatgggatatcattttccatatattacattaggagaacrttaaccatacagtattcaatattggcaagtctgctatataataatatatttctaataaaagtataaattggtataaatcttttggaaaacaatttggcac

SEQ ID NO: 4780 - DNA, 201 bp, Homo sapiens
gcaccaagcagtgagcctgctggagagaggtggaagcagaagtgagggggtatgtgagtgccagatggatggggacagaggaggcttggaaaagcagacaragagagagttcaggaacaggccagggcatagcaaagagcaaggattatgaatacaaaatacacctcagttgcaaggtgaaaagtagcggtctccaagaat

SEQ ID NO: 4781 - DNA, 201 bp, Homo sapiens
gtttcactgcccttgagaggatttcctgaaaacttcaaaagtatctctccatctgcaccaagcagtgagcctgctggagagaggtggaagcagaagtgagsgggtatgtgagtgccagatggatggggacagaggaggcttggaaaagcagacaaagagagagttcaggaacaggccagggcatagcaaagagcaaggatt

SEQ ID NO: 4782 - DNA, 201 bp, Homo sapiens
atttatctatcttcccacacattcaccaaaactgggtgttattatttttcatctttatatacatcagtggtgaacttaattttattattatttaaatttgmatatcattgattcctaatgagatttagagtttttgtatactaattagccattgtatttattcttttgcaaattgcctgttcattactttgcctatttttc

SEQ ID NO: 4783 - DNA, 201 bp, Homo sapiens
aataattgaatagattaaaagcaatgtgtttacacatgtgattttagctttcattattaatggagtctattctttttatgtgtccagaatttatatgaggktgattgttctctatatctcttaaaacataggagttgtggtttaatacttaggaaagtcccttctatctaaaggtttgtgggagaagtgtatatagtgttc

SEQ ID NO: 4784 - DNA, 201 bp, Homo sapiens
ttctttgattagaagtgtgagtttttccacctgcttttgaatctcaaacatattttttatgctaccattaatctatgcgtgaaggaggcaaaagtttaaaataagcctctgtcaatcaaaatgttttacttaaatatcactattgaagagatcacttagaaggcttatttgaaaccattgacattagatttctttgaaaat

SEQ ID NO: 4785 - DNA, 201 bp, Homo sapiens
accaatccaaccagccagtcaatcaatcacttggttaatttatgcaaactacacaggcctgagtaaatgtttcacgaaatcgactggttgcttgagtgaakcaacctaatcaagggtttgctggcaccgtatagacacagccttaacaaggcaaatatcattgtaatctcttgcctttgaaatgattctatggtgttttcc

SEQ ID NO: 4786 - DNA, 201 bp, Homo sapiens
cttctttgattagaagtgtgagtttttccacctgcttttgaatctcaaacatattttttatgctaccattaatctatgcgtgaaggaggcaaaagtttaaaataagcctctgtcaatcaaaatgttttacttaaatatcactattgaagagatcacttagaaggcttatttgaaaccattgacattagatttctttgaaaa

SEQ ID NO: 4787 - DNA, 201 bp, Homo sapiens
gttgggggagggagaggctcagacaggtgagagacctgggctcttccttggtgacagtagcttggaaaattcccccaagtcttctgggcttggagcaagtmctgggaggcaaattggggataccagaagccttgtgtatgcacccaagcaagggtttgttctctggaatccatagacatggcttcagcctcagagatccat

SEQ ID NO: 4788 - DNA, 201 bp, Homo sapiens
aaatgatggaaatcttagctctaatgctgtcttttattggaatctaacatcaactgatggtttttacttttttattttgcagggctggagcgaattgctcrggattcatcttatgaacaggaaggaaaggtccaatttgtaattgatgctgtatattccatggcttacgccctgcacaatatgcacaaagatctctgccct

SEQ ID NO: 4789 - DNA, 201 bp, Homo sapiens
tccccttcctctcccttccccttcttctcccttccacttccccttcccactcccatctcttgcccttccccttcccctctcttacccttctccttcccctstcttgtccttccccttcccctctcttgctcttccccttcccctctcttgcccttccccttcccctctcttgcccttccccttcccctctcttgcccttcc

SEQ ID NO: 4790 - DNA, 201 bp, Homo sapiens
cacagagaccagaataccaaccaagagcatctaaaagcacagagtgtcacaagtgattaagaccagaggaagaacaaaaacaataattcgatgaataaaaataaataaactgaccactatttttgtttagaaaaaaactagtttttcagagtgtaaatatacaaatataaaccacgttaattcgactctctaaatatgtag

SEQ ID NO: 4791 - DNA, 201 bp, Homo sapiens
aggactcctctatagtcttgcaaaacttgccttagacctggactatagtatccctcctcccccacccatctccccttcttccctcctcccctccctcctcmcccacccatctccccttcttccctcctccccaccctcctcaccctcccctccctcctcaccctcccctccctcctcaccctcccctcccttccccttccc

SEQ ID NO: 4792 - DNA, 201 bp, Homo sapiens
tcctgtataattgaacatgcttgtatttctaccttatgttccccctattgtatcctggaacccaaatcagtttaaatttagtaaaaaaaaaaaaaaaaaamaaaaaaaaaacctatttgtcagcttgatagcgctcactctttagtgtgtgatgtggttcttggcatggttctcatggatttaaaagtcactgcactatgc

SEQ ID NO: 4793 - DNA, 201 bp, Homo sapiens
tggagatacaggactcctctatagtcttgcaaaacttgccttagacctggactatagtatccctcctcccccacccatctccccttcttccctcctccccwccctcctcccccacccatctccccttcttccctcctccccaccctcctcaccctcccctccctcctcaccctcccctccctcctcaccctcccctccctt

SEQ ID NO: 4794 - DNA, 201 bp, Homo sapiens
gctttacccaggctgtagtgacctaggctccttctagtttattactctgctatctccacgttgtggctctaattcctcctggttccaggtgacaggtagarctccagtgatttcatctgccatttaggtggcaggatggagaacaggatgaaaaaggataaagaagcgaaagacctgggtcttaaaagacccgggtctttt

SEQ ID NO: 4795 - DNA, 201 bp, Homo sapiens
cagtcagtggggtttggctacactggttttactcttgtagagcatgaaatatttgtccttgagagaaaatgagatgattctgtagtttcacatcggtaacygaataggaaacgtggttcattcagtggaaatttggatgggcatttgtggcatctgagtgtaaagtccttgctgggcactgtccacagtgatggaggtctt

SEQ ID NO: 4796 - DNA, 201 bp, Homo sapiens
aggtacagattttagaatagtatttcatgttctaagagtagtttttatacaatgattagacctttaaatttttcaacactctccccctaaagtttttaaggtcaaaaatcatgaataaatccatgcttgatagactaaaaggttttggcttcagagaattgtcagtagacttcaaattggagcagcctttcacttctgtta

SEQ ID NO: 4797 - DNA, 201 bp, Homo sapiens
ggatattagccctttgtcagatgagtagattgcaaaaagtttctcccattctgtaggttgcctgttcactctgatggtggtttcttttgctgtgcagaagygctttagtttaattagatctcatttgtcaattttggcttttgttgccattgcttttggtgttttagacatgaagtccttgcccatgcctatgtcctgaat

SEQ ID NO: 4798 - DNA, 201 bp, Homo sapiens
cctgctctctgacctcctgtgcaaatgccagtcatctgtcctcagtgatgtgtcaggagcagcaagtcccagaacttcactcttggacgtatgagaagttyagtttagtaaaacgtcttgttgaaggaaactgtcccattttcccttttgattttctacaaaggcccgctactaggcaagagccaaggctgacatggagac

SEQ ID NO: 4799 - DNA, 201 bp, Homo sapiens
gttacttaggaaaaaatagaaaatataaacgttattgagagaaaagtctgaaatgattagagagataatactatgcttatttagatatgtgggatgtttcygtattgaaaagctgtctagtcacaatcaattaaaacattttgtgaaattccaattaaatatcaactggttgtggtgtgtatgtgtgagagatttgacaga

SEQ ID NO: 4800 - DNA, 201 bp, Homo sapiens
tgaatccattgagatttgtcatactatttgtgtacctctgtatatgcttgaaattatacgctacactaccacacacacacacacacacacacacacacacacaaaatcatatactatctcacattaggtagcaaacagcaagacacagttaccatcccatctgaagaacatagctactaccagaaaccatcatcatcatca

SEQ ID NO: 4801 - DNA, 201 bp, Homo sapiens
ggcgcccaccaccacgcctggctaatttttttatatttttagtagagacggggtttcaccgtgttagccaggatggtctcgatctcctgacctcatgatcmgcccacctgaaaaaatgcttttcataacatcaactaaaactatatgttacttaggaaaaaatagaaaatataaacgttattgagagaaaagtctgaaatg

SEQ ID NO: 4802 - DNA, 201 bp, Homo sapiens
gggtcaaatggtcaatattttaggctttgtgggccatatggtttctgtatcaactactcaactatgtcactgtggcttaaaagcagccatgggtaatatgwtatcagatgggtgtggctgttttccaataaactttttaaaaaaaatttttaacagcaaaaacaggttgcgtaggctgtagtttgctgacccctggcccaa

SEQ ID NO: 4803 - DNA, 201 bp, Homo sapiens
atgaatccattgagatttgtcatactatttgtgtacctctgtatatgcttgaaattatacgctacactaccacacacacacacacacacacacacacacacacaaaatcatatactatctcacattaggtagcaaacagcaagacacagttaccatcccatctgaagaacatagctactaccagaaaccatcatcatcatc

SEQ ID NO: 4804 - DNA, 201 bp, Homo sapiens
ttttattttttattttttgaaacagggtctcattttgtcacccaggctatgtgtagtggtgtgatcactgctcactacagccttaacctcaacctctgggkctcatgtgattctcctacctcagctgctccagtagctggcactataggtatgaatcaccatgcctggctaagtgtttctgttttttgtagagatgagatt

SEQ ID NO: 4805 - DNA, 201 bp, Homo sapiens
ccatgagttgataatttgtgcaactgggtgatgaatccattgagatttgtcatactatttgtgtacctctgtatatgcttgaaattatacgctacactaccacacacacacacacacacacacacacacacacaaaatcatatactatctcacattaggtagcaaacagcaagacacagttaccatcccatctgaagaaca

SEQ ID NO: 4806 - DNA, 201 bp, Homo sapiens
tttttattttttattttttgaaacagggtctcattttgtcacccaggctatgtgtagtggtgtgatcactgctcactacagccttaacctcaacctctggkgctcatgtgattctcctacctcagctgctccagtagctggcactataggtatgaatcaccatgcctggctaagtgtttctgttttttgtagagatgagat

SEQ ID NO: 4807 - DNA, 201 bp, Homo sapiens
tgtgtgggtagaagctactgtattagacagtgtacctataaaatttttccatcattgctgaaggttatattgctataactctgctatggaattttttttttaattggaaaagctgatattgctttctttttattgatggttgccttcggattcatgcttagaaaggtcttttccattccccaacatgatataaatgtgact

SEQ ID NO: 4808 - DNA, 201 bp, Homo sapiens
atttacttgtaaacctgcgtcagtgtgcatggtttacaaactcaacacgaataaactggagatcaaatttgtatgactttcttttatgttgtttaacataragccacccagtttgtcactgaagaatatacagaaatatttcattagtaaatccttccatatatattatcattcttgccagtaatgttgctcctctgtgtg

SEQ ID NO: 4809 - DNA, 201 bp, Homo sapiens
gtgccataattaacaaaaagaatgtatatgtagttgtttttgcactggtgtgagtttcttcagatctgagtttttctgctggtggatcatgaaaaggttayggtgagctgctcaggccaacacaaatagggtctggggcaagcctctggcagccttatccacttaacatggggtattgtacaaatgccatcattttctctt

SEQ ID NO: 4810 - DNA, 201 bp, Homo sapiens
tagtatttctatgcacaaatatgtcacaatttgttaatttgtatttggataatttttcattgttggaaatggtgccataattaacaaaaagaatgtatatrtagttgtttttgcactggtgtgagtttcttcagatctgagtttttctgctggtggatcatgaaaaggttacggtgagctgctcaggccaacacaaatagg

SEQ ID NO: 4811 - DNA, 201 bp, Homo sapiens
gatttctctgtgttgatacatggaactccagtttattcattgtaactgtgagtagtatttctatgcacaaatatgtcacaatttgttaatttgtatttggwtaatttttcattgttggaaatggtgccataattaacaaaaagaatgtatatgtagttgtttttgcactggtgtgagtttcttcagatctgagtttttctg

SEQ ID NO: 4812 - DNA, 201 bp, Homo sapiens
ttttatttttattctctttgtcttaaaatatatcttcaaacacaggttctacaattcctgctttgtgatgtgttattagtccccagcccatttgctggggycattgtaaacaaggggctattaaggtagacagctggacagggaacaactactgagaaggttgttgcctatgcatagaggggataaagagaaggggctaag

SEQ ID NO: 4813 - DNA, 201 bp, Homo sapiens
catcaatattatgatgttaatattgttgaaatgactgagcacattcaaagacagaatctacaaactagcctatttggaaagggaattgcctatgtaagtcrtaacttgagggaagatcaaaggaatcagttcctaaacatgagaaactaagctttctttcattgaaaaagctagttagttgtattgaatcatatctaatgt

SEQ ID NO: 4814 - DNA, 201 bp, Homo sapiens
tcagcccaaaatctccttaagctgataagcaacttcagcaaagtctcaggatacaaaatcaaagtacaaaaatcacaagcattcttatacaccaataacaraccaatagagagccaaatcatgagtgaactcccattcacaattgcttcaaagagaataaaatacttaggaatccaatttacaagggacgtgaaggacctc

SEQ ID NO: 4815 - DNA, 201 bp, Homo sapiens
gtaggcggttcacgagatcaggagatcgagaccatcctggcaacacagtgaaaccctgtctctactaaaaatacaaaaattagctgggcatggtggcacaygcctgtaatcccagctactcaggaggctgaggcaggagaatctcttgaactacctgggaggtggaggtcgcagtgagctgagatcacgccactgcactcc

SEQ ID NO: 4816 - DNA, 201 bp, Homo sapiens
gaacaatcacagcccagcttcagctggtgggtgttcagctgtatctttgccatgcatttttgcaggatgctatgaagacccaactgaaactaagaagcttygtcaatggttaaaaatgtctcactagaaatgtatttgcatttcacttggatctcaattggatttctttttttattccaaataattttagctctcttctct

SEQ ID NO: 4817 - DNA, 201 bp, Homo sapiens
acaatatttactctgggttatgtgtttgccagaacaatcacagcccagcttcagctggtgggtgttcagctgtatctttgccatgcatttttgcaggatgstatgaagacccaactgaaactaagaagcttcgtcaatggttaaaaatgtctcactagaaatgtatttgcatttcacttggatctcaattggatttctttt

SEQ ID NO: 4818 - DNA, 201 bp, Homo sapiens
agaagttcttatctgaaagctactatctgagtctgcttggctattgttaatcagcacattaattctttagatgtactataaaggacagtgagtgagtgctrgttgtaaaattaattaagataatgtaataacatccctgtgcaattttataaattgccaccctatttaaatatcactttctgatcaataatagatgagaac

SEQ ID NO: 4819 - DNA, 201 bp, Homo sapiens
acttagtcagtgaattttagagctaaaaccatacattaaatatgtttcctaccatatcacactcaccaagtgcctaaaaaggagcatggaaccctcaagcktgtgatatggtgtcacaaatcacaaggtagaagatgccattttaacttggtctgctgatttgagtgtgcaaattagtaaaacttaaaaatacatattgat

SEQ ID NO: 4820 - DNA, 201 bp, Homo sapiens
gacactttcagaatgcttgttaaaaatacagattcttggacccacattagacctaaagaattaggatctctctgaaagggctaaataatttggattttaayaaattccagatgctcttttgtacactaaaatttaggggcactgccccaaaggaatggtacaataatcagtgtctcaaaatgttgttctataaatgcttaa

SEQ ID NO: 4821 - DNA, 201 bp, Homo sapiens
atgatttcctaaaaccacttagtcagtgaattttagagctaaaaccatacattaaatatgtttcctaccatatcacactcaccaagtgcctaaaaaggagyatggaaccctcaagcttgtgatatggtgtcacaaatcacaaggtagaagatgccattttaacttggtctgctgatttgagtgtgcaaattagtaaaactt

SEQ ID NO: 4822 - DNA, 201 bp, Homo sapiens
tataagatcttgtatggcctggtcagccattgaaagaccttcacatttcacccttagtgataggaaatcattacaggattttgagcagaaaagtaacatcrtaagtattaattttaattgagtttttctgaattatctgaggtgagattagccttaaagaagccaatatcaggaacacagtcttaccttagaagatttttg

SEQ ID NO: 4823 - DNA, 201 bp, Homo sapiens
tcccaggttcaagtgattctcctgcctcagcctcctgagtagctggaactacaggcacccgccactacgcctagctaatttttgtatttttaggagagacrgggtttctccatgttggtcaggctggtcttgaactcctgaccttgtgatccgcctgccacggcctcccaaagtgccgggattacaggcatgagccactgc

SEQ ID NO: 4824 - DNA, 201 bp, Homo sapiens
ccagcccctacacctcaaggggcatcagtggatgctgagtggaacagggatgatctatctactttacatcctacccagattgcagggtcatacgcaaaatraattttgctgttgctcattcagtttggggcattttgttacacagcattagatatctagaacacttgtcacttctcactttttatctttgtatatcatcca

SEQ ID NO: 4825 - DNA, 201 bp, Homo sapiens
ccccccctttttttttttgagacagagtctcgctctgtcactcaggttagagtgtaatggtgtggtcttagctcactgcaacctctgcctcccaggttcargtgattctcctgcctcagcctcctgagtagctggaactacaggcacccgccactacgcctagctaatttttgtatttttaggagagacagggtttctcca

SEQ ID NO: 4826 - DNA, 201 bp, Homo sapiens
gagttagttttttaatcagcagcgaggcacatcataacagtgaatagtaagaaatttcaggggagtactaaggaagaaatataaagttgtaggtcaatgtygaatgcctgttagaagtaattagatatacaagggtgaagctcttataaaattaatttacaaagcatatgtctatcttttgggtattaatattatcactga

SEQ ID NO: 4827 - DNA, 201 bp, Homo sapiens
cgaaagtagatgggggtttagggaaataaagaatgtttgctgagcagcatgaagaactttcttaaattaagcaaacattaattcattttccatgtacttaytctttcagtaaatatttacataaacatataataggaaatgtaggagatgaagctatgaactcctctgcttattaccttctctactctttaattgtgagaa

SEQ ID NO: 4828 - DNA, 201 bp, Homo sapiens
taacatccagtctacatttttccatcttttctgtttgggtatgttgttttctgttttctgtcagatgttttgctgtaatgcaatgcatattattgactgcrttttataaccaaacagactaataaccccctcaaagaaagttatgaggttgatgtacataatatgatatattaagcagtttagtgggataaaataggtacc

SEQ ID NO: 4829 - DNA, 201 bp, Homo sapiens
attgacttagaaaatacataaacaatataagagctctaaggactgggccctgaagcactccaacacataaaggacagggagatgacaaggggtcaattaargatattgaaaagaacagccaggggcatagaaggtaaaccaggaatgtatgctgttctggaagccaagtgtagatgaaaatgaccaactgcatcaattgct

SEQ ID NO: 4830 - DNA, 201 bp, Homo sapiens
agaaagtgatcttgtgaataattcaattaagcactcttgagctccccagtaaggttgtctgatatcaagcaccacttcaggtgagccgagagttttgggarcagagtcaaaactctgttcagtttggctaagaactcccttaaccaaactgaaatggacaaaccaaaatgcacaaagtgtgttttaagcccaatttctttt

SEQ ID NO: 4831 - DNA, 201 bp, Homo sapiens
gttactagttgcgctaacatccagtctacatttttccatcttttctgtttgggtatgttgttttctgttttctgtcagatgttttgctgtaatgcaatgcrtattattgactgcattttataaccaaacagactaataaccccctcaaagaaagttatgaggttgatgtacataatatgatatattaagcagtttagtggg

SEQ ID NO: 4832 - DNA, 201 bp, Homo sapiens
ttgggtacaaatgttcaacgagttactagttgcgctaacatccagtctacatttttccatcttttctgtttgggtatgttgttttctgttttctgtcagaygttttgctgtaatgcaatgcatattattgactgcattttataaccaaacagactaataaccccctcaaagaaagttatgaggttgatgtacataatatga

SEQ ID NO: 4833 - DNA, 201 bp, Homo sapiens
attatggatttattttctttcaggtttgcaagagacctcaaaattcattcagacaaagctcccactagtgacttaattccctatacaatattctactaatyggttgttcagccttttgtccctctacccaacatgggagaactcacattctgataagtccataccatatatttctttattgtgccaagtcacaatctcctt

SEQ ID NO: 4834 - DNA, 201 bp, Homo sapiens
tcttgtttaccctagcaattcacttcgcaaacttttttttttccccttagagatagcaaaccttgatcctattttcttctgcattgttacacatttgaaayagtagaatctgagctaatgagggctttggtgttttttccaccttgataagaagcatatgtgtgttatgtgagtgtgtgtgtgtgtgtatataaatatttg

SEQ ID NO: 4835 - DNA, 201 bp, Homo sapiens
aggactattatacaaactgagtattactcttatattaaaggtaaggaaatagcttctaactaagcaaagttgctcaaagtgacacatagagtgaggtctgyggctgttctcttactccaaatgtgggatatctcagaaattgccatcctccagaaggctacagagtagctcagactgtgcaaattgttctccatttgccat

SEQ ID NO: 4836 - DNA, 201 bp, Homo sapiens
caaggtaaatcttttgaaagtttattacagtcatatttgaggcttggatattaacattcatgacttttttgaggctgaggagtggacattaaggttctttmcagcccattatttttttcttcgtcggcttaattgaggtaaaatatagacacggtaaaacccatcaatttcaagtgtacaatttgaggtttcattttttta

SEQ ID NO: 4837 - DNA, 201 bp, Homo sapiens
cagtggatcccgagtactgccagtaatctattttctaaaagctttttggtggagtcagaccagaagagtgtaatggtgaaagcctactctctgtagccacrtctcactggttttattcacagccatataagcaagtattagttttatacttgcaattgttttctatatagaggatagttaattgcccatattgattttatt

SEQ ID NO: 4838 - DNA, 201 bp, Homo sapiens
gctccctcgactcgactggatgaaacagggctcagctgtatcaaccaagcagggctaagctgtattgatcaatcaaaactcagctgtgccagccaaccagmactaagctagtttccatcgttcatttgcataaaccaacctgactggaaacctgggtaggaggttttgctataaaacagaacactctcattgttctccgga

SEQ ID NO: 4839 - DNA, 201 bp, Homo sapiens
attatttcagtgatacaaagatgtatttgaaatctctttttgaaggctgaagttctttttctggctatttactggcaaccaatctaaactgagctgctttygtttatgaccatgctcactttcctagcttttaaaaatatttgcttttaaagctctgcagatattttttttcatgcccaccccaaccaatcacttttgaaa

SEQ ID NO: 4840 - DNA, 201 bp, Homo sapiens
tgtaagacaattaaggcttttctgcaggctgaatttggctgcttagcatggttggtttgcaactcctaaattaaagtacatgaaaagaaaatgtatttatrtgtaactggtagagatgtaccaattaattatgcagtgatatcactgtgtagtttgtcttgcatttccttccccaatttgataaacaggataaagaaacag

SEQ ID NO: 4841 - DNA, 201 bp, Homo sapiens
tagacaaaagcaacccctgacattcaggagcctgcctcgcactattacctaagccctggtgttcccctgttgcccataaacaattgcattgaacaccaacrttgggcaaggccactctgaccacaatggatcaagaaaaaatagacacagacaaaacatgaatattttttaaagaagatcaactatcttcctatttcgatt

SEQ ID NO: 4842 - DNA, 201 bp, Homo sapiens
gctgctattccatggaccatgttttgcttagcagaagcctagaacatcttacctgcctctgttttctatcaactgaatataataatgcccctactttctayagttgatgcgggtgttacatgtgtgccttatgtaaagtgcctggtatagttcccggccaaaaatcatgcagtgtatggtggtagtggtggtagcagcaag

SEQ ID NO: 4843 - DNA, 201 bp, Homo sapiens
aaagtcccttttttgcttaagctacttgttgctcatcaaggtgcaatgatatcgaatttaagtctatatgtatacataatcctgtgtcaaagattacttaygtagaatgggtcatgcataaaacgacttggttcaattgtatgtttttctgggtccaggaagagtcctaactgcttcataggttaagtcagaaaccaggct

SEQ ID NO: 4844 - DNA, 201 bp, Homo sapiens
ccatggaccatgttttgcttagcagaagcctagaacatcttacctgcctctgttttctatcaactgaatataataatgcccctactttctacagttgatgygggtgttacatgtgtgccttatgtaaagtgcctggtatagttcccggccaaaaatcatgcagtgtatggtggtagtggtggtagcagcaagtagtgtgga

SEQ ID NO: 4845 - DNA, 201 bp, Homo sapiens
ctgtgagagattttaaaacttgggagcaactcattttctgcccactaaaaggctcactgaaccagaaagaattacagtagacacattaaatggttttcccrgttccctttctgggaagcatccacaccccacccccagttctcctaccctgatgttcacataccagtctttacagctgtgagcctccttccagctatgttt

SEQ ID NO: 4846 - DNA, 201 bp, Homo sapiens
ttgtacagaaatcataagctatttatttttaatggtgtgtttttttgactttggttgtaaggtcaagcttcctcccagaatcttgtttaccctagcaattyacttcgcaaacttttttttttccccttagagatagcaaaccttgatcctattttcttctgcattgttacacatttgaaacagtagaatctgagctaatga

SEQ ID NO: 4847 - DNA, 201 bp, Homo sapiens
agttatataaaggaagatatcacgatgtaacagaactcatccccaaggctactgcagacaaaattaggagaataacaaacaaatgcaaatgaaagtcatgyagaaatggtactgtttcccctataaattctaatcactcaaactgtatgtccatatttcaactgcatctactcagatccttcagaacagattgttaaaaaa

SEQ ID NO: 4848 - DNA, 201 bp, Homo sapiens
tttttgagatagagttttactctgtcacccaggctggagtgcagtggtgcaagcatggctcactgaagcctcaacctcctgggctcaagcaatcctcccayctcagcctcccaaatagctgggaatacaggcacacaccaccacacctggctaattttttagttatttttcagagaccgggtctcaaactcctaagctcaa

SEQ ID NO: 4849 - DNA, 201 bp, Homo sapiens
cagtaaggactgctagcaaggacttataactgttcagtcatacctgagctgagttaaagaatgggtcattgagaaattgggaagatttatttgtacagaartcataagctatttatttttaatggtgtgtttttttgactttggttgtaaggtcaagcttcctcccagaatcttgtttaccctagcaattcacttcgcaaa

SEQ ID NO: 4850 - DNA, 201 bp, Homo sapiens
tgcaaaatgctttagaaaaataaactaatagaagaatgttttatgtaaaataaaagtaccaaaagtgcaggtttctacattctgttgagaaggatagtcaygtggtttagcaaaatgaaagcctgcagctactctctcatccctttttgtaacagtagttttatactgaatctcttcttagtactatgactatgtttgatg

SEQ ID NO: 4851 - DNA, 201 bp, Homo sapiens
tagttcaaaggaaagctgaattaaacaaaattttaataactttattattttcaagtgtgtgtagtattcagtaaggactgctagcaaggacttataactgytcagtcatacctgagctgagttaaagaatgggtcattgagaaattgggaagatttatttgtacagaaatcataagctatttatttttaatggtgtgtttt

SEQ ID NO: 4852 - DNA, 201 bp, Homo sapiens
ttagatgaaaatatttagaaaaaatatagaagacttcaataactcactgaagctgatatgacagatgcgtgtatgactgcatgctctgaaaacgcaaatakccattttctcgagcacactaaattcagaggtaggtttttttgtggtggttataggagcagactatgggtttgactaagcttgtcttagcactgccgcttg

SEQ ID NO: 4853 - DNA, 201 bp, Homo sapiens
ctaatagaagaatgttttatgtaaaataaaagtaccaaaagtgcaggtttctacattctgttgagaaggatagtcacgtggtttagcaaaatgaaagcctkcagctactctctcatccctttttgtaacagtagttttatactgaatctcttcttagtactatgactatgtttgatgacataatgtgtaagtctaggttaa

SEQ ID NO: 4854 - DNA, 201 bp, Homo sapiens
ttggatttaatgtgcttctacagtttatggcctgtttgtgtgatctcctgcttctttaaggttagttttggactacttacttacttttatctctttctagrtaatagtttacttataatattacttttatctctttctagataataattactttgtgttggctgggaatgatctatggccatttcttgcttatctgtactc

SEQ ID NO: 4855 - DNA, 201 bp, Homo sapiens
aagtgtacctcccttctgtgtacaggccctgggcagctgctcaggttgtgcacccatgcagacctgccaggcatgtcatgaatttggcagctttggatttmatgtgcttctacagtttatggcctgtttgtgtgatctcctgcttctttaaggttagttttggactacttacttacttttatctctttctaggtaatagtt

SEQ ID NO: 4856 - DNA, 201 bp, Homo sapiens
ctatagccactttgaaaaacagtctggcaatttctcaaacagttaagtaaagttaccatatattccaccggttctactcttagctgtgtacctaagagaaytgaaaccacacatacacacaaaaatttgtatatgaatattcatgacagcatcatttatattagccaaaaagtggaaacaagtcgaatatccatcaattaa

SEQ ID NO: 4857 - DNA, 201 bp, Homo sapiens
ctctttcctatctcaaatcttaactgtatctccaattcagaactgaattgtgtaaattgataaggtgaataactgggaataaaagtgtacttgccttcagrtaacaccactgacagttccacaaataatttttgaaagtatgacttattccttttgtcccctacataccgccatctctagtgaataatttctctcctcttt

SEQ ID NO: 4858 - DNA, 201 bp, Homo sapiens
ggaaggaaaggaaggaaggaagggcctgagtgcaggtaagcactcataaaataaaaaatcagtggtaaatcatgcaaatgtgttgtggcagctaaatgcaygtgtaaagaagatagtcctcagcagtgtcaaaaatactatgtggtctaggagtaaaggcttgagaagtttcttttaaagaaactttaaatgacaagagag

SEQ ID NO: 4859 - DNA, 201 bp, Homo sapiens
tacagtaggagctggagaattcttccttccactgtgtttattttctcagggattttgctgagggcttgagaggtagtcatatagggtgggacaatggcggygaggtatcctgtaggagggatttagtatgtgccagtagtggatcataagtcccatgctttaaaatgaactgtctgtgtactatagataagcaaatgcaaa

SEQ ID NO: 4860 - DNA, 201 bp, Homo sapiens
aaaatataatcttttaatttgcatatttgttaaaaattatttagtgcctcatagagtgccaggtaaaatgatttataattgaaattacattgtaactaatrtcttttctgggcatacattttataacaataatcttgcactcagattttaataatagagatatgttaaaaaggagaaatgattttcaaatatgttttactt

SEQ ID NO: 4861 - DNA, 201 bp, Homo sapiens
ctctactaaaaatacaaaaattagctgggtgtggtggcgtgcacctgtaattccagctactcaggaggctgaggcaggagaatcgcttgaacccaggaggyggaggttgcagtgagctgagattgcgccactgcactccagcctgggtgacagagcaagactccatctcaaaaaaaacaaaaaaaaaaaaagcaaaaaaaa

SEQ ID NO: 4862 - DNA, 201 bp, Homo sapiens
atatcaacagacatcaagtaaatgcttcttacattaataaggaatacaatgaccagatgcattttaaatgaaaaaaatcaacatctctcttatatcctatyaataacctgttagaaagtgtgatgggttaaaaaataccctctttataatggaaccattacattctttagaacaattctaactaaaaaaaaagtacctttt

SEQ ID NO: 4863 - DNA, 201 bp, Homo sapiens
attcatgagttatctagaggctatttgtaattatgatgaaggattatggtaatatgagtgtgagtcagtacctcttaaaaatcatttatatgggccgggcrcggtggctcatgcctgtcatcccagcactttgggaggccaaggcgggtgcaatcacaaggtcaggagttagagaccagcctgaccaatagggtgaaacct

SEQ ID NO: 4864 - DNA, 201 bp, Homo sapiens
caaccctagattatcctttccttttctgagtcctcagaacactctgtcatatcatcattagagcccttagcaggttgtcttgaaatctgttgctcacttgyctcccttattgctctgtgagcacctcaaggtgacactgtttcttctgtttcatctgagcccttgtacctagaacagtgtctggcacacagcaaatgaact

SEQ ID NO: 4865 - DNA, 201 bp, Homo sapiens
tgattttcagtttttatttggttacaaagagagaaggaacatatttggtctcatggatggaaaatgctcctacaagaaaactccactgcattgatgcagcrtattcatgagttatctagaggctatttgtaattatgatgaaggattatggtaatatgagtgtgagtcagtacctcttaaaaatcatttatatgggccggg

SEQ ID NO: 4866 - DNA, 201 bp, Homo sapiens
attacttgcatgtgtcagaatcactagaggaaggagggattcttttaaacatgccaacatagggttctttctcaaacctatgagttgtaatctctaagaaygagaaatatgcattttaagtaaacccttaagtgattcttaggaatataacctaaaatttaaagcccactttttaaaataaaaataaaatcaaacaaatac

SEQ ID NO: 4867 - DNA, 201 bp, Homo sapiens
tgttacttggttaagttactttatcttgctatggctcagatgcttcattcgtaaattactgatcatcatagtaccttgtgcgtttgtgagctttaacaagwtaaaacatattaactgtttagaatagtgcctaacacatggtaaatacttgaaaaatgttagttggtattattactctagatgactgcaaaagaagaagca

SEQ ID NO: 4868 - DNA, 201 bp, Homo sapiens
ttgctaggatgtgcatagagatagtaacttagtaactcctctgagatgaaaagcttcaagtacaaactaaaatgttggccccttccaacttctttgacaaytgtctatctgtgtaggttgtcgagattttgtgaagtatcttcttaaaaagtagtttacacatataaaattaagtaatttttacatgagcatttaaaaagt

SEQ ID NO: 4869 - DNA, 201 bp, Homo sapiens
ccctcaagtttacagcctctgtaaaccagccagatcagtccatggtccatggtctcttattaggagaaagttactgaaccacagctgtctcttttccaatmaaaaaatgtgggtatggcttgtggaatcggccgggggtcagcatctggtggtgagagtgctgcagttgtttcaatagtgcttatcttgaggccggtgctg

SEQ ID NO: 4870 - DNA, 201 bp, Homo sapiens
gatttatgatgataattagggcaacagaagaataatacaaatttgaccactgtcacataaaacgaaatgtaatctgaataattacaaggctaggtgatgakggttcttcccctcaccttcttaggagggaaccagtgaggtaacacatttgtattaaatgaatgggcatttttgagcttggccaagatgatgataccattc

SEQ ID NO: 4871 - DNA, 201 bp, Homo sapiens
gattgtcactattcagcaataaattaagttcttcctctttcagctggttgggcttatttcttttttatacatcaaccttctgtatgttgatatatgtctcyctaatgaaataggaaaatcagctctatcaaaaacatagagtaacaaccagtcctggtgctggtaaagctcaggtattctgtatataaggaacattctctt

SEQ ID NO: 4872 - DNA, 201 bp, Homo sapiens
gaggaagatgtcatatagtgttctcctgactctcaaacttgtttaatctgggatatgtacattgcagtagaaaagactgtggatatttcccagctgggtakgaggaagaaattttttctggtgttgccagttacctggtattctgcttatccttaaacttgatttatacccacattccagcttacttgtgggtaagcttag

SEQ ID NO: 4873 - DNA, 201 bp, Homo sapiens
ttcaacttttggtgctaagtgtgggtaaaaattggtacccaccttgatgcttttcatcttgcttctgatagtactacccttggaagagactgaaaaataaytgagaagttaaaagccttctattgtgactaagaaatattaatacaatttattgaaaaaacgcataggtagaatgaatgtaatagtttttaaaaaagagaa

SEQ ID NO: 4874 - DNA, 201 bp, Homo sapiens
ggtggctaaactcaacatacgctcagtgtttcctttctattaattttctgtgctcacaagtactttaccttgcatcttattatcaaacagtgactaaaatscttaatttaaatgagtaattttagacaagaagaactgtatgtagatcagatctgttattattagttcgcacacaacaaaagtgatgtggagaatacccgg

SEQ ID NO: 4875 - DNA, 201 bp, Homo sapiens
gagaaacagagagagagagaaagaactggtaaagaacatgtagaggatgtccaggctgtgctgagaatgaggtggcaagaccacacctatccgtggttttwctgtctcatatggttttctattatgtgatctctagttcatgacgtggactgttgaatttatccaaggttcagtttttgtcaggtgggtgccagaaaaata

SEQ ID NO: 4876 - DNA, 201 bp, Homo sapiens
tcatactgaatgggcaaaaactggaagcattccctttgaaaactggacaagacagggatgccctctctcaccactcctattcaacatagtgttggaagttytggccagagcaattaggcaggagaaggaaatacagtgtattcaattaggaaaagaggaagtcaaattgtccctgcttgcagatgacatgattgtatatct

SEQ ID NO: 4877 - DNA, 201 bp, Homo sapiens
aatttttccatcattgctgaaggttatattgctataactctgctatggaattttttttttaattggaaaagctgatattgctttctttttattgatggttkccttcggattcatgcttagaaaggtcttttccattccccaacatgatataaatgtgactttttatttcctactagtatttctatagttttttaaaaaaat

SEQ ID NO: 4878 - DNA, 201 bp, Homo sapiens
atcattggctgggctgaagtgtttttccagtgcttgttttaaaaggtgaatcagcagcagggatattcctaatccatctttatgtacacaccagaagagawgttgccaaggtttttatggctagtcagatgctttcaagaaagtacaagtggctttgattttcagtttttatttggttacaaagagagaaggaacatattt

SEQ ID NO: 4879 - DNA, 201 bp, Homo sapiens
tgtcttaactcatttcagcattaattcaaaagtccacggtccaaagtctcatgtgagacaaggcaaatcccttgtgcctataagcctacataatcaaaagyaagttagttacttcctagatacattgggtaccggcattgggtaaatacacctgttccaaatgggagaaattcgccaaaatgaaggggctagaggccccat

SEQ ID NO: 4880 - DNA, 201 bp, Homo sapiens
gatggttgccttcggattcatgcttagaaaggtcttttccattccccaacatgatataaatgtgactttttatttcctactagtatttctatagttttttwaaaaaatctatttacattgttaatatttctagaatgtattttgttgtattgaacgagctaaggtcttactcatattttacaaattttaacataaattcca

SEQ ID NO: 4881 - DNA, 201 bp, Homo sapiens
ctactgtgaacacctctacacacacaaactgcaaaacctagaagcagtggataaatttctggacaattacaccctcccaagactgatctaggaataaaatrattccctgaacagaccaaaagccagctctaaaattgaatctaataaatagcctaccaaccaaaaaaagcccaggacctgatggattcactgtcaaattct

SEQ ID NO: 4882 - DNA, 201 bp, Homo sapiens
cagcaaggggcttcccatgctatggtctattaaaatggtaccctggaaaccaggtactcttgcagaaagcagaatcttctgaggcccccactaatggtcakgggtcaaaggctaatacccttgcttttatggtcctgagaaagagcttatgcctctctttggcccttaatactatcttcctttacttgatcccacacagtt

SEQ ID NO: 4883 - DNA, 201 bp, Homo sapiens
ttcaggtgagagctgaagggggcctgaactggggtattagcagtgggatggattagagagactctcagaaggtggaagtgacaggggttggtaataattgratttggaaggaatccctaattgattgatattccaaggtatacctgtagactgaagtatgcctccagttctgccaagaatgaatgggtttgctgacatggg

SEQ ID NO: 4884 - DNA, 201 bp, Homo sapiens
gtaaattatttatttattgtttatttagtgggaaaggatctgctctgttgtgtgctttcactggtctaaagggatttggcacagttacctaaataggtgtrattataagccatatctccctttgctgttctccctgaatcactagccacctttcccagaactttgtttaaattcaagttttacatgatccttggagtgctg

SEQ ID NO: 4885 - DNA, 201 bp, Homo sapiens
tttaacagacaatactggaagaaaaaaaatatcatcagagagcagttgctgaaatctttgtattataatttggaatgtgaataattctaatattcgagagrtagtttggagattagtaataaaattcctgctctaaggaatagtccagatgagaaaagaacagcctgaaaatcctgcggaaatagtgtcaataacctggac

SEQ ID NO: 4886 - DNA, 201 bp, Homo sapiens
aataatgtggttatatttcataagagtctttatttcttaaagatatataatgaaatattacaaatgaaataatgatgtttgggattttcttcaaacaaaayataatggaagcgtgaatagaaggactatggataaaaaagattgcccatgagttgataatttgtgcaactgggtgatgaatccattgagatttgtcatact

SEQ ID NO: 4887 - DNA, 201 bp, Homo sapiens
cattttcttttgtactgttcagacaatcagccccatgttatcaacttgaattgtttactacagctagctagcacacacatccattaacccagcagctcctyattgagcattgtgtccggcattgaactaattattgagcccatgtcagtcggcttccctgagcctcctttgcaaggctgagtctggctcccagcccatgcc

SEQ ID NO: 4888 - DNA, 201 bp, Homo sapiens
ttactcacttcatagagcttaccttttatagtagctgcttttcatagtaagtggtctcccgtcatctgtaattttcagttttgtcctattagcattctgcyaaaattactgtgtctaataagaaaagcaaattaaaggtaagagatcaatgattggtgctgtctctttcacgaactgcttgtatctcgatagagttattct

SEQ ID NO: 4889 - DNA, 201 bp, Homo sapiens
agctggaggtaagccatctggaagtggggcatcttacgtgtttggtttgggatgcatatttggatttttcttttggccctgagttgagactagggacaaawtgtagggaagctgtctgaagcctgcagactgtggtttggtttcccaggctcattgctgtggagattgtgcattagagtgctattttcatatattgtgact

SEQ ID NO: 4890 - DNA, 201 bp, Homo sapiens
agaatcatttggaaaatgtagggagtccagacaaggagaagtgaagggaggagatgatggaagagtggcaggagagataatataatgaagggggaagaggsaaaagggaaacctggatataaggaggcaactgaaggactaggaaaacagggatttactagggaaatgcatctcgcttgatttttaagtttgtcaaaccga

SEQ ID NO: 4891 - DNA, 201 bp, Homo sapiens
ctagatgctgcttacaaagcccttcgttatatggtcactgactgtcttgtattgatacacaccatgttctaatcatgccatattgcttacagtgattacartgtacatttgcttatgggattcatccaacctgaaatgcctttctttgtcttctccagttccattttatctttcaaggcagtctcacctcccctgagaaac

SEQ ID NO: 4892 - DNA, 201 bp, Homo sapiens
aagtctaagaagttactttggagaaataacttctttggcagtgatgttattttctgtgaaatagtaaggatgatctggaacctgggactcagaaaatgccrtttgcagacccagatatttggactagctagacgatttggaaggtaaaacgaaggtacctattctgttacattatttaatgctgttagaaactgaagatga

SEQ ID NO: 4893 - DNA, 201 bp, Homo sapiens
agtggcaggagagataatataatgaagggggaagaggcaaaagggaaacctggatataaggaggcaactgaaggactaggaaaacagggatttactagggraatgcatctcgcttgatttttaagtttgtcaaaccgagggttagcctagaccaaagcatcttttagtgaagaagttttagtgaagaaatcagaatttcat

SEQ ID NO: 4894 - DNA, 201 bp, Homo sapiens
ggagtactagttctgagctcattttagtattattaacttctacttattagcaatgaaggatcaatttaattagatttagttattataaagtactgaccatrtagattcaatgtaattatttatgtataacatttaagtcatattttaaaatttagctgacttttaagtttaaaaacatgaatactatagtacttttaaata

SEQ ID NO: 4895 - DNA, 201 bp, Homo sapiens
ctcagtgggaagaagagcggcactgaagacagcttgagtaagaactgagcaatcaaagcgaatggagagaaactggagttcagggggtaatttcagtggtrtcagtggcattccacatagcaaagctgggcatgtgggagtagagagggaaaatactgaaagcaaagatacctatttctatttttaccatactgaatttca

SEQ ID NO: 4896 - DNA, 201 bp, Homo sapiens
ataaagaaattttgacagtataagatgaattagcaatgatgtttttcagaaaacacgtaggcagtaacttcatttatatgaccatgttattaatctgtagrcattaatggatttatgtagcctgttcagaaattaatgaagcctgttttctatggattttgttattagctccttccctcttcttttgtcttcttggcatca

SEQ ID NO: 4897 - DNA, 201 bp, Homo sapiens
ttaaatatgtacttgcagaagataggcattgaaaatgaaaaataaaataaagtacaaaagagtaccatgaacattgggagcaaatcccattttgtatcttytgcaatttggtgagtaatgaaactaactgccctgccactggaaatccaaaatgccttcagctttcctcttatgtttaagtgtacgcttatattttgattg

SEQ ID NO: 4898 - DNA, 201 bp, Homo sapiens
tgtggcggtgatgactgactctccttctcatttccccttcactttctctcccctcctctgagagtttttcctgtagaatactactttttgaagaaaaaggraaaagggaaaaggaagcgaggatggccttttttgaagaaagaaaaaaaaaaagaaagagaggtgggctagctttgtctctcctggtgccttgtcaaaata

SEQ ID NO: 4899 - DNA, 201 bp, Homo sapiens
gaagcacttaattcattttaaatttcatttctttgagaaaagattggaatatatttttccaaatatgaaacaatgatacattattaaatatgtacttgcaraagataggcattgaaaatgaaaaataaaataaagtacaaaagagtaccatgaacattgggagcaaatcccattttgtatcttttgcaatttggtgagtaa

SEQ ID NO: 4900 - DNA, 201 bp, Homo sapiens
ggtgatgcagagaacagagcctgtactttcattttcctgaaagagtaagtggaagcttctcagctagtaatccctgacccctctaaaagtatctgtcttcycaaaacctgcaaccattataagcatcctgaaggatcatcttcagggtttcactgatggggcgcagatcatctctctgtacttactcatctgccccctttg

SEQ ID NO: 4901 - DNA, 201 bp, Homo sapiens
cttacaaaaacttcaaactatttaagagccaatgactcatattcaacaggactttctgtctagttggaggagcacagtcttattatatatataaaaatgtstgaaaaaagctggttgcaatctagaggatcctctggggctgggtctctcttcgagccctccatctggtggcttgctcccacctcatgattcgtgagaacc

SEQ ID NO: 4902 - DNA, 201 bp, Homo sapiens
aaatgatgccaattaaacttgaatttcagataaacagtgaataatcttttattgtaagtatgttgcatgcaatatagaaaacaaaagacaaacttatttgygtttttgttctgttttgctaaatccagtaatcctcagagcagggtttgttccgttttcttgttaattcactgactaaatatcctgggcatcattttcagc

SEQ ID NO: 4903 - DNA, 201 bp, Homo sapiens
aagtcactggtcactttctgtttgggtgctttttccacagaaaaaatttatcatgtatgctaggattggaagacatcttagagattatttattctcacctmacacctaaattattagaactctttaaagcatctgcaacaaataattatccagttttgacttgaatgggccagaggctactcccttacaacaccactgctc

SEQ ID NO: 4904 - DNA, 201 bp, Homo sapiens
gaagacatcttagagattatttattctcacctaacacctaaattattagaactctttaaagcatctgcaacaaataattatccagttttgacttgaatggrccagaggctactcccttacaacaccactgctccattgtttggtgtttcacaggcgtggaacattcttctttgtactgagccaaaacctttttagccaatg

SEQ ID NO: 4905 - DNA, 201 bp, Homo sapiens
ctgcaggtccagaagctctcattgagccatggggtcgggggtaggggttgtctgatttgttgctttgttttataggatattcattcatttttaattcactygctagtatttgctgagagttcatgtgtttagcacagctttgtctcaggaagccctaaatatcctcttcaacatgatgtgttatcaccagaggaacttcag

SEQ ID NO: 4906 - DNA, 201 bp, Homo sapiens
ggaagatctatctatataactatcctccatttgttataccatgtatttcagactgaaaacgtcttaataacagaataataccaaaggtgaggaaggcaaaytttaaaaatatatggttaaggcatctctttatacttataatgaaagatggtataatttgttaatatagcaataaacagggttgaataatctttgtttatg

SEQ ID NO: 4907 - DNA, 201 bp, Homo sapiens
acagcaagggaatcagccaccatcacttgcctaattccaagacaggcagggggatgcggaagctttgttcaacaaatacatacatgttaaatagttccagktgtgctctgattggacattattgccatggggaagctgaaggtaggctaaccagaggtggggcatcttatgtgatgggtttgggggatcatttttggcttt

SEQ ID NO: 4908 - DNA, 201 bp, Homo sapiens
cttccctcactgactggttagttctcttaatttcttgggtaattctggagggaccccatctgactgggtgagagggttactactgactctctgggcagagyccaatgccccaggccatctcttgagacacccaccaacacatgaaagggcagctcttgctacccttaactgaagtgcagggagtgggtgggtcacttatcg

SEQ ID NO: 4909 - DNA, 201 bp, Homo sapiens
gtgaatgaacaccatttccttgaaccaagtggtcattgtctccatgatattctcagtgcattttgacctttgtgcttccaaaggatgaagatttttctttyctaatttaaaactttaattttgtggttttattccagtttgtggcatggcttctagtgattctgccatttatgctgcagctcttaaggaaaataggcatgg

SEQ ID NO: 4910 - DNA, 201 bp, Homo sapiens
cctttgtgcttccaaaggatgaagatttttcttttctaatttaaaactttaattttgtggttttattccagtttgtggcatggcttctagtgattctgccwtttatgctgcagctcttaaggaaaataggcatggttaggataatgtgttctgatggagtattctggaaggccaaacgaagaggctggccagaaaaatcac

SEQ ID NO: 4911 - DNA, 201 bp, Homo sapiens
gattctagtttatagctgttcttagcattgtctggtagtgacgcaagataaatttaaccagacactgttggttattctgcctaccccttagcccaggctaygaagatagtctcttggcctgagcaattaataggaatctcctttcatcatttacgtagtttgcttcttcacatccagctatgagcactctgcaacctaact

SEQ ID NO: 4912 - DNA, 201 bp, Homo sapiens
catagcaaaggtattagtaataattgctgttattatagcaacaacatgaaccacatttatagaatgcctgccacacttcagccactatttcttgtactctrtgagcagtacttcggttactaatagctgagtgccccagctggggaatctgctttctacagtccagggatggaggaagaaggaatggaggtactatctttg

SEQ ID NO: 4913 - DNA, 201 bp, Homo sapiens
ctcattcaagtaactttaaacaaggggataattcttcaactatatgtatccaaccccaagataatttattatttggggaagtaagggtaagaaagtgctcragctgcttttggtttttcagagttgggaatatgttcacatttcaactggatgtttttggtgctttgtagagatagtcattgtacttcattttagtattct

SEQ ID NO: 4914 - DNA, 201 bp, Homo sapiens
ggtttgattaatgtttcagtcttgtctgtagaaggattttcaaggacaaaaactccttacaaaaacttcaaactatttaagagccaatgactcatattcarcaggactttctgtctagttggaggagcacagtcttattatatatataaaaatgtctgaaaaaagctggttgcaatctagaggatcctctggggctgggtc

SEQ ID NO: 4915 - DNA, 201 bp, Homo sapiens
tggctttcttttcctgacttttgtaagttctttatgtattttggagactagttatctgtgtcttacctacattcacttattctctttcagtctgtggtttstctttttgcttagtttatgttatcttttgggtattgaggtcataacagaaactttggctaatttgtttttctatattctggaacagttgaaatttaagat

SEQ ID NO: 4916 - DNA, 201 bp, Homo sapiens
atcccatctcccacctttacccctgagatctttactaggaacttaactatggacagcatttcttaccacagaaatctctgggaaaataaaataagcctttwtacaaaatgagtaagactcctacataaaatgtggctgtctataggaaggaaacacacctataactctgagaatgaaattagtttcaagaatacacaaagg

SEQ ID NO: 4917 - DNA, 201 bp, Homo sapiens
ctagtgaagtattaatatatatcctttgttcatttttatatgggattgtttggctttcttttcctgacttttgtaagttctttatgtattttggagactarttatctgtgtcttacctacattcacttattctctttcagtctgtggtttctctttttgcttagtttatgttatcttttgggtattgaggtcataacagaa

SEQ ID NO: 4918 - DNA, 201 bp, Homo sapiens
agagttctccagaaattctgcagcctttagaaatttctagcgataagcactttctctgttaatgtacactttcacacatgtgagaaatcaataaatttcakgcatcaggaagttctaaaataaactatcttaccatccttctctgttgtggtagccccaagtatacctgtaggttttgttggtcagcaaatatccacctag

SEQ ID NO: 4919 - DNA, 201 bp, Homo sapiens
gtggaattttctacttgtgacaccatgatggcaatcaaaaagttttgaattttggagaattttggatttcaaactttcagattagggatgctcaacctgtrtaaaataatgttttaaaatacagaaaacacaaataaaaacttctatatccatcactctgattaagtaatagaaatatttgtaacatagagattttccttt

SEQ ID NO: 4920 - DNA, 201 bp, Homo sapiens
cattttgtggaaaacactatttgttacctgtgattaactgggtaacctatagattgagcttaaagcctcacctggtgaacctataagatcctggctgccamcatcccatctcccacctttacccctgagatctttactaggaacttaactatggacagcatttcttaccacagaaatctctgggaaaataaaataagcctt

SEQ ID NO: 4921 - DNA, 201 bp, Homo sapiens
tccaccttatatgtatagactgaaggcagttttatacagtatgttttaacaattttgggcatgaaacaaagtttcgactgtgttttgactgcaacctgtcwtatgtcaggtgtggaattttctacttgtgacaccatgatggcaatcaaaaagttttgaattttggagaattttggatttcaaactttcagattagggatg

SEQ ID NO: 4922 - DNA, 201 bp, Homo sapiens
ggcattttctgtgtctattgagataatcatgtggtttttgttgttgattctgtttatatgcgggattatgtttattgatttgcgttcaattttttaaactyaggcaactaattatcctgtttctaatgttagtttattgaagaattggctgatttttataaatagtatccataaaatgtgtaacgggtggatttcgtgttg

SEQ ID NO: 4923 - DNA, 201 bp, Homo sapiens
acaaaatgtatagctctaggtagactttataatatatttttatttaaatgttaattataggttgtatatcccttatctgaaatgcctgggaccagaagtgytttggatttcaatttctttcaaatgttagaatatttgcatatacataatgacatatcttggggatgggacacaagtataaacatgaaattcatttgtttc

SEQ ID NO: 4924 - DNA, 201 bp, Homo sapiens
atcaaaattattgattagaagtgttaagttgaaatttcctatttctttcatacatccttttccttatagatgaatgtcaatttttctttctcaccaaccgrttgtttatctagaagttactatttgaaattctattacttaatgaagtgcttacaaagctttggaaaattactcctaattctaaaataattataccacgta

SEQ ID NO: 4925 - DNA, 201 bp, Homo sapiens
gctattttctatttgtttttatctttaaataaaggaaatgatgaaatatctatccttagaaggcatcaaagtttgattgtcattaactttaaaaaatacayggctgggcgtggtggctcacgcctgtaatcccagcactttgggaggctgaggtgggtggatcatctggggtcaggagttcgagaccatcctgacccatat

SEQ ID NO: 4926 - DNA, 201 bp, Homo sapiens
agtataaaaaaggagtaaaagacaatttcaagttccctgtccacctgctctcccaagaactagaagcacggtattaatgagatagggtagaccactgggaratcaagtttagggatgaagattgggaatcagaggcttgttaagtttcagatgctgtcaggcaccgaagggagtgacccaaaagacaaatgcctttcctaa

SEQ ID NO: 4927 - DNA, 201 bp, Homo sapiens
atgtcacccaggtggccaatatcttcagtatacattctaggtactcagagatccctttcctagtttccatcctctgactcactattactttcctctcttcsaataattcaaccccaattacttttctatgtcaaacttccctccattcccaacacacacagatatcatagaggcatatcaaaggccccaggagaagctgtc

SEQ ID NO: 4928 - DNA, 201 bp, Homo sapiens
tttgtgccagcctttgatcttacccttaagacaggggtctgagattggaggaccttgacttcctagcctcctattggtgcctaccacacctgtctctttarcatcatctttagctactttgatctgcctgtgcccacaagatcagggctctgccatgtgtcccacagtccctggctgcttgctctgggtagtggagagaga

SEQ ID NO: 4929 - DNA, 201 bp, Homo sapiens
cattttcatctcaggcattttatatttaaactttcatcaagcacgtgggtgaaacgagtcctttagaaagaaagaaaaatattaaggctatgccttccttmgacaagtgaaatgctcttttagcaaatatttgacaaatgtctaaatccatatatgaatgtaaatttgtctgtttactctcgattgagctcaaggctgact

SEQ ID NO: 4930 - DNA, 201 bp, Homo sapiens
tctgcctcccctccttttctgagttttactctgtcacccaggctgaagtacagtggcacacagctcaggctcattggagcctcaatttattaggcccaagygatcctctgatctcagtctcccaagtagctccaaccacaggtggcaccacactgggctacatttgtaatattttgtagagatgggggggtctcactatgt

SEQ ID NO: 4931 - DNA, 201 bp, Homo sapiens
tgtaagtatgttgcatgcaatatagaaaacaaaagacaaacttatttgtgtttttgttctgttttgctaaatccagtaatcctcagagcagggtttgttcygttttcttgttaattcactgactaaatatcctgggcatcattttcagcattattatgccactctgcttcaaagtgttgaatggcccatatttattttcaa

SEQ ID NO: 4932 - DNA, 201 bp, Homo sapiens
gaaaatacagtataactttttcttctgttatttaactggtgtaaaattaattccttgactctcatattttgtaaacaaatatgataatgtatgtggtgatrtacggctttgccttgagaaggaaaaaatatagccataaaatatttaagaaaattctggaaataagggtaatagaattaattttttcaaacatttcccaaa

SEQ ID NO: 4933 - DNA, 201 bp, Homo sapiens
gaaggtcagaaggggaaaaagtcgtgtttgtgaaagaccatgtgaaagtttgggcacaaacagaaccatagggccgaggtaaccaactgtaatattagcargtgggggagcctccagctttctctctctaccctgccatagaccccaggtgaggtttcttaccctggacccttccagtggcctctgcagagcggtagagag

SEQ ID NO: 4934 - DNA, 201 bp, Homo sapiens
tattagcaggtgggggagcctccagctttctctctctaccctgccatagaccccaggtgaggtttcttaccctggacccttccagtggcctctgcagagcrgtagagagtggcgaacagtggtggagatgctgactcttatgtcagtgacctggtggtagccctgtagatgtggcagtgtgtcaggtctcttacctgcccc

SEQ ID NO: 4935 - DNA, 201 bp, Homo sapiens
agaaggccaaagtggaggaaaatgagtggttggttttgtgcatattacaggacatctgatagtgccctcaaattggctggggaaggcttcaaagaaagccygagtcttggtaattcaggcattaatgtaaatgtgactacatttgttttcgtatgttggtggctcctcccatctcaccgccttgaatgaaagttctatgag

SEQ ID NO: 4936 - DNA, 201 bp, Homo sapiens
gtgaagctcttataaaattaatttacaaagcatatgtctatcttttgggtattaatattatcactgagatgggccaagtcagacttagaatcctgactcgkatttagtagtactgtaaacctataccagttaagaagtatctacctctcagagttactgtaaggattaaaagagaaattgtcatttaatgtcactagcata

SEQ ID NO: 4937 - DNA, 201 bp, Homo sapiens
tagatggaagcatatccagctgcttacagtctcccaaacacatctgtgtgtacatttgtgtgtttaaatgcctttgcatgtcctgtgttctgtgccctttmctcttatgtattgtgtgcctcaaaactccttatttttcaaaatgcagctcaattatatcctcctccatgaaaaattccctgtctcttcatgcagagtaag

SEQ ID NO: 4938 - DNA, 201 bp, Homo sapiens
aggtgtgccacgttaacagactaaggaagtttaatattattataaaagaagcaagaataagacagttaaaaaaaaaaaagacttggacaaagctgctacaygtagctgctgcatttaggatcaatccaggtagaacaaaatagaagttaatcagatggtctggaccaccaaaagtttttgacttttacaacttactagtac

SEQ ID NO: 4939 - DNA, 201 bp, Homo sapiens
cttagctttttttaccttaacagtacatcctggaagttagcctgtaacaattcaaagagatcttcattaatcttttttacagcattattgtactccatttkggagatatatgacaatatcttctttatgtaccactttcccttgcagataggtgtgccacgttaacagactaaggaagtttaatattattataaaagaagc

SEQ ID NO: 4940 - DNA, 201 bp, Homo sapiens
ctatgcatttaataatgcacagacagcttatgtttctaactattgtagtgatacgtaaggccacatatcaatactttactacttctaggtgcttcatgaawtcttatccattgttctgcaatccatattgacatttattgaaacacaactttgataatgccacaggttattgataatcaatagctttttgacagaagccct

SEQ ID NO: 4941 - DNA, 201 bp, Homo sapiens
ttgcattttggatcctcatcattgttagttttagttgttgattgcttaggggcatgtgaaaaatatgaatcataactgtggttctaagagccagagctttmcaaaatgatgcacccaaggcagtatctgtcactccatcctgtcttgatacacataaccatttccgtcttctttccagctctttgacacctgccctctgta

SEQ ID NO: 4942 - DNA, 201 bp, Homo sapiens
atgtctatgcagcaccagtcacccaagttctcagaaaattagacgatgagaaattacaaaactagggagattatgatttattttcttcctcataattattrcagctatgcatttaataatgcacagacagcttatgtttctaactattgtagtgatacgtaaggccacatatcaatactttactacttctaggtgcttcat

SEQ ID NO: 4943 - DNA, 201 bp, Homo sapiens
atccactggagttcaatattgggtcattttcttcaaagaagagagaggtattaattagtttgttgcttggaggcttcattccctttgctgttgtaacaaayggttcctgggcactctcaggccctgactgattaacttgcatagcttccttttgatagctctccttctgacacacatggttaaacaggagagaatgaggtg

SEQ ID NO: 4944 - DNA, 201 bp, Homo sapiens
ctaaggggctctggaacaggaaaccaattctgaacttgatggataagggaggcccaggaaatcagtgcacagggctgtggatgctggggtggggagggcarggagggcagcatctacttaccaccaggtgaagaattatttcacattttaacagccctttgccccatattagtgcacactggcttttttaagtatagagaa

SEQ ID NO: 4945 - DNA, 201 bp, Homo sapiens
cttactaagcggagatgactgtctgaagaacatgtttggaaatatgtaagaatcaagcattgtgtctgagataattatcaaacaataacgtggagatacarataattggaaaagtctgcattcagggctagacatataaatttgagactcatcagtggaggaatgaggttaaattttaacttaaaatgtgtcaaagagtaa

SEQ ID NO: 4946 - DNA, 201 bp, Homo sapiens
ggtagagtgttgattatttggtatatctgcacatgagattgagagcggggaagaagtagagaaaacccttaatataataatagatttggatcttttccctwtagattattctttaagggaatgtcacaggatccttggggtgtcactttgccagccggaagcctcagtggtgggtggtgccttctgcctgagtattacttg

SEQ ID NO: 4947 - DNA, 201 bp, Homo sapiens
gtgtattttagccaaggtaaataaacatggatacttatccagtgcaattctgaagaatgattacactttctcaagtccaccttatattatatatatccacrttgaagtaatgagtattaactcttaaggacaatctgaaacaagttattaatccatgccagtgtctgatactcactctacactattcttgaagctttataa

SEQ ID NO: 4948 - DNA, 201 bp, Homo sapiens
ttccagatttctccttccttctacccaggttaaattttttccatgtttctgaagcttgttagagagtcaacaaaatgaaatatgagtttaagtatatcctytgtgatggttacaacccctcacagttttgataacattgggcagctttactgaatgtacttatatatgaaataaactgggtagagtgttgattatttggta

SEQ ID NO: 4949 - DNA, 201 bp, Homo sapiens
tgactttctgcctgattttactctttaaaaagtgtacaaagtgaaaaaaaatgaattaagctttttggcttaaaaatgtaatgcgattctaatcccacacmgttatagtttataaaccggaaataacagacagaaggttgactgatgtaaaatctaaaaatgtgcagaaaagctgctttagagaattgggtaaaggcaatt

SEQ ID NO: 4950 - DNA, 201 bp, Homo sapiens
gtagtattgtagcattgggcactactctctgcagactgtccttattgcctcttattattgtggtgtttttctttcaattataggttctaccaagtcagtcyttaaaatttttgtggattcacaagaccctgtgtattacagctaatagtcttcactctctgcttcaaagtctttttcccagggttactctgttaaagctca

SEQ ID NO: 4951 - DNA, 201 bp, Homo sapiens
aagaagtgaaataatgactcaactgggaagaggtgactttctgcctgattttactctttaaaaagtgtacaaagtgaaaaaaaatgaattaagctttttgrcttaaaaatgtaatgcgattctaatcccacacagttatagtttataaaccggaaataacagacagaaggttgactgatgtaaaatctaaaaatgtgcaga

SEQ ID NO: 4952 - DNA, 201 bp, Homo sapiens
aatattaaatggcactgctttcaaaacaggaatagcctggattttaaaaacttaactgcttcaaaatgacatagtccaataccatttgcatatttgaattsaaatcttttttacatgtatctggggaaatagcatccaaaaatagtttttctgggtctagaacaaagccaaatctaggtattagtctaaggctacaaaatt

SEQ ID NO: 4953 - DNA, 201 bp, Homo sapiens
ctagtgacttctggctgacctacaatacatgtccacccagcatccccttccagtactctaggctgcctttctaaataaacctacttgtctatatgccccawcccatcagaatcctgcattgagttatttaacagataaagttgtctgtgctaatatatgaacaaattagtgggttaacttcccaaagcaataattcttttg

SEQ ID NO: 4954 - DNA, 201 bp, Homo sapiens
ctttttttacttttctggccaaattttctcagttctgtttctttgggtcacttcttgcatttgccagagacatttcctccagtcaatgattatttgcattrgttccctgtggctcttcctgaattttttcaatggcatagtaatttttttcttgaatatttcctactgctttaattttcactcctgttttaaattcttcat

SEQ ID NO: 4955 - DNA, 201 bp, Homo sapiens
ctgtctttgagaaagtaacgtctatgtatacggctatcctcttgtaaccaggcattccaaggtaaattgaagtgtgatttgacatttaatggtactgaatrtatgttatgttgaaaatagtgtaatatagtgttgggagggcaccaacgatacatttgactaacgctttgccctaaacatgaaaaaaatatatttcaatta

SEQ ID NO: 4956 - DNA, 201 bp, Homo sapiens
tgttttgttcactgttatatgcttggcacttagtagggactccattcatatagattgaatcaatgactccattactaatgctggaaaaaaataacatacarggccagctgtagcagtggcgcgtctgttctcactgaaaaagaaactaaggcaagagtaccacgtaaaatagaattggctggattttcttgtctcatacaa

SEQ ID NO: 4957 - DNA, 201 bp, Homo sapiens
aagtagtctgtctttgagaaagtaacgtctatgtatacggctatcctcttgtaaccaggcattccaaggtaaattgaagtgtgatttgacatttaatggtrctgaatatatgttatgttgaaaatagtgtaatatagtgttgggagggcaccaacgatacatttgactaacgctttgccctaaacatgaaaaaaatatatt

SEQ ID NO: 4958 - DNA, 201 bp, Homo sapiens
gaaatgaggaaaatgagtttcaaagaggttaatgaacttgctcaagtttactcactaagtgataaaactcacatgggaactaggcctgaatgacttaaaayatatgctctggccccttcccactctgtctgtcttgctgtcttccctgtttctgtagtttctctactctttgttcacttttccctaaggtggcaggaagtg

SEQ ID NO: 4959 - DNA, 201 bp, Homo sapiens
agtactgaagaggcacaaacaggcttcagggtgtgctggagacatttgagcaggacattaagaagcgcctcttgacagtgagaaggacacaattaaaacaygtagccagagttgctctagttctccatttctggaaaccttcaagggaaactaggcagttgttaaccatttctcttagtaagagggactccttgcttagag

SEQ ID NO: 4960 - DNA, 201 bp, Homo sapiens
actcactaagtgataaaactcacatgggaactaggcctgaatgacttaaaacatatgctctggccccttcccactctgtctgtcttgctgtcttccctgtytctgtagtttctctactctttgttcacttttccctaaggtggcaggaagtgaaggacagatagcagtttccctattttcaacactaaaaataaacatgaa

SEQ ID NO: 4961 - DNA, 201 bp, Homo sapiens
ggctttggcatttgaacatacctggtctgaatagtgtctctactactgattgtttgactttggccaagtcacttaatctatccaagcctcaatttgcttgrccctaatacctacccttacagggatgttaagggagaaaatataaaatgtattgcttagcacataattgttgttttattttttttacaaggttgaaaagca

SEQ ID NO: 4962 - DNA, 201 bp, Homo sapiens
cacatatgaattgggatttattattagtgctcaatatggaattgtaaagtcatggaggcttaaggcagtttcctcaaaacctacttttgcttcattatgayttactggtttaaacttaaccagttgtatattaatagtactgttctgtttgaagcgaggactattcttttcaaagcttattaggactgtatatgaattttg

SEQ ID NO: 4963 - DNA, 201 bp, Homo sapiens
aacatatgcattcccttatacacttaacagtttccctgttggctagtctaggctacttccatcccacaaccatccatatcctgccatttataagaccaatrcaaattagtatgaatcaaataatttctttagagagtttattattatctgctaaagcttatcagcattgagcctttgaatcaaatggtttccttaatctta

SEQ ID NO: 4964 - DNA, 201 bp, Homo sapiens
gcagccatcaacattggggcaagaccctccaccagcaaaaatattatgcttttctgaaggttcagatgattctttgcatttttagcaataaaatattttaragttaatgtgtgtacattttttgatacagtgctgttgcatactcagtggaatacaatatagcctaaacattacttttatatgcactaggaaataaaaaag

SEQ ID NO: 4965 - DNA, 201 bp, Homo sapiens
ccaattttgaaagaacttttactgtgggtaaaatgctgtaacagcatcacatgctaccaagaaatttcttgtgaaaggaagagtcagtcaatgaagtaagytttattgttgttttattttacaaaattgccacagccactccatttatcagcaaccaccaccctgatcagtcagcagccatcaacattggggcaagaccct

SEQ ID NO: 4966 - DNA, 201 bp, Homo sapiens
ctgtatgtatccgggcaaagtaaatgaagactcctggaaaaaattcatcattctaaatgccagtaagaacatttgtgattcatgggaggaggtaaaaatakcaacattaacaggaagtttggaagaagttgatgccaacccttagggatggctttgaggggttcaagactgtagtagaggaaataactgcagatgtggtgg

SEQ ID NO: 4967 - DNA, 201 bp, Homo sapiens
aacttaatacattaattcaggtgagaggtgatggtgtctgacctaaggcaataaccacagaggtagaatggaaagaacagtttttgataaatagttggtgmtttattgtgtatgacataattagacgatagttcttttgatccttttattaatattgtctcaatgaaatgaactgaattgctgaataattgattttgtaga

SEQ ID NO: 4968 - DNA, 201 bp, Homo sapiens
taatacattaattcaggtgagaggtgatggtgtctgacctaaggcaataaccacagaggtagaatggaaagaacagtttttgataaatagttggtgatttrttgtgtatgacataattagacgatagttcttttgatccttttattaatattgtctcaatgaaatgaactgaattgctgaataattgattttgtagatggc

SEQ ID NO: 4969 - DNA, 201 bp, Homo sapiens
gggctcaagaactctgtgaggacgataatgataatgaaaggcagatgttgcagcgtgactgaacagcatcccgatcgcctcctatgtgaactgtagaaaasgttgttgatgatccccttaatttgacatggcttttcacaaccatccataattgggttttggggtgttttttcttttatgacacaaacagatctttggaag

SEQ ID NO: 4970 - DNA, 201 bp, Homo sapiens
gaagggcagagcacttgaagttagacagaataagtcagaatcactgaggctgatagtaacctggggtgtgaaatatcttttaaatagttacattgtagtgkagaaatattatatttgcctttcaagaccattgataggggacaattgagaaaatagaacagtgtttctcaactggaagagatttgctgtctcagggacatt

SEQ ID NO: 4971 - DNA, 201 bp, Homo sapiens
acaacatccattctgcagcccatggatcaaggagtaacttaacctctcaagtctcattatttaggaaatacatttttttaaggttataggtttcctagatrgtgatacctgtatgtatccgggcaaagtaaatgaagactcctggaaaaaattcatcattctaaatgccagtaagaacatttgtgattcatgggaggaggt

SEQ ID NO: 4972 - DNA, 201 bp, Homo sapiens
ctactgcagacctaaggtatgagaaactctgagagtggggcccagtaatgtgtttttacaagcttttccaggtgtttctggtgcatcctaaactattagamctattaagaccactgttgtacagcatacaatgctcctgcaataggaatacaagacatagctaataaagataggacctaataaagtttattggatagctgt

SEQ ID NO: 4973 - DNA, 201 bp, Homo sapiens
tcctttgatctgattgactgatgtgttctggtcatgaacatgaccagttcatgcgggtaagtgctattcagtgggagaagtcttcttctaagtttagaggktgggtgctcttacaccaagaggaaatattttttgtttcataaacagtctatggaattaggtggttgattatgatattgggttatattcttgttctaagaa

SEQ ID NO: 4974 - DNA, 201 bp, Homo sapiens
ttttgatggcaccactcaccattactcctagtgacccactagcaaaattttgcttcctgttcccacaatattatgttctgctggcctagaagtcttagttscagagggaggaacaccaggagacacaacaatgattcctttgaactggaagttaagattgccacctggacactttgggctcctcctacctttaagtcaaca

SEQ ID NO: 4975 - DNA, 201 bp, Homo sapiens
tacacagttgtaagctattagccatttttgctcttcactgtggtacttacatgtacttaactctctgctaacctaccacaaatcataaatgctacctagamttttgatcctacccttccacctttttaaccctgagcttactcaagttgctttatgacagtgaattataaatttgttgaaatgtaccttataaatgtgatc

SEQ ID NO: 4976 - DNA, 201 bp, Homo sapiens
ctattgcctgccatggacttattaaatgtcactattccagtgttgaggctgattccagtcagcatgttactgcactgaaatctttcctcatatgtgaatcraaagttcctattatatagagattcttagtttatagaaagtttttaaagatcaaaagaatttttttatgtgaaaatactttgaaaacttcaaaatactata

SEQ ID NO: 4977 - DNA, 201 bp, Homo sapiens
ctactaagaacatactttaaacttagtgactgttctttctttttctttttttttttttaatcttgggatttttaattacataaatttagtaaactcttcaratattatttttcatacttcacattacttttttttcttttttttatgatactttaagttctagggcacatgtgcacaacatgcaggtttgttatatatgta

SEQ ID NO: 4978 - DNA, 201 bp, Homo sapiens
cccctgctagtactactgacatagtcctatactaatcttcctgctttaattccttttctgcaaggcatctagtctaatattcttaaaactagatcatgccygattgaaactcctcaatgaattcccaatatactaggaaaaatctgaacttgtctctcactgacatggccctaatcagactcccacagtgtctcattttcc

SEQ ID NO: 4979 - DNA, 201 bp, Homo sapiens
cagtttggtgaacaattagctaatcttccatatctcattgaagagaactcacagtagtagctgagtcggcttccttcctctaagccttgagaggaggactyaagtgaatcacgatatctccaagcagagaaaacataaaaacataatcacttaatcacctcacacagacacctgtttaaaaatgtatgccctctatgtaaa

SEQ ID NO: 4980 - DNA, 201 bp, Homo sapiens
ctgaaaataggcatacaagtttcatggagaatggaaattggacaaaacctatctgagggtgttaagggttcttgaggtttcacatccacctttatagtttytccaagatgctgttgggttgacaggtgacacatgatctaaaaatagcctcatcagtccataaatcttccccaccaatgatgatttaagatagtaaccaat

SEQ ID NO: 4981 - DNA, 201 bp, Homo sapiens
caaattttgcttctaaacactcctctatccctctcttctacttctctaatgtggctttagctcggggacttccatgtctggtttggtcaattgtagttttytttctgtagtattgtagcattgggcactactctctgcagactgtccttattgcctcttattattgtggtgtttttctttcaattataggttctaccaagt

SEQ ID NO: 4982 - DNA, 201 bp, Homo sapiens
gaatgcctttacactgttggtgggaatgtaaattagttcaaccattgtggaagacagtgtggtgattcctcaaggatctacaactagaaatactatttgamccagcgatcccattactgggtatatacccaaaggattataaatcatgctactatgaagacacatgcacacgtatgtttattgtggcactattcccaatag

SEQ ID NO: 4983 - DNA, 201 bp, Homo sapiens
ggggtgagcctttcaacttctgcccattcagtattatgctggctatgggtttgtcatagatggcttttattattttgagctatgttctttctattcctagyttgttgaagatttttaccaaaaagggaggctggattttagaaaatatttttctgcatctattgagatgatcatatggtttttgttagtacttctatgtat

SEQ ID NO: 4984 - DNA, 201 bp, Homo sapiens
tcatcagctccttttcctggcttcagtctccttgggatgagaaggaggagattactggattctgaagttttgtgctgatttgcctcaaatccaggcctgtmtcatccaggttcttagaagtctcaatgagctaagtaaacccaacttagagggagcaaactggacaggtgaggaggcatagcaaaggtattagtaataatt

SEQ ID NO: 4985 - DNA, 201 bp, Homo sapiens
taaccagagggtggcacaaagaccagtgggcaagagaaaggatggcagttgtagagactaggagagggggataggaagagagtaaggatagagacctaggyaagggacagatcatataacactttatatgcctcaagaggcagttgaaaaatgttttgaaagtcaatgaatgggcaccagaaggttttaagcagaataata

SEQ ID NO: 4986 - DNA, 201 bp, Homo sapiens
tgaaaggccacatatctctgtttctccaggattggtccctggtcccttatttagtttgtatggtgaggtcatgttttcctagatggtcttgatacttctgsatgtttgtctgtgtctgggcattaaagagttgggtatttattgtagtcttctcagtctgagcttgtctatgctctatgctcattcttcttgggaaggctt

SEQ ID NO: 4987 - DNA, 201 bp, Homo sapiens
aggaaacagagttagcccagaatccaggtgagttgacagttaagcgcagagagcttcccagctaggatcactacactcacatttccttagggccagttttstggttcagtctctttgacaccaaatgttgtttttccttcaatactgttggtgacaattaagttatgaaatgattaatgtcgattcacaggtggctgatat

SEQ ID NO: 4988 - DNA, 201 bp, Homo sapiens
ccctttgcagtcatggaccattactccgctcttctgttcatgggttcagagtgatccagaggcactggccttctgccctgcatgccttttgtgtggctgayccttcctggcttttaagcaattttctaggtccctccagtacttagaagtttgatccctctcaaaggtctgctcagtgggctggaatcgggtggtgtttgt

SEQ ID NO: 4989 - DNA, 201 bp, Homo sapiens
gagccaatgactcatattcaacaggactttctgtctagttggaggagcacagtcttattatatatataaaaatgtctgaaaaaagctggttgcaatctagwggatcctctggggctgggtctctcttcgagccctccatctggtggcttgctcccacctcatgattcgtgagaacctgagtggctcctaaaacttgaactt

SEQ ID NO: 4990 - DNA, 201 bp, Homo sapiens
aaactgatgtcagagctcttggatcatgttgcttcaactctcccatgcccagatttctctgattcccccactcctaccagtaccaaaaacacacctccccraagttagcagcttcttttgggatctcctttcactttggctatatatggcagcaaagagaataaagaagagggagtaaagaggtggaataattcagtgaca

SEQ ID NO: 4991 - DNA, 201 bp, Homo sapiens
tgattctctcttcaatttaaaaatgttatggacattcttcagcctctttagagaaatctcctgatatctgtaagaatttaatgaatgatctgatttttttyctgcagttgactatacccttagataaattttgcccttttatgaaagagtcatttgttgtaatctttgtacattttttgtatgtctgtgtgttggaggtgg

SEQ ID NO: 4992 - DNA, 201 bp, Homo sapiens
gttctcactcataagtgggagttgaacaaagagaacatatgggcacagggaggggaacatcacacactgaagcctgtcggggggtggggggctaggagagkgatagcattaggggaaatacttaatgtagatgatgggttgatgggtgcagcaaaccaccatggcaggtgtatacctgtgtaacaaacctgcatgttctgc

SEQ ID NO: 4993 - DNA, 201 bp, Homo sapiens
aatcagaagacatcaatttgatatttttaatcaatttttttttgttttgtatttccaaatatgtcccccaaagtgatatgtctatgcagcaccagtcaccyaagttctcagaaaattagacgatgagaaattacaaaactagggagattatgatttattttcttcctcataattattgcagctatgcatttaataatgcac

SEQ ID NO: 4994 - DNA, 201 bp, Homo sapiens
ttcccaggtcctctgaaaacaaacaagaaaaggtgagaaagggcaagatttggtgtgtggtttgagatttggaggggtgtccttgcgagtagtcatgtacyatgcagtcacaaaatctaaccaggggaaaaatttgtcaaggtaaggtcagtatatctggcagagaaggcaaagggcaggaggaggtgggtcagatggttt

SEQ ID NO: 4995 - DNA, 201 bp, Homo sapiens
tgaaaacactcttatgtccccaaaagctagtattttgacaaaaagctatatttaaacatgtatttaaattaccaacccattctcattcctcctgaataacyaacaacactcctttgccttttaaaatacatttgtcttgcatctttctcaaaatgaatgaaaaaattttaagtaattgttacacatttataaaatgtattt

SEQ ID NO: 4996 - DNA, 201 bp, Homo sapiens
atatatttcactatgtcttttaatcatgctccacattgttatgcgtgcagtgtagaatagaaacacctcaaatcaccatagtaacatagacaattcacatytatcacagtggcctaatattcattgacagttcatgtaattacagaaaatcaggtccattataaataaattatctgctatctttttaagttaaatccataa

SEQ ID NO: 4997 - DNA, 201 bp, Homo sapiens
tttgataggccagcttctgaaaggattatgctaaagtcagactatgttttgctttttaattgacagcaattttaaaatatatttcactatgtcttttaatyatgctccacattgttatgcgtgcagtgtagaatagaaacacctcaaatcaccatagtaacatagacaattcacatttatcacagtggcctaatattcatt

SEQ ID NO: 4998 - DNA, 201 bp, Homo sapiens
agcaaagcctacttgtcaggtctattgcctgccatggacttattaaatgtcactattccagtgttgaggctgattccagtcagcatgttactgcactgaartctttcctcatatgtgaatcgaaagttcctattatatagagattcttagtttatagaaagtttttaaagatcaaaagaatttttttatgtgaaaatactt

SEQ ID NO: 4999 - DNA, 201 bp, Homo sapiens
aaaaacaataattcgatgaataaaaataaataaactgaccactatttttgtttagaaaaaaactagtttttcagagtgtaaatatacaaatataaaccacrttaattcgactctctaaatatgtaggttatatgcattgatgttcagaaaacaaatatttgttgaatttaaatacaatttattcaaggttagtaacatcca

SEQ ID NO: 5000 - DNA, 201 bp, Homo sapiens
tctgtgaatgagcctattctagggaaattttccaattctaggtatttatacaccatataagtggaatcatacaatattttctttttgcatctggcgtatgycacctagtgtaatggttcttaaaatgttttttatttttaatttttgtaggtacatagtaagtgtatatatttatggggcatgtgaaatactttgatacag

SEQ ID NO: 5001 - DNA, 201 bp, Homo sapiens
cttccaatgtacaatggcacaccattgaagaattttgattaaggtaattacatgattttgtttctagaaatttagtttgctatgaagaaaatgcattggargagaacaacatgggaaaagggtgagacattttacaagcagatgtttcggtgcatttgtgagataatggtgattcaacttaaggtggtaacaaatgcagag

SEQ ID NO: 5002 - DNA, 201 bp, Homo sapiens
gattagtttacactttactaacaaaaataatctaattttggtgcttaactttaaaaaaacgtgtctctatatcatgctctcgctcctcctatcctctaccrtctgacaggccccagtgtgtgttgttcccccatgtctccataggtgcccatcattcagctcctacctataagtaagaacatgcagtatttgatattctgt

SEQ ID NO: 5003 - DNA, 201 bp, Homo sapiens
tgtgtgtatttaggaaatctaatattgtttgaataaagtggtaaatttattatctcataaattaatggttgagctgaatcacattatagtcctttaacaaktgtgtctgtgatctgagtagcagtcagcacaaagcaagggatcaggtttcctctcccaagtaagataaagaacaggtatgccacctgtgttatgcatttg

SEQ ID NO: 5004 - DNA, 201 bp, Homo sapiens
atttagagttaatttaaaatatacaggaggatgtacataggttatatgccattttatatcgggaacttgagtgtccttggattttggtatccatgggaggyctagaaaccaagcctctctggaccccagggaataactttacatattatatacactattctcctatgctgttctcataatttaaaaatacaaaatatgtat

SEQ ID NO: 5005 - DNA, 201 bp, Homo sapiens
cagctatttacataatatttaccttgtattaggtataagtaatttagagttaatttaaaatatacaggaggatgtacataggttatatgccattttatatygggaacttgagtgtccttggattttggtatccatgggaggcctagaaaccaagcctctctggaccccagggaataactttacatattatatacactattc

SEQ ID NO: 5006 - DNA, 201 bp, Homo sapiens
gacttttttattgtcattattacctatacaatacagtggaacagctatttacataatatttaccttgtattaggtataagtaatttagagttaatttaaartatacaggaggatgtacataggttatatgccattttatatcgggaacttgagtgtccttggattttggtatccatgggaggcctagaaaccaagcctctc

SEQ ID NO: 5007 - DNA, 201 bp, Homo sapiens
ccccatcccatcagaatcctgcattgagttatttaacagataaagttgtctgtgctaatatatgaacaaattagtgggttaacttcccaaagcaataattmttttgcattttacacataatcttgtggttaatccaaatagttatgctaatagtgggaatttctctgccttgtgccagagcagtaggaaggtatctggagg

SEQ ID NO: 5008 - DNA, 201 bp, Homo sapiens
tacagaaattacttggtgaagaacctggtatagtatattcagggagagaatgagtggctccagggtgtctagactgggatgtttctgacttgttctgtagygccctaccttctataaatacacctaagaagcaagatagactaagttacatcacaggcgaatgttatcttaggtacatcctagtgatttatacttgacaat

SEQ ID NO: 5009 - DNA, 201 bp, Homo sapiens
gatgtcacgtctttgcttttgtgaatagctctgtgatatgcatatgagtgcatatgtctttttggtagaatgatttattttcctttgggcatatgtccagyaatgagattgctgggtcgaatggtagttcaactcttagttctttgagaattctgcaaactgcttttcacactgggtgaaataatttatacccccaccaac

SEQ ID NO: 5010 - DNA, 201 bp, Homo sapiens
ccagaaggccagtgaaactgggcccacagtcaaaggaaagatacatgggacaacttacagaaattacttggtgaagaacctggtatagtatattcagggaragaatgagtggctccagggtgtctagactgggatgtttctgacttgttctgtagtgccctaccttctataaatacacctaagaagcaagatagactaagt

SEQ ID NO: 5011 - DNA, 201 bp, Homo sapiens
ctccagtggaccacgtggctagagtagattgtgtggtgagattcagtggcacgtgaggtggaaaatgcagtgaggttgaagtagagtacagaagtggcagkggggtgcccagaaggccagtgaaactgggcccacagtcaaaggaaagatacatgggacaacttacagaaattacttggtgaagaacctggtatagtatat

SEQ ID NO: 5012 - DNA, 201 bp, Homo sapiens
aatggcaggaaaagagcatgccaaggaagtggcatctggacaagcacttgaaagaagattcagagtttcatagcagaagaaaagacagatacgcattttargttgtttgaagtgcttgagcaattttgggagagtggatgtccctggggaagccagcgtgtagctccagtggaccacgtggctagagtagattgtgtggtg

SEQ ID NO: 5013 - DNA, 201 bp, Homo sapiens
cccagctctgctatctgctaacatcactgttcttttccaaatgttaattaaaagaaggaggaagaaagggcagacatggttcacaggggtgagctgtcccygagatatgccactgcatgacaaatgccttcttttttgttctaaagtaactctgggataaagccattgcttggtaattgtgatgattttagtcatggaagc

SEQ ID NO: 5014 - DNA, 201 bp, Homo sapiens
tgtggtagccccaagtatacctgtaggttttgttggtcagcaaatatccacctaggatatctttttatgcagctaccagcagtctccacaagtggttcagytggagaactgtccttttgagggaaagagccaaagccactcccctaaacatggctctttcccagaggctgacaagccacagcttgatgcccttgagccctt

SEQ ID NO: 5015 - DNA, 201 bp, Homo sapiens
cacaatagggctcacactcctatgagaatctgatgcctgtgccgatctgacaggaggcagaactcaggcagtaatgcttgtgctgctcacctcctgctacrcagcccagttcctaacaggccacaaaccggtaccagtctatggcctgggggctgggaacccctgccctagaggatctgttgtctacccttatagtatatg

SEQ ID NO: 5016 - DNA, 201 bp, Homo sapiens
ttagcacaaacataaaagagtgttctgcagtttaagttgtattgcagggaagaatctgatgtacaatctttacagtggacttcagtagagaaggagaaaawgaaagaatgttgaaggaacatgtatcttttgtagccgaggggcagtgcagaaggagccaaagaagaaatgggatcctgctgtggccagtcaccatactga

SEQ ID NO: 5017 - DNA, 201 bp, Homo sapiens
ggagatgctataaactagagaaactataaaattagttggaatattaaagtcctctttttaattttttgagtggcagtgtctttctctgtcacccaggctgraatacagtggtgcaattatagctcattgtcacctagaattcctgggctcaagtgatcttgcagcctcggcctgccaagtagctggggctacaggtgcacc

SEQ ID NO: 5018 - DNA, 201 bp, Homo sapiens
ctcggcagatgccaccatgggtgtcaaagtgacttgcacccatgaagcagggaggacctagagaataggaattacccactctcacctatgccactatctcygctactgtcagtagccttggagttccttagtcctcatttatgctatggatattaacatggcctttattcatgaaagcttggggttggtttaatcggtaga

SEQ ID NO: 5019 - DNA, 201 bp, Homo sapiens
ggaatttttccttaaatgtggaccttctgaccgcagtgccctttccactctatcataaccttctcttattacagcaaaccgaactaagcaaaacaataaartgcaattggtagatattggttcacacggcaatgattacttaatttttttaaagtattgatcagaaaggaggtagaaaaagaggagactttatcacaagta

SEQ ID NO: 5020 - DNA, 201 bp, Homo sapiens
attccacccatgtatcactttccattaaatctttgacccatatataacctttagctgcaggcttgtttgcttacatcactgtgatcaaatggttagaattrtagattttcatttgggaaaatgattattattttttattaaggacattattgctggtttgaattatccttttgttcatggttcatgcacaacaaagctttc

SEQ ID NO: 5021 - DNA, 201 bp, Homo sapiens
tattctctcagcatttgtttgttgaaaaatattgtatctttcctttatttattaagcttagtttcactggatacaaaattattggctgataattgttttgkttaagtaggctgaagatagggccccaatctcttctagtgtggagggtttctgctgagaaaactgctgttaatctgataggttttcctttacaggttacat

SEQ ID NO: 5022 - DNA, 201 bp, Homo sapiens
acccctgtgacataccctttacctgtataacaaacctggaccaggtgcagtggctcacacctataatcctagcactttgggaggcccagacaggctgattrcttgagtccgggagtttgagaccagcccgggcaacatgacaaaaccccatctctacaaaataaataataaaataataaaataaaataaaataaaataaaa

SEQ ID NO: 5023 - DNA, 201 bp, Homo sapiens
ccccacactgctggaaataaatttaataaatggttgttaagcatctgctttgggtaaggcactatgccaggggatgggaggatacatccttacctcttacratttgtgacctcatatgtactatgtggtcagtagatgcacttccatgcaaaataaaatagatgccctaaagagagatgcaagcaaagtgttaaagttact

SEQ ID NO: 5024 - DNA, 201 bp, Homo sapiens
ggtttgggatgcatatttggatttttcttttggccctgagttgagactagggacaaaatgtagggaagctgtctgaagcctgcagactgtggtttggtttyccaggctcattgctgtggagattgtgcattagagtgctattttcatatattgtgactatatatatatatataaaaatctggcctttgtgtatttgtatgt

SEQ ID NO: 5025 - DNA, 201 bp, Homo sapiens
gcagactttttctttgttttgggttcagaacagtagatggtcagtttaaaagattttattgaatagtcacagaccattgcactggggacaaagagagcacrtaaatataggcaagagaaacttttaaaaagtaaagtattcccattgctaacagagctcttgaagaatatgattcaaaatgaaatataagctgatgttaac

SEQ ID NO: 5026 - DNA, 201 bp, Homo sapiens
catgcttactccatgtcacatactatttttttctttattttgattaatagtatttgtgtctttcttaccaaataaaggtaagcttcttgaagtcactgacrcttactcatagtgagtttctttttattggactaaaagtatgtgttattctagagcttaagccaacctaaatttatcccacagatttgcagactttttctt

SEQ ID NO: 5027 - DNA, 201 bp, Homo sapiens
gtacagggagaataaaatattctaaaattagattacatttatggttgcaaagctctgtgaatatactaaaaacttctgaattgtgtactttaagtggatayatgaattctgtatcaataattttatttaaaaatgtcttaatgcacaactctcttccattacattaaaagtaattcagtttaccaacacaagattaggatc

SEQ ID NO: 5028 - DNA, 201 bp, Homo sapiens
agaaacaaatttaccaattatagtttttgtgtacaactgattttgtctttaaccttacagtagctagtcaaaacaccattttatttacttacttatttatktatttatttattgagacagaatctcactctgtcaaccagactggagtgcagtggcacaatttcagttcacctcaacctctgcctctcaggttagcacaat

SEQ ID NO: 5029 - DNA, 201 bp, Homo sapiens
cacaggcatgcttcaccatgcccagccatttttttgtattttggtagagacgggtcttgccatgttgcccaggctggtctcaaattcctatgctcaaacartccaccctcctcaccctcccaacatgctgggattataggcttgagccactgcacctggcctgcttccaacattattactaacaatgatagttaacattta

SEQ ID NO: 5030 - DNA, 201 bp, Homo sapiens
tttggcaaataggttctacttccatatataaggagtagctaagatagtactgcttgattggagagctcttattttattccctgagtaatgtacatctatcratttatatataaagtcatttctcatgtgaattaataataatagtaataataatgtacatatttacagctcttttaggacttcaaaatttattcatattta

SEQ ID NO: 5031 - DNA, 201 bp, Homo sapiens
atgcagtaatatgttttattacatgtgaatgaaccttgcttatttgcttaaggtagctttttccagatttctccattatgaagttatgattttttcattgrtaattgataaatatttatttggaggagatttttgtaactgtacaaataggtgtttcttcttaaaacatatccactaaatttgtcatccataactggatct

SEQ ID NO: 5032 - DNA, 201 bp, Homo sapiens
ttccacaaataaagtttggactgattgattcacagttagcactgaaggacaaattttggaatcacaacatagatccaagataccatctaatgtaagattcrccatcgactttagaagcatatttctgcaaaagacgaaactctacattaaatgtacatgatttccttttaaccaaacccactttttcatacatttattcaa

SEQ ID NO: 5033 - DNA, 201 bp, Homo sapiens
attatattttgtgacaatgtggctctctaatgagctctcttgagaggctttcttgacttggatatagaaacagctaacacattaggaattatgtataactyagggtatattcatggtaatgtgttatacaaattacattatttcatcttaggtactgttattgtaaaaaagattgggaactgctgttgtagaagataagga

SEQ ID NO: 5034 - DNA, 201 bp, Homo sapiens
aaattatacatatacatatatatatgtaactaaaataagtatacacataaacatcttggataagatataaatgtttttcttagtgtgggtaccctgtcaaraaagtttaaaaaccaaaatcatgagactgtcacataaacctttatagaatttaccagattaaactcctgaacacacttgtaatctcacagatatttgccc

SEQ ID NO: 5035 - DNA, 201 bp, Homo sapiens
aaatacgatatattttaatattaaacttcattccacaaataaagtttggactgattgattcacagttagcactgaaggacaaattttggaatcacaacatwgatccaagataccatctaatgtaagattcaccatcgactttagaagcatatttctgcaaaagacgaaactctacattaaatgtacatgatttccttttaa

SEQ ID NO: 5036 - DNA, 201 bp, Homo sapiens
aagcttctgtaagtgcatgacccttgagcctcatcttgaaggaattatatagagaggggtaaggaggaaagagaatgggaaattagagaaaatagcctgarcaaagacagaatggtgagacagagcataatgaatttagggaccggaattttaggtataggtggcattgtgttgaaagagatcagagattagtgagagtga

SEQ ID NO: 5037 - DNA, 201 bp, Homo sapiens
aaacccaaccaaattataatgaaagagggaatatttatgagtaaagtatgaggccgctgttgacatgaggcatttatgattcaaactttatgtttaaattygaaaatacgatatattttaatattaaacttcattccacaaataaagtttggactgattgattcacagttagcactgaaggacaaattttggaatcacaac

SEQ ID NO: 5038 - DNA, 201 bp, Homo sapiens
ccactcatcatttcacatattgcaattacttatggggatcgaggacacaccccactgtgctatttagtgccctcatgccttagcttgtgctattttcctcycctggaaagcctttcatgccccccaccccctttttttttgttgttgttgttgctgcctatgtatgatttgtctattaagaccttgattgcactcatttcc

SEQ ID NO: 5039 - DNA, 201 bp, Homo sapiens
tcttaaagcataaaagccaagggatgatgtgagttctcacactttgtctacattcctttcaaaaacccaaccaaattataatgaaagagggaatatttatsagtaaagtatgaggccgctgttgacatgaggcatttatgattcaaactttatgtttaaatttgaaaatacgatatattttaatattaaacttcattccac

SEQ ID NO: 5040 - DNA, 201 bp, Homo sapiens
ggttgggagtaactggtctcagagttcaaaggcccaagaaccagaaactctgatgtcttggctctggtgggggacggggaggaatttgttcttcctttgcstcttggttctatttgggccctcactggattggatgctgtccacctaagttggtgaagacagatcttctttattctgtctactgctttgcatgctcatctc

SEQ ID NO: 5041 - DNA, 201 bp, Homo sapiens
cattctcttattatgaataaagcacagatatgcattcagtacataaagaggtatacagtgcatgtatgctgtttaaatttcacctgtgggggggagattargaaaataatgtctaaaaaggcttttttgtgaggaacaatgtgagaaatcaattgagaaacactcaagtgatttaactacatcaccccaatttctcctaca

SEQ ID NO: 5042 - DNA, 201 bp, Homo sapiens
atcatacaaatattgcttaaattagaataaaatatataaagtagaccagtgttccttgaatagatggcataaaattcaacagtaaatagttgtgttaagcmgaataagggcctcccaaagatgtgaacattctaatcaccagaacctgtgaatataatatattaaatgtcaaaaaggaattaaagtaatagatggaatcaa

SEQ ID NO: 5043 - DNA, 201 bp, Homo sapiens
gagttcattatgtcccctttcatcactcctgaacctaacggcattttttgcacttagttgatgttttttgttactgtcacctttcctctgatgcacttagrtagtacaagtagagccaccctcctattttgcatgcttgcagacatcactgaccatttatccatttatgtattcatccatatgtataccacagagcaccca

SEQ ID NO: 5044 - DNA, 201 bp, Homo sapiens
tgtccatgcaatggaatgctattcagcaatgaaaataagtgaattacagataaccataacaatggagatacttctcacaagcaaactcaaaagtggcctakcagataaagttcaagtggagagaaagtgatttcttttatgtaaagttagaaaaataacaggcaaaaactaaactaaaaggtttaggaatacactgttagg

SEQ ID NO: 5045 - DNA, 201 bp, Homo sapiens
caaggggatgccatgaggtggcctgtacaggtaggacataaatctacttataactttttgtaacatggcagtggaaatgacccctcactgcaggaatggcwgacatagaaggttgggatagaggacactcacattttttgagatgttaccatgtgcactggaaataaaatgatgaatgaaaataaacatgatccctgccct

SEQ ID NO: 5046 - DNA, 201 bp, Homo sapiens
ctctgagccaggtgtgggatataatctcctggtgtgccgtttgctaagaccgttggaaaagcgcagtattaaggtgggagtgacctgattttccaggtgcygtctgtcacccattcccttggctaggaaagggaattccctgaccccttgcactttccgggtgaggcgatgcctcgccctgctttggctcacactcggtgg

SEQ ID NO: 5047 - DNA, 201 bp, Homo sapiens
ctgaagcttgtgcattcatcacgtatttctcgtgccatagttttcagctccatcaggtcatttaaggacttctctacactggttattctagttagccattygtctaatcttttttcaaggtttttaacttctttgcattgggttcgaacttcctcctttagctcagagaagtttgatcatctgaagccttctctcagcttg

SEQ ID NO: 5048 - DNA, 201 bp, Homo sapiens
gaaaatggttatctattatgaccttttctgagtgtggttccctggaccctggtcatggttgtcactgcagacaatatccagttatttgtcttgataatcarctgttaaactgaaataattcactgtgttgccagttgttctttccccactgtgggaattagaaagcatttggaaattggttatatcatataatacttgcac

SEQ ID NO: 5049 - DNA, 201 bp, Homo sapiens
tcacagagaataattcttccttttgggaaaatggttatctattatgaccttttctgagtgtggttccctggaccctggtcatggttgtcactgcagacaayatccagttatttgtcttgataatcagctgttaaactgaaataattcactgtgttgccagttgttctttccccactgtgggaattagaaagcatttggaaa

SEQ ID NO: 5050 - DNA, 201 bp, Homo sapiens
gtactaatcagacaagccatgttttatttctctttccctcaccagaaaaacattttaaacttgtaatgtggtcactcaatgggttcttcctgttcactgcrtagacaaaattaatcaattgagatggtgctattgcagtatagagtttaactgacatgagttcagcccatgtgggagaactggagctatcactcaacctcc

SEQ ID NO: 5051 - DNA, 201 bp, Homo sapiens
ttgaacctgggagatggaggctgcagcgagctgagattatgcgcactgcactccagcctgggtgacagagtgagactctgtttcaaaaaaaaaaaaaaaawtgagaggtctgtgaaaagggacaatagagaggggacttgtgcaaacactaaatcactcatctttttctgtgagtagccaatagatactatctaaaattgg

SEQ ID NO: 5052 - DNA, 201 bp, Homo sapiens
gtgttgaagtcttttgaatactaatgatcatgaagttgaagtactacttagtactaatcagacaagccatgttttatttctctttccctcaccagaaaaamattttaaacttgtaatgtggtcactcaatgggttcttcctgttcactgcatagacaaaattaatcaattgagatggtgctattgcagtatagagtttaac

SEQ ID NO: 5053 - DNA, 201 bp, Homo sapiens
tgtataatttttgcacataaaggtgaatgcattatttttacattgtgttttgcatggtgtaaacaagaaaatgtatactaagggggcataagtgcagccaraggaatggaagatgatgagtgtttgcgttcattgcacatctattgtgtaccagtcatatacactgtcatctcatgcaacacttgtaacagtttaggaagg

SEQ ID NO: 5054 - DNA, 201 bp, Homo sapiens
ttccctggtaaaatatagggtaagttcatcagctgaggcaaaaggcaaatggaaactgagatttagtaggaggtagaagaggggcactatttgttgagccsagtgagagagagccagatggctaagaaatctagtgagattcccaggcagtgttgaagtcttttgaatactaatgatcatgaagttgaagtactacttagt

SEQ ID NO: 5055 - DNA, 201 bp, Homo sapiens
agggagggggtgagtaaaagaccttgaaaattcagttgtggaataaaagtaggggctatggtgtatgacttctattttccctggtaaaatatagggtaagwtcatcagctgaggcaaaaggcaaatggaaactgagatttagtaggaggtagaagaggggcactatttgttgagccgagtgagagagagccagatggctaa

SEQ ID NO: 5056 - DNA, 201 bp, Homo sapiens
atgaagaaaatgcattggaagagaacaacatgggaaaagggtgagacattttacaagcagatgtttcggtgcatttgtgagataatggtgattcaacttarggtggtaacaaatgcagagagaaatgagtggacaaatttgaagtgtattttgaggcaaaactgaccacttggaaaatgtataaagagagagctttcaatg

SEQ ID NO: 5057 - DNA, 201 bp, Homo sapiens
tttatttgattttgctcaccattttctcttcagcactcagcataatattgagtctgtaataggttctttaaaaaatatttgtttaatgactgaatatattygaatgaattgcgtaggaggatgtgatttgatttatccaagtaattgtctcaatttcacctgccatttagaccatatctgagcagacccccaactgaaagt

SEQ ID NO: 5058 - DNA, 201 bp, Homo sapiens
tttggttttgaatctcagctaatgaatctgtcctgttagacagttctattgttcttacccttctctttagagctgtgacagacactgcacaaagaaaactrctacagaccacagaggaatcatgggtgttgtgattgaaaataattaattcaaacattgaacagatatttttgaacagcaactctgtgtacctggcactac

SEQ ID NO: 5059 - DNA, 201 bp, Homo sapiens
ttattattcaagacaatacataaaatgacaagcctgggaaacataacaagaccctatctctacaataataaaaataaaaaaattagccgggcatggtgtcrtgcacctatagtccaagctgttcaggaggctgagacagcagggattgtttgagcccaggagttcaaggttatagtgagctaggatcatgccactgcccta

SEQ ID NO: 5060 - DNA, 201 bp, Homo sapiens
tcatccctgatccaaaagcataaatgcatccagtcatctgagaaattagccagatttgccttttggttttgaatctcagctaatgaatctgtcctgttagwcagttctattgttcttacccttctctttagagctgtgacagacactgcacaaagaaaactactacagaccacagaggaatcatgggtgttgtgattgaaa

SEQ ID NO: 5061 - DNA, 201 bp, Homo sapiens
tttcagtgaaggagccagctgagattttgactgggattgtgttgaatatgtatgcagatcaatgtgggaaatattgctatcttagcaatagtaaatcatckgattcataaacacaggatttcttttcaactatttatactttttttttcactttttttcaatgatgttttgtagtttttcctggataagtcatgtgcttct

SEQ ID NO: 5062 - DNA, 201 bp, Homo sapiens
tcatgatcggcctttcaaaaccagtcattcccttgtacgccccttttcagtgaaggataccactacctattcacatggcattttagtctttcttcattcaktcaaaaatagttattgatgcctattaggtcttagtcatgatgttaggatctggaacacagtggtggaaaatcagacctgacttctactcttcttaggaaa

SEQ ID NO: 5063 - DNA, 201 bp, Homo sapiens
agtccaggctgtgtatttgagttttttcctctcttttttttctccctcaattagacttgccaggtatctgtaatttcaactggctattccatagaaactgktcttggattttctttttaattaattcaccattattctgtttctaagtcttttattattaattattccctctacttcttatagtattatgtatcatttgtg

SEQ ID NO: 5064 - DNA, 201 bp, Homo sapiens
tttgtatttataattacatctgtatgtcagagtccaggctgtgtatttgagttttttcctctcttttttttctccctcaattagacttgccaggtatctgkaatttcaactggctattccatagaaactgttcttggattttctttttaattaattcaccattattctgtttctaagtcttttattattaattattccctc

SEQ ID NO: 5065 - DNA, 201 bp, Homo sapiens
tattatctcaagattgtacatacattaaaaatattattagcaccttttttgtgcaaatgctagcttaagtaaaataatatggagccaaagtataaggcatwtttaaggtacatattaggcatggttcctgacttaaagaatagttaaaactaatagaggagttcattataatataggagcataatgaaattatcatacaaa

SEQ ID NO: 5066 - DNA, 201 bp, Homo sapiens
aattcatttatgacagttgttaaatttatgaaaaaatagcttgattaggaaaggtttcacggtctagattgtatcagatggataaaatgttaacaggcacwgaagtgtgagtcattccaggtataggaaataacatgacaatctccctcctaaataaatctctgtggtagaaagacatagtaacatttaatgagtagcaca

SEQ ID NO: 5067 - DNA, 201 bp, Homo sapiens
gaaaaagccaacactttaaagtacttttgtaattgggaacaagaaaagctgtaattttcttaaaaataaattcatgatagtttaagacttaattcaaatayggaaaccatataggtgacgagttctcttcctttggttgaaaatcctatggggcaatctatctaaaataattatttcccttagacttgaaaccttcaaaag

SEQ ID NO: 5068 - DNA, 201 bp, Homo sapiens
gtggagataaaatgtttgtttagtgacttacatagctacttttcaatgtatggcaatcataacatcaacctcagccacaatggtattgatgattatgattrtaatgataaaacttgcatatgtaatgggcttagcaagtttgtgcagcaaggagattggcatgatggcccatggtatcctgcaatgctaggattatattta

SEQ ID NO: 5069 - DNA, 201 bp, Homo sapiens
gaggctcccaaacacagctgcaattttagccccagagccagctgtcctgactttggaagtcctagccccaatgaacttggctgctatgccaatatcccttraagtggtgctggtttggaagctgtgactagggttaagtgaggtcgggggatgtggggctgccaaactgctgaagctctcatctgttagtgtctctggttg

SEQ ID NO: 5070 - DNA, 201 bp, Homo sapiens
taaaaaggactaggaccccagtgagcattttgtctacctttgcggtagacatggcagataccaggtatatattaaaactattgaataaggaggaccattgraaataacatgtgaagaattcacataatgctttttgaaaccagacttacagtatcttatattatctgtggctgtaactactcatgttcactttttccttta

SEQ ID NO: 5071 - DNA, 201 bp, Homo sapiens
gtatcctggaacccaaatcagtttaaatttagtaaaaaaaaaaaaaaaaaaaaaaaaaaaaacctatttgtcagcttgatagcgctcactctttagtgtgygatgtggttcttggcatggttctcatggatttaaaagtcactgcactatgcagtaacaatatatctgtgtcacattgggaaaagcacaatgtaaagcatg

SEQ ID NO: 5072 - DNA, 201 bp, Homo sapiens
atttagtaaaaaaaaaaaaaaaaaaaaaaaaaaaaacctatttgtcagcttgatagcgctcactctttagtgtgtgatgtggttcttggcatggttctcayggatttaaaagtcactgcactatgcagtaacaatatatctgtgtcacattgggaaaagcacaatgtaaagcatgacagtcttattcctggttatcaatag

SEQ ID NO: 5073 - DNA, 201 bp, Homo sapiens
actctttagtgtgtgatgtggttcttggcatggttctcatggatttaaaagtcactgcactatgcagtaacaatatatctgtgtcacattgggaaaagcamaatgtaaagcatgacagtcttattcctggttatcaataggcagagaagctcctgtgaaattcagaatgacttctaaatctgggcctagatgcataaatgt

SEQ ID NO: 5074 - DNA, 201 bp, Homo sapiens
aacaaaatattgttttggagaagacaaggtcacaaagctggcattttaatatttcattccattttaaaagtgaaaaaaattagagcttcaacattgtgctyatttaattaaaataacccaacagaatatgtcacatgaaatgtatcagttacatggtaatgaaattatagcaatggtacaccagagctgtacattttctgg

SEQ ID NO: 5075 - DNA, 201 bp, Homo sapiens
ctaaaatatatatactttgctctactatttcttctcacatatacaacttattttttgtttgtttgttttgagccacacttttacatcatcccattgtgaayactggcattctatcctgtgagaataataaaattttctttttctttgttcctgggttgactctaataggagaaaacaaacatttacattatgatgactgtg

SEQ ID NO: 5076 - DNA, 201 bp, Homo sapiens
caagctacttgagaggctgaggaaggagaatcacttgaacccgggaggcggacgttgcaatgagccgagataatgccactgaattctagtctcagtgatakagtgagactctgtctcaaaaaaaaaaaattaaaaaataaataaaatgaaataaaggtaagaatttgtttacttttgctgtcttttataccctcttccctc

SEQ ID NO: 5077 - DNA, 201 bp, Homo sapiens
gaagccagaaatgtgcatttcttctccagggtaggtgggtgatggtaacagtgtcatttaaaatggtgttttaagttttacttcttaatttcttttgaagwttttattttagaagattgctttaagtcaaaagcaagaatatctgatttcacttctccagacctttggacctccttagagaggcaacctttttgaattgtt

SEQ ID NO: 5078 - DNA, 201 bp, Homo sapiens
atagtatatggttgctcaaagttaactgagggaaaaggaatcaccagagaattcgagccagttctgagacagagcttggaattcaatagggctgacagaaractgtgagtcatgttatactacccttgcctaatagagtcagtattcatcagggaacctcttcacaggaagtgctgagtccacaccttaacagtcaggtcg

SEQ ID NO: 5079 - DNA, 201 bp, Homo sapiens
gcagtcagaacacacaacatttatcagttatctgtgttgacttatataggtgtagttctgttgcactccaaaacaattacaatagtaacaaaacagatcayggaccacagatcaccaaaacagatataataataatgaaaaagcttgaaatataagaattaccaaaatgtgacacagagacatgaagtgggtacatgctgt

SEQ ID NO: 5080 - DNA, 201 bp, Homo sapiens
cttgaagccaggcattgacttctttctagcaatggaagtcttagatggccccttcttccaatagaaggctgtttcttctccatttaaaatctattgattgytgtagacaccttcattcattatcttatctagattgcctggataacttgctttagctcccatatgagtacttgctacatcaccttgcccttttatgttata

SEQ ID NO: 5081 - DNA, 201 bp, Homo sapiens
aattttctcctattctgtaggttgcctgttcactctgatggtagtttcttttgctgtgcagaagccctttagtttaattagatcccatttgtcaattttgkcttttgttgccattgcttttggtgttttagacatgaagtccttgcccatgcctatgtcctgaatggtattgcctaggttttcttctagggtttttatggt

SEQ ID NO: 5082 - DNA, 201 bp, Homo sapiens
tgtttcctgactttttaatgattgcctttctaactggtgtgagatggtatctcattgtggttttgatttgcatttctctgatgaccagtgatgatgagcaytttttcctgtgtctgtgggctgcataaatgtgttcttttgagatgtatctgttcatatccttcacccagtttttgatgggcttggtttttttttgtaaat

SEQ ID NO: 5083 - DNA, 201 bp, Homo sapiens
tgcctgtgtaagtgagaacataatggtatttgtctttctgtgcctgacttattttacatagcattatgtcccctgagttcatccgcgttgttgcaagtgaygagttttctttttttaatgtttgaataatattccattgtatatatgtacctcaatttctttacttattcttctgtccatggacacttaggttgttttcat

SEQ ID NO: 5084 - DNA, 201 bp, Homo sapiens
tatcacatttattaatttacatatgttgaaccatccttgtatccctaagatgaatcccatttgataatgctgaagatctttttcacgtgcctttgaattckgtttgccaatattttgttgaagatgttttacatcagtgttcatcagggatattggcttgaggtttttctttttttttgtagtgtttttatctggctttgg

SEQ ID NO: 5085 - DNA, 201 bp, Homo sapiens
gttttcccttttacatttaggtctatatgattcattttgagtttgtttgtttaaagagaataaggtctgtgcctagatttatttatattttttttgcatgsggttgtccagttgttccagcactatttgttgaacccatccttttttttcacttagagatttgaggatgaaacttttgcccatactcaattgttcaaatgt

SEQ ID NO: 5086 - DNA, 201 bp, Homo sapiens
gtttagctggcatccaaggtgcaagacaaagtctctttgctcttctgtctcctctcctcaagtagaaggaaggagtccttttattgctgcaagctttcctkcctgtggttgtgggaggagttgcacaagcactcccctagctggcccatctggtgtctttctaggccatgtgccaccccaatccactggctctaagtccag

SEQ ID NO: 5087 - DNA, 201 bp, Homo sapiens
gcaatttataataaaaattagtggtagatatgtatactgccatacgaattaatagtcaaaaatgatacatgtatttcatatgtaactgtaattggcatttyttttacatagtcaaaccatgttttcactttttcttcattaattctgaggtacatattaaaagcatccaagttggcagttttttcctgacactatatatag

SEQ ID NO: 5088 - DNA, 201 bp, Homo sapiens
gctggggccattgtaaacaaggggctattaaggtagacagctggacagggaacaactactgagaaggttgttgcctatgcatagaggggataaagagaagrggctaagagtatttctatttgagcaccaatatatattgaagagggtgcaagaggcagagagcttcagaggtcactgaactcagccccttctattttgcaa

SEQ ID NO: 5089 - DNA, 201 bp, Homo sapiens
gatcttttccgtgaagccactgcctatattgcatttcatctgggctcccattacacttctaggaaacctttctttgataaattttacagtagaatctcatrgttaaaagcacaggatttgaagccagactgtctggttcaaattctggttacaccacttagtgaatgacattaagcaaattattcagcttttctgtaactt

SEQ ID NO: 5090 - DNA, 201 bp, Homo sapiens
ttttagagagagaaaaaaaagtgtttattcaatgtttattcagttttcctgcctaaatttaaatgcttcttaattcaattaaattgtgtcaaactgagtaktattaagcacttactatatgtctgtctgctctagaggatgcaaatatatttatgcctaggtgatataaaatctattttaggtgaaaggacttatgcatgt

SEQ ID NO: 5091 - DNA, 201 bp, Homo sapiens
tctcaaataagcaatcaaaaatagtctttaaatcatctcctttattcctcaagttcactgctgccaaattttgcttctaaacactcctctatccctctctkctacttctctaatgtggctttagctcggggacttccatgtctggtttggtcaattgtagttttctttctgtagtattgtagcattgggcactactctctg

SEQ ID NO: 5092 - DNA, 201 bp, Homo sapiens
aattacataatttcttaatgggccttttaacttttataacagatgttcttttacaactggtcttttatcatcattaataatctgcctgtagtttttcagtygtatagtataaattagtttattgaaattatattaaacatttaatatggtgaaaaaatatattatgataatgtttgttctggctacaaactaaatttaatg

SEQ ID NO: 5093 - DNA, 201 bp, Homo sapiens
cccacgaggcttgtgatgggcacaagtgctttccttcaggctcctgggcctctactcatatgctgccggagagatagtatgaaaacagaacatgtacaaarcatccgttcttgggatctgctgtgtctgagagcacctgctctgtggtgaggcaggagtagagccagcagcaggccacttaagcagagtgtggcacatagt

SEQ ID NO: 5094 - DNA, 201 bp, Homo sapiens
tatatctgtgtcacattgggaaaagcacaatgtaaagcatgacagtcttattcctggttatcaataggcagagaagctcctgtgaaattcagaatgacttytaaatctgggcctagatgcataaatgtatttattcatagcaggttcacaaattcccttcttcctctaccattctctccagagcaactccaagaaactgac

SEQ ID NO: 5095 - DNA, 201 bp, Homo sapiens
ggcagagaagctcctgtgaaattcagaatgacttctaaatctgggcctagatgcataaatgtatttattcatagcaggttcacaaattcccttcttcctctaccattctctccagagcaactccaagaaactgacttaattatttaaaatagttgcttcataattcagaaaaattcagggagaaactttaaaaaatacttc

SEQ ID NO: 5096 - DNA, 201 bp, Homo sapiens
tcaataccataaaattctctaaacaatagatctatagtggtatttttgaggattgctgtatggaagagcagaaatttcctaaagctggcccacagactcakctggttgcaccagaatctcttggcgagttgttgaaatgacagatccttcatgtcccaagtagggagattctgacccagcaagtctggggtggtgctgaga

SEQ ID NO: 5097 - DNA, 201 bp, Homo sapiens
aaagtcaaaaaaagcaggtgctggtgaggttatggagaaaatgggaatgtttatacactgctggtgcaaaagtaaattagtttagccattgtggaaatcartttggagatttctcaaagaacttaaaacaggattaccattcaccccagcaatcccattactggcgtatatacccaaaggaatatagttttggtttttggg

SEQ ID NO: 5098 - DNA, 201 bp, Homo sapiens
aaataattaagattccatgtcccttttacatagttttttccaatgataacattttgcaaaattattgtacagtatcgcaactaggatattgacatttatayaatctatcaatcttattcagatctccctagttttacttgtattcctctgtgtgtgtgagtgcatatgcttatactatgtatttagctctctgctattttg

SEQ ID NO: 5099 - DNA, 201 bp, Homo sapiens
aggtttcacatctgccaatacaatattttctgtctgtgttcgattgaaaaaaaccaatgtagaagtagacccatacactccaaacccatgttgtccaaggrtcaactgtatttccagatatcaacggatttctaatttattaaagcaaccatatactcataactacaataattgcataattatacaggtacagattaaata

SEQ ID NO: 5100 - DNA, 201 bp, Homo sapiens
accaacccaaatgtccaacaacgatagactggattaagaaaatatggcgcatatacaccacggaatactatgcagccataaaaaatgatgagttcatgtcrtttgtagggacatggatgaaattggaaatcatcattctcagtaaactatcgcaagtacaaaaaaccaaacaccgcatattctcactcataggtgggaatt

SEQ ID NO: 5101 - DNA, 201 bp, Homo sapiens
aagacacatgcacacgtatgtttattgcggcattattcaccatagcaaagacttggaaccaacccaaatgtccaacaacgatagactggattaagaaaatrtggcgcatatacaccacggaatactatgcagccataaaaaatgatgagttcatgtcgtttgtagggacatggatgaaattggaaatcatcattctcagta

SEQ ID NO: 5102 - DNA, 201 bp, Homo sapiens
ttatagttaaccattagtaaagataaagagaaatattaataaagatatcaaatatgcattatgaactaaaatgaatgtacaaagcaaaacattaacaaaawaagatgaatctatccaaataggagatgttaacaccttacctcagaaattaataaattagatgaaaatatttagaaaaaatatagaagacttcaataactc

SEQ ID NO: 5103 - DNA, 201 bp, Homo sapiens
cccagccatcccattactgggtatatacccaaatgactataaatcatgctgctataaagacacatgcacacgtatgtttattgcggcattattcaccatarcaaagacttggaaccaacccaaatgtccaacaacgatagactggattaagaaaatatggcgcatatacaccacggaatactatgcagccataaaaaatga

SEQ ID NO: 5104 - DNA, 201 bp, Homo sapiens
cattccagttccttagagcacatacatcatccctggttccctggtgtaaaaagttgaagtattttgctccagttgatctagaatgtggtcttcttataaastgttaacagataaacccaatgccacaggattcatcttggaccaggttgcagtattgagtggactgtggacatagataacaggtgatacatgtgcctcaca

SEQ ID NO: 5105 - DNA, 201 bp, Homo sapiens
tatttgtctgttgttggtgtataagaatgcttgtgatttttgtacattgattttgtatcctgagactttgctgaagttgcttatcagcttaaggagatttkgggctgagacaatggggttttctagatatacaatcatgtcgtctgcaaacagtgacaatttgacttcctcttttcctaattgaataccctttatttcctt

SEQ ID NO: 5106 - DNA, 201 bp, Homo sapiens
accctcagaggcctatctaagggttcctagtagaaggggccatgtgagaggctctggttacaggagtgtttggagtttgatgcttgaaagtaagaacagayacaccacgttattagaaaacatgtatcaaaatgaaacaaggggaggggtaaggatagctcaaaaatcccaaggccttttaccagtttgcatagggagagg

SEQ ID NO: 5107 - DNA, 201 bp, Homo sapiens
ctatattctgttagaactttaaatgccactctatttgtctgttgttggtgtataagaatgcttgtgatttttgtacattgattttgtatcctgagactttsctgaagttgcttatcagcttaaggagattttgggctgagacaatggggttttctagatatacaatcatgtcgtctgcaaacagtgacaatttgacttcct

SEQ ID NO: 5108 - DNA, 201 bp, Homo sapiens
ttttaatcagaattgcacatcacaataacctgggaagcaagcccacacttatatctccagctaccttatttcatcagttccagtatgtacttttttccccrtattttctcatttttgaaatctggatgtgctttacattagtttgatcaaacttttttaagataaattttattgtgcatatgtgaggcttacaacgtgatg

SEQ ID NO: 5109 - DNA, 201 bp, Homo sapiens
gcaaagaaggctgttggaagtagggaggtgtagtctccagtgggatagccatttgcctaaataaaattcagggaattctataactaaaagggagagtgaasagcggatagtggggggagtcagatagtctgtaacacaatcctattgacgggttataaaatgaggttaaaacatgactggagtcgtggcaagcccttaaat

SEQ ID NO: 5110 - DNA, 201 bp, Homo sapiens
tgaaacagtggaagaaagcataagtttgagaacaaatgatgcagatataaatgctaaaaagtttcagagatcaatataatctggagtggttgggaaaaaawaatccacaaacacagtgagaccttggagaaccttaaaggccaggctgaagatcatattttattctacagataatgggaaacttttaggaaatatgttagc

SEQ ID NO: 5111 - DNA, 201 bp, Homo sapiens
caggtttttaaatactgcattctgaatggccccatgggaaaggtgtttaattgacatatacaagtttaggtattctatttgataacacaagggactatgcyaacagattcaatctaacataaaaaattaaccctgtgcatttcaagcgttccttgaaataataatacctgattagcctatccatttctaatgtttggtttg

SEQ ID NO: 5112 - DNA, 201 bp, Homo sapiens
tgcagctggagtggcttaatgctttgagccctaaagttataatttaagaagtatcctacctgacagatgtctaggacccatatcccacttcatgctcactyatgcaaggatttttcatccaacactgttctacactgtctcccagtggggaagtacaggtgaactgaaattacaaatgaaattacagaaggccagaacata

SEQ ID NO: 5113 - DNA, 201 bp, Homo sapiens
accacttataaaaacttctttagagacttcttgtcagtgggtggattgctgtctaggagtacaggagatattttgaatttctaatgtctagtttattttayattcatacaatgaagtaggctattgcagctggagtggcttaatgctttgagccctaaagttataatttaagaagtatcctacctgacagatgtctaggac

SEQ ID NO: 5114 - DNA, 201 bp, Homo sapiens
tgtgcccctcccccagcctcgctgctgccttgcagttggatctcagtctgctgtgctagcaatgagtgaggctccgtgggcatgggaccctctgagccagrtgtgggatataatctcctggtgtgccgtttgctaagaccgttggaaaagcgcagtattaaggtgggagtgacctgattttccaggtgccgtctgtcaccc

SEQ ID NO: 5115 - DNA, 201 bp, Homo sapiens
gggctgctttgtttacctactcaagcctcagcaatggcgtgtgcccctcccccagcctcgctgctgccttgcagttggatctcagtctgctgtgctagcartgagtgaggctccgtgggcatgggaccctctgagccaggtgtgggatataatctcctggtgtgccgtttgctaagaccgttggaaaagcgcagtattaag

SEQ ID NO: 5116 - DNA, 201 bp, Homo sapiens
ggtacccggccgtgtgaggtgttagtctgcccctactgggaggtgcctcccagttaggctacttggaggtcagggacctacttgagaaggcagtctgtccrttctcagatctcaaactccgtgctgggagaaccactactctcttcaaagctgtcagacagggacatttaagtctgcagaggtctgctgccttttgtttgg

SEQ ID NO: 5117 - DNA, 201 bp, Homo sapiens
agtttgctggaggtccactccagaccctgtttgcttgggtatcagcagtggaggctgcagagtagtgaatattgctgaacagcaaacgatgctgcctgacygttcctctggaagtttcgtctcagaagggtacccggccgtgtgaggtgttagtctgcccctactgggaggtgcctcccagttaggctacttggaggtcag

SEQ ID NO: 5118 - DNA, 201 bp, Homo sapiens
tcaaagtcattctccatccagctttgttccattgctggtgaggagctgcgttcctttggagggggagaggtgctctgatttttagaattttcagcttttcwgctctgttttttccccatctttgtggtttttatctgcctttggtctttgatgatggtgatgtacagatgtggttttggtgtggatgtcctttctgtctgt

SEQ ID NO: 5119 - DNA, 201 bp, Homo sapiens
tactgagagtttttagcatgaaaggcagatgaattttgtcaaaggccttttcttcatctattgagataatcatgtggcttttgtctttggttctgtttatrtgctggattacgtttattgattttcgtatgttgaaccagccttgcatccctgggatgaagccaacttgatcatggtggataaactttttgatgtgcttct

SEQ ID NO: 5120 - DNA, 201 bp, Homo sapiens
attggtgtataagaatgcttgtgatttttgcacattgattttgtatcctgagactttgctgaagttgcttatcagcttaaggagattttgggctgagacartggggttttctaaatatacaatcatgtcatctgcaaacagggacaatttgacttcctcttttcctaattgaataccctttatttctttctcctgcctgat

SEQ ID NO: 5121 - DNA, 201 bp, Homo sapiens
gtgagaacatgcggtgtttggttttttgttcttggggtagtttgctgagaacgatgatttccagcttcatccatgtccctacaaaggacatgaactcatcrttttttatgactgcatagtactccgtggtgtatatgtgccacattttcttaatccagtctatcactgatggacatttgggttagttccaagtctttgcta

SEQ ID NO: 5122 - DNA, 201 bp, Homo sapiens
ccacttccctcaccccacaacaggccccagtgtgtgatgttccccttcctgtgtccatgtgttctcactgttcaattcccacctgtgagtgagaacatgcrgtgtttggttttttgttcttggggtagtttgctgagaacgatgatttccagcttcatccatgtccctacaaaggacatgaactcatcattttttatgact

SEQ ID NO: 5123 - DNA, 201 bp, Homo sapiens
cactgcacccagtgtgaaaaccattttaaaaaattaatccacttttggctgggcacatttattcatgcctgtaattctggcattttgggaggccaaggagrgaggattgcttgaccccaggagttcaagaccagcctgggcagcatgcaaaaccctatgtctaccaaaaattacaaaaattagctgggcatggtggcacag

SEQ ID NO: 5124 - DNA, 201 bp, Homo sapiens
ttccccaaatgccacaaaagaagaggtaattgtcttagccaagaagtctgccacctacagggcagaaggaaagaatgcacgaatcttccagtggataataygtcactttgatgggtattccccataacaagaattaaacagcaatgtgtaacttactaacttttccctgacctaagggcttcaaagttttatcattgcttg

SEQ ID NO: 5125 - DNA, 201 bp, Homo sapiens
aagacttcaataactcactgaagctgatatgacagatgcgtgtatgactgcatgctctgaaaacgcaaatatccattttctcgagcacactaaattcagargtaggtttttttgtggtggttataggagcagactatgggtttgactaagcttgtcttagcactgccgcttgccagctgtgttacttggttaagttacttt

SEQ ID NO: 5126 - DNA, 201 bp, Homo sapiens
gtgatgggactagtgcaaaattattcattgttaccacttataaaaacttctttagagacttcttgtcagtgggtggattgctgtctaggagtacaggagayattttgaatttctaatgtctagtttattttatattcatacaatgaagtaggctattgcagctggagtggcttaatgctttgagccctaaagttataattt

SEQ ID NO: 5127 - DNA, 201 bp, Homo sapiens
tccagagccagttcactacctatattgttattattgtttttaatcttaagaattgaacaagaatcaaatatgctcagagtactgtggacaacatctatctwctttactacattttaagagcatcataatttaggcatgatactgttgcagattaatgtaatgagctattttaaaactttagcgatttattgcaggttttta

SEQ ID NO: 5128 - DNA, 201 bp, Homo sapiens
ccttgatttcttattagaaccttagggtaagatatgggagtaaaatgacctaaaacctatatgaatatatctggcctcaagtaaaaggataggatagatawgaaggtggaggttgttggttgaaaaggtgttcagggaatgtgtactagaatataatacacctcctagcttaagagtctcttcagaaacttagtcgttgcc

SEQ ID NO: 5129 - DNA, 201 bp, Homo sapiens
tgataatgaagggaaatgtatgctgtgtcaacatgatgataacagacagtagagcaaccggaagtggaaaataagctgacattgtgctgatggtgttagcmaagactggaaagtggctatgtatacaagtttcttccagttgcatagtgcagatttgctagtgcccactgaacttcctaagaagtcctggtttaagaaata

SEQ ID NO: 5130 - DNA, 201 bp, Homo sapiens
agaagtatcttaacttccccaatgatctctctttataactgtttgtgacaacctcattactggagataattcagtattttagtatatatactattgatatgatcaacttgacactactttctatttcatctactttttttttttttaattttttaagagacagagtctcgctttgtcacccaggctggagtgcagtggtgc

SEQ ID NO: 5131 - DNA, 201 bp, Homo sapiens
cctcatctttggatggaaaaaataataatacctagctcatagctttattgtgagcatttaatgagataattcgtgcttaagaacttaacacgatgcctggyacagtgtaaatatgcaataaatggtaactattatttttttctgctcctgacaataaaccctcagtatatatttactgaatttcaagcatacacacataaa

SEQ ID NO: 5132 - DNA, 201 bp, Homo sapiens
aatagtctctgtggttacttttcttacaagagattttatttaaacctcctaattcatctgcttccctgagatgcatatcacagaataatgggtcttttccyattttaaaagttgaatcagcttatttgagtactataaatgcaattatagggtctatttctgtttctcaaatagtgctattcattaatgacaatgacactt

SEQ ID NO: 5133 - DNA, 201 bp, Homo sapiens
gccaaacatttgatattttaatagtctctgtggttacttttcttacaagagattttatttaaacctcctaattcatctgcttccctgagatgcatatcacrgaataatgggtcttttcctattttaaaagttgaatcagcttatttgagtactataaatgcaattatagggtctatttctgtttctcaaatagtgctattc

SEQ ID NO: 5134 - DNA, 201 bp, Homo sapiens
gttacagaatgaaaatatattagattcagggtattgtaacgtattttggtttgttctcacattcattttaagatatattacctaatcttgcctaattattrtatgttcttttttatttatttcctttagccaaacatttgatattttaatagtctctgtggttacttttcttacaagagattttatttaaacctcctaatt

SEQ ID NO: 5135 - DNA, 201 bp, Homo sapiens
tccaccaacacaatggactagttgatgaaagaccttttcctagtacagcaaatttgaaaaggttggaccatatgtacacacacacacacacacacacacayacacacttctctcatatatgtaatcatcactattagagatacaatgattaataaagcaaagtcctttttataatggaagtcatatatacacatttttata

SEQ ID NO: 5136 - DNA, 201 bp, Homo sapiens
ataaagactgataaatgtgactcttgtaaatccagatggaaagagaatctttctttttccaccaacacaatggactagttgatgaaagaccttttcctagkacagcaaatttgaaaaggttggaccatatgtacacacacacacacacacacacacacacacacttctctcatatatgtaatcatcactattagagataca

SEQ ID NO: 5137 - DNA, 201 bp, Homo sapiens
aaataaaaaatctagagatcaattattaggtataataaaagaatttgcaacggtttctgaaacatgaaactactgacattttggataatttactgctgtargacactgtcctgtgccttgtgggatgtttagtagcatctttgacctcttccactagttgccaataacatcaccttcccagttgggattatcaaaaatatc

SEQ ID NO: 5138 - DNA, 201 bp, Homo sapiens
attcctcctgaataactaacaacactcctttgccttttaaaatacatttgtcttgcatctttctcaaaatgaatgaaaaaattttaagtaattgttacacmtttataaaatgtattttgtatacttacttttttcatttaatatattgctgagatttatctatatttgtggccatctctgtagttcatccattttgactgc

SEQ ID NO: 5139 - DNA, 201 bp, Homo sapiens
atattaattgttaaatgcattgaaagactataccttattcaaacaataaattattacaaaggcatgcataacccaagataaaagaacaatttgaaacttarcaagaagtgaaataatgactcaactgggaagaggtgactttctgcctgattttactctttaaaaagtgtacaaagtgaaaaaaaatgaattaagcttttt

SEQ ID NO: 5140 - DNA, 201 bp, Homo sapiens
ttataaatttgcttaagtttcttgtagattctggctatcagacctttgtcagatggatagattgcaaaaattttctcccattctgtgggttgtctgtttgytctgatgatagttttgtttgctgtgcagaagctctttagtataattagatccaatttgtcaatttttccttttgttgcaattgcttttgatgatttcatc

SEQ ID NO: 5141 - DNA, 201 bp, Homo sapiens
atgatcagtgatgttgagctttctttcatatgtttgttggctgcacataggtcttttctttagaagtatctgtttctattctttgcccacttattaatggrcttgtttgtttttttcttataaatttgcttaagtttcttgtagattctggctatcagacctttgtcagatggatagattgcaaaaattttctcccattct

SEQ ID NO: 5142 - DNA, 201 bp, Homo sapiens
aaacaaatctaccccaaggccaggtggtaggaagctatcatcctgatggccgctgttgctaaccaccatcactggaaaagtgcttggtcaagcactacccyctaagggaagaatgtggcttcaagctgatctttcactggaaaaaaccaatgatgttattgagtagcacaaagaacccaccccgccaacctacttcaccaa

SEQ ID NO: 5143 - DNA, 201 bp, Homo sapiens
gttaatggctataataattatgcttttttttgacctgagttttgcagcaaaaacaaatctaccccaaggccaggtggtaggaagctatcatcctgatggcygctgttgctaaccaccatcactggaaaagtgcttggtcaagcactaccccctaagggaagaatgtggcttcaagctgatctttcactggaaaaaaccaat

SEQ ID NO: 5144 - DNA, 201 bp, Homo sapiens
gtgaacagaggtggaaacggggaggaagctgaacacctgtgggaaaaaaagctactgaagaattaatatcagatttaaaaatggacccaaagtagcggagrgtagaggagtttaagaaatgaatccggggtcagactacctggatttgaatcttattctgtcatttacaaattacttggtcttgggcaagttacttctcca

SEQ ID NO: 5145 - DNA, 201 bp, Homo sapiens
tatgcaaaaacctttgtttggtattcagaaaaatgcaaaaatgaataagaagtcatcagatttttaagggtcaagtcagggggataataccaagcacagargtgactggtcaaggcagagtaagataatggaggtgaagttcacagtatgacgtcttgggaccagggatggtgaacggatgaagaaactgtccatgaagga

SEQ ID NO: 5146 - DNA, 201 bp, Homo sapiens; identical to SEQ ID NO: 629

SEQ ID NO: 5147 - DNA, 201 bp, Homo sapiens
aattactcaattttaatttaaaaaatctgtaagtatgtatttatggtatttaatgtgcatatgtcaaaaacattcatttaacattcattaaatgtctattrtgtgcccaaactgtgccatttgtattttttctctgttctctcacttcttttacttcatcttcctttatatcttaaaattctttttctctcctcttgtcct

SEQ ID NO: 5148 - DNA, 201 bp, Homo sapiens
tggagctttttgagcaggacagtgaagtgctagggtaagtgttttagaaaagaaactatggcagcaatttgaaaactgaagcaactgagattaaaggcagsgatggtatgtttaagagatagttccagtagtcacaatgagaaaatagtatctaaaataggaaagtaaaggtacatgtgaaatggaaagaagtcaaagata

SEQ ID NO: 5149 - DNA, 201 bp, Homo sapiens
tgtgaggtcttataggccattattaaggtttgttcttcatctcgaaagcaacaagaacctattggagcataatagaactgtgctgtgtctgatataaggcwacatatagctcagatgagggttatggaaaataaataaatcttagtatatgaacttaaaagacaatctctttgagctctttggagattgattttgctgggc

SEQ ID NO: 5150 - DNA, 201 bp, Homo sapiens
gggaagctgacctggaagaataatattgacttgtgcaacagaataaaggtgacagatggaaagagttctgatggtgatgaggaccttaaccaggcttttcytgtagatatgtgagatagttcaaggttctcctaattatgttttcccatttttagctagcaacctagagtccagactaatacattaaaataatacttgcct

SEQ ID NO: 5151 - DNA, 201 bp, Homo sapiens
tccttctttccttcctttctccctcccttcatcactccctcccttcctcccttctttccttcctcttttctttctttctctttcgttttttctttctttckttctttctttctttctttctttctttctttctttctttctctctttctttctttctttctcttacttctccttttctcagtctctttattgagacataat

SEQ ID NO: 5152 - DNA, 201 bp, Homo sapiens
aggatgattgaagagtggtatgtaaggggaatagggcttctttttgggtaataaaaacgttctaaaattggttatgttgatagatgagctgtgctatgtayatattaaaagccattgaattgttcattttaaatgcgtgaattgtgtgacatgtgaagtatatctctataaagctgttaccaaaataaaagttctttcttg

SEQ ID NO: 5153 - DNA, 201 bp, Homo sapiens
gaattgtcttcatgtcccttctatttgcccctttgcactctcaaataactccccctttgggcctttggaccccacactgctggaaataaatttaataaatrgttgttaagcatctgctttgggtaaggcactatgccaggggatgggaggatacatccttacctcttacaatttgtgacctcatatgtactatgtggtcag

SEQ ID NO: 5154 - DNA, 201 bp, Homo sapiens
cttcacatcatccaactagagagtgcttagttgttagtctcattcacaccacagcttctgagtctgctgaacacaaaattattactgccagaactggctartgaaaatccaggtattgctacattattcatttaatcgtgatcagtattaatcccaatattgttgtcccctattttaatctttgtcatgctactttagttt

SEQ ID NO: 5155 - DNA, 201 bp, Homo sapiens
aatgctactccagtgaacacatgaatgataagaaagcaaaacagccttactgctgatatagagaaagtttttgtggtttggatagaagatcaaaccagccacaacattcccataagccaaaacctaatccagagcaaggccctgactctcctcaattttataaaggaagggagagaggtgaagaagctgcagaaaaagaat

SEQ ID NO: 5156 - DNA, 201 bp, Homo sapiens
tcaccatgcccagccatttttttgtattttggtagagacgggtcttgccatgttgcccaggctggtctcaaattcctatgctcaaacaatccaccctcctyaccctcccaacatgctgggattataggcttgagccactgcacctggcctgcttccaacattattactaacaatgatagttaacatttattaagcacttcc

SEQ ID NO: 5157 - DNA, 201 bp, Homo sapiens
cattttttttttttacctacagtgatcattgcttcaaactatatatatatatatatatatatatatatatatatttttttttttttttttttttttttttktgagacaagttctcactctgtcacccatgctggagtacagtggcacaatctcagctcactgaaacttctgccccatggggctcaagccatctttctacct

SEQ ID NO: 5158 - DNA, 201 bp, Homo sapiens
tccaggatatttgacaaattctgttgcttttaattatccttttgcatgcatattaggtgatttttaaatttaatagctatacatatacatggacatttacmcacatataaatatacacaagggtttaattatatgtgtatatattctttcttaaaaattggaaaccacttgatgttggatttataacatgataatacacat

SEQ ID NO: 5159 - DNA, 201 bp, Homo sapiens
atattccaggatatttgacaaattctgttgcttttaattatccttttgcatgcatattaggtgatttttaaatttaatagctatacatatacatggacatwtacacacatataaatatacacaagggtttaattatatgtgtatatattctttcttaaaaattggaaaccacttgatgttggatttataacatgataatac

SEQ ID NO: 5160 - DNA, 201 bp, Homo sapiens
tttaattaaacacagtggatctctggaacttctcgtagtttttaaaatcctatgatattccaggatatttgacaaattctgttgcttttaattatcctttygcatgcatattaggtgatttttaaatttaatagctatacatatacatggacatttacacacatataaatatacacaagggtttaattatatgtgtatata

SEQ ID NO: 5161 - DNA, 201 bp, Homo sapiens
ccctatattcttcatctaaggattatattgctctaataaataggtcttaatatcagtgtcgttcagcatttgttcatttaaagatatttaaatcatagtamatttttctgtttgagtttgtgtgtatgtttcagataatggagtttctagatatgcaacttgttggtatctatcagcaaatgtcatccctgatccaaaagc

SEQ ID NO: 5162 - DNA, 201 bp, Homo sapiens
tggatagagaagatggtggtatggaactcaaccagatgatctgatacagtgggttctgaatattacattgaaaacatgagtgaatgatagactggcaaagraatatgaagagctaaggatattattattgtctttatgacaatataaaagttatgaaaagcacctttacgcagaatcaatcacattttcttcctgaaaaat

SEQ ID NO: 5163 - DNA, 201 bp, Homo sapiens
gatctcctgaccttgcgatccgcccgccttggcctcccaaagtgctaggtttacaggagtgagccactgtgcctggcctgtttggtaggtcttgcttccaraataacatgaggaggagtggaaactgttagctctctcaccaattcaaatgccaataagatgccccaggccgtcaaggctggcttttgcctaagcccctcc

SEQ ID NO: 5164 - DNA, 201 bp, Homo sapiens; identical to SEQ ID NO: 632

SEQ ID NO: 5165 - DNA, 201 bp, Homo sapiens
agtggatactagttggttttcagactttagctatgaaatcaattcacagcatagtttaacaaagattccttgatgaaaattaagtcatgcatatttagcakgcatatttaacatatttattaaaacataatctgtaaactataacattacagtctcctttataataaaaatgttacacatattgcttatttttttacttaa

SEQ ID NO: 5166 - DNA, 201 bp, Homo sapiens
catataatgcatataattacataattttatattctgttatcagattaactgtgcaacatgtactcattcatgtgtgaatcatgtgatatgcaaaatatggyactaaagtttaaaattttaagtacccatgcagattgtatgcatttatatgaaatttaatgagtaatggtttaaaaataatcattagtgtctctggaagta

SEQ ID NO: 5167 - DNA, 201 bp, Homo sapiens
ctttaaaagaacaaaaatgtacaaagttgaatatgtttaatcaacagtcaaaataattggagtttataactagaaaagaaaatgaataatttgaatagtamaattttaaatatgtttctttaataagattatgtgtatttgattgttcatttagacctattggatataaagttgaatttttagttttattttttggtaggg

SEQ ID NO: 5168 - DNA, 201 bp, Homo sapiens
atcgcatgatgctaaggttttgtgatgtaaatgatcctatcacttagttagtgagtatggtacctaatagatttttgcgtcttccgccctccttctttccytcttctagtagtccccagtgtctgttgttctcatcttaatgtccatgtgtacccaatgcttagttctcacttatgagtgagaacatgcagtatgtggttt

SEQ ID NO: 5169 - DNA, 201 bp, Homo sapiens
cgggtgtgtgatgttccccttgctgtgtccatgtgttcttgctgttcaactcccacttatgagtgagaacatgcagtgtttggttttctgttcctgtgttrgtttgctgagaatgatggcttccaccttcatccatgtctctgcaaaggacatgatgtcattcttttttatggctgcatagtattccatggtatatatgtg

SEQ ID NO: 5170 - DNA, 201 bp, Homo sapiens
catcctacttatgtatcccagacttaaaataaaatgcattttttcaaagagtttttgtttcttaaattttgcatccaattccatgcatcactcacttcacyctagtcccagccctgtgtatccacttgtgcatttcacaggtaactcaagctatttgtattctaccttcaatcaagccttctttcacactgttactccctg

SEQ ID NO: 5171 - DNA, 201 bp, Homo sapiens
aagcccttcgttatatggtcactgactgtcttgtattgatacacaccatgttctaatcatgccatattgcttacagtgattacaatgtacatttgcttatrggattcatccaacctgaaatgcctttctttgtcttctccagttccattttatctttcaaggcagtctcacctcccctgagaaactttttacccctgtgct

SEQ ID NO: 5172 - DNA, 201 bp, Homo sapiens
acattggcttttctctgccttctgatttgaactgaaaaataagctcttcctgagactcaaacttactgacctttggacaggaactagaccattagcactcmtgggtctccagctggccaactcaccctgtagaccttgggatttgtcagtcaccataataatgtgagccattctttatatcaaattgtatttattataagg

SEQ ID NO: 5173 - DNA, 201 bp, Homo sapiens
attggccttaatacttggaaaatccctctgcactcaaaaaacaaactttatatgagataaatttattttcctgtgctaccatgtgaatagatatcatcacstaggcagttattttttgaatagatttgggaaattcagtctgtgctcatactctgttaaaaggtgttgagactatagtgaatatgtgaaccctgttctcag

SEQ ID NO: 5174 - DNA, 201 bp, Homo sapiens
ccacttggtattgtttgctcttcttgcctgtgctcttggtgttctagccaaaaaaccattgtcaagaccaatgtcaaggagattttctccatgtttttttsctaggcttttaatggtttcaagtcttacatttagatcttcaatccattttgagttgatttttgtgtatggtgtaagataaagggcaaatgtctttctcat

SEQ ID NO: 5175 - DNA, 201 bp, Homo sapiens
cagctccatccatgtccctgcaagggacattatcttgttcctttttagggctgcatagtattccatggtgtatatgtaccacattttctttatccagtctmttattgatgggtacttaggttgattgcatgacttttttattgtgaatagtgttgcagtgaacatatgtgtgcaggtatctttgtaatagaataatttata

SEQ ID NO: 5176 - DNA, 201 bp, Homo sapiens
gaaggtaatgaaggatgacatgaaagtccatattttcagacttcaacaacttgtggctaagaaaataatacaaacaaaatacacagaacacaagatgtacrggctcccatctcctaaactagtagaaaatctagactttacccaggctttccttacccagataatccctagaatctgcagttttggtcacatttaatcctg

SEQ ID NO: 5177 - DNA, 201 bp, Homo sapiens
ttatgagtgagaacatgtggtatttggttttctgttcttgtgttagtttgctgagaatgatggtacccagcttcatccctgtccctgcagaggatatgaaytcattcttttttatgactgcatagtattccatggtgtgtacgtgccacattttctttatgtagtctatcattgatgggcatttgatttggttccaagtct

SEQ ID NO: 5178 - DNA, 201 bp, Homo sapiens
aatcttcccaggatggcatattgaacacaccttccatgtggagagtaatgccatgtcctgaagatagtcccctccattctcaacatttttaacacacatcwtctaatgttgacatcaaggacatggagagggccttagtcatcactgtccttggtgggggacacttagagtactttgggactcaacctcaggcatttcctc

SEQ ID NO: 5179 - DNA, 201 bp, Homo sapiens
ctgagtgcagtggcgtgatctcggctcactgcaagctcccactcctggattcacgccattctcctgcctcagcctcccgagtagctggggctacaggcgcstgccaccacgccctgctaattttttgtattttttttttagtagagacggggtttcaccgtgttggccagggtggtctcgatctcctgaccttgtgatccg

SEQ ID NO: 5180 - DNA, 201 bp, Homo sapiens
tggcatgggaaagctggaggtaagccatctggaagtggggcatcttacgtgtttggtttgggatgcatatttggatttttcttttggccctgagttgagastagggacaaaatgtagggaagctgtctgaagcctgcagactgtggtttggtttcccaggctcattgctgtggagattgtgcattagagtgctattttcat

SEQ ID NO: 5181 - DNA, 201 bp, Homo sapiens
gttcattttggtaataaaatgtcacagaatgcacaagttaagatggtcagtttctggtaggtactttgtttctcttttgtttactaccattgggaatattyggccaatattacttcaatttctccttctagaaaatttagaaattaaagataaatataggaaagggaataggtggaaatagaaatcaggaaacgcaaaagg

SEQ ID NO: 5182 - DNA, 201 bp, Homo sapiens
ctttgtgtttctctgtttctaggtagcactctattttcactcattcactcattccatcttactgaattaatatttttaagtgccccgatttgtgtgttgarccagatgctgcaaaaaaaaaaaaaaaagtataatatgagggttcagcatttagtgctggcaggatgggcaacaaacagacataaaattctcatgaaacag

SEQ ID NO: 5183 - DNA, 201 bp, Homo sapiens
ttaggcaggattataatatttccaaaaagaaaaaattacctttcttctcttacctagtttaatggctagagattatgggctttgaattcagcaagagacasgttccagtcttaactttgctgtcaccagttctaaaaccctgggttattttccaagtttcatcgtctttaacatggggataatcatagtcccttcagttca

SEQ ID NO: 5184 - DNA, 201 bp, Homo sapiens
tcacattctgagatattgagggataagacttcaacatatgaattttgggaggtacacaattcaacccataacagaattccttagcactaacgaagtatttrgtgattagaatgctacgatctcaagtagctcttagctccaggaatctttcttgtatgtacctttgtacctgataatctgtatctaacaaatttagatggt

SEQ ID NO: 5185 - DNA, 201 bp, Homo sapiens
gggaggagctctgcagttttcttggagaaatgtaacctagaaacccagatgttttgtatgctaatcaggtaaccctaaataacttagttttaaagacttasatcagttccgaattacctgtgttaatagagttttaaaatatgaaagtaatggcttatgtggaaatattttagttttggaatatatatttttctttctgtt

SEQ ID NO: 5186 - DNA, 201 bp, Homo sapiens
gaacagaaaaatacattgtctaaacagcctgaaaagaaatcaaatgatccacttttaagtttagaaatggtaatagtattcagtctttcagtttgtcaccmtatgcttatgttgatttatggggagattcttacagtgttcattgattcacatgtggcaccagttactaggcagacttctgaactctttaaaagaacaaaa

SEQ ID NO: 5187 - DNA, 201 bp, Homo sapiens
ttgtccgatagctaatatctaatgtaaaatactactaaaattagagaactgaattaaagaccaaattaaaaatggtgatttttattaatgtgcctttatayagccttcaagtagactttagcacatatctttaaagcacataaaagatagctgctttttgtaactggagcccctcatccttctagagtacacctctgcagc

SEQ ID NO: 5188 - DNA, 201 bp, Homo sapiens
tggatatttacaaacataagcatatttggtttcatatgaaaaagctatttacagtagtactgactgcacttttccatttctattaagctgtcttggcatcrtgtagcctcagaggaaatacagtagcaaaggttagaaatatttaaagcagttttttgcctaaatgtaaggagagggacacaaaaacatccagtttgcagt

SEQ ID NO: 5189 - DNA, 201 bp, Homo sapiens
tgcttcccacaatcttgtgaaagtggctcctattatttccattttacaaagaaggaaacgaaggctcagggagattaataagggaaataatttccccttaktattatactatcgtaaataacaaagctaggattttagtctctatttgtggtgctcctcagaacttttgttcttgtcatgacatcatgctgtcagctcgtg

SEQ ID NO: 5190 - DNA, 201 bp, Homo sapiens
aaaatgccatgtttgattctttaaaaatgtaacacttggatattacaaattatcatgaacataattcaaaaacggaaattataaggattcattgggggggkgttgtgtcaaaacatgaatatcctaaacattaaaagagccacatgaattgatataaactatgcaatctctaagaggtcaattgacaaaacttgtaaatgt

SEQ ID NO: 5191 - DNA, 201 bp, Homo sapiens
atagacatgtgataaatgaaaccaaatagaaatagtcagaaacatagaatgatgataaataagtaaataattctacaattgtgtgtgtgtgtgtgtgtgtrtgtatatatatatatatatatatatatatatatgaatttatcatatgataatggtggcttttagaactcactgggaaataacattttattgattaagagt

SEQ ID NO: 5192 - DNA, 201 bp, Homo sapiens
gaatagacatgtgataaactacaataatcaatccagtatgaaactagtaccaaaatagacatgtgataaatgaaaccaaatagaaatagtcagaaacatasaatgatgataaataagtaaataattctacaattgtgtgtgtgtgtgtgtgtgtgtgtatatatatatatatatatatatatatatatgaatttatcatat

SEQ ID NO: 5193 - DNA, 201 bp, Homo sapiens
agcataatgttaaactacaataatcaatccagtatgaaactaataccagaatagacatgtgataaactacaataatcaatccagtatgaaactagtaccaraatagacatgtgataaatgaaaccaaatagaaatagtcagaaacatagaatgatgataaataagtaaataattctacaattgtgtgtgtgtgtgtgtgtg

SEQ ID NO: 5194 - DNA, 201 bp, Homo sapiens
cacttaagcataatgttaaactacaataatcaatccagtatgaaactaataccagaatagacatgtgataaactacaataatcaatccagtatgaaactartaccaaaatagacatgtgataaatgaaaccaaatagaaatagtcagaaacatagaatgatgataaataagtaaataattctacaattgtgtgtgtgtgtg

SEQ ID NO: 5195 - DNA, 201 bp, Homo sapiens
ataaattgaacctgtttgaagacaactttactgagagacatacaacatatttgaaaaaacggagagacatttcttgtttatggacagaagagctaagtatrggaaaaacattaattctttctgaataaatctgtattcaggcatgttataattccagtagaataactagggagtattttctggaattttaatagtatttta

SEQ ID NO: 5196 - DNA, 201 bp, Homo sapiens
cgctttttttctttggcaaaaattatttaaaatattttggaataaattgaacctgtttgaagacaactttactgagagacatacaacatatttgaaaaaayggagagacatttcttgtttatggacagaagagctaagtatgggaaaaacattaattctttctgaataaatctgtattcaggcatgttataattccagtag

SEQ ID NO: 5197 - DNA, 201 bp, Homo sapiens
aaagaatatcttaatgtaatggctattaaaaggatttgcctctagactccaataatctttgagttctgtccactttttttttttttttttttttttttttwacattatcaaagtgttgctgctgctgttgctgtgcttgtttttaggacaggtgctgacgatactttactggggaacatagacaaaacattcatggcactt

SEQ ID NO: 5198 - DNA, 201 bp, Homo sapiens
catgaaaaagtctggtactattactggcacacagagtagattctcagtaaatgtgggttaaatgtgaaaaatttccttgtagggttatgacaacaaggttrtcacccttgcttcaaatggatgaggccaggatgggaagagaaaaataggtcttttttaagttctttttttttcctctttaagtttaataattgtccgata

SEQ ID NO: 5199 - DNA, 201 bp, Homo sapiens
ggaggagtagaatcctttacctctacttagaaaaataccatttcatacctactttacgtaagataatggccatgaaaaagtctggtactattactggcacwcagagtagattctcagtaaatgtgggttaaatgtgaaaaatttccttgtagggttatgacaacaaggttgtcacccttgcttcaaatggatgaggccagg

SEQ ID NO: 5200 - DNA, 201 bp, Homo sapiens
gatgagtgcttttagcttatgaatactaagactaacatgagagcatataataaccacttattttgcttaccattgttttaataaacatgtaaaaattattmaaaatgactatgatttttttttttgctctcacagcagcatgtattaaaagatgcttttaaaaatagggctctgctacagggaagctaaatttattctatt

SEQ ID NO: 5201 - DNA, 201 bp, Homo sapiens
agaataaggaagactgagttttagttctacctgtgtcaggaatgtgtgaaatgtcacttaaggtatgtagacctcatttatctaatctataaaatctgcasattctctttcgtttcttccctttccttctttccttccctcctacctccttcctttcttccgtatatccatccttccttccacactgtctccctttcttcc

SEQ ID NO: 5202 - DNA, 201 bp, Homo sapiens
aaggggaatgctttcagcttttgcccattcaatatgatattggctgtgtgggtttgtagtctatggctcttattattttgaggcatgttccttcaataccyagtttattgagagtttttaacatgaaggatgttgaattttatcaaaggccttttctgcatccattgagataatcatatgatttttatctttagttctgtg

SEQ ID NO: 5203 - DNA, 201 bp, Homo sapiens
atttgtaactaaatcagtgaacatagtatatataaaaacttgtggcatacagcgatcacttcaattgaagtttccaaaaatgaatgtacatatcaggaaawagatcatttggaactaaataaaagaaggttcaacccaagcagttagaggaggaatagcagagaacctctaatgaaagtgggaaggggaaaagcatacaag

SEQ ID NO: 5204 - DNA, 201 bp, Homo sapiens
tgaaaatgaggaggcacacgaagaatccctcagtaaaaataaaacccttgcagcaaggtgtatgctaataagtcagttggatacaacagtgatggacagarttgaaaaatttcaaatcagtctttatcttcttatgtggaaaataggtgttgcattcattatgcaactaaatcaaggtaaaatctgtaaaaaaaaaaaaaa

SEQ ID NO: 5205 - DNA, 201 bp, Homo sapiens
atgaggaaccccattacagaggtccctaagagtggcaatgccagctgaaggcccaggattagtgacatggttcaggaaggtgtccaaggccactcgccttytaagctgtccagctgggacctggatccagatctacctgactgatcctctctctcccctagccagctgcttctatcagtcagtttgcctttctgtctcatc

SEQ ID NO: 5206 - DNA, 201 bp, Homo sapiens
aaagagtatgatagagtacagaatgaaccaatggtataacataaacacataataatcataaaaatgtagcattggcatattaagagaaaaatggcctaggkcagaaaatccagagaggtgttcaagaatatataaaaatctgatatgttaaaaataatgttatataaattatttgggaaatgaatatacatgtaataaata

SEQ ID NO: 5207 - DNA, 201 bp, Homo sapiens
aataataaagataataataatatcatcttatgtagtgcctattcttttcaacactcttctgactgcctaatgtatatactaactcatttaattgtctaatrtatatactaactcatttaattatgacaacaaccctatgggggagatattattgttatccccattttacagataaggtgcataggaggttaaagggcttac

SEQ ID NO: 5208 - DNA, 201 bp, Homo sapiens
cttttatgactcattcttttattattacatgttttgtaagaggttttatacttatacatatataatttttatttagtcagtcacagcagtagttacaattyatttagcacttatgggacaagatattttatacacagtttttcattggatgtccaggactattatacaaactgagtattactcttatattaaaggtaagga

SEQ ID NO: 5209 - DNA, 201 bp, Homo sapiens
ttttcacttaaaggatatgcatcataaacttcaggcacttatgggcctttatttacaaatttaagtttctgttataaaatcgtttgtgtttagattttttkggttttcaaaaccaaaagctgtggttctttgttgttggttttcactgatagtttccctttggagtaagagagaacctgcccattactcatactttcttgt

SEQ ID NO: 5210 - DNA, 201 bp, Homo sapiens
taagaggttttatacttatacatatataatttttatttagtcagtcacagcagtagttacaattcatttagcacttatgggacaagatattttatacacaktttttcattggatgtccaggactattatacaaactgagtattactcttatattaaaggtaaggaaatagcttctaactaagcaaagttgctcaaagtgac

SEQ ID NO: 5211 - DNA, 201 bp, Homo sapiens
tattgataaatttgcacactgctggctgcagtcctaatgaatatattcatggaccatggagcatggcatggtatttagagaaatccaaaatatgatttttwaaaaaaaatagagttggaaatgttattggtgatttaatattttaaaaaataacaagaatatatgctattttgcttgtaattccagattaaatgttaaaaa

SEQ ID NO: 5212 - DNA, 201 bp, Homo sapiens
ttgtctattcaagtcctttgcccatttcttaatatagttgtttgattatttgtttttcccctaatttttaaatttgagatacttttagacttacaaaagcrttataaaagtgacacagaaagctctccttcgtccttctcccagctttccctaatatgaacattgcatataactatggtaagtaaaatgatcaaaacaaat

SEQ ID NO: 5213 - DNA, 201 bp, Homo sapiens
gacagctgcagggaaagccaaggggctggtgaatcaggccaatggaatacaacattgataagagctgtaattgcaaaagtgcagactgagaggacagttargagaggagattgaaatcagttttagaagagagagtgcatccctttgataattacccttctgcatcttttgtgattagtgtacaagcaatggtaagttaac

SEQ ID NO: 5214 - DNA, 201 bp, Homo sapiens
cgtccgctctggccgcgctcgaggagcccttcagcccaccgctgagctgtgggggcccctctctggggctggccgaggccagagccggctccctctgctcrcggggaggtgtggagggagacgcgcgggtgggagctggggcttacgggtggccaccggcgcggttccgggtaggcgcgggctccgcaagccccgcactca

SEQ ID NO: 5215 - DNA, 201 bp, Homo sapiens
tttggattttagatctttggattagggatactcaacctacataatcctcatgttgttcattatatttctggacctgtgcatcctagttaactgctactctstctgtatagttgacgttttttatttagactccacatataagagagattatgcagtatttttctatgtttcatttatttcactgagaataatcatgggtta

SEQ ID NO: 5216 - DNA, 201 bp, Homo sapiens
gcaaaatacataatgcaagcctaggtattgtatgttcaggacatgatgaagggagaagtgacaatgccagccatatttctcctttttttttttttaatcaygaaagcaaaatcttttcagggaaccctctggtgggttttgcttgtatctcatcagccagaactgtgtccagggcaatgcttagctgcaagagaagcagga

SEQ ID NO: 5217 - DNA, 201 bp, Homo sapiens
ttaaggcacaaatgaacttaatggacaaaccttatgaagattgtgatgatacgaaaagcataactggaaattaggagatgtgtttttaattctcactaatmctcagatgggtttatgccttattgtttaatatgtagtgcctcaatttccatattcatagaattaggaatttgctacagttattcaccaaaatttcttcct

SEQ ID NO: 5218 - DNA, 201 bp, Homo sapiens
gggtaggttgtttgagcctaggaatttatccgtttcctccacatattccaatttattagcatataattgctcatagtagtcactaatgatcctttaaattyctgttgtatcagttgtaatgtcttcttttttctctctgattttatttgtttggatcgtctctttttttttttttcttagtctggctaaaggtttgccaat

SEQ ID NO: 5219 - DNA, 201 bp, Homo sapiens
taaaaatgatgagctatcagattaattcaaacagctgaatgttgtagtttgtattagttaataattgtattccttttcaagatcattaaataagtaactgmacgaaatgagataacatatgtaaatcacctagcacaatttctagtagctagcatagtccttaataagcaggagtacttttaccccttcctttctgtgaat

SEQ ID NO: 5220 - DNA, 201 bp, Homo sapiens
agtaagactccattaggtctcatgtatggttcatggaaagaaaagaaaataaggaaggaagaaaggaagggagatagggaggaaaggagggagggaggctsgttctatattggttcttccagactacagctgttccatcccgatctattctgcttttgaccttacaggaacacagtattgtaggttttgaaccagtgataa

SEQ ID NO: 5221 - DNA, 201 bp, Homo sapiens
tcagatctgttccagattatcagtgtacaggaggaagtagtacaaacttggttgtcacagaccactccctatagaaaaaggtgacatttagaaagtttctrtaagtgccttatggggaaagcttaagcagggagttggaaacctgagagaggggtgatgtctaggtatctgaatctcattgcttctttaggtggatgagtt

SEQ ID NO: 5222 - DNA, 201 bp, Homo sapiens
tctaaatccaagattgtttctgagacagattcaagaaggaatctttcagcagtgaattttggcttctctgaagatacaactctttaaaggcagcatcaaartagttcattttctccaatggttcataggtgggtagagtatccttaacaagtatactttacttgctgctttgaaacattacagcatattcaagcccacatt

SEQ ID NO: 5223 - DNA, 201 bp, Homo sapiens
ttttgtttttccagttttgcatagggacacattagtaatctttgtaagcccttcagtaaatcacaagatctctttattgagtcataaccagcattgagttktaattttcataaaatgtattccttgttaaacatataatgggcttacctttgttattataaataaatacataattgtttaaatatttctcagttttaattt

SEQ ID NO: 5224 - DNA, 201 bp, Homo sapiens
tatttttcatcatgtctgtgggagagagctctctcataaatattcatgacctcaattgccttgcatatacctgtgcctttgaaatctttacctctaggcamacttggctcacaaacccatgaactaagtcatgatcggcctttcaaaaccagtcattcccttgtacgccccttttcagtgaaggataccactacctattca

SEQ ID NO: 5225 - DNA, 201 bp, Homo sapiens
tatattccacattgaaacttcttatttaatttacattaactgagcatttcttcaacaataaacacttagtattgcatttctttgaacctcaatataatagrcattcctgatcccaggactcccttgttaattaagactcaaaaactaactgggaagccaaccagccattctgttacccataccaaacagtttgaaataaac

SEQ ID NO: 5226 - DNA, 201 bp, Homo sapiens
atttaattagttatttaaataataactgaaaataacagaaatagagaagaaacaaaaaaggtagaccacatatgactgagaacatgtgatattttgtgaawagaatgatggttagcaaaggcagggaggagtgggggaggggaattaagaaggctaggtagtgggtacaaaaatatagtcagctagaaggaaggagttcta

SEQ ID NO: 5227 - DNA, 201 bp, Homo sapiens
tttaacacttacatagtatgatgggatatcattttccatatattacattaggagaacattaaccatacagtattcaatattggcaagtctgctatataatmatatatttctaataaaagtataaattggtataaatcttttggaaaacaatttggcactatgtaccaaaagctataaatacgttcaacctgccatgaattt

SEQ ID NO: 5228 - DNA, 201 bp, Homo sapiens
ggtaaggagggcttgaactaaggccatggcagtgaggagaaagataatgatggctggagtagacttgagagggatttggggtttgaaacagtaggacttaktgactcattgaatgagggcaattaagcacagtgaggggtgtaagataattatcaggtctccatcaaagatattgctgcaaaaatttctctatgggtaaaa

SEQ ID NO: 5229 - DNA, 201 bp, Homo sapiens
tttatgcttatagaattaatatgatataatgtctcttccccttggtcttcttgcttacttattaattcctttaagcaaatttccttgttcttgttcctttygttttcctccttttttctacttcaattcctccttccatactgagtatgtgtgaaagcagctgccagagcccattaaatgcatcaacacctttgcctgtgg

SEQ ID NO: 5230 - DNA, 201 bp, Homo sapiens
tatttttaagcttttttatgcttatagaattaatatgatataatgtctcttccccttggtcttcttgcttacttattaattcctttaagcaaatttccttkttcttgttccttttgttttcctccttttttctacttcaattcctccttccatactgagtatgtgtgaaagcagctgccagagcccattaaatgcatcaac

SEQ ID NO: 5231 - DNA, 201 bp, Homo sapiens
aaaagcaccctccaaagaaaacctgcaaatgcacagccttgtctgatttgatttatatatataatttatatatatgtaaattatatatataaattatatawaatatatgtaaattatatatttacatatattatatattatctataacatatatattatatataacatattatatatataattatatatatatttttttca

SEQ ID NO: 5232 - DNA, 201 bp, Homo sapiens
gttatccccattttacagataaggtgcataggaggttaaagggcttactcaaagctcataactagtaaatggtggtattgagatttgaacctaggcagatyggaagcagggtggttggtctcaatcacagaactaaattacctttctcatgcttagtaattgaatatatgaatatatactgagtttaactttctgttgtaa

SEQ ID NO: 5233 - DNA, 201 bp, Homo sapiens
actcaggaggctgaggcaggagaattgcttgaatcggggaggcggaggttgctgtgagccgagattgcaccacagcactccaacctgggtgacagagcaasactccgtctcaaaaaaaaaaaaaaaaaaaaaaaaaattgagtcaaagtatattcaagacttgaatgtaagatctggagccataaagctcttaggaaaaaa

SEQ ID NO: 5234 - DNA, 201 bp, Homo sapiens
cctctactgagaggaaattatttctgtatattaatgtatatggatattttctatacatttgtgtatattaataattttgaacatttttcaagaggtctgartaacaaatataaaagtgcatagcttctcagagaccactacatttatgataacagaaacagacattattatgaagaaaagaaaagtaaaaataatttgggc

SEQ ID NO: 5235 - DNA, 201 bp, Homo sapiens
gctcgaatgaagacctttaacctcatgcgtaccttcttctaatctactaagtttactaacttaggtaacagaaagtaaatgagaatttccagtgctattargtgttcagaatcagtacctgaatgctagctgggagataaataatgacttgaagactaagattttgtgaatgcggataatcactaaaaatccatgaaattg

SEQ ID NO: 5236 - DNA, 201 bp, Homo sapiens
gtcggccgggcgcggtggctcacgcctgtaatcccagcactttgggaggccgaggcgggcggatcacgaggtcaggagatcgagaccatcccggctaaaayggtgaaaccccgtctctactaaaaatacaaaaaattagccggacgtagtggcgggcgcctgtagtcccagctacttgggaggctgaggcaggagaatggc

SEQ ID NO: 5237 - DNA, 201 bp, Homo sapiens
aaattaggtattgatgggatgtatctcaaaataataagagctatctatgacaaacccatagccaatatcatactgaatgggcaaaaactggaagaattccytttgaaaactggcacaagacagggatgccctctctcaccactccttttcaacatagtgttggaagttctggccagggcaattaggcatgagaaggaaata

SEQ ID NO: 5238 - DNA, 201 bp, Homo sapiens
tgataccaaagccgggcagagacacaaccaaaaaagagaattttagaccaatatccttgatgaacattgatgcaaaaatcctcaataaaatactggcaaawcgaatccagcagcacatcaaaaagcttatccaccatgatcaagtgggattcatccctgggatgcaaggctggttcaatatacgcaaatcaacaaatgtaa

SEQ ID NO: 5239 - DNA, 201 bp, Homo sapiens
tcattgctagcacagcaatctgaggtcaaactgcaaggtggcgaggctgggggaggggcgcccgccattgcccaggcttgcttaggtaaacaaagcagccrggaagctcgaactgggtggagcccaccacagctcaaggaggcctgcctgcctctgtaggctccacctctgggggcagggcacagacaaacaaaaagacag

SEQ ID NO: 5240 - DNA, 201 bp, Homo sapiens
agcacaaggagtcagggacttccctttcctggtcaaggaaaggggtgacagacggcacctggaaaactgggccactcccacccaaatactggacttttccratgggcttaggaaatggcataccaggagattatatcccacacatggctcagagtgtcctacgcccacggagtctctctcattgctagcacagcaatctga

SEQ ID NO: 5241 - DNA, 201 bp, Homo sapiens
ctttctatgttaattttttttcacaagctacaaaacttacacattttttagctctttgggtggatttctttctctctttcactttgtaattgaataatcaytttttcctactgggtaatttgaggcactaaaaaaaaagtcattaacagatgactggcttgttgaatacatcacagaaaataatatttattatgattttgt

SEQ ID NO: 5242 - DNA, 201 bp, Homo sapiens
gcaaggcattgcctcactcaggaagcacaaggagtcagggacttccctttcctggtcaaggaaaggggtgacagacggcacctggaaaactgggccactcscacccaaatactggacttttccgatgggcttaggaaatggcataccaggagattatatcccacacatggctcagagtgtcctacgcccacggagtctctc

SEQ ID NO: 5243 - DNA, 201 bp, Homo sapiens
attttagagggaaatgaaataatgtgtctgcagctccaggcacactgcaggcaatcagtaagtgttgatgtcacccactttctctcttcttatctgatacrtattataaaaagtagcttctcattactttaaatatggtctttttgtgcaatagctgtgttattggaaaaataaaggcacaaattgaattctcctaaatca

SEQ ID NO: 5244 - DNA, 201 bp, Homo sapiens
attcttttttccccctattatttttccttatctaggttttgtgcttactatgtacaaatctgacggtgattgccagctaacattgatctatgtaatttggmtaaatggccagcagcctgccttgttgccatggttgcttactctaatttttctttttttttctgggggctacatgatattcttgggaaggccaattgtact

SEQ ID NO: 5245 - DNA, 201 bp, Homo sapiens
ttacccactaacctcaagcaaattagtagattctttgtacccatgttgacaatttggtttcccgtcttgccatttgttattccagtgaatgactgctgtgwtctttagaggaggtgacatatccagttaatcttagtgaagtttgaggcgattagtatgttattcactcttccagccaactttttcctattgagggtttgg

SEQ ID NO: 5246 - DNA, 201 bp, Homo sapiens
ggaatctctcagcacattttcatgacctttcaaatcaagaattgctgagttcatgtcagaaatgatagagttttctttccaaagcagtgaaactgaggtawacaatataaatgatttgttcaaggtcagggaaggagtgcttacttgagtctcaatttgtgacttgggaccaccttttgtttcagttatcagcacagattt

SEQ ID NO: 5247 - DNA, 201 bp, Homo sapiens
tttatagttactaaaatgtattatattgatcagcattgtttttttggagatcatttgcttggtacatatcaaattcttattttcttatttctagaaaggtwttctaagaaaattattaacagtaattatatttacagtaattcattgaaaaaaacaaatcacaatttcactttgtttttaactaaaacccaccaacaatat

SEQ ID NO: 5248 - DNA, 201 bp, Homo sapiens
gctttactcctgatttcctctaggctcaaaaactgcagaaaatatatatgcacccaccctaatatatattctttgtccatactgacagagagagagattgrtaatataaatgcatacttttatacataaatcaatatataaatgcatagttttatacataaatcaatatgcataggtattaaagtagttgatttcatctca

SEQ ID NO: 5249 - DNA, 201 bp, Homo sapiens
gattgataatataaatgcatacttttatacataaatcaatatataaatgcatagttttatacataaatcaatatgcataggtattaaagtagttgatttcrtctcaaacatcaatctagctcattgatataattctagaaaataaactagctttgttttccctcagtttgaaataatattttatccttagttattctagtt

SEQ ID NO: 5250 - DNA, 201 bp, Homo sapiens
attgatgcaactattgagatacttttgccatatcacccctcttgttctttttctctatttatctaccttaggggcagaagagtgtaggggtacacaggtgkgccagtggagtaagaaagagcataagctcctgaatgtgaaatcttgggttcaaatcctgtgtctgctaaatagctgagaaaacatgggcaagtggctatg

SEQ ID NO: 5251 - DNA, 201 bp, Homo sapiens
taagctcctgaatgtgaaatcttgggttcaaatcctgtgtctgctaaatagctgagaaaacatgggcaagtggctatgtatctataggtggtaatgagttycccctggacaatacaaattccaatacaaagcaatgtaaagcaaccccctgccatcacccccagccctgttctcgaactagaggagacttgagttcatata

SEQ ID NO: 5252 - DNA, 201 bp, Homo sapiens
ctgacatgaaatgaaacaggaagctgaaatcccaacacttcatagagcatatttgtcatgaccctcacaggattatgtcaatcattatgtgttatggataagttatcttctttcaggaaagttatcttctttcatttgtaagatattttgtaagtctcattatcatttttatcatgtttgaacaattgtttgcaaattaaa

SEQ ID NO: 5253 - DNA, 201 bp, Homo sapiens
taaaggaagtttagtaatgaatgattcatttctgtgcagattgtgagatggaaaaatgctgataagtatcctttatttttactcctttgggataaaaaaaaggataagactaagttggcctaggttgagctaaggcatctagcattgaaagggaagatggaagagctgctcatagaagcatatgtaacctcctgagccttg

SEQ ID NO: 5254 - DNA, 201 bp, Homo sapiens
gcaagatgaatttagaaacaacaaataacagaatacctttaaaggcttttattttttccttgtttattttgtaaacagtaattggttcattaaaaagttcrttaatttggtgagtaggtgaaactagaaaagaggtactcaggtaaataggtattttaaagtcaaatgtaaaaattttgaatcttaagtgacttgtgtcct

SEQ ID NO: 5255 - DNA, 201 bp, Homo sapiens
tgagaggatataattcttacaaaacactttcctgtgacatactgctatcatgatctcttgatatgatgccttgagaaggacacagtgtcagctctgtggcrttcttactaaaaaatgtaagttttcaaaatttaataatgaataaatatcagacaaacccccaatgaagaagagtctaccaaataactgattagttatttt

SEQ ID NO: 5256 - DNA, 201 bp, Homo sapiens
tagaggctcacctattctttctatgacctggagcctcttaaagtaagtgcaaaatttaacacagcaaaataaagagaacaaagacttaaaaaaaacaaacraaaaaaacaccttgcgacctccatcatctgttattacatgttacagatcaaacaaaacactagtaactgatgatgcagagaaaagcagatgccaaattca

SEQ ID NO: 5257 - DNA, 201 bp, Homo sapiens
aaaccaacgagaacaaagacacaacataccagaatctctgggacacattcacagcagtgtgtagagggaaatttatagcactaaatgcccacaagagaaarcactaaaagcccaaaattgacaccctaacatcacaattaaaagaactagagaagcaagagcaaacacattcaaaagctagcagaaggcaagaaataactg

SEQ ID NO: 5258 - DNA, 201 bp, Homo sapiens
actttgggaggctgaggcaggaggattgcttgaggccaggtgttcaagaacagcctggaaaacataacaagactttgtctctacaaaaaaaaaaaaaaaaaagccacacatagcaagataaagtaagttaaccaagtatatatttgtatatgtttatatatataataattaaaaatgaaaaatgatataccaggtaaatta

SEQ ID NO: 5259 - DNA, 201 bp, Homo sapiens
aaacatcaggaggctctcctattgtagagatttccctgaaactgaactctggaggatgaaacatttggtgtagatacttgaccttctaaaaataaagcttkatgtatgtgtgtatctatctatttttctcatagcagcaattagtctgaaatctaatgccttgtcagtgaacataacaatttttgtaaatgttctcctctt

SEQ ID NO: 5260 - DNA, 201 bp, Homo sapiens
agtcaaagtatattcaagacttgaatgtaagatctggagccataaagctcttaggaaaaaaagtataaatctttgtgatgttggattaagcaatggtttcytagacatgccaccaaaaagcataagaaataaaaggaaaaaatagataaatgggacattgaaattaaaaactttcatacttcaaaggaaaccaccaagaaa

SEQ ID NO: 5261 - DNA, 201 bp, Homo sapiens
tagaaggaagaaaatcactttaaaattttttattagctactccaagggtagatctgatattttatttatcttaacctaaatatgcttcataagaatctaaraaatgctgctgtggatcagggaagaggcctttaaatgtaatgttttgtcttcgaggtctctggaggggagagaatgggagtgtgatattgaggagagttc

SEQ ID NO: 5262 - DNA, 201 bp, Homo sapiens
tataagacgagaaagagacacacgggcttcctctctgtctctcatgtgataaagcaagaaggcagccatctgcaagctagaaagagcagatcaggttagarcctgaccatactggcaccctgattttggacttcccagcctccagaactgtgagaattatatgtctgttatttaagccatctgatctatggcattttggta

SEQ ID NO: 5263 - DNA, 201 bp, Homo sapiens
agcactccaacctgggtgacagagcaagactccgtctcaaaaaaaaaaaaaaaaaaaaaaaaaattgagtcaaagtatattcaagacttgaatgtaagatmtggagccataaagctcttaggaaaaaaagtataaatctttgtgatgttggattaagcaatggtttcttagacatgccaccaaaaagcataagaaataaaa

SEQ ID NO: 5264 - DNA, 201 bp, Homo sapiens
ccaaacactaatcatatgtcttactttgagcaaagattgaatattctaagttaaaaatagcacattgatgctggaggtaactcacattaatgtccacaaaratgcactgggttgtaagaggacactgtcaaatataattcctctctcttttgtttttctagttaactttacctggattgttaattttctacccttgaagga

SEQ ID NO: 5265 - DNA, 201 bp, Homo sapiens
agtcagtcattataaaacatttgataattataaagacatatgattctgtgaaaatagagtgtctgtaaatcacgtgtacatttccaaaatggcttttgaargtgtctcacccagatattatcaaaccaaactccatgagaaaaatgagatgggcaataaaaaggaaaatattagtgaagatagactgttagtgaaggggta

SEQ ID NO: 5266 - DNA, 201 bp, Homo sapiens
ataggtggtaatgagttccccctggacaatacaaattccaatacaaagcaatgtaaagcaaccccctgccatcacccccagccctgttctcgaactagagragacttgagttcatatattctggggaaaagcaggaaaagggttgattatttaaaataaatacaaacacacacacacacacacacacacacacacacacac

SEQ ID NO: 5267 - DNA, 201 bp, Homo sapiens
ccagttattcatgcttgttaacttgtgattttgatattttgtattatagttagtaataaaaatttagttatttggaaattagtgggcaagaagctcttttycagagcactgttgtaaaatttggggcacccaatcatgattatcctgtgtaaacactggtaaatatgttactggaaaaaatattcaggggcaatcaattaa

SEQ ID NO: 5268 - DNA, 201 bp, Homo sapiens
aaaaccaggattttaataattatgcttactccttttctgcaagtccagttatgctacctgaatgaatctgaagggaataatatttagtagccataatatartaattgctttttgaattgatattacgttgttagaaggaatctagaaacaaaatagagaagtattaatttatctactaatgtaagtaatgtaaatattata

SEQ ID NO: 5269 - DNA, 201 bp, Homo sapiens
gtgaattccatgagcatgagcccactgccacacttctttggccacaaagtgagtgccttggtcagaggcaatgctgtgtgggataccatgacagtggaccrggcattctgtgagtccatggatggtagtcttggcagaagcattgtgtgcaggacaggcaaactcatatctggagtacatgtctattccagtgaggacaaa

SEQ ID NO: 5270 - DNA, 201 bp, Homo sapiens
agtaaatttgggtgttgcaagaaggaacgcagaactgttgtggtttttatatgtctataagtctgcttatacaccaaatccattttagtcctagtgaaggkttgcttgcatccgtcaatatgtagcctaattggtgacaagaattgcttcttctgttcactattccactttgaacacttgaaactgaagaatgactccaac

SEQ ID NO: 5271 - DNA, 201 bp, Homo sapiens
atagagaggggacttgtgcaaacactaaatcactcatctttttctgtgagtagccaatagatactatctaaaattggtaactcaagagatatgagtacatkctttacacaacaggaaaaacaaaacaaaaaaacattcaaactcattaattctatacaatgggatcaggagatgtaagattattcaagtataaatcatcgc

SEQ ID NO: 5272 - DNA, 201 bp, Homo sapiens
gaactaagacctctaggcgagcagaacataatgtcgcggtaccaggaagcaaaaattttgctggtggatcactaagggtgatggtgagtgctgccacttcracttccaccccttgattcctggaccagtgaatcttggctatgggagaaacagtaccatatataggacgccgattcagagcatacacagccttccagagga

SEQ ID NO: 5273 - DNA, 201 bp, Homo sapiens
accccagctaacactgtaactcccttcttagcctgttgacttaaaggtaggaggagcccaaagtgtccaggtggcaatcttaacatccagtttaatggaaytattgttgtgtttcctggtggcagcattcctccctctggaactaagacctctaggcgagcagaacataatgtcgcggtaccaggaagcaaaaattttgct

SEQ ID NO: 5274 - DNA, 201 bp, Homo sapiens
atataaaaattgagtcaaggcagggcgcggtagctcacacctgtaatcccagcactttgggaggccgaggtgggtggatcatgaggtcagtagtttgagaycagcctgaccaacatggtgaaaccccatctctactaaaaatacaaaaattagccaggcatggtggcatgcacctgtaatcccagctactcaggaggctga

SEQ ID NO: 5275 - DNA, 201 bp, Homo sapiens
aaggtatcttttctattatttgaaatagccttgtgttcaattgtatcctcttcttccccacaatgcatattaccaggataggctctgttactacttctgargatgataaatagaaatatagtttgctctttgatgagaaagaaaacaacactattgaactgaagtgcattaaaacaaatacccagagtattcatgggtatt

SEQ ID NO: 5276 - DNA, 201 bp, Homo sapiens
agccaggagcattgatcaaggtggatacactaaacattagattttcaatgtagaagaagattccatctaggacttttttttttttttttttttttttttttaatctatgaggaaaagtcaatacctggcttcagagcttcaaaggacaagctgatcttcttgttaggggctaatgcggcttgtgactttaagtgaaagcgt

SEQ ID NO: 5277 - DNA, 201 bp, Homo sapiens
gtgtttctataaatataggtaccctggaatgtgattttaatgctatatctttcccttgtgtcatgctttggaaatgtatctaccttgggagtcagttaaaycacatgtggatgttttaaataatccttgtgattaagcaagtaaaatatcttctttagatttggaccagctattttgtttccatcataattttggacatta

SEQ ID NO: 5278 - DNA, 201 bp, Homo sapiens
aaaagtgctccccaatgaaagttatcaaaggtgaagcaatagtaacacattccagaagaggaaaaatgcatctttaaaactgtatgtgtgtgtatgtatgygcaggtgtgtgttttaaactggagtagagagtatgaacacctagcataatactgggaatttgctaaattctttttattaatataaaataaatgttattta

SEQ ID NO: 5279 - DNA, 201 bp, Homo sapiens
aatatctatttctctcaataggagaaagtgcaaagattagcccattttctgtgtgtttctataaatataggtaccctggaatgtgattttaatgctatatytttcccttgtgtcatgctttggaaatgtatctaccttgggagtcagttaaaccacatgtggatgttttaaataatccttgtgattaagcaagtaaaatat

SEQ ID NO: 5280 - DNA, 201 bp, Homo sapiens
gtcccttctgtgggtatcccaaactctttgatattatataggtgaggaagtatgtattgcttactacctatttaagttcttcctagtattctggccctttracagtttattctgtttgtttttttttttccttctttgattacttacagttgtaataccttttaaagacatttgatatctcttccttgacttattccacat

SEQ ID NO: 5281 - DNA, 201 bp, Homo sapiens
ctatgaagaaagggttgagtagaatatctatttctctcaataggagaaagtgcaaagattagcccattttctgtgtgtttctataaatataggtaccctgraatgtgattttaatgctatatctttcccttgtgtcatgctttggaaatgtatctaccttgggagtcagttaaaccacatgtggatgttttaaataatcct

SEQ ID NO: 5282 - DNA, 201 bp, Homo sapiens
tactactgaattcgacacagctggaaaacaggttttccatgagataatggcctgtgtggcaacagacaaaggcatttttgtaccagagcacaaaaataagwgcctagttattttcaaggtaatgtgaaatcattaaagggtaatctgggattggtgagattggagatagggagacccattaaaaacttaatacattaattc

SEQ ID NO: 5283 - DNA, 201 bp, Homo sapiens
aggagtatcctcatggatacctcaaaaacaagtaacccgtagacagaggacagagaaatttcatgcaaagacagattttcctatccgttatgattaaattytctcagtttcctcattatgaaaatcatttgggatacttgataaatgtacagaatcttctgcctcaattcatactggtcaatataaatcttagcttgggga

SEQ ID NO: 5284 - DNA, 201 bp, Homo sapiens
tcagataaagggggaggagtatcctcatggatacctcaaaaacaagtaacccgtagacagaggacagagaaatttcatgcaaagacagattttcctatccrttatgattaaattctctcagtttcctcattatgaaaatcatttgggatacttgataaatgtacagaatcttctgcctcaattcatactggtcaatataaa

SEQ ID NO: 5285 - DNA, 201 bp, Homo sapiens
aaaaagtttgccctgagtagtagaggtgaaaagaatattgcaggaaattaggagtaaggtatgctgaatagaggcaacatggaacagccttttttttttttaaagagtttgtattcctagagttataggataaagcattacacagtaagttagtctcagcaagtactgtatatttcccaagtaagtggagttcttgcaggc

SEQ ID NO: 5286 - DNA, 201 bp, Homo sapiens
cgagtgccagctcaaaccgtaggatacatggagaggtgtttagtgtgataagatccaaacagattggcaaactttgaagaactttactgctaggccaacamgtttagattccaaaatagaacaaacatatttagaagcaggcaaaacaaaagaatacgtttatgaaggagaccaaaaagttgcagagagagaaagaggaag

SEQ ID NO: 5287 - DNA, 201 bp, Homo sapiens
ctttggagacaggtaaatattaagaataaatcttgaagaacaagtcatatctgaataggaagagatatggttggtggaccgcatttcaggtagacagagaatagaatgagctaaagtgtagagatgagaaatttgagtagtccagttgtctagactagcactgtccaatagaacttatgtccatgaaggcaatgttgtatg

SEQ ID NO: 5288 - DNA, 201 bp, Homo sapiens
ttcacatttctcactgttttgactaccagaaggaaaggatgtgtggggcacagtcagcaagttactctagttatcttaccccaatctccaaatccccagarctctggcatttaatgccccttggaattattttattgttattatttctagtctataatttgtaaccccactcttcccctccccaacaaatggaaagccaat

SEQ ID NO: 5289 - DNA, 201 bp, Homo sapiens
agtaagatgagaacttgactaggtagtctctaagggtctgtttaattctaagatgctcttattttagaaaaaaaaatgccagctacataagaaatggtcarctactcagaggcatgacctaatttttaagcaaatgcacatgaagattattatgcatattcagtgagagatgcaaattaatgcaggaagcattttagaaga

SEQ ID NO: 5290 - DNA, 201 bp, Homo sapiens
ccaggttgattccatgtctttgctattgcaaatagtgttgcaatgcacatacaagcacatgtgtctttttggtagaatgatttatgttcctttggtatctkcccagtaatggaatttctgggttgattggtagctctgttgtaacttctttgagaaatctccagactgctttccacagtgactgaactaatttacattccc

SEQ ID NO: 5291 - DNA, 201 bp, Homo sapiens
taaaaacaatgctcagcacacaggattggtttgagtattgactaagactcctgcttcttcttactcgtttgttggtaagtgagatgacgagtcttcatttkccatactgaccaacctaaatccctttggcattctctaaactctgctgtccctacttttttgctgatgcatttggtcacttgagaaatgttaagtttatat

SEQ ID NO: 5292 - DNA, 201 bp, Homo sapiens
taatgttgatattaatgcttttgtggccagttcaccaattatgatttttaatcagcaaaaacgttctttctttcatctcatattttctcttattatttttrtgcaactggtctttggaaaaataagtttctccctgtgaaattgtttttccccatgaaatttaatttttcaggcttggcacattttcctagtctgatgaga

SEQ ID NO: 5293 - DNA, 201 bp, Homo sapiens
gactttggagacaggtaaatattaagaataaatcttgaagaacaagtcatatctgaataggaagagatatggttggtggaccgcatttcaggtagacagagaatagaatgagctaaagtgtagagatgagaaatttgagtagtccagttgtctagactagcactgtccaatagaacttatgtccatgaaggcaatgttgta

SEQ ID NO: 5294 - DNA, 201 bp, Homo sapiens
gtaaaccagaagtggtgggtgatcataccatagcagaccataataaacagcacagccctgaaattttcactgagcttcgtcttagtgagtctcccaactaygtgaagaccatgggatagctgctactggcagtactgatctccctacaacccactacctgcttatagatatctccatagagaaaaagaaaaggcagacttc

SEQ ID NO: 5295 - DNA, 201 bp, Homo sapiens
atgtttcaacttgaagacaactattcaagtatcatattaacattcaaatagcatcttactatgtggctctgggcaaatctttgtgcttcagtttactttaytgtagagtgaggataataataatggtatatacatctctggttattgcaaaaattgaatgaattaatatatgctaagttcctaggacagtgtctgacatat

SEQ ID NO: 5296 - DNA, 201 bp, Homo sapiens
gataatttgaggtcaggagttcgggaacagcctgaccaacatggtgaaaccctatcccatctctgctaaaagcacaaataaattagccaggcatgatggcrggtgcccataatcccagctatttgggaggctgaggctggagaatcgcttgaacccgggaagtggaggttgcagtgagctgagacggtgccactgcactcc

SEQ ID NO: 5297 - DNA, 201 bp, Homo sapiens
gggtatcaggcacgtttatgttttacccaagagacttatttaacagtcattcaaccatttggtcattaatagtgaaaaggtcataggctttggcatgaggsaggcctgggtttgaaacagatcttcaccatttcctagaaaggttgtcttaaggcaaattatttttttagacaccttttcagtttttctgttaaaggaaaa

SEQ ID NO: 5298 - DNA, 201 bp, Homo sapiens
tggatccactttgcaagacacctgtgtatacatcctctaaatccattatctcccacttgaaagtatttccctaaattgcccaagtagtgttgtaggacttwcccttagttcaactaaagacagggtccttgtctgtcccaaagccataaaaacgtaggcttgcagatcatctgaacagtgagtaaggagggttttgttggg

SEQ ID NO: 5299 - DNA, 201 bp, Homo sapiens
actctctgctctctgtgtttatcttgggtggggcctatggaaggctctagcaggatattggagggcaggaagagaaagaggtcaggatatttcttcttcakgtcctacttcggtcctgtgcgctggccgtgatcatgtcctttcaggatataactcccttcaccctgttctcctctgtacctcttctgatgcagggctcct

SEQ ID NO: 5300 - DNA, 201 bp, Homo sapiens
gagagatagagctccagtttcattcttttacatgtggctttcaatttacccagcaccatttattgaatagagtgtcctttccctagtgtatgtttttgtcygctttgtagaagatcagttggttgtaagtatttggctttatttctgagttctctattctattccattgttctatgtatttacttttataccagtaccatg

SEQ ID NO: 5301 - DNA, 201 bp, Homo sapiens
tggtttttgaatacatattaggttgcttccaatccatctgaaatgcagtctcatgagaacataggtctgcaatctaaaaaaaatactttgattattcttgrtacataaaacaatagctatttttatagagttagaaggaatattagagattatttatcttatatcccttttttacagattgaaaagctgtaatcaatttga

SEQ ID NO: 5302 - DNA, 201 bp, Homo sapiens
tcttcattgattatcagtttatctaatctgtgtatcatccatctctaaacctaatttttggatacatatacaaccaatagacatgggatataccaacaatrtaattgcatgatagtcttagttaaaaagtttagtctgtctctgtgaatttgattcttctgctttgcatgattctggctgagtcctttcatctggtgctgg

SEQ ID NO: 5303 - DNA, 201 bp, Homo sapiens
ttttgtctcctgtctaattttatttctttcatgaatacacatattttatacatctgatatttcagaaaatgtgcttaaaaatgtctatttttccatttctycattgattatcagtttatctaatctgtgtatcatccatctctaaacctaatttttggatacatatacaaccaatagacatgggatataccaacaatataa

SEQ ID NO: 5304 - DNA, 201 bp, Homo sapiens
aaaatgacccctatcttcaatatctctatgttttaacacctgctttgtttttacaatagaggcccttgtttggaacaaagccacttaagctgaacgtcattgtacctgcacagttacctgggttatctgtggttgtgatgaaaattacaccaccataatcaccccaggctacttacaaggcaccttcatagaaattatact

SEQ ID NO: 5305 - DNA, 201 bp, Homo sapiens
tgaaatatgtcaggaattttgctaacatgaaatttcatcatttgtccagttgtgtacttaatggattcatcttaagtataccgtaattcctggcaataatgtggggaagctcagatttacttttcagtgcatgttagtatgtaaaatgacccctatcttcaatatctctatgttttaacacctgctttgtttttacaatag

SEQ ID NO: 5306 - DNA, 201 bp, Homo sapiens
ttcacttaggcacctttgtgcactagatctctgatcaaattattttgaaattttaatatgaaatacataggagaaaaaattgaaaatgtgtagcagtaggmaagcttttctttgttaaaaaagtgtaatttaatagagtaagaggtgtgaaatatgtcaggaattttgctaacatgaaatttcatcatttgtccagttgtg

SEQ ID NO: 5307 - DNA, 201 bp, Homo sapiens
aattttctccccttctgtaggttgcctgttcactctgatggtagtttctttcgctgtgtagaagctccttagtttaattagatcccatttgtcaattttgrcttttgttgccattgcttttggtgttttagacatgaagtccatgcccatgcctatgtcgtgaatggtattgcccaggttttcttctagggtttttatggt

SEQ ID NO: 5308 - DNA, 201 bp, Homo sapiens
taggaggctagaacgtttgtccattggcatagttcttgttctctaaggatctatttcttctaacctaattttaaaagaaatgacacatgcttattaatacscttttttgtcaagatgctgtgattattgattgccaaagctctctaaggctagtctttccactgttaaggcttcaagattttataaacaagatggaaggct

SEQ ID NO: 5309 - DNA, 201 bp, Homo sapiens
cattcttttgtaaattcaatattgttgaatctagtgcctctatgtctactgaacctcatgctaaaggtgtgataattgcatatttgcagttaaatagcaayagcaataatagcacacacaaatataccatctaacttacggagagatgctttcctaatgcctaccaaagagcttcctacgctgtgagtagacagtggtttt

SEQ ID NO: 5310 - DNA, 201 bp, Homo sapiens
tatttctatatattgggttgggatggctcatcaaattcaagtaaaacatactcataaaggaggaggaattacccatgataattaaccgtaaataataaatmcagtaaataagaaggaaacagccttcaaagtttaaagaatggattttctttttctggaaaacttgcctggatacataatcattgtcaattaaaagtatgt

SEQ ID NO: 5311 - DNA, 201 bp, Homo sapiens
ctgctcaccttcccttcatccacaaatatttacatgctagatattacgctaggcaatgtagagtacagtagtgaaaaaattcaacatgatccctctttcayggaggttactattgcctgcctttttggctttatttggggttatctaaaaacctcagaaatgttttaatgctatctcacacaaaagggagtgcagtccaaa

SEQ ID NO: 5312 - DNA, 201 bp, Homo sapiens
ctgaaagatgaatggagagattcagtccatctgtaggcagcaggttgagttagtagggtgttgcaatagtccaagcaatgaataacaaggtcctaaataargctgtggttgcaaggatggagatgaggtgactagtaggaagacctttaagaagtagaatcaaacaattgcaagcaatggggtatacagagtgagggagaa

SEQ ID NO: 5313 - DNA, 201 bp, Homo sapiens
caacagacagatgctaggttcagagtatcagcctacaccgcccactccatatacagtgatcgtgccctaagtatgattttttttctttctcacgttcttcmttccatttatttccctgtcttccatcctctctacttctttccttcctgctcaccttcccttcatccacaaatatttacatgctagatattacgctaggca

SEQ ID NO: 5314 - DNA, 201 bp, Homo sapiens
ccaaactaaggaggtagggcatttgaagaattatataaagggcagcagcgtgaccagatttgtgtttgagggagttccttctgatggtaggctgaaagatkaatggagagattcagtccatctgtaggcagcaggttgagttagtagggtgttgcaatagtccaagcaatgaataacaaggtcctaaataaagctgtggtt

SEQ ID NO: 5315 - DNA, 201 bp, Homo sapiens
tcctaaactagtagaaaatctagactttacccaggctttccttacccagataatccctagaatctgcagttttggtcacatttaatcctgagcctgtctgkcttgctacacatctatgacactgtgctggagagatgcaactccattatactccttcaagccagacttttcagaaggtgctcttgggtaggccacttactg

SEQ ID NO: 5316 - DNA, 201 bp, Homo sapiens
gagcagcattccttttgtgaaagaggggggcagcatttgcaaaagtttagaaccaaggaagggtaatggcaatttcaaggaagcagattttgttgttgttkttgttgttaggtaggatgcaaggagtatgggggcttaggaaagggatgatggggggaccttgtttttaaaccaaactaaggaggtagggcatttgaagaa

SEQ ID NO: 5317 - DNA, 201 bp, Homo sapiens
ctttacatatttgagggtagccaccatggttctttgaaatttattttcactttaaacatgcttatttccttcaaaagtccttcagatattctggttttttycattttaaatgttcaataaatccctcttgaaatctttgacaagaatgaagcagagtatgccaagagatattggactagcacaggtcagttctctcaggga

SEQ ID NO: 5318 - DNA, 201 bp, Homo sapiens
ccaggaacacagagatgcctgggtccagagatggggcagagcagctgcagctgcacccagggagctcccacccagctaactcagagggggtgggtctcccrcttgtccagggctcttgcaggctccctgaagcatggtaccaccccaggcccggctccgcctcgagtcccctctctgctcacccctctgtgcccaaccaca

SEQ ID NO: 5319 - DNA, 201 bp, Homo sapiens
gaaggaaacttggaggtcatcctgttcgatattttgctgagtgtcacctgtcaggctgatgtaaaatgaggacagggagtacatagaaacatttcggtttytctgattcagtagtactcttgaaggcctttattggtggtgcaaaatgaggctttctcattgactctaaataggcttattagcagcacgcagaaggatttc

SEQ ID NO: 5320 - DNA, 201 bp, Homo sapiens
aaagggatactggggcattgaatcagataccttcaagtgcctgggatatagtaatcattcactgatttgtaataatacttttattattactttgttttaaygtgctttctacagtgtatttgtcttcataatgtgctcaatttgtaatttatttcacaactgaatgtgggcttttattcatcactcctctccacgttcaat

SEQ ID NO: 5321 - DNA, 201 bp, Homo sapiens
ccttctcttcacccacaacgtggcaagcaaggggcatgtttcagccctgtttctattacagcttttagccttgccattcagcaggtaccaaggtcttgtcytgagtccaggaagaatgaaatatgcagacaagtggagcgtgagcaagacaaagaggagctttactgagcaatagaacagcttagaagagactctcagtgg

SEQ ID NO: 5322 - DNA, 201 bp, Homo sapiens
acccagatctctttcagaaagaaaatagacagtgctagctaagctgttggatgggagcaatattcagttctttgccaacagagatcctagactccagataygccaattcagcaaaccacagggagattatctaaaactgaaaaggggctcaagaatccatcagaatatgagataatttaaataaaatttaaatcctactgg

SEQ ID NO: 5323 - DNA, 201 bp, Homo sapiens
cagcaaaccaacatggcacatgtatacctaagtaatgaacctgcacattgtgcacatgtaccctagaacttaaagtatttaaaaacaaaaaacaacctgtrgtctttccttccaccagccttcagtagcagtgactcctgcactgacaccaccagtatgagtgggtaagttagtgatgggacagaaacacttctcaagatc

SEQ ID NO: 5324 - DNA, 201 bp, Homo sapiens
caaataaatgaggaaacaggtcttgtggaaatatatatgatctgtatgaatgattaaaatattctgaaatttattgaaggctagacaggaaacagtgagaycctttccacatccacagattcattattttcttatattgctaaagttatttccaaatattatctcatttattctttcaacagcctttcctattgttaacat

SEQ ID NO: 5325 - DNA, 201 bp, Homo sapiens
atttaacatggcatgagcatccctcattttaagatattaaagaattaaatttttgtttttatatagaaattctgaattaagtcagaaggtcaatatttgcmatacacacaaattattaaactaatttctcacaggtttcctaagtaccagcttctcagtcagtgaatataaaatgtgatttgatttattaaaattaaaatg

SEQ ID NO: 5326 - DNA, 201 bp, Homo sapiens
cccatctgacaaagggctaatatccagaatctacaaagaacttaaacaagtttacaagaaaaaacaaccccatcaaaacgtgggtaaaggatacgaactgrcacttctcaaaagaacacatttatgcagccaacagacatatgaaaaaatgctcatcatcactggtcatcagagaaatgcaaatcaaaaccacaatgagat

SEQ ID NO: 5327 - DNA, 201 bp, Homo sapiens
tgatttatttaacatggcatgagcatccctcattttaagatattaaagaattaaatttttgtttttatatagaaattctgaattaagtcagaaggtcaatrtttgcaatacacacaaattattaaactaatttctcacaggtttcctaagtaccagcttctcagtcagtgaatataaaatgtgatttgatttattaaaatt

SEQ ID NO: 5328 - DNA, 201 bp, Homo sapiens
cggaatttggatacatagctttctgaattgtttaaaaaaatactgggccaggcgcagtggctcacgcctgtaatctcagcacttttggaggccgaggcagkcagatcacgaggtcaggagatcgagaccatcctggctaatatggtgaaacctggcctctactaaaaatacaaaaaattagatgggtgtggtggcgtgtgc

SEQ ID NO: 5329 - DNA, 201 bp, Homo sapiens
tgatagacctatagaacaacaatttttaaagccattttggatcggattttctatcatttgcagctgcaagcatcctaactaatacaatgtattaaatatargtggaaatgatttatttaacatggcatgagcatccctcattttaagatattaaagaattaaatttttgtttttatatagaaattctgaattaagtcagaa

SEQ ID NO: 5330 - DNA, 201 bp, Homo sapiens
gaggaccctgccattccagtttctgtagaaattgttttcactgtccataagtggagcccctctggccatgtctctattctacaaccctgatcctctccctkgtgtctcttcagccacaactgattgatttaacactgagctcttcactaaagctaaattatcagagtccttccgagtaatatctaaaatgggagtgaaagg

SEQ ID NO: 5331 - DNA, 201 bp, Homo sapiens
tatcagcatgtgttttttcttagtggaaagatcccccaatatccagtatagtacctggcatgtaacaggctcttcatgaatttctgttgaatgaccattgycaccagattcctagttgtgttagtaatgtgagtctgggggtaaggtttgctcagcctctgggaaccaaagggcagagctgcttccaaccatgccttatgc

SEQ ID NO: 5332 - DNA, 201 bp, Homo sapiens
gagaggaccctgccattccagtttctgtagaaattgttttcactgtccataagtggagcccctctggccatgtctctattctacaaccctgatcctctccyttgtgtctcttcagccacaactgattgatttaacactgagctcttcactaaagctaaattatcagagtccttccgagtaatatctaaaatgggagtgaaa

SEQ ID NO: 5333 - DNA, 201 bp, Homo sapiens
tgttctttataaactcaaaagtgctacttaatatcaggtattactagtgaaaggaatggggataatacagattttcccccaaaaggcataacaaagctgtrtattatcataaagatggtaggtatgttgcctggtgtgcaggatatttgaaatagcagagggtttttgcttgatttgttaattaccttcaatcttaactat

SEQ ID NO: 5334 - DNA, 201 bp, Homo sapiens
gagatagagccttgaggactcagaaatatgttgaaggagaggaccctgccattccagtttctgtagaaattgttttcactgtccataagtggagcccctcyggccatgtctctattctacaaccctgatcctctcccttgtgtctcttcagccacaactgattgatttaacactgagctcttcactaaagctaaattatca

SEQ ID NO: 5335 - DNA, 201 bp, Homo sapiens
atcttgatgttagtccaagtttttgaagtgagtgatttcgactgagagaaaggacactgaaatctatggagaccaaaatggaatgaaaaggttgttttatrataggaaggcctcggggcttgtttcactgtcacaggctcttggaatgttcatattgggaggaacctaagaaataagtccaatagcctctttacttcatat

SEQ ID NO: 5336 - DNA, 201 bp, Homo sapiens
ggagtggaaattgcagagggcctgagatagagccttgaggactcagaaatatgttgaaggagaggaccctgccattccagtttctgtagaaattgttttcmctgtccataagtggagcccctctggccatgtctctattctacaaccctgatcctctcccttgtgtctcttcagccacaactgattgatttaacactgagc

SEQ ID NO: 5337 - DNA, 201 bp, Homo sapiens
ttggtcttggaactgtgcatccctagcgcctagcatagtgtctgtaagtgttcgacaaatcttacatgagtggattaacggatggatctggaatcacaaamcttaaaagtagaacttaccctctttgctaggatgctgtctgacatttggcaaatcacaggacctttcaggaccttagcttcctcacccttgagatgaaga

SEQ ID NO: 5338 - DNA, 201 bp, Homo sapiens
agtatgtggagtggaaattgcagagggcctgagatagagccttgaggactcagaaatatgttgaaggagaggaccctgccattccagtttctgtagaaatygttttcactgtccataagtggagcccctctggccatgtctctattctacaaccctgatcctctcccttgtgtctcttcagccacaactgattgatttaac

SEQ ID NO: 5339 - DNA, 201 bp, Homo sapiens
atcccataaattcctgtctaatcatgtgtgacaagattcaatagtgtttctcttattttttacttccaccgagctgtgagctccatgagggcaacaggttkgtcttggaactgtgcatccctagcgcctagcatagtgtctgtaagtgttcgacaaatcttacatgagtggattaacggatggatctggaatcacaaaact

SEQ ID NO: 5340 - DNA, 201 bp, Homo sapiens
atatggacaacttctgcagtattgatgaaaatatcagaaaacagtattaaaatctacagattatagttgcagtaataaagggttttgtaaagacagattaratgttcccattcaatcgatcttataatgcagaaattagtggaaattttttgaaattaataggtatgaaacttaggaaagttagcacaattgcttcataga

SEQ ID NO: 5341 - DNA, 201 bp, Homo sapiens
tttcttttcttttaaagcacaaaatacggcatctttgttcctaagaggaaaggatgaactgacaatatccttccttgtattatcctggtttgatagattgsttaaatctagcatttgtaatgcagatagaaataaacagtttctgaacaaaagctgattaaagaatttagttgaaaaaataaagaacctgcttgcttagtt

SEQ ID NO: 5342 - DNA, 201 bp, Homo sapiens
tcaacagagtatttcttaaaagctttagagtttgtaacagagagatacaataaaaatgtgaactgcatgagggcaccattagatggatttaggtggatttkcagtgggaggagcagccatgttcaaaaagggccaatccagatggaggtctctagaacatttcagggctcttggttggctccattctcttcaggtaattga

SEQ ID NO: 5343 - DNA, 201 bp, Homo sapiens
ccaaaaaaccaattttgtctccatgatctactctacagcaatgttcagagttatttgagggataaagtgagtacaattttgcttttatcccctggagcttstactagtgaaaacactgaatttgtgtaaggtcagggatgtacctctgtgacatagattgtataaccaattttgtaatctgactctgcagcctcctagtct

SEQ ID NO: 5344 - DNA, 201 bp, Homo sapiens
gattctgtgttaacagtcatcttccttaacaataatgctggagaaagggttgcagttttcttgcaggaaaactgaagagtttttgttaggatatgcgactraacagaaagataccccacttccattaagaagggtacaagggagatttactagttgtatcataagcagattccttagctcctctatacctcagtttttttt

SEQ ID NO: 5345 - DNA, 201 bp, Homo sapiens
taaaagcaggagaaaattaaaaggaaaggtaaatgtgggtcattaaatagaaccaggagcaagattaagatgactataaaacctgtttacttgcttaggayaggtcataaatttagctctaaccaaaaagaaaaacctggttagttgaaaatgccgtaggatccagaagaaaagacagaacaattgctctgggaaaagtct

SEQ ID NO: 5346 - DNA, 201 bp, Homo sapiens
tttgctaagcctcagagacaactgtggggtgagggctctctttgacctcctacctattttggaggtttcccaaagtctttagctttaactttgtctttcargcatttcactttatatgttataataagtttggctatggttaccatgattaaatgaattcactatccactgtcattatttctagttgttagttggtcaaat

SEQ ID NO: 5347 - DNA, 201 bp, Homo sapiens
atagccccttgatatcccagctgttatagtgtcatcccaaggcatctcttgactataggattattgctggagaaggaaaaaaacatatttggtatcagcaratagcacagtttttctgactggagcatagtttgtttagtgaattatgggagacaaaattggaaggtttgacatagacacatgattatttcaaatcatagg

SEQ ID NO: 5348 - DNA, 201 bp, Homo sapiens
atgtttaatatgtgtaaaatatctagtgtttgacggttcttatttcttcctctattgatgattactgtcatgtattctcttacatgcaatcagtgtgtggstttacctgacactattagtccctgctttccatgatcacccctacccagcatcacccatgcccttggcagcaattttaattttgttcagttcctgggtctt

SEQ ID NO: 5349 - DNA, 201 bp, Homo sapiens
  misc_feature (1)...(201): n = A,T,C or G, or insertion/deletion polymorphism (see Tables 1-2)
cctaaagcattgattgccctaataattagtaaacgttagaaatttatatttggtttactaatgctgtgtaattgttatcttgtttgtaaattggaattgtntgtgactttttttggggggggttgtttttactgctaagaaaatatgtcagtgtccactgctctattaggttggtacaagagtatttgcggttttcaccac

SEQ ID NO: 5350 - DNA, 201 bp, Homo sapiens
atacctgggaaaggagtgagattacaatgactgagttagactatacattctcagtggtggcagaattgccaccgtggtgaccaaaattggttcttggggaygggggatgtgctagtttcctatgctgctattacagatgaccacaaatctagtggctttaaacaagatagatttattatctttcatttctggatgttagaa

SEQ ID NO: 5351 - DNA, 201 bp, Homo sapiens
aaggtcagtgttaggaatggcttccagtccccacgcttttaaacaatgctcgttaaaagaactaaatggaactactgctgaatatgtatatgtagttgcakcacagagatctttcaaaacttgtcaccaaaaacaaaagccatgaaggaaaaaatttagctacataaaaactaaaggcctcccctcttgaagaaaatacct

SEQ ID NO: 5352 - DNA, 201 bp, Homo sapiens
atccaaaggacatgcatatgattttaacagttattgcagaagctgatcaaatatagtgtcatttcaaagctgttcttcaccccagccattcctaatatttrgggcttagtaactgccaagtagcaacagctgctgttaatatgaaacagcaaacagcattcaaataagtgctttaaaacctatgattctaatgctgtagtt

SEQ ID NO: 5353 - DNA, 201 bp, Homo sapiens
tgtaatatgtattgcaaaacaaactttatataataataatttatttgctgcataaagggcattaaagatacctaactaaaaagcaagtctcaattatttaraaacttgaacatatgctaataattcttcttgatcaaagaaatgtgggttatatatttcaacactcttattgaaggttgagcaggctggtcaggcaggact

SEQ ID NO: 5354 - DNA, 201 bp, Homo sapiens
atccagaaagtatgtggagtggaaattgcagagggcctgagatagagccttgaggactcagaaatatgttgaaggagaggaccctgccattccagtttctstagaaattgttttcactgtccataagtggagcccctctggccatgtctctattctacaaccctgatcctctcccttgtgtctcttcagccacaactgatt

SEQ ID NO: 5355 - DNA, 201 bp, Homo sapiens
tttttttttgtgagggtcaagcaataaggtaaggaaagtttcatccctagtgtacaattgaaacgtgttcactgatcatatttttaatgtatcttagtacrgttttaaaataaagcattttcccctcttgggttataaacaagaagcaagtttctggtaactgaaatggattcactttaagattaaaacgaagtattttca

SEQ ID NO: 5356 - DNA, 201 bp, Homo sapiens
ctggacaaaatatcttgtttatgtaacatatattatatgtaatgtatttaaacacctgattgaatattaagaaaagagcattggattttatttaattaatrcaatatatacttgaccttcagtaaggtttacatgtgaacaattaagtggagagatggagggaggggagaaagaaacacctaggagaaaaggataagggaa

SEQ ID NO: 5357 - DNA, 201 bp, Homo sapiens
acttggtgagacagatccagaaagtatgtggagtggaaattgcagagggcctgagatagagccttgaggactcagaaatatgttgaaggagaggaccctgscattccagtttctgtagaaattgttttcactgtccataagtggagcccctctggccatgtctctattctacaaccctgatcctctcccttgtgtctcttc

SEQ ID NO: 5358 - DNA, 201 bp, Homo sapiens
gcagccaggccacattttgaatgctttgctgcatagaaatttcttctgctgtataccctaggtcattactttcaagttcaaacttccacagagtcctaagrcatggacatagtgcatccaagttatttgctaaggcataacacaggtaacctttgctccagattccagtaagtccctcatttccatctgagacctcagcag

SEQ ID NO: 5359 - DNA, 201 bp, Homo sapiens
gcccaaccacattgttcccctgcctgtaggcaacttggcccggccccatcatggtggcccccagggtggtaggctccagggggtcccccaggggaagtctytagggactattcgcctcttccccatgaactccccatagcagtggctgtcaagagtggcaagcggggccggggcctggagtgggtactgcccggctgcgtg

SEQ ID NO: 5360 - DNA, 201 bp, Homo sapiens
cctcactagtatattaatgggacttggtgagacagatccagaaagtatgtggagtggaaattgcagagggcctgagatagagccttgaggactcagaaatrtgttgaaggagaggaccctgccattccagtttctgtagaaattgttttcactgtccataagtggagcccctctggccatgtctctattctacaaccctga

SEQ ID NO: 5361 - DNA, 201 bp, Homo sapiens
aactcagagggggtgggtctcccgcttgtccagggctcttgcaggctccctgaagcatggtaccaccccaggcccggctccgcctcgagtcccctctctgstcacccctctgtgcccaaccacattgttcccctgcctgtaggcaacttggcccggccccatcatggtggcccccagggtggtaggctccagggggtcccc

SEQ ID NO: 5362 - DNA, 201 bp, Homo sapiens
gagtctgaagctaagaatacaaggtcttgctgagacagagaattggggcctcactagtatattaatgggacttggtgagacagatccagaaagtatgtggrgtggaaattgcagagggcctgagatagagccttgaggactcagaaatatgttgaaggagaggaccctgccattccagtttctgtagaaattgttttcact

SEQ ID NO: 5363 - DNA, 201 bp, Homo sapiens
cctctgattaactcaagcagatcataatggaatgatggtgaaatgaaaattgggttagtgataaattgcttgtacagtttgattagaatgtttttcatttwaaaaaaatcagacttgggaaagtgtcctttgcgaatctgggagaatgaagtttatgagtgtatggtggtcattgatcagacctcagtgatggctcttccc

SEQ ID NO: 5364 - DNA, 201 bp, Homo sapiens
ataagttatagtgtgtccatgcaatggaatgctattcagcaatgaaaataagtgaattacagataaccataacaatggagatacttctcacaagcaaactyaaaagtggcctagcagataaagttcaagtggagagaaagtgatttcttttatgtaaagttagaaaaataacaggcaaaaactaaactaaaaggtttagga

SEQ ID NO: 5365 - DNA, 201 bp, Homo sapiens
gttacttggttatgtgagtctgaagctaagaatacaaggtcttgctgagacagagaattggggcctcactagtatattaatgggacttggtgagacagatycagaaagtatgtggagtggaaattgcagagggcctgagatagagccttgaggactcagaaatatgttgaaggagaggaccctgccattccagtttctgta

SEQ ID NO: 5366 - DNA, 201 bp, Homo sapiens
ggcaaatggtagcaacttaacccattctgaaattatctgatgtctctaatgaaaattcattagttctgtaacatttgcagctcttactacaacattgatgmcatctgtcaccatgttagtagtgtgtttttaaaaaaaaacctcagtagcttgagtgagaaagagatgtatacattcaatttttttggagtgtctgcccat

SEQ ID NO: 5367 - DNA, 201 bp, Homo sapiens
aagagaaaggatggcagttgtagagactaggagagggggataggaagagagtaaggatagagacctaggcaagggacagatcatataacactttatatgcstcaagaggcagttgaaaaatgttttgaaagtcaatgaatgggcaccagaaggttttaagcagaataatagaatcaccatcttagaaagattattctggct

SEQ ID NO: 5368 - DNA, 201 bp, Homo sapiens
ctagaacaaaaatagctgaaaattaaaccttttacatgacaatgatgttaatgggaatggcaaatggtagcaacttaacccattctgaaattatctgatgkctctaatgaaaattcattagttctgtaacatttgcagctcttactacaacattgatgacatctgtcaccatgttagtagtgtgtttttaaaaaaaaacct

SEQ ID NO: 5369 - DNA, 201 bp, Homo sapiens
tgagacatatttttcatcttttgaaatagaaaatactttgagaagaaatattttggattgataagaaggcacagagatcagactactattttatatgcccrgcaaaagattaaacaaactataaaacaaagaaaactgtctagaaaataattcggcaaaatattttcttcttgctctttggttcagaaacactacttccaa

SEQ ID NO: 5370 - DNA, 201 bp, Homo sapiens
agattatcagtagtattattattttaaccagagggtggcacaaagaccagtgggcaagagaaaggatggcagttgtagagactaggagagggggataggargagagtaaggatagagacctaggcaagggacagatcatataacactttatatgcctcaagaggcagttgaaaaatgttttgaaagtcaatgaatgggcac

SEQ ID NO: 5371 - DNA, 201 bp, Homo sapiens
ctcaaccagctatatattttgtaaatgcagtgttttccaagtacttacctagaaacgatagagttaattcaaggaatcgagccattgcttttcaggccttrtttgtgatgttcattttagtggtactgcaaagtgagggaattaacctcaacttcaaacccacgtctttgatctaaaatactcgacagaagcctacaggct

SEQ ID NO: 5372 - DNA, 201 bp, Homo sapiens
ctgccatttctttgctcttctgtctagatatataacccatttcctttctctctggtgctctacttggcccagttcaaatgccaacctgttgcaatcctgtwacttaccctgcagacaggtattttcccctgtctctgctctggaggccctttgaactctaaagtattcccctggcagactgaaaatggaatctttgaggct

SEQ ID NO: 5373 - DNA, 201 bp, Homo sapiens
agggagaactgatgtagcctaggggagaagattggtgtcattgaagttgagactaaaatatgagcagaattaagaaaaagagattatcagtagtattattrttttaaccagagggtggcacaaagaccagtgggcaagagaaaggatggcagttgtagagactaggagagggggataggaagagagtaaggatagagacct

SEQ ID NO: 5374 - DNA, 201 bp, Homo sapiens
gtactgtgaatttgggtaagttatttaacatcctcatgcctaagtttctctaatttatacaataggaatgataagaatacctacctcatagggttacagayaagccatgggaaatgcttagcatggggtatggaacatggaagctaaaactggctataatcattattgtgtttccaattgctcttaaatgtactaattttt

SEQ ID NO: 5375 - DNA, 201 bp, Homo sapiens
aagattttatctagaacaaaaatagctgaaaattaaaccttttacatgacaatgatgttaatgggaatggcaaatggtagcaacttaacccattctgaaawtatctgatgtctctaatgaaaattcattagttctgtaacatttgcagctcttactacaacattgatgacatctgtcaccatgttagtagtgtgtttttaa

SEQ ID NO: 5376 - DNA, 201 bp, Homo sapiens
ataattatatgagaaaagcagtcattccttcttttccctcttatctttatggtgtaatcaataggtctaccaccattcaccaaggaagaaaaagtaaaaarggaaatgttacaattagaacgtcatcggctctctgcaaaagttgcagagttatcagaatgtgtctttgatgcacaactcttttgggtcagtgtgtgtcta

SEQ ID NO: 5377 - DNA, 201 bp, Homo sapiens
aaaaagttatacaaatattaaaactatatttatttatacaatttaagcattttctaaaaaattattagtttattagggttttttttttttttttttttttttaccctgcaagaacatgagcttcatataggaagagattttgtttcattcacagctgaatctcagtgccttgggtggcatctggcacaaataggcttcctt

SEQ ID NO: 5378 - DNA, 201 bp, Homo sapiens
gtagctgctgcatttaggatcaatccaggtagaacaaaatagaagttaatcagatggtctggaccaccaaaagtttttgacttttacaacttactagtackgtgaatttgggtaagttatttaacatcctcatgcctaagtttctctaatttatacaataggaatgataagaatacctacctcatagggttacagataagc

SEQ ID NO: 5379 - DNA, 201 bp, Homo sapiens
taaaaagttatacaaatattaaaactatatttatttatacaatttaagcattttctaaaaaattattagtttattagggttttttttttttttttttttttttaccctgcaagaacatgagcttcatataggaagagattttgtttcattcacagctgaatctcagtgccttgggtggcatctggcacaaataggcttcct

SEQ ID NO: 5380 - DNA, 201 bp, Homo sapiens
gaattttattcattttctgagaatttctaatgactctgaacattaggagatggtctctttcacaatgtttttattttttattttttatttttttctaaaamttgaaaacctaaggctgaaataactttcaagatgatagctgtggttcttgtccaggtaagcattttctcaaagccttcctcagaacactggttctgcagg

SEQ ID NO: 5381 - DNA, 201 bp, Homo sapiens
catggggcattgactttgcagatgttaaacatatttacagatgaggaaaccaaagctcagagactagaaagggcttactcatgactctccagctatagcayttgaccaatactaaagctgtttgcattacacagtggttgcctccatcagcctccatcatgtttcttgttagtaaccattctgggagaagagtggatgaga

SEQ ID NO: 5382 - DNA, 201 bp, Homo sapiens
ctctggggggttggatggtaaatggttggacccagtcacctgcattctaaagaagggctttcagtgatatggagcggtggacttcagactggccagaggcrgcatgtgcaaggctttggaatttaccaaaattcagagcttaattttataattgatttgtttagctataactgagtgacagagtggaacactgatattctg

SEQ ID NO: 5383 - DNA, 201 bp, Homo sapiens
gttcaagaccaaaaattgcacttggaagttaagttctcaaaataagagagacacaaatataagaaagaaagcaaaactcattatactgccttaggaaatasaatttttttttaggggttggcatctcacaaatgcgagagtatcacaggcttacaatttcaaaaaacagtgtgtatgtaaacaaggataatgtttctgagt

SEQ ID NO: 5384 - DNA, 201 bp, Homo sapiens
gaatagggagtagctgtaaagagaggtatatgcaccatgataacttgtctgtctacacaataagcccaaagtatttgttttgatatttaaaaaagtagccyctgtgattcaaatgctttgggaaaaactaaaacttgagcaaactttctgatggaattttgctccattaaattggtctttaccacatacctatagtatagt

SEQ ID NO: 5385 - DNA, 201 bp, Homo sapiens
acttgagcaaactttctgatggaattttgctccattaaattggtctttaccacatacctatagtatagtatttattttaattgaatgtatgtattttcctrtagatgatcagttaaatatatacatgctatatgtatgtatactggggcttccttggcttgcttggattaaaaaaagggaaaattcctgagtctccccatt

SEQ ID NO: 5386 - DNA, 201 bp, Homo sapiens
tttaaataataactgaaaataacagaaatagagaagaaacaaaaaaggtagaccacatatgactgagaacatgtgatattttgtgaatagaatgatggttrgcaaaggcagggaggagtgggggaggggaattaagaaggctaggtagtgggtacaaaaatatagtcagctagaaggaaggagttctagtgttcaatagca

SEQ ID NO: 5387 - DNA, 201 bp, Homo sapiens
agaagagaaatagggctctgttccgcccggctcactggtggtcagagtttaaggttatctcttttattccctgaacattgctgttatcctgttcttttatygaggtgcccagatttcatattgttcaaacacacatgctctacaatttgtgcagttaacacaatcatcacagggtactgaggtgacatacatcctcctcaa

SEQ ID NO: 5388 - DNA, 201 bp, Homo sapiens
acaaagattttatctagaacaaaaatagctgaaaattaaaccttttacatgacaatgatgttaatgggaatggcaaatggtagcaacttaacccattctgraattatctgatgtctctaatgaaaattcattagttctgtaacatttgcagctcttactacaacattgatgacatctgtcaccatgttagtagtgtgtttt

SEQ ID NO: 5389 - DNA, 201 bp, Homo sapiens
tagaaagtagattgtcttgaagagagagcagctataaggtggccaggtaggcatgaggtaaaaaggactaggaccccagtgagcattttgtctacctttgyggtagacatggcagataccaggtatatattaaaactattgaataaggaggaccattggaaataacatgtgaagaattcacataatgctttttgaaaccag

SEQ ID NO: 5390 - DNA, 201 bp, Homo sapiens
tggaatatattaaatatcaaaatcatccctcattttaatgacaaagattttatctagaacaaaaatagctgaaaattaaaccttttacatgacaatgatgktaatgggaatggcaaatggtagcaacttaacccattctgaaattatctgatgtctctaatgaaaattcattagttctgtaacatttgcagctcttactac

SEQ ID NO: 5391 - DNA, 201 bp, Homo sapiens
acaattggaacacaaagctccaagcccagttcctagtatctaggaggctttccttttctgcatcattactgctctgcaatgggatcttttcttctactccygctgtgagccagccagctggggtccatatttcttcaggaagcaaagggaaattagtggttctgcacagatagcattccaagcagcgctgtcagcaagggc

SEQ ID NO: 5392 - DNA, 201 bp, Homo sapiens
aaggtacagcaaggagaacagggtgggcagaacagggaataagggcaggcagctgggagcacctcacatagggcccagaagccagcaggaagcctcccctrgaccatggatggtgtccctccttgtcacctgttgagctgatcagttttctgagttgttcatctagctcctgtattgaagtgttttcaaaggtcttctctt

SEQ ID NO: 5393 - DNA, 201 bp, Homo sapiens
ccttgcttcttttgtcacacagatgggcacatctgtaaaagaagggactaactagtcacaatagctgaaaggttctttgtcttttatttgtaaacttgcamtaggaccaactcttcatctgtgacatatgttctcattatttgaaagcaagtttaatttctacttaataagcattcaattggctgtgcattagcaatcgtc

SEQ ID NO: 5394 - DNA, 201 bp, Homo sapiens
cttaaagtataataataataaaatttaaaaagtaaaaataaaaatgtaaaaagttatacaaatattaaaactatatttatttatacaatttaagcattttytaaaaaattattagtttattagggttttttttttttttttttttttttaccctgcaagaacatgagcttcatataggaagagattttgtttcattcacag

SEQ ID NO: 5395 - DNA, 201 bp, Homo sapiens
tcttccaatatcaaatgatgttataccctcaaaatagaaaatatatattatctgttagaattctttacagtattgctttaagaacatctcatttaaaaagrggaaaatactccttaataatacaaataatatacttaattgattacttagatttattttttatttatggatatttattagacatcatagaaaatgaggaaa

SEQ ID NO: 5396 - DNA, 201 bp, Homo sapiens
tgaattcactatccactgtcattatttctagttgttagttggtcaaatacagccattgttctattaggttcaaaccaagaagataaagaaatacctaccastccattttagcagataatataaagttttgtatgtcattcactggtggagattttatttttccatttttacaatggattatttttattaaagttttatagg

SEQ ID NO: 5397 - DNA, 201 bp, Homo sapiens
acatatgtaaataacctgcacattgtgcacatgtaccctgaaacttaaagtataataataataaaatttaaaaagtaaaaataaaaatgtaaaaagttatwcaaatattaaaactatatttatttatacaatttaagcattttctaaaaaattattagtttattagggttttttttttttttttttttttttaccctgcaa

SEQ ID NO: 5398 - DNA, 201 bp, Homo sapiens
aggtgctgctgatgtctgtcctgggcatttttttcaaggtgcttatccaagtgtctaggcattttaccatcttgtatgtgtacgatgaggttgtaaatccwttccactactttgaaaacacagagcaaaacaaaggaacaacttagagcacaaatcttaactgctgatttgtcaacaacatatctttgtgaattaagtatg

SEQ ID NO: 5399 - DNA, 201 bp, Homo sapiens
gcaattcttccaatatcaaatgatgttataccctcaaaatagaaaatatatattatctgttagaattctttacagtattgctttaagaacatctcatttaraaaggggaaaatactccttaataatacaaataatatacttaattgattacttagatttattttttatttatggatatttattagacatcatagaaaatga

SEQ ID NO: 5400 - DNA, 201 bp, Homo sapiens
atctggggaaaataatggccctgaaagaaaggggtaaagagtttgcagctctttgcctttgctagggggaggaattggaattgtttctctccaacgtagamttttagggaaagatgggttccaccttccatcaaggatcccagtgtctactcgacttcagttgacagactgaggctggctacgtaaaataaaagactgtta

SEQ ID NO: 5401 - DNA, 201 bp, Homo sapiens
ttatactatttgaggggaaagcactttatttccatactacctctaatgaggtaacagaataatgaaaagacaacttggagtacataatggaaaatgtcatytaaaaaggtttcatttatacaattttaaaaatgtaaaaagttcatgtcctttgcccacttttgatggggttgtttttttcttgtaaatttgtttgaacag

SEQ ID NO: 5402 - DNA, 201 bp, Homo sapiens
ctctgccaaggtacatgactgcaaatacctacctctgggttctcacgtgtttccctgttctctgaagccattttgtccactgaatttcattttcttgtggyccttgaagtgcttaaaaaggattagttgggtaataattatgtctgtatgtgagaggactcttattttctttattatagcaacaaagataatattatattg

SEQ ID NO: 5403 - DNA, 201 bp, Homo sapiens
cctgtgtcctataaaatcagtcaaattttattggagtatttggttacctgaatatttaactggaatatttggttacctgaatatttaattggaatatttgrttacttcattataaatgccatgactccatagtgttttgtttttctaaaaaaataaaattacatttatactatttgaggggaaagcactttatttccatac

SEQ ID NO: 5404 - DNA, 201 bp, Homo sapiens
actcaattttcacactttctgctcatttttagaaagggtggctcattattataggcagggtgggagttgtgtaagtcattttactgctggactcttagtasctcaggaagtgggagtatcggtatccaaataggacaaagaaatggtgtagggctatatattttgctatagaatgctcccctattcccttccccccacaca

SEQ ID NO: 5405 - DNA, 201 bp, Homo sapiens
taggaaacagcattcttacatctgtttcagtttcaattgacaccatcagaaaataatctaatcccgtcagtctctgtcctaggcactgaggagaaagaagraaatcatactctcccagctaattctctagggtagttccaaagtactaaaaacatcagtataaggttaccaactttttctttctcttagcatgtaattgtt

SEQ ID NO: 5406 - DNA, 201 bp, Homo sapiens
tttaataaaaggaaaagctcaacatagttataaaagggcttttactgtaatttaagaagaaaatgtactattctgatagtttgtctttaaattcctgactscgatgctaatttaaatgggaatatgattctagaaacacatatagtcctgtgtcctataaaatcagtcaaattttattggagtatttggttacctgaatat

SEQ ID NO: 5407 - DNA, 201 bp, Homo sapiens
tacctgaaccatcttctgcatctgtattttaagcacattctgaatcacagtgtatccagaattactcatgttttccttacaagttttcttaacatcttctrtctacttgggaagccagaaggaaacaaagactttccttttagggttacttttattgctgctatctgaacaaaatgttatttctataatttttaaacccta

SEQ ID NO: 5408 - DNA, 201 bp, Homo sapiens
aatacagttgattccatatcctatcttaaaaccttcctttgtttcattcatccatccattcattcattattcatttagttgtttatacattttgaagctcmccatgtgccaggcactgtgcttcagatagagagacaaacaacagacctcccttgctctcaaggagctcacaaagacatatacactgtcttgtggaatttg

SEQ ID NO: 5409 - DNA, 201 bp, Homo sapiens
cttctttccagctctttgacacctgccctctgtagatagtttctttagtttctggtgagttccttccatattttctttgtacaaatgggcagttatgtatrtgttttcttataatcacttttcttatacaaggagtaacataatatagatactcttttgcacttagctttttttaccttaacagtacatcctggaagttag

SEQ ID NO: 5410 - DNA, 201 bp, Homo sapiens
tttaattgaatgtaatcactgaaactgattttttaaaatcactgaaaaaaaggtacctgaaccatcttctgcatctgtattttaagcacattctgaatcayagtgtatccagaattactcatgttttccttacaagttttcttaacatcttctgtctacttgggaagccagaaggaaacaaagactttccttttagggtta

SEQ ID NO: 5411 - DNA, 201 bp, Homo sapiens
ctgagtatgtgggttaagctgctaaacaaaagccagctccctctggactcaggccgggtcttttccttcctgtctccatcacgaattataaatagctctgygcttatcaaaacgacatcccttgactgatccagtaaatacagttgattccatatcctatcttaaaaccttcctttgtttcattcatccatccattcattc

SEQ ID NO: 5412 - DNA, 201 bp, Homo sapiens
gtcttctttccagctctttgacacctgccctctgtagatagtttctttagtttctggtgagttccttccatattttctttgtacaaatgggcagttatgtrtgtgttttcttataatcacttttcttatacaaggagtaacataatatagatactcttttgcacttagctttttttaccttaacagtacatcctggaagtt

SEQ ID NO: 5413 - DNA, 201 bp, Homo sapiens
aatagcctgcacaatattttggtggaatgcaagggaggaggtggtggggaagaagctgtattaaatttcctgcagcagtttaattaattaattgccctcaracattcattgagcacttggtctgcctggtgttggggatgccaaataaagaaacagagaccctgcttggtcttgagaggatcataagccagcagagtcatg

SEQ ID NO: 5414 - DNA, 201 bp, Homo sapiens
tgctgagttctgaaagctactactacttaatcctacttaaaattccctttgtctttctcgagaagaaaaaaggactcttttatacttgttatcagtggtgrtgggtgttattttatagacttttatctgacctctccctcccttccttcctccctccctcattgtactctcaggcttagtgtctttccactctccaaaacc

SEQ ID NO: 5415 - DNA, 201 bp, Homo sapiens
cttctttgtttgattctagtgaacacatagttttagaattgctatcctatgcccctgcgagaaacatatttactgactaaattctagcatttatgcatttrtatttgtctttagcttcatggtatccagtcaagatactgttttctgtagttatttaggttagtgttactattccccatcctttcagtgtagttttgtaac

SEQ ID NO: 5416 - DNA, 201 bp, Homo sapiens
gggcaggtggctagagaagggctaagaagttagggcagggctgagattggggagccacagcagtgttgtcttctacagagacttgtcataggggagtgttyatcaggcttctggcacacccaggggtaatgaaagggcagttcacaaaaagattatttgtaagtgtgggcacagttagaaaaaacaagggatgatgaagtg

SEQ ID NO: 5417 - DNA, 201 bp, Homo sapiens
taaacagattttcatgcaaattccattgtgggtgataccaaaataacttgtctctgggtggaaaacaaataacactaatttaattttttaaaaaagcaacrtatgacagttttcagatgataagagaagatatttgtctcccaaattaccattttacccagttttcatttctgttttaggggagaagggaagatgatctgg

SEQ ID NO: 5418 - DNA, 201 bp, Homo sapiens
acacacacacactgttaaccagtcacataactttttaataggctgttttcagaataaccagtttctccaaactcatattttctttctttttttttttttamactcgtaagtgggagttgaacaatgagaacatatggacacagagaggggaacatcacacagtgggacctgtcagggggttgagggtgaaaggagagtgag

SEQ ID NO: 5419 - DNA, 201 bp, Homo sapiens
cttgcttagcaaagatactgtctttccgataaaatctaaactttgtttattaacctgtttcctctttcaacaaatatttttaatgcaaacagtaatactgmagtaattacaataaaagcaagcatgtattgaatacatagtatattccaggtactgtatagattatttgatttactcttcacaaccactctatgagaaagt

SEQ ID NO: 5420 - DNA, 201 bp, Homo sapiens
ttttctgcagttctagtttttgcatccagccaagaggaaaatgttattttacagcctttgtattggtgttgatgggttcttagctgacttcttgaagaaaygaaggtgggagaggtagataggacacttctaagagaagagcttaaacattggctgttatccaggcatgggtaatcttgcctctagacagaaatattttac

SEQ ID NO: 5421 - DNA, 201 bp, Homo sapiens
gaaataactactagcacatttaagtaagagttttggtgatacttgcatgctgagggattgtcaatatggtagctttccatattccagtttttaccccatgrcaattcttccaatatcaaatgatgttataccctcaaaatagaaaatatatattatctgttagaattctttacagtattgctttaagaacatctcatttaa

SEQ ID NO: 5422 - DNA, 201 bp, Homo sapiens
cttcctctaatttgggatatgaatagattctactaataactcttaaggcacaattcacacaagatgcaaaattcaaaagaataaaaagaatgtgttaattrgggactttggatttttcttaaatgacttagagatatttgctgttgctccgaatggatatagaagacttaattacataatttcttaatgggccttttaact

SEQ ID NO: 5423 - DNA, 201 bp, Homo sapiens
ggaaaaatatgttttcttctttcatatgctaagtgattacagctagagaggttgacctcactaatatgtcttcctctaatttgggatatgaatagattctrctaataactcttaaggcacaattcacacaagatgcaaaattcaaaagaataaaaagaatgtgttaattggggactttggatttttcttaaatgacttaga

SEQ ID NO: 5424 - DNA, 201 bp, Homo sapiens
ctaatgttttaagaaagtttacagatttgtgttgggctgcattccaagctgtcctgggacacgtgcatgtagcccataggccatggttgggcaaccgtgayctaaacataactgatttagcttgaatatgcctttaaactaaacaggatttttttattcctaaactattcttaagaaaattcagattttccatatcttgaa

SEQ ID NO: 5425 - DNA, 201 bp, Homo sapiens
atactgattgtgatgctgggcattcctgttttgaccctaatcctctaatactgcaatttttaaataatgcctgctgatctctgatgtcactgttgaccatsctaaaaatgatttctaatttaaagttttactaaatatagatacactataaattttgtcaaatgccttgtcacctatcaacatgatgatgtatttttgtcc

SEQ ID NO: 5426 - DNA, 201 bp, Homo sapiens
agcacttttatttactaactgcttccggtggaatttcagattatcagttatttttattcttatttcttttacttgtctaattgcattggttagcacatctrgaatgacatggaatactgattgtgatgctgggcattcctgttttgaccctaatcctctaatactgcaatttttaaataatgcctgctgatctctgatgtc

SEQ ID NO: 5427 - DNA, 201 bp, Homo sapiens
atgtttactattatatcttgttcacaggtcaatctttgaactgggaaattcgttttaaactaaaatagccatagtaagctttcaggacttttaaaaatacrtattttcttgtagctttttcatgatgtcattttaataatgaaacattgaattcatcttcattttgtgttgtaagttatgaaatagacatctaattttttg

SEQ ID NO: 5428 - DNA, 201 bp, Homo sapiens
gctaggtagtgggtacaaaaatatagtcagctagaaggaaggagttctagtgttcaatagcactataggatgatgatagttaacaatactttattgtatawttgaaaatagctggaagagaagattcagaatgttcccaacacaaagaaatgataaatgtttgaaggagatcctaaatcccctgattttatcattacatat

SEQ ID NO: 5429 - DNA, 201 bp, Homo sapiens
tggagctcatgatcaatcttaagtagacgagaatgcagaagaaagagattttaggaaaaagaagaaagccttaagaagaagatcacatttaagctagatgkatctagactattctggacaagggacatgaagatagggaataccaggggtagagaatggattgcacaaaggcaaaaagagggagtcttggaattttcatga

SEQ ID NO: 5430 - DNA, 201 bp, Homo sapiens
ttagtgaataggcatgtatttaatttataacttactgaaaaaaatttaaaaatactaatttgttctaaccacaacttttttttttcatatgggataagcamgttttctttttaccaaatatcctgatttattctgtaatatttccttaatatttatctgatctcattttaaggaatttagggaccttttaagggagatata

SEQ ID NO: 5431 - DNA, 201 bp, Homo sapiens
aaaaaagaggatgatgagtgtcctgagttgtataattaattgactcaaatatgcttcatttgagtaatagaaatatggccttatttaagcacatatgatakttttatgaagtctcagcacaaagaaaataagaaatgaaggaaagcaaaatgacaggtgttttcaaatatgcagtaggatgccttagggaaatgaagaaga

SEQ ID NO: 5432 - DNA, 201 bp, Homo sapiens
ggaggtttcatctagaaggagaacagacactagaagacaataatctctgctaactcctattaataatatatgtaaatgaatttcttttgaaatataatttyaatcttgagctctaagttaaatttttggaatttctcagagtttgcaagtccaatattcacagaatagctagttaaatgtagattaagtaattagctttat

SEQ ID NO: 5433 - DNA, 201 bp, Homo sapiens
gaacccaccccgccaacctacttcaccaattaagttccatgatcaatggacaaggttgtttgcagagaacaaaaaccttttttggcaggggggaaaaaaamaaaaaaaaaccctttttcatggtgaaaatatacgtgattcaggtcttaaattgtcttctgtctgcaaatctgtactcagatgtatgcaagtttcttgcag

SEQ ID NO: 5434 - DNA, 201 bp, Homo sapiens
caagaattgttttcatttttcatttgggtggtccaataatacacacagacaccctaaaattttcacttaaaggatatgcatcataaacttcaggcacttawgggcctttatttacaaatttaagtttctgttataaaatcgtttgtgtttagatttttttggttttcaaaaccaaaagctgtggttctttgttgttggttt

SEQ ID NO: 5435 - DNA, 201 bp, Homo sapiens
aggctggtacttaccaatcacctgaaaccaaaatccataataaatcttaacctttgaaaaaccttatggctttaaagaaattaaatggattttaaagatgwaagtattcaatttaatttcaacaatagttaatcatttatcactacaaacttttttttaatgcttatcaaactgctctacaatgtgccagtgatgaccagt

SEQ ID NO: 5436 - DNA, 201 bp, Homo sapiens
tgttcagatgctgagatgtgcttagaagaaatacaacagattaactgtgaaagactaacctgggtattaggaggaggaaggtaattagactgtgtggtctragtatgcctcgccagaggaggtgacatttgagataagacctgagtgacaagaagtggtcagtcatgtaaagatatgacaggaatgcatgacaagctctag

SEQ ID NO: 5437 - DNA, 201 bp, Homo sapiens
aatgcaatttccttttgaggttgccaggggctggctgtgtccttttagagagattactgcacccctcaaggtggcttccgttcatgactctgtaactgctmtctctcttagggctcatgggtaacaactgccaacctcgacctctgactccttctaggttgtggctttccactgccttctctatatgctgctcctgccttg

SEQ ID NO: 5438 - DNA, 201 bp, Homo sapiens
tttgtggacaaaaaaaaaattcgccacttaattctgtttctcagagtggccagtttcagtacaaacaatgacatttttaaaagatggcaaacttgtaggawttattaaacagctaatgagttagttccttatggctactcaacgatgctctttctacattgaccagagttccatggcagtcatttgaaatgagtcaatatg

SEQ ID NO: 5439 - DNA, 201 bp, Homo sapiens
gtgttcagatgctgagatgtgcttagaagaaatacaacagattaactgtgaaagactaacctgggtattaggaggaggaaggtaattagactgtgtggtcygagtatgcctcgccagaggaggtgacatttgagataagacctgagtgacaagaagtggtcagtcatgtaaagatatgacaggaatgcatgacaagctcta

SEQ ID NO: 5440 - DNA, 201 bp, Homo sapiens
tgctagtaaaacttttagggtagttaggcttaaaaatccccacactactagtgacttgatggattagaacaattcttttcctaaggagctgttgtgctttyttattgtaaaatgtaattagcagatgtaaaaaaaaaaggtttattaatcttatggggtaaaattatggttgcttatatgtaaattatttcatgttcatag

SEQ ID NO: 5441 - DNA, 201 bp, Homo sapiens
tctagtagagcagttggcaccttctgacattcatgccaagtcatcctacccagagccctggattctcaccgacccagtcaccaggcattactgtctgcatycacactttacggagcatcgctgctgcccttcctcattcaccttcacttgtttggactctggattgattttatcatatgttcctgctatcataagtgcagc

SEQ ID NO: 5442 - DNA, 201 bp, Homo sapiens
gaggtggaaatgggtgccacactgtggaagaatctgatttcaggcttccatgtgccaggcacttttccaggagctgggttgagtgaagaaaggcaatattsatgctcacgggcttacatttgagtgtggggagatggacactccataataaacataaatgaacagatgtgttcagatgctgagatgtgcttagaagaaata

SEQ ID NO: 5443 - DNA, 201 bp, Homo sapiens
agtccctttctttgaaagtgaaggttttaaatccaacttgctagtaaaacttttagggtagttaggcttaaaaatccccacactactagtgacttgatggrttagaacaattcttttcctaaggagctgttgtgctttcttattgtaaaatgtaattagcagatgtaaaaaaaaaaggtttattaatcttatggggtaaaa

SEQ ID NO: 5444 - DNA, 201 bp, Homo sapiens
catttaaaatatgaaaatagtgcagaaggtagaaagattatagtaactctgaaagaaggtctgtgttgtgaaagcaagtcacaaaataaaggcaaagaatrctagtagcaagagaagatatatcaattatctaagcatgacatctcaaattaagtgttttttaaaaaaatgtagtaatgtaatattcttaagaactgtgtg

SEQ ID NO: 5445 - DNA, 201 bp, Homo sapiens
aatcctgcatagcagctatcctggaacatgtatgatttttagatgctttactttccatagcttgtgcttaaaaataataatgatattgaatatgcatttttgaatatatgattaaaactatatttattttcagatgattgtgcacatagaaaaaaaactcgcataattttttttttgagacagagttacttagaactgagc

SEQ ID NO: 5446 - DNA, 201 bp, Homo sapiens
tgattatttattgaatgcctgctttttccatttggtcatatgttccatggggctgggaggaccatgtgttgtttacagtcctgtctccagggcctgtcacygtgtctggcatgtagtgggagctaatttgttgaatgaattaataaaaaagtaaccattaaagaacatttaactattagaagaagtgtatgtattggttta

SEQ ID NO: 5447 - DNA, 201 bp, Homo sapiens
ttttgcatgtaccacaagcatttaaaatcaccactctgaaaccatatcacttataatctgtgaccttccattgaaaggatgtttccaaataccaggcactsctgatttcagaagcaaactcagcatcagtaagcccacgttctcactgaggaacacagagtgctcaggtgtgcctgtttggtgtatctgtctccatttctc

SEQ ID NO: 5448 - DNA, 201 bp, Homo sapiens
ttctgctttctccttctcctccttccccttcttccccctccttcctcttcctcctcctccctcttcctcctcccctttcttcttcctcctcctcctcctttctcttactcctcctcctccatctcttcctcctcctcctccatctcttcctcctccttccatctgctcctcctccttccatttcctcctccttgtctttct

SEQ ID NO: 5449 - DNA, 201 bp, Homo sapiens
tgcttctgctttctccttctcctccttccccttcttccccctccttcctcttcctcctcctccctcttcctcctcccctttcttcttcctcctcctcctcctttctcttactcctcctcctccatctcttcctcctcctcctccatctcttcctcctccttccatctgctcctcctccttccatttcctcctccttgtctt

SEQ ID NO: 5450 - DNA, 201 bp, Homo sapiens
atatcctttgttataaacatacagaggcataccaactaccacaaccaagttgctgtaatcagccgtaaagaaaggggcactatttgtagttcaggctgtamtgttttcagcttgtagcacatccttaatgaggataaaatgcaggtgtcttcgttgaatggatcttgaagtggaattataactagattttctttaagctgc

SEQ ID NO: 5451 - DNA, 201 bp, Homo sapiens
ctgcttctgctttctccttctcctccttccccttcttccccctccttcctcttcctcctcctccctcttcctcctcccctttcttcttcctcctcctcctcctttctcttactcctcctcctccatctcttcctcctcctcctccatctcttcctcctccttccatctgctcctcctccttccatttcctcctccttgtct

SEQ ID NO: 5452 - DNA, 201 bp, Homo sapiens
taagcaccgaaaatgtgggaagcttttgagaagcagttttactaggtagactgttgatattaaaagccaggaatcctgagttgttttactgtcgctagtargcagttaatcaacaatgtccatgtgttatctgctatgtacaaagtgctttcctaggatctgctgaagaatagcagtgtatcccagtgcctcagctcataa

SEQ ID NO: 5453 - DNA, 201 bp, Homo sapiens
atgatactcagcatataacatgtctttaatgggatgcttaagtaatcatggcaatttaattaaaagggcagtcatcttttgaaacagctattgttccctakagagtgttacttcatgttacatttttgcagttacctaatgtttccactcacggaggttggtttgtttgcattttaaataaattatacatagtcttcaact

SEQ ID NO: 5454 - DNA, 201 bp, Homo sapiens
accagtgtagtagtctaactttattaggctccagaatcagctgtggaactttaaaaaagtgttcacaccgtggtcctgtccctgggcttctgatttgttayctagagttgaaaaacattcatgtactcattagaaggtctttcattgcgtagattatttttctttttctacatctgtgtttataactaattcatggtaata

SEQ ID NO: 5455 - DNA, 201 bp, Homo sapiens
actagctattgagggaactaacagagtgagaactcactcccccaaccttgtaagggcattagcgtattcaggaaggattccccccaggacccaaacaccgsccattatgccccacctccaacactggggatgaaatttcaacgtgaggtttggaggggacaaacattcaaaccgtagcagttgtataggcacagacatgtt

SEQ ID NO: 5456 - DNA, 201 bp, Homo sapiens
ttgatttgcagttaatgtgcaggactcagggtaatagctatgccaaaagattgcatttgattactacattgtttcaaaaaaaaactttctcataaaatacrtcatttaaatatcagaacggggataagcatttcactgttgcagacattgggactcaaatatgttttgtggcttctctaaatccatgtgcttctttaagtc

SEQ ID NO: 5457 - DNA, 201 bp, Homo sapiens
gcaaggaaactagccaggaaattctagaaaacagccaattataaattccttcatataacattttgcctgtaagtactaagctttaaaaattacagaacagkaacacccctgcagaataggaaagttaaagtcccttaaattgtacacaattagtaatctttcagactgagacatggaagaatagatgtggtggacacattc

SEQ ID NO: 5458 - DNA, 201 bp, Homo sapiens
taattgttgggggaaagtggaagagacttttatattaaaggtttttgacttttttttcagttaccatgctttagtgcttattaattttttttttaactctstgattgagatcttccttaccttccaggcacaagctccctctacatcaatgtagtagatacattgcagcatctatgtctgtaccagtgtagtagtctaact

SEQ ID NO: 5459 - DNA, 201 bp, Homo sapiens
ggaatagtgcctcaaaaaggagatcagagaccacgattctattcctctttattggtggatgtatttcatttattatttttagagatgcttctcccctggayattttcatgtgttttccaataggatagaataaatgttatttgggttttcatctatcataatagaaagctactgtcatgaagagaaactagaggcttgaga

SEQ ID NO: 5460 - DNA, 201 bp, Homo sapiens
gttaaattcaacaaatgatctttaaattattgttaagtaaccagaaggaaaaaaaatacacaggctgcaaggaaactagccaggaaattctagaaaacagycaattataaattccttcatataacattttgcctgtaagtactaagctttaaaaattacagaacagtaacacccctgcagaataggaaagttaaagtccct

SEQ ID NO: 5461 - DNA, 201 bp, Homo sapiens
tccatgggtggccatggatgggcccagaaaaaggacctaagttgtcacttctggctgcggactccacctggaatgggcagccctgcccccgggcttcaggscatccctggcttgtaagtgggcgaggatccacccctttctgctctcagcctgtctgcttcctgcctctgttcgtggtacccaggctattcatgccgaggg

SEQ ID NO: 5462 - DNA, 201 bp, Homo sapiens
gagcacctgctctgtggtgaggcaggagtagagccagcagcaggccacttaagcagagtgtggcacatagtaggatcccatggtgctgacaggactagaakgaacgcacacatcccatagtttacaggccccatgagtatctgtagcataaacaattcaagctttattctagacaaatgagactcttgttatattcactta

SEQ ID NO: 5463 - DNA, 201 bp, Homo sapiens
acccaagagtggttctctcgagaagattagaggtgtgaggttagcagtagcactggtgacaggtggaaaaggaatactgggcagggctcaacggggtctayagccccaggcttcatcggtggtaccatgtgaaaaccactggcctgggtaacaggaggcttggcttgtactccttaattttctttatgaccttgagcaagt

SEQ ID NO: 5464 - DNA, 201 bp, Homo sapiens
agctgtgcttggggaaggtaaagtttgagtaggatattcaaggataagccaaccagatatacagggagtgtgagagaaaagcactcttttcaggataaacrtcacattaaagacaagaagagattgtgttgggtctatgaatactactgaattcgacacagctggaaaacaggttttccatgagataatggcctgtgtggc

SEQ ID NO: 5465 - DNA, 201 bp, Homo sapiens
agtgcagatgtcaataaaatattttgttttactcttacctgataagttcatgtttactattatatcttgttcacaggtcaatctttgaactgggaaattcrttttaaactaaaatagccatagtaagctttcaggacttttaaaaatacgtattttcttgtagctttttcatgatgtcattttaataatgaaacattgaat

SEQ ID NO: 5466 - DNA, 201 bp, Homo sapiens
cggaggatttcctggcccctggttctggaatagatcacagaattgctgttggtgttgcccatactaactagagtggtgtaggaaaaggccccatttgtgcygagccatgagtcttttgtacccagagcttacatcagccttctggaagaacttaacattaacaatctgtgcacttctatttaaggtattgtataaaaatat

SEQ ID NO: 5467 - DNA, 201 bp, Homo sapiens
atggcacattctgtcggaggatttcctggcccctggttctggaatagatcacagaattgctgttggtgttgcccatactaactagagtggtgtaggaaaakgccccatttgtgctgagccatgagtcttttgtacccagagcttacatcagccttctggaagaacttaacattaacaatctgtgcacttctatttaaggta

SEQ ID NO: 5468 - DNA, 201 bp, Homo sapiens
aaaatggcttaagaatttaaataggtacatagttgtaaaggtgttgcacatttccaattagtgagaagagaccgtacatgtgtatgtgttaagttaggttrtatttctggtttagcatggcacattctgtcggaggatttcctggcccctggttctggaatagatcacagaattgctgttggtgttgcccatactaactag

SEQ ID NO: 5469 - DNA, 201 bp, Homo sapiens
aggagagacagtaaaatgtgattcagtagtcaccctggactcgaatctattggacatcatttaatagctgtgtgatgtgatgcatatcaactactgttctrtatttctttaaacaaaatatgaggaaaatacttaactcacggggttgttataagcactaaatgttaagtgattagaacaatctgacacatagtatgtcct

SEQ ID NO: 5470 - DNA, 201 bp, Homo sapiens
ttgacacccattatgtcataacattgacataacattaattaccaaggtaattaatgaataaccttgttcaaattacaggatgggctgagtatatcaagcawgacaaatggaaatgcttttgcttgtttcagcagattgtgtttataaactctagagcaggtttgatccctctttcagggggttatgtttgcacatggctta

SEQ ID NO: 5471 - DNA, 201 bp, Homo sapiens
ttggtggagatcacaagatcagatgaaccagcttatccatcttgggtggtgccagctgatctatcaagtacagggtctggaaaatgtctgaagcactggtsttaggctttacaatagtgatgttaccctcaggagcaatttggggagggtcggaatcttgtagtctccagctgcatgattcctaaaccataatttctaatc

SEQ ID NO: 5472 - DNA, 201 bp, Homo sapiens
acctgtcctgaaaaggttcttattgtctttgtactgtatgtgcccttttctctggctatgctggactttgtgattctggaaatgggtcatgcccacctttrtgatagcacatatgttgttccttttcctgaataattctctcttctgtttttgacatgtcaccttttactctttatttttcaaaaccccatttcacctttt

SEQ ID NO: 5473 - DNA, 201 bp, Homo sapiens
gggcttgttttcaaaacacttctatcatcatactttcctcttgcttacagtcatgaaatagctccctgcagctttcagcatcctgcctcaactccttggcytaacacatcatacctgtcctgaaaaggttcttattgtctttgtactgtatgtgcccttttctctggctatgctggactttgtgattctggaaatgggtca

SEQ ID NO: 5474 - DNA, 201 bp, Homo sapiens
gacatacacaagtttactctgtgagggtccctgggtgtgggctggcaatatctgcacattcttcatgcaaatgataaaatataaaggatgtttagaaccgrcaaacgtaagacatcttatgaatcatatatattaaaagtattttagtttatgatcaaccacaaagttgtctcttttactgaacactttgcttttaattta

SEQ ID NO: 5475 - DNA, 201 bp, Homo sapiens
ggttatgacaacaaggttgtcacccttgcttcaaatggatgaggccaggatgggaagagaaaaataggtcttttttaagttctttttttttcctctttaartttaataattgtccgatagctaatatctaatgtaaaatactactaaaattagagaactgaattaaagaccaaattaaaaatggtgatttttattaatgtg

SEQ ID NO: 5476 - DNA, 201 bp, Homo sapiens
gagttagagttctattactatttatgggctgaccattgggattggtatactcagcatctcagatggaaggaaagtgtcagaataggttcatggagaatatygagtggtaagaggaccacagtctgggcaagaaatttcaccctgctgttgatttatttatttggaggggagggtgcagtttctggtagaatagtttctagc

SEQ ID NO: 5477 - DNA, 201 bp, Homo sapiens
ctaaaattagagaactgaattaaagaccaaattaaaaatggtgatttttattaatgtgcctttatacagccttcaagtagactttagcacatatctttaargcacataaaagatagctgctttttgtaactggagcccctcatccttctagagtacacctctgcagcatgacagccatctgctgctgctcccttagtggct

SEQ ID NO: 5478 - DNA, 201 bp, Homo sapiens
tttttgaaaatgttttctttttgaattggagaggcttgagtatacacaaatgccagtagaaaggacccagttgaaagtatgtggttaatgacttgaaagaragaggcaataatctacagtgtcaagctcaaaaaggctgctgcatgtgcaattcagagcagagttgaggcttcactttagatagcaaaggtgacatttttt

SEQ ID NO: 5479 - DNA, 201 bp, Homo sapiens
ctttctgagctgtaacactcatggcaaaggtctgcagcttcactcctgaaggccgcgagaccacgaacccactggaaggaaggaacaactccagatgcgcygcctttaagagctgtagcactcaccgggaaggtctgcagcttcactcctgaagtcagcgagaccacgaacccaccggaaggaataaactctggacacatc

SEQ ID NO: 5480 - DNA, 201 bp, Homo sapiens
cacgctttaccacacattactgagagaaaccacttggccccttctattgtcacagcaaaactgatgaacagttcctacagaacgcttcctccctgagttcwccatgtggtttcattccaattttagtgactctgtgctaacactgctagagaattactggtgtgtcagtatttgactggcagctctgatgtggacacaaag

SEQ ID NO: 5481 - DNA, 201 bp, Homo sapiens
atttctctgatgattagtgatgtaaagtattttttcaaatgtctgttggccctttgtatatcttcttttgaaaaccgtcttttgctcactttttaatagtwatttgtgtgtgtgtgtgtgtgtgtgtgtgtgtgtgtgtttagttgtttgagttccttataaattctggatattggtcccctgatggatgcatagttttcc

SEQ ID NO: 5482 - DNA, 201 bp, Homo sapiens
tagctaaaggattgtaaacgtaccaatcagcactctgtgtctagccaaaggtttgtaaatgcaccaatcagcactctgtcaaaacggaccaatcagctctmtgtaaaatggaccaatcagcaggatgtgggtggggccagataggggaataaaagcaggccagctgcgcaagcagccacaatgcactcgggtcctcttctg

SEQ ID NO: 5483 - DNA, 201 bp, Homo sapiens
gtgcatttctctgatgattagtgatgtaaagtattttttcaaatgtctgttggccctttgtatatcttcttttgaaaaccgtcttttgctcactttttaawagttatttgtgtgtgtgtgtgtgtgtgtgtgtgtgtgtgtgtttagttgtttgagttccttataaattctggatattggtcccctgatggatgcatagtt

SEQ ID NO: 5484 - DNA, 201 bp, Homo sapiens
aagccggctgggtttctgggatgggtggggacttggagaacttttctgtttagctaaaggattgtaaacgtaccaatcagcactctgtgtctagccaaagstttgtaaatgcaccaatcagcactctgtcaaaacggaccaatcagctctctgtaaaatggaccaatcagcaggatgtgggtggggccagataggggaata

SEQ ID NO: 5485 - DNA, 201 bp, Homo sapiens
ccttatcagaaagatggtcatgatgcaaaccttcaagttctgccattaggaatagagatggtgtcattgagtaaatgagactggaaaggagtgatcatgtrtattgtaaagtatacataaagtgttaaattcaacaaatgatctttaaattattgttaagtaaccagaaggaaaaaaaatacacaggctgcaaggaaacta

SEQ ID NO: 5486 - DNA, 201 bp, Homo sapiens
ttctgactagtgtaagatgatatcttattgaggttttaatgtgcatttctctgatgattagtgatgtaaagtattttttcaaatgtctgttggccctttgkatatcttcttttgaaaaccgtcttttgctcactttttaatagttatttgtgtgtgtgtgtgtgtgtgtgtgtgtgtgtgtgtttagttgtttgagttcct

SEQ ID NO: 5487 - DNA, 201 bp, Homo sapiens
actcagcggcacagccggcaggcacctgctgggcttgactggggggcgagctccctctgggctgccagagtggctggctaggtgccgcaaagtcccgcgaygcatgccagtgacaggtgaagccggctgggtttctgggatgggtggggacttggagaacttttctgtttagctaaaggattgtaaacgtaccaatcagca

SEQ ID NO: 5488 - DNA, 201 bp, Homo sapiens
ttgcagtcactaaaccattaagccacaggtatagtcaattgtggatgggtaagatgatggaagaagtccagacttagaggcagacaaatctggctttgaasctggatttcagtatcttgcaagccgttggtacccctgtttctcattttccttatcagaaagatggtcatgatgcaaaccttcaagttctgccattaggaa

SEQ ID NO: 5489 - DNA, 201 bp, Homo sapiens
atggttctgactagtgtaagatgatatcttattgaggttttaatgtgcatttctctgatgattagtgatgtaaagtattttttcaaatgtctgttggcccyttgtatatcttcttttgaaaaccgtcttttgctcactttttaatagttatttgtgtgtgtgtgtgtgtgtgtgtgtgtgtgtgtgtttagttgtttgagt

SEQ ID NO: 5490 - DNA, 201 bp, Homo sapiens
gtaggcgcgggctccgcaagccccgcactcagcggcacagccggcaggcacctgctgggcttgactggggggcgagctccctctgggctgccagagtggcyggctaggtgccgcaaagtcccgcgacgcatgccagtgacaggtgaagccggctgggtttctgggatgggtggggacttggagaacttttctgtttagcta

SEQ ID NO: 5491 - DNA, 201 bp, Homo sapiens
tgaaagacaaggttcaatactcatggatttctaattgaagaagaaaaagaaaaagaagtaacaaaaaaaagtaaaattaaaattattatgattgctgcagyatgaaagaagtggaagacaagaacctcagaaaagtcttcctgagaacatgcatcaacagaaacaattggaaagtttggagggtagactggctatatgctg

SEQ ID NO: 5492 - DNA, 201 bp, Homo sapiens
aatagtaatggttctgactagtgtaagatgatatcttattgaggttttaatgtgcatttctctgatgattagtgatgtaaagtattttttcaaatgtctgktggccctttgtatatcttcttttgaaaaccgtcttttgctcactttttaatagttatttgtgtgtgtgtgtgtgtgtgtgtgtgtgtgtgtgtttagttg

SEQ ID NO: 5493 - DNA, 201 bp, Homo sapiens
tgtggatggccctgaggtcttgaacaaatcaatattctcacttctttggtttctttactggcagaacgggagtgttacaaaggctagtgtagagtatgggmaggtctttgatataaggcttttatctataggtttaagtccttcctttgcttttggatattgggggagtttggataactgtctggtagaatctgtctgaag

SEQ ID NO: 5494 - DNA, 201 bp, Homo sapiens
gcagcactgtctcatttgtatttctctatcctagcagtacctgtcacaagtcttgcatttattcattcaacaaatgtttgttgaagtctatgtaccaaacrcagtgatacatgttggggtatactgataaatttgaaagacaaggttcaatactcatggatttctaattgaagaagaaaaagaaaaagaagtaacaaaaaa

SEQ ID NO: 5495 - DNA, 201 bp, Homo sapiens
gaattcctcttacaggctttgttgtcctgtgaacaaagtaagagattatctacatactgtatcaaaactgaatcagaagggaaacctatgtcttttaagtyttatttgagaatctaggaaaataggagggtctttagtgaacccctaaggcatgactgtcagagtatattgttgcactccccaggtgaaggtataaaggca

SEQ ID NO: 5496 - DNA, 201 bp, Homo sapiens
acacattagattccagcctcttaaaaaggtagcacaaatgtttgaatgaaacagaacatgtggttgtttccataacaacttttgcttaacaattggcaccygttaatattttaatagttttaaccattttattaaagagttaaattctaatttcaactcagatattggagccaaatctttactacttatggaatccatttg

SEQ ID NO: 5497 - DNA, 201 bp, Homo sapiens
tatatatatctgccaaattatttcaaaagtggttgtagcaatttgcattctcaactgcaatgtaggagagtttaagttgcttcacatcattgccctacttsgtattgtcagtttctacctttaggaattctagtaagtatgtagttatatctcattgattttaattttaatttccctgaagagtaatatgatttagcatct

SEQ ID NO: 5498 - DNA, 201 bp, Homo sapiens
ggcgctgctgtctagctcaaagcacaatgttatggctcatgctgggcctggctgcctaggatctgggatacacagaaacaggcacatagaatggctggagyggggcactctctgggcagggagggatgactcagatggatacagtgccattggcttgagcatacacgacaggtagacatctccatccacgaatgagatcgg

SEQ ID NO: 5499 - DNA, 201 bp, Homo sapiens
tgtttgtttgtttgtttgtttgtttgtttgtttttgagacagagtctcgctctgttgcccaggctggagtgcagtggcgggatctcggctcactgcaagcyccgcctcccgggttcacgccgttctcctgcctcagcctcccaagtagctgggactacaggtgcctgccactatgcccagctaatttttttttgtattttt

SEQ ID NO: 5500 - DNA, 201 bp, Homo sapiens
ttccactgtccacccaatctaagctgatgggctggaagtcagcacgacaaagtagttagaatttgtgggctcagaggtcagacacacttaagttggagttscacctctgccacttattattatagaagaccttgggcatgtcgcatatatctgtctgcttatggtttcttatctgtgaaatgaggaatattgttgtgagga

SEQ ID NO: 5501 - DNA, 201 bp, Homo sapiens
gtaacattttgcatataagcctgttcttttattaattatttgagttcaggaataaaaaaaaaagacagaatttacttttggaaaaaaaacgtagatttttrgtaatatatgagaagaagtacaaaaagctgatgaaagttcatgcttcttaatcattgaagccacttttctcctttaaggaaagactctccattctcacaa

SEQ ID NO: 5502 - DNA, 201 bp, Homo sapiens
agcctgcattggagaaggtaatctgctttattcagtccactaattcaagtgctaatcttttctctatttgtttgtttgtttgtttgtttgtttgtttgtttttgagacagagtctcgctctgttgcccaggctggagtgcagtggcgggatctcggctcactgcaagctccgcctcccgggttcacgccgttctcctgcct

SEQ ID NO: 5503 - DNA, 201 bp, Homo sapiens
agttgtgacctagcttccatgggattctgtgtaatgtttactatgtttactagggatcacatggcctttccagctactctttttcactctgtataacttcygatagaaagagcttaaagttaaggacttgtgtatttctttttttccatgaatttctgcctactgcccagtcttggtctactctaacacaggctttccatg

SEQ ID NO: 5504 - DNA, 201 bp, Homo sapiens
cagcctgcattggagaaggtaatctgctttattcagtccactaattcaagtgctaatcttttctctatttgtttgtttgtttgtttgtttgtttgtttgtttttgagacagagtctcgctctgttgcccaggctggagtgcagtggcgggatctcggctcactgcaagctccgcctcccgggttcacgccgttctcctgcc

SEQ ID NO: 5505 - DNA, 201 bp, Homo sapiens
agagcaacccagccagcaagcatagtggggctgccctggaaaacattgatccatgggcctgtgagggaacctgtgcttctagcatgagtggcacattgtcrccagttgtgacctagcttccatgggattctgtgtaatgtttactatgtttactagggatcacatggcctttccagctactctttttcactctgtataact

SEQ ID NO: 5506 - DNA, 201 bp, Homo sapiens
ccagcctgcattggagaaggtaatctgctttattcagtccactaattcaagtgctaatcttttctctatttgtttgtttgtttgtttgtttgtttgtttgtttttgagacagagtctcgctctgttgcccaggctggagtgcagtggcgggatctcggctcactgcaagctccgcctcccgggttcacgccgttctcctgc

SEQ ID NO: 5507 - DNA, 201 bp, Homo sapiens
cccagcctgcattggagaaggtaatctgctttattcagtccactaattcaagtgctaatcttttctctatttgtttgtttgtttgtttgtttgtttgtttgtttttgagacagagtctcgctctgttgcccaggctggagtgcagtggcgggatctcggctcactgcaagctccgcctcccgggttcacgccgttctcctg

SEQ ID NO: 5508 - DNA, 201 bp, Homo sapiens
gacttgtatcagattgctattgcagaacactagtctagatatatttttaatggaggggacagtgtttaacaaaataattgcttaataaatactttctgacmaattaattgatagtgtctatgttttctataatatttggtacaaatgtttcctctttcttttttttaaaatttaagttctggggtacatgtgcagaatgtg

SEQ ID NO: 5509 - DNA, 201 bp, Homo sapiens
tgactcagagtgtggggtcagtggggatgccagtggtcagggaaggcttcatagaggaggagtatactgaactttactgaatttttttgagaaaataaggraataaagatatattagggaaaaaacccttatggtagagagggtgtaggaactccagtcaataatagtttcataattattacatattaaagtgatatttca

SEQ ID NO: 5510 - DNA, 201 bp, Homo sapiens
agttttacctcctttcctttgtttctattttttcctttttttaattgttcagcaaatattaactaaacatttagtgcttcctatgtcagacagtcattagrccacagactagactgagggaggatttgcaaaatgcacttaatttgagccaattaagaaacaatttaggtaaaacatcaatttggggatatgtgctgaata

SEQ ID NO: 5511 - DNA, 201 bp, Homo sapiens
gtaactaaacgtaacaccgtggtcttatcaaagatgtaagatgctaagaggtgaatataacatatttatttatactttactaatataaactatgttttgtrtgtggtgtgtgtgtgtgtgtgtgtgtgtgcaaacacaattttgagtaactttggatggaatctcaaggtgattcactctaattcccagctactgctcctg

SEQ ID NO: 5512 - DNA, 201 bp, Homo sapiens
cagtgttttgtagttttccttgtagaggtcttttgaccccttggttaggtgtattcctaagtattttatttcttttttgcagctattgtaaaaggggttgrgttcttgatttgattctctgcttgcttgctgttggtgtatagaagagctactgattttcatacattaatcttgtatgtggaaactttgctgaattctttt

SEQ ID NO: 5513 - DNA, 201 bp, Homo sapiens
gaagttcaaattgctttaggaagagctataaacaaaatcaatgacccaggatttaccatgaaagaaagtggaatcttgttcacatagtaaaatagaaggaygatttgtttaggatcttcaggatgcataatggataggtttctggaggcccatgccccactcaaattgtatgtaattatctttacgtatatgcatttcatt

SEQ ID NO: 5514 - DNA, 201 bp, Homo sapiens
ctccatagtcttgattgaatattgaatttatatgagcaatgcaatatatttctgggtgcacataaattagttttgactttgttgttggcaaaacatgactkgactagagagtaaatagcctaggcatatgctgccctggagatgcagagcaacccagccagcaagcatagtggggctgccctggaaaacattgatccatgg

SEQ ID NO: 5515 - DNA, 201 bp, Homo sapiens
caaatatccattttctcgagcacactaaattcagaggtaggtttttttgtggtggttataggagcagactatgggtttgactaagcttgtcttagcactgscgcttgccagctgtgttacttggttaagttactttatcttgctatggctcagatgcttcattcgtaaattactgatcatcatagtaccttgtgcgtttgt

SEQ ID NO: 5516 - DNA, 201 bp, Homo sapiens
atttgactggcagctctgatgtggacacaaagtgtcgttttcttcctgtagtagaatataattaaaaataaaattcactttcagcatttttgtttcttttkgaagaagttcagtatgtcttgggggaacaaacatgtggatacatggagcctgtcatggtcattaaatacccaggttggaaagtacctctgtgcaaacaat

SEQ ID NO: 5517 - DNA, 201 bp, Homo sapiens
ttaccactccatagtcttgattgaatattgaatttatatgagcaatgcaatatatttctgggtgcacataaattagttttgactttgttgttggcaaaacwtgacttgactagagagtaaatagcctaggcatatgctgccctggagatgcagagcaacccagccagcaagcatagtggggctgccctggaaaacattgat

SEQ ID NO: 5518 - DNA, 201 bp, Homo sapiens
ccctcaattacatccagttaatttgaactaatgatattttctgcttattctcctctacatgtgctcattcttgagaggttgtataggatagggattggtcrtttgattttggagctagatttcctgggttcaggtaactttagggaagttattttactctctgaatggtaggttacacaggcaggaattaatattagtacc

SEQ ID NO: 5519 - DNA, 201 bp, Homo sapiens
tccagtgaatatcacaggaagatatccctgatcccttctttaggggagcagcttccccacaggcagctcatttttcagagcaagaatagggctctatcttrtctttttctttctgtttcttctttgtgctgttccttggccctttacttgaaaacaatacttaatagtatatccatatttctttcaagtagttttatgaat

SEQ ID NO: 5520 - DNA, 201 bp, Homo sapiens
gactcttctagctttgtgaaccttaatgaataggttcacctcccatagcttccctttcctcaattgtaatatgggaataaaaatgcttacttacagggtcrtgttgaggattaaatgagataatgaaagtaaaatgtcagtatggcatctgagtcatggtatgcccagtggaaaaataacagccatcattattatttaaaa

SEQ ID NO: 5521 - DNA, 201 bp, Homo sapiens
ggcagacagccttcagctctgaaccctgtgagggaatgccctggctacagagagctgccttggccaagttcaccttcccctcttccagagtggcccaagtytgatgattcattgtattggtcagggttctccagagaaacagaaccaaagagattttttgtcagatactggcttacataattatggaggatgaaaagtttt

SEQ ID NO: 5522 - DNA, 201 bp, Homo sapiens
cacaggaagatatccctgatcccttctttaggggagcagcttccccacaggcagctcatttttcagagcaagaatagggctctatcttatctttttctttstgtttcttctttgtgctgttccttggccctttacttgaaaacaatacttaatagtatatccatatttctttcaagtagttttatgaattacaaataaaac

SEQ ID NO: 5523 - DNA, 201 bp, Homo sapiens
ttagcttgtgtatttccccagtccatgcactagcttgtgcactcatattaccataaccaactgcatgctagtaaaataagtcaattagtataagctgggtrtggtggcttacgcttgtaatcccaggactttgggaggctgaggtgagaggatcacttgaagccaggagtttgagaccaggctggatgacaaagtgagacc

SEQ ID NO: 5524 - DNA, 201 bp, Homo sapiens
tttagttaacaatatttcagatccttaatttttagtttccagatgatcagactcctcagcttgaaatccaagggcattatagacttcaagcaaattgcatrtgcattaagactgttgaacttgggacaagtaatcctataaaagcgaaatcattgctgaagcatttttgtaatcatgtattcctcctgcatgttcatttga

SEQ ID NO: 5525 - DNA, 201 bp, Homo sapiens
ttcaagatcctatcagtgcatgacctgttattcctatttctgggagtgctataggcagacagccttcagctctgaaccctgtgagggaatgccctggctayagagagctgccttggccaagttcaccttcccctcttccagagtggcccaagtctgatgattcattgtattggtcagggttctccagagaaacagaaccaa

SEQ ID NO: 5526 - DNA, 201 bp, Homo sapiens
agcttgaaagggagaaggggaatgacttggactgtccctttcacttcacccctctagggttttccactgtggaaggatgattattggttggttctctcctyggagtggtggaaagatgcatggggcatctccttactctcaacagtggctttcaaatggttatttattttttttaaatcatgacttacactaataaatata

SEQ ID NO: 5527 - DNA, 201 bp, Homo sapiens
gaagaaagttctgggttgagacagttctaccttgacttatttaccaaggctcctaaaccatatagcacatcactatgaatacactcagggtgggggcaatrgatcctacccagatccctgtaaagccagcgtggttctgcaaccatcattcatggataaggaccaagactgagctgctctggttgaagaagctgttggatg

SEQ ID NO: 5528 - DNA, 201 bp, Homo sapiens
tcaatttccatcacagttggaacttggtgctgtgacattgtttcttgttttatttttctcctactaaattattaatagagatttttgtcttataaatgagsaacaactaaaaacataattctttatccttttagattgttttaacaaaacttctttattgaaaaaccagaaagaatgaaggtcctatttctcctacttgtg

SEQ ID NO: 5529 - DNA, 201 bp, Homo sapiens
tatgtaaaatgacccctatcttcaatatctctatgttttaacacctgctttgtttttacaatagaggcccttgtttggaacaaagccacttaagctgaacrtcattgtacctgcacagttacctgggttatctgtggttgtgatgaaaattacaccaccataatcaccccaggctacttacaaggcaccttcatagaaatt

SEQ ID NO: 5530 - DNA, 201 bp, Homo sapiens
gatactgataatactgtagtcatgttgttttttaaaaatgcacacttagtattctatacacagctttgtaagtaatttcatcccaataagttaatcctcartttccatcacagttggaacttggtgctgtgacattgtttcttgttttatttttctcctactaaattattaatagagatttttgtcttataaatgagcaac

SEQ ID NO: 5531 - DNA, 201 bp, Homo sapiens
tcatttgcagctgcaagcatcctaactaatacaatgtattaaatataagtggaaatgatttatttaacatggcatgagcatccctcattttaagatattamagaattaaatttttgtttttatatagaaattctgaattaagtcagaaggtcaatatttgcaatacacacaaattattaaactaatttctcacaggtttcc

SEQ ID NO: 5532 - DNA, 201 bp, Homo sapiens
aaccacagacttgagttgatttatgtagaatttaatttgatggaaattgtgaaccaacttgagatactgataatactgtagtcatgttgttttttaaaaawgcacacttagtattctatacacagctttgtaagtaatttcatcccaataagttaatcctcaatttccatcacagttggaacttggtgctgtgacattgtt

SEQ ID NO: 5533 - DNA, 201 bp, Homo sapiens
ccaggaggcagaagttgcagtgaaccaagatcatgccactgcactccagcctgggagatagagccagactttgcctcaaaacaaaaaaaagaacagcaacraaagaaatctctgtacctcctcctatacccataaatcatttcttatattcttatggagatatattttggctctcttttggttttagagagtgctatttct

SEQ ID NO: 5534 - DNA, 201 bp, Homo sapiens
aaatatgttgaaggagaggaccctgccattccagtttctgtagaaattgttttcactgtccataagtggagcccctctggccatgtctctattctacaacsctgatcctctcccttgtgtctcttcagccacaactgattgatttaacactgagctcttcactaaagctaaattatcagagtccttccgagtaatatctaa

SEQ ID NO: 5535 - DNA, 201 bp, Homo sapiens
tatataaccacagacttgagttgatttatgtagaatttaatttgatggaaattgtgaaccaacttgagatactgataatactgtagtcatgttgttttttwaaaatgcacacttagtattctatacacagctttgtaagtaatttcatcccaataagttaatcctcaatttccatcacagttggaacttggtgctgtgaca

SEQ ID NO: 5536 - DNA, 201 bp, Homo sapiens
ggtcatcataatattattctgtatgaaaatttccagcatgcaagctgatgcctactattgttttcctttccttttaaggtgaaataattgcaaacaacttkaggaaatctctggccaggcgcagtggctcatgactgtaatcccagcactttgggaggctgaggcaggcggatcacttgaacttatgagttctagaccagc

SEQ ID NO: 5537 - DNA, 201 bp, Homo sapiens
gacccccacactgttttttctgaggctcacttttgccgtggagagcagttgtgagtctcttcaagccatagctctgggaaccacagttttcagaaattgcyatgcaagggaccatagaatgccacaagtatctcctacactctcttcagcgacagagtgcccctgatgtaggctgtatttccttagggtctgcatgccttt

SEQ ID NO: 5538 - DNA, 201 bp, Homo sapiens
agtctaattgggaaggtgaataatttagcccagttcctgcaatgcaatgtgttaagcgaatagccagcatatagcagggagaactgatgtagcctaggggmgaagattggtgtcattgaagttgagactaaaatatgagcagaattaagaaaaagagattatcagtagtattattattttaaccagagggtggcacaaaga

SEQ ID NO: 5539 - DNA, 201 bp, Homo sapiens
acctggttattttgttttgctcattgctattatctgaaggcatgttcataagaaataaataatggtggatgggctgtatcacatttttattagatcaaaaratgtttaattctaggcaaatttcttatggtcaaactgtaagtctaatcatttttaaccaatagtctagtcattctctttaacaactgataaaatggtaat

SEQ ID NO: 5540 - DNA, 201 bp, Homo sapiens
tctctttctctctttcatgggaaggtcatcataatattattctgtatgaaaatttccagcatgcaagctgatgcctactattgttttcctttccttttaargtgaaataattgcaaacaactttaggaaatctctggccaggcgcagtggctcatgactgtaatcccagcactttgggaggctgaggcaggcggatcactt

SEQ ID NO: 5541 - DNA, 201 bp, Homo sapiens
gtccaaaacttggaatttgttgtctctgagttttcctgggtttgtccctgggtttcccttgtttccctgttcctctatctcctggagccatgagacccccrcactgttttttctgaggctcacttttgccgtggagagcagttgtgagtctcttcaagccatagctctgggaaccacagttttcagaaattgccatgcaag

SEQ ID NO: 5542 - DNA, 201 bp, Homo sapiens
tcttcctttttctctgtagcctcatcaacatgttattttttgacttttaataatagtcattctgactggtgtgtgatgatgtctcatagtggttttgactygcatttctctgtgaccagtgatgttgagcatttttttcgtatatttgttagccacctgtatgtcttcttttgagaagtgtctgcttctgttgcagtcccg

SEQ ID NO: 5543 - DNA, 201 bp, Homo sapiens
tgtccaaaacttggaatttgttgtctctgagttttcctgggtttgtccctgggtttcccttgtttccctgttcctctatctcctggagccatgagaccccyacactgttttttctgaggctcacttttgccgtggagagcagttgtgagtctcttcaagccatagctctgggaaccacagttttcagaaattgccatgcaa

SEQ ID NO: 5544 - DNA, 201 bp, Homo sapiens
ggttgctgggttgaatggtagttctgtttttggttctttgagaaatcttcatactgctttccacagtggctgaactaatttacattcccaccaacagtgtrtaagtcttcctttttctctgtagcctcatcaacatgttattttttgacttttaataatagtcattctgactggtgtgtgatgatgtctcatagtggtttt

SEQ ID NO: 5545 - DNA, 201 bp, Homo sapiens
atccagtccactgctgatgggcacctaggttgattccacgtctttgctattgtaatagtgctgtggggaacatataggtgcatgtgtctttttggtagaasaatttcttttcctttgggtagatatcaagtaatggggttgctgggttgaatggtagttctgtttttggttctttgagaaatcttcatactgctttccaca

SEQ ID NO: 5546 - DNA, 201 bp, Homo sapiens
gaaatattttattgaccatgatttaatagcttcacaattttcttttcattttaagagcatttacatacttctgagttgtttaatagataaatctcagacartggcattataacatgatggtgatacaatgataaactcatatattacatctaatggatatcaaagtgatagtttctccaaaaccaacagataagacatttt

SEQ ID NO: 5547 - DNA, 201 bp, Homo sapiens
caaaggaggctggaaaaataaagtctttattctgaccaagtcatgccttcctaaaaatcgtgggttctaataccatgtaagaagtggtgaattggtatgargtacaactaatggtgtctgcctaggtagcattggtgtgtggttgggatagaagtcaaattgcagcagccaagatgtgcattgcaataaggaagtagaagc

SEQ ID NO: 5548 - DNA, 201 bp, Homo sapiens
aggaacattgatctagagccaagcaggaactgagatatagatcaaagctcattctcatacaattgatggttgagtatggaaaggtggttgctaaggtgagragtataggggaatgaggatggactcatggggagaagctttcatataaaggtatgtgatatggtttttctgtgtccccactcaaacctcaccttaaattat

SEQ ID NO: 5549 - DNA, 201 bp, Homo sapiens
atgaatacagtgtgggaataatggcctagacattgcaatgggaggtaacagtatggtagagtgttctcttttcatgggtttatggtcatgggagggctctsagtctcctttgaagaagacttcaattatgggagatgataaaaggagatcctcagaaaaaaatttaaggatgatgagcagtgtttcataagaaaacaggaa

SEQ ID NO: 5550 - DNA, 201 bp, Homo sapiens
ttactgcaggaagttgttagagtttctccgttgggaaatgtctatgcttcggtattttcttgaaattctacattactacttattatggcaggttaacaaamatacctgaataacgtgaatctttaagacaagactctgctgccaaaaccacctgtggaaagaggaatctctcagcacattttcatgacctttcaaatcaag

SEQ ID NO: 5551 - DNA, 201 bp, Homo sapiens
gtattggaaacagcctcattagaatcaactcgggaacactgaacacacacacacacacacgtacgcacacagatttacggaattctgattcagtggatccygagtactgccagtaatctattttctaaaagctttttggtggagtcagaccagaagagtgtaatggtgaaagcctactctctgtagccacgtctcactggt

SEQ ID NO: 5552 - DNA, 201 bp, Homo sapiens
ttggcgtggttgattaatggtgagttggccaccatgctccgtaggagaggtggctgtgcgggctggccttggagaagtggtaagtgtggtggggtgggggmtgtgaggttaatccttgaaatgcttacccagatcttttttaaagtcccaaattaaaggaaataggatactgttgtaggactgctttgcagtcctaaaact

SEQ ID NO: 5553 - DNA, 201 bp, Homo sapiens
tttgtgttgaatacctacaatatgccagacagcgggtcagcctctgttggggaagtggtggaaatgaagatatgtaagatagagtcccttcccgcagaaarcttgaaatctaaaggaaagccagccttataaataggcaattattaaaatacatcagaattaactagtgaccagaattagtaattaactagtgaccagaat

SEQ ID NO: 5554 - DNA, 201 bp, Homo sapiens
caacaaatttgtgttgaatacctacaatatgccagacagcgggtcagcctctgttggggaagtggtggaaatgaagatatgtaagatagagtcccttcccscagaaaacttgaaatctaaaggaaagccagccttataaataggcaattattaaaatacatcagaattaactagtgaccagaattagtaattaactagtga

SEQ ID NO: 5555 - DNA, 201 bp, Homo sapiens
cttggtataattttttaaaagtaatactaaatttttaaaagtaataccaaaatagagaaaatgttatgtttagcaatggctatgtttctgttccattttcrctccaggtgcatattctttttatttattttttattgctataggattgtgattgaaatataatttagtatagtttaagacacttgtctaaagggtcagcat

SEQ ID NO: 5556 - DNA, 201 bp, Homo sapiens
tttaccataagtgcaaatgtcaacacaatggaagaggcacatacaattttaatattgctatgaaaatgtttttcacctggcagatcactggaaagggtctkggggccccctagggatctgtggactacattgagagccactattctaaataatttctctctgtaagtactattgtatgaagtaagaagaaacagactggct

SEQ ID NO: 5557 - DNA, 201 bp, Homo sapiens
tggaacagaagtgctttagttttacatttcactgtttttttactcacacatcaaggttttaatcaataaattttacttctttatcttggccattcttaagkgaaactagcaattttttattttttccattgcaagtgtgtagcagtgaggaatatgatgactactagtgtagttcggcaccactgtctgcctcattgtaaa

SEQ ID NO: 5558 - DNA, 201 bp, Homo sapiens
agccctcttttctaatctgcaagtgcaaaaaatgcagctttctttgaaggtgtttgggcatattttcagttatcccccagggaagcaccatctttcctttyggggcaagaaggataaaaagaaaattttatgaactggaacttgaacaagtgaatggaaaatacaagcagatgttggttggctagggtacaggagaactgt

SEQ ID NO: 5559 - DNA, 201 bp, Homo sapiens
gtagcacagttagaaagtaatgaatctatataaaagtccaggtctggaaattaaattgtagcattagtcacctatttctcataagggggaagggaaatacmaattaaaatacaggttagatttgaatttcagataacaaataatttttagtataagtatgtcccaaatatcgcctgggacatggacaccctatattgctat

SEQ ID NO: 5560 - DNA, 201 bp, Homo sapiens
gcagaaggtggaattaagccttagggacagctgaagcaaggtgagtggggggataggagggaatttgcccaaagcagagaccaagagaaaactgcagcttwttagtagttagcagagaagtacccagccaagcttgcagagagcattacgaaagggtttaacaatatgtattaggaaacaaggtcctttaaggtaaacttg

SEQ ID NO: 5561 - DNA, 201 bp, Homo sapiens
tggagaacaggcctcagctttgcctgactatcagatgtccaatcaaaaaatgtgtgaagaaataagcacttctctctctcctcccacgaggcttgtgatgrgcacaagtgctttccttcaggctcctgggcctctactcatatgctgccggagagatagtatgaaaacagaacatgtacaaagcatccgttcttgggatct

SEQ ID NO: 5562 - DNA, 201 bp, Homo sapiens
acaattttattacctatgaccttcatgttgtacattagatctctagacttcttcattctacatacctgctattttgtatcctctgacatacatttcttcaytcccccaccctgaccccataaccactgttttgttctctatctctgattttttagattccacatgtgaggtcatgtgatttttttcccccgtgtctgcctt

SEQ ID NO: 5563 - DNA, 201 bp, Homo sapiens
acatctaatggatatcaaagtgatagtttctccaaaaccaacagataagacattttcataagctgaaatcataaaatgcatttacatctgcatatgtatcrtgtacatttataggtgcacatttaactctgcatgaatatttatgtagtcacacatatgaattgggatttattattagtgctcaatatggaattgtaaagt

SEQ ID NO: 5564 - DNA, 201 bp, Homo sapiens
aggaagtgaaggacagatagcagtttccctattttcaacactaaaaataaacatgaaaattcaacaattggcaagtgagaaatcgtaagtaacttttaaakgggactaggaacatctaatattaacttctttttttaatctacagaattaaaggctttggaatgcaaaagagaaacctacaaaacctcagaatatagacta

SEQ ID NO: 5565 - DNA, 201 bp, Homo sapiens
tcactattgagaggtggggcctttaagatgtgattggatagtgaggaacctgcctttattaactgattaatgtattcatggcttaatagataaatgggttrtcatcagaagtgactggtggttttatcagaagaggaagagagacctgagtaagcatgctcagtttcctccccatgtgatgccctgccctgcactgccttg

SEQ ID NO: 5566 - DNA, 201 bp, Homo sapiens
atttaaatgtcccctccaaaacttatgttgaaacttaatccccagtatgtcactattgagaggtggggcctttaagatgtgattggatagtgaggaacctrcctttattaactgattaatgtattcatggcttaatagataaatgggttgtcatcagaagtgactggtggttttatcagaagaggaagagagacctgagta

SEQ ID NO: 5567 - DNA, 201 bp, Homo sapiens
gtgtctcattaagtgttcctcaaatgatggaaatcttagctctaatgctgtcttttattggaatctaacatcaactgatggtttttacttttttattttgmagggctggagcgaattgctcgggattcatcttatgaacaggaaggaaaggtccaatttgtaattgatgctgtatattccatggcttacgccctgcacaat

SEQ ID NO: 5568 - DNA, 201 bp, Homo sapiens
ttatatatttttgaaaaggtgattagaatattttaacaatcttttagtagttctgcttcagttactgctatgatttaaatgtcccctccaaaacttatgtygaaacttaatccccagtatgtcactattgagaggtggggcctttaagatgtgattggatagtgaggaacctgcctttattaactgattaatgtattcatg

SEQ ID NO: 5569 - DNA, 201 bp, Homo sapiens
ttcaccttctctgccctgtcttgccacttttgcctgttaaccaccaccaccatcatcctgtatgtcatagtttggatttctgtattgtgccaagtgctttrcctgcattgctatatacccttagaccagctcctgcaaggtgattgaaatgaggaaaatgagtttcaaagaggttaatgaacttgctcaagtttactcact

SEQ ID NO: 5570 - DNA, 201 bp, Homo sapiens
aaactgaaatgagattagctagtctgctgattctcatggaatttgcaatccaggttgagtgtctttcaaagcagaatgaagttgttaatcaggttggtagwatatttcctttgccatagatactctcaatcatgcttatatttggattttagggaaaaccatatctagtatttctttctaactttgctaccttcaccttct

SEQ ID NO: 5571 - DNA, 201 bp, Homo sapiens
acagttcatgggagtagtggagacagacgtctgattggagtggattaaagaaaaagcgggtagagtagataccctttgccaaagaagcagataaatggacrgaagctgaaggggcaaatagaattaaggaagtttgttttgtttgtttgctttgcaaggtgagagtctttttacaacatgtttacatgcaaatggaaatga

SEQ ID NO: 5572 - DNA, 201 bp, Homo sapiens
attaagaacataagtaatatataacagttgaactgtagtcctatgaaacatgtctgaaaattatttttattcatggttttaccttttggtaaattcctttrgtgatctttagatggttttctccaagtgtcatcagatgcatctccaatttaaagaaataatctctgtatcataatacctacactcttgtataaagagagc

SEQ ID NO: 5573 - DNA, 201 bp, Homo sapiens
ttgcagctggactataagctccatgaagagaggatttgattataggttttatgcttgacattccttcagtagagttccctcttagttcacaggattctctsaaaaacaaaaacagctcctgaaaaagaactcattaaattattatctggctttccagagtcaatagttaaatgttcaggaatattgtcagcaggttactaa

SEQ ID NO: 5574 - DNA, 201 bp, Homo sapiens
tgtattttctagtatcctttctaatctgaatctaatcttgtatttaccaccttaaaaatggttggattcagtctaacaaacttaataactattactagttrtgtggctaaatcttttttctaaaaatgtttttatgtcaatagctgaggtccctgttttaagagcatggcaagtagatttttctagtgacatcacagatgt

SEQ ID NO: 5575 - DNA, 201 bp, Homo sapiens
cagtttgagttcaaaaactgatagaataaagaaatcagttttcatttaaattatttctactttttagaaattttattcagactccagtagtgcatacatcrtatgtgttcctgaaattagttaaaaaaaaaaagttatagtccatgggttggaaaaaggaaatcaaaaagaattgatatctaagaaatgtcatttgtctgc

SEQ ID NO: 5576 - DNA, 201 bp, Homo sapiens
acttgctatttagttccagataagttctttctgtgcttttctttttgtttcctgcatggttcaatatggttccaattgccacatatccacctcagtccacktggtaactcagcctttcccttctcaagggttgatggtttagaaagacattcagcatgcagatgggtggggtatgcaatatatctctttgacctccctcat

SEQ ID NO: 5577 - DNA, 201 bp, Homo sapiens
ttggaacttggaagtggaaattttagaagcatgagcactactcagcctagggacctgttattcggctacagtgacctgcagaccctgtctctacctccacrgaattgtgcacacttattagtgcagattggtgtcttataaatacggcaaagggattgaaggccttgttgcagatcttgaaatgctttctttgtgatacct

SEQ ID NO: 5578 - DNA, 201 bp, Homo sapiens
atcttggtctaacagcttgacaccttccttctaactgtgctatactctcctttgatctgattgactgatgtgttctggtcatgaacatgaccagttcatgygggtaagtgctattcagtgggagaagtcttcttctaagtttagagggtgggtgctcttacaccaagaggaaatattttttgtttcataaacagtctatgg

SEQ ID NO: 5579 - DNA, 201 bp, Homo sapiens
caaataaaactgtcataagatcttgtcctgttctgtgatggcttacagaattaatgcatttcctatgggcaggagtgttagcataaagttgagggtaggcscatgccttccccaccttcatccaagattcccagagtgaaggcaaatgggagtggccataaacttgataagacaaacagattatacaaaatctactttctt

SEQ ID NO: 5580 - DNA, 201 bp, Homo sapiens
cacctatagtcttagttacttgagaggctgaggcaagaggattgcttgagcccaggagtccacggctgtggtgtgctatgatcatgcctgtgagtagctaytacactccagcctggaaaagtcacctcatatagaagctgaacgcaagcttgtgataaaaagtcaaaggccaaatggttactatgtgcttacagtactagt

SEQ ID NO: 5581 - DNA, 201 bp, Homo sapiens
attgagatttgaacctaggcagatcggaagcagggtggttggtctcaatcacagaactaaattacctttctcatgcttagtaattgaatatatgaatatayactgagtttaactttctgttgtaatctctttcatttgtataattgaaaaagtgttgtatgttatagaaggttaagtattttatagcctcacatatcaaat

SEQ ID NO: 5582 - DNA, 201 bp, Homo sapiens
aaccatggtttatatgtcagtcgtttcttcaagaaaaaacatgccattaaaaagatggctaattcagatcacaactcaatcatataaatgctcccccaccyctcctgagtcaagcgtcatgctttggtctggaacagaagtgctttagttttacatttcactgtttttttactcacacatcaaggttttaatcaataaatt

SEQ ID NO: 5583 - DNA, 201 bp, Homo sapiens
acacgtaattctaaatagctttttattgtgagggtggtatttaatattcggaaggagagaaacacaaggtaagaggaataatcttgtgaaaatccagtgtrcaagaagaaattcaataagcatgacttagggagaatatgtttacaagcagaggttgtaccgtggaacagaatagaaaagaatgaagcttcacagctgtga

SEQ ID NO: 5584 - DNA, 201 bp, Homo sapiens
tatccaaatcaaaagagaattttcagaagatataaatttgttatatatctattgtacatataaatttattatatatctgagttgcttatgaattatagagrtgccataaatggaatacaggtacacgtaattctaaatagctttttattgtgagggtggtatttaatattcggaaggagagaaacacaaggtaagaggaat

SEQ ID NO: 5585 - DNA, 201 bp, Homo sapiens
atctgaatcagaaaatttcatttctatattctagataaccatggatgaatttcctggttattcataaatttagagtcttccactattaaagatttgtaatsttagggaacatacaatgactcatgtagtttatgaatataatttcagtaatatgagtactatggcataacacagaaatgtctccattgccatggccataca

SEQ ID NO: 5586 - DNA, 201 bp, Homo sapiens
tgtagtttcttgatgtgttactaggcttatattctagtaagtcatcatcaaatggattgtttggtcttgattacaaattatcaaaaccagggaatttgatsttcttagagggactagtcaaacaggtaacataaatgtgtaaaactggtgaatgcgttttaatactatctaaaaattaaatttaaaaagtttaaattttgc

SEQ ID NO: 5587 - DNA, 201 bp, Homo sapiens
ggcagggcagtggagtgggagggatgaggcttttctaggtagggtgtggtggggttgccctgaggaggtggccttttggagctgatgtctgcatgaaaagmaggacccagccatgtgaaaacatgagtgagctctgcaggcaaaggcaacagcaggtgctaaaaccaggaatataagtccagtgtgactcgaaggagggaa

SEQ ID NO: 5588 - DNA, 201 bp, Homo sapiens
ctttatcttaggtttccagatttatacccttgtcttttatgagtaactactgctagaattagccacatcttacaacaatgggctctgggggttattaaacrttggcagccttcaagagggcgtcaattccaggttttctactaccctctcctgtgctgagccacaagtttagccttctgttgttttccatgttaagatgtt

SEQ ID NO: 5589 - DNA, 201 bp, Homo sapiens
attttgaactaccagtactattcagcatgttatgggtttcattaggatgtagttaattccctggtttagaagtgttccaaatagaattcatttaacagatmtttaatgagtactattatgtgtcagacactgttctaggtgctgaggatagactgagatggtgaagattaataaaagaatgagttgagataaacagagagt

SEQ ID NO: 5590 - DNA, 201 bp, Homo sapiens
ggtgtctttgatgtaattgttttacataatgtgtgtaaccttgttaagtctgtggtattgttttgcgtgtgaatgtgtttttaatttttatcagtggtatygtactataaatcttgctttgttttctacttttatccatgtagctatgtttatcattaatacttggttaggctgcagttacaaccaacttacatttttgtg

SEQ ID NO: 5591 - DNA, 201 bp, Homo sapiens
tgagcaatgagtaatattccattgtgttcactctaacatccctgtgatcagcatgtgtcttgcagttgatgtgatgaggaagtactgagttataatttacytgataattttttttctctcatagtagcacataaaataagggtacatcgtataatcagtgatccttaaatccactgaaatagggtaaacagtgacagaata

SEQ ID NO: 5592 - DNA, 201 bp, Homo sapiens
caaggtagaagatgccattttaacttggtctgctgatttgagtgtgcaaattagtaaaacttaaaaatacatattgatggtgagtatattttttgtacatwggaaatattttgtagtaaataataaattagtcaaaatcagtcgccctttgtaggcatagttcatcaatattatgatgttaatattgttgaaatgactgag

SEQ ID NO: 5593 - DNA, 201 bp, Homo sapiens
gttctaccatctttaaaatgatgaggatgctttttttttcttgtttttatagggatattgtatggacaaactatatgatgtatgcaaatgttgtttggaamaaatgttgttatataaatctaggttactattaaataccttctccagagctacatagactctactcatgaacttgaaatccagtggggaaacatttgttag

SEQ ID NO: 5594 - DNA, 201 bp, Homo sapiens
tgtatatgtgtgaaatcttggaaaaacctttatatgttttgtgcctcagttctaccatctttaaaatgatgaggatgctttttttttcttgtttttatagsgatattgtatggacaaactatatgatgtatgcaaatgttgtttggaacaaatgttgttatataaatctaggttactattaaataccttctccagagctac

SEQ ID NO: 5595 - DNA, 201 bp, Homo sapiens
cacacttttttatggctctatagtattccatggtgtatatgtgtcacattttctttatccagtctatcattgatgggcatttgggttggttccaagtcttygctattgtgaacagtgctgcaataaacatatgtgtgcatgtgaatgtgtctttatagtagaaagatttataatcctttgagtatatacccagtaatggga

SEQ ID NO: 5596 - DNA, 201 bp, Homo sapiens
ggtaaaatgatttataattgaaattacattgtaactaatatcttttctgggcatacattttataacaataatcttgcactcagattttaataatagagatrtgttaaaaaggagaaatgattttcaaatatgttttactttgtatatgtgtgaaatcttggaaaaacctttatatgttttgtgcctcagttctaccatctt

SEQ ID NO: 5597 - DNA, 201 bp, Homo sapiens
cattgcatctgcacttcaggttcttactcataacagtatccctcatttctccctcctatctgttatgacattgctgtcattcatttcacttattcatattstataatcaaccaatacattgttactattattattttaagtaaacagttatcagatgattgtatctccatttattccttctgtattgattttcctttacat

SEQ ID NO: 5598 - DNA, 201 bp, Homo sapiens
tgagctggtgctaaatttaaacataatttcacaatgagatttagaaaatataatcttttaatttgcatatttgttaaaaattatttagtgcctcatagagygccaggtaaaatgatttataattgaaattacattgtaactaatatcttttctgggcatacattttataacaataatcttgcactcagattttaataatag

SEQ ID NO: 5599 - DNA, 201 bp, Homo sapiens
taaaaaaaaaaaaaataatgaaaataaaaccccaaccccctgtcatctctatagtaaaacaggaactagtttcctataaagacatggctgcttccttctcmttcaagtcgacagatactctctatgaccagtgtgactgtttctaagttgtcattattcaggtgactgagttttatattaaattttattccacatgtgcag

SEQ ID NO: 5600 - DNA, 201 bp, Homo sapiens
agctatctacttccttgaataattttcccttcagttcttgcattattttttggatttcctggcattgggcttcacctttctctggtccttccctgattaawttaataactaaactcctgagttctttttcaggtaaatcagggatttattcttggtttggatccattgctggtgaactagtgtgatttttttgtgggtgtt

SEQ ID NO: 5601 - DNA, 201 bp, Homo sapiens
tggctccttctagaaattgtaacctctgttcttgcaaggcagctttagaaatcaaaatataatttcatttaatagactgtttctatcacaagttttccctrtattaggtttttttttttgtgggatatgagctggtgctaaatttaaacataatttcacaatgagatttagaaaatataatcttttaatttgcatatttgt

SEQ ID NO: 5602 - DNA, 201 bp, Homo sapiens
actgatgattgaaaagttaaagtttggagaacctttcaagacagaatcaaggacagaggcaagaattaagctttgagtaaaagttctaaagaaacaaaggygaagaaactctagattcaagtaaatattaaaaccattagttactgtcatctgaagaaaatcaagagaaagcaggccagctgctgtggggatggatccact

SEQ ID NO: 5603 - DNA, 201 bp, Homo sapiens
tttgttttataggtcctgtgtgatttatgctttaaagagtttctgttttgatgtgtttccaggatttgtttcaagatttagagctccctttagcagttctygtagtggtggcttggtaataggtgaattctctcagcatttgtttgtctgaaaacaacagtatctttccttcgtatatgatgcttagttttgctggataca

SEQ ID NO: 5604 - DNA, 201 bp, Homo sapiens
ctattaatttgatttgcattcagagaccacattatcttttgagttacagtgtttcctattatctatgaactgacctctacaaataagaagagaaataggaraaacgtctgagttgccaggaagggttatttccacctagcttttgatccagtccgaccaactaatgaatcccccgtcaggggctaataaaggaggcttgtt

SEQ ID NO: 5605 - DNA, 201 bp, Homo sapiens
agtggctccagggtgtctagactgggatgtttctgacttgttctgtagtgccctaccttctataaatacacctaagaagcaagatagactaagttacatcrcaggcgaatgttatcttaggtacatcctagtgatttatacttgacaattgctttttatcctgctggccctctctatggtactccattccattctctagtg

SEQ ID NO: 5606 - DNA, 201 bp, Homo sapiens
gaagtaagatgatatcacattgtggttttggtttgcattttcctgatcattagtgatgttgagcattttttaatgtgtttgttggccatttgtatatcttyttttgagaattgtctatttatgtccttagcccactttttgatgggattgtttgtttttttcttattgatttgtttgagttcattgtagattttggatatt

SEQ ID NO: 5607 - DNA, 201 bp, Homo sapiens
cctggtatagtatattcagggagagaatgagtggctccagggtgtctagactgggatgtttctgacttgttctgtagtgccctaccttctataaatacacytaagaagcaagatagactaagttacatcacaggcgaatgttatcttaggtacatcctagtgatttatacttgacaattgctttttatcctgctggccctc

SEQ ID NO: 5608 - DNA, 201 bp, Homo sapiens
ccttaaatttttggtagaattcaccagtgaagccatttgagcctggtgcttttgttttgatggttgttaattattgattcaatttcattggtagatatggycctcttcagattatctacttttccttttgtgacttttggtagttgtgtctttgaagaattggttcactttatctaatttgtgggcagagagttgtttgta

SEQ ID NO: 5609 - DNA, 201 bp, Homo sapiens
agcaggaaaaataagtatttagtgttcctagccacagaagaaggtggctggggcctgggaatgagtatggttggccaaacaacagtgtctgaggcaatggrtattaaataatgctgattctcttaggttagcactagtggaatatatgtatgaattttaaaggcaatgactgaaatggagacagtaaaggagaatatttta

SEQ ID NO: 5610 - DNA, 201 bp, Homo sapiens
acagattttgtcatttccttcagggcagtcagtttccccagaacccatgcaggtctagagatgctgtctgggagccagggattagaattaaaaaaaaaacktagaaatctacctggtgttctgttgcattgtggctaagctggtactcagaccataagacaaagctctttccattcttctttcccctttccacaggcagag

SEQ ID NO: 5611 - DNA, 201 bp, Homo sapiens
taggtggtcttagataaggtctggaagaattccctggattaccaggaagaaattctcgttatcttctgctactttcttttaaacaaatgaagtctttcttkctgtgctgaaccacctggagctggggatggcatgattcaagcacccctgtggccaccaccactgggactatcccaggtcagacctgaagccagcacagta

SEQ ID NO: 5612 - DNA, 201 bp, Homo sapiens
agtcattataaactacatagaagtatgaaactgaaaaattgaagtataatttatattgcatattccttgtatgaaagatcattgttatcaagacatttcgygctttattgagcaattttagatatttaaatatctaaaaatttaaatttaatatttaattaaaaccaaatagaataatttaaatttggtagtgtaggcaaa

SEQ ID NO: 5613 - DNA, 201 bp, Homo sapiens
ccaggcattccaaggtaaattgaagtgtgatttgacatttaatggtactgaatatatgttatgttgaaaatagtgtaatatagtgttgggagggcaccaaygatacatttgactaacgctttgccctaaacatgaaaaaaatatatttcaattaggagttaagatacatacatttaaatataataagcaaaacatattagc

SEQ ID NO: 5614 - DNA, 201 bp, Homo sapiens
gtagacaccttaggcctttcaacttaatcatattatctacaaatgaagatagttttattacttcctttccaatatgcctgatgtttaattcttcttcctamtttatgctactggttaggtcttccattacaatgttgaattgtactggaaaaacacaaactaagacatccttgtcttttttcttatcatagacagaaataa

SEQ ID NO: 5615 - DNA, 201 bp, Homo sapiens
tatagttttatattaggaattgaaatcaaatagtgtaaattctctttgtttttctttttaaaaattactttggtattctatgccttttgcatctatgtatsaattttataatccgtttgtcaatttttacaaaaaaaaaaaaaaaaaaaaacccgacctgctctgattttagttggtattgcattgaatctatagatttgg

SEQ ID NO: 5616 - DNA, 201 bp, Homo sapiens
ttgtattatatttatacttttgttgtaaatcagttgaatacatatgtgtaagtctatgtttggatttgctgtcttgttctaaaggtctatatgtgtatgcrtattctaataccccactgactagattattatagttttatattaggaattgaaatcaaatagtgtaaattctctttgtttttctttttaaaaattactttg

SEQ ID NO: 5617 - DNA, 201 bp, Homo sapiens
gccagtgaagggtaattttaaaatatgataagaggtgaagcttgaggtttatcttaaaaatatcaatattaattgttctactaccagtatttgaaaagacygtctcccattgtattatatttatacttttgttgtaaatcagttgaatacatatgtgtaagtctatgtttggatttgctgtcttgttctaaaggtctatat

SEQ ID NO: 5618 - DNA, 201 bp, Homo sapiens
ttttatttcattatttttatttttttgagatggagtctcactctgtcacctaggctggagtgcagtggcatgatcttggcccactgcaacctctccctccsggttcaagcgattctcctgcctcagcctctggagtagctgggattacaggcaggcaccaggatgtctggctaatttttaaacattttttggttagagacg

SEQ ID NO: 5619 - DNA, 201 bp, Homo sapiens
tttgtcaactttctaaaaatgaatcttacttgtctttcatagctaagaaatttgtgcctaactcaagcttatgaatttttttttcattgtttcttctcgargttttatagttttagctcttatatttaagtctgtgatccttagaaaggtgattttatttcattatttttatttttttgagatggagtctcactctgtcac

SEQ ID NO: 5620 - DNA, 201 bp, Homo sapiens
ttgcagattttgtgttctttctcccacttagcacgaagtttttaaaatttacctgtgttgtgtctattggtagttcattcattgcccacctccctttttgyatatcacaatttgtgtattcattcattagttgatggacatttggattgtttccagttttccccgtgaagaataaagcttttatgaaagttcaagtacagc

SEQ ID NO: 5621 - DNA, 201 bp, Homo sapiens
acatgtacatacataacatgcacaaggcaaacacacacacaatagaaaaggtagtaataggtataagaaatatccttctaagaaataatgtttaaattgtyctctccattgtaatacagagcagaaacttaagaatgcaacaatattttcttttttttcaaaaaagaagccatacaaaaaagaggcacagaaaatgactct

SEQ ID NO: 5622 - DNA, 201 bp, Homo sapiens
aaattctattacttaatgaagtgcttacaaagctttggaaaattactcctaattctaaaataattataccacgtatccttagtcaagaaaaattggcattyatgtgtgctttagcaatatttagataggctgttacatttcttcctttaaaatagccctgattgcaatgcaaattgaaagctgtgatgccatcactgaaaa

SEQ ID NO: 5623 - DNA, 201 bp, Homo sapiens
agtgttttgtagctgttctttatcaagttgaagaactttccctgcattcctagtttgctgataatttttattatacacggatataggattttgtcaaatgycttttctgtaccaagtaatgtaatattgcttttttttcccttagcctgttaatgtggtgaattacattcattggtttttaaatattaaaacagccttgcc

SEQ ID NO: 5624 - DNA, 201 bp, Homo sapiens
cactcagaattccttctcccatgcttctctctctgcacctttacctcctcccacccgtgatggtgaatatttctaaagaaactgttcttggcaatctcatmcaagctttcagtttcaattgtcgtctctatgctgatgactccccaaatgatatcttcagttctgatgtctcatctgagctccagactcacactctctcat

SEQ ID NO: 5625 - DNA, 201 bp, Homo sapiens
gtatccatgtctaatcaaaatataaggtcattttcccctcaccccaccaagacattaatagttaaatatatttgatttacaactgatctaactggtttttsttgcctggatatctgccctagttatctctttagccgtggtttatacaatgtctgtgtctctgttctccacatcacctccttcatctgtctgtcctaaagc

SEQ ID NO: 5626 - DNA, 201 bp, Homo sapiens
tctttctgaggccaagtccaaggccttttcctggcttccttccttcttgacccctttgcatcctccagcactgctgataccttcagaaattgtctcctttwtcagcactcagaattccttctcccatgcttctctctctgcacctttacctcctcccacccgtgatggtgaatatttctaaagaaactgttcttggcaatc

SEQ ID NO: 5627 - DNA, 201 bp, Homo sapiens
ccctaaagagcttattcctgaacagaccaaaatatataaaggcattgtattttttaattaaataaaaatgttttcaggattatcagcccatgtgaatatgraatgaaagaaggcaaagagcggtatagtttgttctcttccttttctggtgagcatctgcaggagcagtgtgggctcagtgtgtacccactgactctgtgt

SEQ ID NO: 5628 - DNA, 201 bp, Homo sapiens
tgtgtattctcaactagagtaggagatctacagatgtgtatcttgctctcactgtctgaggagatggatgcattgaaggtaagaggggcctcactgaattrtgcagcacttgctgtctcttggttgttcacaactgtggaagccaacctcaggtgactgagttcatataactccaactgccagaactttagggattccttt

SEQ ID NO: 5629 - DNA, 201 bp, Homo sapiens
ttcttgacttcctatggcttttgtaatgattaaaagagaaaacccatgtaaagttttaagcttaggatccagcatgcaataagcttttaagaaatgtttgycattattattataatcgaggaaacatttacgcagtagtgttaatgactaataacagctaagattgttactttcccaggagagatttatgtcataataggg

SEQ ID NO: 5630 - DNA, 201 bp, Homo sapiens
gttttggcactggggataaaaagcatatacatatacatataatgtctcagggtgtgtagtgttggggttatcataacctagatgttttgatattaaacgaygttcttttaaacagcttgtacttgtctttgtcagggaataccactaggaagaaggcagttctgggctcattaataaacactatgttcttattgtgtattc

SEQ ID NO: 5631 - DNA, 201 bp, Homo sapiens
atggtcttgtgtccacagagaactgtaacattaatctataatgaaggtgctctgtggttttatgtgttatttataataacaaacatggtttatagtgtatytaatgccccttcgtctactcccacatttcaggtactcaaatgcatagctgttggagatagcaagaggactacatttttacttattttcttaaaatattcc

SEQ ID NO: 5632 - DNA, 201 bp, Homo sapiens
ctcagacaggacttaaatgtaagcctatgaggcaatttagggtacaaaaacttaaaacagtataggagtaaatctgacttctcaggcagggttagctccayattttaaaatgaagtctacaggaatgtgtcttgctccagctctgggctctgctttctggtgtgctggctatatgcttaggttttgcccatgtggtgggaa

SEQ ID NO: 5633 - DNA, 201 bp, Homo sapiens
agttttggatttacgatacaatagaagaagctgggagatggaaaccatgagaaaataaaagttcctttcactgctttggaggctcagtgtttatgtgatcrtttaatacaagataaaagtcacagggataggagtgtggagaactgattggaggagaattgttgtcaactcagccctggtggattgatgggggaggctctg

SEQ ID NO: 5634 - DNA, 201 bp, Homo sapiens
caacagctgctgttaatatgaaacagcaaacagcattcaaataagtgctttaaaacctatgattctaatgctgtagttaagtttttagtaaacaatggcartttgatgcagtagaaccaaccttggagtcaaaagcacttctttaaatccctctttttcaattatgagattttgttaacaagcttctctgagaattaattt

SEQ ID NO: 5635 - DNA, 201 bp, Homo sapiens
aacattgttcttattttacagatgaagaaactaaagctaagagagattgatgaagttatccaagatcataaccttggtttgttggactccaactctaaagyccacatttttctatcatcctctactgttttgttgtatactcgaggatgctgaggcagagaaaagctagttattgaaaacataggactagttttgaaagag

SEQ ID NO: 5636 - DNA, 201 bp, Homo sapiens
ttttgagttacaaatcatatttaattaatattaacaccaggtaattggcaagaataacttcaaaggagggctgaggaaattgcaaattggaactgcaggtrcagtgatactgtagaagctttatagggatccaaaggacatgcatatgattttaacagttattgcagaagctgatcaaatatagtgtcatttcaaagctgt

SEQ ID NO: 5637 - DNA, 201 bp, Homo sapiens
ggagaattgcttgaacctgggaggtggaggttgcagtgagccgagattccaccaatgcacttcaacctgggttcaagctgctggtggatctactattctgsagtctggaggatggtggcctctttctaacagctccatttggcagtgcccccactggggactctgtgtgggggctccaaccccacatttccccctgacact

SEQ ID NO: 5638 - DNA, 201 bp, Homo sapiens
cattgagtactttaagtaattcaacaggtctgaaatggataattagggttgctgaatctaaaaggcctgacttgacaaggtagaattctgtaaggtatgcrgcttaactagttttgttcattctgagctctaataattattagctaatttttaacttaatgattagttaagattttcccccgtccaggtagtcataacaat

SEQ ID NO: 5639 - DNA, 201 bp, Homo sapiens
ttttttagctctttgggtggatttctttctctctttcactttgtaattgaataatcactttttcctactgggtaatttgaggcactaaaaaaaaagtcatyaacagatgactggcttgttgaatacatcacagaaaataatatttattatgattttgttgacaaaattagaatgctaaattcagatagctgcaaaaaaaaa

SEQ ID NO: 5640 - DNA, 201 bp, Homo sapiens
cttgaacaagtgaatggaaaatacaagcagatgttggttggctagggtacaggagaactgtccaaatttcaggtttcaaacccatatataaataggttagraatgagcattagattaaccatcctgccaaagtaaattggtgctgtttattctcttaattagctgtgcattacaaatctcagattccctgtgttaagtcag

SEQ ID NO: 5641 - DNA, 201 bp, Homo sapiens
aatggcagtaacaaaaatgcacaaaatcttattatcactcccagataaagtggtttactaattattatacttcgagagctagccatggcagaggtttcctraattctgtctcaagtacccactgccaagagcagttgtcatcttttaggaggaagatgtcatatagtgttctcctgactctcaaacttgtttaatctggga

SEQ ID NO: 5642 - DNA, 201 bp, Homo sapiens
gctattctgaagatcatttaggtcttcatcctgaatatcctaaaagcagccccttgaagacactttcgcaggtggagcttttgagtactagataagttaawgtcttggtcatggttatataataaatgggatgaaaaaggcagcgatggtgtgctagaaaataatttggatcggtgaacacaatttgctccactgtctttg

SEQ ID NO: 5643 - DNA, 201 bp, Homo sapiens
ctaagtcatgatgagacattgaatttgtagaaggctattctgaagatcatttaggtcttcatcctgaatatcctaaaagcagccccttgaagacactttcrcaggtggagcttttgagtactagataagttaaagtcttggtcatggttatataataaatgggatgaaaaaggcagcgatggtgtgctagaaaataatttg

SEQ ID NO: 5644 - DNA, 201 bp, Homo sapiens
tatctctcaaaaggagagtagttatctgcaggagatggcagagccttgttccaaaatcctagaggcctctgctgtgattcacctgtgggagcctgccaaargctccaaatacaatccgtatcttctcctgatacctcaggcaccattggatctcctgggtcatatggcccaagtggcagagcagcttgcacagcagcctgt

SEQ ID NO: 5645 - DNA, 201 bp, Homo sapiens
agtagttatctgcaggagatggcagagccttgttccaaaatcctagaggcctctgctgtgattcacctgtgggagcctgccaaaggctccaaatacaatcygtatcttctcctgatacctcaggcaccattggatctcctgggtcatatggcccaagtggcagagcagcttgcacagcagcctgtacctgttgcagagcct

SEQ ID NO: 5646 - DNA, 201 bp, Homo sapiens
taagacaaggtaaatttaactacatgtacatacataacatgcacaaggcaaacacacacacaatagaaaaggtagtaataggtataagaaatatccttctragaaataatgtttaaattgttctctccattgtaatacagagcagaaacttaagaatgcaacaatattttcttttttttcaaaaaagaagccatacaaaaa

SEQ ID NO: 5647 - DNA, 201 bp, Homo sapiens
gtgggcagggggctagggaattgatgctgttgattggttgggaataaaatcataggggtgtggaaaacagcctttgtgtgctgagtcttcctctgggtggrgccatggggccagttgagtcatgagtcacaagttttggtgggattcatctgaaaaagtactcaaaaaccaatcttaggttctacaataatgatgttatct

SEQ ID NO: 5648 - DNA, 201 bp, Homo sapiens
gactcacagatagtcaaggaattgggactagatccaaaattttcaattctatgttcaatgctccaagtatcaaaggagctaaaagaggacattgctctgamgatagccaattaaaattgctaaatctgcatccattcctcaagctagtcattgaacagattattaatcagtgcttactgtatactaggcattgttaggagc

SEQ ID NO: 5649 - DNA, 201 bp, Homo sapiens
aactaggtaggtgaactagatatatgcttcactatatttaagactcacagatagtcaaggaattgggactagatccaaaattttcaattctatgttcaatrctccaagtatcaaaggagctaaaagaggacattgctctgaagatagccaattaaaattgctaaatctgcatccattcctcaagctagtcattgaacagat

SEQ ID NO: 5650 - DNA, 201 bp, Homo sapiens
tatacgtatatacgtgtgtctatctatctatatatatatatgcctgtgtgtgcgtgcgtatattctgtcattagccctaattgtcctgtgtagtagagcarctaagagtgttattatgccatttgacaacagacatatatatataaaatttaaatatagactaagtaattcttcaaggtctcaaatcctggctctaccact

SEQ ID NO: 5651 - DNA, 201 bp, Homo sapiens
gttatacgatacgtatccaccacttgtaggaaaataattcaaagtatatgcactgagtatacaattttatttcccactcacatagtagtctgaggtagttyctggttgaatggcaattttcttccatggagtgattcaggaacccctatgtcttccatcctatagctttgcatcccctgatgtctcttcatcataaataat

SEQ ID NO: 5652 - DNA, 201 bp, Homo sapiens
gctttggttacaactcccaatactatgttgaatagaaatggcaaaagtaggcacccttgtcttgttcctcatcttagaggaaaagctatcagcttttcacygtgaagtatgacattagctgtgattttgttatatatggcatttgttatgttgaggatctttccacctaatttgttgagaattatttttatcatgaaagga

SEQ ID NO: 5653 - DNA, 201 bp, Homo sapiens
aatttaagtgttgattattagtgacattgtggtatttttcaattgaaattgagtttacaaacagtttgaattctctgcccaaattacaataatttatgcarctagaccactggatattcagcctgggaacttagagctagagctaacacatcgaaatggttgaactttctgaatatgattgaaaaatcctgaggtactaga

SEQ ID NO: 5654 - DNA, 201 bp, Homo sapiens
tccttgtgactctttttaattttagtttttttgaaatagggtttcattctgtcactcaggctggagtgcagtggcacgatcataactcactgcagcctcarcctcctgggctcaagcaatccttccacctcagcttcctgagtagctggaactacaggcatgtgctaccacatcaggctaattattattattattattatt

SEQ ID NO: 5655 - DNA, 201 bp, Homo sapiens
tggaaaatttctttgatgataaatttaaaatttaaccatattaaatcattttaactgttaatcatcttgaattttttcaaattacaataaaaatttcagamatcttaatgcttttagttttaatatgtgtgtgtatgtgtgtatatacatttgtgtgtacatatatgtgtgtatatatgtgtgtgtatatatacgtatata

SEQ ID NO: 5656 - DNA, 201 bp, Homo sapiens
aacttgctttagctcccatatgagtacttgctacatcaccttgcccttttatgttatagaggttgctttgttccttaaatctcatgaacaaacctctgctrtcttcgagcttttcttatgcagcttcttcacctctgccagctttcatagacttaaaagaattaggaccttgctttggattaggctttggtttaagggaat

SEQ ID NO: 5657 - DNA, 201 bp, Homo sapiens
agccccttgatatcccagctgttatagtgtcatcccaaggcatctcttgactataggattattgctggagaaggaaaaaaacatatttggtatcagcaaayagcacagtttttctgactggagcatagtttgtttagtgaattatgggagacaaaattggaaggtttgacatagacacatgattatttcaaatcatagggt

SEQ ID NO: 5658 - DNA, 201 bp, Homo sapiens
atttattgtttttcttagaggcctcgactcagagaaagatcatgggaatgatttgggcttaaccataattaccaaggacaaaaagtctgatgttattgaartaggatgttcacttgagagacttgcagatgactgcaagcttttctgtacatagtaggacatagaaaaattataatacacaatatttagtatctttaacat

SEQ ID NO: 5659 - DNA, 201 bp, Homo sapiens
tacacattcaatgtttcatactatagcagagcttttccaattttattgtgaacacgaatcacctggagatcttgttaaaattcaaagtctcattcagtagrtctggggtggggcctgaaattctacatttctaagaagctcccaggtgatgctgatgctgtgggtttgctgatagcactgagtagcaagattgtagagaaa

SEQ ID NO: 5660 - DNA, 201 bp, Homo sapiens
gttctcagaaagtgcctatctgacccttcaaataaagtgagattcctcctcactttcatctctcccacacactatttccagtgtaccgctttcattagctyctgtcaatttgttgtctgtatcacctactagatcctaagcttcttgaactatgtctgttttattgtgtctctagcactgagcagaatggcatgtgacaga

SEQ ID NO: 5661 - DNA, 201 bp, Homo sapiens
gtatatacatatacattctaaatccaagattgtttctgagacagattcaagaaggaatctttcagcagtgaattttggcttctctgaagatacaactcttkaaaggcagcatcaaagtagttcattttctccaatggttcataggtgggtagagtatccttaacaagtatactttacttgctgctttgaaacattacagca

SEQ ID NO: 5662 - DNA, 201 bp, Homo sapiens
atcacactggatattagttaatacttattaggatatctctgaagagatttagtaacaacagaggtagatgtgtagtttaactggcttaagacaataggctrtcacaatttcaatggtttgcccattattggaagtgactatttattaaggataaaatgaatcctctccatctgttacactactaggaaatatccaccaaga

SEQ ID NO: 5663 - DNA, 201 bp, Homo sapiens
gatcctctgtgaatcacccttaggtcagagggacttcaaaagatgagaatgactaatttttttagaggattaggatgaaaccggcatatttaaagaggtcmacaatcttatataagtgaataaatggatattttccttgtgtggtggcaggctttggaattatgtgaacttgagtccaaattctggctcacccatctagta

SEQ ID NO: 5664 - DNA, 201 bp, Homo sapiens
cactttaaccgcagaaaggaaatctaccagagagtgcattttagtcttgtatttgcatatgagaaagaaggacagaaattaatcagctgtaaaatgtccayccagaatgacatttctaagtaaagaaattgattatggggagatgcactttaaacatgttcttgcctcactgacagtgagaacagactaaaagataatgaa

SEQ ID NO: 5665 - DNA, 201 bp, Homo sapiens
aatcacttggtttcctaacgatttgctatgtaatatgaaaatgtaaacatgtacttgataatatttacctatccataaatggttgtttcatttataacatkatctctattagatatccagtattaatatggattcaaccatgttctcatgaaacataattcatggtgaaaacttggtatgtagcatttggcctcaaagaca

SEQ ID NO: 5666 - DNA, 201 bp, Homo sapiens
tggaatgcctatgatttaattttgactgacaagtggttccaaactattaagaacataagtaatatataacagttgaactgtagtcctatgaaacatgtctkaaaattatttttattcatggttttaccttttggtaaattcctttagtgatctttagatggttttctccaagtgtcatcagatgcatctccaatttaaaga

SEQ ID NO: 5667 - DNA, 201 bp, Homo sapiens
ctccacagttagattctataatacattttgactacaactcttaaatttagcatattttataaacatttcaatttgacctgtccttatttgcatgacatacrtttatataactttatgaaaataacatttaagaagttctacaatgcaggcatttattttctagttatggagtttttttttctctttcttctgtctctccca

SEQ ID NO: 5668 - DNA, 201 bp, Homo sapiens
ccatcacctaggagtacaacgtgtagggttgtgggtgctggtacatgtgggatggcaagatcaagggtgaacaggagtcagctgatcaatgttctccatcmagcagtacactcatttatataccatgttttggtgctcatgactcatggaataatcaatttagataatttgggattactttgtagtaaaatttaagagaac

SEQ ID NO: 5669 - DNA, 201 bp, Homo sapiens
tttacctttatattgttcactcctttctctgagggatgttttccctttgctgctccccctttttttttttgacagacatgtttcctttcattgaaagagaygaaagaaactaggattgtttagtcacaacaaaacaaaacaaaatatacatacgaatcaatgaattttgagttgtgaagcacagtaggaaaaaagtattgt

SEQ ID NO: 5670 - DNA, 201 bp, Homo sapiens
aaaaagatgacaccttcttctttgaaaatgatgacaccttcttctagctacttaagcttgaaaacttggtgtcatttgtgacatcatttatttatatcacyaagggctatttctgcagcttggcaaatagctctagctgttctgtattcttattgccatcacctaggagtacaacgtgtagggttgtgggtgctggtacat

SEQ ID NO: 5671 - DNA, 201 bp, Homo sapiens
tacatttccatcccagttttcttactcaggtttcagttatcacacatctgactgcctactgctttttaactggaatgcctctccatcaccccacactcaasaagttccaaatgacatgcatcagctccccatctcaattttctagcctctgaaaaagatgacaccttcttctttgaaaatgatgacaccttcttctagcta

SEQ ID NO: 5672 - DNA, 201 bp, Homo sapiens
aaaataaactagctttgttttccctcagtttgaaataatattttatccttagttattctagtttattctcataaaacactccacctccctctctcccacaygtggcatatggtatccaatgacaatcataaatatcttgacctctccttcttaacacctcatgaactagaactccagccattaattgcactaaaggctatc

SEQ ID NO: 5673 - DNA, 201 bp, Homo sapiens
tcacttttccttattattattttttattactcatttgccaggtatgtcattttcttagtgtaactttctctaacactccaggcaaagtgaggcagctgccmtttatatatgcccagcacctggaccttgtttttgtttttgatttttttcttttttgcgtatttattacaattactcttattggtctgtatgtgtgtatgt

SEQ ID NO: 5674 - DNA, 201 bp, Homo sapiens
tatggtctgcatgctattctgataataggcacaattgccacatttgggcttctgtgtatttataatctttgcctcagaatttaagtagaaactcacttttygtgttacacttaattaggttgggatctgttctgtaggaatgaattttactagcttttacttctgtttcttttaatgaaaattcctcaaatgtagttcagt

SEQ ID NO: 5675 - DNA, 201 bp, Homo sapiens
cttcaaacatctagaagatccttacagaccacattggaactatacttaagaaccactgcttccaagattgcttagagttcagacagttaccacacagtgayctgtgctgccataataaaatttgtattggaaaaaaaaaaaaagaaacattatcagttcaaaggaagaaaataagtggtgttattctaataagatccaaag

SEQ ID NO: 5676 - DNA, 201 bp, Homo sapiens
ttctagtttattctcataaaacactccacctccctctctcccacacgtggcatatggtatccaatgacaatcataaatatcttgacctctccttcttaacrcctcatgaactagaactccagccattaattgcactaaaggctatcataggttctgattaattatattgatatgttataaaattcttaaaacattctcttt

SEQ ID NO: 5677 - DNA, 201 bp, Homo sapiens
gcttttatttcaaaggaattcagccttaaatacagatgggcttgtctgcatggtctagatgacatttttataacctgtaatgttcttcagcaagatgtggyaaatgattcttcacatcatccaactagagagtgcttagttgttagtctcattcacaccacagcttctgagtctgctgaacacaaaattattactgccaga

SEQ ID NO: 5678 - DNA, 201 bp, Homo sapiens
tttttccctatcccatgtttgaataataaacattctttcagtatttgaggtggaaaataatctcatcatttgggatttatattcaaactaatgtatgtatrtatataaagatgataagctcctaataagtacctcaggttttcttatttcaatactcagtggaaaatttctttgatgataaatttaaaatttaaccatatt

SEQ ID NO: 5679 - DNA, 201 bp, Homo sapiens
aggtttttaaatactgcattctgaatggccccatgggaaaggtgtttaattgacatatacaagtttaggtattctatttgataacacaagggactatgccmacagattcaatctaacataaaaaattaaccctgtgcatttcaagcgttccttgaaataataatacctgattagcctatccatttctaatgtttggtttga

SEQ ID NO: 5680 - DNA, 201 bp, Homo sapiens
agctttcatataaaggtatgtgatatggtttttctgtgtccccactcaaacctcaccttaaattataataatccccgtgtgtcaagtgtagggcaaggtgragatcattgaatcatgggagtggtttccctcatactgttctcatggtaatgaataagactcatgaggtctgatggtttaataaatgggagttcccctgca

SEQ ID NO: 5681 - DNA, 201 bp, Homo sapiens
tatgtacaaatctgacggtgattgccagctaacattgatctatgtaatttggataaatggccagcagcctgccttgttgccatggttgcttactctaattwttctttttttttctgggggctacatgatattcttgggaaggccaattgtacttttttcctttattatacttatttcattaaattatagttattttttatt

SEQ ID NO: 5682 - DNA, 201 bp, Homo sapiens
tatggaaggctctagcaggatattggagggcaggaagagaaagaggtcaggatatttcttcttcatgtcctacttcggtcctgtgcgctggccgtgatcaygtcctttcaggatataactcccttcaccctgttctcctctgtacctcttctgatgcagggctcctaaggaaacactgctccttttccttgactgtttatc

SEQ ID NO: 5683 - DNA, 201 bp, Homo sapiens
tttagcgatttattgcaggtttttaaatactgcattctgaatggccccatgggaaaggtgtttaattgacatatacaagtttaggtattctatttgataayacaagggactatgccaacagattcaatctaacataaaaaattaaccctgtgcatttcaagcgttccttgaaataataatacctgattagcctatccattt

SEQ ID NO: 5684 - DNA, 201 bp, Homo sapiens
attttaggttcagggtacgtgtgcaggtttttttttgccacgaagggaaaaggttgggaaacactgctgaagaagtggttctcaatcttaacatgtatcaraatcaactggagggcttattaaaaagactgttgagtttcactccctgaatttctgattctgtacacccagagtggggcccaggtgtttgcattttaacaa

SEQ ID NO: 5685 - DNA, 201 bp, Homo sapiens
agctattcaaaataatgatgcataatttggtagcataaaacatatgttcttcttttatgcatttgctctgtttacttcctccaagtttttatttgaaaagrtatttcacatatattctgtgccccaggtagaatttcttaatcagaatattgtgtagatctcttcatgttgagtttacttataaggtggcaatacattaat

SEQ ID NO: 5686 - DNA, 201 bp, Homo sapiens
agggtagttccaaagtactaaaaacatcagtataaggttaccaactttttctttctcttagcatgtaattgtttcattttaccagggaggaaaacacattwgcttttcttcacttagttgttaacgacagctgtcagagttgtcacacatactagagtcaataaattctagagtgctaaagagacatttgagaaaactgca

SEQ ID NO: 5687 - DNA, 201 bp, Homo sapiens
cttaagagcgtgcttttagtgataaatgcctatgtttggggtgttttaaataatgaggttgtttgaaaagtagtgagaagtctttccataagaatggtttrtgactggatgttatatattttggtttacaaaattgtctgaaaacctttctagaataagtcagggtctatgtaaataaatctgcataaggaaagtactgtg

SEQ ID NO: 5688 - DNA, 201 bp, Homo sapiens
tagctaaaaagcatccccatacccagtgtgatttagactttcttctatgttattatcgtctaatagttttaatagttttcccttttacatttaggtctatrtgattcattttgagtttgtttgtttaaagagaataaggtctgtgcctagatttatttatattttttttgcatggggttgtccagttgttccagcactatt

SEQ ID NO: 5689 - DNA, 201 bp, Homo sapiens
ccatttcacatcagtcagaatagctattattaaaaagtcaaaaaaagcaggtgctggtgaggttatggagaaaatgggaatgtttatacactgctggtgcraaagtaaattagtttagccattgtggaaatcagtttggagatttctcaaagaacttaaaacaggattaccattcaccccagcaatcccattactggcgta

SEQ ID NO: 5690 - DNA, 201 bp, Homo sapiens
acatccaggtcatgctgatgcaagaggtgggttcccatggtcttgggtagttttgtccctatggctttgcagaataccaccccagttccggctgctttcaygggctggcattgagtgtctgcagcttttccaaatacaaggtgcaagctctaggtggatctaccattctggggtctggaggacagtggccctcttctcaca

SEQ ID NO: 5691 - DNA, 201 bp, Homo sapiens
aatagggtctttacatatttaattaaataagttaaggtgagatcataccacattaagatgggccctaatccaatgactcatgtctttataagaagagaaarcacacacacaggggcgaaagccatgtgaagatggaagcagagattggagtgatacatccaggaggcaaggattgccagtgaccaccagacactggaggag

SEQ ID NO: 5692 - DNA, 201 bp, Homo sapiens
atgaagcaatatgaaaaaactttgtaaatataaagcacaatatcaacataagcaagaaaaatgacagattttatgatcttggatataataaagctgtgcayttgttgagaagttggtgaagattttaaattaatttgactcccttagaaattccttggtaaaggaaaggtgagtagttttgcactccatatgtacagggtt

SEQ ID NO: 5693 - DNA, 201 bp, Homo sapiens
tgcctacttgtgtgagaatgagtatttgtgcttgtgagtatcaaatgaagcaatatgaaaaaactttgtaaatataaagcacaatatcaacataagcaagraaaatgacagattttatgatcttggatataataaagctgtgcacttgttgagaagttggtgaagattttaaattaatttgactcccttagaaattccttg

SEQ ID NO: 5694 - DNA, 201 bp, Homo sapiens
tgactccattactaatgctggaaaaaaataacatacagggccagctgtagcagtggcgcgtctgttctcactgaaaaagaaactaaggcaagagtaccacrtaaaatagaattggctggattttcttgtctcatacaatcaggatcagcacagttttgtctttccgcaaaccaacaaatggaaaaggcgaaggctattgaa

SEQ ID NO: 5695 - DNA, 201 bp, Homo sapiens
tagtgttttaataaaaatttcatcttcacttaattacttccctcccttgctggttaatattatttgatgaattaccgagacacatagaaaacttgggaatragggtcctgaaaataagggttctgatggttcaaatgcatagatagtaaatacaaatattttctcttaagaacataatcagcaatttaataaaaataaaaa

SEQ ID NO: 5696 - DNA, 201 bp, Homo sapiens
tgaggttggccaagtatacatattcaataggttacaggaggagctatgaataatcatgaagtgggagaggtacacgtgtgataagcaaacatgcgtattasctgcatcccatgttcactttggggtggagacttaacatttaagtgtcttacaattaggccttatatggcaaaacgtaaggcagggacacgaaggccctca

SEQ ID NO: 5697 - DNA, 201 bp, Homo sapiens
ctcaatgctgctctgtaatgatatgactgaaaacaagtgactgctacaattacaggcagcatgtggtggaggagagactggtaatgctagatcacatcaastgtaccgaatcaagtggttagaggactgaagaaagtggcagatctgcgagagttgagatgaacaagcaaggtgatcattgtaaaagctttctaatgacat

SEQ ID NO: 5698 - DNA, 201 bp, Homo sapiens
ttggaagacatcttagagattatttattctcacctaacacctaaattattagaactctttaaagcatctgcaacaaataattatccagttttgacttgaaygggccagaggctactcccttacaacaccactgctccattgtttggtgtttcacaggcgtggaacattcttctttgtactgagccaaaacctttttagcca

SEQ ID NO: 5699 - DNA, 201 bp, Homo sapiens
gatgcacttaggtagtacaagtagagccaccctcctattttgcatgcttgcagacatcactgaccatttatccatttatgtattcatccatatgtataccrcagagcacccattacatatgccaggtacatttagagaatatagagaaaagtaaagaataaatgagaaaatatacaaataacttgataatttaagatactg

SEQ ID NO: 5700 - DNA, 201 bp, Homo sapiens
aagggattctcatgcctcagcctcctgaatagttggggccataggtatgtgccaccacgcccagctactttttatatattttttgcaaagatgggattttrccacattggccaggctggccttgaactcctggcctcaagtgatccacctgccttggcctcccaaagtgctgggattactggcatgagccactgcatgttg

SEQ ID NO: 5701 - DNA, 201 bp, Homo sapiens
atcttcctttatatcttaaaattctttttctctcctcttgtcctctttctccccagtatttctctgtttgcccttgtgatcactcagtaaccgagagagtrgtaagaggctaggatcgtgaacttttcagagacagacatgagctcatatcctagctcttctactaatgttgtaagatcttggataagttatttatatttt

SEQ ID NO: 5702 - DNA, 201 bp, Homo sapiens
ggatttttttctacttctatgaaatttctttgggattttgatagggattgcatagaatctgtagatcactttgagtagtctggcattttcacaatattaakccttctaatccataaatacaggatgtctttccatttgtttgtgtctttaatttctttcatcaatattctttaattttcagtatataagtctttcatctcc

SEQ ID NO: 5703 - DNA, 201 bp, Homo sapiens
ggagacggacacaacagttgcccttcaaagtttagagccaagatgagaaaataattgctagatatacacacataaactatgcaggtgcagaggttgaggtractggttccaaccagggacattatgggagggctttatggaggggaagcttgggctaggtactgaaggaaggggaggtgcatgtagacagagaccagggaa

SEQ ID NO: 5704 - DNA, 201 bp, Homo sapiens
aagtaaagctgactaatcaagtcttagataaaagatctgatttctagtattgaacgtcaaatgtttacaataagttcaaattaaagagaggattgaaaaakctcacatgatttcatgggctgctataataatgaaattacttaaaggattatcatttatgtgtatattttcttagcattcctatttagccaacttgataaa

SEQ ID NO: 5705 - DNA, 201 bp, Homo sapiens
ttgattcatttctattgaatagcaatactgtccttatcccattcctaaatgtcatcaacttcagaattgtttaattatttcttgaaattggaatgctagtmcttcaaaatgatatttatagaattattgcagtgctgctttatagcattttgggtcttcttggagaaatctgttatagaaaataatgtatttattatataa

SEQ ID NO: 5706 - DNA, 201 bp, Homo sapiens
ttcatttactgatctgaagtgtcaaatagcagaaaccctcgtaataaattgttttgctttaaaaataatttgatataagaacaattataaacaataactgracaaattaataagaatatgaaatataacaaatatagtaaatgcaggtatttgtggtaattgttcatttccaataattaatggatctgatttatgtttgga

SEQ ID NO: 5707 - DNA, 201 bp, Homo sapiens
actcaggtttccttgttcctggtctattggaacaaggaagcccacccctgaatccataccacataaccaatccccaggctgccacaccagccctggcagartggactacattttatatcccctttggcaaaatccctaaagagcttattcctgaacagaccaaaatatataaaggcattgtattttttaattaaataaaaa

SEQ ID NO: 5708 - DNA, 201 bp, Homo sapiens
tttagctattctttaagacacttgttaaaactaacttttttttttaagtctcaatgtcagcttcttggaagcttgaatctcattagccaaacttaggttgyatgtcagatctgttccagattatcagtgtacaggaggaagtagtacaaacttggttgtcacagaccactccctatagaaaaaggtgacatttagaaagtt

SEQ ID NO: 5709 - DNA, 201 bp, Homo sapiens
ctattattctaaggagacttgtgattgctttcaagtcctagttctgtttgttttgttaactttgagtctagtaaatcctcgcagagaaactaggaaatcasgtttatataactctttacagttttcacaatgacttcacatgcatttttaaaatttggtcctctcaggagttgtgtggggtctgcagggcaggagtaatca

SEQ ID NO: 5710 - DNA, 201 bp, Homo sapiens
ttttttaaatgttggcaaatggttatctagagaatgggaatcaacttatactatcactagcagtatataggacattagtaggtgaaaaataggtgttatarcatggctttgatttgtatttgtttgatacaagggaggttaacacttttcgtatgcatattggttgattgtgtttcctcttttttgaatatcctatttata

SEQ ID NO: 5711 - DNA, 201 bp, Homo sapiens
ttctgtcagatgctgtcccctatgcctggaacacctttcagtcatcttctaccttttcttttcttttttctttctttcttgtgtatgtgtgtgtgtgtgcrtgtgtgtgtgtgtgtgagagagagagagagagagacaggatctcgctctgtcacccaggctggagtgcaatggcacaatcttggctcactgcaaactctg

SEQ ID NO: 5712 - DNA, 201 bp, Homo sapiens
acacacacacaaagaagaaacagaactgatggcaggtctagattggctctggcatagggcaagcctatctagttttcttgaaggccaaacttgagactagracttcatcagctcatgttccagccaagtgagctaagaaggtggtgtactgctatccttccaaatccatgtgttgggtggtaagagtcagttttattcaaa

SEQ ID NO: 5713 - DNA, 201 bp, Homo sapiens
atcacactgtagcatgcgagaaatcacccagagtgcttgttgaaacacgcgttcctgagcccacctgcagagtttctgattcagtgggtccggggaggccyggggtggggtctgagaactgccatttctaatggttcccaggtgatgctgatgctgctcttttgcacatcacactttggaagcactgctccatacaaattg

SEQ ID NO: 5714 - DNA, 201 bp, Homo sapiens
cctcagaagagacgtatcatcatttctggaatatactattgtttacacagactagccctattcaaagtggcagcgggccacaggagtacatcaattttcaraagtgaggttattgggggccacggtggagactgactaccacacagtatagtaattcttttggattattagtaaaggcgaacttatgaaaataagttgttc

SEQ ID NO: 5715 - DNA, 201 bp, Homo sapiens
gatcatcttttatatatgtttatatcctagcccagtgtttcagggattctggcatttatatttgtgattaactctaaagcatctttctacggggcttcttmttatttttttgtattttattttttttagttttaaaactgttttgaccaataaatctctctccagatgtcacattggtcagcaatgaggaggtaaatggaa

SEQ ID NO: 5716 - DNA, 201 bp, Homo sapiens
atttcagtctctgcttctataagttcaacttttttagattccacatataagtgggataatgcaatatttgtttttctatgtctgccttacttcacttagcrtaatgttctccaagttcatccatgttgtaccatatgttagaatttcttttctttttaaggctgaataataatctattaaagaattgaatatatctcactt

SEQ ID NO: 5717 - DNA, 201 bp, Homo sapiens
cagcctcctagacaatagaaatagtgggtttacactttcagagaagggaaagttgggcattgtttgtaaaacctgtgaccaaaaacctgttttaagtttargatagccacaaggagaactgggaggccacatattccttttttccttgttaataacacaccttttccactgaaaaagtattttccagtgtgggcgaaaaat

SEQ ID NO: 5718 - DNA, 201 bp, Homo sapiens
atattgttgtgcaatcagcaccaccatttgtctctataactctttgcatcttacaaaactgaaattctatacccattaaacaatatcttctcaattcctcytccccccagaccctggatctaccattctgctttgtgtctgtgattttgagtactctaggtaccttatataagcagaatcatgtttgtcttttttgtgact

SEQ ID NO: 5719 - DNA, 201 bp, Homo sapiens
tgttttgttttgttttgtttttgattctttatttaaaaggacacaattagtttggtcttgaggattgccagatgagatctaactagtatgatagatgttakcaagactaacagattaaaacatatttaaaaaatccaactaatcaggatcatattcagagatgtaaatagagtgaacagatctattaatgagggtcgtaga

SEQ ID NO: 5720 - DNA, 201 bp, Homo sapiens
atgcaagtttcactttggcagacacgcagatgaggaagtagaaacagaagcagagaaatacaggctgtcagtgttagtgtagctttctagctggtcaaacrgtatgcaaagcagccaaacagaacctggtgactaaaacaaagtggtaagattaaaccatcgagggcaaaacagaaatagtcaggaataaatactgagtct

SEQ ID NO: 5721 - DNA, 201 bp, Homo sapiens
aacaccagtggagacattctgaaagttctgagcaaattttgaaggtagaatcaataggatatggtcatagatagggtgggagtataaaaaaggagtaaaasacaatttcaagttccctgtccacctgctctcccaagaactagaagcacggtattaatgagatagggtagaccactgggagatcaagtttagggatgaaga

SEQ ID NO: 5722 - DNA, 201 bp, Homo sapiens
gaataagtgggaaaaagccctgaacggaggtatgggtgagagagaggcggtggctgagggaggaaagctgtcttttcactggtgccttcttgttagagctkaggaaggggctgccccaaaggcttggagcctcttagtctttccaaaccacagatcccacctgtagctcctgttctttgtggcctggaaggccccagggct

SEQ ID NO: 5723 - DNA, 201 bp, Homo sapiens
ttttcccctttaaaatttttttctattttttaaactgtagtaaagttacacagaagataaaatttactctcaaccatttttaagtatacagtgcagtgatrctaagtatattcatattgttgtgcaatcagcaccaccatttgtctctataactctttgcatcttacaaaactgaaattctatacccattaaacaatatct

SEQ ID NO: 5724 - DNA, 201 bp, Homo sapiens
ttgctccatcattggggtaaccagctgttacttatttaaagcctccatcattttgtatgacagagtaacttaattatcccctgctttggagatgctaaatraaattatcttcaaaacaagtgcacttcatttaatatttttctccatcaagtacttgaactgtgacatttacgtcataagcactaagtaactaaatgcttt

SEQ ID NO: 5725 - DNA, 201 bp, Homo sapiens
tatgaactcacaccaactcaaaagattatagagaatgtctgttatccaaacagttttctttcctttttttttttttattatactttaagttttacggtacrtgtgcacaacatgcaggttagttacatatgtatacatgtgccatgttggtgtgctgcacccattaactcatcatttacattaggtatatctcctaatgct

SEQ ID NO: 5726 - DNA, 201 bp, Homo sapiens
tcaacttggcttattataatctttatatatgcttttctcttttgagaatacaatttaaaatcaaacctgataatatctgtatttaaatagggaatttagtrtttataatgaaaattaatgatttatgtttgctaatgttttctgttttctttttactatgttctcatgtttctttttttgtcttctctgaaattattttaa

SEQ ID NO: 5727 - DNA, 201 bp, Homo sapiens
ggaacacagaaagggttctgagtctttgaggctgagttggaagtggttagttgtcttatgctttccaccctttcagatagagttccctttacatcttcctmaactctccttatcatagggctgtccttagtaaaggggccaatcttagcaaatatccaggctccccagagatagcccagggataaggggtgagtggagcct

SEQ ID NO: 5728 - DNA, 201 bp, Homo sapiens
ggcttcagtaagagaagactcagtcagactgctaatgacctaaggactattcaggacctaagaaggttgtccagttgatctgggtgggggcaaaataggtyatctgaacccaggacatcaatgaagttaatgaaactagtagcataaggcactatgctcatcaaaaagagggatatttcagatgatgtctgagttcactgt

SEQ ID NO: 5729 - DNA, 201 bp, Homo sapiens
ggtgagagatgtataaagaattgagtgattttcaataaaattcagagtattctagttggttcagtggaatattgtgtctgagctgcatcactttgggagcwgactggtgattagaggagtaatctgctgtccttattctcaacagaacacagggcttcagtaagagaagactcagtcagactgctaatgacctaaggacta

SEQ ID NO: 5730 - DNA, 201 bp, Homo sapiens
aactacaagacccaatgatctgttgcccacaagaaacacacttcaccataaagatgcatagactgaaaataaaggaatggtaaaatacattccatgcaaaytggaaccaaaaaggaacaagggtagctatacgtttatcagacaaaatagatttcaagacaaaaactataaaaagatggcaagccacacagtaaaagaagt

SEQ ID NO: 5731 - DNA, 201 bp, Homo sapiens
ggaaagagggaccaggaaaggctgccaggggaggtgacattccatctggatcttgttagtgcaaccgaagtaagaaaatgctattttaaactattgccackttctaaggagggtggaaagaatttggatatgcctaggactgtagttggtatttgaatagacatggctatagccaagtcactatagatcagggtttcccaa

SEQ ID NO: 5732 - DNA, 201 bp, Homo sapiens
tttgtgaagcgcctgacttctgagggagtcagattgatgcatttggtctgagaaactaacatttttagaagggaagcaattctagttaaaatttcgagtaygtaaatactcacattttttcagaaaataatttaaaacagaaaaatgctcacactacagagagaaaaaatgaattcaggagtctaggaaatcctttctgca

SEQ ID NO: 5733 - DNA, 201 bp, Homo sapiens
ttttgaaggtagaatcaataggatatggtcatagatagggtgggagtataaaaaaggagtaaaagacaatttcaagttccctgtccacctgctctcccaaraactagaagcacggtattaatgagatagggtagaccactgggagatcaagtttagggatgaagattgggaatcagaggcttgttaagtttcagatgctgt

SEQ ID NO: 5734 - DNA, 201 bp, Homo sapiens
caccactgagcctggcccaaaacaccattgttcagttactcaggtcatttcctttcttcttcacccacttcagtctagttatataatttatttgtaatacrgttagattgattcgtcacagtctgcattccaccttgggttgccatcacattctggttgatttttttccctctgggtcatgtcataaatgaaaatagatag

SEQ ID NO: 5735 - DNA, 201 bp, Homo sapiens
agtaaccgagagagtagtaagaggctaggatcgtgaacttttcagagacagacatgagctcatatcctagctcttctactaatgttgtaagatcttggatragttatttatattttataagcctttatggcctcatctttggatggaaaaaataataatacctagctcatagctttattgtgagcatttaatgagataatt

SEQ ID NO: 5736 - DNA, 201 bp, Homo sapiens
cccctgctgtgcttgctttccctttgccttctgctatgattataagtttcctgaggcctcccagccatccttcctgtacagcctgcagaactgtgaatcarttaaacgactttttttcataaattactcagtcttagatagttctttagagcagtgtgagagtggactaatataggtacagaggagataaccacggagatg

SEQ ID NO: 5737 - DNA, 201 bp, Homo sapiens
agaccctgattccaaatccaggcctcagatttgctgtatcccagagaaggctgattgtagcttgccatagataatgaagactggtctgtggtgcataatgkattatagtttgtccctatttattatttttttccttaagactgccgaattcaaaataaatgacatgttttaaatggctactctttattttgaaaaatgtta

SEQ ID NO: 5738 - DNA, 201 bp, Homo sapiens
gctttcattagcttctgtcaatttgttgtctgtatcacctactagatcctaagcttcttgaactatgtctgttttattgtgtctctagcactgagcagaayggcatgtgacagatactcagtaaatatttgagaaatgaatgaatgaaagaccggatgacttggaaagcttggaaaaggagaagaaataattaaaaggaac

SEQ ID NO: 5739 - DNA, 201 bp, Homo sapiens
gtttagtagagacggggtttcactgcgttagccaggatggtctcgatctcctcgtgattcgcctgcctcggcatcccaaagtgctgggattttgtttgctyttttagagacagggttgtggttttttttgagacagactctcactgtgttgcccaggctggtgtgcaatggcgtgacctcagctcactgcaacctctgcct

SEQ ID NO: 5740 - DNA, 201 bp, Homo sapiens
attttttagcaatgatgtgttaaacataaaaatctttttgcctattatattttcatcatgttaaatttctgttattcatgtgtttaatacatttttaaaawttgtttatgaagtttgcagaaatgttagctgttttaaaggtctttgtgaaagttgcagacttatgttcagagctcaggaggaagctaggtgaaattttga

SEQ ID NO: 5741 - DNA, 201 bp, Homo sapiens
cacaaaatagtttcttttgaatgggttaaatattttttttcctgaaaatgttttcatcatatgaatttactgagtaaacttcctttttgaatggatgataraaacataaaccctgactcagcccaaatcttctctaattccaaattagtaaagtctaaatcattgatctaaaaaaaagacaggtagtcatatttttatgat

SEQ ID NO: 5742 - DNA, 201 bp, Homo sapiens
tgggtgggggtgccagtaagttggaagtgctgattggtcaggtcagagatgaaatcgtaaggagtcgaagctgtcttcttgcactgagtcagttccttggyggagatcacaagatcagatgaaccagcttatccatcttgggtggtgccagctgatctatcaagtacagggtctggaaaatgtctgaagcactggtcttag

SEQ ID NO: 5743 - DNA, 201 bp, Homo sapiens
atttccccagtccatgcactagcttgtgcactcatattaccataaccaactgcatgctagtaaaataagtcaattagtataagctgggtatggtggcttaygcttgtaatcccaggactttgggaggctgaggtgagaggatcacttgaagccaggagtttgagaccaggctggatgacaaagtgagaccccatctctaca

SEQ ID NO: 5744 - DNA, 201 bp, Homo sapiens
aacatggcatgagcatccctcattttaagatattaaagaattaaatttttgtttttatatagaaattctgaattaagtcagaaggtcaatatttgcaatayacacaaattattaaactaatttctcacaggtttcctaagtaccagcttctcagtcagtgaatataaaatgtgatttgatttattaaaattaaaatgatat

SEQ ID NO: 5745 - DNA, 201 bp, Homo sapiens
ctttctgtactttggccggaacatgtttactttcagctttgcttggtttggtggtggggttcagacttcttgggaaacattgattagctctctgaggcttyctgtggctgcccaactttcattcattggaccattcttttgtaaattcaatattgttgaatctagtgcctctatgtctactgaacctcatgctaaaggtgt

SEQ ID NO: 5746 - DNA, 201 bp, Homo sapiens
gtatgtaacatgagatgtgagtcatgactgcaagatgtcctaaggtctaaagcttctgctattgagtcatgactccaggccctgatgaacttgcttattcmccattcatttaacacataattggtacccaaatgaagttccaagaacttgttaggtgctgggaatttacagatctggtaaaagcctttgaagggatttgat

SEQ ID NO: 5747 - DNA, 201 bp, Homo sapiens
atctattgttgaaagtggggtattgaagtcccctatgatcattgtattgctatctatttccccgtgtccattatttgctttatgtatttaggtgctctggygtggggtgcatatatatttacaatagccatgtcctcttgatgaattgatcccttaaacttctttagtggaaaagttgctttctaattggtggattggatt

SEQ ID NO: 5748 - DNA, 201 bp, Homo sapiens
tactttacacttaaatgtaaatgtaactttgatttctttacatttaaatgtggctaatgactatcatattggacagcagaagtctagggtgatagacctawagaacaacaatttttaaagccattttggatcggattttctatcatttgcagctgcaagcatcctaactaatacaatgtattaaatataagtggaaatgat

SEQ ID NO: 5749 - DNA, 201 bp, Homo sapiens
ctcacagctccactaggcagtgccccagtggggactctgtgtggaggctctcatcccacattttccttccatactgccttagcagaggttctctaggaggrctccatccctgcagcacacctctgcctggacatcagacatttccaaacatcctctgaaatctaggcagaggttaccaaatcacaattcttgacttttatg

SEQ ID NO: 5750 - DNA, 201 bp, Homo sapiens
agggtagaccactgggagatcaagtttagggatgaagattgggaatcagaggcttgttaagtttcagatgctgtcaggcaccgaagggagtgacccaaaaracaaatgcctttcctaagaaaagcccggaatttgtcagtatataagtgatttttaaaagaggactagctatataatttgtggaacccagtaagaaatgaa

SEQ ID NO: 5751 - DNA, 201 bp, Homo sapiens
gccaccttcttcaggctttcaggggtgcctttaattctaatatttgtgaatttggagaatgaacagtcttatttccataacccgcatgtcttttgttatawtttatacatctttaaatcaatatgaaccttcttgtttctagacagtttgagttcaaaaactgatagaataaagaaatcagttttcatttaaattatttct

SEQ ID NO: 5752 - DNA, 201 bp, Homo sapiens
accgaaaatgtttccagagccagttcactacctatattgttattattgtttttaatcttaagaattgaacaagaatcaaatatgctcagagtactgtggacaacatctatcttctttactacattttaagagcatcataatttaggcatgatactgttgcagattaatgtaatgagctattttaaaactttagcgatttat

SEQ ID NO: 5753 - DNA, 201 bp, Homo sapiens
atcaagtttagggatgaagattgggaatcagaggcttgttaagtttcagatgctgtcaggcaccgaagggagtgacccaaaagacaaatgcctttcctaaraaaagcccggaatttgtcagtatataagtgatttttaaaagaggactagctatataatttgtggaacccagtaagaaatgaaaatgcaggagtctttctt

SEQ ID NO: 5754 - DNA, 201 bp, Homo sapiens
tcaagatgagcggctgttctacagagtacaaacttgctcacaaaatctcttttacaaagcatgacattcagatctttcttttgaagcattacaaagcttgrtatttgaaagcgtcatcttcttataaaaattatcttttagtacttggaaacaattccacaatttttcttgttccatactgggtgctttttatagtatcag

SEQ ID NO: 5755 - DNA, 201 bp, Homo sapiens
ctttgctcttctgtctcctctcctcaagtagaaggaaggagtccttttattgctgcaagctttcctgcctgtggttgtgggaggagttgcacaagcactcycctagctggcccatctggtgtctttctaggccatgtgccaccccaatccactggctctaagtccagcacagcatcaggacttccctaagaattgcagtcc

SEQ ID NO: 5756 - DNA, 201 bp, Homo sapiens
tatgttggtttagctggcatccaaggtgcaagacaaagtctctttgctcttctgtctcctctcctcaagtagaaggaaggagtccttttattgctgcaagstttcctgcctgtggttgtgggaggagttgcacaagcactcccctagctggcccatctggtgtctttctaggccatgtgccaccccaatccactggctcta

SEQ ID NO: 5757 - DNA, 201 bp, Homo sapiens
tcactactctgcccactgatctaccctatgttggtttagctggcatccaaggtgcaagacaaagtctctttgctcttctgtctcctctcctcaagtagaargaaggagtccttttattgctgcaagctttcctgcctgtggttgtgggaggagttgcacaagcactcccctagctggcccatctggtgtctttctaggcca

SEQ ID NO: 5758 - DNA, 201 bp, Homo sapiens
aaactctaattcaatgcgtttgccattatttatttctcaaacatgaattgaacacctgctatcaaccactatgctacatattggagatgcaaggattggamttacatgtcagattagttatatctttttgctttaaatccagcacatttttctattcatgtactgtttgtttttcccattctcttcctcatgtagcatatt

SEQ ID NO: 5759 - DNA, 201 bp, Homo sapiens
aacaatacaaatatgcccactttcaccactcctattcaatatagtactggaggtcctagccacagcaattaggcaagaagaaagaaaagacattcaaactrgaaaaaaaaggatgccaaattatccctattcactgatgatataatcttacatctagaaaaccctgaagactctaccaaaaaactagatttgataaatgaa

SEQ ID NO: 5760 - DNA, 201 bp, Homo sapiens
taatcactataaaactctaattcaatgcgtttgccattatttatttctcaaacatgaattgaacacctgctatcaaccactatgctacatattggagatgyaaggattggacttacatgtcagattagttatatctttttgctttaaatccagcacatttttctattcatgtactgtttgtttttcccattctcttcctca

SEQ ID NO: 5761 - DNA, 201 bp, Homo sapiens
aatagtgaaagaaacattattactattggaatttgcattcttgcccatgtgatgcatttgctttaaattggtgtaagctcttcacatgcagagggcccatrtgccttgatgtaacattagatcaagtggcagaagctaaatttggaattaaggcaatatttgattgtagagaacatcattctcgtttctagctcttggact

SEQ ID NO: 5762 - DNA, 201 bp, Homo sapiens
gtccaattagactctcccattcaaaaggagagaacagcgcacttctgatcctgaaatttgaatttaactgggcatcgtgtatatttatttattaaatctcrcaacccacatttatttatcctaaagagagataagatgatgagctcagtgtaggactgaattttataatgcctagaattgagacaagccccagtgggtcct

SEQ ID NO: 5763 - DNA, 201 bp, Homo sapiens
gagagagagaatgtgttctcacatagagaccagttctggaattaagcaaataaaatagttggatttcatagtacaacatgccagttggaaaacagtttagrgattcaactctgaaaaaattaagagagtctttgttgttctccttttccagatatatctatacctgagaatatacgacataacttatatagcaaaccttct

SEQ ID NO: 5764 - DNA, 201 bp, Homo sapiens
ttttcttaatcctgagttatacactttgaatctgctttggggcattctctttgcccctatgaaggtaatgcacactacacaatggaaaaaaaaatgctctraggtattaatcccaatataatggaagacaagttgaagacactggacttggcaacgtgtaaatatgggaaagaattctgagactttctttagtgcagaatt

SEQ ID NO: 5765 - DNA, 201 bp, Homo sapiens
acatccatcctactaatcttcatcagaccaacatgctcctcactactgattggtatttgccatcttcttatttgtctcacgtgggatgtttgttgaaaatrgagattcctgagcgtgccttcagttttagtaccaggtgtttccactaaatgctggagtggtacttctccaattatcagtgtgttcaagaatcctatgggg

SEQ ID NO: 5766 - DNA, 201 bp, Homo sapiens
taaatctgcatccattcctcaagctagtcattgaacagattattaatcagtgcttactgtatactaggcattgttaggagctgaatgagcaaaccacaatycctgtcctcaggaggatgcagtttagtaacacatatacttaacaagcaactacaaaatgtaaagtatttccatgcagaaacaggatattgtcagaggagg

SEQ ID NO: 5767 - DNA, 201 bp, Homo sapiens
cccacatttatttatcctaaagagagataagatgatgagctcagtgtaggactgaattttataatgcctagaattgagacaagccccagtgggtcctccaraattgtttctgggaataatgatatttatttgctaataatgaatataatatccatgagaggagggctcttctttttggagggtgctttaactagaggatct

SEQ ID NO: 5768 - DNA, 201 bp, Homo sapiens
agcagctgatagaatactcacatttttcccatggccattgccattcctcagattcctgtcatcatctttcatctggaattccgcaacagcctcagcgtgaytgacttctctctagtcttggactcctgcagtcttctttctacgctacagtccagagattctaaaacgtgactcatcatctttatcctggctatatcccta

SEQ ID NO: 5769 - DNA, 201 bp, Homo sapiens
aaagggcagacatggttcacaggggtgagctgtccccgagatatgccactgcatgacaaatgccttcttttttgttctaaagtaactctgggataaagccrttgcttggtaattgtgatgattttagtcatggaagcagagtttatagtgaaataatcacacacacgtataaaaactgaatggcttcgttcagtctgaacc

SEQ ID NO: 5770 - DNA, 201 bp, Homo sapiens
gcgtgtgtgtgtgtgtgtgccagtgtgtgtgtgttttgataaattacccagtctgtggtattctattatagcaacacaaaacaaactgagataataatatmcaaaaatataatatacaaaggtataaaaatgtaatttaggccagaagctgaagttggaggtgtagattacttcttcaatcataattaatgaatactctat

SEQ ID NO: 5771 - DNA, 201 bp, Homo sapiens
taaaatattgctgtattatttagggaagaacttagaagagtcttctttctgccaaaagaaatgtgcagctatagattaaaagcatgccgcaactttgtgaycatgttgggaatacctcattcatatccttcccagagggaactcagtattgctacaggtgcatgtcatctggacttgcagacaattttacctttctttcta

SEQ ID NO: 5772 - DNA, 201 bp, Homo sapiens
ttgaaatctttgacaagaatgaagcagagtatgccaagagatattggactagcacaggtcagttctctcagggaactagattagatagatctcttaatgawtactacgatcacatcacatcatcttttatttggaagccatatcaactcttaaatcatattgagttcattttttttttttttttgctaaaacctatgtgtc

SEQ ID NO: 5773 - DNA, 201 bp, Homo sapiens
aatgtttcatattttcatgtgatttaatggaattgagcccaattatttaatatcaattactaaattgttttgtatttaaagtaaaattatttttatgaccrtaatatgactaagtagaaagagatatgttataacatgatttgtttataagacttttttttctattctccacactctaataacatagtctgtcaagaaatc

SEQ ID NO: 5774 - DNA, 201 bp, Homo sapiens
tagcccacagcagatacctctcagtatatcagattttgctagttgaacattacctaacttttctgtggcacattctactcatcattacttcttgtttgtcrttcaaaatgtttttcctcttatggaaatacataagccacaagctggaagactgatgtgaccccagaaaagttattgtgtaaagtaatctcttattagaaa

SEQ ID NO: 5775 - DNA, 201 bp, Homo sapiens
attagaatgagtatgttctgacttaattataatagacaaaaaaaaaagagaaaaagaaccattattagtggatgacaatcagagctctatggaaaataagragagtggtaacaggtaagaagattgaaaaacaaacaagaatgcaggggttttaggttggatgtattgggtgcaagctgtctactgtccaagatcatcttt

SEQ ID NO: 5776 - DNA, 201 bp, Homo sapiens
cagtgaagattatggaattcaaatttagaattatatagagtctgataaacaggcagtaagaattggttctttttctggtatagagagacaacagcaaagtyttaggttgatttgtttaaagtcatttgtccatgtaggtacaagtggaaatgtcactgattataatttgctggggtatcatttgatgagactaggattgct

SEQ ID NO: 5777 - DNA, 201 bp, Homo sapiens
ggtagaagctactgtattagacagtgtacctataaaatttttccatcattgctgaaggttatattgctataactctgctatggaattttttttttaattgraaaagctgatattgctttctttttattgatggttgccttcggattcatgcttagaaaggtcttttccattccccaacatgatataaatgtgactttttat

SEQ ID NO: 5778 - DNA, 201 bp, Homo sapiens
tatctcatcttccttctgttcaagttgccccattttggactttctcccaggcactattcccttgacattctcatcattcacatatctcctgctagaaaagytgcattcgtgctttcctcactgctttcttaatctctgcccttttacgtgttcaaaaatgtgaactaaaacaatccaaaactgggatcagaaagcaatcca

SEQ ID NO: 5779 - DNA, 201 bp, Homo sapiens
tcattttgccatttcctttcaaaattgatgcagtgtgatttgaatttccctaagtatggtagaaagacatggatcatcttttatatatgtttatatcctarcccagtgtttcagggattctggcatttatatttgtgattaactctaaagcatctttctacggggcttcttcttatttttttgtattttattttttttagt

SEQ ID NO: 5780 - DNA, 201 bp, Homo sapiens
ctgaagaaaaaaaggatatttcaagcctaaacaggggcaaaacacattaatatagttatctccatgaacacatgaggaaagtcagagattaactcattttkccatttcctttcaaaattgatgcagtgtgatttgaatttccctaagtatggtagaaagacatggatcatcttttatatatgtttatatcctagcccagtg

SEQ ID NO: 5781 - DNA, 201 bp, Homo sapiens
ggatgcatcgtccttcacatggagtaatatcagatttcttgttggtatcccaattgcaagtcaatgagagaaacaaaaacagatggaccacaactccagcrtctgcggacttgctggggctatttaagtcactaaatgctcatctccataggcactgggatacttattttcctcatctctgtgtttcctgtacccagcact

SEQ ID NO: 5782 - DNA, 201 bp, Homo sapiens
ctataaatgcagacctgacaatgtatatcccctggtagtgagaggtgacaacatgctagcagccctcgctcactctcggttccttgttggcctcggcgtcygctctggccgcgctcgaggagcccttcagcccaccgctgagctgtgggggcccctctctggggctggccgaggccagagccggctccctctgctcgcggg

SEQ ID NO: 5783 - DNA, 201 bp, Homo sapiens
tcactgtttgttcacaccagtgaaaaaattactcacttcatagagcttaccttttatagtagctgcttttcatagtaagtggtctcccgtcatctgtaatwttcagttttgtcctattagcattctgctaaaattactgtgtctaataagaaaagcaaattaaaggtaagagatcaatgattggtgctgtctctttcacga

SEQ ID NO: 5784 - DNA, 201 bp, Homo sapiens
tcactttgggagctgactggtgattagaggagtaatctgctgtccttattctcaacagaacacagggcttcagtaagagaagactcagtcagactgctaaygacctaaggactattcaggacctaagaaggttgtccagttgatctgggtgggggcaaaataggttatctgaacccaggacatcaatgaagttaatgaaac

SEQ ID NO: 5785 - DNA, 201 bp, Homo sapiens
cttcatgtctcaggtcctcaacaagtcagctgcctataaatgcagacctgacaatgtatatcccctggtagtgagaggtgacaacatgctagcagccctcrctcactctcggttccttgttggcctcggcgtccgctctggccgcgctcgaggagcccttcagcccaccgctgagctgtgggggcccctctctggggctgg

SEQ ID NO: 5786 - DNA, 201 bp, Homo sapiens
tctctaaaaattatattctttttaaagagtttataaaacagtactcctagttgacttttctgaaaagattgaaaatttaaaaatgtaagcacactcacccrgaaactttggtttcacgattctttgtgtacttgtctgcaataataacaggatttgacagcagaaaccagctgatgacttacattttctgaaatgcactgg

SEQ ID NO: 5787 - DNA, 201 bp, Homo sapiens
gaaagtaagactccattaggtctcatgtatggttcatggaaagaaaagaaaataaggaaggaagaaaggaagggagatagggaggaaaggagggagggagrctggttctatattggttcttccagactacagctgttccatcccgatctattctgcttttgaccttacaggaacacagtattgtaggttttgaaccagtga

SEQ ID NO: 5788 - DNA, 201 bp, Homo sapiens
ctatttactttcctacattatgggtacacttgctagagtttagtattctgggttgcctgtggacattgtacaaggatgtgtgaaaataaattaaaactacytaaatgataacaaactatttattcagagtttgttatagttccacataccatcacttgcacttttcagagattcagagataggcaggagggtggtaaagcc

SEQ ID NO: 5789 - DNA, 201 bp, Homo sapiens
acacttgctattgtctttattttttattataatagtcctagttggtgcactggttttgatttagatttccctgatagctaataatgttaggtatattttcrtgcactattgacaatttgtatatcttctttgggacatgtctattcaatttattggctcatttgtaattggattattggtcttttaactgttgaattttaa

SEQ ID NO: 5790 - DNA, 201 bp, Homo sapiens
tggaattgctaggtcatatcaaaaccctatgtttagctttctaaggaattgtcaaattttccaaagctacagtaccattttacattgccacagcaatgcaragaattccaaatgtcttcatccacatctttatcaacacttgctattgtctttattttttattataatagtcctagttggtgcactggttttgatttagat

SEQ ID NO: 5791 - DNA, 201 bp, Homo sapiens
ttgtggcttctctaaatccatgtgcttctttaagtctatactatgtggacagttaaatttagatcttctatttcctagcctaggttttttccactatatayggctgcattgtcatatttgtatgcttgaaattatacactgctttataaattgatattctataatatattaagtatatatttgatatatattagttaccca

SEQ ID NO: 5792 - DNA, 201 bp, Homo sapiens
tggtttcaaaggttattaaagtggctctatatctgggaagttgtgagattagggttaatgtggagtttgcgcgtgcacgtgtgtgtgtgtgtgtgtgtgtrtgtgtgtctgtctgaataggaagggagtgagaaaggggagagtgaggggacgataatatgataaactatggtgaaactaaattgtgaaatattttgtgtg

SEQ ID NO: 5793 - DNA, 201 bp, Homo sapiens
tgcattttaagtaaacccttaagtgattcttaggaatataacctaaaatttaaagcccactttttaaaataaaaataaaatcaaacaaatacataatcatrtactgtaaaagtccatggaagaacactaaaaggactaaggaggattgctaaatgatggttgcgcattgcctgggagttagacagggacaagatcatgcat

SEQ ID NO: 5794 - DNA, 201 bp, Homo sapiens
caggactcagggtaatagctatgccaaaagattgcatttgattactacattgtttcaaaaaaaaactttctcataaaatacgtcatttaaatatcagaacrgggataagcatttcactgttgcagacattgggactcaaatatgttttgtggcttctctaaatccatgtgcttctttaagtctatactatgtggacagtta

SEQ ID NO: 5795 - DNA, 201 bp, Homo sapiens
agatatgagttaatggattcattaacaattgtcacatgagtaggctgagctgatctttacacattcgttctcagtataagaatttaaccagatagttgctrtctttacaaacaaaacttttgatacccctaatgatgaggaccagatgaaaaataataatttaaaacttgttactcagcaggcactgtgtattcatatact

SEQ ID NO: 5796 - DNA, 201 bp, Homo sapiens
agttgtttgaatctaccaacagttactgtgcaaacaattttatcagcatgcacgtatgcctagtgagattggatattttcgttagccaccttgccaacaartttttctcattacccaaacacacacacatttatgcatatttaaatatgtgcttaagaagcagaaagatatgagttaatggattcattaacaattgtcaca

SEQ ID NO: 5797 - DNA, 201 bp, Homo sapiens
cctgtggaatccagttagaagaccactgaattcagtcccttcagttttgaagtatttggctttgagcttctactctgaagtagttgtttgaatctaccaasagttactgtgcaaacaattttatcagcatgcacgtatgcctagtgagattggatattttcgttagccaccttgccaacaagtttttctcattacccaaac

SEQ ID NO: 5798 - DNA, 201 bp, Homo sapiens
ttccttagttgtcctccaataatttaagactacaaaggcttctgagagtccatggtaatcttttaggttttgtggtctagttgcttatatgatgtgagccrtgagttaacattttctttcacagcctgacttagatgttttaaatggcaaattcaggagagaacaatgtatgagtctttaattttattttgtttgttagta

SEQ ID NO: 5799 - DNA, 201 bp, Homo sapiens
aatttttagtttccagatgatcagactcctcagcttgaaatccaagggcattatagacttcaagcaaattgcatgtgcattaagactgttgaacttgggayaagtaatcctataaaagcgaaatcattgctgaagcatttttgtaatcatgtattcctcctgcatgttcatttgaaaatgttctcttttggtgtggaggca

SEQ ID NO: 5800 - DNA, 201 bp, Homo sapiens
caaaatgacgcacgtcatttcgcatgaagggtgatgtgctagctggcaattgtttgcttcctgcagggttttgatggaagtgttttgtgatagtagcttgrtatatattcctgacttttagtttgaaaagctcagtgcatctgtgttgtcattttttttttttaaacgaagagctttagtgtctttaattttgaaacaccc

SEQ ID NO: 5801 - DNA, 201 bp, Homo sapiens
ggtgtaagctcttcacatgcagagggcccatatgccttgatgtaacattagatcaagtggcagaagctaaatttggaattaaggcaatatttgattgtagrgaacatcattctcgtttctagctcttggactttatgtggaagcactttaagtcctaagaggctaattttagttcaatctatttagttaacaatatttcag

SEQ ID NO: 5802 - DNA, 201 bp, Homo sapiens
ataactaaattctatcacttatgaaaataggagacattttagaaaagtagtttgtgttggttacttaagtcaagttaggttcaaattattgtgccttaagwgcttctatagcaattttgctggaaatatgtaaagtggtgcatgaaagttttctcatggtatatctaaatcctctgtttaactgacaagttcttttgatgt

SEQ ID NO: 5803 - DNA, 201 bp, Homo sapiens
catgtcctacttcggtcctgtgcgctggccgtgatcatgtcctttcaggatataactcccttcaccctgttctcctctgtacctcttctgatgcagggctyctaaggaaacactgctccttttccttgactgtttatccctaagggtagtattatattctcaccattgctatcctttgggtgccctgccatcttgtttgct

SEQ ID NO: 5804 - DNA, 201 bp, Homo sapiens
gacttttataactaaattctatcacttatgaaaataggagacattttagaaaagtagtttgtgttggttacttaagtcaagttaggttcaaattattgtgycttaagtgcttctatagcaattttgctggaaatatgtaaagtggtgcatgaaagttttctcatggtatatctaaatcctctgtttaactgacaagttctt

SEQ ID NO: 5805 - DNA, 201 bp, Homo sapiens
tagtatgttatttgctttatctcctactgttaggcttaccaacagtgattcttttttttttcttccctcagatgtacatccagacaacaacacttactgtytccatgagtttaagtgcttcagtatctctgggcatgctctatatgcccaaggtttatattataatttttcatccagaacagaatgttcaaaaacgcaaga

SEQ ID NO: 5806 - DNA, 201 bp, Homo sapiens
gtgaaaactatttcctccaactctaagctgtaactttcaaattctcctaatttgagatctaggaagttttaatagaccaggaaatgatttgtccagttgckgttctcgcctaccaaccaggagtgtgttgacaagaacaaagagaaactttaaagctctcttgcccttcctggggccaggctgtggggagtgctgatgaat

SEQ ID NO: 5807 - DNA, 201 bp, Homo sapiens
aggaataatcttgtgaaaatccagtgtgcaagaagaaattcaataagcatgacttagggagaatatgtttacaagcagaggttgtaccgtggaacagaatrgaaaagaatgaagcttcacagctgtgatttatcatcacaaaagaaaaagacaaactattcacattttatgcctagtgttaatattagggggaaaaaaacc

SEQ ID NO: 5808 - DNA, 201 bp, Homo sapiens
ggcccttccagctactaactgaggaactgctactgtcttcgatttttgtgtttgtttgtttgtaatgatacattcctccaactccctagctaagcttttgkctaatgatatctaagaaaggaaaaacaacatgtcaggcgctgctgtctagctcaaagcacaatgttatggctcatgctgggcctggctgcctaggatctg

SEQ ID NO: 5809 - DNA, 201 bp, Homo sapiens
tttagggaggctgttttatcatgtggtggtctgggaaggtctgggaaggtggtgtgtgtggggtggggggtggagggacacattagactgggactgccaaraaaagagcaaggaaaaccaataacaaggcagaggcctcaggtaaatgggaaaaagtatgtcctgttcaaggaacagaaaggagtgtcaaaagacaaaatt

SEQ ID NO: 5810 - DNA, 201 bp, Homo sapiens
agtggttgtgaactttgtatgaacttggtctctggtaagaacttgtctaatccatcaatagtgtcactaagatggaatgagtctgattgtcagttatttcygaggaggaactttacaatttctagtcttattcaatgttcaataaataaattattttctaaaaatctgtttcatcctgaattggattcatatattgaaaca

SEQ ID NO: 5811 - DNA, 201 bp, Homo sapiens
aggaggtgtccagatcattagttaaatgaaagaatgaatcagccacttttaaaatatgaatatgtagtataagattcagaaaatgaatttataatctggayaggaatctaggctccatcataaacttcttatttgtaagttatttgtccttttgttccctcagtttttcagtctgcaaaaatgggactcacagtcttactg

SEQ ID NO: 5812 - DNA, 201 bp, Homo sapiens
attaaaagtattttagtttatgatcaaccacaaagttgtctcttttactgaacactttgcttttaatttaacagttctagtatttactatgtgtacaagtrtctataattcttagagatggatttaatttcatattctcaagttgttttcagaagacagtctttaccatataacgcaaaatgtacaaaatagtttacaaac

SEQ ID NO: 5813 - DNA, 201 bp, Homo sapiens
aaagaaggtgagtgttattttccatactttaaaaacactgtaccaaacagcttaaagtgctagtgtccctttaactttaaaatagaggcttcatttatttygatgactgctatttagggtaccctaaacaacatcttagtagcggaaagaattaatactcctaatattccttttggtggtgggaagtggcctctgggtaag

SEQ ID NO: 5814 - DNA, 201 bp, Homo sapiens
ataagcagtttaatagaatttaaatatatgacatccaattactgacagaatacaaagcatcataaagtatgctttgcagacatattttataaattggaaamccttaaggattcatagcatttgtgtaaaaagtgtggtcatttacacattttaatacattgattctattgtggaaggtcctgcaacatggactgttaaaca

SEQ ID NO: 5815 - DNA, 201 bp, Homo sapiens
gacatgtggatagtgtgactgaggagttgaattttttattctatttaattttaattagtatacattttaaaaccacatctgacgagtgccagctcaaaccrtaggatacatggagaggtgtttagtgtgataagatccaaacagattggcaaactttgaagaactttactgctaggccaacaagtttagattccaaaatag

SEQ ID NO: 5816 - DNA, 201 bp, Homo sapiens
ttgacatgtggatagtgtgactgaggagttgaattttttattctatttaattttaattagtatacattttaaaaccacatctgacgagtgccagctcaaaycgtaggatacatggagaggtgtttagtgtgataagatccaaacagattggcaaactttgaagaactttactgctaggccaacaagtttagattccaaaat

SEQ ID NO: 5817 - DNA, 201 bp, Homo sapiens
tagaacttatgtccatgaaggcaatgttgtatgaacgttctgtccaatatggtagccactagtggctgttgaacacttgacatgtggatagtgtgactgasgagttgaattttttattctatttaattttaattagtatacattttaaaaccacatctgacgagtgccagctcaaaccgtaggatacatggagaggtgttt

SEQ ID NO: 5818 - DNA, 201 bp, Homo sapiens
tccagtgtgcaagaagaaattcaataagcatgacttagggagaatatgtttacaagcagaggttgtaccgtggaacagaatagaaaagaatgaagcttcayagctgtgatttatcatcacaaaagaaaaagacaaactattcacattttatgcctagtgttaatattagggggaaaaaaacccaaaagcaaagtacaaggt

SEQ ID NO: 5819 - DNA, 201 bp, Homo sapiens
cagtttaaaagattttattgaatagtcacagaccattgcactggggacaaagagagcacataaatataggcaagagaaacttttaaaaagtaaagtattcycattgctaacagagctcttgaagaatatgattcaaaatgaaatataagctgatgttaactatgcaggcttttgtcagtgaccaaagtagtagtgtataaa

SEQ ID NO: 5820 - DNA, 201 bp, Homo sapiens
aaagacaaactattcacattttatgcctagtgttaatattagggggaaaaaaacccaaaagcaaagtacaaggtaatacattttcattaattgagcagatrcgattgaataattttagttttggacctatgagagctctctgtggaatattcaagtgaagatatttaggaagcagttggacatatacacacagatgcagac

SEQ ID NO: 5821 - DNA, 201 bp, Homo sapiens
acattttatgcctagtgttaatattagggggaaaaaaacccaaaagcaaagtacaaggtaatacattttcattaattgagcagatgcgattgaataatttyagttttggacctatgagagctctctgtggaatattcaagtgaagatatttaggaagcagttggacatatacacacagatgcagacacacacgtcacacac

SEQ ID NO: 5822 - DNA, 201 bp, Homo sapiens
ggatgagaggaggaggaaaacacagaggtggcatcaagcctgggaaagtgagtagggttggaaaatgtggtttcaaaggtatacatatgtattgttttctkatgtggtaagttcatgtggacatctataagcaatttccttgtcatctcagttgaactgttatcatctctaacacacaattgtcaaaattcacttctgaac

SEQ ID NO: 5823 - DNA, 201 bp, Homo sapiens
tcatggaaacgtatctgtgtgtctggaaaggtggttataactagttccaagcagcatgatttagatggtttttatcttttcttaatactgccattgttgcyagcccagatagagtaattcaggcttggtagtggtaatgtttgtctgagagcaagcacacttacgctggtgaatgaagaggtaaaaatgatgagcttaccc

SEQ ID NO: 5824 - DNA, 201 bp, Homo sapiens
atgctctgagcaacagtcttaccttgtactgcttggggaacagaaaaagttggcttttctagcaggagtcctcagctttccagctgtcaatatctgtatcyctgtccttacagcctgtgaccctggtctcagatattgttatggcaatacccacttctaggtagaaactgtatattagaatacaggctaaactgctgtaac

SEQ ID NO: 5825 - DNA, 201 bp, Homo sapiens
attggtttggtagcccactcctaactccctcagtttaagggcttcttccttgaggtcatctgaagcaataggctcgaatgggaaatccaggcctgccctamctgaatgtttgaactggctgccattgtgtggcctaggagaatataggagattcttgaaggatgctctgagcaacagtcttaccttgtactgcttggggaa

SEQ ID NO: 5826 - DNA, 201 bp, Homo sapiens
gaccgcatttcaggtagacagagaatagaatgagctaaagtgtagagatgagaaatttgagtagtccagttgtctagactagcactgtccaatagaacttwtgtccatgaaggcaatgttgtatgaacgttctgtccaatatggtagccactagtggctgttgaacacttgacatgtggatagtgtgactgaggagttgaa

SEQ ID NO: 5827 - DNA, 201 bp, Homo sapiens
cccaagtagctgggactacaggtgcccgccaccactcccggctaatattttgtattttttttttttttttttagtagagacggggtttcactgtgttggcyagggtggtctcgatctcctgacctcatgatccacccgcttcggcctcccaaagtactgggattacagccgtgagtcaccgcgcacggcctgaaacacttt

SEQ ID NO: 5828 - DNA, 201 bp, Homo sapiens
atggttggtggaccgcatttcaggtagacagagaatagaatgagctaaagtgtagagatgagaaatttgagtagtccagttgtctagactagcactgtccratagaacttatgtccatgaaggcaatgttgtatgaacgttctgtccaatatggtagccactagtggctgttgaacacttgacatgtggatagtgtgactg

SEQ ID NO: 5829 - DNA, 201 bp, Homo sapiens
gaacttgtctgctaattaaacactttctttctttcttttttttttttttgagacagagtcttgctctgttgcccaggctggagtgcagtggtgcgatctcygctcactgcaggctccgcctcctgggttcacgccattctcctgcctcagcctcccaagtagctgggactacaggtgcccgccaccactcccggctaatat

SEQ ID NO: 5830 - DNA, 201 bp, Homo sapiens
acaagtcatatctgaataggaagagatatggttggtggaccgcatttcaggtagacagagaatagaatgagctaaagtgtagagatgagaaatttgagtastccagttgtctagactagcactgtccaatagaacttatgtccatgaaggcaatgttgtatgaacgttctgtccaatatggtagccactagtggctgttga

SEQ ID NO: 5831 - DNA, 201 bp, Homo sapiens
gaatggaaaaaaaataatagcatgtaggcctgccaggtggttatcttggaccacacggcaagtatttcattatcgggcagttttgacacttaaaaaatagrtacgttctcaatatagtaacgatggccttccatactatcacttgattattgggagtgtagatgcttggaaatttgcttgctcatgtaatcaaaacatcca

SEQ ID NO: 5832 - DNA, 201 bp, Homo sapiens
gtgataagtaaagactttggagacaggtaaatattaagaataaatcttgaagaacaagtcatatctgaataggaagagatatggttggtggaccgcatttyaggtagacagagaatagaatgagctaaagtgtagagatgagaaatttgagtagtccagttgtctagactagcactgtccaatagaacttatgtccatgaa

SEQ ID NO: 5833 - DNA, 201 bp, Homo sapiens
agagtactctctgtttaatgaccagttctcatgagtctgtgctactggtggaagtgtggctgtcacttgaatgtgttagcaaaggaaagaaaggttagcaycggtgagtctcatcttcactctgcctgtttctgacctggaccacaccctgattcttctgggctgagcaatatttaattatacttctccaatcctagctgc

SEQ ID NO: 5834 - DNA, 201 bp, Homo sapiens
agctagagtgataagtaaagactttggagacaggtaaatattaagaataaatcttgaagaacaagtcatatctgaataggaagagatatggttggtggacmgcatttcaggtagacagagaatagaatgagctaaagtgtagagatgagaaatttgagtagtccagttgtctagactagcactgtccaatagaacttatgt

SEQ ID NO: 5835 - DNA, 201 bp, Homo sapiens
ccatactttcagctagagtgataagtaaagactttggagacaggtaaatattaagaataaatcttgaagaacaagtcatatctgaataggaagagatatgrttggtggaccgcatttcaggtagacagagaatagaatgagctaaagtgtagagatgagaaatttgagtagtccagttgtctagactagcactgtccaata

SEQ ID NO: 5836 - DNA, 201 bp, Homo sapiens
agttcataggtgggctgccatactttcagctagagtgataagtaaagactttggagacaggtaaatattaagaataaatcttgaagaacaagtcatatctsaataggaagagatatggttggtggaccgcatttcaggtagacagagaatagaatgagctaaagtgtagagatgagaaatttgagtagtccagttgtctag

SEQ ID NO: 5837 - DNA, 201 bp, Homo sapiens
gagagttcataggtgggctgccatactttcagctagagtgataagtaaagactttggagacaggtaaatattaagaataaatcttgaagaacaagtcatayctgaataggaagagatatggttggtggaccgcatttcaggtagacagagaatagaatgagctaaagtgtagagatgagaaatttgagtagtccagttgtc

SEQ ID NO: 5838 - DNA, 201 bp, Homo sapiens
acaactttgagagttcataggtgggctgccatactttcagctagagtgataagtaaagactttggagacaggtaaatattaagaataaatcttgaagaacragtcatatctgaataggaagagatatggttggtggaccgcatttcaggtagacagagaatagaatgagctaaagtgtagagatgagaaatttgagtagtc

SEQ ID NO: 5839 - DNA, 201 bp, Homo sapiens
atgacagttggcaactatcaatcaactcttcaaagattatatctctgatcaaggaaagcaggcatttgcaccaataatgacagaacaaaacaacatggggragagtagtagtataaacaactttgagagttcataggtgggctgccatactttcagctagagtgataagtaaagactttggagacaggtaaatattaagaa

SEQ ID NO: 5840 - DNA, 201 bp, Homo sapiens
ttgcagtaagtgaaaatctgttcaaagtgctggaagttttatcaactggaccataagacccaagaggaactaagtgtttctgttatgctttctgtgtttamtaattcccagccttgttagtagacactcaaacactgcatcctagctgtggaatcttgggtgggtaacatagtctctgagaaattttgataaatgcttatt

SEQ ID NO: 5841 - DNA, 201 bp, Homo sapiens
gaccattagtaatttgtcagtttcttcagatgtttctgaacctccagtttcatggggtccaggattcccttacacctgccgatctgataaaatctagaatsttgcttttcaaagagagagccaaaggcccagcagctttggcatcacttgggagcttattagtcaggtcccacctgagacatattgagtagaatttgtatt

SEQ ID NO: 5842 - DNA, 201 bp, Homo sapiens
cctgaaaaggttcttattttctgtcttcgtactgtttgtacaaaccaattcaatttgacttgatacaagttatctcctagggaataaaaaattgccccatrttaataatcagaggtgatattagcttgtggcatattgttcagtggagtacctattgtgattgatatcagcttgagtcttgagaagcatttttattgttca

SEQ ID NO: 5843 - DNA, 201 bp, Homo sapiens
ctgggtgcagtggctcatgcctgtaatcccagcactttgggaggccaaaatgggtggataatttgaggtcaggagttcgggaacagcctgaccaacatggkgaaaccctatcccatctctgctaaaagcacaaataaattagccaggcatgatggcgggtgcccataatcccagctatttgggaggctgaggctggagaat

SEQ ID NO: 5844 - DNA, 201 bp, Homo sapiens
ttaaattggtgtaagctcttcacatgcagagggcccatatgccttgatgtaacattagatcaagtggcagaagctaaatttggaattaaggcaatatttgrttgtagagaacatcattctcgtttctagctcttggactttatgtggaagcactttaagtcctaagaggctaattttagttcaatctatttagttaacaat

SEQ ID NO: 5845 - DNA, 201 bp, Homo sapiens
tttatacttatacatatataatttttatttagtcagtcacagcagtagttacaattcatttagcacttatgggacaagatattttatacacagtttttcaytggatgtccaggactattatacaaactgagtattactcttatattaaaggtaaggaaatagcttctaactaagcaaagttgctcaaagtgacacatagag

SEQ ID NO: 5846 - DNA, 201 bp, Homo sapiens
tatgtagtcagtggctgtgcacaggacaggactttgggatgtacagagggatatactatccttacaaatacttccttcagctgtttgctgatgagcaagaytccaggaataggatacaaggcccctaacttgtcttaactctctgattaggtcagatctccctactgtatgcccatagtgcaccatactcattttagcttt

SEQ ID NO: 5847 - DNA, 201 bp, Homo sapiens
tggatgcagaggtatgtagtcagtggctgtgcacaggacaggactttgggatgtacagagggatatactatccttacaaatacttccttcagctgtttgcygatgagcaagattccaggaataggatacaaggcccctaacttgtcttaactctctgattaggtcagatctccctactgtatgcccatagtgcaccatact

SEQ ID NO: 5848 - DNA, 201 bp, Homo sapiens
agtctgctttggatgcagaggtatgtagtcagtggctgtgcacaggacaggactttgggatgtacagagggatatactatccttacaaatacttccttcasctgtttgctgatgagcaagattccaggaataggatacaaggcccctaacttgtcttaactctctgattaggtcagatctccctactgtatgcccatagtg

SEQ ID NO: 5849 - DNA, 201 bp, Homo sapiens
ctcagcaaggccagctgaaagctgagtctgctttggatgcagaggtatgtagtcagtggctgtgcacaggacaggactttgggatgtacagagggatataytatccttacaaatacttccttcagctgtttgctgatgagcaagattccaggaataggatacaaggcccctaacttgtcttaactctctgattaggtcaga

SEQ ID NO: 5850 - DNA, 201 bp, Homo sapiens
ggctcactctcagcaaggccagctgaaagctgagtctgctttggatgcagaggtatgtagtcagtggctgtgcacaggacaggactttgggatgtacagarggatatactatccttacaaatacttccttcagctgtttgctgatgagcaagattccaggaataggatacaaggcccctaacttgtcttaactctctgatt

SEQ ID NO: 5851 - DNA, 201 bp, Homo sapiens
gggctcactctcagcaaggccagctgaaagctgagtctgctttggatgcagaggtatgtagtcagtggctgtgcacaggacaggactttgggatgtacagrgggatatactatccttacaaatacttccttcagctgtttgctgatgagcaagattccaggaataggatacaaggcccctaacttgtcttaactctctgat

SEQ ID NO: 5852 - DNA, 201 bp, Homo sapiens
tcattttccaagatatgctgggctcactctcagcaaggccagctgaaagctgagtctgctttggatgcagaggtatgtagtcagtggctgtgcacaggacrggactttgggatgtacagagggatatactatccttacaaatacttccttcagctgtttgctgatgagcaagattccaggaataggatacaaggcccctaa

SEQ ID NO: 5853 - DNA, 201 bp, Homo sapiens
ttaattgtgtgactggttgcttttatcattctcaatgttgcctggcatttatttatgtgaaaaatgtattgtttggaaaggtcctttgggatctctcagamcaatactatataaatgtagaccattatagttattgatacagtcatgtgtcacttaacgttgggggcatgttctgagaaatgtgttcttaggtgattttgt

SEQ ID NO: 5854 - DNA, 201 bp, Homo sapiens
gcatttatttatgtgaaaaatgtattgtttggaaaggtcctttgggatctctcagaccaatactatataaatgtagaccattatagttattgatacagtcrtgtgtcacttaacgttgggggcatgttctgagaaatgtgttcttaggtgattttgtcactgtgcaaacatcatagaagtatttatacaaacctagatggt

SEQ ID NO: 5855 - DNA, 201 bp, Homo sapiens
tctaagcagactatttctagtttttgttatataccatgtgctttgccttttgttcttttcttccttgtgactctttttaattttagtttttttgaaatagrgtttcattctgtcactcaggctggagtgcagtggcacgatcataactcactgcagcctcaacctcctgggctcaagcaatccttccacctcagcttcctg

SEQ ID NO: 5856 - DNA, 201 bp, Homo sapiens
aaaacaggaagttctttaagaatgataaatcttaaccatatgatgttagtaatatattagaaacaaagttatgtaatttagtgccctaaaaataacatatrtgacaataaaaagaaagactggaaacaaaaacagaaaatttaagaaaaactatttctgaaaacttttataaaaataattttgtttaactatactttctat

SEQ ID NO: 5857 - DNA, 201 bp, Homo sapiens
ttttgagttataggcaacacatccatcatttccattctaaaaagaggaatttctgtgccacaaattggaatctcaaattccaacttactcttttcttcttrcatttatcctattatttgccaaacaaaacaggaagttctttaagaatgataaatcttaaccatatgatgttagtaatatattagaaacaaagttatgtaa

SEQ ID NO: 5858 - DNA, 201 bp, Homo sapiens
attctgcctaccccttagcccaggctatgaagatagtctcttggcctgagcaattaataggaatctcctttcatcatttacgtagtttgcttcttcacatycagctatgagcactctgcaacctaacttagtaccgtgtcatgggatcgactataaattgtaccttactctcccctattcacatgcaccagattaagcttt

SEQ ID NO: 5859 - DNA, 201 bp, Homo sapiens
tggtagtgacgcaagataaatttaaccagacactgttggttattctgcctaccccttagcccaggctatgaagatagtctcttggcctgagcaattaatakgaatctcctttcatcatttacgtagtttgcttcttcacatccagctatgagcactctgcaacctaacttagtaccgtgtcatgggatcgactataaattg

SEQ ID NO: 5860 - DNA, 201 bp, Homo sapiens
caaaaatcagatatgagttctagatgaagccattacattgtccttgagactgctgacccaacatctttgtgagatttttctgaagggaatcagaggagacygcagttgtcatatgctatataaatcccctactaagaacatactttaaacttagtgactgttctttctttttctttttttttttttaatcttgggattttt

SEQ ID NO: 5861 - DNA, 201 bp, Homo sapiens
gtaagcagtaaggttggaggggcaggcaggagtctgatcataccaatgcttataggtcaagtttgggaatttgggtttttctgtaagagaaataggagtamatttaaaaattctgagtagaaggagtgacctgatttaagtgtttaaactatgactcccagtgatccttggaaaagggactgtaggggtcaatgtagatat

SEQ ID NO: 5862 - DNA, 201 bp, Homo sapiens
tgatttatgtttggatcatatttctgtgtgacaagacagggattctagtttatagctgttcttagcattgtctggtagtgacgcaagataaatttaaccakacactgttggttattctgcctaccccttagcccaggctatgaagatagtctcttggcctgagcaattaataggaatctcctttcatcatttacgtagttt

SEQ ID NO: 5863 - DNA, 201 bp, Homo sapiens
atataaagaagatgtagtataagtaggatgggaggtgttaaaaagcacatacaattttgagtgaacaaggcataaatgttaaagatatctgaaagggtttkttttttttttgagatggagtcttgctctgatacccaggctaaagtgcagtggtatactctcggctcactgcaaccttcacttgctgggttcaagcaattc

SEQ ID NO: 5864 - DNA, 201 bp, Homo sapiens
aagttgtggcataaagtgggggcaagaacagagcaagagggaccagcatgtcacagtctttggtcagggaggaaagaagtgaggttgggggagggagaggytcagacaggtgagagacctgggctcttccttggtgacagtagcttggaaaattcccccaagtcttctgggcttggagcaagtcctgggaggcaaattggg

SEQ ID NO: 5865 - DNA, 201 bp, Homo sapiens
gggtttgtgccagagtgtggtgaattcattttccaagatatgctgggctcactctcagcaaggccagctgaaagctgagtctgctttggatgcagaggtaygtagtcagtggctgtgcacaggacaggactttgggatgtacagagggatatactatccttacaaatacttccttcagctgtttgctgatgagcaagattc

SEQ ID NO: 5866 - DNA, 201 bp, Homo sapiens
accatcattcatggataaggaccaagactgagctgctctggttgaagaagctgttggatgatatggggtttgtgccagagtgtggtgaattcattttccawgatatgctgggctcactctcagcaaggccagctgaaagctgagtctgctttggatgcagaggtatgtagtcagtggctgtgcacaggacaggactttggg

SEQ ID NO: 5867 - DNA, 201 bp, Homo sapiens
tgtaaagccagcgtggttctgcaaccatcattcatggataaggaccaagactgagctgctctggttgaagaagctgttggatgatatggggtttgtgccasagtgtggtgaattcattttccaagatatgctgggctcactctcagcaaggccagctgaaagctgagtctgctttggatgcagaggtatgtagtcagtggc

SEQ ID NO: 5868 - DNA, 201 bp, Homo sapiens
ctaaaccatatagcacatcactatgaatacactcagggtgggggcaatggatcctacccagatccctgtaaagccagcgtggttctgcaaccatcattcayggataaggaccaagactgagctgctctggttgaagaagctgttggatgatatggggtttgtgccagagtgtggtgaattcattttccaagatatgctggg

SEQ ID NO: 5869 - DNA, 201 bp, Homo sapiens
gtacttaatggattcatcttaagtataccgtaattcctggcaataatgtggggaagctcagatttacttttcagtgcatgttagtatgtaaaatgaccccyatcttcaatatctctatgttttaacacctgctttgtttttacaatagaggcccttgtttggaacaaagccacttaagctgaacgtcattgtacctgcaca

SEQ ID NO: 5870 - DNA, 201 bp, Homo sapiens
taggagaaaaaattgaaaatgtgtagcagtaggaaagcttttctttgttaaaaaagtgtaatttaatagagtaagaggtgtgaaatatgtcaggaattttrctaacatgaaatttcatcatttgtccagttgtgtacttaatggattcatcttaagtataccgtaattcctggcaataatgtggggaagctcagatttact

SEQ ID NO: 5871 - DNA, 201 bp, Homo sapiens
ggtcattgattgaaagagcattcctgatataatgaatgattggggaagagggggaaggaggatgatgaattttgtgggagatactgagtttaaggatcctrtgagatatagagctgcagatgtctgggaagggttacttggttatgtgagtctgaagctaagaatacaaggtcttgctgagacagagaattggggcctcac

SEQ ID NO: 5872 - DNA, 201 bp, Homo sapiens
agaccagtgggcaagagaaaggatggcagttgtagagactaggagagggggataggaagagagtaaggatagagacctaggcaagggacagatcatataasactttatatgcctcaagaggcagttgaaaaatgttttgaaagtcaatgaatgggcaccagaaggttttaagcagaataatagaatcaccatcttagaaag

SEQ ID NO: 5873 - DNA, 201 bp, Homo sapiens
agagattatcagtagtattattattttaaccagagggtggcacaaagaccagtgggcaagagaaaggatggcagttgtagagactaggagagggggatagkaagagagtaaggatagagacctaggcaagggacagatcatataacactttatatgcctcaagaggcagttgaaaaatgttttgaaagtcaatgaatgggc

SEQ ID NO: 5874 - DNA, 201 bp, Homo sapiens
actctgttgcccaggctggtctctaactcctaggctcaagtgatcctcccacctaagcctccaaaagtgctaggattgcaggtgtgagttaccacacccgrtcaggcattaaggacaaaatcctatgcaaaaatattctcttcctctcatattcatccagcagtctgtatcccctactctccatacttttgacactaaata

SEQ ID NO: 5875 - DNA, 201 bp, Homo sapiens
aaagtttgaaagtccacataaaaatccgtacattaatgttcatagtaccattatttaaaatagtcaaaaactggaaacaacccaaataaacatcagctgaytggtggataaacacaaggtggtttatctatatgatgaaatattatttggcaaccaaaagaaattaagtactgatacatgctatgaaatggataaaccttg

SEQ ID NO: 5876 - DNA, 201 bp, Homo sapiens
ttcattcatcttttgcccttactctaccatgatctctgttgtctttactgtatctcaaatctatcctatcttcttcatcaccaccacttagacataattcrcaaagtcttgctttgcctgacattatggcaatatttctctaattcatattcttgcttctctgccatcctccctctgatctgtcaccacagtgatttctct

SEQ ID NO: 5877 - DNA, 201 bp, Homo sapiens
cctaggtttagtatcagttgttttcaatctcaactgtccagttgactcaaaaaggaaagctttttaaaaatcttgctgtgcctgagctttataacttgggytgccaaatgtaataaataagaacatgggatgtttagttagatttaaatttcagataaacaagaattattttgttactataagcatgttaaagaaatacct

SEQ ID NO: 5878 - DNA, 201 bp, Homo sapiens
ggcagatcacaaggtcaggagattgagaccatcctggctagcatggtgaaaccctgtctctactaaaaatacaacaaattagccaggcatggtggtgtgcrtttttagtcccagctactcaggaggctgggcaggagaatcatttgaacccaggaggcggaggttgcagtgagccgaggtcaccccactgcactccagcct

SEQ ID NO: 5879 - DNA, 201 bp, Homo sapiens
agatgtcccacaaggccccaagcatataccaacttttgtataaaatgatctgtaagttttgtgccagcctttgatcttacccttaagacaggggtctgagrttggaggaccttgacttcctagcctcctattggtgcctaccacacctgtctctttagcatcatctttagctactttgatctgcctgtgcccacaagatca

SEQ ID NO: 5880 - DNA, 201 bp, Homo sapiens
gagttttccttgatatgtccttttacagtcaatcaaatttcttttcatgggcattagcaaatattaagcagaaaatattcaaatgtgtggttcaaagaggrattcaatctgagagcatttgtattccacacatattttaggaagaataaagtgagcatttgcatctgtacaagtaaacaaacactgaatagaaaactgagc

SEQ ID NO: 5881 - DNA, 201 bp, Homo sapiens
actttgatctctgaactttcactcataccacagcatggcagcagaggagttactatacacaatcacatagctcactctcccacattattgagaaatgacakaggattcctcatttcaaagaatttctggcaattcaccccattaaaagaaaaatagtctcttctaaagaatttatggtctggattcccttttctgtgatgt

SEQ ID NO: 5882 - DNA, 201 bp, Homo sapiens
ttccctaaaaaatgcagtataaaaactatcttcgtagaatttacattgtatgaggcattgtaattaacctagagatgatttcaagtatacagtaggatgcrtgtaggttataagcaaatattacaccatcttatataaaagacttcagaatccatggattttggcatctggaaggtcctggaaacagcatacagaggcata

SEQ ID NO: 5883 - DNA, 201 bp, Homo sapiens
agtttccattacataaatcaatgttattcataggttttataagccatatgaaatattagcaatgagttataattagaaatcttgctgctaacctgacttcyggttaaaaaatcagtgacttatattatcactgatatagactaaaaattatgtggatttgaaaacatcactgcccaacattttaatattctgtcatctgaa

SEQ ID NO: 5884 - DNA, 201 bp, Homo sapiens
cttggcctcccaaagtgctgggactacaggtgtgagccactgcgcctggcctattttactactttcgtagctgttttttctgaggaagtacaagacaaaakgtgccaataatggcaattatggttaacctgagtgaaataaagatttgagcaggaatatatatttcaatgtgtggacagctgataggattagtagaccatg

SEQ ID NO: 5885 - DNA, 201 bp, Homo sapiens
tgaaacagagtctcactctgttgcccaggctggagtgtggtggcatgatcttgactcactgcaacctccgccctgggttcaagcaattcttctgcctcagyctcctaagtagctaggaccacaggcacgagccaccacgcccggctaatttttatatttttagtggagatgcggtttcaccatattggccaggctggtctc

SEQ ID NO: 5886 - DNA, 201 bp, Homo sapiens
atcttttgtgatttatctttatctagtgttttccccaaatactcctacataaagctttggacagcaagacactttatctctctccactttagttcactctwtttaatgacccatccagcttagcagtttatggttttatcatgtctaattttttatattcaccctctgaattatattttcagatatcagggtataggggaa

SEQ ID NO: 5887 - DNA, 201 bp, Homo sapiens
ctttttgacatttagagcttgtttatttaaaacctttgcttatttatttatttgagatggagttttgctcttgttgcccaggctggagtgcagtggtatgrtctcggctcaccgcaatatctgcctcctgggttcaagcggttctcctgcctcagcctcccaagtagctgggattacaggcatatgccaccacaccggcta

SEQ ID NO: 5888 - DNA, 201 bp, Homo sapiens
tgaggaagcacacgtaagtgctaaggggcatgcgattactacgttcattataacaggcttctaagctttcaaacatcatatccacatattgtacaatgggyagtacggaaacagcttggatacatttgttataataattagttaaccatatatttctttagtaaatctttgggtcatctttttgacatttagagcttgttt

SEQ ID NO: 5889 - DNA, 201 bp, Homo sapiens
gaaataatgaatatttttgattaaatatgtttttttttttaaaaaaaaccacagggcaagtagaagttttgatattataaaagagaacttaagaagaatgkttcaaaatatcaagaatttaaaattactgttgatgccgtaaatcaccgaggggtagaatgttatgcctgtgtattatacaaggccagatgcctaagtgca

SEQ ID NO: 5890 - DNA, 201 bp, Homo sapiens
actcccagtgatccttggaaaagggactgtaggggtcaatgtagatatagggagtccccctagatcaaaaccaccaagatatcttgcaagttctatcactwccaaatgtatatctcagatccagcctcttctttggcagtgtagggttgaagggaagtggttaattaccaagttcttggcttgaataactgggtgaatggg

SEQ ID NO: 5891 - DNA, 201 bp, Homo sapiens
caaatgccgttcttcagaagcagccattcagtcacctgcacctagggctttccccgatgggcaaagcgtacacctgaatagttccttagttgtcctccaayaatttaagactacaaaggcttctgagagtccatggtaatcttttaggttttgtggtctagttgcttatatgatgtgagccgtgagttaacattttctttc

SEQ ID NO: 5892 - DNA, 201 bp, Homo sapiens
tacctcagtgttgaataagcagagcagagaaacaaaagaaggaaggtgatattaccagtacttggctatgtcactggagtcttactgcccatgttttattrgctgatgtttcagggaaacactttttttcttgagtcttttttttcccccaagatgctatttctaaaaggtcagttatttgtcatgtaactattactgcat

SEQ ID NO: 5893 - DNA, 201 bp, Homo sapiens
gaagattggtgtcattgaagttgagactaaaatatgagcagaattaagaaaaagagattatcagtagtattattattttaaccagagggtggcacaaagascagtgggcaagagaaaggatggcagttgtagagactaggagagggggataggaagagagtaaggatagagacctaggcaagggacagatcatataacact

SEQ ID NO: 5894 - DNA, 201 bp, Homo sapiens
atagcagggagaactgatgtagcctaggggagaagattggtgtcattgaagttgagactaaaatatgagcagaattaagaaaaagagattatcagtagtaktattattttaaccagagggtggcacaaagaccagtgggcaagagaaaggatggcagttgtagagactaggagagggggataggaagagagtaaggataga

SEQ ID NO: 5895 - DNA, 201 bp, Homo sapiens
ttgggaaggtgaataatttagcccagttcctgcaatgcaatgtgttaagcgaatagccagcatatagcagggagaactgatgtagcctaggggagaagatkggtgtcattgaagttgagactaaaatatgagcagaattaagaaaaagagattatcagtagtattattattttaaccagagggtggcacaaagaccagtgg

SEQ ID NO: 5896 - DNA, 201 bp, Homo sapiens
ttacagtctaattgggaaggtgaataatttagcccagttcctgcaatgcaatgtgttaagcgaatagccagcatatagcagggagaactgatgtagcctargggagaagattggtgtcattgaagttgagactaaaatatgagcagaattaagaaaaagagattatcagtagtattattattttaaccagagggtggcaca

SEQ ID NO: 5897 - DNA, 201 bp, Homo sapiens
cactagctattagatgtcaaggacatgttcgtgagcaaaacaaaaatggttattgtcctcatggggcttacagtctaattgggaaggtgaataatttagcmcagttcctgcaatgcaatgtgttaagcgaatagccagcatatagcagggagaactgatgtagcctaggggagaagattggtgtcattgaagttgagacta

SEQ ID NO: 5898 - DNA, 201 bp, Homo sapiens
ttacactgttggtgggactgtaaactacttcaaccattgtggaagtcagtgtggtgattcctcagggatctagaactagaaataccatttgacccagccawcccattactgggtatatacccaaaggactataaatcatgctgctgtaaagacacacgcacatgtatgtttattgaggcactattcacaatagcaaagact

SEQ ID NO: 5899 - DNA, 201 bp, Homo sapiens
ttcatccaaatgcccaggtttatcatagttgctaacacggagactctgcttgtcaccaagcctgtgatggcaaaaggccctctctcacagctttcaacacmccctccagccttatataaatgtctgtagtcaaaactattgactggatctgcctcctatcctccattacttgctatttcagaatgttatagaagaggaatg

SEQ ID NO: 5900 - DNA, 201 bp, Homo sapiens
acatctcacaccagttagaatggcagtcattaaaaagtcaggaaacaacaggtgctggagaggatgtggagaaataggaacacttttacactgttggtggractgtaaactacttcaaccattgtggaagtcagtgtggtgattcctcagggatctagaactagaaataccatttgacccagccaacccattactgggtat

SEQ ID NO: 5901 - DNA, 201 bp, Homo sapiens
tagaatggttaggtgtttgggaataaacttgaattttgttctgagatagccccatgaaactggccagcaggtggcagcataaggtctgggaccccacagasagttcactaaaatttgagattaggaagtcttggagattttgaagttaaagacaaaagcagagatgcaattgccatgggagactgagaaaagatgaggagt

SEQ ID NO: 5902 - DNA, 201 bp, Homo sapiens
aagaagagctaactaggggccgggcacggtggtgcaaacctgtaatcctagcactttgggaggccgaggtgggcatattgcctgagctcaggagtttgagwccagcctgggcaacatggtgaaaacccatctctactaaaaatacaaaaaattagcccggcgtggtggcgggcgcctgtagtcccagctacttgggaggct

SEQ ID NO: 5903 - DNA, 201 bp, Homo sapiens
taagaagagctaactaggggccgggcacggtggtgcaaacctgtaatcctagcactttgggaggccgaggtgggcatattgcctgagctcaggagtttgaraccagcctgggcaacatggtgaaaacccatctctactaaaaatacaaaaaattagcccggcgtggtggcgggcgcctgtagtcccagctacttgggaggc

SEQ ID NO: 5904 - DNA, 201 bp, Homo sapiens
ttattgttcacttaggcacctttgtgcactagatctctgatcaaattattttgaaattttaatatgaaatacataggagaaaaaattgaaaatgtgtagcrgtaggaaagcttttctttgttaaaaaagtgtaatttaatagagtaagaggtgtgaaatatgtcaggaattttgctaacatgaaatttcatcatttgtcca

SEQ ID NO: 5905 - DNA, 201 bp, Homo sapiens
acttgctcaagtagggctgcctctggcatgtcttggttggccttcaggatggctctctgactcctcttagaatgtaaagtaaaggtagtttttgggaagcycttcccagacctttcagctttaggatttacctggatttccaggtaaaggaaaaatcctactcaacattctgttacactacaatttcttagtatttgcact

SEQ ID NO: 5906 - DNA, 201 bp, Homo sapiens
gcatcaggaagttctaaaataaactatcttaccatccttctctgttgtggtagccccaagtatacctgtaggttttgttggtcagcaaatatccacctagratatctttttatgcagctaccagcagtctccacaagtggttcagttggagaactgtccttttgagggaaagagccaaagccactcccctaaacatggctc

SEQ ID NO: 5907 - DNA, 201 bp, Homo sapiens
taaactgctgaatatccttgtctggaagggatttcgtgaactatttttctccatgagcacaaatatgtcactagtaataaagttgcaggaataaaatagtyatagtcaccagatataaggcagcccttaaagtttaatgaagtgatctgattacattaaagtcaattctcagttaatggaagactgaatattcatctaacc

SEQ ID NO: 5908 - DNA, 201 bp, Homo sapiens
caattaaaacacttttgctaggaaagatgtctcattgcccagtggctgctagaaaagactagggcacctgcccatcatctgactttcatttctttttcacmtggaggtgggaccacccaaactgctaatttctcttcctcatctccaaagggttctggtagccatctactagacctaaatataaccataaccatcacccta

SEQ ID NO: 5909 - DNA, 201 bp, Homo sapiens
gatgtcatctgcaaacagggacaattttgcttctttccaatttggataccttttactttcttttcttgtctaattgccctggctgggacttccattaccaygttgaatagaagtgctaagagtaggcatccttgcctttgtcccgatctttcaacttttcaccactgagtgtgatgttacctgtaggcttttcatatgtgg

SEQ ID NO: 5910 - DNA, 201 bp, Homo sapiens
cctcctgctgtgttcttcttgctcaaaattgctttgctatttgggttcttttatagtttaatataaattttaggatttttttctacttctatgaaatttcyttgggattttgatagggattgcatagaatctgtagatcactttgagtagtctggcattttcacaatattaagccttctaatccataaatacaggatgtct

SEQ ID NO: 5911 - DNA, 201 bp, Homo sapiens
aagtgcacaatacattattgttgactatagctacaatgttgtccagtaggtctctagagcttattcatcttgctcaattgaaactttaaaatgttgatgartaatttctcatttattcctgcccccattccctggcaacatccatcccactctcattctatgaatttgattattatatgattcgactcatataagtggtaa

SEQ ID NO: 5912 - DNA, 201 bp, Homo sapiens
tggcttatgtggaaatattttagttttggaatatatatttttctttctgttaacgtaactatggatatgtttgatatcttgaatgttcactttaaacagartattgaattcatgttgggaaggtctaagtaaagaggaggcacatacacactcctgaagcttccttccttctttgcctcattatctctgttctgtttttct

SEQ ID NO: 5913 - DNA, 201 bp, Homo sapiens
tattgctggcaggatgtgggaaaagacacgctttaccacacattactgagagaaaccacttggccccttctattgtcacagcaaaactgatgaacagttcytacagaacgcttcctccctgagttctccatgtggtttcattccaattttagtgactctgtgctaacactgctagagaattactggtgtgtcagtatttga

SEQ ID NO: 5914 - DNA, 201 bp, Homo sapiens
tcttaaagaagagccctctggtttcttgcccaggggtaaatgccagttgagtgggatgggtctcccatccttgtcctgtatatagatcatcaatggctctrtagttagactctttattttcagtacagtatttaatctcatttaaatctcataaaatctaaattacttcctatctctgtgtgctgtgtctccatggggttc

SEQ ID NO: 5915 - DNA, 201 bp, Homo sapiens
tctaaaaggtcagttatttgtcatgtaactattactgcatattaaaatgcacaatgcatcaaattagaataagctaaaaatactctagcagttcatgcagyacatattttaatgatattatttttaagattagtgtgtttaagggcacaggtagtatttacaatggagtatctatcaagattttcagacttgaggcaatgg

SEQ ID NO: 5916 - DNA, 201 bp, Homo sapiens
aagctttcacatttaatgaccatttctgtagtctagagttcagtttgaacttttatttttattttcagtaaatggattataattgtaaaatgtccaattakactctcccattcaaaaggagagaacagcgcacttctgatcctgaaatttgaatttaactgggcatcgtgtatatttatttattaaatctcgcaacccaca

SEQ ID NO: 5917 - DNA, 201 bp, Homo sapiens
atcctggggacaggccatcatggtctaagaagagctaactaggggccgggcacggtggtgcaaacctgtaatcctagcactttgggaggccgaggtgggcrtattgcctgagctcaggagtttgagaccagcctgggcaacatggtgaaaacccatctctactaaaaatacaaaaaattagcccggcgtggtggcgggcgc

SEQ ID NO: 5918 - DNA, 201 bp, Homo sapiens
gcagaagtgtgaagaggattggggttcaggggagaaaatggaggcaggtcaatgaggactcatccagtatcctggggacaggccatcatggtctaagaagwgctaactaggggccgggcacggtggtgcaaacctgtaatcctagcactttgggaggccgaggtgggcatattgcctgagctcaggagtttgagaccagcc

SEQ ID NO: 5919 - DNA, 201 bp, Homo sapiens
caagaagatttgcctggcagaagtgtgaagaggattggggttcaggggagaaaatggaggcaggtcaatgaggactcatccagtatcctggggacaggccrtcatggtctaagaagagctaactaggggccgggcacggtggtgcaaacctgtaatcctagcactttgggaggccgaggtgggcatattgcctgagctcag

SEQ ID NO: 5920 - DNA, 201 bp, Homo sapiens
actgttaaaaaaaatcaagcccttatgacatgcttgtgatttttggtagttggaattatgtaatgatgtgaagatgcaaccactagcattattcaagcacwggtgtgtaatagtgatgttctggaatgttgcactcccactctattttcactatgtatacttaccttctgggttaaacttattgctacaataacacttggc

SEQ ID NO: 5921 - DNA, 201 bp, Homo sapiens
tgggctttattctaccggtaggacacaatgtcttgaggctcttcatctagagaattgctcagacactcggttcaagaagatttgcctggcagaagtgtgargaggattggggttcaggggagaaaatggaggcaggtcaatgaggactcatccagtatcctggggacaggccatcatggtctaagaagagctaactagggg

SEQ ID NO: 5922 - DNA, 201 bp, Homo sapiens
tgcatgttctgcacatgtatacccaaacttaaagtataataataataataaaagaatgtttattccttaattttatttagaatttacccagaaattcaaarccaatgcagtatgtcctgaggattaagttttttgtgtcaacttaactgggcaaagggatgccttatagccaatgaagcattatttctgggtatctttatg

SEQ ID NO: 5923 - DNA, 201 bp, Homo sapiens
aatatcgcgagaggaagcgtgatgacagctgaggctttgatgatagtctggagccagaccatgcacagtcttgaagttctttccagaagttccagagttgmggaatttgggctttattctaccggtaggacacaatgtcttgaggctcttcatctagagaattgctcagacactcggttcaagaagatttgcctggcagaa

SEQ ID NO: 5924 - DNA, 201 bp, Homo sapiens
gttgagaacagggaccgcttgagcccaggagtttgaatctagcctagacaacattgcagaccccatctcttagaaaaattaaaatacgtctcaatttttcmaccatattgcgtgtctgaagcggggttttcattataaacctttaccaaaacaacttatagattaaatctagaagaaaatatgagaatttagttgtcttct

SEQ ID NO: 5925 - DNA, 201 bp, Homo sapiens
ctaggtggtaactcctggattagactgtgcatttccaatgttgagcccagtgcgtagaatataatggcatccaataacagttggatgactgagtgcattgkcaattgtttggaagtaaaaatgcctttgcctactgaagcaatgctataaatggtgatttaattcttagctgactaaaaaaaaatactgtttataccataa

SEQ ID NO: 5926 - DNA, 201 bp, Homo sapiens
cttttccttagttcagctagcgatggggtccttgtccgtcctacggctatgaaaatttaggctcacaaacagtttgaatggtgagtaaagtagggttttawtggatgaaaaggaagaaaggggggtaaacagggactctcacaagcccagaatccccgctagagcacttcccgctgggttgtcggaatcccaggttccacc

SEQ ID NO: 5927 - DNA, 201 bp, Homo sapiens
aacagtcccatctcctaatactttcacactggggattaagttttaacatatgaacactcagcctacagaatttggcatgtctaacaaagccgttctcaagytggacctggtcattgtttccaacttcaaacccagccagtctctaccataggccatgatcatgctaggtttttacatactttggcctccaccagacatgtt

SEQ ID NO: 5928 - DNA, 201 bp, Homo sapiens
tcacctcccaacagtcccatctcctaatactttcacactggggattaagttttaacatatgaacactcagcctacagaatttggcatgtctaacaaagccrttctcaagttggacctggtcattgtttccaacttcaaacccagccagtctctaccataggccatgatcatgctaggtttttacatactttggcctccacc

SEQ ID NO: 5929 - DNA, 201 bp, Homo sapiens
taatcacctcccaacagtcccatctcctaatactttcacactggggattaagttttaacatatgaacactcagcctacagaatttggcatgtctaacaaarccgttctcaagttggacctggtcattgtttccaacttcaaacccagccagtctctaccataggccatgatcatgctaggtttttacatactttggcctcc

SEQ ID NO: 5930 - DNA, 201 bp, Homo sapiens
tttataagggcactaatcccattcataaggactccactctcatgacctaatcacctcccaacagtcccatctcctaatactttcacactggggattaagtkttaacatatgaacactcagcctacagaatttggcatgtctaacaaagccgttctcaagttggacctggtcattgtttccaacttcaaacccagccagtct

SEQ ID NO: 5931 - DNA, 201 bp, Homo sapiens
actaattgtgtagagataattttaaaaataggcataagtcatgcctttcttatgattatatttaataaatggagaatatggtttcttgcattttatactgkggtgcaataggaaaaataccagggtaggaattgtgtttttgatgtgtgttctggccgtggtccacactgggtaacatgagagagtgaactcaataattga

SEQ ID NO: 5932 - DNA, 201 bp, Homo sapiens
gcattattaaatggattgtcttgtatgccactgagaggcaagacctaacaataagaaagaaataattggaaaaattcacacatttaatgtagaaatatacygcacttcttccactgtaatatgtattgcaaaacaaactttatataataataatttatttgctgcataaagggcattaaagatacctaactaaaaagcaag

SEQ ID NO: 5933 - DNA, 201 bp, Homo sapiens
ttccctcctttgagacatcattcaatcccatgctttcaggtatagtgtagagctagggtaaagtattccctatatgctttctcatcaaaactagaccaacwgtccagtaaaattataatgggacaagtatttatcattttaaattttcttttctttctttctgtttttttcttttgagacagggtgatatggtttggctgt

SEQ ID NO: 5934 - DNA, 201 bp, Homo sapiens
ataatgtttctgagttccacattgacatctgattattcaattatgttggtttggttaaattttttttcttaccttaagttcaaagatacaactcatgagtmaagtagcagattttattttattccctatagcagcggtccccaacatttttgggaccagggactggtttcatagaagacagtttttccatggacttggggt

SEQ ID NO: 5935 - DNA, 201 bp, Homo sapiens
ttgggggactgaggtgggaggatcacttgaggccaggaggtggaggttgcagtgggtggagatcacatcgctgcactccaacctgggtgacagagtgagaycctgcctcaaaaaacaaaacaaaaaaccaaaacagaacaatacaaaaagttggggaaaatgactttttgtttgctctgtgctgtgaattgagtcttcttt

SEQ ID NO: 5936 - DNA, 201 bp, Homo sapiens
ctgttttccatcttactatttttattactttaaccaaaaattctttaaaaaacctacatgtcagaaatatatgtaaatacataatttcatagagtttccartcaacccattatgatgggtattgctttttatatgtaacaggaaaaatatggatataagactagtaagagtttctcactttagtcttctctttaaaaagaa

SEQ ID NO: 5937 - DNA, 201 bp, Homo sapiens
atttaagttaattagtttttactaattccttaaatgccacaattttgcataggtgaatgagttagtggacaaatttagaagacactggggctgagctttakttcagttgacaaattatggacactcctggtgcgatctagaagaaaggcaagtaaaaattccttttcctagaataccaactactttttcccttctcataaa

SEQ ID NO: 5938 - DNA, 201 bp, Homo sapiens
gaagaaagagattttaggaaaaagaagaaagccttaagaagaagatcacatttaagctagatggatctagactattctggacaagggacatgaagataggraataccaggggtagagaatggattgcacaaaggcaaaaagagggagtcttggaattttcatgaaaaacagagggactaagaagagaaatcatagaagtcc

SEQ ID NO: 5939 - DNA, 201 bp, Homo sapiens
tttccatctaagttgaattacatatttattaactcgtttgatctttactataattctgtgaattaggtactctttgaatgaccattttatagaagaggaawctatgattaacaataagttgcttatttaagttcattcagctagtggagacatagctaaaattcaaaagcatatatatctgatgccaatgttcgtgctttc

SEQ ID NO: 5940 - DNA, 201 bp, Homo sapiens
aagagctgatgagggccctcttcctggttcagtgtctttttgctgtgtcctcacatggcagatggtgcaagaaatctctgtggagtcttttttataagggyactaatcccattcataaggactccactctcatgacctaatcacctcccaacagtcccatctcctaatactttcacactggggattaagttttaacatatg

SEQ ID NO: 5941 - DNA, 201 bp, Homo sapiens
gagcaaggtgccagcatggtcaagagctgatgagggccctcttcctggttcagtgtctttttgctgtgtcctcacatggcagatggtgcaagaaatctctstggagtcttttttataagggcactaatcccattcataaggactccactctcatgacctaatcacctcccaacagtcccatctcctaatactttcacactg

SEQ ID NO: 5942 - DNA, 201 bp, Homo sapiens
ataaaaaataaaaattatcatatactgggtggcttaatcaatagtaatttatttttacagttctggaggctgaaggtctgagagcaaggtgccagcatggycaagagctgatgagggccctcttcctggttcagtgtctttttgctgtgtcctcacatggcagatggtgcaagaaatctctgtggagtcttttttataagg

SEQ ID NO: 5943 - DNA, 201 bp, Homo sapiens
aaaaataaaaaataaaaattatcatatactgggtggcttaatcaatagtaatttatttttacagttctggaggctgaaggtctgagagcaaggtgccagcrtggtcaagagctgatgagggccctcttcctggttcagtgtctttttgctgtgtcctcacatggcagatggtgcaagaaatctctgtggagtcttttttat

SEQ ID NO: 5944 - DNA, 201 bp, Homo sapiens
acacccccatatctaaaaaataaaaaataaaaattatcatatactgggtggcttaatcaatagtaatttatttttacagttctggaggctgaaggtctgaragcaaggtgccagcatggtcaagagctgatgagggccctcttcctggttcagtgtctttttgctgtgtcctcacatggcagatggtgcaagaaatctctg

SEQ ID NO: 5945 - DNA, 201 bp, Homo sapiens
ggctacagtgaactatgatctggccactgcactctagcctgggtgacagagtgacacccccatatctaaaaaataaaaaataaaaattatcatatactggrtggcttaatcaatagtaatttatttttacagttctggaggctgaaggtctgagagcaaggtgccagcatggtcaagagctgatgagggccctcttcctgg

SEQ ID NO: 5946 - DNA, 201 bp, Homo sapiens
tgtgcagagtaatcccagttactccggaggatgaggtgagcaaatcactggagcctagggctttgaggctacagtgaactatgatctggccactgcactcyagcctgggtgacagagtgacacccccatatctaaaaaataaaaaataaaaattatcatatactgggtggcttaatcaatagtaatttatttttacagttc

SEQ ID NO: 5947 - DNA, 201 bp, Homo sapiens
gagaccagtgcggtgtggtggcatgtgcagagtaatcccagttactccggaggatgaggtgagcaaatcactggagcctagggctttgaggctacagtgarctatgatctggccactgcactctagcctgggtgacagagtgacacccccatatctaaaaaataaaaaataaaaattatcatatactgggtggcttaatca

SEQ ID NO: 5948 - DNA, 201 bp, Homo sapiens
agtgctaatcttttctctatttgtttgtttgtttgtttgtttgtttgtttgtttttgagacagagtctcgctctgttgcccaggctggagtgcagtggcgkgatctcggctcactgcaagctccgcctcccgggttcacgccgttctcctgcctcagcctcccaagtagctgggactacaggtgcctgccactatgcccag

SEQ ID NO: 5949 - DNA, 201 bp, Homo sapiens
tctacatttttgttccatttaggccctcaatgatcccagcctgcattggagaaggtaatctgctttattcagtccactaattcaagtgctaatcttttctstatttgtttgtttgtttgtttgtttgtttgtttgtttttgagacagagtctcgctctgttgcccaggctggagtgcagtggcgggatctcggctcactgc

SEQ ID NO: 5950 - DNA, 201 bp, Homo sapiens
ctgttcacaaaaagagtcaaagaagtttaagacttatgtgcaataattcactagttgaatgtcctttgattctaagtgttgtttttttaattccataaggyttgcaaaaatttttgtttgctgtggtatttactatagtttgggaaaataaagtgtgtccagaggaaatttttaaaaatagaaaatctaacgatgtaacta

SEQ ID NO: 5951 - DNA, 201 bp, Homo sapiens
cagaggagccaagatggccgaataggaacagctccggtctacagctcccagtgtgagccatgcagaagacaggtgatttctgcatttccatctgaggtacygggttcatctcactagggagtgccagacagtgggtgcagcgcactgtgcaccagctgaagcagggcaaggcattgcctcactcaggaagcacaaggagtc

SEQ ID NO: 5952 - DNA, 201 bp, Homo sapiens
gaaatatttactgaaggaatgaatcaattatcacaactagtggtagtatatcggtagactagctaactgcaggtagtgacacagcccaatctgtgtattaygggcaattcccacccctgggatgcaaattgtaaggttactaagagtcctgctattacaggcataattttgaatgttctctaacttaaaagaaaaatagtt

SEQ ID NO: 5953 - DNA, 201 bp, Homo sapiens
aaatttgagaatattcagtatattgatggaatttaaagtcatgggattagatgagattagacaaaagcaacccctgacattcaggagcctgcctcgcactrttacctaagccctggtgttcccctgttgcccataaacaattgcattgaacaccaacgttgggcaaggccactctgaccacaatggatcaagaaaaaatag

SEQ ID NO: 5954 - DNA, 201 bp, Homo sapiens
agggccctcacatgggtaggctgttggtgctgtgtggaatggagagagcctactttagaaagcccgttggcatttgggcctttatcacatcagagtgaatrctggtacaagagacagcacagactgtcgggggagaatctcagctctgccacttaatagctaggcagttttaggcaaaccacttggcctctctgagccctg

SEQ ID NO: 5955 - DNA, 201 bp, Homo sapiens
ccatgggaaggaagtgtgggatataaaaaatcataagagggccgggcatggtggctcacacctgtaatcccagcactttgggagaccaaggcggtttatcrcttcaggtcaggagtttgagaccagccttgccaacacggtgaaacccaatatctactaaaaatacaaaaattagccaggcatgctggtacatgcctgtaa

SEQ ID NO: 5956 - DNA, 201 bp, Homo sapiens
atttctttacatttaaatgtggctaatgactatcatattggacagcagaagtctagggtgatagacctatagaacaacaatttttaaagccattttggatyggattttctatcatttgcagctgcaagcatcctaactaatacaatgtattaaatataagtggaaatgatttatttaacatggcatgagcatccctcattt

SEQ ID NO: 5957 - DNA, 201 bp, Homo sapiens
tctatgtttgtaaagttaggagtttttatggtttatagaagagcagaccacaaatgagctataaatgtaaggtagtcttattttgcttctcatgaaaagaraattaaatgatttcggaatttctgctgtgccatctaaaatttggttacattcagcttgtaacattgagacaatcggtcaacaaacatttataggcatacc

SEQ ID NO: 5958 - DNA, 201 bp, Homo sapiens
gctacatagggaatataacagatactgttgcttactgatttaacaacttccttttctttgaagccagcactatctaatagaactttctgaggtgaagaagrtttttccatatctgcattgtttaatagagcagccattagtgacatgtggctattggtcacttgatggaatatggctagtgcaaactgaaaaaatagaatt

SEQ ID NO: 5959 - DNA, 201 bp, Homo sapiens
ggaaataatatgcataaagattattgcctgctacatagggaatataacagatactgttgcttactgatttaacaacttccttttctttgaagccagcactrtctaatagaactttctgaggtgaagaaggtttttccatatctgcattgtttaatagagcagccattagtgacatgtggctattggtcacttgatggaata

SEQ ID NO: 5960 - DNA, 201 bp, Homo sapiens
tttttgatgaagatgaaagaagagttaagttctatgtttgtaaagttaggagtttttatggtttatagaagagcagaccacaaatgagctataaatgtaasgtagtcttattttgcttctcatgaaaagaaaattaaatgatttcggaatttctgctgtgccatctaaaatttggttacattcagcttgtaacattgagac

SEQ ID NO: 5961 - DNA, 201 bp, Homo sapiens
aatggcaacaaaagacaaaattgacaaatgggatctaattaaactaaagagcttctgcacagcaaaagaaactaccatcagagtgaacaggcaacccacaraatgggagaaaattttcacaacctactcatctgacaaagggctaatatgcagaatctacaatgaactcaaacaaatttacaagaaaaaaacaaacaaccc

SEQ ID NO: 5962 - DNA, 201 bp, Homo sapiens
ggtactaccactggaagacgttgaacagagactggagcattcatttatttattggttaatccaacaaacatgtatttaccactactaagggttcacactcygcaagacactgaagatacagagttaaaagtacatttctaaccttaaagaaccaataggctggttgggaaaatgtggaactagacaaacacagtgcaatgg

SEQ ID NO: 5963 - DNA, 201 bp, Homo sapiens
agaaagactcatagcaaaggcaaactaaacaaagtagtcaacctaccaaccaacataaaacagtcttgagaatagaaaaaatcatttatggccatcttttmgagatgctagtgagattcctgcactggtaaggttgacccaagattacccttaagtttctttctaagatgctattttaaaatttacaggataaattaaaga

SEQ ID NO: 5964 - DNA, 201 bp, Homo sapiens
aagggcttcttccttgaggtcatctgaagcaataggctcgaatgggaaatccaggcctgccctacctgaatgtttgaactggctgccattgtgtggcctargagaatataggagattcttgaaggatgctctgagcaacagtcttaccttgtactgcttggggaacagaaaaagttggcttttctagcaggagtcctcagc

SEQ ID NO: 5965 - DNA, 201 bp, Homo sapiens
ttgactgcatgatgctaaatgttaataattataattatggattactgagtatttgccatgttccaggaatgcacagatgaaatataattaattgcataatwtctttcaataaatccaggatacaaggtaggtgttagtgttatctccatttgataggtgaggaccttcagacttggagaagtgaaataaccttgttgaagt

SEQ ID NO: 5966 - DNA, 201 bp, Homo sapiens
gatgccaatattttttattagtggtggtgttgatcatgaccacttgattaaggtggtttctgctgggttctccactttatagttagtatcttttctcctamtgttaagaaagatcttgggggacatgctttaagactgtgcaaatcctgtttctctttagactgtgaacaaatgatttcagcatacatccatggattttga

SEQ ID NO: 5967 - DNA, 201 bp, Homo sapiens
ttaattttttcaaacatttcccaaatgtgttttaaatggctttcctgaaggagaaagagagagggagagaaaaaagagaacatttagatataattacagawaagacctatgcataatattagtggacttaaaaataatcatgcatattcatagctaaattgctaattaacattctcagaattttgcttaatgtaagcaagt

SEQ ID NO: 5968 - DNA, 201 bp, Homo sapiens
agaaggtttttccatatctgcattgtttaatagagcagccattagtgacatgtggctattggtcacttgatggaatatggctagtgcaaactgaaaaaatwgaatttcaaattgtatttaactttaattactttacacttaaatgtaaatgtaactttgatttctttacatttaaatgtggctaatgactatcatattgga

SEQ ID NO: 5969 - DNA, 201 bp, Homo sapiens
atcttagttgtttcactcttattcttttgccttttattctgaattgaaatgaaaaatgaaatgtgtaaaacactgcaagaaaattctgcaagctctcctcmttctgaagcctgacagtaattattatttggggattacaggaaaatcttacagtgtaatttagagattcttaatttattcacagactcttcttctttctct

SEQ ID NO: 5970 - DNA, 201 bp, Homo sapiens
tttgttatctagagttgaaaaacattcatgtactcattagaaggtctttcattgcgtagattatttttctttttctacatctgtgtttataactaattcayggtaatagtcggctctgtattgagtgaaatgttccattatcagaagaaaagataaattttgtaagttgaaagaataaagtttgcttctcatgtgttctat

SEQ ID NO: 5971 - DNA, 201 bp, Homo sapiens
ggggctcccacctattcctgcggagccttccccactcagctggtgtccctgccacagctgctccagacaggctgctgctgccatcaggaagagacctcatkgttatgtaattgttgggggaaagtggaagagacttttatattaaaggtttttgacttttttttcagttaccatgctttagtgcttattaatttttttttt

SEQ ID NO: 5972 - DNA, 201 bp, Homo sapiens
acaatcttagtcctaggtacagattttagaatagtatttcatgttctaagagtagtttttatacaatgattagacctttaaatttttcaacactctccccytaaagtttttaaggtcaaaaatcatgaataaatccatgcttgatagactaaaaggttttggcttcagagaattgtcagtagacttcaaattggagcagcc

SEQ ID NO: 5973 - DNA, 201 bp, Homo sapiens
tggggctcccacctattcctgcggagccttccccactcagctggtgtccctgccacagctgctccagacaggctgctgctgccatcaggaagagacctcakggttatgtaattgttgggggaaagtggaagagacttttatattaaaggtttttgacttttttttcagttaccatgctttagtgcttattaattttttttt

SEQ ID NO: 5974 - DNA, 201 bp, Homo sapiens
atcagttcaatatttgttgtctccatcttacttttaatgggaacatcaaaatatatctttagatagtattgggcttgagccagacaaaagttcatgttgcyatgagggagaagagagagagcagtcaattttgagttcctttgttgttttacacaatcttagtcctaggtacagattttagaatagtatttcatgttctaa

SEQ ID NO: 5975 - DNA, 201 bp, Homo sapiens
gttgccagaatcttgtcagagtagaaaaattggaagattgattagtgtcgttttctttttcattgatttacctgggtttctggctggctgatgaatgtgtrgcatcaggtgctatggattatgtgtgtgtgaagaaaaaataaagagctcaataacaaaaataataaattctaccctttctaatgcttacagtttgatagg

SEQ ID NO: 5976 - DNA, 201 bp, Homo sapiens
aaatttgcattctatactagtaatagtagggaaattctcatgtatgtgccatggatgttaatagctgcattgattttaatagtgaaaaattggaaacaatrtagattaccatttatatatgacatattatgtaagagttaaaataaatgcactatatcttcatgtactaacattggccaaatattgagagcatagtggtga

SEQ ID NO: 5977 - DNA, 201 bp, Homo sapiens
agatcatttggaactaaataaaagaaggttcaacccaagcagttagaggaggaatagcagagaacctctaatgaaagtgggaaggggaaaagcatacaagragaagcacaaagtaatacaatagcaaacagaaagaatggagaaattactaacaaaatacaaaggatggatttttgaaaaggatgttaaaatagacaagcc

SEQ ID NO: 5978 - DNA, 201 bp, Homo sapiens
tttaataaaatgtggcaccaactataaaaaatagccccaacttccccatatagctggaaatttaaaaatggacttctaagtaattcatgagttaatgaagmaagttaaatagctatcaaacaatatttgtaactaaatcagtgaacatagtatatataaaaacttgtggcatacagcgatcacttcaattgaagtttccaa

SEQ ID NO: 5979 - DNA, 201 bp, Homo sapiens
cacaatacatacgccaacatgcacactcaagatgccaccatccgtggactcagagttaaggggagaaggcactcttttacgtggctttttctgcatagaasttgagtgaaagatggggcacttcatgtaacaaatatcagaaaccattattaagagctgagattgtcggacgataaaaacaagtaatagcagatctggatg

SEQ ID NO: 5980 - DNA, 201 bp, Homo sapiens
ttctgttcagactgttttgtcccatggggtgctcccttgatgtagtacttacctactagggggtgtctgcacagagttctgtgatgtgaaccatctttctstctcttagtcatggatagcagcacctgctccagtggaggtggcaggggagtgaaatgcattctgtgagggcccgtagttgtattattgttgtttattgca

SEQ ID NO: 5981 - DNA, 201 bp, Homo sapiens
attatttcaggtaattgtaggtatattaagaagttattgatatgcttaaaataataatttttaagtagcacttttatttactaactgcttccggtggaatwtcagattatcagttatttttattcttatttcttttacttgtctaattgcattggttagcacatctggaatgacatggaatactgattgtgatgctgggca

SEQ ID NO: 5982 - DNA, 201 bp, Homo sapiens
aggccacttaagcagagtgtggcacatagtaggatcccatggtgctgacaggactagaatgaacgcacacatcccatagtttacaggccccatgagtatcwgtagcataaacaattcaagctttattctagacaaatgagactcttgttatattcacttacacacggtgatggtataagagaagaaaagagaatggaaatc

SEQ ID NO: 5983 - DNA, 201 bp, Homo sapiens
tggtaattttcccgatatttcaaattatttttactattattatatctgttatggtgatctttgatgttactattgtgattgtttagacagtgaacttgatkgaaaaatgttatatattttcttactgctacactgaccaggcattccctcatctctgtccctctctttggacctccctatgccctgagacacaacaatatt

SEQ ID NO: 5984 - DNA, 201 bp, Homo sapiens
gtgaatatgattgtgtctactcaacatcagtacaactatttgaaaagcacaacattcaaatagtaatttttttgctctgcatgatgcaaaataagcaattygatttttcttttttcaccaaattgactggttcttgaatgtgttatttgacccacagtactgtattatccacagcatttcccagatgactgaactaagtag

SEQ ID NO: 5985 - DNA, 201 bp, Homo sapiens
tcatcagttccagtatgtacttttttccccatattttctcatttttgaaatctggatgtgctttacattagtttgatcaaacttttttaagataaattttrttgtgcatatgtgaggcttacaacgtgatgttatgggatacatgtagacagtaaggtgtttactatagtgaagcaaactaacatatctatcatctcatgg

SEQ ID NO: 5986 - DNA, 201 bp, Homo sapiens
aaaaatttaagaacatcgtagttttaaaaagagtattatgataaagctttaatttctgattttagaaaggaattcaatatggaccaggaccagaagaggtwtctaaggtttgaaaatatattttttgaagtatagatttcattgatagtttatgtgtgtgtttccagtatagtgagaaaatgagaaagtcatccatatcca

SEQ ID NO: 5987 - DNA, 201 bp, Homo sapiens
caggacattgagtaacatggtgaaacaaatggaacccagaaaagaattctatgattctgagatttagaactaggttgatgctgatgcactagttaacaccrtttgaatatagctgttgaaactgttactgatctgcctcacagtctgggcactcagctcctgtaatccattttatctacaagattaagttaaaagaccttc

SEQ ID NO: 5988 - DNA, 201 bp, Homo sapiens
ggttggactcttacacccccatgtcccctgacaccagctgaaccccagctttcatgcttgcagtgtcatggtggccctgactcctggaattcctccaattsctcctgaatccttctacagtgctgcttttattacaccattccttcttttataaatggcaatgactccctattgcatgctgtgtcaagccagctcctctct

SEQ ID NO: 5989 - DNA, 201 bp, Homo sapiens
atgtcccctgacaccagctgaaccccagctttcatgcttgcagtgtcatggtggccctgactcctggaattcctccaattgctcctgaatccttctacagkgctgcttttattacaccattccttcttttataaatggcaatgactccctattgcatgctgtgtcaagccagctcctctcttggtgtatcctttttagtca

SEQ ID NO: 5990 - DNA, 201 bp, Homo sapiens
tcaggaatgaaggtttgggtcactccaggaaaaaaaccatgacctgctgaggtgcttgctaaaggcaaagggaatacagaatgggtagtagaagaaggtastcatcaataccagctatgaccacgtgaccagttgcagaaatgaggactgtaattgtcatatttcttccttctttgttaaaaacatgtttgtgcatgtaca

SEQ ID NO: 5991 - DNA, 201 bp, Homo sapiens
gaatgctcctgccatgggcttgggggttcatgctctcacctttttgaaatctttgtttagatggcacctttgcaaagaggcctgctgaatatcctttacamaactgtagttctttcccctccccttcccgcttaccattttctgtgtgttccttttttcatcacttactatttgctctatttttattgttcatttccctca

SEQ ID NO: 5992 - DNA, 201 bp, Homo sapiens
cacaaaattccatgaaataagtttaataaaatgtggcaccaactataaaaaatagccccaacttccccatatagctggaaatttaaaaatggacttctaartaattcatgagttaatgaagaaagttaaatagctatcaaacaatatttgtaactaaatcagtgaacatagtatatataaaaacttgtggcatacagcgat

SEQ ID NO: 5993 - DNA, 201 bp, Homo sapiens
gactgtaaactagttcaaccattgtggaagtcagtgtggcgattcctcagggatctagaactagaaataccatttgacccagccatcccattactgggtawatacccaaaggactataaatcatgctactataaagacacatgcacacgtatgtttattgtggcactattcacaatagcaaagacttggaaccaacccaaa

SEQ ID NO: 5994 - DNA, 201 bp, Homo sapiens
ttaagaggttttcacataatccaagcttgtgaggcatttattcttgcacagattactgttatccattgaactttacagaaataaagtgtgggttattttcyctttgaaaaatgtgtgtgaatatgtagctttgatgatgtgagtcataggaggaagtcttaataaccagtggtgtctctgaattgacatgaacaaagtaaa

SEQ ID NO: 5995 - DNA, 201 bp, Homo sapiens
gtttaattaagtactcatttatctagttttgttttggtttcttgtgcttctgaggtcttagtcatgaattcattgtctagaagagttttgtcctgaagagwtttccctagattttcttctagtatttttgtatccttgcgtgtactgctgtatagttttattatttgtgtttgggtcagttgtccactttgactaattttt

SEQ ID NO: 5996 - DNA, 201 bp, Homo sapiens
tgtatattttgatatagttgtcctttatcagttgtgtcttttgcaaatattttctcccagtctgtggcttgtcttctccttctcttgaatgtatcttttckagagcagaagtttttcattttaatgaagcccagcttatcaattctttctcttataaatagtgcctttggtactgtagctaaaaagcatccccatacccag

SEQ ID NO: 5997 - DNA, 201 bp, Homo sapiens
ttcctcagggatctagaactagaaataccatttgacccagccaacccattactgggtatatacccaaaggactataaatcatgctgctgtaaagacacacrcacatgtatgtttattgaggcactattcacaatagcaaagacttggaaccaacccaaatgtccaacaatgatagactggattaagaaaatgtggcacata

SEQ ID NO: 5998 - DNA, 201 bp, Homo sapiens
aaggactctatagtcctaatttcggctgcctcaccaccttgcacatacacggcgtcaatgagagagagggaagaaatggataaggtttcaccttgaatcamcccaagagctattccttcctgttaaagacaaatggagtctgggccaatgatttaatggatttgatatggagaagatgtcccacaaggccccaagcatata

SEQ ID NO: 5999 - DNA, 201 bp, Homo sapiens
atgcaagaagtattgctggtctgttaatattgccaacattctggatggtgctgagacataagaaaatttccagtgatgtaaaagatctagctttattctcwtttttaaactcatgtgggcaataaatgagtggataaaatttcagcaaagtttccatctaaagggacattcttaactccaattcttaactcacaaaaccat

SEQ ID NO: 6000 - DNA, 201 bp, Homo sapiens
ttgttaaaaattatttagtgcctcatagagtgccaggtaaaatgatttataattgaaattacattgtaactaatatcttttctgggcatacattttataayaataatcttgcactcagattttaataatagagatatgttaaaaaggagaaatgattttcaaatatgttttactttgtatatgtgtgaaatcttggaaaaa

SEQ ID NO: 6001 - DNA, 201 bp, Homo sapiens
tatttctgaccatgctatacgggttgaaaagaatttaaaggagaatgacttctttctatactggatcaaatacaaacttcaacaaagaaaaaaaaaatctrgatttttcacaattccaaatcagtagggcagtaatttgtgacattttagcactctgtaatttttgtgataaagtaaaaattttctgttcatttttacttt

SEQ ID NO: 6002 - DNA, 201 bp, Homo sapiens
aactaagattttataattccatgctttttaaagagatcgaagtatcaggaaggctgatgtctcatatcccctaatattgctgtgataccaattatgcatartacgccccaaatcatgtcattttcttgtcagatctttagtttagagaagactgttacaggtgataaccactttaaaaattaccactgtgttcaaaccata

SEQ ID NO: 6003 - DNA, 201 bp, Homo sapiens
aaaagtctccagtcaatacaactaaatgtcaaataaacctacagtggtttgggtaagaaagtgcccaatttactactttttttcttttcttgtaaatcacracagcgaatgtttggaacaaggctgcatcggggcagtgtaagaaattagcctatgtaaatgagttttttatttcctcagagcccttcatactagtgactc

SEQ ID NO: 6004 - DNA, 201 bp, Homo sapiens
ctctgtcctctcatttctgttcttctctggctttcctctgcttttttcactcctctcatttctctgttggcattattgttattttttgttccaactgaccsttttgataggatcgttttctctcttcctcctttaatgtctcatttttttgatactgcaatatagaaagaaatgcagacaagaattacttactgggattta

SEQ ID NO: 6005 - DNA, 201 bp, Homo sapiens
aataattgatgtttttgttaaaacaaatcagaacctctgaaccatggctaattcttatttctgaaggtttttcttgtattttcaaagaactgaaaatattwaaaatttttagccacatcagtgtcatgaaaattcaggagatttatatacattttggtgaaaatgaggaggcacacgaagaatccctcagtaaaaataaaa

SEQ ID NO: 6006 - DNA, 201 bp, Homo sapiens
gatattgtgttgtcctctctttagcatatttcttagacaagcagtaccctttgattctctaacagacacgtaggactgagaggagggtaccagaaacaaaytgaatattcaggtaattactataaattgtgatgcattttatggtagcacaaaacataacaagttgctttgccatatcaaatgaaatccactattttctag

SEQ ID NO: 6007 - DNA, 201 bp, Homo sapiens
aagtctgactttcctctgcttgcttgtctttctttgtttcattgtttttacactttcgtatgaaagccaaagaaacaattaatcctgacaagtagtgtggrtgattttcaggatctgggtgcctattataattttaagaggatctggtaaattgactcttttaggtataaatacagtgttttatggcaatgtagaagcttg

SEQ ID NO: 6008 - DNA, 201 bp, Homo sapiens
tattaagagactctaagacattcttcaatacatcagttgcattttcaactatagaatttctgcttgattctttttaattatttcaatctctttgttaaatktatctgatagaattctgaattcttctttgtgttatgttgaatttctttgagtttcctcgaaagagctattttgaattctctgcctgaaaggccacatatc

SEQ ID NO: 6009 - DNA, 201 bp, Homo sapiens
caggcaggatggggattgctgccatcagggtctaagcctggccctgtgcctgagagcactcagctcacccaccagcctgagagctgggggcccagagggtrccagccaagctctatgtcttaccatgctctctgctagagttcacacctttattttcacacttcattttttctctgattaacattttatgatagaaagtat

SEQ ID NO: 6010 - DNA, 201 bp, Homo sapiens
aaggatggcagacacatcctgttggccaagtgtggcacagtgttctaccatttctctcttccaacatcaaggtctggtgttgattaaccaacttttgtagyctcagctcattttctaggccccttaagggacagtacagagtggcatcttgttcactagggacacagtggtcacctcagatctgtgatctgcacagctcct

SEQ ID NO: 6011 - DNA, 201 bp, Homo sapiens
gttttccttgatatgtccttttacagtcaatcaaatttcttttcatgggcattagcaaatattaagcagaaaatattcaaatgtgtggttcaaagagggaytcaatctgagagcatttgtattccacacatattttaggaagaataaagtgagcatttgcatctgtacaagtaaacaaacactgaatagaaaactgagcta

SEQ ID NO: 6012 - DNA, 201 bp, Homo sapiens
agatgatgaacatagtacccaataggaagtttttagcccttgccccactccctccatccttggggagtttccagtgtctattgttcccatctttatgtctktgtgtagccaagatttagctcacacttataagtaagaacgtgaaatattttgttttctgtttctgcattaatttgcttaggattatggcctctagctgca

SEQ ID NO: 6013 - DNA, 201 bp, Homo sapiens
gtttgctcatcctcaaaaataaagacatagagttgaagttctcctgagaacagcagagtcccttcccttccttccatcctatgcacatgcaaagatcaagrgcaggagtagctttcatgccaagacacaagccaaacacccagatcacttatagacatacacaagtttactctgtgagggtccctgggtgtgggctggcaa

SEQ ID NO: 6014 - DNA, 201 bp, Homo sapiens
cctccaggcagctgagtaccacttaatggaaaactgtttacaaaataattttttttgacagagtacttctgagaagtgctcttagtttatcagaaagaggmgagctgctgtttgaaaagtgctttaagtttggataaagatatttctcttaaaaaattctgcttcattgtaatttttcctctccttgccccccaaaagaat

SEQ ID NO: 6015 - DNA, 201 bp, Homo sapiens
cacagcatctctctgagagtacatctgcagacaggcaggagaggggctctctgtgccaaggtccttttctttttaattatgattttcttttttaaaaaagyatctatttttattttagattgggggggtacatgagcaggtttgttacaggggtatacttgtgtgatgctgaggatcaggtttctgttgatcccatcagcc

SEQ ID NO: 6016 - DNA, 201 bp, Homo sapiens
ttacatttgtaggcatcctgcttcctgctacttccacgtacaatgtttcaacttgaagacaactattcaagtatcatattaacattcaaatagcatcttastatgtggctctgggcaaatctttgtgcttcagtttactttattgtagagtgaggataataataatggtatatacatctctggttattgcaaaaattgaat

SEQ ID NO: 6017 - DNA, 201 bp, Homo sapiens
gtgagagcccagcgtggacgctgaccctgtgaacctacctagacccgatccacctccagatcacagcatctctctgagagtacatctgcagacaggcaggrgaggggctctctgtgccaaggtccttttctttttaattatgattttcttttttaaaaaagcatctatttttattttagattgggggggtacatgagcagg

SEQ ID NO: 6018 - DNA, 201 bp, Homo sapiens
aagtctgaccctagagacgagattcatattcaccccactcctctgttcctctgagcagacctccagatcggtggtgagttgtggctgagtgagagcccagygtggacgctgaccctgtgaacctacctagacccgatccacctccagatcacagcatctctctgagagtacatctgcagacaggcaggagaggggctctct

SEQ ID NO: 6019 - DNA, 201 bp, Homo sapiens
aagaagagaagggccaggatttggacctaggaagtctgaccctagagacgagattcatattcaccccactcctctgttcctctgagcagacctccagatcrgtggtgagttgtggctgagtgagagcccagcgtggacgctgaccctgtgaacctacctagacccgatccacctccagatcacagcatctctctgagagta

SEQ ID NO: 6020 - DNA, 201 bp, Homo sapiens
tgagggacagaggtacaaagaagccacctcacttacccagtctcacatagctaagaagagaagggccaggatttggacctaggaagtctgaccctagagaygagattcatattcaccccactcctctgttcctctgagcagacctccagatcggtggtgagttgtggctgagtgagagcccagcgtggacgctgaccctgt

SEQ ID NO: 6021 - DNA, 201 bp, Homo sapiens
ccccaagaacaattatttccaacccctttagctctttttctggtatttgtctccatttttcacaaaacattttcatgttgctatttcttgattttttttttagctttcattttgattgtctactacggaagacgatgacttaactccccacagtacacacattgcacatggatgtgcgtatgaacacacatacacttcctt

SEQ ID NO: 6022 - DNA, 201 bp, Homo sapiens
tggggtcaaacacaacacctctaattctttttcccagtgaagttattaggatatttgagcatgctgatcagatctccagggtaaatatgctcaagtacttygaggaattcttggatattattgatttgattgtttgtacatctcaggtcatgcttgaatgtgctcagtttctccatgcttgtattgcagtacttcatgggt

SEQ ID NO: 6023 - DNA, 201 bp, Homo sapiens
agatcctttctggagaactgtgaggtaattaattccagagcctcagtgtctaccatacattaaaaaatacatgtagatgtatttgaatcacagattaatggaatctgtgatttatttctcaaatagaactcatcaagtttcaatctgaatgggttagttcagactttgccaagaagctttctcaaacctcttctcttccta

SEQ ID NO: 6024 - DNA, 201 bp, Homo sapiens
accagttaggaaacctgcctcttctgggcagatgtaacctgtgccagggcagtggctttgccaggggccagaagcagtgtgggacttgggaaggaaataayggattcactgctggggctggttttattaatccttagcccaagggataggagctgtctgccaagcttatgtgagatccaggttacttcaccagggaaagag

SEQ ID NO: 6025 - DNA, 201 bp, Homo sapiens
cctgtgcctgcagtcccagctatgcaggaggctgaggcaggagaatcgcttgaccccgggaggtggaggttgcagtgagccggggtcgcgccactgcactscagcctgggtgacagagcaagactccatctcaaaaaaatacaataaaataaaaaataaaaataaatttaaaactcagttttttagtcactctagctgcat

SEQ ID NO: 6026 - DNA, 201 bp, Homo sapiens
ctcctacccagatctctttcagaaagaaaatagacagtgctagctaagctgttggatgggagcaatattcagttctttgccaacagagatcctagactccrgatatgccaattcagcaaaccacagggagattatctaaaactgaaaaggggctcaagaatccatcagaatatgagataatttaaataaaatttaaatcct

SEQ ID NO: 6027 - DNA, 201 bp, Homo sapiens
ctgctatgccaatatcccttgaagtggtgctggtttggaagctgtgactagggttaagtgaggtcgggggatgtggggctgccaaactgctgaagctctcrtctgttagtgtctctggttgcttgagaactactgcagagagtggtgggcttagcacctgacaggtgctctcaaacagagaaaggtgggaacacacttggc

SEQ ID NO: 6028 - DNA, 201 bp, Homo sapiens
aaactattgagcttaaatgtcaaacttgcattatgtttagaaatgggtacttatctctttatgcacctttcccttacaccccaacggtgggccgacatagratatggtagaggagttagtattctgacaaataggtgatgtcattccacccatgtatcactttccattaaatctttgacccatatataacctttagctgca

SEQ ID NO: 6029 - DNA, 201 bp, Homo sapiens
ataatatgcataaagattattgcctgctacatagggaatataacagatactgttgcttactgatttaacaacttccttttctttgaagccagcactatctratagaactttctgaggtgaagaaggtttttccatatctgcattgtttaatagagcagccattagtgacatgtggctattggtcacttgatggaatatggc

SEQ ID NO: 6030 - DNA, 201 bp, Homo sapiens
tgagagatctgtccataggaatagattagtctatccatggattaatgagttaatggattaactggtggcattataagaagaggaagagtgacttgagctarcactttagcatgctcaacttcctcgctatgtgataccatgcactaccttaggactgtagagagtgtccaccagatatggtctcttaactttggactcaag

SEQ ID NO: 6031 - DNA, 201 bp, Homo sapiens
taaattaatgagttttctctttttattttttatcattctgtccagtggcgaagttattaatgataaccagatactttagtttgaggttgagctgattttartttgtggatgttaatccaaaagttgccaacagaaagacattctgtgactaattcaagctattgagcatagggccttataccctgtggaaaaagacatgat

SEQ ID NO: 6032 - DNA, 201 bp, Homo sapiens
taaaataatacttgcctcatagagcggttgggaagttaaaggaaataatatgcataaagattattgcctgctacatagggaatataacagatactgttgcytactgatttaacaacttccttttctttgaagccagcactatctaatagaactttctgaggtgaagaaggtttttccatatctgcattgtttaatagagca

SEQ ID NO: 6033 - DNA, 201 bp, Homo sapiens
cacttaatatacaaatattgtggtaggtgttgctataggagaaaacagagtttggtggatgccgagcaggaggtacatgagctagtgggatgagagtcaasgagacattgggtgtttgtgtgggagcagccacatagtgaaatcactttcagatctctaccagcacgtctccttaggtgtttgagatctgaagtcactttc

SEQ ID NO: 6034 - DNA, 201 bp, Homo sapiens
ctgggatcaaggcatgtttccctcagaactgttaatatacccattgctcccacaccgacaaattaattggaaaccctgacaatggtaataggaatatcttyacatgtcaccttacctgtgtgtttcattttcaagtctttgttttcttaccagagaataagacaatttatatgaaatagctgactttctatgttaattttt

SEQ ID NO: 6035 - DNA, 201 bp, Homo sapiens
cccactggaaggaaggaacaactccagatgcgccgcctttaagagctgtagcactcaccgggaaggtctgcagcttcactcctgaagtcagcgagaccacraacccaccggaaggaataaactctggacacatctgaacatctgaaggaacaaactccgggtgcaccatctttaagaactttaacactcaccacgagggtc

SEQ ID NO: 6036 - DNA, 201 bp, Homo sapiens
tcatagtaaatgggatatccatccccttaagatttatcctttgtgttagaaacaatccaattatattattttagttatttaacaatgtacaattaagttaktattgactatagtcacccttttgtgctatcaaatactaggtcttattcattgtttctaattatttttttcacccattaacaattcccactccctgcccca

SEQ ID NO: 6037 - DNA, 201 bp, Homo sapiens
aaacactgtaccaaacagcttaaagtgctagtgtccctttaactttaaaatagaggcttcatttatttcgatgactgctatttagggtaccctaaacaacrtcttagtagcggaaagaattaatactcctaatattccttttggtggtgggaagtggcctctgggtaagacaaagaggtctgggctgatgacacaatggaa

SEQ ID NO: 6038 - DNA, 201 bp, Homo sapiens
ttcgaaatacaaatgttggaggagacacaattcagcccataacaccatttttcttgattcttactatattaagggatatcaccagaaaaaaaaaaatagcmcttttaaaacatcatgtgcctccgcaaaagcacctgcactgagttactgaatcaattattttgtctttaaaaagggttatagagaaaatatctatctgac

SEQ ID NO: 6039 - DNA, 201 bp, Homo sapiens
caggtaactttagggaagttattttactctctgaatggtaggttacacaggcaggaattaatattagtacctactatcttaagggtgtgtgagagttaaaytagataatatagatatggaacacgtaggccaaaatctgatacacagtttataagcatcaaccgttttttccttcagttattaaaataagtttcgcttctc

SEQ ID NO: 6040 - DNA, 201 bp, Homo sapiens
gatttgaatgctctgaggtttgttcacacacaagtcaccaggggcgatcagtataaccataagccagaaagaccatgagttggtctgaaaaatcacacttrtcacctcacctaattcagggccagatgtagaagaataagaagaatgtacctgaatctgcttaggggtctagttatttctataaatgggtatatagagagt

SEQ ID NO: 6041 - DNA, 201 bp, Homo sapiens
gggaagattgattggtttagattgtagcctgggaggttggtttggggactttaatcacccagaaaataactctagagtttctctgtaaactttatcttttwaaaaaatgtatttaagtggtggttcagaattcatacccaggtctactggaacatattccttccatggccctgtaacaaatgctaggccactgtaaggttg

SEQ ID NO: 6042 - DNA, 201 bp, Homo sapiens
acgatagttcttttgatccttttattaatattgtctcaatgaaatgaactgaattgctgaataattgattttgtagatggctcacaagatacatttagccrtgatggggaacatataattgtttgctattcatacctatggtgacttcttaaattggattgctattggacaagattttcagtatttatcccattgatttaa

SEQ ID NO: 6043 - DNA, 201 bp, Homo sapiens
gggttcacgccattctcctgcctcagcctcccaagtagctgggactacaggtgcccgccaccactcccggctaatattttgtattttttttttttttttttagtagagacggggtttcactgtgttggccagggtggtctcgatctcctgacctcatgatccacccgcttcggcctcccaaagtactgggattacagccgt

SEQ ID NO: 6044 - DNA, 201 bp, Homo sapiens
ggaagggagacccatgagatactacagtaattttccagaaatgatagtggcccagcctatgatggttgcactgtactaggaatggacagaagtagatggayatattaataaaaagacattttagggatatatgtagggcttggcaattaattgcatgttaaaggagaggacaaatcatggatgatgccttgattcttggaa

SEQ ID NO: 6045 - DNA, 201 bp, Homo sapiens
tgggttcacgccattctcctgcctcagcctcccaagtagctgggactacaggtgcccgccaccactcccggctaatattttgtattttttttttttttttttagtagagacggggtttcactgtgttggccagggtggtctcgatctcctgacctcatgatccacccgcttcggcctcccaaagtactgggattacagccg

SEQ ID NO: 6046 - DNA, 201 bp, Homo sapiens
agttgagactaaaatatgagcagaattaagaaaaagagattatcagtagtattattattttaaccagagggtggcacaaagaccagtgggcaagagaaagkatggcagttgtagagactaggagagggggataggaagagagtaaggatagagacctaggcaagggacagatcatataacactttatatgcctcaagaggc

SEQ ID NO: 6047 - DNA, 201 bp, Homo sapiens
atctaggagggagtttgtcttccattacccatttgactctctcactttatggacctactggtcctacctaaatgccaaagccaacttgactatttgagtgrattcactggtcaaattggacagaaatgcaaaatgaacagttaataagaatattcaggttgcatgtatatagtttgtatgttcctgttatccaaaataaaa

SEQ ID NO: 6048 - DNA, 201 bp, Homo sapiens
ttcatttgtttcatgtccaccttatatgtatagactgaaggcagttttatacagtatgttttaacaattttgggcatgaaacaaagtttcgactgtgttttgactgcaacctgtcatatgtcaggtgtggaattttctacttgtgacaccatgatggcaatcaaaaagttttgaattttggagaattttggatttcaaact

SEQ ID NO: 6049 - DNA, 201 bp, Homo sapiens
tttgactttttctttccttttctgcctcccctccttttctgagttttactctgtcacccaggctgaagtacagtggcacacagctcaggctcattggagcctcaatttattaggcccaagcgatcctctgatctcagtctcccaagtagctccaaccacaggtggcaccacactgggctacatttgtaatattttgtagag

SEQ ID NO: 6050 - DNA, 201 bp, Homo sapiens
atgctattgtagcaatttcacttatgcccatttacagatgagaaatggaggcttggaaaagtttattaagttgcccaaggtcacacagtaaaaggcagaascaggatttaaaccatggctgtcttaagtagcatctccattggaaagcatttgtctgtaagtaacggtaacgtcaacaatcttttattcccacatcaagct

SEQ ID NO: 6051 - DNA, 201 bp, Homo sapiens
tattttttacttccaccgagctgtgagctccatgagggcaacaggttggtcttggaactgtgcatccctagcgcctagcatagtgtctgtaagtgttcgayaaatcttacatgagtggattaacggatggatctggaatcacaaaacttaaaagtagaacttaccctctttgctaggatgctgtctgacatttggcaaatc

SEQ ID NO: 6052 - DNA, 201 bp, Homo sapiens
tgtaagtcgactcaaatcctttttaaaaaggtttagattaaaaattataatctctttgaattaataaaaaagctatttcataaaaggccctaccttttaartaattaatttgtgtaaatacctacttttaagaggcttaatggaaagctataaatggaaagtctctaggcttcggaacacagtcttttactggccttgtaa

SEQ ID NO: 6053 - DNA, 201 bp, Homo sapiens
gctggcatccaaggtgcaagacaaagtctctttgctcttctgtctcctctcctcaagtagaaggaaggagtccttttattgctgcaagctttcctgcctgyggttgtgggaggagttgcacaagcactcccctagctggcccatctggtgtctttctaggccatgtgccaccccaatccactggctctaagtccagcacag

SEQ ID NO: 6054 - DNA, 201 bp, Homo sapiens
aggcctggggctcactcttcagggaagtgggctcccctttggcctagggcaggtctataagtgccatccaatagcctattcctggattcagggatccctamgagcccacttggtgctctgcgctactatggctgagctggtagctgaagccagcatgtctcagagtcttacccaaggccagtggtataccacctgagtatt

SEQ ID NO: 6055 - DNA, 201 bp, Homo sapiens
gtaggcttactttattattttttattcctttttattttgtctcctttgacagtatattaccaaggagcctgtcttcaagctcattaattctttctttttgwtgagcagttatgttattaagagactctaagacattcttcaatacatcagttgcattttcaactatagaatttctgcttgattctttttaattatttcaat

SEQ ID NO: 6056 - DNA, 201 bp, Homo sapiens
tatagtttaacattagaaaatatactacaatcatgctaataggtcaaataagacaataataaacatttcataagattgtgtaaagtcatatgataaaaatrttagcctaatttatgttacaaatacaaaacaaaaaaactagaaatcgaacaaatatttaacatgataaagcacatctttctcagtctataacattttata

SEQ ID NO: 6057 - DNA, 201 bp, Homo sapiens
cctgggatgcaagcaaggctggttcaacattcaaaaatcaataaacataatctgtcacataaacagaaccaatgacaaaaaccacatgattatctcagtasatgcagaaaagtcctttgacaaaattcaacagcctttcatgctaaaaattctcaataaactaggtatggaggtaatgtatctcaaaataagagctattta

SEQ ID NO: 6058 - DNA, 201 bp, Homo sapiens
caagaaataactaagatcagagcagaactgaaaggagatagagacacacaaaaaaaacccttcaaaaaatcaatgaatccaggaggtgggtttttgaaaasatcaacaaaattgatagactgctagcaagactaataagaaaagaaagaaggatcaaatagatgcaataaaaaatgataaaaggggatatcaccaccaatc

SEQ ID NO: 6059 - DNA, 201 bp, Homo sapiens
tgttgctatctcatttcttaggtctattagtaattgttttatatatttgggagctccagtgttaggtgcatatatgtttaggattgtgatatttttctgtkggacaaggccttttaccattatgtgatgtccctctttgtctcttttagctgctgttgctttaaagtttgttttgtctgatataagagtagctatcctgct

SEQ ID NO: 6060 - DNA, 201 bp, Homo sapiens
tttttatctggctttggtatcagggtgatgctgatcttgtaaaatgaatttggaagtattccctcttcaattttttaaggttttaaataattgatatgagycattctttaagtttttgatagaattcagcaatgaagccatcaggttctgggctttttttttttgatgggagactttatattattgattcaatctccttac

SEQ ID NO: 6061 - DNA, 201 bp, Homo sapiens
tgttttaggttgagatttacctttaaattggtagactgagtaaggcagactactcttcctaatgttatgggcctcattcatacggttgacagcctgaatargacaaaatggctgaccttctccaaggaaagatttccccccaccttactgacttcaaactgggacattggcttttctctgccttctgatttgaactgaaaa

SEQ ID NO: 6062 - DNA, 201 bp, Homo sapiens
tgtgttataagatctcctgccaattattaaaggtatcttttctattatttgaaatagccttgtgttcaattgtatcctcttcttccccacaatgcatattrccaggataggctctgttactacttctgaagatgataaatagaaatatagtttgctctttgatgagaaagaaaacaacactattgaactgaagtgcattaa

SEQ ID NO: 6063 - DNA, 201 bp, Homo sapiens
ctgaagatgataaatagaaatatagtttgctctttgatgagaaagaaaacaacactattgaactgaagtgcattaaaacaaatacccagagtattcatggrtattcttgttccagattaattgccctggactattatttttatttgagctttgtgatttttgaagtttccatatgtaacagaatcccttttttgttgtaag

SEQ ID NO: 6064 - DNA, 201 bp, Homo sapiens
acatttacatttttctctattaactatcatactatgtagccagtattgaatattcagcctatcaacttttatttatttagctgttatgtgcattgcttaayttggatactcatcatttactttctaatatgtacaataaagcacgtcttactcgtgtgtgtatgtctgggcttctttttcatgtaaaagatattatgctat

SEQ ID NO: 6065 - DNA, 201 bp, Homo sapiens
caaactacttttaaagaaaagttgcaaaaatggaacggagaattttcacatatccctgccctagcctccctcagtattaaaatcttaactggagtgcaatkatcagaacccagaaattaacattgatataataccaataattaaacaaaaatcttattcaaattctaccagttttttcatcaatatttcattgttattatt

SEQ ID NO: 6066 - DNA, 201 bp, Homo sapiens
atatctaatgttaaatgacgagttaatgggtgcagcacaccaacatggcacatgtatatatatgtaacaaacctgcacgttgtgcacatgtaccctaaaayttaaagtataataaaaaaaagggaatgttgaaaaagagcaaattgaaacttagcatttattgaatacctactgtcagacactattcttattcataatgct

SEQ ID NO: 6067 - DNA, 201 bp, Homo sapiens
gcctctccttctcccctgataggatctcctttgaacatattactttatacaataagttttattcaattctaaaccaacattctaagaatagtatagtcttygggccataatgttagtttattgtttgttcattcttgttgaaacaaaacattgtctaccttttgataatgaaaactatttttctgttttctgcatagtttc

SEQ ID NO: 6068 - DNA, 201 bp, Homo sapiens
attttcaaggtaatgtgaaatcattaaagggtaatctgggattggtgagattggagatagggagacccattaaaaacttaatacattaattcaggtgagargtgatggtgtctgacctaaggcaataaccacagaggtagaatggaaagaacagtttttgataaatagttggtgatttattgtgtatgacataattagacg

SEQ ID NO: 6069 - DNA, 201 bp, Homo sapiens
tttttgctttggattgtcttggctatgtgggctcttttttggttccatatgaaattaacagtagttttctccagttccgtgaagaaagtcaatgatagctyaatgggtatagcattgaatctataaattactttgggcagtatggccattttcatgatattgattcttcctatccatgagcatggaatgtctttccattta

SEQ ID NO: 6070 - DNA, 201 bp, Homo sapiens
gcctgtgtggcaacagacaaaggcatttttgtaccagagcacaaaaataagtgcctagttattttcaaggtaatgtgaaatcattaaagggtaatctgggrttggtgagattggagatagggagacccattaaaaacttaatacattaattcaggtgagaggtgatggtgtctgacctaaggcaataaccacagaggtaga

SEQ ID NO: 6071 - DNA, 201 bp, Homo sapiens
tctttgtagattctggatattagccctttgttagatgagtagattgcaaaaattttttcccattctgtaggctgcctgttcactctgatgatagtttcttytgctgtgcagaagctctttaattagatctcatttgtcaattttggcttttgttgccattgcttttggtgttttagtcatgaagtctttgcccatgcctat

SEQ ID NO: 6072 - DNA, 201 bp, Homo sapiens
gtttccagctttatccatgtccctgcaaaagacatgaactcatcctttttatggctacatagtattccatggtgtatatgtgccacattttcttaatccartttatcattgatgggcatttgggttggttccaagtctttgctattgggaatagtgccacattaaacacatgtgtgcatgtgtgtttacagtagaatgatt

SEQ ID NO: 6073 - DNA, 201 bp, Homo sapiens
ggtacatgcctgtagtcccagctacttgtggggctgaggtgggaggatggcttgaacccaggaggcagaagttgcagtgaaccaagatcatgccactgcaytccagcctgggagatagagccagactttgcctcaaaacaaaaaaaagaacagcaacaaaagaaatctctgtacctcctcctatacccataaatcatttct

SEQ ID NO: 6074 - DNA, 201 bp, Homo sapiens
tatggttttaggtctaacatttaacctttaatccatcttgatttaatttttgtataaggtataaggaagggatccagtttgagctttctacatatggctakccagttttcccagcaccatttattaaatagggaatcctttccccatttcttgtttttgtcaggtttgtcaaagatcagatggttgtagatgtgtggttat

SEQ ID NO: 6075 - DNA, 201 bp, Homo sapiens
aatgttgtctcttcttatagtttttgtctttaaatttattttatgagatataactgtagctactcctgttcttttttggtttacattgccatgaaatattmcatttatttgtttttagtctatgtgtatctttatagttgaagtatgttttttataagcagcagatcattgggtctttttttaaaaattcattcagccatt

SEQ ID NO: 6076 - DNA, 201 bp, Homo sapiens
ctttgggaggctgaggcaggcggatcacttgaacttatgagttctagaccagcctggacaacatagtgaggccccatctctactaaaaatacaaaaattarctgggtgtggtggtacatgcctgtagtcccagctacttgtggggctgaggtgggaggatggcttgaacccaggaggcagaagttgcagtgaaccaagatc

SEQ ID NO: 6077 - DNA, 201 bp, Homo sapiens
gtagcctgacatatggtctgtctgtgagaatgatgctgagttgaagaatttttattctgtagccattggatgaaacattctgtaaatatctattagatgcrtttgttctatagtctggattaagtctgatgtttctttggacagatttcccaggcagaaaatcaacaatgttgaaagtgggatgttgaaatctccagctac

SEQ ID NO: 6078 - DNA, 201 bp, Homo sapiens
ataagtgtattcaaatctttcctggtctaaccatgtatttgatcaaatccaataatcttgatacatgatatataaagggagaaaggtgtacacacacacamaaacacacacacagagtaaacaaggcagtgccaacaactaccagaaacccatctgtcacccatgatcctaatataggttatgttatggcctaggcattct

SEQ ID NO: 6079 - DNA, 201 bp, Homo sapiens
aacatccattctgcagcccatggatcaaggagtaacttaacctctcaagtctcattatttaggaaatacatttttttaaggttataggtttcctagatggygatacctgtatgtatccgggcaaagtaaatgaagactcctggaaaaaattcatcattctaaatgccagtaagaacatttgtgattcatgggaggaggtaa

SEQ ID NO: 6080 - DNA, 201 bp, Homo sapiens
tttctccaatatatgttcttggcagctttgttgaaaataaggatttgtttctgggttatctattctgttccattggtctaggtatctgtttttatgccagyaccctgctgttttatttgttattgccctgtagtataatttaaagtcaggtaatgtggtttctccagttttgttctttttgctcaggatatctttggctag

SEQ ID NO: 6081 - DNA, 201 bp, Homo sapiens
ttatagtaatttcatggtttgaggtcttagatttaagtttttaatcccttttgatttgatttttgcatatagcaagagataggggtctagtttcattcttytgcatatggatatccacttttcccagcatcatttattaaagagatgatttttctccaatatatgttcttggcagctttgttgaaaataaggatttgtttc

SEQ ID NO: 6082 - DNA, 201 bp, Homo sapiens
tttttaacatcagattattgtattttttcctatagagtttttatagctactgctatattttggttattagtttctcatcatatgggtagtttataaatatyttctcctattctgtgggttatcttttcactttgttgattgtttcctttagtatgcagaagctttttaactgatgtgatcccatttgcccatttttgcttt

SEQ ID NO: 6083 - DNA, 201 bp, Homo sapiens
tatttcacaatcaatttgtagatttcataaaaaagtctcctagggttttgttttgtaaataagggtgttttagtatagtaaaaaaaatataaaatttgctrttttaaccatctttaagtattcaattcagtggcattaattacatttgcatcgtcgtgtcaccaatatttccagaattttccatcaccccatacagaaact

SEQ ID NO: 6084 - DNA, 201 bp, Homo sapiens
aacttagttcttttcaaatgattttggctattgtggatcctttacattttaatatgtatttcacaatcaatttgtagatttcataaaaaagtctcctaggrttttgttttgtaaataagggtgttttagtatagtaaaaaaaatataaaatttgctattttaaccatctttaagtattcaattcagtggcattaattacat

SEQ ID NO: 6085 - DNA, 201 bp, Homo sapiens
aaaaactgcacaataaatttatatctgtgcaaagaggaatatatacaccatcacttggttatgctttcaatgttttaaaatcattcctggctgaaacctasggtttctgaacaaattcttaaaggactaccttggaggtggaagactgagtattagtggactgtcctggtcaaggaggcaatggcagtaacaaaaatgcac

SEQ ID NO: 6086 - DNA, 201 bp, Homo sapiens
tatggttggtggaccgcatttcaggtagacagagaatagaatgagctaaagtgtagagatgagaaatttgagtagtccagttgtctagactagcactgtcyaatagaacttatgtccatgaaggcaatgttgtatgaacgttctgtccaatatggtagccactagtggctgttgaacacttgacatgtggatagtgtgact

SEQ ID NO: 6087 - DNA, 201 bp, Homo sapiens
tgtccatgaaggcaatgttgtatgaacgttctgtccaatatggtagccactagtggctgttgaacacttgacatgtggatagtgtgactgaggagttgaaktttttattctatttaattttaattagtatacattttaaaaccacatctgacgagtgccagctcaaaccgtaggatacatggagaggtgtttagtgtgata

SEQ ID NO: 6088 - DNA, 201 bp, Homo sapiens
agtgcattaaaacaaatacccagagtattcatgggtattcttgttccagattaattgccctggactattatttttatttgagctttgtgatttttgaagtytccatatgtaacagaatcccttttttgttgtaagccatagaagcagctgaaaactgaaccactttgataaagtaagcgtattttctgtaaaggtttatgt

SEQ ID NO: 6089 - DNA, 201 bp, Homo sapiens
ttgagctttgtgatttttgaagtttccatatgtaacagaatcccttttttgttgtaagccatagaagcagctgaaaactgaaccactttgataaagtaagygtattttctgtaaaggtttatgtgctttcagaaactaattcttgtctatacaatcaatgtaattttcttcttatttctgttgtagttaccttatttaata

SEQ ID NO: 6090 - DNA, 201 bp, Homo sapiens
tagtgggaaatacagaaagttgatattagtcaccaatatgagcataaatagctataaggcattaactcttttcaaacgggaattcatgttgaagaaaatgraatgtcaacttgtttattttttatactcttgatcaaatcaatgggcaaggaaagataaaattagctttttgaattaattagttattgggctgaacaaaat

SEQ ID NO: 6091 - DNA, 201 bp, Homo sapiens
atgaggcaagtttaagttgggttctaagtattcaggattcagcatgaagtcactggttgctgcctctgggagtagtagagtaggagagggtttaagaaggwcgctgacaccaggctttcctgttgtacttattcatagagccaggtgcttgggtactggtggtggtgtggggggattgtccattgatcctccttgactttt

SEQ ID NO: 6092 - DNA, 201 bp, Homo sapiens
caaggaggtggaaatgggtgccacactgtggaagaatctgatttcaggcttccatgtgccaggcacttttccaggagctgggttgagtgaagaaaggcaayattcatgctcacgggcttacatttgagtgtggggagatggacactccataataaacataaatgaacagatgtgttcagatgctgagatgtgcttagaaga

SEQ ID NO: 6093 - DNA, 201 bp, Homo sapiens
cctcatactctccgtatatcgctggctagaatggcagatgggctggccagcacacccatggtgggcagtggcctcagtacaaggatggagtctgactgccygtgaccccatgtatcttccctgctgccggaatgatcacatggcttccagaaacgttgtgttcctttagcagcattgatgggagcttcctattgttccaga

SEQ ID NO: 6094 - DNA, 201 bp, Homo sapiens
ccttaagaagtatgttaaatctactctgcttatgccctataattagaataaaacttggattacagtacatgtctttatagcatggtttaatgaatattttrtgctcactcttaagacctgctgctcagaaaaaaaaaagattcctttcaagatagtactgctcattgagaacacacctagtcttccaagggctcagatgga

SEQ ID NO: 6095 - DNA, 201 bp, Homo sapiens
tggatagaagatcaaaccagccacaacattcccataagccaaaacctaatccagagcaaggccctgactctcctcaattttataaaggaagggagagaggygaagaagctgcagaaaaagaatctgaggtttcaggaaagaagctgtttccataaccagaaatgccaggtaaagcagaaggtgctaatgtagaagctgaag

SEQ ID NO: 6096 - DNA, 201 bp, Homo sapiens
aattgtgtgtttatgatgtacaacatgatgtttatatgtacaggctcacctcactttattgtactttacagatagtgttttttttttttttttttttttttacaaattgaaattttgtggcaaccctacattgagcaagtctattggtgacatttttccaacagcgtgtgttcacttagtatctctgtgtcacattttggt

SEQ ID NO: 6097 - DNA, 201 bp, Homo sapiens
aaattgtgtgtttatgatgtacaacatgatgtttatatgtacaggctcacctcactttattgtactttacagatagtgttttttttttttttttttttttttacaaattgaaattttgtggcaaccctacattgagcaagtctattggtgacatttttccaacagcgtgtgttcacttagtatctctgtgtcacattttgg

SEQ ID NO: 6098 - DNA, 201 bp, Homo sapiens
aaaattgtgtgtttatgatgtacaacatgatgtttatatgtacaggctcacctcactttattgtactttacagatagtgttttttttttttttttttttttttacaaattgaaattttgtggcaaccctacattgagcaagtctattggtgacatttttccaacagcgtgtgttcacttagtatctctgtgtcacattttg

SEQ ID NO: 6099 - DNA, 201 bp, Homo sapiens
aatgttctcattggcagtagagtctttcttcagaagttttgctttactttttaaatgactgtcattctgatttcttgtcttctatagtgaggacccaatastgaatattgtagagacctgagtatgtgggttaagctgctaaacaaaagccagctccctctggactcaggccgggtcttttccttcctgtctccatcacga

SEQ ID NO: 6100 - DNA, 201 bp, Homo sapiens
aaaaattgtgtgtttatgatgtacaacatgatgtttatatgtacaggctcacctcactttattgtactttacagatagtgttttttttttttttttttttttttacaaattgaaattttgtggcaaccctacattgagcaagtctattggtgacatttttccaacagcgtgtgttcacttagtatctctgtgtcacatttt

SEQ ID NO: 6101 - DNA, 201 bp, Homo sapiens
taaaaattgtgtgtttatgatgtacaacatgatgtttatatgtacaggctcacctcactttattgtactttacagatagtgttttttttttttttttttttttttacaaattgaaattttgtggcaaccctacattgagcaagtctattggtgacatttttccaacagcgtgtgttcacttagtatctctgtgtcacattt

SEQ ID NO: 6102 - DNA, 201 bp, Homo sapiens
agcctggccttagggggattgaaacaatatatcataaccatcaattagcttagcattttatttttcattttttagtacttctaccctaaaaagacacataytgtctggaacaaagcaaaagcacaatctgtgttttcagggaattgacattctaccagagacctggtagaaaagatactagatgtagagaaagattcacaa

SEQ ID NO: 6103 - DNA, 201 bp, Homo sapiens
gttcaacatgtttttaccattgttattattatttccctcctattctttggttatttgtttttaacattgttaccacccagtccctgtatatataaactggyctggatctctaaaaattgtgtgtttatgatgtacaacatgatgtttatatgtacaggctcacctcactttattgtactttacagatagtgtttttttttt

SEQ ID NO: 6104 - DNA, 201 bp, Homo sapiens
aatacgtaaaacaaatttttgagagagtgggaaaatgaatttgttatggaaacatagaaggatgctgggtggtggggaggtctttctaagatttgtggtcrtaaatttaagaaaatgaaggcatttcttaaaattctttcctaaaagtttacataaaatcagttaattcaaatgaatgtttttctttgactacttccagct

SEQ ID NO: 6105 - DNA, 201 bp, Homo sapiens
ccccaccagagagccagttagccaggacactcctgtttatagcatttccataggaaatgtggtccacaggcacctgccttcctttcccctttgtggattakgtagtagccatgggtcaagtgtttacactaggggagaaggtggaggtgaggtcattctgctggtctccatgcctctgctgtcatgactctctgagcagag

SEQ ID NO: 6106 - DNA, 201 bp, Homo sapiens
atgtgctcctgttccactgtcttgagaacagccactggtttcagtgaccagcctccttttgaagtccctgccattgcaatgcctctgctgtcaaataccarttcattagcaattgttttccaggaggcagaatttttctttcatatgagccctccattctatgcctgtcttctttcctgtttcattgaggcaagggaaata

SEQ ID NO: 6107 - DNA, 201 bp, Homo sapiens
aatatcccttgaagtggtgctggtttggaagctgtgactagggttaagtgaggtcgggggatgtggggctgccaaactgctgaagctctcatctgttagtrtctctggttgcttgagaactactgcagagagtggtgggcttagcacctgacaggtgctctcaaacagagaaaggtgggaacacacttggcacaggtgtac

SEQ ID NO: 6108 - DNA, 201 bp, Homo sapiens
gggctgagttgcactgacccattctactatttttcctggtatatgggccagtatgttttttttcttggccacctaaggtgaagtattccctctttgtgaascgcctgacttctgagggagtcagattgatgcatttggtctgagaaactaacatttttagaagggaagcaattctagttaaaatttcgagtacgtaaatac

SEQ ID NO: 6109 - DNA, 201 bp, Homo sapiens
ttattgacaacatatagcacttttgtaaatgtttagtcatttaattctccagcccagtctatgatgtgggtgactttcacccccgtaagaggagggaacaygcacagggatggtgtctcaggatctcacagtgatggcaggtttgagtctaaagcctctgctctttctactgctagacccttctctctttggatggttgtc

SEQ ID NO: 6110 - DNA, 201 bp, Homo sapiens
aacatttcatcattaaaagtaaacattaacatcactgctttggagataaaatcactaaaatctcaggtattgtcttaagtaaaggctagacttatatttcyatatactcataacgtctgcaaataaggacccaataatcatttgataatattagtaatcatttcagtggagatgatgaaaatgtacaatctccctgaaagg

SEQ ID NO: 6111 - DNA, 201 bp, Homo sapiens
aaaagtaaacattaacatcactgctttggagataaaatcactaaaatctcaggtattgtcttaagtaaaggctagacttatatttccatatactcataacrtctgcaaataaggacccaataatcatttgataatattagtaatcatttcagtggagatgatgaaaatgtacaatctccctgaaaggtggggggaggaagg

SEQ ID NO: 6112 - DNA, 201 bp, Homo sapiens
agggcaagaaccatgtcttggtcttgttgaattctcacattgaactttgtgccttaaacaaaatgggcatggactatgtttttgtacagcattataggacwgagtcttaaaaccacttgaaaatatctacttaaatagtctccacattttttaaataacagctttatagagataacttacacgccaaaaatgatctctttc

SEQ ID NO: 6113 - DNA, 201 bp, Homo sapiens
cttgttaccatgaagctaaaaatgatacaaactaatactgaaattcatagctgaaagaatcatttccattaggtgttgacttgtttatcgttaatttttttctgaccagaatgtaagctccatgagagtaggtgccatgtctgttttatttgtggttatatgttcagtagttagacaagggattgataaatatttgttgaa

SEQ ID NO: 6114 - DNA, 201 bp, Homo sapiens
ttttgacttgaatgggccagaggctactcccttacaacaccactgctccattgtttggtgtttcacaggcgtggaacattcttctttgtactgagccaaamcctttttagccaatgcccagctcataaggggcttgggaagtaaaacattattaaatgttaatttaaaaaaacactatgcaaatctgtatcactgtttact

SEQ ID NO: 6115 - DNA, 201 bp, Homo sapiens
gttttgtcactctagagaaccccgactaataagatgcagtatttatttgtcttccctctgtcaaaccttgagccaaccacttttctcagattgcctgagaaggtatagggaaaagaacatacaagatagatgagacatggaggaaagaactattaatggtggggacagcttctttacatggtgaagaggatgagaaaagcc

SEQ ID NO: 6116 - DNA, 201 bp, Homo sapiens
tgcaacaaataattatccagttttgacttgaatgggccagaggctactcccttacaacaccactgctccattgtttggtgtttcacaggcgtggaacattyttctttgtactgagccaaaacctttttagccaatgcccagctcataaggggcttgggaagtaaaacattattaaatgttaatttaaaaaaacactatgca

SEQ ID NO: 6117 - DNA, 201 bp, Homo sapiens
aacaatgattcctttgaactggaagttaagattgccacctggacactttgggctcctcctacctttaagtcaacaggctaagaagggggttacagtgctgkctggggtgattgacccagactatcaagacgaaatcagtctactactacacaacagaggtaaggaagggtatgcagggaatataggagattcattagggca

SEQ ID NO: 6118 - DNA, 201 bp, Homo sapiens
ggagcttgcagtaagccgagattgcaccactgcactccagcctggacgagagagcgagactctgtctcaaaaaacaaacaaacaaaaaacaaaaaaaaaaactgtgaacaagatatgcttcttgtccttaaagaacgtaacacttaatatacaaatattgtggtaggtgttgctataggagaaaacagagtttggtggatg

SEQ ID NO: 6119 - DNA, 201 bp, Homo sapiens
gtgctttttccacagaaaaaatttatcatgtatgctaggattggaagacatcttagagattatttattctcacctaacacctaaattattagaactctttwaagcatctgcaacaaataattatccagttttgacttgaatgggccagaggctactcccttacaacaccactgctccattgtttggtgtttcacaggcgtg

SEQ ID NO: 6120 - DNA, 201 bp, Homo sapiens
ctcccccatgtccacatagcatctcctcaactctgataacatacttttctagtgttttgtgagctttagttgctgccatcctgcctaggtgttgaagattkccagttctagtaagtttgcattttgcagactctaccatggtatctctgccacctttgctgttagtagttctgagctaaggagttctgggtctcagccaaa

SEQ ID NO: 6121 - DNA, 201 bp, Homo sapiens
ggccgaggcgggcgaatcacgaggtcaggagatcgagaccatcctggctaacatggtgaaaccccatctctactaaaaaaaatacaaaaaattagccgggygtggtggcaggcacctatactcccaggtactcgggaggctgaggcaggagaatggcgtgaacctgggaggcggagcttgcagtaagccgagattgcacca

SEQ ID NO: 6122 - DNA, 201 bp, Homo sapiens
tctaaagtgctgtatttgtgtaatgataacactttttatgctggctctgccggtccaaaaataggggtgtgactattatgtaagggagatcattatgtaargttgtgacctttataatggaacaattcttattcccatactctaagcatgaaactcagccaaataaatgctgccattatgtttgattatggggtaatagtg

SEQ ID NO: 6123 - DNA, 201 bp, Homo sapiens
agctacatgtcctattatgctcagtgcaattttataaagaataatttatactaaacatgcaaaagcatgcctcaggtaaggattaatgcataagcccctasagattaccatttttcacagaatctttgcaacctgagtattttcatgtactgattcaaagcacatcattgaatttgtatttggaagagaataaaatatatt

SEQ ID NO: 6124 - DNA, 201 bp, Homo sapiens
gcagggttttgatggaagtgttttgtgatagtagcttgatatatattcctgacttttagtttgaaaagctcagtgcatctgtgttgtcattttttttttttaaacgaagagctttagtgtctttaattttgaaacacccaaattttaaatctctgtgccaagatggagaggaccattcattaatgtagttttctgcagtgt

SEQ ID NO: 6125 - DNA, 201 bp, Homo sapiens
agctgtttgaaaaatagtaatagaattgaaaatatatttctgtccttaaaaacacctctaaagtgctgtatttgtgtaatgataacactttttatgctggstctgccggtccaaaaataggggtgtgactattatgtaagggagatcattatgtaaggttgtgacctttataatggaacaattcttattcccatactctaa

SEQ ID NO: 6126 - DNA, 201 bp, Homo sapiens
ttaatccaattttccgcccgagggcttcggggtgcttttctctgccttcctatcccccattttttttttgagtcagggtcttgctctgtcacccaggctgkagtgcagtggctcactgcaacctctacctcctgggctcaggtgatcctcccacctcagtctctggagtagctgggaccacaggcacgcaccaccatgcct

SEQ ID NO: 6127 - DNA, 201 bp, Homo sapiens
aacctcagacttcctgcgaaattctatgtctgtcttagatacgtgactgtagtcagttgattcattttctttgacagctcaaaaacagcgaagcagggcasttggaatctctgtctagcctcagctgtttgaaaaatagtaatagaattgaaaatatatttctgtccttaaaaacacctctaaagtgctgtatttgtgtaa

SEQ ID NO: 6128 - DNA, 201 bp, Homo sapiens
acggttgcaaaatacataatgcaagcctaggtattgtatgttcaggacatgatgaagggagaagtgacaatgccagccatatttctcctttttttttttttaatcatgaaagcaaaatcttttcagggaaccctctggtgggttttgcttgtatctcatcagccagaactgtgtccagggcaatgcttagctgcaagagaa

SEQ ID NO: 6129 - DNA, 201 bp, Homo sapiens
ttagcttgcaggtggccaccatctcactgtgtgctcacatgacctctttgtgtacacacacacacacacacacacacatacacacacacacacacacacacggagagagagatggcacgctctctggtgtttcttcttataaagacactaattaattatgagggcccatcctcatggcctcatgtaaacctaattacctat

SEQ ID NO: 6130 - DNA, 201 bp, Homo sapiens
catgctgttctgtgatagtgagatctcatgagatctgatgtttaaaagtgcggcacttccttcaacacgctccttctcctgccgccatgtaagacgtgacwtgcttctctttcgccttctgccatgattgtaagtttcctcaggcctccccagccacttggaactgtgagtcaattaaacctcttttctttataaattacc

SEQ ID NO: 6131 - DNA, 201 bp, Homo sapiens
cttagcttgcaggtggccaccatctcactgtgtgctcacatgacctctttgtgtacacacacacacacacacacacacatacacacacacacacacacacacggagagagagatggcacgctctctggtgtttcttcttataaagacactaattaattatgagggcccatcctcatggcctcatgtaaacctaattaccta

SEQ ID NO: 6132 - DNA, 201 bp, Homo sapiens
attcatttgctctccctttttccctctgcctcctccctccccttctggcccaggcacagtactaggtgtgggggtttacccatgaaggccacagtttctamcttcgggttccaggttagtgggagagagacaggcattaactcacccaattacagcacttctgacaatttgaaaaatacagggcaaagatgtacctaaggt

SEQ ID NO: 6133 - DNA, 201 bp, Homo sapiens
tctaaatgacaacaaagcagtttcaaggacaagaaaaagcttctgttagagcattctccccagctttgtaaaggctctccattctgtgctgccttcaccarccctagtgtgttggcaaccaaaggaattaacccagggccttcatggttattgagaggaaccacatctacctacacattagttatctgtggcagaatgcag

SEQ ID NO: 6134 - DNA, 201 bp, Homo sapiens
gtacaaatgcttgaaaagggccaggagcttcacatgaactgtgtggtccctgttttcagttatttattattttcctgctacctaactcctattgccaactrtattagtttgctagggctgctgtaacaaagtcccataaactgggtggcttgaataacagaattggcctccacagtttgggagccagaaacctgagatcaa

SEQ ID NO: 6135 - DNA, 201 bp, Homo sapiens
gcctctttcagttactgatatacgtttgggtttcctccatgtctttttatggcctgatagttcatttcatcttactattattgagttttaagggctctttstatattttgatatagttgtcctttatcagttgtgtcttttgcaaatattttctcccagtctgtggcttgtcttctccttctcttgaatgtatcttttcta

SEQ ID NO: 6136 - DNA, 201 bp, Homo sapiens
catttcttaaagctaaagtgtgatgctctcctacaacaagaagaagagctgcctggcaggtgaaccacacagatgtccattgcacatgctgtatggtgtcrgtccattgacaccactgcgttctacgtagactgtaactttctcaggggaattagcaacctggtcttattcatcagtgcccagggcatgaaagagctctat

SEQ ID NO: 6137 - DNA, 201 bp, Homo sapiens
agacttgattattttttctctttaaatctgttaacttttataattacattaaggtttaaacacaaaattagtttgaaagtgagggacaggggctgggcgcwgtggcttatgcttgtaatcccagaatttgggaggccgaggtgggtggatcacttgaagtcaggagtttgagaccagcctggccaacatggtgaaacccca

SEQ ID NO: 6138 - DNA, 201 bp, Homo sapiens
ggggttcattctttcattatttcttcttgtttcttcaaaattatatattactttttttattgatggaacgtatttaatggaattgcgcccatgttattagkgataattattttcttagcagtagcagtattttgcttcagaaagaatctactcaaaaattataatggagacttgattattttttctctttaaatctgttaa

SEQ ID NO: 6139 - DNA, 201 bp, Homo sapiens
aggaacagaaatgtgaatgtttttatgacattcttaaggtaaataggaaagtactttactgctgagatgggcatctaatgaatctagaatggaccaggtgkggttcattctttcattatttcttcttgtttcttcaaaattatatattactttttttattgatggaacgtatttaatggaattgcgcccatgttattaggg

SEQ ID NO: 6140 - DNA, 201 bp, Homo sapiens
gttgatctaaaaataatatcctttaataattgtctcattagaaatacaattgaggaaattaataatttggaaatatgtaattcttgaagtctctgcttatygctatataatcaatattactgtatatacattcactttttaaaaatttataaatatttttagaaatgaataggtcaattcacaagtaatttttttgtttct

SEQ ID NO: 6141 - DNA, 201 bp, Homo sapiens
aatcatcgagcccgccctcatctacttttataagtagaaaatgagacagaaattcattatatggaaaaattgacataaaacatcatctcttgaagttatgrtgcataatttccttatgattaaatttacttgtctagtaaatgaaataaagtcaaatatgattgattatctgttgatctaaaaataatatcctttaataat

SEQ ID NO: 6142 - DNA, 201 bp, Homo sapiens
ccaaagtgctaggattgcaggcgtgaatcatcgagcccgccctcatctacttttataagtagaaaatgagacagaaattcattatatggaaaaattgacakaaaacatcatctcttgaagttatggtgcataatttccttatgattaaatttacttgtctagtaaatgaaataaagtcaaatatgattgattatctgttga

SEQ ID NO: 6143 - DNA, 201 bp, Homo sapiens
gacagagtctcgctttgtcacccaggctggagtgcagtggtgcgatctccgctcactgcaacctccgcctcctgagttcaagcaattctctttcctcagcstccccagtggctgggactacaggtgcatgccgccaagccggctaattttttttgtattttagtagagacggggtttcaccacgttgcctaggctggtctc

SEQ ID NO: 6144 - DNA, 201 bp, Homo sapiens
aggggtgtaagataattatcaggtctccatcaaagatattgctgcaaaaatttctctatgggtaaaagactaggttaaataatatctatagtcttttacakgtctatgagctataatttaaaattttattaactttcagaactcctgatagcttacactaataatcttaaaatataatacgggtaacatttaacacttaca

SEQ ID NO: 6145 - DNA, 201 bp, Homo sapiens
tgattaatgaattgggaagtgtaggaaatcatagaattgttgcagtgaggatggaaggtggtgtccaaagaggaaacttttggagatgatatggttactaracaagacaatttccagagagtgactatgatagtatgtgtcaagatgcgtgaatgattttttttttttaaatggtgattggggccaggcatgatgtctcac

SEQ ID NO: 6146 - DNA, 201 bp, Homo sapiens
caaatcacgacacataagaagcactcaatgcatgctggccactgttagtgttttggttattgttttgtttttatcctggaacagagcgaagctaagaggtrgtggttctctccttgagggtgaataagaaagaattaactgggcattaccaatgttgacaatgtggatttctgggccccactcatgagagatgctaattca

SEQ ID NO: 6147 - DNA, 201 bp, Homo sapiens
attgggaagtgtaggaaatcatagaattgttgcagtgaggatggaaggtggtgtccaaagaggaaacttttggagatgatatggttactagacaagacaayttccagagagtgactatgatagtatgtgtcaagatgcgtgaatgattttttttttttaaatggtgattggggccaggcatgatgtctcacacctgtaatc

SEQ ID NO: 6148 - DNA, 201 bp, Homo sapiens
tgccatactttatctccaaagacaacactactgacccactgtcagtagaccatgggctgtgggttgctttccagcagagaggatggattttcttcagttcygtctactcatgcttgacagagatttcctttgggacaagtaccacgccccaaggagcccaagcctggagaaagggaggctggatcatcatggctgacgctc

SEQ ID NO: 6149 - DNA, 201 bp, Homo sapiens
ttttacaggtgaagaaactgaggatttaagaggttaacctgctcgaggtcactaggagctgagaaaggttttggtcaggtttggcaaataggttctacttscatatataaggagtagctaagatagtactgcttgattggagagctcttattttattccctgagtaatgtacatctatcgatttatatataaagtcatttc

SEQ ID NO: 6150 - DNA, 201 bp, Homo sapiens
ttttattttgaagtcccttctcttagcttgcaggtggccaccatctcactgtgtgctcacatgacctctttgtgtacacacacacacacacacacacacayacacacacacacacacacacacggagagagagatggcacgctctctggtgtttcttcttataaagacactaattaattatgagggcccatcctcatggcc

SEQ ID NO: 6151 - DNA, 201 bp, Homo sapiens
caggtcagcagatccgtggtggtctgctggggcttgtgcccctcagatgccttgtctcccctgggtggagcttttggggtgggtatagtggttcatgggtrcatcgctgaatttgcataaggctagcatggcaatggactctcaaaatatctgtggtcataaataggaacttacttaaaattttaggcctgggcaggaaca

SEQ ID NO: 6152 - DNA, 201 bp, Homo sapiens
agttttattttgaagtcccttctcttagcttgcaggtggccaccatctcactgtgtgctcacatgacctctttgtgtacacacacacacacacacacacayatacacacacacacacacacacacggagagagagatggcacgctctctggtgtttcttcttataaagacactaattaattatgagggcccatcctcatgg

SEQ ID NO: 6153 - DNA, 201 bp, Homo sapiens
actggcaggcttttcattacagcttcaatcttgttactttgttattggtctgttccatttttgggtttcttcatggttcaatctgggtaggttgtttgagyctaggaatttatccgtttcctccacatattccaatttattagcatataattgctcatagtagtcactaatgatcctttaaattcctgttgtatcagttgt

SEQ ID NO: 6154 - DNA, 201 bp, Homo sapiens
ttattgtcattttattaggtccagcgaagtatagaaacctagacatgggccaggcacaggggctcacacctgcaatcccagcactttaggaggccaaggcrggcagattgcttgagttcaggaattcagaccagcctaggcaacatggcaagaccttgttgctacaaaaaagtaaaagaaaaagaaaattacctcccttta

SEQ ID NO: 6155 - DNA, 201 bp, Homo sapiens
ggggtgtaagataattatcaggtctccatcaaagatattgctgcaaaaatttctctatgggtaaaagactaggttaaataatatctatagtcttttacagktctatgagctataatttaaaattttattaactttcagaactcctgatagcttacactaataatcttaaaatataatacgggtaacatttaacacttacat

SEQ ID NO: 6156 - DNA, 201 bp, Homo sapiens
tagcatatgttgaaactgggataaaccccacttggtcatgatgaatgatctttttaatgtattgttgaattcagcttgctagtattttgtgaggatttttstatcaacattcgtcggggatattggcctatagttttcttttttgatgtgtctttgtctgattttggtatcaggataatactggatttatagaatgaattc

SEQ ID NO: 6157 - DNA, 201 bp, Homo sapiens
gagccttgacaaggagccactttgggtgtgctggcaggtcagcctgcgggctttgagaagagccttccataagcaccagggcacacattcaccaatgcaargcaaagctctgtggaaaagcctggtgggttcatccctgtcccaccctagatgtacccccagaacagcagaaatgactgtgctccccaccttgtgaaaagg

SEQ ID NO: 6158 - DNA, 201 bp, Homo sapiens
tcttatgctgttatctgtgttacctaatttacacccttgtctgacatttcttatgtgtacatattgtcattcaattatatcataactgctgaggactggckgtctttgtctgtagctcctgaaacatagtagaccatgagtgcttatgaacagattagctgtctggtttttgactgatatgaagaaagaaagtgtgaatgg

SEQ ID NO: 6159 - DNA, 201 bp, Homo sapiens
ctgtttttatgccagcaccctgctgttttatttgttattgccctgtagtataatttaaagtcaggtaatgtggtttctccagttttgttctttttgctcargatatctttggctagttggggtcttttgtagttccatataaatcataggattactttttctacttttgtaaataatgtcattggtattttgacaaggatt

SEQ ID NO: 6160 - DNA, 201 bp, Homo sapiens
atacgtgcaaggagaaggaataattggaatctgttttttgtcaaccctgactctgccctctacagccttctctttgttatatcatgggctgggggagtgasaagcaagagaaaaggcagaaagaacatgagaggttggaaagaaaggttagaggtgtgtgctaagttgattgtgctaatttgaaaagagacaatgaatcaa

SEQ ID NO: 6161 - DNA, 201 bp, Homo sapiens
cctcctgttcatcccacttcaggctgccctctgtatcagcgatcgtcatccatttttcttccgtggagtgcaatgctcatacatgagacatattcctatgsgccactcaaagatcgaagaaatagaaacatttagtgagaaagttaagcatttaattattcatagtcttccacaggccctgcagagccacacacaattgga

SEQ ID NO: 6162 - DNA, 201 bp, Homo sapiens
ttctgggttatctattctgttccattggtctaggtatctgtttttatgccagcaccctgctgttttatttgttattgccctgtagtataatttaaagtcargtaatgtggtttctccagttttgttctttttgctcaggatatctttggctagttggggtcttttgtagttccatataaatcataggattactttttctac

SEQ ID NO: 6163 - DNA, 201 bp, Homo sapiens
aatacaataaacatcagcccacccgtaggaggcgtgcaagccggtagaaacactgtagcaccacagtcatgaaatgatgtgagcatattattttttactgsaaaaagcagaatttggaacatgagccctgcattgcaggcaaatggtttgggagctctagcatgaattctagtgttcactaatcagctcaaggcagaaaga

SEQ ID NO: 6164 - DNA, 201 bp, Homo sapiens
tctctgatgtctttctttcctgattcatatgcttcttcctagaagtcatgatcttggaaactgtggacccaacctattcttacataccttttggcctgaarcgaaatcccttattctcccttcattccccaccccattcctccctccacccccatgcctctccatctctcttcccctgtcagggttgggtgcatgagtggt

SEQ ID NO: 6165 - DNA, 201 bp, Homo sapiens
catttattaaagagatgatttttctccaatatatgttcttggcagctttgttgaaaataaggatttgtttctgggttatctattctgttccattggtctargtatctgtttttatgccagcaccctgctgttttatttgttattgccctgtagtataatttaaagtcaggtaatgtggtttctccagttttgttctttttg

SEQ ID NO: 6166 - DNA, 201 bp, Homo sapiens
gccttggagaaaagactttaatatcaaaaggaacacgtgaaatagtcctccctacatgcagagatattttgaagttacaggcagtgtcaggaatacatctyagaaaaattactgatcattttctaaaatgcccttcagatggtatggcttttaatatttagaaattttgtgttacatagtgggttccaatgtagtttttct

SEQ ID NO: 6167 - DNA, 201 bp, Homo sapiens
tttcattcttttgcatatggatatccacttttcccagcatcatttattaaagagatgatttttctccaatatatgttcttggcagctttgttgaaaataargatttgtttctgggttatctattctgttccattggtctaggtatctgtttttatgccagcaccctgctgttttatttgttattgccctgtagtataattt

SEQ ID NO: 6168 - DNA, 201 bp, Homo sapiens
gtatggtttcctttctctaaacacagtcctgctgttagtttaaccccattctaagttaaaataatttttccttgctattctaaaagactgcctttgagcargaaaattaagccttttaatgcagaagacttcagctctgtaagcctcatactctccgtatatcgctggctagaatggcagatgggctggccagcacaccca

SEQ ID NO: 6169 - DNA, 201 bp, Homo sapiens
tgctgtagaagaggtggcagctgttaatagccaaatacaagacttgacaagctatcaatttcgtcaagcaaatgagtagcagtgcagtgatgtaaaaccarttccatatttgactaaattccctcttttaaaaaagctactttattactttatttacaggcctagccttggagaaaagactttaatatcaaaaggaacacg

SEQ ID NO: 6170 - DNA, 201 bp, Homo sapiens
tctgctctctccatgagttcaattgttttaatttttagttcccacaaataagtgagaacatgcaaagtttatatttctgtgcctggcttatttcacttaasataattacctccagtctcatccatgttgctgcaaatgacaggatcttattctttcttatggctccagtactccattgtgtatatgtaccacattttcttt

SEQ ID NO: 6171 - DNA, 201 bp, Homo sapiens
cattgcaatgggaggtaacagtatggtagagtgttctcttttcatgggtttatggtcatgggagggctctcagtctcctttgaagaagacttcaattatgsgagatgataaaaggagatcctcagaaaaaaatttaaggatgatgagcagtgtttcataagaaaacaggaacttttgccagaatgcatagctgaacgtgca

SEQ ID NO: 6172 - DNA, 201 bp, Homo sapiens
ggaatataaaccccttttaacagtagcccagttgggcttctacaaatatggagttctctttcagatacttcaaaatactaggccaaaaaaaaaaaaaaaaaagttcctagcagtaaagttgtaatatatcagacataagcagaaattcccaagacttcacatacgtaatctgtgatcagcacaaaatgatggtttttttcc

SEQ ID NO: 6173 - DNA, 201 bp, Homo sapiens
gaggtgaccttttctgatgtatatgccttcatttttctctcctttctgcaccagagcttatcatgtacagactaaaaaagcaacatcaataaaaagcaacrtcaacaaaaagcacaaatgttttgctttggctccagaaacaatggaaactaaagcaaaatgaaattctttctcactgtttagaaatattgtgcattgaga

SEQ ID NO: 6174 - DNA, 201 bp, Homo sapiens
agccagtttcagaggtgaccttttctgatgtatatgccttcatttttctctcctttctgcaccagagcttatcatgtacagactaaaaaagcaacatcaayaaaaagcaacgtcaacaaaaagcacaaatgttttgctttggctccagaaacaatggaaactaaagcaaaatgaaattctttctcactgtttagaaatatt

SEQ ID NO: 6175 - DNA, 201 bp, Homo sapiens
tcttagagattcagaattttcattctttcagaaaactattccattagagaatgacaatgaatcttcccagctttaactcttgtggtatgtcttttagacascataatttgtgatgcacagttagtgcttatggggaaataattgaatagattaaaagcaatgtgtttacacatgtgattttagctttcattattaatggag

SEQ ID NO: 6176 - DNA, 201 bp, Homo sapiens
tctaattagaatctcatttctatattctctgacaccgaaatcttctcccttaaatatcgctgctgaccatattaaatttgagctaacaaggggatactgartgatgaatgttttgtttatagaatgcgtttatttttggtaaagggaagaaaggttgcttttgatggcaagcaggaaagagccatcccaaaactagcttaa

SEQ ID NO: 6177 - DNA, 201 bp, Homo sapiens
agttgagcatccactgtggaagaatgtaacacagtggttgtgggggcagtcaggtgatgagacagtaagatgagcttggtcctggttagaaacctgtgccragtttggctttgaatttgacacagcagggaaaaaggaatggagctttttgagcaggacagtgaagtgctagggtaagtgttttagaaaagaaactatggc

SEQ ID NO: 6178 - DNA, 201 bp, Homo sapiens
gaaacaaaaatgacaaagattattactataagggaaaaattacttcatgatgattttcaaattatttgatctcgacaataattatattagaaagataaaaygtaacattaatattagaacattaagacttttctacatagtattaagaagtcattgttaatacatgggaactggaacgctttttttctttggcaaaaatta

SEQ ID NO: 6179 - DNA, 201 bp, Homo sapiens
ggaaagaacaagccagttagagaaatattacttatgaaaactcctgacatttgcttggctgaacaccagagagagggctagagtgaatacctgggctctcygaagacctcttgaagctcttattccagcacagttgccctgctcagcacagatacagacacatactcacacagacacatctgcacacacactccattgaag

SEQ ID NO: 6180 - DNA, 201 bp, Homo sapiens
tataacattttatatttatagttactcttatcaagagatggatcaaacctattgccactattattaatattctatcagttttaaccagtgtgataaacatkaaacaaaaatgacaaagattattactataagggaaaaattacttcatgatgattttcaaattatttgatctcgacaataattatattagaaagataaaac

SEQ ID NO: 6181 - DNA, 201 bp, Homo sapiens
attgtagacattttgttttgaaactgattttaagcttttgaaacagtaggttgacttgaagaaaatggatgacttggagttgctgtatatttatactcaaygagtgttaagtttctgtgttttctgtttccttatatttttctcaatgactcagtccttcggaagcaaagggatgcacacaatgtaggcaggatttttata

SEQ ID NO: 6182 - DNA, 201 bp, Homo sapiens
aaaaatcctactcaacattctgttacactacaatttcttagtatttgcactgttgacatgagaaataatgaatatttttgattaaatatgttttttttttwaaaaaaaaccacagggcaagtagaagttttgatattataaaagagaacttaagaagaatgtttcaaaatatcaagaatttaaaattactgttgatgccgt

SEQ ID NO: 6183 - DNA, 201 bp, Homo sapiens
aacctgactcagtaagtatagaattaatcagaagtgaaatcaaatagtcgtgtctcattaagtgttcctcaaatgatggaaatcttagctctaatgctgtsttttattggaatctaacatcaactgatggtttttacttttttattttgcagggctggagcgaattgctcgggattcatcttatgaacaggaaggaaaggt

SEQ ID NO: 6184 - DNA, 201 bp, Homo sapiens
acctcttgaagctcttattccagcacagttgccctgctcagcacagatacagacacatactcacacagacacatctgcacacacactccattgaagacctrgacttaggaaaataatatggaaataatatgggacacacagtaacgaaggctataaagggagaacagcacatacatatggggtgcaggtagtggtcgaagg

SEQ ID NO: 6185 - DNA, 201 bp, Homo sapiens
actcaataaggtggaaaaaagataatgaaactatacatcttttatttactttatatctttttgttgctaatgaaatagttttactctttccaaataaactyaatatccagtttaaaaacctgactcagtaagtatagaattaatcagaagtgaaatcaaatagtcgtgtctcattaagtgttcctcaaatgatggaaatct

SEQ ID NO: 6186 - DNA, 201 bp, Homo sapiens
ctcattcactcattccatcttactgaattaatatttttaagtgccccgatttgtgtgttgagccagatgctgcaaaaaaaaaaaaaaaagtataatatgakggttcagcatttagtgctggcaggatgggcaacaaacagacataaaattctcatgaaacagtggaagaaagcataagtttgagaacaaatgatgcagata

SEQ ID NO: 6187 - DNA, 201 bp, Homo sapiens
tttatatttcatttaaaatatatttcttttccatattaaattataaacaccaacctaaaagtaatctccagtgccaatgagcagccctaaatatgcccaamcacaggtacatttattctgaatgacattcattttgaggtatctacatctttttaacagaaattctaaatagaaaattgagttcaaaaagaaaacaaattg

SEQ ID NO: 6188 - DNA, 201 bp, Homo sapiens
gcttattgggccatcattgcattgatgttagaagttttatatgcctaatttcaggacaattaaattagccctctgacattttaacttagaaaactgaactstatcctgagaaatgggaaattctttcttatttgcagatctttcgtgtctttctggcttctacccttgtcatcagctccaggcctccctgtgtgtctaagg

SEQ ID NO: 6189 - DNA, 201 bp, Homo sapiens
aggaaatcagtgcacagggctgtggatgctggggtggggagggcaaggagggcagcatctacttaccaccaggtgaagaattatttcacattttaacagcmctttgccccatattagtgcacactggcttttttaagtatagagaagtatggagcacgttctgtagtctcagtcgaggtttagagttcattcatccagcat

SEQ ID NO: 6190 - DNA, 201 bp, Homo sapiens
tttcattttttagtttggatagctttatttcatttatattcatgtagcccaggcatctagtgagttttgctggtgtataaattaatatttacaggtaaaaycttgctgaaaataaaatagattaagtggagaatgtttttcccacagctttcgtctctaacaaaaatgaaaaaacccagcaccactcctttaccgaatgcc

SEQ ID NO: 6191 - DNA, 201 bp, Homo sapiens
cctttcattcatgagctgtatagccagccttgggcatgtgacttagactcaggttctttatctaccaacttgatagagttctgagatcatcaaggaaattrcatgtacaaaaatcctagaacattgactggtacatattaagtattgaacgaatgtgataataataatttttgttttgttttgccagtacaaccagcctac

SEQ ID NO: 6192 - DNA, 201 bp, Homo sapiens
gagtagtagagtgcttggcaagctaccaacttgttaatgttttgcttagatctatggcaaagcactaaacaaattatttgcctcagttttatcatgtctamaatgaaaacagtagcacccaccttatatggttgtaataagcattaaatgaagtaatacaacaaagccctttgcccagtgtttggtacacctgagatctat

SEQ ID NO: 6193 - DNA, 201 bp, Homo sapiens
tggaatataaaccccttttaacagtagcccagttgggcttctacaaatatggagttctctttcagatacttcaaaatactaggccaaaaaaaaaaaaaaaaaagttcctagcagtaaagttgtaatatatcagacataagcagaaattcccaagacttcacatacgtaatctgtgatcagcacaaaatgatggtttttttc

SEQ ID NO: 6194 - DNA, 201 bp, Homo sapiens
tgtaactcaggataaaacattttgctttatttttcatttgccacatgcatatcttgactgtttacacggttatcattcaatgtagatacacaattaattgytaagaaagaaattaaatgcattgtcaatgaatttattttatttacttcattccaataagaaaagccaccattcttgaggggctcacggttcttttccatt

SEQ ID NO: 6195 - DNA, 201 bp, Homo sapiens
tcctgagaaaggtaagcataaagaaaatacagtgaatactgtatatatttttgttagtaatgagaataaggttggttaatatgttagcatcagaatatgartagtattaaaaccaaatagaataatttagatttgatagtgtaggcaaaagagagtcattgtagtttcttgatgtgttactaggcttatattctagtaagt

SEQ ID NO: 6196 - DNA, 201 bp, Homo sapiens
ctttatctcccaagatgtcagctatgttaagaaacgagataccattcaggatggaggaaggagatgtggcacccatgcctagattgggtgataacctaaayctctgctctcctgactgtggttttatcctatggttagacttagaaaccaccagtactcctaagaatttaaggaattgatggccaagtttggaaaaatagg

SEQ ID NO: 6197 - DNA, 201 bp, Homo sapiens
agatggtgccttgtctgattatcctcactgcacaccaagaggaatgatcctttacatttctgctgtggcccataactcaccaagagtcttctcatctacartctcatttggacctttcagccaccttatgagatgggctgatgcactttgtcttaggtgcttatatgtcaatttgctttacattaatttgcatttataatc

SEQ ID NO: 6198 - DNA, 201 bp, Homo sapiens
atatgaaagaaaagaagactctaagccatcaatgttacttgtactgtagttgaggggaaatgaccaaaatcctgtaaaataaccacgagcaatataaaacygtgtaaaaagggctacagtgtggtcctggggtttaaaagagaggctgacttcatccaaggaagctgcagttatcagccaaggtttctcaatcagctctgt

SEQ ID NO: 6199 - DNA, 201 bp, Homo sapiens
atttccccttattattatactatcgtaaataacaaagctaggattttagtctctatttgtggtgctcctcagaacttttgttcttgtcatgacatcatgcygtcagctcgtgttagaccggtcttcttgaggacatttcagttcttctgccacattcaggaccagagttacaaggaaaaatcctggcctgttcccagggta

SEQ ID NO: 6200 - DNA, 201 bp, Homo sapiens
ttctgggaacaggaagagcctagatttgaataaattttgagatggatattttaaaatgaatagggccaagtcttaaatgtcaaagtgggactgctcttaggctcaagtggctgagaagctataggatttggccaagtttctacaaaggagctgattcctctcaggaagggggagttgacatagcactgttaggggaaatgg

SEQ ID NO: 6201 - DNA, 201 bp, Homo sapiens
tttctatttttttaaataaagttgcagtaaattttaatatcgtttcagcgccaaaagaaaaatacccttaggattcaattgtttaaaaaaaaaagaaaaaraaaaaaatcaccaattctggcttacagaggccacaggtttgatggtggagttgtggttgagcatgaacagctgaataaccccaggggtgggtggcagccc

SEQ ID NO: 6202 - DNA, 201 bp, Homo sapiens
caaaagaagacatttatgcagccaaaaaacacatgaaaaaatgctcatcatcactggtcatcagagaaaggcaaatcaaaaccacaatgagataccatctyatgccagttagaatggcaatcattaaaacgtcaggaaacaacagatgctggagagaatgtggagaaatgggaatgcttttacactgttggtgggagtgta

SEQ ID NO: 6203 - DNA, 201 bp, Homo sapiens
ggtgctgatactcgtgagtaaaatagattaatatgaattatatgaaataggttgggctctgtagtcagactgcccgagttcaaactttgacctaatgcttrttaactgtgttaccttaagcaagataatttatctctctaattcttaagctttcttatctgttaaacaacccaggctgggtgcggtggctcacacctgtaa

SEQ ID NO: 6204 - DNA, 201 bp, Homo sapiens
caacctacagaatgggagaaaagttttgcaatccacccatctggcaaggcactaatatccagaatctacaaagaacttaaacaaatttacaagaaaaaacyatcaaaaagtgggcaaaggatatgaacagacacttctcaaaagaagacatttatgcagccaaaaaacacatgaaaaaatgctcatcatcactggtcatca

SEQ ID NO: 6205 - DNA, 201 bp, Homo sapiens
gtggtgctgatactcgtgagtaaaatagattaatatgaattatatgaaataggttgggctctgtagtcagactgcccgagttcaaactttgacctaatgcytgttaactgtgttaccttaagcaagataatttatctctctaattcttaagctttcttatctgttaaacaacccaggctgggtgcggtggctcacacctgt

SEQ ID NO: 6206 - DNA, 201 bp, Homo sapiens
ctaaatttaaacataatttcacaatgagatttagaaaatataatcttttaatttgcatatttgttaaaaattatttagtgcctcatagagtgccaggtaaratgatttataattgaaattacattgtaactaatatcttttctgggcatacattttataacaataatcttgcactcagattttaataatagagatatgtta

SEQ ID NO: 6207 - DNA, 201 bp, Homo sapiens
gaaatcataacaaactgtctgtccgaccgcagttcaatcaaattagaactcaggattaagaaactcactcaaaaccacacagatacatggaaactgaacartctgctcctgaataactactgggtaaataatgaaatgaagacagaaataaagatgttctttgaaaccaatgagaacaaagacacaacgtaccagaatctc

SEQ ID NO: 6208 - DNA, 201 bp, Homo sapiens
gtcttcagtcggtagttggtaaaaagctttaactgaatactcctgttgctcttgcatcaaggtcttgagtccagctctgaccttgtgctctggcttcagcraggcagcttttctcctgtttctaggaagaaatccttctccatgtgtgccccagttctagttgaaggttttccctcaacctgaccctagagtgactaacct

SEQ ID NO: 6209 - DNA, 201 bp, Homo sapiens
tgctgtattcaggagacccatctcaaatgcaaagacaaacataggctcaaaataaagggatggaggaagatctaccaagcaaatggaaagaaaaaaaaaaagcagaggttgcaatcctggtctctgataaaacagactttaaaccaacaaagatcaaaagaggcaaagaagggcattaaataatggtaaagggatccattc

SEQ ID NO: 6210 - DNA, 201 bp, Homo sapiens
attaggagatgtctgttcaaattatagattattttaacgtatttatctagtggtgctgatactcgtgagtaaaatagattaatatgaattatatgaaatakgttgggctctgtagtcagactgcccgagttcaaactttgacctaatgcttgttaactgtgttaccttaagcaagataatttatctctctaattcttaagc

SEQ ID NO: 6211 - DNA, 201 bp, Homo sapiens
aacagaccaggagacaaaaataacatctgaaaaaattcttgtcactatgctcaagaaaatattattaaaacaagataccatgttagaaaaaaaaaaaaaaaggaaacgaaaggcctcagggtagtttctggagatccactgattaaggatatctagaatggcctttgggagaagttttagatagaagcctttctctctaga

SEQ ID NO: 6212 - DNA, 201 bp, Homo sapiens
cttctcagccctttgagagattcagaaatcacctccctggaaatgcccccagattgtcccttcctaattaatatgttagtgttcttccagagctaagcatygaagatgtgcacctttctgaaagattgcagtggaggggcagggccattccctttccttgtgctgccacagtgagtccctgcagcactggggtctttctcc

SEQ ID NO: 6213 - DNA, 201 bp, Homo sapiens
actgcaagctccgcctcccgggttcacgccattctcctgcctcagccttctgagtagctgggactacaggcgcccaccaccacgcctggctaatttttttrtatttttagtagagacggggtttcaccgtgttagccaggatggtctcgatctcctgacctcatgatcagcccacctgaaaaaatgcttttcataacatca

SEQ ID NO: 6214 - DNA, 201 bp, Homo sapiens
ttattttagaagtatgatttatctaaaaattcataaaatataaaatatacatgattagtctaaaatcatgaaactcttaattataatatcatacattaaawagtttatgaagcattttcacaaggtgaaatccaaactagtctaacttcagataccaacctttgaccttggatggactctaggtttaaaaccagctctgct

SEQ ID NO: 6215 - DNA, 201 bp, Homo sapiens
cgctcagaatggggcttgtatataatgatccttatgtagaaacaagcacacttgtcgacagatacacacataagtgagtggatgaattgattgtccaagtkcattttagaatatttcaagtacaaatatcaggttgtctctaccagatatccacttattttagtgaatggtatttttaaagacaagttagatgttgaaagc

SEQ ID NO: 6216 - DNA, 201 bp, Homo sapiens
cagtttgtcaccatatgcttatgttgatttatggggagattcttacagtgttcattgattcacatgtggcaccagttactaggcagacttctgaactcttwaaaagaacaaaaatgtacaaagttgaatatgtttaatcaacagtcaaaataattggagtttataactagaaaagaaaatgaataatttgaatagtaaaat

SEQ ID NO: 6217 - DNA, 201 bp, Homo sapiens
gcttcatttgtaaaggaatatttatctcctttagtaaaataaatcagcatatagaatatcactaacttttagttctgagagagaaaccttctggtgggaaraggtgaatgtcaacagttctctactttcctcttggggttctctcatctgctttgtcctaagtgtacagtcctcaccctggcagcaagtcatactcgtgaa

SEQ ID NO: 6218 - DNA, 201 bp, Homo sapiens
gaaaaatacattgtctaaacagcctgaaaagaaatcaaatgatccacttttaagtttagaaatggtaatagtattcagtctttcagtttgtcaccatatgyttatgttgatttatggggagattcttacagtgttcattgattcacatgtggcaccagttactaggcagacttctgaactctttaaaagaacaaaaatgta

SEQ ID NO: 6219 - DNA, 201 bp, Homo sapiens
acgttaacactaactttagaaactatagcataatgaaattttacagccaattaggttgatgagtcactgtcagcttcctaaactcctcttttagatgaatragagaatcaaatataggaagtgaggagcaaattctagctgctgtaaaatcttaagtgtcatcatgaggttgaagtgttaaggaacagaaaaatacattgt

SEQ ID NO: 6220 - DNA, 201 bp, Homo sapiens
gtttttgtcaggtttgtcaaagatcagatggttgtagatgtgtggttattatttctgagggctctgttctgttccattggtctgtatctctgttttggtascagtaccatgctgttttggttactatagccttgtagtatagtttgaagtcaggtagcatgatgcctccagctttgttcttttggcttaggattgtcttgg

SEQ ID NO: 6221 - DNA, 201 bp, Homo sapiens
aaaaatacttcttaatctacaaatttagattgtgggattatttatactccaagctgagatggttgtaagaaaaaggcaaccaattggatgtttgatttccscagaattaagcaactggtatgacttccatttgttttttacttgaattgaccaactgcttattggaccatcattgcattgatattagaagttttatatgcc

SEQ ID NO: 6222 - DNA, 201 bp, Homo sapiens
gtttggacaaaccgcattggatcttctcagccctttgagagattcagaaatcacctccctggaaatgcccccagattgtcccttcctaattaatatgttaktgttcttccagagctaagcattgaagatgtgcacctttctgaaagattgcagtggaggggcagggccattccctttccttgtgctgccacagtgagtccc

SEQ ID NO: 6223 - DNA, 201 bp, Homo sapiens
gtgaggattttaccctatcatattttaatcatacctgctaaatgcccaaggaagatgtgatggcagacccagagagaccctgcatgcgttggtgggtgtgytccacctgacatcaccttgacatcaacctggccaggagacctcatttggagcagaagtgtttggacaaaccgcattggatcttctcagccctttgagaga

SEQ ID NO: 6224 - DNA, 201 bp, Homo sapiens
actacatgtgggcatgccacaaacaatattcagtattgttcagcatgttataaatactatataaatgttatcaaaatgtatgcattgttttataacctgcytttttttttttttttttttttttttgctcaacattatgtttttgagatttctctgtgttgatacatggaactccagtttattcattgtaactgtgagtag

SEQ ID NO: 6225 - DNA, 201 bp, Homo sapiens
acttcttttgtctctgtatggtgtgtttttttgtactaataactcatatttattttgctgaaagttagatgacaggagtcatgaaaagtgtttcatgcacrtaataggcagtgaataaatgttggctatcatcaccattaggctgttacccatgagggcaaggactttatttgattttgctcaccattttctcttcagcac

SEQ ID NO: 6226 - DNA, 201 bp, Homo sapiens
cagtaagtattaactgtatgctgttatgtgccagatattgggaattttttgtataataaccaagatgaaatgtatattcccccccccccctttttttttttgagacagagtctcgctctgtcactcaggttagagtgtaatggtgtggtcttagctcactgcaacctctgcctcccaggttcaagtgattctcctgcctca

SEQ ID NO: 6227 - DNA, 201 bp, Homo sapiens
ctatcgtaaataacaaagctaggattttagtctctatttgtggtgctcctcagaacttttgttcttgtcatgacatcatgctgtcagctcgtgttagaccrgtcttcttgaggacatttcagttcttctgccacattcaggaccagagttacaaggaaaaatcctggcctgttcccagggtaagcagagaggagagcaact

SEQ ID NO: 6228 - DNA, 201 bp, Homo sapiens
tcatgcacataataggcagtgaataaatgttggctatcatcaccattaggctgttacccatgagggcaaggactttatttgattttgctcaccattttctyttcagcactcagcataatattgagtctgtaataggttctttaaaaaatatttgtttaatgactgaatatatttgaatgaattgcgtaggaggatgtgatt

SEQ ID NO: 6229 - DNA, 201 bp, Homo sapiens
tcagtaagtattaactgtatgctgttatgtgccagatattgggaattttttgtataataaccaagatgaaatgtatattcccccccccccctttttttttttgagacagagtctcgctctgtcactcaggttagagtgtaatggtgtggtcttagctcactgcaacctctgcctcccaggttcaagtgattctcctgcctc

SEQ ID NO: 6230 - DNA, 201 bp, Homo sapiens
cccagccaactatataacattttctttccttgtcagttcacagtcatttgaagcagatcctttttaacggtgccacattacagaactatttaatgtattayggtcgattttttgtggacaagatcaattataccagactgttgcaatctgctctggaagggggaagtaaattttaaaaaaactggaaaagaaagcatttat

SEQ ID NO: 6231 - DNA, 201 bp, Homo sapiens
cctgttaattcagtaagtattaactgtatgctgttatgtgccagatattgggaattttttgtataataaccaagatgaaatgtatattccccccccccccyttttttttttgagacagagtctcgctctgtcactcaggttagagtgtaatggtgtggtcttagctcactgcaacctctgcctcccaggttcaagtgattc

SEQ ID NO: 6232 - DNA, 201 bp, Homo sapiens
tcctgttaattcagtaagtattaactgtatgctgttatgtgccagatattgggaattttttgtataataaccaagatgaaatgtatattcccccccccccctttttttttttgagacagagtctcgctctgtcactcaggttagagtgtaatggtgtggtcttagctcactgcaacctctgcctcccaggttcaagtgatt

SEQ ID NO: 6233 - DNA, 201 bp, Homo sapiens
gctagttgtctatgcctgaaaacagcataaacctcaccatgtctcagtgggaagaagagcggcactgaagacagcttgagtaagaactgagcaatcaaagsgaatggagagaaactggagttcagggggtaatttcagtggtatcagtggcattccacatagcaaagctgggcatgtgggagtagagagggaaaatactga

SEQ ID NO: 6234 - DNA, 201 bp, Homo sapiens
atcctgttaattcagtaagtattaactgtatgctgttatgtgccagatattgggaattttttgtataataaccaagatgaaatgtatattcccccccccccctttttttttttgagacagagtctcgctctgtcactcaggttagagtgtaatggtgtggtcttagctcactgcaacctctgcctcccaggttcaagtgat

SEQ ID NO: 6235 - DNA, 201 bp, Homo sapiens
gtgaaccaggtgtgcacaggcaaggaaacactatatattacacagaatggtggaagctagttgtctatgcctgaaaacagcataaacctcaccatgtctcrgtgggaagaagagcggcactgaagacagcttgagtaagaactgagcaatcaaagcgaatggagagaaactggagttcagggggtaatttcagtggtatca

SEQ ID NO: 6236 - DNA, 201 bp, Homo sapiens
cttatgggtagtcataccatatggttggttcatattgaatttattgccaaccaaagtttctatgtttctgtctaggtagctgccaactattttttttttttagcattctgcacttgagaattattatttttgatcttatgattatctctgttaaattttgatttgttcaacttgacccatatctgtacactaccatatcta

SEQ ID NO: 6237 - DNA, 201 bp, Homo sapiens
tacacatttgaaacagtagaatctgagctaatgagggctttggtgttttttccaccttgataagaagcatatgtgtgttatgtgagtgtgtgtgtgtgtgkatataaatatttggggatgggtagcagattggacttcacaccatatcttgctgagaccgttagtaatgtgaataagtcttttgcaatcacctttctttta

SEQ ID NO: 6238 - DNA, 201 bp, Homo sapiens
agaagaagctgataaatgacataaggtttcttcaatgtgatgactttgctaccattaaacattaagaaaaaccaattaattgaatcactgtgggaaaaaaagtcatcaaattccaatctggagtgtcaaaggatctgttttttaagtaattattctttttaatacatcaaagcttttcagcaaaagtttcagaatcgtgaa

SEQ ID NO: 6239 - DNA, 201 bp, Homo sapiens
ggaaaatgaagggagaatgcttgctgagctgagactacagggtagttgggtgtacagggtgatgtttgggtgaaccaggtgtgcacaggcaaggaaacackatatattacacagaatggtggaagctagttgtctatgcctgaaaacagcataaacctcaccatgtctcagtgggaagaagagcggcactgaagacagctt

SEQ ID NO: 6240 - DNA, 201 bp, Homo sapiens
agcatcctgaaggatcatcttcagggtttcactgatggggcgcagatcatctctctgtacttactcatctgccccctttgcagtcatggaccattactccrctcttctgttcatgggttcagagtgatccagaggcactggccttctgccctgcatgccttttgtgtggctgatccttcctggcttttaagcaattttcta

SEQ ID NO: 6241 - DNA, 201 bp, Homo sapiens
gactgcttgtaaatgagacactcatgaacacctgaggagcatcttaaaatccaaagttttcaatcaagagatcagggtgagccctaggcagggcttgactstgtcagtgaatccaactatccagctgtggcaggaggaaggcactaacttatccaagaggaggtgccagcaagagatattatcagtctagcttttaaaagg

SEQ ID NO: 6242 - DNA, 201 bp, Homo sapiens
aacattgctagaagtcaaaagttaatagtaaaaattaatgaaacaagttattaatataaagtaaagcagagtgatgggaagaatcaaggatttttccctarggggtaacatgttttcttatggaagaattaaaatttttaaagaagtagagcataaaacagactagaaacccttatatttttaccccccatattaagataa

SEQ ID NO: 6243 - DNA, 201 bp, Homo sapiens
tcagtttgctgtaaatgtatggatttatttcagggctctctattctgttccattggtacatttgttttcatgtcagtactatgctgttgtagtaactatarctttgttgtacattttaaagttaggtaacatgatgcagctttgttcttttcactccagattgtgttggctattcaaagtctgttgtagtttcatacaaat

SEQ ID NO: 6244 - DNA, 201 bp, Homo sapiens
tatattttaaaaagcaaaaggacatgaatatataaaaatgtgcagtatttttccaatagtcacaatttaaaagccatgttttggccagtaaatgtgttatrtagaatgtagtagaatatttgaactcattatgcttgcagtttccataaataaatctgccgctgtttaaaagaattggagttaatatctacaaactgggta

SEQ ID NO: 6245 - DNA, 201 bp, Homo sapiens
gggtcttatatttaagtatttaatccattttaagttaattttcatatgatgtgagaaaattacctaaatttattcttctgcatggtagatatccagttttsccaacatcagttattgaaaagactgtgatttccccattgtatgttcttggtacctttgttgaatcagtttgctgtaaatgtatggatttatttcagggct

SEQ ID NO: 6246 - DNA, 201 bp, Homo sapiens
tgtctaatacttttggtttggctttaatccatacaatggacatgccttgagacacgcacagcactgcaccgtctatcataacacactccagtgacctcagytgccagcgtttctcagaaaagcacgaggtcatcttcaatttagaattcaagtggaaacttcttctttattttttttttttttgcatttttcctttaaagg

SEQ ID NO: 6247 - DNA, 201 bp, Homo sapiens
atatgcacccaccctaatatatattctttgtccatactgacagagagagagattgataatataaatgcatacttttatacataaatcaatatataaatgcrtagttttatacataaatcaatatgcataggtattaaagtagttgatttcatctcaaacatcaatctagctcattgatataattctagaaaataaactagc

SEQ ID NO: 6248 - DNA, 201 bp, Homo sapiens
aaaccatgcttttctataatataggggaattctcattatagatgaagtgaatagagcatattaaaaagagtatatcactttaatgtttaaaaataaagagkcaaagaaagaaatgtaagacgccacaccaatatacaaatggtcattaagctgggaggctaatagatttttttttattttcttctttctacacttttattt

SEQ ID NO: 6249 - DNA, 201 bp, Homo sapiens
tgcacccaccctaatatatattctttgtccatactgacagagagagagattgataatataaatgcatacttttatacataaatcaatatataaatgcatakttttatacataaatcaatatgcataggtattaaagtagttgatttcatctcaaacatcaatctagctcattgatataattctagaaaataaactagcttt

SEQ ID NO: 6250 - DNA, 201 bp, Homo sapiens
ataaatagaaatttataaattataccagttaatgaaaataaatcattttataaagctacaaaacataaaatattgaagaattaacttaaaaataaatgtgmaagtgacatatctttattaaggattcctaaagaagatttgaataaacagactctatgttagcaaatggaggcttagtattgtagctatgttatgtctttc

SEQ ID NO: 6251 - DNA, 201 bp, Homo sapiens
gtgagaccctgtctcaaaataaacaaataaataaataaaattttttagaaaaagcagataggatgagattattttaacataagcatttctattaattacargtttaaggtgttataacatgtgttcccgtgataatacttcattgttgacaaaatcttaaaaagataatggaaaggggaaatgttttacttttctatgttt

SEQ ID NO: 6252 - DNA, 201 bp, Homo sapiens
aagcaatggggaaaggattccctatttaataagtggtgctaggaaaactggctagccatatgtagaaagctgaaactggattccttccttataccttatayaaaaattaattcaagatggattaaagacttaaatgtaagacctaaaaccataaaaaccgtagaagaaaacctagacaataccattcaggacataggcatg

SEQ ID NO: 6253 - DNA, 201 bp, Homo sapiens
ctacagtgagccttgatcacaccactgcactccagtctgggtgacagagtgagaccctgtctcaaaataaacaaataaataaataaaattttttagaaaargcagataggatgagattattttaacataagcatttctattaattacaggtttaaggtgttataacatgtgttcccgtgataatacttcattgttgacaaa

SEQ ID NO: 6254 - DNA, 201 bp, Homo sapiens
gttccctttcctctgcaagcttgccagcctgttgttttttgactttttattaatagccattctgaccggtatgagatggtatctcactgtggttttgattrgtaattctctaatgatcggtgatattgagctttttttcatatccttgttggccacatttatgtcttcttttgagaagtgtctgttcatgtcctttgccca

SEQ ID NO: 6255 - DNA, 201 bp, Homo sapiens
ataatcatgcatattcatagctaaattgctaattaacattctcagaattttgcttaatgtaagcaagttatcctaatagggttagggcaaaaacaatatgmtaaagattgaaatatgtggctatttaaaagcactgaaaacttgaataaattgcctcttcccctcccttagacataaaccattaagcctcatcatgttttt

SEQ ID NO: 6256 - DNA, 201 bp, Homo sapiens
attgggaagaaaagtgaaagacctagtcagtcatccagaggattgactgcattgtacagaggcaagaattgttttcatttttcatttgggtggtccaatamtacacacagacaccctaaaattttcacttaaaggatatgcatcataaacttcaggcacttatgggcctttatttacaaatttaagtttctgttataaaat

SEQ ID NO: 6257 - DNA, 201 bp, Homo sapiens
aaataaattagcggctgtggaacattaacctgtacctatggatgctggtactgatgaaggcaacagtcacctaagaattgtggagtccctgtcgtctgtcrgggcagcaaagataaaaagctttaagataccataaatttataacatggaagctgaggaggagtttcttactgtttctttatgtgttgccttgtttgctgg

SEQ ID NO: 6258 - DNA, 201 bp, Homo sapiens
tggggttttaacatttaaaaaaataaattagcggctgtggaacattaacctgtacctatggatgctggtactgatgaaggcaacagtcacctaagaattgyggagtccctgtcgtctgtcggggcagcaaagataaaaagctttaagataccataaatttataacatggaagctgaggaggagtttcttactgtttcttta

SEQ ID NO: 6259 - DNA, 201 bp, Homo sapiens
ctgaggcgggtggaccacttgagcccagaactttgagaccagcctgggcaacatggtgaaaccctgtttctactaaaaatacaaaaattagctgagcattrtggtgcacgcctgtaatcccagctcctcaggaggctgaggcaggagaatcatttgaacctgtggggcagaggttgcagtgagccgagattgtgccattgc

SEQ ID NO: 6260 - DNA, 201 bp, Homo sapiens
agattcaaagccatacattaaatattttatcaagtttaaataattgctctcataacctctaaaaagatatgtgtttgtctagcttaaaagtgacattttaraaacttgtttgaaaacttgcctttcgatgtcatgtaattctcagaaagatgaagtcttttaggactgaaatcccctcaagtttttattcttttgttatgt

SEQ ID NO: 6261 - DNA, 201 bp, Homo sapiens
ttcttgatagctactctcaaattgctgttcatagtcatatacataatagtaacagatcaatttatctatcttcccacacattcaccaaaactgggtgttaytatttttcatctttatatacatcagtggtgaacttaattttattattatttaaatttgcatatcattgattcctaatgagatttagagtttttgtatact

SEQ ID NO: 6262 - DNA, 201 bp, Homo sapiens
tctagtaaatcctcgcagagaaactaggaaatcaggtttatataactctttacagttttcacaatgacttcacatgcatttttaaaatttggtcctctcargagttgtgtggggtctgcagggcaggagtaatcatgaatcccacttttcaaatcaggggactccagctttgaattttaagtggcctgtgctgataagtct

SEQ ID NO: 6263 - DNA, 201 bp, Homo sapiens
acaattcacacaagatgcaaaattcaaaagaataaaaagaatgtgttaattggggactttggatttttcttaaatgacttagagatatttgctgttgctcygaatggatatagaagacttaattacataatttcttaatgggccttttaacttttataacagatgttcttttacaactggtcttttatcatcattaataat

SEQ ID NO: 6264 - DNA, 201 bp, Homo sapiens
tcagggacttccctttcctggtcaaggaaaggggtgacagacggcacctggaaaactgggccactcccacccaaatactggacttttccgatgggcttagraaatggcataccaggagattatatcccacacatggctcagagtgtcctacgcccacggagtctctctcattgctagcacagcaatctgaggtcaaactgc

SEQ ID NO: 6265 - DNA, 201 bp, Homo sapiens
actctattttcactcattcactcattccatcttactgaattaatatttttaagtgccccgatttgtgtgttgagccagatgctgcaaaaaaaaaaaaaaaagtataatatgagggttcagcatttagtgctggcaggatgggcaacaaacagacataaaattctcatgaaacagtggaagaaagcataagtttgagaacaa

SEQ ID NO: 6266 - DNA, 201 bp, Homo sapiens
cactctattttcactcattcactcattccatcttactgaattaatatttttaagtgccccgatttgtgtgttgagccagatgctgcaaaaaaaaaaaaaaaagtataatatgagggttcagcatttagtgctggcaggatgggcaacaaacagacataaaattctcatgaaacagtggaagaaagcataagtttgagaaca

SEQ ID NO: 6267 - DNA, 201 bp, Homo sapiens
gcactctattttcactcattcactcattccatcttactgaattaatatttttaagtgccccgatttgtgtgttgagccagatgctgcaaaaaaaaaaaaaaaagtataatatgagggttcagcatttagtgctggcaggatgggcaacaaacagacataaaattctcatgaaacagtggaagaaagcataagtttgagaac

SEQ ID NO: 6268 - DNA, 201 bp, Homo sapiens
agcagatcctttttaacggtgccacattacagaactatttaatgtattacggtcgattttttgtggacaagatcaattataccagactgttgcaatctgcyctggaagggggaagtaaattttaaaaaaactggaaaagaaagcatttatgtggcctcatttatgctcttaatttaaatgatatgcttgtgaagattcaga

SEQ ID NO: 6269 - DNA, 201 bp, Homo sapiens
tctgtgacatttgaggccagataatttgctgttgtaggacctgtcctgtgcattgcaggatgtttaccagcatccctggcctcgacctactacatgtcaakttccggtacctcctcactgaaacaaccaaaaatgtcttgagatattgttaaatgttcccccgtgaacaaaatcccctccagttgagagttgctacttcta

SEQ ID NO: 6270 - DNA, 201 bp, Homo sapiens
tattaataccactttcattttgttataccactcttcatttcagtgaaaccaattttcttatgaaatcaactaatccatgaaatcttccctattaatacaasttctaaacacatatgtgctctatctggatgtccattattttacatttccagatttgtgttctgtgttgttcttcagttatttatgcaactatggttgtat

SEQ ID NO: 6271 - DNA, 201 bp, Homo sapiens
tgggaggcagagaggttgcagtaagcggagatcataccactgcactccagcctgagagacagagcaagactctgtctcagaaaaagaaagaaagaaaaaaraaacacaaagcccacatgtatatataaataaatgtcattgcctaatacttcaattatgcttatatatcatggttggatggcttgatgtaacagtatctgg

SEQ ID NO: 6272 - DNA, 201 bp, Homo sapiens
ttacatttccagatttgtgttctgtgttgttcttcagttatttatgcaactatggttgtatttccattcagcgattcctcaggaagagatcatcataattyttgtgcattcttcccaactctcacttcttgccagccccacaatccaagtgctttgcaactagttttcaagtacaaggtttttgttgaaattgataaaaag

SEQ ID NO: 6273 - DNA, 201 bp, Homo sapiens
ctagaaatactatttgacccagcgatcccattactgggtatatacccaaaggattataaatcatgctactatgaagacacatgcacacgtatgtttattgyggcactattcccaatagcgaagacttggaaccaacccaaatgtccatcagtgacagactggattaagaaaatgtggcacatatacaccatggaatactat

SEQ ID NO: 6274 - DNA, 201 bp, Homo sapiens
cctggcaaaaaggagagaaatagacattttgtttgactgtcataaacatggctgagtcctctatttttaaagaaaatattttatttctttttatggtttcwaaattatttttcatttcctcgtttaaaaaatggaattccatgtgtgattgtcaggaagcatggaagccttgtttgtactgtgaatcgtgaagcaggcaag

SEQ ID NO: 6275 - DNA, 201 bp, Homo sapiens
agataagattgtgcaacaactaagctctcttttacatcacagagcttatggaataatgtgcaagaagaggactttttgtctgtggtctagagttatgagtrctggtcaaagccttctccacctttcactggtagttatttgagacctacagtttctgaggttgtgattactgggtgttttaaggttttgacctatttgaaa

SEQ ID NO: 6276 - DNA, 201 bp, Homo sapiens
ctgttgcactccaattattcccttgcactttatgttccattcaagaagcaagaggtccccacctacactctactgacaaatgccctttaatgcttgtcttycatggctgatctactgatgcccatttctccctccgttttataatagggcactctcagcatcataggttactactgcctatcatttaagactcacatttat

SEQ ID NO: 6277 - DNA, 201 bp, Homo sapiens
ctgcttccaaccatgccttatgcattatctttgataacgcatgggaaccttcgggggttactgtaatgttaagtcacttagagttcaagtttttattgctrgcaaataccaaaacctataatctgtaggttcatccaaccctaatctcttaggcagcactggggagtggttaagaacttctcactggctgggtttatgttc

SEQ ID NO: 6278 - DNA, 201 bp, Homo sapiens
cattcaaataagtgctttaaaacctatgattctaatgctgtagttaagtttttagtaaacaatggcagtttgatgcagtagaaccaaccttggagtcaaaagcacttctttaaatccctctttttcaattatgagattttgttaacaagcttctctgagaattaatttccttgtctgtaaaatggatgccctgtctgctca

SEQ ID NO: 6279 - DNA, 201 bp, Homo sapiens
actaaaactaatttatgaatgcatttatcaagtaaatattttagtgtatttctatcaattttattttttgtaatcacttccattttactaaactatgaatrtagccaaattttctgtagtggtccattagctaagtaattgtgggaaatatgtaattataaaggacttaaagtaatgctacattttgtggaaaacactatt

SEQ ID NO: 6280 - DNA, 201 bp, Homo sapiens
cataggtattaaagtagttgatttcatctcaaacatcaatctagctcattgatataattctagaaaataaactagctttgttttccctcagtttgaaatamtattttatccttagttattctagtttattctcataaaacactccacctccctctctcccacacgtggcatatggtatccaatgacaatcataaatatctt

SEQ ID NO: 6281 - DNA, 201 bp, Homo sapiens
gaccccctgccccacatatacttcgccctgactaaaagtttaaaattccaactaaaactaatttatgaatgcatttatcaagtaaatattttagtgtattkctatcaattttattttttgtaatcacttccattttactaaactatgaatatagccaaattttctgtagtggtccattagctaagtaattgtgggaaatat

SEQ ID NO: 6282 - DNA, 201 bp, Homo sapiens
tgtttgctgtgctctcaagatggatctgaacatggaacagaaatagagggcttctgtttaatgtatattacagcattaaaagtctatttgcctcatttttytttccttgtcctcaggttatccatccctgtttgggattcagggctgccttcatgaatgttttgctatactatgtcaagttgtttaccaatttctgcttct

SEQ ID NO: 6283 - DNA, 201 bp, Homo sapiens
aaacatcaatctagctcattgatataattctagaaaataaactagctttgttttccctcagtttgaaataatattttatccttagttattctagtttattstcataaaacactccacctccctctctcccacacgtggcatatggtatccaatgacaatcataaatatcttgacctctccttcttaacacctcatgaacta

SEQ ID NO: 6284 - DNA, 201 bp, Homo sapiens
tattgttaagtctgtgtggtaagtgaaggaaaagggacatacacaagttgtggaaatcaatggggaatggagtgagcctggacatggaacttccagttccrggagcagagctctttcttccatgcggtgccatctcttgcagcctcagcagttcctgatgataccagatgtctgtagtctcatcagagaacttacaccatg

SEQ ID NO: 6285 - DNA, 201 bp, Homo sapiens
cctatgttttcttatagcagtttcatagttttgggtcttatatttaagtatttaatccattttaagttaattttcatatgatgtgagaaaattacctaaayttattcttctgcatggtagatatccagttttgccaacatcagttattgaaaagactgtgatttccccattgtatgttcttggtacctttgttgaatcagt

SEQ ID NO: 6286 - DNA, 201 bp, Homo sapiens
aggttactattaaataccttctccagagctacatagactctactcatgaacttgaaatccagtggggaaacatttgttagactagaaccaagatggatttkatgtttgattcttcatcttaacttttccctctgattgcttcatttctagatttacatgtttagaaatgagttatgctgaagtatataagacagtggcata

SEQ ID NO: 6287 - DNA, 201 bp, Homo sapiens
tgtctcttcactcttgttgattgtttcctttactgtgcagaagctttttagttttgtatagtcccctcatttatttttgcttttgttttctgtgcttttgragtcacatccaaaaagtcattacttagacctatgtcatggagattttcacctatgttttcttatagcagtttcatagttttgggtcttatatttaagtat

SEQ ID NO: 6288 - DNA, 201 bp, Homo sapiens
gctctaaggtattaatcccaatataatggaagacaagttgaagacactggacttggcaacgtgtaaatatgggaaagaattctgagactttctttagtgcrgaattcagagcatcttgatgtcatttggcccttctcttagaggcgttctcttcttgcagttttcctggggttgtaaacttatccccaaataagacaatct

SEQ ID NO: 6289 - DNA, 201 bp, Homo sapiens
ttgatgtttgattcttcatcttaacttttccctctgattgcttcatttctagatttacatgtttagaaatgagttatgctgaagtatataagacagtggcataaaaatatttttgatatttaaagttttggtaactctttctcttctgtaaacgtggatataaagctgtatgtttctcactggtgaaaggaactttacaat

SEQ ID NO: 6290 - DNA, 201 bp, Homo sapiens
agcaagtcccagaacttcactcttggacgtatgagaagtttagtttagtaaaacgtcttgttgaaggaaactgtcccattttcccttttgattttctacamaggcccgctactaggcaagagccaaggctgacatggagacagctcagccctatttcaaaagctgaaactctctttactatcccactggatgcacaggatg

SEQ ID NO: 6291 - DNA, 201 bp, Homo sapiens
agaagccatcttaatcgaagatggggagaggaaacaggtatgattagtggggctctgcttttccataaacatcctagaatttaataacctctgtctatccyttacttctgtctggcatccgaagctctgcagagcaggataatggtgaatgtggggccatgggactctctttccatagggagcctgttttctgaatagaat

SEQ ID NO: 6292 - DNA, 201 bp, Homo sapiens
gaaatgagttatgctgaagtatataagacagtggcataaaaatatttttgatatttaaagttttggtaactctttctcttctgtaaacgtggatataaagstgtatgtttctcactggtgaaaggaactttacaatccacattagggtgaatataatttgagcaaaagttcaaattttttttttcactcatatgtagcttt

SEQ ID NO: 6293 - DNA, 201 bp, Homo sapiens
tgttgatagactcaaatgaagccctctacggaaagaacagccattcatattttttgcctattgctaaattttggataatttctgtgatgagtgataatttrttgctttactttccctaactgtaaacattacattggcaacataggaataataaagatcacaaacacacctaaaattacatgaagataagtcagtaatgga

SEQ ID NO: 6294 - DNA, 201 bp, Homo sapiens
aactctttctcttctgtaaacgtggatataaagctgtatgtttctcactggtgaaaggaactttacaatccacattagggtgaatataatttgagcaaaarttcaaattttttttttcactcatatgtagctttgtcagttcacaatccagagaatactggaaaagtctgaagtgtcacaaagctgcttcactacatttaa

SEQ ID NO: 6295 - DNA, 201 bp, Homo sapiens
tcatgtctcctgaaagtgatacatgactttttgatggaatttgaaatggtggttgattacttttgaatacttaagctccaccggttgacagctcacatctrcagaaaaacaattagcaaatttgtgaattatcattggtttacacattaaacaagcaaagtaattctttataacgttaaccaacaggctgtgtcttgatta

SEQ ID NO: 6296 - DNA, 201 bp, Homo sapiens
atggaatttgaaatggtggttgattacttttgaatacttaagctccaccggttgacagctcacatctacagaaaaacaattagcaaatttgtgaattatcrttggtttacacattaaacaagcaaagtaattctttataacgttaaccaacaggctgtgtcttgattacaggatattgtttttcattaataaatggagcta

SEQ ID NO: 6297 - DNA, 201 bp, Homo sapiens
ggtgtgagccaccacgcccggccaacaccgaagttattaaagacatcaccattcaaactaaggaacctatctaactatgtacttatgaaagagttactccyagaaataagcaaagagtttagatgatgttaaatttatgttcttagcacggtttctaagtaaatgattttttgtccataaaattattccgatattaaccaa

SEQ ID NO: 6298 - DNA, 201 bp, Homo sapiens
agggaatgtattttaaaatgttagattccacaattatttgaagtagaaatgcaggttacactacaaagtctacttatttgaaatagtatgtagagaaagcrtggttattggcctgtattacttttcctaattgtctctttttggggaagctttgtccatagttgtatgtcccaaagtccatagttgtatgtcccaaacatg

SEQ ID NO: 6299 - DNA, 201 bp, Homo sapiens
ggctctttaccatcatctttcatgtagttccttttctccacctcaaaagattttaaggaactcttatcttttttctgctcctcttgacatgtttattattmctccctactggtggaagaagagcatgctggcctcttagagaataacccctccactcatgttcatgattcttcctcttctccctcatgctttcctctcaat

SEQ ID NO: 6300 - DNA, 201 bp, Homo sapiens
agaacccaccccgccaacctacttcaccaattaagttccatgatcaatggacaaggttgtttgcagagaacaaaaaccttttttggcaggggggaaaaaamcaaaaaaaaaccctttttcatggtgaaaatatacgtgattcaggtcttaaattgtcttctgtctgcaaatctgtactcagatgtatgcaagtttcttgca

SEQ ID NO: 6301 - DNA, 201 bp, Homo sapiens
tctcattaattcttaagctgtcaactctgactttctaactagcctcttctcacctattcccatccttaactacagaacaatgttaaatctggagggaaggkggggaaagatcagttggaattagtaaaatgtctttattataaatattttaaattgtagttctattattttcaaatatctataatagctcaaacaccacct

SEQ ID NO: 6302 - DNA, 201 bp, Homo sapiens
tcgcctctttccagatccattattgatgtgagggtgcaggattttgcagctctgctgtgtaacttgtgaggggtgtgtgtgtgtgtgtgtgcgcgcgcgcgtgatggagcctccttacacccttacacaggccgccctgctctgctctggaatcttctttgtttttcctcacccattattttctgaggtaatggccttggc

SEQ ID NO: 6303 - DNA, 201 bp, Homo sapiens
ttcgcctctttccagatccattattgatgtgagggtgcaggattttgcagctctgctgtgtaacttgtgaggggtgtgtgtgtgtgtgtgtgcgcgcgcgcgtgatggagcctccttacacccttacacaggccgccctgctctgctctggaatcttctttgtttttcctcacccattattttctgaggtaatggccttgg

SEQ ID NO: 6304 - DNA, 201 bp, Homo sapiens
ccagattcctgggcggtccctaccaggtcttgctcttcagggactccttaaagggcattaagatctgggtgtcgtcattggaggaaacttaaggaataaargagaagaatggaggaaacttaggaataaaagagaagaatgggaaaccacttccacgtcaggcgctaatcctcctgagcagcttcctgcctcatcccagcc

SEQ ID NO: 6305 - DNA, 201 bp, Homo sapiens
gcccttaataagagaatcagcttgccttttgaaactttgaagccaagcattgagctttcctctctagttaatcctggatggaatcttcttccaatagaagkctgtttcagctacactgaaaatctgtttagtgtagctgccttcatcaatgatcttagttggatcttctggataacttgctgcagcttctacatcagccct

SEQ ID NO: 6306 - DNA, 201 bp, Homo sapiens
tgtaacagcttggggctctagtcagccaccagattcctgggcggtccctaccaggtcttgctcttcagggactccttaaagggcattaagatctgggtgtygtcattggaggaaacttaaggaataaaagagaagaatggaggaaacttaggaataaaagagaagaatgggaaaccacttccacgtcaggcgctaatcctc

SEQ ID NO: 6307 - DNA, 201 bp, Homo sapiens
tacatctcacattctgtacttcatttcgtcactttacatttttaaaaacaaaaattccattaatcatgtggaatgatgaatttacttgtttctttttttttgcaagtaatatcctataattatttattttgaatcttctgtttaaatgtcagaatatggagtatcataagttttttcgaagtgagctggaatgattcccaa

SEQ ID NO: 6308 - DNA, 201 bp, Homo sapiens
agggcatttgtttatagagtttgagccagaccagcccaatgaatgccaaagccagttttggaatggacacgatggccaagagcagagcaaatggccctgtwacagcttggggctctagtcagccaccagattcctgggcggtccctaccaggtcttgctcttcagggactccttaaagggcattaagatctgggtgtcgtc

SEQ ID NO: 6309 - DNA, 201 bp, Homo sapiens
gagtgcttgatataatttcaactttcttaaacttattgaggctcattttatggcctgtcatatggtctatcttggagaaagttccatgtgctattaaatasaacgtgtattttgcggttgttggatgaaacgttctctatatatctgttaggtctatttgttccaaggtatagtttaaatccattgtttctttgttgtctt

SEQ ID NO: 6310 - DNA, 201 bp, Homo sapiens
ctttgttctcacaaacaaatgggcaatatcaaagaaatccctggtttgtttacctttatattgttcactcctttctctgagggatgttttccctttgctgytccccctttttttttttgacagacatgtttcctttcattgaaagagacgaaagaaactaggattgtttagtcacaacaaaacaaaacaaaatatacatac

SEQ ID NO: 6311 - DNA, 201 bp, Homo sapiens
atggtggtggggggatgactagtcatcagtgagacggggatggtggtgggggggatgaccagtgggatggtggtggggggatgaccagtcatcagtgagayggggatggtggtggggggatgaccagtgggatgggaggatgatcagtgggatggttgaggggaatgatcagtgggacagggggatgatcagtggaactgg

SEQ ID NO: 6312 - DNA, 201 bp, Homo sapiens
cactccctttttcttcctttggtaaaccaatgcatgcaaagttaaacctttcaaaactcacccccaccgcctcaccccccttttttttgaggtttcaacarttggttcttatttttttcaatttattttattttattttattttattttgagatggagtcttgctgtgtcgcccagactggagtacagtggcacaatcttg

SEQ ID NO: 6313 - DNA, 201 bp, Homo sapiens
agcatgacgagtgggatggggggatgacgagtgggatggggtggatgatgagtgggatggggatgaccagtgggatggtggtgggggggatgaccagtggratggtggtggggggatgactagtcatcagtgagacggggatggtggtgggggggatgaccagtgggatggtggtggggggatgaccagtcatcagtgaga

SEQ ID NO: 6314 - DNA, 201 bp, Homo sapiens
tttggaaactccagcactagatgagagctttaagatgcaatctgtacttactgtgttgatagaagaacataatataaaaacacccttctgcagaaatgaarcaacatcagaatctatttatgtcattttttataggccttaaaagagttggcctgagaattaggagtgtattttctcagtttacttcatcatgtatcaact

SEQ ID NO: 6315 - DNA, 201 bp, Homo sapiens
tcattaaaaagtcaggaaacaacaggtgctggagaggatgtggagaaataggaacacttttacactgttggtgggactgtaaactagttcaaccattgtgraagtcagtgtggcgattcctcagggatttagaactagaagtaccatttgacccagccatcccattactgggtatatacccaaatgactataaatcatgct

SEQ ID NO: 6316 - DNA, 201 bp, Homo sapiens; identical to SEQ ID NO: 631

SEQ ID NO: 6317 - DNA, 201 bp, Homo sapiens
tctaacctcttttgtgacatgaaattggtgtataatttctaccgttaaaatgaaagaaaattattaaattgataggaaattatctttctttcgaaagtaartattcccttttatttatattagaaacttatacaaagttcattttattttcttggtgtaaatatattcattagcaagtcatgctatggtgtggaatttggg

SEQ ID NO: 6318 - DNA, 201 bp, Homo sapiens
tggcatgccccatcattttcgtaaaaattatttcctttaattttgtaccccaagatgttccaggttcatcttgtattttcccggctacaaccctgggatcratgtcttctacaaggatgctggagaatggtatttagaaatcaaaatctggatgctaagtgtgcccattactactggggtgtcactgtctctaggctctct

SEQ ID NO: 6319 - DNA, 201 bp, Homo sapiens
tcgtttaatacaagataaaagtcacagggataggagtgtggagaactgattggaggagaattgttgtcaactcagccctggtggattgatgggggaggctytgccaggtcaaggttagtgaatgtcatcaaacttgtctggagggtttggatttgactccctggacaaagtgaattgcttgatttattaacaagctttgct

SEQ ID NO: 6320 - DNA, 201 bp, Homo sapiens
attgcactccttatagatataaagagctgtctgtgcgctctagcttcaacccagttactgacagttactttatctaatagagaaggttgaagtagcatagygcaggttccttcaacatacagtgacatttcctagatagcacaaagacatattgctgcatgtagacggaaatgtgtatctattggctttttgttgagtttc

SEQ ID NO: 6321 - DNA, 201 bp, Homo sapiens
cctgggggcggggcggggggcggggcgcaaccatattaattacctacaagtgtgttgcctcaaggcctttgtctttatatctgtactgaataaatgactgyagcggccgcttgtcaaggctgcggcctctgtgactctttacggcatcctccttgatgtctgtgagtggctcggtcccctagccgcgcggccaggcaaaac

SEQ ID NO: 6322 - DNA, 201 bp, Homo sapiens
ttacacatttgaaacagtagaatctgagctaatgagggctttggtgttttttccaccttgataagaagcatatgtgtgttatgtgagtgtgtgtgtgtgtrtatataaatatttggggatgggtagcagattggacttcacaccatatcttgctgagaccgttagtaatgtgaataagtcttttgcaatcacctttctttt

SEQ ID NO: 6323 - DNA, 201 bp, Homo sapiens
aggttttggtattaggaagatgctggcctcatttaacgacttagagaggaatccaaccttttcaattttttggaatagtgtcagtaggaatggtaccagcycttctttgtacctctggtagataccaattcagttgctaatatgtctggtcctggactttttgtggttggtagcctatttattactgcctcagtttcagac

SEQ ID NO: 6324 - DNA, 201 bp, Homo sapiens
gtacgatgaggttgtaaatccattccactactttgaaaacacagagcaaaacaaaggaacaacttagagcacaaatcttaactgctgatttgtcaacaacrtatctttgtgaattaagtatgttgttgttacttaagtactattattcttattaagaatgaatgaatttttctataagagtaatattttgtggaaaaatta

SEQ ID NO: 6325 - DNA, 201 bp, Homo sapiens
taaccaaaataattgttagaaaagtggaatccaaaacaatttttttttaaaaaaagaggatgatgagtgtcctgagttgtataattaattgactcaaataygcttcatttgagtaatagaaatatggccttatttaagcacatatgatatttttatgaagtctcagcacaaagaaaataagaaatgaaggaaagcaaaatg

SEQ ID NO: 6326 - DNA, 201 bp, Homo sapiens
aatggatggatgggctcattttactttcaatgaatatttattgaacacctactatctcatgggagctcatgttacatctgtgaacaatgcagaaaataacsctgtggaatctacatgttagtaggggaaacagaatacacaaattaatgcaggtggtgaaagaggaaggaaataagtagagtgatgaggtcataatggaag

SEQ ID NO: 6327 - DNA, 201 bp, Homo sapiens
gacactgcacaaagaaaactactacagaccacagaggaatcatgggtgttgtgattgaaaataattaattcaaacattgaacagatatttttgaacagcarctctgtgtacctggcactacattaggcataaaatactagagatagataaaatagaacaattgtcatttcttatgaaaatcagaaaatttttactaaaatg

SEQ ID NO: 6328 - DNA, 201 bp, Homo sapiens
aatacagaggccatatgaaaatatatcaaagataattttcaaagcatgtttgaaagctctacattaggatcactagcactagcatgccaaaaggcacagawaagaaaatacagggcatagcaaaatattgtttcttcttaatagggaatctgcctcagggaaagactaggctggtgagaagggggaaagactttaagagtc

SEQ ID NO: 6329 - DNA, 201 bp, Homo sapiens
cttttcctgttaccaatgatgtccatttatgaaatcagctttttggtctttgcaaatggagtgggttttccccctgtgtaaatggagctcgaatgaagacstttaacctcatgcgtaccttcttctaatctactaagtttactaacttaggtaacagaaagtaaatgagaatttccagtgctattaggtgttcagaatcag

SEQ ID NO: 6330 - DNA, 201 bp, Homo sapiens
ttctgggattacaggcatgagccactatgcctagccaagtccagactttttctaagagtgtttaagtctaactgcaagagggagatcaaggaaaaccatgrcagtctcttgagacctaaccttgtagttggcacatcaacatttcatttgtattctgtaggccaaaccaactcacagggccagccagaatcagaaggaaga

SEQ ID NO: 6331 - DNA, 201 bp, Homo sapiens
gcattcattaagttcaaatttgatgagagctgttcatattaaatttgataaccccaattctagcaagttacacatattataaagctcctttgaaaattctrtgacattcatgttatttttgtcctttaataactaagccatttttaaattaggtgcccatatgtagccatgtgttagtgaaagtgcttcataattgatgac

SEQ ID NO: 6332 - DNA, 201 bp, Homo sapiens
gtagatgtcttattgttgttttttcctaatagacatgtatggggatgaagatagtggtaattggaaaaggggaaagcatagcatttggaacttggaagtgsaaattttagaagcatgagcactactcagcctagggacctgttattcggctacagtgacctgcagaccctgtctctacctccacggaattgtgcacactta

SEQ ID NO: 6333 - DNA, 201 bp, Homo sapiens
aatgttaggttcattgtgaagtaggactggggatcctgtttctgtacattttctaatcctcaacaattttttggattatctgactagataaagcaatattytggcttaagtcttgagtaaaattaaggtaaactatctagaagaattaattgaacatgaattctagcatctactcaggtctgagtgccatagcttcgccag

SEQ ID NO: 6334 - DNA, 201 bp, Homo sapiens
ttttccaccatgtggtgacacattagcaaggtgccatctttgaagcacaatcaagccctcacgagacactgaatgtactggtgccttgatcttggacgtcyctgcctttgaaactgtgagaaataactttctgttgtttataaattacccagactaaggtatttttattatagcggcagtaatgattgaagacaaatggaa

SEQ ID NO: 6335 - DNA, 201 bp, Homo sapiens
cagcattgtagaacagctaaacaggggtgaattgctgttgaatttaaggaaagtgttatcaaacctaggagaatccctccccccaaccctttccccatcckttgcactctgggaatccatgtaactcaggataaaacattttgctttatttttcatttgccacatgcatatcttgactgtttacacggttatcattcaatg

SEQ ID NO: 6336 - DNA, 201 bp, Homo sapiens
ctaacatatggtctatcctggagaatgttctatgtgtgttgaagaaaaatgtgcatgtattatactgctgttggacagaaatttttgtctatgtctcctargcccatttggtcaaaagtgctattcaagtccagtatttccttattattttttttttttgcttcatctatctattgttgaaagtggggtattgaagtcccc

SEQ ID NO: 6337 - DNA, 201 bp, Homo sapiens
atgagccctccattctatgcctgtcttctttcctgtttcattgaggcaagggaaatagaattttatttatttataaaataaattgtattgtatatattcarggtataaaacatgttaagggatacatgtggatagtaaaaaggttactatagtgaagcaaattaatgtatccattatctcacatagttaccctttgttttt

SEQ ID NO: 6338 - DNA, 201 bp, Homo sapiens
gtgcatacatcgtatgtgttcctgaaattagttaaaaaaaaaaagttatagtccatgggttggaaaaaggaaatcaaaaagaattgatatctaagaaatgycatttgtctgcaaggtagatgaacagtaaaactcaattcaacagacatgcattgagaatctatgatgtgccagttgcttttcaagttatggggaacaaag

SEQ ID NO: 6339 - DNA, 201 bp, Homo sapiens
agatccttatagttaatacttggttacccaggcaaccattccctgactgcaagaaagccatcctgaagtcttgattagatggaagaaaaaggcctgggatmttcctttctgctgctttctcttctggcctgggaaaagaggaaccaagaaataggaataagtgggaaaaagccctgaacggaggtatgggtgagagagagg

SEQ ID NO: 6340 - DNA, 201 bp, Homo sapiens
acaattataataattccatcaaaagtcactgatcacagatcccgataaaggatataataataatgaaaaagtttgaaacattgcaaggatgatcaaaatgygacacagagacacaagtgagtacatgctgctggaaaaatgacagcgatagacttgtttgatgaaaggttgccacagaccttaaatttgtgaaaaatggaa

SEQ ID NO: 6341 - DNA, 201 bp, Homo sapiens
atttcattctcttcttgcttgcatggtactgatgagaagtctgctgtaattcttaaacttgtttttctataggtaaagtgtttgttccttctggcttcttytaaggttttctctttgtagttggttttctgcagtttgcatatgctatgcctacaagtagtttaagtgtttatcctgcttttctctgaacctcatggatct

SEQ ID NO: 6342 - DNA, 201 bp, Homo sapiens
atgctaataactctcaataaattaggtattgatgggaggtatttcaaaataataagagctatctatgacaaacccacagccaatatcatactgaatgggcraaaactggaagcattccctttgaaaactggacaagacagggatgccctctctcaccactcctattcaacatagtgttggaagttctggccagagcaatta

SEQ ID NO: 6343 - DNA, 201 bp, Homo sapiens
atccaccacagcacagaagggagggagttcaaaagataaatactcttgcttcactctcttcctgccttctgctctcctgccacttggccttcctgggacgycagagtgaagggatcccttaatgtagaccataaaggccagactgctggggcagattggacacaaggtagaaagtgttatctgaagaggcaatggataata

SEQ ID NO: 6344 - DNA, 201 bp, Homo sapiens
gtagagagagacttaagctttttgtttattttccatccattcatttatttattcaatatttattaaatgctggtagtttacaccaggctgtatttgggtgycggggaagacaaagatgtataaggaaaaacaaatacctacctttaaagataaaaaccaggcattttgcggaagggggtggataggcaagtacacaagtag

SEQ ID NO: 6345 - DNA, 201 bp, Homo sapiens
aatgaattttgagttgtgaagcacagtaggaaaaaagtattgtttctttggtcacaaccctctccctcttgctaggatgtgcatagagatagtaacttagyaactcctctgagatgaaaagcttcaagtacaaactaaaatgttggccccttccaacttctttgacaattgtctatctgtgtaggttgtcgagattttgtg

SEQ ID NO: 6346 - DNA, 201 bp, Homo sapiens
gtacaaggagatgcaccacaattactgtcattttcatttcataggaaactcgctcaggtgagttcagtaacttgactaaggccacagagcagatttgggamtcaaattcagtacatatctgtgttcgtggtgacaaagacttttgtccagtttatgtgcatcttattgtgatctgtgcctagtattcaatagcacagtaag

SEQ ID NO: 6347 - DNA, 201 bp, Homo sapiens
caagagtaccacgtaaaatagaattggctggattttcttgtctcatacaatcaggatcagcacagttttgtctttccgcaaaccaacaaatggaaaaggcraaggctattgaaacgagtgggtactgcctgtgtgaccgctgtcagcgtcatcctctagctcctgtaactgtggttcttgaggctcccacagcgaagggga

SEQ ID NO: 6348 - DNA, 201 bp, Homo sapiens
agtggctgcatcctctcaaatatctaagccagaaacctggggaatcattgctgggtcttatttttccttcattcctcacacgcattcatgtttgtggtcayacaagccatgtcccatttcatctcctggttagcttctgaacctgccttgtgtgtctgtctctgctattactgccttagaccagctgctgtcaactcttgt

SEQ ID NO: 6349 - DNA, 201 bp, Homo sapiens
aatgtctctacaccttagatttcctcattgttagttaggtataacaatagtaataaggaaaataacactcattgagtttttgtgcattttaaagaagtatmtgtttggggccgggcatagtggctcatgcctgtaatcccagcactttgggaggccaaggtgggcagatcacaaggtcaggagattgagaccatcctggct

SEQ ID NO: 6350 - DNA, 201 bp, Homo sapiens
aactaaaggtgtagtgtcttgttctaggtgctaaatcttgttgaggtagagagaagggagaaacctgaactatatttaaacaaacacagtaagtccctcarctcatgattggctggcccttggttcttgcagccgtgcagcagcaccaagcagaacttcattttacctatttatatccccgatgttgaaacaaacacacac

SEQ ID NO: 6351 - DNA, 201 bp, Homo sapiens
ggtttctggaatgaatgtccttctgtcactttcatgttcctctttcactgaacagtcaacagctgagatcttggctgggtttcatactggacagtgtattmttgactttacaaaaggtggtggggtgttaatgaggttccttcctgatttcgtacttgagtaatttctttccagccactgctgtgtatccctgctccttat

SEQ ID NO: 6352 - DNA, 201 bp, Homo sapiens
aaaggtgaaaattttagaatatgtcttttaaagagagtaagacaggaacgttgctatttctttttccatttatcatgatattgttagtcctgggtaatacratagggcaagaaagagaaatgtttataaggaagaagaaagaagaaagtaaatttgttcatactcagagtatatcattatttaaaagaaaattcaagataa

SEQ ID NO: 6353 - DNA, 201 bp, Homo sapiens
gaagcagaatgcagcctctggagtctccagtttgtacccttctgctgcaccaagcatttgatctctacaactaaaacaatatgttgaataatattgactgrtaatatatacaaggggcaaagtattaatgttactctccaagcttctgtttcacagttggctcagtacggagaatacttaatgacatattaaacacctttg

SEQ ID NO: 6354 - DNA, 201 bp, Homo sapiens
aaataagcaatcaaaaatagtctttaaatcatctcctttattcctcaagttcactgctgccaaattttgcttctaaacactcctctatccctctcttctasttctctaatgtggctttagctcggggacttccatgtctggtttggtcaattgtagttttctttctgtagtattgtagcattgggcactactctctgcaga

SEQ ID NO: 6355 - DNA, 201 bp, Homo sapiens
gcatttgccagagacatttcctccagtcaatgattatttgcattagttccctgtggctcttcctgaattttttcaatggcatagtaatttttttcttgaayatttcctactgctttaattttcactcctgttttaaattcttcattaattaagctttcccaaggcttaaatacctataaaactttttaaaacttaatcatt

SEQ ID NO: 6356 - DNA, 201 bp, Homo sapiens
catttgccagagacatttcctccagtcaatgattatttgcattagttccctgtggctcttcctgaattttttcaatggcatagtaatttttttcttgaatrtttcctactgctttaattttcactcctgttttaaattcttcattaattaagctttcccaaggcttaaatacctataaaactttttaaaacttaatcattt

SEQ ID NO: 6357 - DNA, 201 bp, Homo sapiens
gtttgtatccacttttttttcgttgagcagtggtttgtagttctccttgaagagttccttcacatcccttgtaagttggattcctaggtattttattctcyttgaagcagttgtgaatgggagtccattcatgatttggctctctgtttgtctgttattggtatatgagaatgcttgtgatttttgcacattgattttgta

SEQ ID NO: 6358 - DNA, 201 bp, Homo sapiens
tgatgtaactcttataacactgaaagtatagtatatttcattaaagatgtttccaaggaggaggaagataatcatccttgatttagatgtataactctttwgagccctgatgatacggggatgtaccatactctgaagaataaatgaagaacatctcccttatactctagttttaagactctatcttcaaaaatatcctac

SEQ ID NO: 6359 - DNA, 201 bp, Homo sapiens
ccagtgaagtgtgaacggaacagagactggaccaagtcatagagcttggtgtgttcagcttttacctgactagaggaaatttccagataacattcatccartccttaatctatgttcttaactctttccaggatgtactatttgcctgcattgctcttcgcacctgactgtacaacctaaaggagccctccccttgctttt

SEQ ID NO: 6360 - DNA, 201 bp, Homo sapiens
gtggctgttgaacacttgacatgtggatagtgtgactgaggagttgaattttttattctatttaattttaattagtatacattttaaaaccacatctgacragtgccagctcaaaccgtaggatacatggagaggtgtttagtgtgataagatccaaacagattggcaaactttgaagaactttactgctaggccaacaag

SEQ ID NO: 6361 - DNA, 201 bp, Homo sapiens
agttcacaaagtggcaacaagtatgaaaaataaggaatgaaataaatagtgaaagaaacattattactattggaatttgcattcttgcccatgtgatgcayttgctttaaattggtgtaagctcttcacatgcagagggcccatatgccttgatgtaacattagatcaagtggcagaagctaaatttggaattaaggcaat

SEQ ID NO: 6362 - DNA, 201 bp, Homo sapiens
ggctgtagtatggataatgtattggtgaggcataacactggaggaagggagacccatgagatactacagtaattttccagaaatgatagtggcccagcctrtgatggttgcactgtactaggaatggacagaagtagatggatatattaataaaaagacattttagggatatatgtagggcttggcaattaattgcatgtt

SEQ ID NO: 6363 - DNA, 201 bp, Homo sapiens
aaaaaatactgtttataccataatgcagttgaaacctattactaatattgctttctcatctagtttcagaatgttatctctgtttcactgcaactgggggmacctctttcttctcctcctaccccagcccagaggcagagatcttttctatacttttctcttttgtccttcattgcctaagaaggagaggccaaaagaagg

SEQ ID NO: 6364 - DNA, 201 bp, Homo sapiens
atttgtttaggggaaacttaatgtattgccctttggatactgagatgatgccttctcagaggaacatatccttgcattctgtagtatgtagtggaataaargactctgagtcatttacatccttttatcaacttttcctgttaccaatgatgtccatttatgaaatcagctttttggtctttgcaaatggagtgggttttc

SEQ ID NO: 6365 - DNA, 201 bp, Homo sapiens
gtggtttttaatcagaattgcacatcacaataacctgggaagcaagcccacacttatatctccagctaccttatttcatcagttccagtatgtactttttyccccatattttctcatttttgaaatctggatgtgctttacattagtttgatcaaacttttttaagataaattttattgtgcatatgtgaggcttacaacg

SEQ ID NO: 6366 - DNA, 201 bp, Homo sapiens
ttggtcatatattggcaggctctttaacaactagaaagacaagatgttgtaaaattgactcatttgttcattatgtataccacatagagaacaaagtaaartaaaatgcacagaacattcaggataagatggctaatcttggcttactataaaatgactggcatggagccttttcctcttctttcttctgccttgttccct

SEQ ID NO: 6367 - DNA, 201 bp, Homo sapiens
tctaaaattagattacatttatggttgcaaagctctgtgaatatactaaaaacttctgaattgtgtactttaagtggatacatgaattctgtatcaataaytttatttaaaaatgtcttaatgcacaactctcttccattacattaaaagtaattcagtttaccaacacaagattaggatcatttcatttgcttgtgaaga

SEQ ID NO: 6368 - DNA, 201 bp, Homo sapiens
tggaattacaggtgtgcaccactgagcctggcccaaaacaccattgttcagttactcaggtcatttcctttcttcttcacccacttcagtctagttatatratttatttgtaatacggttagattgattcgtcacagtctgcattccaccttgggttgccatcacattctggttgatttttttccctctgggtcatgtcat

SEQ ID NO: 6369 - DNA, 201 bp, Homo sapiens
tagtagagagagagtttcaccatgttggccaggcaggtctcaaactcatggcctcatgtgatctgtctgcctctgcctcccaaagtgctggaattacaggygtgcaccactgagcctggcccaaaacaccattgttcagttactcaggtcatttcctttcttcttcacccacttcagtctagttatataatttatttgtaa

SEQ ID NO: 6370 - DNA, 201 bp, Homo sapiens
ctgtatttttagtagagagagagtttcaccatgttggccaggcaggtctcaaactcatggcctcatgtgatctgtctgcctctgcctcccaaagtgctggrattacaggtgtgcaccactgagcctggcccaaaacaccattgttcagttactcaggtcatttcctttcttcttcacccacttcagtctagttatataatt

SEQ ID NO: 6371 - DNA, 201 bp, Homo sapiens
gtcaaaacaccattttatttacttacttatttatttatttatttattgagacagaatctcactctgtcaaccagactggagtgcagtggcacaatttcagytcacctcaacctctgcctctcaggttagcacaattcttgtgcttcacctcccaggtagctgggactacaggcgtgcgcccccacacccggctaatttctg

SEQ ID NO: 6372 - DNA, 201 bp, Homo sapiens
agagaaagatgcttcggatgtgaagtgtgctaatggagatccacccattttcaccaagcccgacaagatttctggcgtcataggtgctgcagcaagctccrtgtccatcatggttgctaacattttaagactttttaaggtaggtaaaggcattgtctttctgaccattgtgaaagaacaatgaaatgctatgactcctac

SEQ ID NO: 6373 - DNA, 201 bp, Homo sapiens
atgcagacctgccaggcatgtcatgaatttggcagctttggatttaatgtgcttctacagtttatggcctgtttgtgtgatctcctgcttctttaaggttrgttttggactacttacttacttttatctctttctaggtaatagtttacttataatattacttttatctctttctagataataattactttgtgttggctg

SEQ ID NO: 6374 - DNA, 201 bp, Homo sapiens
ccctctcaaaggtctgctcagtgggctggaatcgggtggtgtttgttcctgccttctgggcagaggaaggcgttcttcctacagctgtggcggtgatgackgactctccttctcatttccccttcactttctctcccctcctctgagagtttttcctgtagaatactactttttgaagaaaaagggaaaagggaaaaggaa

SEQ ID NO: 6375 - DNA, 201 bp, Homo sapiens
tttagagaaagtataaaatacatacagaagagtgcagtaaatctatagcttagtgaattttcataaattgaaagcaccccacacagaatccagaacaccaraacaaacccccaaatcctcagctggcacctcaaaatcctcctgggttctctattcctcattacaccctcgccaagaagtcgctctcctaacttttgatag

SEQ ID NO: 6376 - DNA, 201 bp, Homo sapiens
gccaagaagtcgctctcctaacttttgatagcacagactaggggttcttgcttttaaactttatataaataaaattgtataatctgtacttttaaatgtcyggcttcatttcacagcaatttttaataaagataaaatatatttctaccattatctgtctctattaatgttagattcaattatttaaatttactttgttag

SEQ ID NO: 6377 - DNA, 201 bp, Homo sapiens
aatttataaaggtttacattttagtacaatacccataatttttttgaaactggtaaagaaaatattaccttcatgaaccttctcgtcttggttttgttatygtcattcttttaaataataaacttcattttgtagagcagttttaatctcacagcaaaattgagtggaatgtataggagtatccatagttctatgttgagg

SEQ ID NO: 6378 - DNA, 201 bp, Homo sapiens
agtacatagctttttcagatttgcctctttcagttactgatatacgtttgggtttcctccatgtctttttatggcctgatagttcatttcatcttactatyattgagttttaagggctctttgtatattttgatatagttgtcctttatcagttgtgtcttttgcaaatattttctcccagtctgtggcttgtcttctcct

SEQ ID NO: 6379 - DNA, 201 bp, Homo sapiens
tatgcactaaaccatgggcacagtcacctatttatttatttttgcatctatttttatatatatacacacgtacacataaatatatgttgaaagcccttgcrttttactgatacctctgactttgaaccaacattacaagggtcattctaacttttcctgttttcttgattgtaccttctttctcacacagtgagaaatttg

SEQ ID NO: 6380 - DNA, 201 bp, Homo sapiens
attgtcacacaaataatacactcttatctttgtatcatatcaaggatatgatgtcttatgtcttatgtactaatatgcagtaatatgttttattacatgtraatgaaccttgcttatttgcttaaggtagctttttccagatttctccattatgaagttatgattttttcattggtaattgataaatatttatttggagga

SEQ ID NO: 6381 - DNA, 201 bp, Homo sapiens
gaagattgtcacacaaataatacactcttatctttgtatcatatcaaggatatgatgtcttatgtcttatgtactaatatgcagtaatatgttttattacwtgtgaatgaaccttgcttatttgcttaaggtagctttttccagatttctccattatgaagttatgattttttcattggtaattgataaatatttatttgg

SEQ ID NO: 6382 - DNA, 201 bp, Homo sapiens
cgttatcttaagttgtcatgcttccttggtttttttcaatctgtgacagttcctcaggctttcttcaaatttaataaacttgagaatttgaatagtactgstcagttaacttcatgaagtacccctcacttttctcttgattagattgaatgtatatactgttgggaagattgtcacacaaataatacactcttatctttg

SEQ ID NO: 6383 - DNA, 201 bp, Homo sapiens
tctccttcgtccttctcccagctttccctaatatgaacattgcatataactatggtaagtaaaatgatcaaaacaaataaactaacatactaagaaaactrccaactttattcagatttcaacaatttttccattaatatcctctttgagtcgtaagatctaaccctggatcccacgttatcttaagttgtcatgcttcct

SEQ ID NO: 6384 - DNA, 201 bp, Homo sapiens
atagttgtttgattatttgtttttcccctaatttttaaatttgagatacttttagacttacaaaagcgttataaaagtgacacagaaagctctccttcgtycttctcccagctttccctaatatgaacattgcatataactatggtaagtaaaatgatcaaaacaaataaactaacatactaagaaaactaccaactttat

SEQ ID NO: 6385 - DNA, 201 bp, Homo sapiens
aagttgtttccaggttttatctcttatgaataatgctactgtcaacatgggcatacaaatatatcctcaagaccctgctttcaatactttgtggcatatayccagaagtggaattgctgggttatatagtaattctatttttaattttatgaggaactgccatattgttttccaaagcaacgttaccattttacattacta

SEQ ID NO: 6386 - DNA, 201 bp, Homo sapiens
acattaaaaatcagtgatttctgtgaactatgataggtatataggggatggcttgagagagtgtaataaggactctttggtgacactgacaggataaaaargtctctctgaagtttgcaatgaggtcagatcaggtgggcagcaccttcctggcagagtaaacagcttgtgcaaaggtcccaaaacagaaaagcctatcgg

SEQ ID NO: 6387 - DNA, 201 bp, Homo sapiens
tgcccctggctttgttctttttgcttagtattgctttgagtatttgggctcttttttggttccatatgaattttagaatagtttttcgaactctatgagarataacattgataatttgataggaatagcattgaatctgtagattgctttgggcagtatgaccattttaacaatattgattcttctaatccatgagcatgg

SEQ ID NO: 6388 - DNA, 201 bp, Homo sapiens
agagcccgcatcgccaagtcaatcctaagccaaaagaacaaagctggaggcatcacactacctgacttcaaactatactacaaggctacagtaaccaaagmagcatggtactggtaccaaaacagagatatagatcaatggaagagaacagagccctcagaaataacgccgcatatctacaactatctgatctttgacaaa

SEQ ID NO: 6389 - DNA, 201 bp, Homo sapiens
ataattcgatgaataaaaataaataaactgaccactatttttgtttagaaaaaaactagtttttcagagtgtaaatatacaaatataaaccacgttaattygactctctaaatatgtaggttatatgcattgatgttcagaaaacaaatatttgttgaatttaaatacaatttattcaaggttagtaacatccatggaaag

SEQ ID NO: 6390 - DNA, 201 bp, Homo sapiens
atagaatagaaaaaagacctcgtccagttttgttggtgactcacagcaaagtttgtacaaatggaaactggtctggagagaaccgaaagtctgtgagaccrgctcaaactataggcttataggactcatgcctgtgctctaccctgggattctcattctaatgataaacgctttcagacagtccgacacagaagaatgaaa

SEQ ID NO: 6391 - DNA, 201 bp, Homo sapiens
atgagttaagactgatgtgtattacatctagggcagagttggtactgttaataacttctgttagagttaatgttaaatttcttagtcttttctatgtataygatttctggtgttgggaacactgttctgattattcatataaacaatgagtcagtaattctccctgatagaatgcttcaaaggtggcctcattttggaact

SEQ ID NO: 6392 - DNA, 201 bp, Homo sapiens
ggacaagcctcagtggggccatcactgtccttatttacattattaatttgggtagccagtctcttttttttttttcacaaggaatacagaagtaacttgcwggacagttatcttttatgtagctataattcttcagtcagtggggtttggctacactggttttactcttgtagagcatgaaatatttgtccttgagagaaa

SEQ ID NO: 6393 - DNA, 201 bp, Homo sapiens
tgaaagctaagcctcttatgccaaacagccaaattgtgaatgcaactggaaagttcttgaagggaattgaaaatgctactccagtgaacacatgaatgatragaaagcaaaacagccttactgctgatatagagaaagtttttgtggtttggatagaagatcaaaccagccacaacattcccataagccaaaacctaatcc

SEQ ID NO: 6394 - DNA, 201 bp, Homo sapiens
gtgaattcccaagtataaaggaatttagcctcaagtgatagtttgaatctctttcccagagattcccgtacaaatgcttgaaaagggccaggagcttcacrtgaactgtgtggtccctgttttcagttatttattattttcctgctacctaactcctattgccaactgtattagtttgctagggctgctgtaacaaagtcc

SEQ ID NO: 6395 - DNA, 201 bp, Homo sapiens
aatgataataaatgcttgcttaaaaataattaatacaaatactagttaggagagttagtctgataaccaactcgaaaatgatttcaagtcagaaaggtccrtagtatgacttaagcaaaattctggtaaacaaaatcaagtacataagtcagactcactttttcctccttgtttacatgcagatcgagtgacaataaaaag

SEQ ID NO: 6396 - DNA, 201 bp, Homo sapiens
tgtatttatctatatttttgccatgtttttttcttccttcctgatgttctgagacattctttcttttatcttttcctttttgtttagagaacttcctttartcattattttagggcaggtctcctggtgacaaatcctcttagtttttcttcatctgagaatgtcatccctgaagaatattttctctggatatagaatttt

SEQ ID NO: 6397 - DNA, 201 bp, Homo sapiens
ataccttgagaactgcattagacagtgttatgattttttaatcatcaactgaatctagaaaactcaagaggagaagcaaagcaaactcgattgtatttatmtatatttttgccatgtttttttcttccttcctgatgttctgagacattctttcttttatcttttcctttttgtttagagaacttcctttaatcattattt

SEQ ID NO: 6398 - DNA, 201 bp, Homo sapiens
caccatgcccggctaatttttttgtatttttagaagagacagggttttaccgtgttggccaggatggtctcgatctcctgaccttgtgatccgcctgcctyggcctcccaaagtgctaggattacaagcttgagccaccacgtccggtccaaatagtgttggttttaatcatcatttagcaactatgtaaaataagttgtt

SEQ ID NO: 6399 - DNA, 201 bp, Homo sapiens
aaatgtctttgttttttcaaatatgctgtatgactctcagtaaagttggcataacactatataatggtgttgactgtgtatttgggatcctaggttttttycccctagttctgccatttttctgtgttgcgagcccatccaagcctctcaacttcatcttttaaatggaaagattatactaaaatgatctaatatttgagt

SEQ ID NO: 6400 - DNA, 201 bp, Homo sapiens
aatttgcttttctgaaagtctttcttttaaactggttgttttgcctgaagatacactcttaatcttatttgccacttaccttaggtttttcagtgttttcraaactctagggcattgcatggaaatttttaatacctgaaggggacacctggcacctgcctgaagcactttctatttcctgccaggcacaaaggagagatg

SEQ ID NO: 6401 - DNA, 201 bp, Homo sapiens
ctgactcctaccaagcccaagccatggtggacatcgtgacagcactgggatggaattatgtttcgacactggcttctgaggggaactatggtgagagcggygtggaggccttcacccagatctcgagggagattggtaagcatatatttatcagatgattgtatttggaggtgacagattgctgatgcctgagcatctcca

SEQ ID NO: 6402 - DNA, 201 bp, Homo sapiens
ttgacttttgccataagagaggccttatttatgggctactggctttctctcatttgttatgtgttttgtttttttcttttcatgcagtgatcagaatatartgtccattcgaaagttctgacaatatttaattttgaaagaatattaaaatcatacctttctcctttgaaataggatttgatcgatactttagaagccgaa

SEQ ID NO: 6403 - DNA, 201 bp, Homo sapiens
ccttagggatggtaaggggctgtaaggatggcagaaatctctaaaacacatattttatcatccttaattgggctcataaaatcgagataatcagacaaggkttatgacactgtcaacctccaatgagcactctgcctcttctagagcatccgatggaaacaaaacaaaacaccctcaaagtggaaaagaaaataaaactca

SEQ ID NO: 6404 - DNA, 201 bp, Homo sapiens
aactaggttttttttttcattttgtttctttcgttctccagaatcttttatgatctatttgttctcgggattctgacatttctgcaagatataaactaatrtttgtatatttttatatgttgtgctggaatctcagtagaatgttttaatctagaatttcatatactttcattctggaaaaattttgatatttttgtttaa

SEQ ID NO: 6405 - DNA, 201 bp, Homo sapiens
attttctgtctgtgttcgattgaaaaaaaccaatgtagaagtagacccatacactccaaacccatgttgtccaagggtcaactgtatttccagatatcaayggatttctaatttattaaagcaaccatatactcataactacaataattgcataattatacaggtacagattaaataataaactatttgaattcagtggtt

SEQ ID NO: 6406 - DNA, 201 bp, Homo sapiens
tctgttgaacagaagtggtgaaagtgggcatcctgatcttgttccagttcttaggggtgagcctttcaacttctgcccattcagtattatgctggctatgrgtttgtcatagatggcttttattattttgagctatgttctttctattcctagtttgttgaagatttttaccaaaaagggaggctggattttagaaaatat

SEQ ID NO: 6407 - DNA, 201 bp, Homo sapiens
gcacagccttgtctgatttgatttatatatataatttatatatatgtaaattatatatataaattatatataatatatgtaaattatatatttacatatawtatatattatctataacatatatattatatataacatattatatatataattatatatatatttttttcacaggctctcaggattaggcatgattctgcc

SEQ ID NO: 6408 - DNA, 201 bp, Homo sapiens
gcttggaatttgcaagcttttgtgtgagagaaagatggagagcatttaattatgctcagaaataacttccctataattgcaaattctgtgttcctttttgwgtgtgcaaaccaggacaaggactttaaaaagataattatatgagaaaagcagtcattccttcttttccctcttatctttatggtgtaatcaataggtcta

SEQ ID NO: 6409 - DNA, 201 bp, Homo sapiens
ggggtaattaaacaaaaatggcaactcattagcataaatgaaaacaagtactgtatctaccatgccaaccagcaatttgtattaattttatatataaatakttctgagattatctggggaaaataatggccctgaaagaaaggggtaaagagtttgcagctctttgcctttgctagggggaggaattggaattgtttctct

SEQ ID NO: 6410 - DNA, 201 bp, Homo sapiens
tttattaatgatattcttttgccactcactctgttttattacttctgcaatctttctgtttcattttgttatttcatcacctggttctagagctatagtarttgaattcatatccatataactcattttattaaagtatttgtggtgaattttcataaaaatatttttaaaaggtaagagccactatttaaataagtgctc

SEQ ID NO: 6411 - DNA, 201 bp, Homo sapiens
ttttttccctaaaagtgttcacactttctttttaaaatagttttgtagttcctcctattattataagggtagacgtcatatttaatgtacatgtcaaagayggtatccatattatatttagtaagtcacacaagatgaactattttatgtatcttttaggccagcaaatgctttaacagtgccttgcactttttttttttt

SEQ ID NO: 6412 - DNA, 201 bp, Homo sapiens
ccacattttttagacatagattaagatagtgtgatgtacttgactaagaaatgcaccaagctaacatagcttctaaaagtgagtctatgatcatgagactktcttctcacagccatttcgtaaatgactggcaaatgaagtctccaaattatatcatcactgtagggatgccacagaagtaaagataactactccagtaaa

SEQ ID NO: 6413 - DNA, 201 bp, Homo sapiens
atagcttctaaaagtgagtctatgatcatgagactttcttctcacagccatttcgtaaatgactggcaaatgaagtctccaaattatatcatcactgtagrgatgccacagaagtaaagataactactccagtaaatatggtgggaatatggtgtttccctatattcttcatctaaggattatattgctctaataaatagg

SEQ ID NO: 6414 - DNA, 201 bp, Homo sapiens
tgatcttgacctcttcacttgccttagctttgacagaataatgttgaagcatagggaagaataccaggttttgttggcatttcctattttgttgaattccyagttttaaattttccataatagaagtagatactgctggatattaaacagtttttcttgaacatcagctggaagtttttgacagtaattgagttttagtct

SEQ ID NO: 6415 - DNA, 201 bp, Homo sapiens
tgttaaaaaaccactcctgcttgctttgacatgagaattctttaaaaaagtaaatcctctctcaaaatagttttgttttggcactggggataaaaagcatrtacatatacatataatgtctcagggtgtgtagtgttggggttatcataacctagatgttttgatattaaacgatgttcttttaaacagcttgtacttgtc

SEQ ID NO: 6416 - DNA, 201 bp, Homo sapiens
tctcttccttcttttccttgttagacctttaatctatagtttttcccctttctttaattcatagaaattttcaggagttatttcctcaactgctttattakcctctcctctgagactgttgttaaaaagatgtggacacttgtatattccacagatcttaactattacactttatatcttttttcttttccaataccttat

SEQ ID NO: 6417 - DNA, 201 bp, Homo sapiens
ggggctgccctggaaaacattgatccatgggcctgtgagggaacctgtgcttctagcatgagtggcacattgtcgccagttgtgacctagcttccatgggwttctgtgtaatgtttactatgtttactagggatcacatggcctttccagctactctttttcactctgtataacttccgatagaaagagcttaaagttaag

SEQ ID NO: 6418 - DNA, 201 bp, Homo sapiens
gtatcattgagtgggattgagaactaaagcaggttaagaagggagaaactgaggcccagagacatgaataacttaataaagatcatagagtgagttacaargaaagactagcaccagggactcaggtttccttgttcctggtctattggaacaaggaagcccacccctgaatccataccacataaccaatccccaggctgc

SEQ ID NO: 6419 - DNA, 201 bp, Homo sapiens
atgacaataaagctatcccttattaattaatatatcccaggctctgtgccactgtgtatatatgttgtctcactaaatcctttgatttaagtctatgaaarcttagaagtaatgtgagtgcctgaccctcagttatacagttaacttgttttgagggcagatcccagagctctcctattcccaaagtgaaaacgactgact

SEQ ID NO: 6420 - DNA, 201 bp, Homo sapiens
ccaagtccccaaagtccattgtatcattcttatgcctttttgtcctcatagcttagctctgacatattagttagaacatatggtgtttggttttccattcytgagttacttcatttagaataatcgtctccaatctcatctaagtgactgcaagtgctgttaatttatccatttttatggctgcatagtattccatcatat

SEQ ID NO: 6421 - DNA, 201 bp, Homo sapiens
catgggtggtcatttgggtaaggaatgaactttttcataaaatccaacttaccaattttttttcgtagattatgctttggtgttgtatctaaaaattcgtygtcaaactcaaggtgacctaaattttctcctatgttttcttctagaaattttatacttttgcattttatattttagtttatggtctgtttggagttaatt

SEQ ID NO: 6422 - DNA, 201 bp, Homo sapiens
cttttcttgtagatatgtgagatagttcaaggttctcctaattatgttttcccatttttagctagcaacctagagtccagactaatacattaaaataatasttgcctcatagagcggttgggaagttaaaggaaataatatgcataaagattattgcctgctacatagggaatataacagatactgttgcttactgattta

SEQ ID NO: 6423 - DNA, 201 bp, Homo sapiens
tgattggggaagagggggaaggaggatgatgaattttgtgggagatactgagtttaaggatcctatgagatatagagctgcagatgtctgggaagggttasttggttatgtgagtctgaagctaagaatacaaggtcttgctgagacagagaattggggcctcactagtatattaatgggacttggtgagacagatccaga

SEQ ID NO: 6424 - DNA, 201 bp, Homo sapiens
ggatagagacctaggcaagggacagatcatataacactttatatgcctcaagaggcagttgaaaaatgttttgaaagtcaatgaatgggcaccagaaggtwttaagcagaataatagaatcaccatcttagaaagattattctggctgtagtatggataatgtattggtgaggcataacactggaggaagggagacccatg

SEQ ID NO: 6425 - DNA, 201 bp, Homo sapiens
gtttgtcttaaaatgaatctctccatttttttttttaagagccaaaaagcctccagagacttccaggggacgcttatatctccttggccagaattcagtcrcatgcctacttttaaattaatacctgggaaaggagtgagattacaatgactgagttagactatacattctcagtggtggcagaattgccaccgtggtgac

SEQ ID NO: 6426 - DNA, 201 bp, Homo sapiens
ctcccccttcccaatttaaggacccttgtggttacaatgggcccaccagaatcatctgggatcatcttcctgtctcaaattcagctggatagctaccttarttccatttgcaaccttaattttcctttgcagtgtaacctaccatattcacaggttccagagattagaatgtggatgtctttatggggctgtttttctgtg

SEQ ID NO: 6427 - DNA, 201 bp, Homo sapiens
ttccctccatcctaccctaaacttgccattgagaaagaactccatacagtccttcatgctcagacctaaatgtaagtttacaatgaggtttctgtcattcyttgtgtcatttgcatttaaaagggcccgaagatctaggtagtctaccaggattaaattctcactgagtagaattccttgagtgagcagatctgtcaggtg

SEQ ID NO: 6428 - DNA, 201 bp, Homo sapiens
tatagcaagtcagcatatctgctactgttccagagtttgacccaattatagtagaatttcaaaggttgtggtatcaaaattaaaattctggtactcaagawtgtgtttataactttagtgatacacatagaactaactgttggatggagaaagttcgttagcccactcacttctgtgtcaaggtctttattataggaaaag

SEQ ID NO: 6429 - DNA, 201 bp, Homo sapiens
caaatgtagtatatgtacaaagtaacaatcttatgtacaaaataataaagcacagatggcagtccattcattgaagatggtttttttcaaggtgagtgttkgtcttttgcacaatgcttgagatggaaatgacttggctgagactatgtgatgagtgctccagatggggcatggcatcggcatggggtaggggtggaaagc

SEQ ID NO: 6430 - DNA, 201 bp, Homo sapiens
aactagcaaatgggatcaggagcatcatggaaataaagacagaaaagtgccttaacagctttaaaattcacagatggcaaatcaagtaaaagatctgtttmtcaccctctgaacactctgtaaagtgaacattggagggttaggaagtttctaatggcaactgctgtgctttgggaaatcttggtggaacccttggctctc

SEQ ID NO: 6431 - DNA, 201 bp, Homo sapiens
gtattaatagctttctaatgtgagctctcagtaacaaagaaatgaaaagaattatttgaagcactaaaaaaggccagggtttcaagctggtttattttacytgatatgttataaaaaaaaaaaaatttggacagtaatgtcaaatcggagatgcctcagtatggttttctcaatagaactgaataatatattagtgagtgc

SEQ ID NO: 6432 - DNA, 201 bp, Homo sapiens
aatatactccggctgttctgagagaggtcttcaccgcatttgggcaagcttattgataggcttaccagaatggttagggaatccagcctggcaaggaatckcaaagcacattgctggactggtgtgactgtacctcacccacaagagctgatcatcctctctgtaggtagaggttgaggaagagcctgggatgcacagcat

SEQ ID NO: 6433 - DNA, 201 bp, Homo sapiens
ccagaaacctggggaatcattgctgggtcttatttttccttcattcctcacacgcattcatgtttgtggtcatacaagccatgtcccatttcatctcctgrttagcttctgaacctgccttgtgtgtctgtctctgctattactgccttagaccagctgctgtcaactcttgtctgcattaatgacatagtgctctggctg

SEQ ID NO: 6434 - DNA, 201 bp, Homo sapiens
gtcgaataagtaaatgagcatttatgattagtgttttaataaaaatttcatcttcacttaattacttccctcccttgctggttaatattatttgatgaatkaccgagacacatagaaaacttgggaataagggtcctgaaaataagggttctgatggttcaaatgcatagatagtaaatacaaatattttctcttaagaac

SEQ ID NO: 6435 - DNA, 201 bp, Homo sapiens
cagcctctgtaaaccagccagatcagtccatggtccatggtctcttattaggagaaagttactgaaccacagctgtctcttttccaatcaaaaaatgtggktatggcttgtggaatcggccgggggtcagcatctggtggtgagagtgctgcagttgtttcaatagtgcttatcttgaggccggtgctggtttaactgcta

SEQ ID NO: 6436 - DNA, 201 bp, Homo sapiens
catggcagagaccggctctagagtcccagggtttggtataaactttggtttcctactcattagccaagttactcaacacgttgctatgtcagtttcatcayggaaaaatcacaagatctttaaatctgtgaaggagactttatttcttataaagggttatagcctgtggtctggccatttttgaaggctgggaagtgtagc

SEQ ID NO: 6437 - DNA, 201 bp, Homo sapiens
ctacatcaggctagctggggagggccagaggactgaacctggatctctgggatttccccttgggtgcattacaatccccaaaggaccctgccccttttccycgccagtcttagtccctacatttgaggaggatgctgggatccccctggttcactccactcctgccaccctggaaactctgactctagctctgaaggtgtg

SEQ ID NO: 6438 - DNA, 201 bp, Homo sapiens
tagaaaaagtatttgtacctattttaaaagctttttatgttagaaaacaaaggatatataaatgtcaatagattggaatataatacaggcattaatattgwtgcttataataatttaacaaaatgagaccatgctaatacacataaactgcaaagcacctacatgctgtaatgtattgtacttatatacaccaaaacactg

SEQ ID NO: 6439 - DNA, 201 bp, Homo sapiens
aaaaagcaagtactatgttttagatggtgcatgtctaatctgtagagggggaggaatttttctaaatgtagaggaattgagtcagaatcacatagggaaatataaatagacctaactatttatatttagttaataaatataactatatatagtttagtttgttttcttataaataaataagaaaaacatagttgggagaaa

SEQ ID NO: 6440 - DNA, 201 bp, Homo sapiens
agactaatataatttaatagcaaatgcatgaaagcgtcattaaatgtaactagttttgcctaagcagaacccagaggagaaatgtagatctaaaataagayttagtatatttcaacactcaagagctttcttgatcactttaaggcatgctaacaattttccatatgtataacagttataaggcaattaatggaatatttt

SEQ ID NO: 6441 - DNA, 201 bp, Homo sapiens
caagagaaaggatggcagttgtagagactaggagagggggataggaagagagtaaggatagagacctaggcaagggacagatcatataacactttatatgyctcaagaggcagttgaaaaatgttttgaaagtcaatgaatgggcaccagaaggttttaagcagaataatagaatcaccatcttagaaagattattctggc

SEQ ID NO: 6442 - DNA, 201 bp, Homo sapiens
actcaagctatttgtattctaccttcaatcaagccttctttcacactgttactccctgcttctgtgaacgtcatcacattttacctggttgtaaaagccasaaagctgggttgccttcacccttttctttatccctgtctctccaaccttataatcagtgatcatatgttgcctcttatggctctttaatatctttcttca

SEQ ID NO: 6443 - DNA, 201 bp, Homo sapiens
gaaggcctgtattcagtaaactgtctacaataatcccatctgagcctccttttcttcagcctctgtctgtctttgttttggcatctatcttctctgatttsttccttcccacgtcccttctccattgccagttccttttagcctcagcaaataaacatgttccagtttcttatttcatgagagaaaagtaaaaataaataa

SEQ ID NO: 6444 - DNA, 201 bp, Homo sapiens
ttatgaatgtgctcattgccctgcaatgactaactttaaattcgtctagacgtgagaaacacatttgactacagaaatgatagatgagcacttcttattartatttctatatcttaatgctattgaaatgcatgctaagggatcccagtcttgttgtttttttgcttttctagatgtcattccatttcagctatttcctta

SEQ ID NO: 6445 - DNA, 201 bp, Homo sapiens
atctcagtagaatgttttaatctagaatttcatatactttcattctggaaaaattttgatatttttgtttaatgattccaactccctatttgcttttccaygaattcttcttataattattgggcatgctgaaattatctttaattaacttttttgcttcatttatttctgtatgtctttttgcttaaatttctgggagat

SEQ ID NO: 6446 - DNA, 201 bp, Homo sapiens
tggtttgcatctcaactttgacttgtgcaaccaaagatacccaaaaacaaaacgaaaacaaactcttgatgcttcaaacatatgtttattctatcctattygtctctgttttaatgaattacagcacatctaccttctgatctagctgaaagccaagaatttaattcctccttttcctcacccctgctagtactactgaca

SEQ ID NO: 6447 - DNA, 201 bp, Homo sapiens
ctaccatattcacaggttccagagattagaatgtggatgtctttatggggctgtttttctgtgtaccacagggacaaaaataatcttaggtgttacaatcrtttatgttcctccaaaggacattgtatctgtggaattaaacttttacaggatggggacggaggtttgggagtacttaaggaaaaaaaaatacctacgaag

SEQ ID NO: 6448 - DNA, 201 bp, Homo sapiens
atgaataataacctccttctccttttaaatgaagccaagaaatttattcctaatttaaactaaattctatgtagtttatcttctgtaaaagataactaatrtactaataaaatctataaaattacattgaaagcatagctgttttaagataaaataggcattttttcatatacttgtgatatactaaaaatatgagaaata

SEQ ID NO: 6449 - DNA, 201 bp, Homo sapiens
aactgactgttcctttgcagattcttatttataaaactctccttgtcaaagtcttttgtctggtttgcatctcaactttgacttgtgcaaccaaagatacmcaaaaacaaaacgaaaacaaactcttgatgcttcaaacatatgtttattctatcctattcgtctctgttttaatgaattacagcacatctaccttctgat

SEQ ID NO: 6450 - DNA, 201 bp, Homo sapiens
aacacaaattctactttttatggagttttcaagggtagaatacattttattaactatatcaccatgttttacaataaacatcttaaaatttaatcttcctrtctaaaattttgaatcccctcaccaacatctccccaactgctccccacatccttcgtttcccaagtattccagcccctggtgtaaccaccattgtactct

SEQ ID NO: 6451 - DNA, 201 bp, Homo sapiens
atggcagagcacacctgtagtcctagacacttgaaagattgaggcaagagggtcgctcaaggccaggagtttgaggctgcagtgagctgtgatcataccastgcacttcagcctgagtgataaagacgagacctcgtataaaaaacgaaaaaggtgcttggatgcactgtgctctgaggttttgtttctgactcttatgtt

SEQ ID NO: 6452 - DNA, 201 bp, Homo sapiens
ccctttaagcatataattgtattccaaattaattcttaaaacatgtataatttgttataacttttaacaaggtttgttaataaaatgctgtaatgtttacmaaacaattatattcgagaaaagagatgttatacagatttatcgaaaagagaatttgataactaaattaagtaaatgccaactattatccctaaatgtaga

SEQ ID NO: 6453 - DNA, 201 bp, Homo sapiens
tctgataggctttggtaacagccaacataagaaagaggtgctttggtggccaggtgtggtggcttaagcctataatctcagcacgctggggggccaaggcyggaggattgcttgagcccaagagtttgagaccagactgggcaacatagcaagactctgtctcaagaaaaaaattttaaaaattagccaggtatggcagag

SEQ ID NO: 6454 - DNA, 201 bp, Homo sapiens
caccaagcagacctaatagacatctacagaactctccaccccaaatcaacagaatatacatttttttcagcatcacaccacacctattccaaaattgaccrcatagttggaagtaaagctctcctcagcaaatgtaaaagaacagaaattataacaaactatctctcagaccacagtgcgatcatactagaactcaggatt

SEQ ID NO: 6455 - DNA, 201 bp, Homo sapiens
ccttcacaggaaggccacacttaagttgaagttgacactctaagtggcagaaagaaagcatcctagccaatttagaaccatcttatttaaaggcaggtggsaaaactaatttaattgcctataatttctttaccatttaagaattttaagccaaattttgaatgttatactcttaaaatcaataccaataatatctatcag

SEQ ID NO: 6456 - DNA, 201 bp, Homo sapiens
gacccttaagatctgactctgtctagccagtctccccttgaccaaggagaacatttgggcatgaactgtagttttcattgtcctctgaccaactcagaaayagctacctgaggccagcctttagttctattttgatcaaactgtcttatagacacagccttcagccttccctgtgacctttgaaaactgccccagggtaaa

SEQ ID NO: 6457 - DNA, 201 bp, Homo sapiens
gggtaaacttgttccctcaacccatttaaaagggcagtaatcccagccatgaaggtggggcctcccagagtcctcacctcttaataacatcaccctggggrttaagttctgtgatggttaatactgagtgtcaacttgattgaaggatgtaaagtattgttccttggtgtatctgtgagggtgttgccaaaggagattaac

SEQ ID NO: 6458 - DNA, 201 bp, Homo sapiens
aagggaaggtaaattgagtgaagttccaggcattcggagaagtgagccagttgaagtaagaggactgtgtcatgacagtgggaggaatgtggataagtgtrtcaccgtagagacagcactgggctttgggtttacacacattcatatccctcggtacaattattatacccttcaacatccagtgagttgcagaattacagc

SEQ ID NO: 6459 - DNA, 201 bp, Homo sapiens
cttcctttcaaatagcagcaagacactataaaatattagaagaggagattaaacatcagaaaaattgtctctgccactatatttgccatgcacttgcatcrctaattctgaaaaggactgtaccctacctaatacacaatgaaaagcaaaataaaaatgctgatgtaagtgtcagaggatgagaggtaggggaacagcata

SEQ ID NO: 6460 - DNA, 201 bp, Homo sapiens
catggcttcaaccagtccctccattcggggtccctgacttcccccaacaactgatcagagttgaaagaatataggaaacatataataagagggttgtagaygtcctgacagtctgacttaatcatttgctggtagtataggtagacagaagtcgtccagttcttcctgggcctgaggaagtgttcgtgaatttgcaggtaa

SEQ ID NO: 6461 - DNA, 201 bp, Homo sapiens
gagtattaactcacacaatcacaatgtccctcaacaggctctctgcaagctgagaagcaaggaagccagtctgagtcccaaagctgaagaacttggagtcygatatttgaggacaggaagcatccagcatgggagaaagatgtaggctgggaggctaagccagtctagtcttttcatgtttttctgcctgctttatattct

SEQ ID NO: 6462 - DNA, 201 bp, Homo sapiens
ttgagacctactgctcagaaaagaagatagttttcaaaacattaatgctcattgaaaatatacctggtcacccaaaagatctgatgaagatatacaaggastttaatgttgttttcttgactgctaacataacatctgttcttcagcccatggatcaagcagtattttgactttcaagtcttactatttaagaaatatatt

SEQ ID NO: 6463 - DNA, 201 bp, Homo sapiens
agaaagtgaaacagtcttattgcttataaagttttgattcatctgtatagaagatcaaaccagtcacaacattcctttataccaaagcctaatccagagcraagccctgctctcttcaattctatgaaggctgatagtggagaggaagctgcagaggttggttcatgaggtttaagaaaaaaggccatctccataacataa

SEQ ID NO: 6464 - DNA, 201 bp, Homo sapiens
gcaaaggaaaagttcttaaagaaaattaaaagtgctactccagtgaacacacaaatgatgagaaagtgaaacagtcttattgcttataaagttttgattcrtctgtatagaagatcaaaccagtcacaacattcctttataccaaagcctaatccagagcgaagccctgctctcttcaattctatgaaggctgatagtgga

SEQ ID NO: 6465 - DNA, 201 bp, Homo sapiens
atagtttcctttgctgagcagaagctctttagtttaattagatcccatttgtcagttttggcttttgttgcagttgcttttggtgtaccatgttttattgygcctcacaggtactgtgtttcttacaaattgcatttttgtgagaactctatttcaagtcggtgggtgctgtttttccaacatcatgtgtttactttgtat

SEQ ID NO: 6466 - DNA, 201 bp, Homo sapiens
ccccttgttccctacctgccaacaggcctggtgtgtaatgttcccctccctgtgtccatgtgttctcactgctcaactcccacttatgagtgagaacatgyggtatttggttttctgttcttgtgttagtttgctgagaatgatggtacccagcttcatccctgtccctgcagaggatatgaactcattcttttttatgac

SEQ ID NO: 6467 - DNA, 201 bp, Homo sapiens
agagaaaggcaaatcaaaacacttttcaactttctatcaacattatactgtctatggcactagaaccaaactcttactgagtatccaagacttcattaaarttgtctctgctctgtctttcttaagttattctaatactcttctagacttgcctgtaactagttctcatttgactgcttttctagctgtcagagccatggg

SEQ ID NO: 6468 - DNA, 201 bp, Homo sapiens
tgtgcattctgcacgaccttcggtgacccactgttgagtgactttccaaagcctgtgcttctgatcttgacctcttcacttgccttagctttgacagaatratgttgaagcatagggaagaataccaggttttgttggcatttcctattttgttgaattcccagttttaaattttccataatagaagtagatactgctgga

SEQ ID NO: 6469 - DNA, 201 bp, Homo sapiens
ttttttacttcattttaactaagcatctatatgttttgttgagaaaattgcttgaattatataagccttgcatttcattcagagagcaaaactcaagtatrtttttatttactaatttcatttactaattgactctaatcaggttcagtgcatgtgacagggtgattatgagagctaagctggctctctcaggccaaatgt

SEQ ID NO: 6470 - DNA, 201 bp, Homo sapiens
ttttctgtagagaaataacttagctgtcaaatatacttctctggctaactgcttcacaactccagatagttacagaaattgttgctgccaacatgagtctyaaattaggccaattagactacaattcaggagtctaagaccctgactatatgtaaggaaaaaaaaaaactgttttgaaaaagaagccagatgagcatttta

SEQ ID NO: 6471 - DNA, 201 bp, Homo sapiens
atatatataatttatatatatgtaaattatatatataaattatatataatatatgtaaattatatatttacatatattatatattatctataacatatatwttatatataacatattatatatataattatatatatatttttttcacaggctctcaggattaggcatgattctgcctatcacaagcactgtgccaaatat

SEQ ID NO: 6472 - DNA, 201 bp, Homo sapiens
ttgtttctgtttttaaagaatgaaatactgctgtttctgtttctataccataaccaaaaaagaaaaagccaaagcagtgattttagctttggtttttttttcagattcttaacctctagcttgtagaaagaaaaaccttccagaaagagctctctctgtaagtatcagagcagtcgatttcagtgggataagggcaagcaa

SEQ ID NO: 6473 - DNA, 201 bp, Homo sapiens
ggaaataacttaggatatattttctaagtttctctgctttagcaaaactgaacaattactatttgcttgttattacaaacatttactagctactcaattgratcaacctgtctaaattctttgtggcattgtgactctataggttaaaaggctactattattctaaggagacttgtgattgctttcaagtcctagttctgt

SEQ ID NO: 6474 - DNA, 201 bp, Homo sapiens
caaagttgctcaaagtgacacatagagtgaggtctgtggctgttctcttactccaaatgtgggatatctcagaaattgccatcctccagaaggctacagastagctcagactgtgcaaattgttctccatttgccatgcccccatgcactcaacactattccatgtcttccctgtgctctgcgaagctgacccttgtcatt

SEQ ID NO: 6475 - DNA, 201 bp, Homo sapiens
ctggcagctggttgaaagcaaaagactgacctttatcctggaaaaataaaatctcctccctcctcactcttcctggagtctttaatgataccacatcatgrcctacgttgagtagaccttgatatgtacaaatgacctatccagagtttgaagagggaactgtaataggtcccagaaaagatttcatattagtatgctcca

SEQ ID NO: 6476 - DNA, 201 bp, Homo sapiens
tatgagtttggacttttgcatgatagattgatttggggtgttaccacccacaggacaactccagtttctctataaacttcttcatctttaaaaaaaaaaaatcacttctagtagtaaatggtattttgaagtccattggctgctaaaaagcaaaagaaaacccattttttgatgcaagtttcactttggcagacacgcaga

SEQ ID NO: 6477 - DNA, 201 bp, Homo sapiens
tcacctcttcttgacagtcttctgtcaatgagattgacagttttctattcataatctcatagttcgtgcaccataaataactaccagttgggagcttgccrtagcagagatatgccactcatgctataaggactttgacttcagttccatttgcgcatctcactcattgtgcaatctggggtgagcctcctatttattaag

SEQ ID NO: 6478 - DNA, 201 bp, Homo sapiens
ccaaacagttttctttcctttttttttttttattatactttaagttttacggtacgtgtgcacaacatgcaggttagttacatatgtatacatgtgccatrttggtgtgctgcacccattaactcatcatttacattaggtatatctcctaatgctatccctcccccctccccccaccccacaacaggccctggggtgtga

SEQ ID NO: 6479 - DNA, 201 bp, Homo sapiens
attccttaaaacccaaatttgggagtatgaactcacaccaactcaaaagattatagagaatgtctgttatccaaacagttttctttcctttttttttttttattatactttaagttttacggtacgtgtgcacaacatgcaggttagttacatatgtatacatgtgccatgttggtgtgctgcacccattaactcatcatt

SEQ ID NO: 6480 - DNA, 201 bp, Homo sapiens
cttctttaacagatcttgagcttccttacgtggttctttcctatcattagagaagctgatattctgcttgttggttgatgctgtatcattctctttagctrgtttccacctctcccaatcattccaaggttaagggttcagaaagacctcacaggagggagaacaagccctgctctgcatctgtagtcttccttcacaatt

SEQ ID NO: 6481 - DNA, 201 bp, Homo sapiens
aggccttcgaaatacaaatgttggaggagacacaattcagcccataacaccatttttcttgattcttactatattaagggatatcaccagaaaaaaaaaaatagcacttttaaaacatcatgtgcctccgcaaaagcacctgcactgagttactgaatcaattattttgtctttaaaaagggttatagagaaaatatctat

SEQ ID NO: 6482 - DNA, 201 bp, Homo sapiens
tctcattttttttcatttgatagttcaggagttttagatcctattttcatttttttctaagttgctcttaaactttaaacatacactttatttttttttttggctaacaacatttagaagtaatttgctggcatatttttaaaatcttatatcacatcttcttccctttttaggaataattaccaaattattggtaattta

SEQ ID NO: 6483 - DNA, 201 bp, Homo sapiens
ttctttgttgccaattttccaatcatgcttcttccaagtccctgaccatccagccaaaccactggctacagcccatcaatcagtatataatcacacatctkgccatttctccttccatgcaaagtgcacatccagatgcactgcttgaagttctgcccacaggggaagatttcccttcactgctgtccttcagggatatcc

SEQ ID NO: 6484 - DNA, 201 bp, Homo sapiens
ggaaagaggctgagtggtatccattgaatgggttatcctgtccacttgattattaaaatcctcctctgctgaagtcacctgttggtgagcgctcacttggkatacaaatatcttcagagtttttgaccactcagagaggtctattcacataactcttccccaaatttctttgttgccaattttccaatcatgcttcttcca

SEQ ID NO: 6485 - DNA, 201 bp, Homo sapiens
tgattttttgtccataaaattattccgatattaaccaaaataattggtaatttaagtcctgttataattttgagtaaataaattattgcctcctaaatttktatgtttttacaagtatgtaaattggtaatatgtaatataaagggaatgtattttaaaatgttagattccacaattatttgaagtagaaatgcaggttac

SEQ ID NO: 6486 - DNA, 201 bp, Homo sapiens
ttatcagaagcctgtatttgaaagtacctgttaaagttgtatagcttattataaaccatcttttgaaaggattaaaacaagacaacaatcgtctgtgaatwacaaaatgtccagggtagttacagttagacacacaattgacaaagaagttttgttatctctgttttacaataacttaacataacaaccttaattatgatt

SEQ ID NO: 6487 - DNA, 201 bp, Homo sapiens
ctgcttcttgagtccccacgttgcaggccaaaaatgtttcaggacttttccttagttcagctagcgatggggtccttgtccgtcctacggctatgaaaatktaggctcacaaacagtttgaatggtgagtaaagtagggttttattggatgaaaaggaagaaaggggggtaaacagggactctcacaagcccagaatcccc

SEQ ID NO: 6488 - DNA, 201 bp, Homo sapiens
ttgtttggtttccctactaggctataagcttaatgaggatgggaatccttgcccatttattcttagcactgaatccccaagacctaagattgtgcctaggrgccatttaataattgcaataaatatttgtggctggttgatataaattattgactgcatttccacatatggattgcacacacatatgtatgtgtttgaatt

SEQ ID NO: 6489 - DNA, 201 bp, Homo sapiens
tggtcaggcacagttgctcacacctgtaatcccagctgaggcaggaggatcgcttgagcctgggactttgagaacagcctgggccacatagaccctgtctytacaaaaaaaaatttaaaaaattatccaggtttggtggcacatgcctgtagtcccagctactcagaaggccgaagaaggaggattacttgagcccaggaa

SEQ ID NO: 6490 - DNA, 201 bp, Homo sapiens
ttttggttaaaagttaaattttgctttcattatattcacatatgaaacccttgtcaggaaggttttctgtcagaagaatgatgactgctctaataaccacytattcatttaagaggcaacttgtggtcaggcacagttgctcacacctgtaatcccagctgaggcaggaggatcgcttgagcctgggactttgagaacagc

SEQ ID NO: 6491 - DNA, 201 bp, Homo sapiens
cagataacattctgttcacacattttaaagacaggtatatcctatataccattggggtgtagggtcaagctgttagtgctgatgagatgtcagctcaagasagcagaaaacattttatgttgtgatgacagtagaatggccaacacactgatctttaatctctgtgtttgctagagggaaaaagtgaaggaaggcagcaaa

SEQ ID NO: 6492 - DNA, 201 bp, Homo sapiens
attatatatatatttttttcacaggctctcaggattaggcatgattctgcctatcacaagcactgtgccaaatattgggtgatagcccctctccttaaagwttatgaagttcattcaagagaacaagttataatgtgacagtgctgtgatagaaatgacccacaattattattgtgatacgtaagaagactgctcaaaaca

SEQ ID NO: 6493 - DNA, 201 bp, Homo sapiens
gagtaagtccttacttatcaataaagtaacattgaatgtaaataggctaaaatcttcaatcaaaagacagagtgacagaatcgattcaaaaatcataaaaataataaaaaactacaagacccaatgatctgttgcccacaagaaacacacttcaccataaagatgcatagactgaaaataaaggaatggtaaaatacattc

SEQ ID NO: 6494 - DNA, 201 bp, Homo sapiens
aacactgattcccttgatatctttggcagtgggtgtcctgttgcctaaagtgaaacttttttttttttggttcgcctctgagcattaataattacaaattsttgagccattgttctgattctgtcatgttctgaattctagcatccatgggggtctttaattcttggcttattcattctttattccagatcagtttgcggg

SEQ ID NO: 6495 - DNA, 201 bp, Homo sapiens
caattttataaagatatcaaataccgagattgagctatacattaatgcaatcctaatcaaaatcccagtagggatgtgtgtgtgtgtgtgtgtgtgtgtgkatcgaaaactggcaagctgactctaaaatttttatggaattatacaggaccaagaagagcgaagacagtctggagaaaaaaattaagttggaagacatat

SEQ ID NO: 6496 - DNA, 201 bp, Homo sapiens
ctttaaaaattaatataaccgttagcatctctttacttaattttagtttgtcgtttccggctttagagaacacaaatctataatgaggattagggaggagytccccctatgcatacacaggccacaggccttctttcctgcacgctttaaatcactcagcggaggctcctcctctgtgggttttccccactcattccaccc

SEQ ID NO: 6497 - DNA, 201 bp, Homo sapiens
tggactttgaattatgcccctggcttttctgattccccagcctgcaggtggcagatcatggaaattctcagcctctataattgtgtgagccaatttccatratatatacatatatcaataggaaattggtatttggagaaccctgactaatatggacattatacagaatcaagaattctacttcttcaaaaggaagaggaa

SEQ ID NO: 6498 - DNA, 201 bp, Homo sapiens
ggaggagttccccctatgcatacacaggccacaggccttctttcctgcacgctttaaatcactcagcggaggctcctcctctgtgggttttccccactcaytccacccccaccacagtagctcactaattaaacaactgaattcaaaggttcaagtacattcccagcatacacactatgtcattaggtttacgcaaacaaa

SEQ ID NO: 6499 - DNA, 201 bp, Homo sapiens
ccctatttaataaatggtgctgggaaaactggctagccatacatagaaagctgaaactggatcccttccttacaccttatacacaaattaattcaagatgkattaaagacttaaacgttagacctaaaaccataaaaaccctagaagaaaacctaggcattaccattcaggacataggcatgggcaaggacttcatgtcta

SEQ ID NO: 6500 - DNA, 201 bp, Homo sapiens
tgcatacacaggccacaggccttctttcctgcacgctttaaatcactcagcggaggctcctcctctgtgggttttccccactcattccacccccaccacartagctcactaattaaacaactgaattcaaaggttcaagtacattcccagcatacacactatgtcattaggtttacgcaaacaaagtagttttactgaatt

SEQ ID NO: 6501 - DNA, 201 bp, Homo sapiens
atctacaactatctgatctttgacaaacctgagaaaaacaagcaatggggaaaggattccctatttaataaatggtgctgggaaaactggctagccatacrtagaaagctgaaactggatcccttccttacaccttatacacaaattaattcaagatggattaaagacttaaacgttagacctaaaaccataaaaacccta

SEQ ID NO: 6502 - DNA, 201 bp, Homo sapiens
aggcctgtgatgggaggaggtgccataaagacctctgacatgctcgggagacattttccccattgtcgtggcagtgaacatttggcttctcattactcacrcaaacttctgcagctggcttgaatttctcctcagaaaatgggttttcactttctattgcattgtcagctgcaaatttttcaaacttttatgctctgcttc

SEQ ID NO: 6503 - DNA, 201 bp, Homo sapiens
caggcctgtgatgggaggaggtgccataaagacctctgacatgctcgggagacattttccccattgtcgtggcagtgaacatttggcttctcattactcaygcaaacttctgcagctggcttgaatttctcctcagaaaatgggttttcactttctattgcattgtcagctgcaaatttttcaaacttttatgctctgctt

SEQ ID NO: 6504 - DNA, 201 bp, Homo sapiens
ttaagcgtgggaggtagaggttgcagtgagccaagatcctgccactgcactctaggctgggtgacagagtgagaccctgtctccaaatatatatatatatwcacacacacacacacacatgcacaaacatatatgaatgtgtgtacgtgtgtgtgtatttcaaatacctcctttgcaaatactttttagttggaaatctag

SEQ ID NO: 6505 - DNA, 201 bp, Homo sapiens
tgaggaatcttcataatgtttttcataatggctataacaatttacatccctatgaacagtgtgcaatgttttccttttctccccatccttgtcaacatttsttatttttttcttttggataatagccaatctaacagttgtgaggtaatgtgtcattgttgttttgatttgcatttccttggtgattattattgttgagtg

SEQ ID NO: 6506 - DNA, 201 bp, Homo sapiens
ccccactcattccacccccaccacagtagctcactaattaaacaactgaattcaaaggttcaagtacattcccagcatacacactatgtcattaggtttaygcaaacaaagtagttttactgaatttatacttttgacctgttatgtttaggcaaacactttcttcttaaagcctgcagactctggagttcagaagttctg

SEQ ID NO: 6507 - DNA, 201 bp, Homo sapiens
ctacttgatggagaagtctttgaaagcagcactgtctcatttgtatttctctatcctagcagtacctgtcacaagtcttgcatttattcattcaacaaatrtttgttgaagtctatgtaccaaacgcagtgatacatgttggggtatactgataaatttgaaagacaaggttcaatactcatggatttctaattgaagaag

SEQ ID NO: 6508 - DNA, 201 bp, Homo sapiens
gaagataataagcatgggagactcagcaggaagcctttcagagccagatttggaattgtcatgcaacacttcttgcattttattggcagaactcaggcctrcgcttaactacaggggatgctgggaaatacagctgcctgctcaggaggaaaagaggtacagtttggtgaacaattagctaatcttccatatctcattgaa

SEQ ID NO: 6509 - DNA, 201 bp, Homo sapiens
gtacagcaaggagaacagggtgggcagaacagggaataagggcaggcagctgggagcacctcacatagggcccagaagccagcaggaagcctcccctggaycatggatggtgtccctccttgtcacctgttgagctgatcagttttctgagttgttcatctagctcctgtattgaagtgttttcaaaggtcttctcttcct

SEQ ID NO: 6510 - DNA, 201 bp, Homo sapiens
acagattgcaggtactagcagtgtgaagccatcagagcactctggaatggtgactgaggagagggtggggcagcaatcatgtgggctacaattggtgccasgtgagaaaatgaagcaaagggagggtgaatagctagctgaacttcatacaggtgggaggggacggaatcaggtctttaatcactatgatagcttgccatt

SEQ ID NO: 6511 - DNA, 201 bp, Homo sapiens
tttggaagacaatttggcagttcctcaaaatgttaagtatagtttctatataacacagtggttctatctatctatctgtctgtctgtctgtctgtctgtctatctctctgtcatctccacgataaagtttgaaagtccacataaaaatccgtacattaatgttcatagtaccattatttaaaatagtcaaaaactggaaac

SEQ ID NO: 6512 - DNA, 201 bp, Homo sapiens
cattcccagcatacacactatgtcattaggtttacgcaaacaaagtagttttactgaatttatacttttgacctgttatgtttaggcaaacactttcttcytaaagcctgcagactctggagttcagaagttctgaaattcacagaagctgagagtgatagaagcttggaactattatacatgccctctgatttcaaagtt

SEQ ID NO: 6513 - DNA, 201 bp, Homo sapiens
ccttcccagtctctggtaaccttctattctctatctcaatgagttcagtcgaaaaacctgatttgttttgacagttgatactgacccttatacatttatactttactggacagaaactaggaagtgattggtgtgaaatataatttgggcagaaaagttcaccttggactttcccaaaaaatatttaaaggtagtgctcgt

SEQ ID NO: 6514 - DNA, 201 bp, Homo sapiens
ctttggaagacaatttggcagttcctcaaaatgttaagtatagtttctatataacacagtggttctatctatctatctgtctgtctgtctgtctgtctgtctatctctctgtcatctccacgataaagtttgaaagtccacataaaaatccgtacattaatgttcatagtaccattatttaaaatagtcaaaaactggaaa

SEQ ID NO: 6515 - DNA, 201 bp, Homo sapiens
aaaagctattttgcatggggaagatggtacaggggacataaaacattgcttctaaaggtatggtgaagaaagaaaaagaatgcagcagttaaagaatacarctatgtcacagatggtattttcaaggcatgggagaccagggatgtttaaaaagcaatacagcaatattatattatgttatattattattttatttaataa

SEQ ID NO: 6516 - DNA, 201 bp, Homo sapiens
actttggaagacaatttggcagttcctcaaaatgttaagtatagtttctatataacacagtggttctatctatctatctgtctgtctgtctgtctgtctgtctatctctctgtcatctccacgataaagtttgaaagtccacataaaaatccgtacattaatgttcatagtaccattatttaaaatagtcaaaaactggaa

SEQ ID NO: 6517 - DNA, 201 bp, Homo sapiens
tactttggaagacaatttggcagttcctcaaaatgttaagtatagtttctatataacacagtggttctatctatctatctgtctgtctgtctgtctgtctgtctatctctctgtcatctccacgataaagtttgaaagtccacataaaaatccgtacattaatgttcatagtaccattatttaaaatagtcaaaaactgga

SEQ ID NO: 6518 - DNA, 201 bp, Homo sapiens
tgagaaacaaatttaccaattatagtttttgtgtacaactgattttgtctttaaccttacagtagctagtcaaaacaccattttatttacttacttatttdtttatttatttattgagacagaatctcactctgtcaaccagactggagtgcagtggcacaatttcagttcacctcaacctctgcctctcaggttagcaca

SEQ ID NO: 6519 - DNA, 201 bp, Homo sapiens
agctctgtgagaaacaaatttaccaattatagtttttgtgtacaactgattttgtctttaaccttacagtagctagtcaaaacaccattttatttacttayttatttatttatttatttattgagacagaatctcactctgtcaaccagactggagtgcagtggcacaatttcagttcacctcaacctctgcctctcaggt

SEQ ID NO: 6520 - DNA, 201 bp, Homo sapiens
agttataagtgttgaggaaatatgaaaacttgagtaacagataacacgtttatatatactctagaccagataaatgttgtttttcaattttggttagggaygcataagtggtttttgtcagcccttcaatagaccataaaatctctttaatgcatcatgatgaaggaaggaaggaaggaagttgaaggaaaggaaggaagg

SEQ ID NO: 6521 - DNA, 201 bp, Homo sapiens
aaaattctggtaaacaaaatcaagtacataagtcagactcactttttcctccttgtttacatgcagatcgagtgacaataaaaagttttcaaaaaaaaaaacaaaaaacgtttaacgatagatccatgctagcacagccttacccagctttccaaaaatggggtcagttatttaatatttttaatagcacgtttgttttac

SEQ ID NO: 6522 - DNA, 201 bp, Homo sapiens
aaaagtactggtgggcagaattgctagtgtgttaatatgaatgttggcactaccaccaaaacagttattagtcattctgttcttcgctaccatgaacttcytgttttttgtttttttttctgtccagttacagctgaatgctattgataaagcaaggaaaattatgaagtttattaaatctcagtttaccaggtttctaca

SEQ ID NO: 6523 - DNA, 201 bp, Homo sapiens
agttgttaatcaggttggtagaatatttcctttgccatagatactctcaatcatgcttatatttggattttagggaaaaccatatctagtatttctttctmactttgctaccttcaccttctctgccctgtcttgccacttttgcctgttaaccaccaccaccatcatcctgtatgtcatagtttggatttctgtattgtg

SEQ ID NO: 6524 - DNA, 201 bp, Homo sapiens
aaaatcaggcctaagcagacaaaagagacttggaatgatttatctaaacacctaaattagttacatcattatttatctgcgaagcttctcgagttttgttrtcatactctggatggaggccaatcagaaatgacccttaagatctgactctgtctagccagtctccccttgaccaaggagaacatttgggcatgaactgta

SEQ ID NO: 6525 - DNA, 201 bp, Homo sapiens
acagtaggggtgggcttctttactctgtgaaaggggcgggacaggctttgtagaagaagagacatctgaggaggaggagtgggaatttataatggaagggkctggggagagaaaggactccagtgagagagaacatcacttacaaagcttgggacttacaacatcacttggtgttttaagccaggaagtactttggaatag

SEQ ID NO: 6526 - DNA, 201 bp, Homo sapiens
ctcatttgtatttctctatcctagcagtacctgtcacaagtcttgcatttattcattcaacaaatgtttgttgaagtctatgtaccaaacgcagtgatacrtgttggggtatactgataaatttgaaagacaaggttcaatactcatggatttctaattgaagaagaaaaagaaaaagaagtaacaaaaaaaagtaaaatt

SEQ ID NO: 6527 - DNA, 201 bp, Homo sapiens
agaaagtggttatggaaggatttatttataaaaggaattaagggaattcaacatgggatggtgaagcacccatgccctagttacagggggaaccccctacyacctaggcttgaagaagctgctgaaacccatggaggttgtatttgtaggagagttctgccaggcaggagctgtggccttcagcagagaaacagtcactgc

SEQ ID NO: 6528 - DNA, 201 bp, Homo sapiens
aacaaatgtttgttgaagtctatgtaccaaacgcagtgatacatgttggggtatactgataaatttgaaagacaaggttcaatactcatggatttctaatwgaagaagaaaaagaaaaagaagtaacaaaaaaaagtaaaattaaaattattatgattgctgcagtatgaaagaagtggaagacaagaacctcagaaaagt

SEQ ID NO: 6529 - DNA, 201 bp, Homo sapiens
catatttcatgttcaacataaaagcttgtaattgccttccaataacagactgccttctagtttgtaaatctgaaatacctacagagtaaaacttggggacyaaatgagataagacaaacgaaggtgatagacagaatgatgtgaatgaggttaaggataaggctaattaacatatgttggagttagtctctgctatattgt

SEQ ID NO: 6530 - DNA, 201 bp, Homo sapiens
ttattcatattctataatcaaccaatacattgttactattattattttaagtaaacagttatcagatgattgtatctccatttattccttctgtattgatkttcctttacatagatttgagtttctgacctatatcattttcattccccttaaataatgttttttaaaaaatttctgcattacaggtcttctggtaatgaa

SEQ ID NO: 6531 - DNA, 201 bp, Homo sapiens
aatgtctatttttccatttcttcattgattatcagtttatctaatctgtgtatcatccatctctaaacctaatttttggatacatatacaaccaatagacrtgggatataccaacaatataattgcatgatagtcttagttaaaaagtttagtctgtctctgtgaatttgattcttctgctttgcatgattctggctgagt

SEQ ID NO: 6532 - DNA, 201 bp, Homo sapiens
acatgcagagggcccatatgccttgatgtaacattagatcaagtggcagaagctaaatttggaattaaggcaatatttgattgtagagaacatcattctcrtttctagctcttggactttatgtggaagcactttaagtcctaagaggctaattttagttcaatctatttagttaacaatatttcagatccttaattttta

SEQ ID NO: 6533 - DNA, 201 bp, Homo sapiens
aacaggtgtcttacatggcaggagcaggaccaagggagggagggggaggtgctacatacttttaaacaaccagatcttgtgagaactcactgtacagtagyaagggtggatgttgctaaaccattcatgagaactctgcccacatgatccaatcacctcccaccaggccccacctccagcattggggattacatttcaata

SEQ ID NO: 6534 - DNA, 201 bp, Homo sapiens
caaaccctgtaaatcaaaaatagtaatataaattttaaaaattgaggggtctggccgggcatggtggctcatgcctgtaatgccagcacttcgggaggtcraggtgggcagatcgctgaggccaagagttctagaccagcctggccaacctggcgataccgcatctccactaaaaatacaaaaattagcctggcatgattg

SEQ ID NO: 6535 - DNA, 201 bp, Homo sapiens
tgttatttgatttattatttctacctttcatttccttccctcactctttcattatcccttcctctccttttttcctcctcctccctcttctgctttttttycctctatttattggctgtttggcttatgacacatagttatcattgatccatgcaaagtgactttcatttatttagttagttatttaaaaatgtaatatgc

SEQ ID NO: 6536 - DNA, 201 bp, Homo sapiens
ggctgaaggcctgaaaactacaggggggttgggagtaactggtctcagagttcaaaggcccaagaaccagaaactctgatgtcttggctctggtgggggasggggaggaatttgttcttcctttgcgtcttggttctatttgggccctcactggattggatgctgtccacctaagttggtgaagacagatcttctttattc

SEQ ID NO: 6537 - DNA, 201 bp, Homo sapiens
aaagtcctaatttgacacattagctacattatgtccattagagcttgtcttttacaggtactgccaatgaagcttgaatatattggtaaagcacagggcasaagtaaggtggaaaaagtgaagaagtaaattatgctataaaatatttaccatcaactgccagctcattaatcagacaaaagcaatagagacagccaacag

SEQ ID NO: 6538 - DNA, 201 bp, Homo sapiens
ggttgctagacttattaaatagaaatgcagatgttatgttaaattttaatttcagataaacaatggataattattttgtgtaaatgtgtcatacaaagtgrcatcctaaaatataattatctgaaattaaaatgtaactggatgtcctgtattttatccagcaactgtattctaggttgatgagagtagattgataagatg

SEQ ID NO: 6539 - DNA, 201 bp, Homo sapiens
cttgaacctgggagatggaggctgcagcgagctgagattatgcgcactgcactccagcctgggtgacagagtgagactctgtttcaaaaaaaaaaaaaaaattgagaggtctgtgaaaagggacaatagagaggggacttgtgcaaacactaaatcactcatctttttctgtgagtagccaatagatactatctaaaattg

SEQ ID NO: 6540 - DNA, 201 bp, Homo sapiens
actaatttccctgctttaaatcaccatagggccactttcgttcagtaaaaaaaacattaccatcaagttatctcattcagcatggtgttttgcacaacatrgaaatgcaagactgaagaaaaaaaggatatttcaagcctaaacaggggcaaaacacattaatatagttatctccatgaacacatgaggaaagtcagagat

SEQ ID NO: 6541 - DNA, 201 bp, Homo sapiens
gaccgtctcggaaaaaaaaacaaaaaaacaaaaaaacaaaaaacattttcactctactctggaacttgtcaatttgtcatttttctaacagttttttttttattgctgtttgctttgttgcccataaaacaacatgcaagttatattttcattgagacctgggtgcttggatctagattattcttattatattcttacatt

SEQ ID NO: 6542 - DNA, 201 bp, Homo sapiens
ctgacctcaggtgatccacccacctcggcctcccaaagtgctgagattgcagacatgagctaccacacctggcccacttttttttttttttttttttttttaaagaggagaactgcttctccattgtcactctagtagtgtcatccctgagccttggtttgaggatttacaatagtaggtactaatatgaaaaacacaaaa

SEQ ID NO: 6543 - DNA, 201 bp, Homo sapiens
ttggcagtagagtctttcttcagaagttttgctttactttttaaatgactgtcattctgatttcttgtcttctatagtgaggacccaatagtgaatattgyagagacctgagtatgtgggttaagctgctaaacaaaagccagctccctctggactcaggccgggtcttttccttcctgtctccatcacgaattataaata

SEQ ID NO: 6544 - DNA, 201 bp, Homo sapiens
atattgtagagacctgagtatgtgggttaagctgctaaacaaaagccagctccctctggactcaggccgggtcttttccttcctgtctccatcacgaattrtaaatagctctgtgcttatcaaaacgacatcccttgactgatccagtaaatacagttgattccatatcctatcttaaaaccttcctttgtttcattcatc

SEQ ID NO: 6545 - DNA, 201 bp, Homo sapiens
catgtattttacccaagcgatattgtatatagtgctactggacttcacagaaacccactgccctccccgtgcttttgaatcttgatccccaagaacaattrtttccaacccctttagctctttttctggtatttgtctccatttttcacaaaacattttcatgttgctatttcttgattttttttttagctttcattttga

SEQ ID NO: 6546 - DNA, 201 bp, Homo sapiens
gtgtgatggctcatgcctgtaatcccagcactttggggggctgaggtggagtttgagaccagcctggccaacatggtgaaacccagtttctactaaaaatrcaaaaattagctgggcatggtggcatgtgcctgctgtcccagctacttgggaggctgaggcaggagaattgcttgaacctgggaggtggaggttgcagtg

SEQ ID NO: 6547 - DNA, 201 bp, Homo sapiens
ttgccctaataattagtaaacgttagaaatttatatttggtttactaatgctgtgtaattgttatcttgtttgtaaattggaattgtgtgtgacttttttkggggggggttgtttttactgctaagaaaatatgtcagtgtccactgctctattaggttggtacaagagtatttgcggttttcaccacaattaaaaaccac

SEQ ID NO: 6548 - DNA, 201 bp, Homo sapiens
caaaagctcatcactacaaattcttgcaaataactcaccccaggatatgaaatttcagaatcaaaatccaaaaaatctgtgaatcaactatacccccaccstagagcttgagcctaaaatagtcaggtataaacactcttggtcactgaagtacgcatttttttaacctcctaatatggaacaagcttagccttccctctg

SEQ ID NO: 6549 - DNA, 201 bp, Homo sapiens
cagagcactctggaatggtgactgaggagagggtggggcagcaatcatgtgggctacaattggtgccaggtgagaaaatgaagcaaagggagggtgaatasctagctgaacttcatacaggtgggaggggacggaatcaggtctttaatcactatgatagcttgccattgcactcaagggctgtgaagcctttatggcagg

SEQ ID NO: 6550 - DNA, 201 bp, Homo sapiens
ggaaagagctacttggttatattcgggctgtaaattttaatggtaagttacaacgtgtgtgtgtctaaatacattaaaagcgacagggtgtgtttttcctyctatatatagaagatacccaggcagagtggaaaacacaggattagaagcagttctcttctttgattagaagtgtgagtttttccacctgcttttgaatct

SEQ ID NO: 6551 - DNA, 201 bp, Homo sapiens
cgatgtttgagtgcacattcctagctttataaaattgatatcataaaaccatcatttcttccagtatgtactattgtcattctagatcacaggcctgagtrgataagggatctagtccactatggcacttctttcttttctttctttatcttttctttttcttttttttttttttggaagatggcactatgttgcgtacta

SEQ ID NO: 6552 - DNA, 201 bp, Homo sapiens
aataaaaatgcttacttacagggtcgtgttgaggattaaatgagataatgaaagtaaaatgtcagtatggcatctgagtcatggtatgcccagtggaaaartaacagccatcattattatttaaaaaaatcaggattaaagattctagttgcagtccaggtacaaattcatgatgatctggaacaagtcacagtttctgtc

SEQ ID NO: 6553 - DNA, 201 bp, Homo sapiens
gcttacagtgattacaatgtacatttgcttatgggattcatccaacctgaaatgcctttctttgtcttctccagttccattttatctttcaaggcagtctyacctcccctgagaaactttttacccctgtgctgatgctgaagtgccccagctctatgttcccctagtatcctttgcatgactctttaacatcacttgtaa

SEQ ID NO: 6554 - DNA, 201 bp, Homo sapiens
taaacattttaatgaatgggtatcaggcacgtttatgttttacccaagagacttatttaacagtcattcaaccatttggtcattaatagtgaaaaggtcayaggctttggcatgaggcaggcctgggtttgaaacagatcttcaccatttcctagaaaggttgtcttaaggcaaattatttttttagacaccttttcagtt

SEQ ID NO: 6555 - DNA, 201 bp, Homo sapiens
gaacactggttctgcaggcttttaagtagctactatatatgcataaaaaggcttcctggtcaaataagtttagggaatgttaggataattgtttttttttytatttttttaagacctcttggagactttaatgtgctaatatacttcatgactgacagagaagtgggtattaggtatactttttaataagttgttttaact

SEQ ID NO: 6556 - DNA, 201 bp, Homo sapiens
ttttggtgtggaggcacatgagctgattatattgagctccatccaccaatttatttattcatctaataaacattttaatgaatgggtatcaggcacgtttrtgttttacccaagagacttatttaacagtcattcaaccatttggtcattaatagtgaaaaggtcataggctttggcatgaggcaggcctgggtttgaaac

SEQ ID NO: 6557 - DNA, 201 bp, Homo sapiens
cctctcaggaacagatggaagccctgcccccttccaagttggaggggcaggaacctcactcccccaggcaccactgcagcgacctagctgcggctgcggaytcaggcatctctgcacttttgggggcctgggaagcccctttgcccctgcaggatcagaagtacctgctccctctgcctggcctctccccactcccggtgc

SEQ ID NO: 6558 - DNA, 201 bp, Homo sapiens
tcctccagaaggctacagagtagctcagactgtgcaaattgttctccatttgccatgcccccatgcactcaacactattccatgtcttccctgtgctctgsgaagctgacccttgtcatttgcatgactgggactctctgctctctgtgtttatcttgggtggggcctatggaaggctctagcaggatattggagggcagg

SEQ ID NO: 6559 - DNA, 201 bp, Homo sapiens
caggtccaatataatcaacctgccaccaggtagatggctgatcacctcaaggaatggtgccatattgagggctcagcatcagtctctgcttctggcaaatygggcactcagcagtggctgtagctaggtcagccttggtgagtggaagtccatgttgctgagcccatgcgtaacctccatccctgccacaatggccacttt

SEQ ID NO: 6560 - DNA, 201 bp, Homo sapiens
gagccaatttctttaggagttacggtttggctttctaggcgtattattatagggatcatgagttagagttctattactatttatgggctgaccattgggaytggtatactcagcatctcagatggaaggaaagtgtcagaataggttcatggagaatattgagtggtaagaggaccacagtctgggcaagaaatttcaccc

SEQ ID NO: 6561 - DNA, 201 bp, Homo sapiens
gaaattgccatcctccagaaggctacagagtagctcagactgtgcaaattgttctccatttgccatgcccccatgcactcaacactattccatgtcttccstgtgctctgcgaagctgacccttgtcatttgcatgactgggactctctgctctctgtgtttatcttgggtggggcctatggaaggctctagcaggatatt

SEQ ID NO: 6562 - DNA, 201 bp, Homo sapiens
ggctgaagtgcagtggtgcaatctcagctcactgcaacctctgcctcctgcgttcaagcaattctcctgcctcagcctcccgagtagctgtgattacaggmgtctgccaccacacctggctaatttttgtatttttagtagagacggggtttcaccatgttggccaggctggtcttgaactcctgacctcaggtgatccac

SEQ ID NO: 6563 - DNA, 201 bp, Homo sapiens
ccctgccacaatggccactttgtttatgggcccattgggtgatgacgggggtggctggggaaagaggctgagtggtatccattgaatgggttatcctgtcyacttgattattaaaatcctcctctgctgaagtcacctgttggtgagcgctcacttgggatacaaatatcttcagagtttttgaccactcagagaggtcta

SEQ ID NO: 6564 - DNA, 201 bp, Homo sapiens
tattcagtattgttcagcatgttataaatactatataaatgttatcaaaatgtatgcattgttttataacctgcttttttttttttttttttttttttttkctcaacattatgtttttgagatttctctgtgttgatacatggaactccagtttattcattgtaactgtgagtagtatttctatgcacaaatatgtcacaa

SEQ ID NO: 6565 - DNA, 201 bp, Homo sapiens
actttggtctttgcaatgtatctttgttttcctgattccttaccacttttgatattgaatgatgacttattgctctttgtacaggccatttaggtacagtyagcccttggtatctgcaggttccacatctgtggattcagtcaaccacaggttgaaaatattcagaaaaaaaaggaatggttgtgtctgtgctaaacatgt

SEQ ID NO: 6566 - DNA, 201 bp, Homo sapiens
aatgaaagaaatgaataaatataatttttaaataaataaaatggtttccagtttcatccatgtctctacaaaggacatgaactcattctcagcgaactatygcaaggacaaaaaaccaaacaccgcatgttctcactcataggtgggaattgaacaatgagaacacatggacacaggaaggggaacatcacacactgggga

SEQ ID NO: 6567 - DNA, 201 bp, Homo sapiens
catcttaaaatgaaagaaatgaataaatataatttttaaataaataaaatggtttccagtttcatccatgtctctacaaaggacatgaactcattctcagygaactatcgcaaggacaaaaaaccaaacaccgcatgttctcactcataggtgggaattgaacaatgagaacacatggacacaggaaggggaacatcacac

SEQ ID NO: 6568 - DNA, 201 bp, Homo sapiens
tttatttaaaacctttgcttatttatttatttgagatggagttttgctcttgttgcccaggctggagtgcagtggtatggtctcggctcaccgcaatatcygcctcctgggttcaagcggttctcctgcctcagcctcccaagtagctgggattacaggcatatgccaccacaccggctaacttttttgtatgtttcagta

SEQ ID NO: 6569 - DNA, 201 bp, Homo sapiens
gaaatcaggaagggagatgcctcctgctgtgttcttcttgctcaaaattgctttgctatttgggttcttttatagtttaatataaattttaggatttttttctacttctatgaaatttctttgggattttgatagggattgcatagaatctgtagatcactttgagtagtctggcattttcacaatattaagccttctaat

SEQ ID NO: 6570 - DNA, 201 bp, Homo sapiens
aagccagctccctctggactcaggccgggtcttttccttcctgtctccatcacgaattataaatagctctgtgcttatcaaaacgacatcccttgactgayccagtaaatacagttgattccatatcctatcttaaaaccttcctttgtttcattcatccatccattcattcattattcatttagttgtttatacattttg

SEQ ID NO: 6571 - DNA, 201 bp, Homo sapiens
agcaagttagttacttcctagatacattgggtaccggcattgggtaaatacacctgttccaaatgggagaaattcgccaaaatgaaggggctagaggcccyatgcaagtttgaaatccagtaggactgtcaaatcttaaagctccaaaatgatctcctttgactacatgtttcacatccaggtcatgctgatgcaagaggt

SEQ ID NO: 6572 - DNA, 201 bp, Homo sapiens
tttcttctattagccatgtaaaataggcccagtgctaaaacattttaaatatattatcttgctcagccttcacaataacttattgttgttggcataattcmtcttttacagatgaggataccgaggctaagaatggttgttgcttgtctcaagttaccattgtgcacagggctcaagacaaattccacagaatcatttggt

SEQ ID NO: 6573 - DNA, 201 bp, Homo sapiens
ttccaaggtcaaatctccttttgtccataggtctcaggcttaaaacctaccttatgtttctctgttatgctcagtgtctattttatttcctcctttctatrtcaacattatctttgtctttcagagatccagacttggaagttgacaccgacttctcttctttttaccctgtttagactctgtcaacaaattatagtgttt

SEQ ID NO: 6574 - DNA, 201 bp, Homo sapiens
ttggtttgcatcaatgttgttgcttcaaaccaaaggtaactactgatatcttgatctatgtactttgtaaaggccctacctccaaatagcattacatttakggttagaatttcaacatatgagttttgggtggacacgaacgttcagttcataaaagattatttgagacacaaagtgacttgcctggaagttcctttcttc

SEQ ID NO: 6575 - DNA, 201 bp, Homo sapiens
aataaaaacctataagaaaaaaaaagcatctctgtctttctgtctgtctgctttatctgtttctctttatattggttttctcttcttctaggttcacaggrtagcagaggatctccatttccagggtttagctattctttaagacacttgttaaaactaacttttttttttaagtctcaatgtcagcttcttggaagcttg

SEQ ID NO: 6576 - DNA, 201 bp, Homo sapiens
ttgtctactttggaaaatgtactttattaggtttgatggaatacagacaaataagacatggtattgctctccaggggttcaaaatgtaatatgtatcatgrtaagttgctataagacagtatttttcaactattttaatcgctgtcctctataatactattattttcttaaatcctgcatagcagctatcctggaacatgt

SEQ ID NO: 6577 - DNA, 201 bp, Homo sapiens
gatagctgcttcctgttaggaacttctgttggaagcatacttcttacctgaagaaagttctgggttgagacagttctaccttgacttatttaccaaggctyctaaaccatatagcacatcactatgaatacactcagggtgggggcaatggatcctacccagatccctgtaaagccagcgtggttctgcaaccatcattca

SEQ ID NO: 6578 - DNA, 201 bp, Homo sapiens
catgaccttggctcactgcagcctccacctcctgggctcaagtgatcctcccacgtcagccccccaagtgtctggtactacaggtgcaaaccaccataccyggttaatttttgtgttttttgtagagatggggtttcatcacgttgcccaggctggtcttgaacccctgagctaaagccatccacccatcttggcctccca

SEQ ID NO: 6579 - DNA, 201 bp, Homo sapiens
gcaaagttgctcaaagtgacacatagagtgaggtctgtggctgttctcttactccaaatgtgggatatctcagaaattgccatcctccagaaggctacagwgtagctcagactgtgcaaattgttctccatttgccatgcccccatgcactcaacactattccatgtcttccctgtgctctgcgaagctgacccttgtcat

SEQ ID NO: 6580 - DNA, 201 bp, Homo sapiens
atgtggccacaacaaacatcaggaggctctcctattgtagagatttccctgaaactgaactctggaggatgaaacatttggtgtagatacttgaccttctraaaataaagctttatgtatgtgtgtatctatctatttttctcatagcagcaattagtctgaaatctaatgccttgtcagtgaacataacaatttttgtaa

SEQ ID NO: 6581 - DNA, 201 bp, Homo sapiens
tttcattgtcctctgaccaactcagaaatagctacctgaggccagcctttagttctattttgatcaaactgtcttatagacacagccttcagccttccctrtgacctttgaaaactgccccagggtaaaggcgaattacaaatactattaaggttgatgagtaatcaactcagtaatgaggatactatttcacattcttag

SEQ ID NO: 6582 - DNA, 201 bp, Homo sapiens
ttttcattgtcctctgaccaactcagaaatagctacctgaggccagcctttagttctattttgatcaaactgtcttatagacacagccttcagccttcccygtgacctttgaaaactgccccagggtaaaggcgaattacaaatactattaaggttgatgagtaatcaactcagtaatgaggatactatttcacattctta

SEQ ID NO: 6583 - DNA, 201 bp, Homo sapiens
ttctcgagttttgttgtcatactctggatggaggccaatcagaaatgacccttaagatctgactctgtctagccagtctccccttgaccaaggagaacatytgggcatgaactgtagttttcattgtcctctgaccaactcagaaatagctacctgaggccagcctttagttctattttgatcaaactgtcttatagacac

SEQ ID NO: 6584 - DNA, 201 bp, Homo sapiens
cctagcccaggaaaatcaggcctaagcagacaaaagagacttggaatgatttatctaaacacctaaattagttacatcattatttatctgcgaagcttctygagttttgttgtcatactctggatggaggccaatcagaaatgacccttaagatctgactctgtctagccagtctccccttgaccaaggagaacatttggg

SEQ ID NO: 6585 - DNA, 201 bp, Homo sapiens
aggaaataatatgcataaagattattgcctgctacatagggaatataacagatactgttgcttactgatttaacaacttccttttctttgaagccagcackatctaatagaactttctgaggtgaagaaggtttttccatatctgcattgtttaatagagcagccattagtgacatgtggctattggtcacttgatggaat

SEQ ID NO: 6586 - DNA, 201 bp, Homo sapiens
taaccaggcttttcttgtagatatgtgagatagttcaaggttctcctaattatgttttcccatttttagctagcaacctagagtccagactaatacattawaataatacttgcctcatagagcggttgggaagttaaaggaaataatatgcataaagattattgcctgctacatagggaatataacagatactgttgctta

SEQ ID NO: 6587 - DNA, 201 bp, Homo sapiens
gaggaccttaaccaggcttttcttgtagatatgtgagatagttcaaggttctcctaattatgttttcccatttttagctagcaacctagagtccagactartacattaaaataatacttgcctcatagagcggttgggaagttaaaggaaataatatgcataaagattattgcctgctacatagggaatataacagatact

SEQ ID NO: 6588 - DNA, 201 bp, Homo sapiens
agtagtttgaggctgtgagatatgaggctgggaagtttccaccacaagggggaagctgacctggaagaataatattgacttgtgcaacagaataaaggtgrcagatggaaagagttctgatggtgatgaggaccttaaccaggcttttcttgtagatatgtgagatagttcaaggttctcctaattatgttttcccatttt

SEQ ID NO: 6589 - DNA, 201 bp, Homo sapiens
tgatttataattttcattatatgatagaagcaagcttacctatttttcaagagagaacacattttcttggaaattatttccaaaagaaaggtgtcatatgygactttgacagccaaatgagcaatgttattttacaaaattttacagcaaaagcagaagtcttctctggctgttttgcatttgtacccacaatcaaagtta

SEQ ID NO: 6590 - DNA, 201 bp, Homo sapiens
tgggacgatagcagttagatggcaagaaaggtttagaaaactaattttccaaaaagctaacttccaaaatgaagtaaactgattattataaattgatctartgttctggattctgtagtcaacattttatagtccgatttatatttctagactgtagaaattttagtagttgacaaaattgacaattagcagattctgagg

SEQ ID NO: 6591 - DNA, 201 bp, Homo sapiens
gactctgtctcaaaaaaaaaaaattaaaaaataaataaaatgaaataaaggtaagaatttgtttacttttgctgtcttttataccctcttccctccccaargcttgctttgtatatttttgagattctgatttttcttctagtaaattttgtggccccagaaaagtatacttaatcctctatttttggttacagctttttg

SEQ ID NO: 6592 - DNA, 201 bp, Homo sapiens
taatgagagatttaataggtcatgcattatctctcaaggtgaaaccagggtttgttccttagtgattcagttcttactgggccaaaattccacttcagttytggaatgttttccaggtcctgatgcagcccactaaagctcacacaaaccatgtgctataattagcttatatgtaatgttgaaggacatcacattttatat

SEQ ID NO: 6593 - DNA, 201 bp, Homo sapiens
atgaaaatatctcgtctagaagccaattttattgtttgactggtacaaatgagacatttctgttaatattacatttgactaatatatgttctattaagatrttaaagagtcacagttttcttagaagattccttttcctttaccatcttcctttttatccagttggaaacaaatcctttaataattttttgtttaatttca

SEQ ID NO: 6594 - DNA, 201 bp, Homo sapiens
aatcacttgaacccgggaggcggacgttgcaatgagccgagataatgccactgaattctagtctcagtgatagagtgagactctgtctcaaaaaaaaaaaattaaaaaataaataaaatgaaataaaggtaagaatttgtttacttttgctgtcttttataccctcttccctccccaaagcttgctttgtatatttttgag

SEQ ID NO: 6595 - DNA, 201 bp, Homo sapiens
gtttttgatgtttagacattatgttatagttccatgaggcagctgagttttctgtggttacagtactggaatgtaaaatgtcacatctactttttttttttggagtaaatcatcatctaggacatatattagagtagaacttcatagtgttttacactttggaaatttcacagaaatttgtatttcgttgtccttgaaata

SEQ ID NO: 6596 - DNA, 201 bp, Homo sapiens
catttattcattcactcaaaaatattccatttactgttgattcacattaacctttctgtagactaaaatctctaagtcttagttgcctgtattgctactaygccacatctccattctgtacaaaacaattgtccttttggacttaatcacatcattttacatttacttctatttcttttcaatttatttctattattactt

SEQ ID NO: 6597 - DNA, 201 bp, Homo sapiens
agaacactggttctgcaggcttttaagtagctactatatatgcataaaaaggcttcctggtcaaataagtttagggaatgttaggataattgtttttttttctatttttttaagacctcttggagactttaatgtgctaatatacttcatgactgacagagaagtgggtattaggtatactttttaataagttgttttaac

SEQ ID NO: 6598 - DNA, 201 bp, Homo sapiens
tacaaaaacttaaaacagtataggagtaaatctgacttctcaggcagggttagctccacattttaaaatgaagtctacaggaatgtgtcttgctccagctmtgggctctgctttctggtgtgctggctatatgcttaggttttgcccatgtggtgggaagatggccaccagcagctgtaggcttgcatactgccagcttag

SEQ ID NO: 6599 - DNA, 201 bp, Homo sapiens
aagggaatgttgtggatggtttgttcttctatccagaccactaaaactttctccatatcagcaataaggctgttttactttcttattatttatgtgttccctggagtagaactttttattttcttcaataacttttctttgcatttacaacttggttaactatttggtggaagaggcctaatttttatctgtctcagcttt

SEQ ID NO: 6600 - DNA, 201 bp, Homo sapiens
tatgcagcttcttcacctctgccagctttcatagacttaaaagaattaggaccttgctttggattaggctttggtttaagggaatgttgtggatggtttgwtcttctatccagaccactaaaactttctccatatcagcaataaggctgttttactttcttattatttatgtgttccctggagtagaactttttattttct

SEQ ID NO: 6601 - DNA, 201 bp, Homo sapiens
caaagaccagtaatattttaaagggaatctttttttatgagaagttcatcccaatgatatgtttaaaatattcagtaaaccatgttgtaaaccaacatacmtgaaactacaaagcctgagtgagaacctgggtaacaggctttgtacttccatttatgcaacacaggccaactagatttagcataattctaaagggcccta

SEQ ID NO: 6602 - DNA, 201 bp, Homo sapiens
atggttactatgtgcttacagtactagtgttagttgaaactggtctttcctaggatctggtaacacgtttatatcttcatctaaattcattacactgtacktgggcatgttctttattgtttagacctgagctgtaataaaaagagttagatcactttgaatagacaggcagagttgggattcttggcttatcacttacta

SEQ ID NO: 6603 - DNA, 201 bp, Homo sapiens
tgggagtgcaatggtacaatcttggcttgctgcaacctcctttcccgggttcaagcaattttcctgcctcagccttccaagtagctgggactacaggcgcscatgaccacactcagctaatttttgtatttttagtagagatggggtttcaccatgttggccaggctggtctcaaactcctgacctcaggtcatccacccg

SEQ ID NO: 6604 - DNA, 201 bp, Homo sapiens
tagcaaatttgtgaattatcattggtttacacattaaacaagcaaagtaattctttataacgttaaccaacaggctgtgtcttgattacaggatattgttkttcattaataaatggagctatttttagattttgccggtgtgtatacattttacttgcttgcttttcatatctcagtcaccattatgtggcagtctccagg

SEQ ID NO: 6605 - DNA, 201 bp, Homo sapiens
ctgtcagaggaatcagtatggcagctacagcattaagaaatgtattacttttcttttctttcttatttttttatttttattattttatgtgtgtgtgtgtkagacagagtttcactcctgtcacccgggctgggagtgcaatggtacaatcttggcttgctgcaacctcctttcccgggttcaagcaattttcctgcctca

SEQ ID NO: 6606 - DNA, 201 bp, Homo sapiens
tcttatattaaaggtaaggaaatagcttctaactaagcaaagttgctcaaagtgacacatagagtgaggtctgtggctgttctcttactccaaatgtgggrtatctcagaaattgccatcctccagaaggctacagagtagctcagactgtgcaaattgttctccatttgccatgcccccatgcactcaacactattccat

SEQ ID NO: 6607 - DNA, 201 bp, Homo sapiens
agggtggcaggactggggaccatgggcatttgagccatttcctcatataacttcaggacctgctcaaacccaatcacatatatactacttccatttgatgrtggaatgctgtggacatgacccactttgtgagtaggtgggtcagaaagcacccagttcatgataggcagttcaagtgataggcagacgtggtgacttgat

SEQ ID NO: 6608 - DNA, 201 bp, Homo sapiens
tttattctatttaattttaattagtatacattttaaaaccacatctgacgagtgccagctcaaaccgtaggatacatggagaggtgtttagtgtgataagwtccaaacagattggcaaactttgaagaactttactgctaggccaacaagtttagattccaaaatagaacaaacatatttagaagcaggcaaaacaaaaga

SEQ ID NO: 6609 - DNA, 201 bp, Homo sapiens
gccaattttctactacctagcatcagaaccctgagttgttcattgcctcctgacatttactgccatatttaatcagatagttagattctgtcaatttggcmtctaaaacatattttctctcattcctttgttttcacttccctgggttatcctgtttccactttctgcataacctgcctcccaacttatctctaccttcaa

SEQ ID NO: 6610 - DNA, 201 bp, Homo sapiens
agttctagatccttgaggaatcgccacactgacttccacaatggttgaactagtttacagtcccaccaacagtgtaaaggtgttcctatttctccacatcstctccatcacctgttgtttcctgactttttaatgattgcctttctaactggtgtgagatggtatctcattgtggttttgatttgcatttctctgatgacc

SEQ ID NO: 6611 - DNA, 201 bp, Homo sapiens
cctctactcctgtatttcacttggctctctaaattgtctcagttctaggtagggtcaaatccttctcccataacctggaccttcgagttccccagtgaggktgtgtgttcaccctttcccactttcatactttgggcactcatagtatttgggctgtctcctgggtcctgcaggagcaatctgcttccttcaaagggtctg

SEQ ID NO: 6612 - DNA, 201 bp, Homo sapiens
ttcccgggtcaatggagttacgttaccagtaggattatggctgcctctgctgtgtcatgtaggttgccagggaagtgggggacagccgacagttacaggcytcacccggctcccatgcaatccaaaaggccagtctcactctcactgtgcctccccgcaatagcactgagtttgtttttaggcagtgggcaagcagggcta

SEQ ID NO: 6613 - DNA, 201 bp, Homo sapiens
gcttgctgcagctgctgtgggggatgggtttgtggttcccgggtcaatggagttacgttaccagtaggattatggctgcctctgctgtgtcatgtaggttrccagggaagtgggggacagccgacagttacaggcctcacccggctcccatgcaatccaaaaggccagtctcactctcactgtgcctccccgcaatagcac

SEQ ID NO: 6614 - DNA, 201 bp, Homo sapiens
agacatgtctgagctgattctccttgggcagggcttgctgcagctgctgtgggggatgggtttgtggttcccgggtcaatggagttacgttaccagtaggmttatggctgcctctgctgtgtcatgtaggttgccagggaagtgggggacagccgacagttacaggcctcacccggctcccatgcaatccaaaaggccagt

SEQ ID NO: 6615 - DNA, 201 bp, Homo sapiens
tttctgtctcttagtcatggatagcagcacctgctccagtggaggtggcaggggagtgaaatgcattctgtgagggcccgtagttgtattattgttgtttrttgcactagttttgtgctgattggcctcttgccaggaggtggcactttcaagagagcatgagccgtggtagtatagggaagatcaggcagtggctggagc

SEQ ID NO: 6616 - DNA, 201 bp, Homo sapiens
ctataaatgtgtccttgatttccagaaattgtgatatttttatttatgctatcaatttcactgaagatttttcccttataccgtctatcatttttttttttatttcatgaaattggacttcacctttctctgctgcctccttaattagcttaataattggccttctgaattctttttctggcatatcaagactttcttcat

SEQ ID NO: 6617 - DNA, 201 bp, Homo sapiens
agcattgggagatatacctaatgctagatgacgagttagtgggtgcagcgcaccagcatggcacatgtatacatatgtaactaacctgcacaatgtgcacwtgtaccctaaaacttaaagtataataaaaaaaaaatgccactctagttcttaactttgtacttgattatgaaaatactttgttctgtttcctttccttgc

SEQ ID NO: 6618 - DNA, 201 bp, Homo sapiens
ttgaacaatgagatcacatggacacaggaaggggaatatcacactctggggactgtggtggggtggggggaggggagagggatagcattgggagatatacytaatgctagatgacgagttagtgggtgcagcgcaccagcatggcacatgtatacatatgtaactaacctgcacaatgtgcacatgtaccctaaaacttaa

SEQ ID NO: 6619 - DNA, 201 bp, Homo sapiens
tgaacagacacttctcaaaagaagacatttatgcagccaaaaaacacatgaaaaaatgctcatcatcactagccatcagagaaatgcaaatcaaaaccacwatgagataccatctcacaccagttagaatggcaatcattaaaaagtcaggaaacaacaggtgctggagaggatgtggagaaataggaacacttttacact

SEQ ID NO: 6620 - DNA, 201 bp, Homo sapiens
agcagaagtctagggtgatagacctatagaacaacaatttttaaagccattttggatcggattttctatcatttgcagctgcaagcatcctaactaatacwatgtattaaatataagtggaaatgatttatttaacatggcatgagcatccctcattttaagatattaaagaattaaatttttgtttttatatagaaattc

SEQ ID NO: 6621 - DNA, 201 bp, Homo sapiens
acagaggacagagaaatttcatgcaaagacagattttcctatccgttatgattaaattctctcagtttcctcattatgaaaatcatttgggatacttgatmaatgtacagaatcttctgcctcaattcatactggtcaatataaatcttagcttggggatctgaatttttaattagcacctgagcgattcttagtatcagg

SEQ ID NO: 6622 - DNA, 201 bp, Homo sapiens
ctgggaacaaggccctagaatcaccccctaaaagtcatctgagaaagacaacattgctgccacccctgggcaaaatcatgatggctcaaagtaaatatagsaccagccctggccactgtatgcaggaaatgggacaaccatctctcttcctctggagagtgttgtttaatgaaatgcaacatgagagaacaattacagaag

SEQ ID NO: 6623 - DNA, 201 bp, Homo sapiens
tgttaccactgcgtcattatcctcagcaaactaacacaggaacagaaaatcaaagaccgcatgttctcacttgtaagtgggagctgaacgatgagaacagrtggatacagggaggggaacaacacacactggggcctgtcaggagtagggggcagggaaagagagagcatcaatatcaaatagctaatacatgcggggctt

SEQ ID NO: 6624 - DNA, 201 bp, Homo sapiens
tgctgtacatattaggtccgatcacagcaccctggaaatctgtcatttggctaccagacgtttcttctttgaaagtctacctaaagcataaagctcagcayatatttctcctgctgatgaacctaatggatccccattgttttcaaaataaagtccaagttatttgatgtcttagtctctttgaaatgcataataaattat

SEQ ID NO: 6625 - DNA, 201 bp, Homo sapiens
aattgacaaatgggatctaattaaactaaagagcttctgcacagcaaaagaaactaccatcagagtgaacaggcaacccacaaaatgggagaaaattttcrcaacctactcatctgacaaagggctaatatgcagaatctacaatgaactcaaacaaatttacaagaaaaaaacaaacaaccccatcaaaaagtgggcaaa

SEQ ID NO: 6626 - DNA, 201 bp, Homo sapiens
tgcccaaggtaatttacagattcaatgccatccccatcaagctaccaatgactttcttcacagaattggaaaaaactactttaaagttcatatggaaccamaaaagagcccgcatcgccaagtcaatcctaagccaaaagaacaaagctggaggcatcacgctacctgacttcaaactatactacaaggctacagtaacca

SEQ ID NO: 6627 - DNA, 201 bp, Homo sapiens
ctgcccaaggtaatttacagattcaatgccatccccatcaagctaccaatgactttcttcacagaattggaaaaaactactttaaagttcatatggaaccraaaaagagcccgcatcgccaagtcaatcctaagccaaaagaacaaagctggaggcatcacgctacctgacttcaaactatactacaaggctacagtaacc

SEQ ID NO: 6628 - DNA, 201 bp, Homo sapiens
cttccttggcttgcttggattaaaaaaagggaaaattcctgagtctccccatttgtctcagggattttgtttttattctggataaacaactgtttttttttaatgcaaaaatcattactttcattaatttcatagaggaacagcttttatataatgaaaaatattaaaatggttttgaagtaacaatggactgaatagagt

SEQ ID NO: 6629 - DNA, 201 bp, Homo sapiens
atagtagatgcattgtaatatggtgatcaagaaaaagatctcaaagtcaaacagaagatgtttgaattctgacctttcattcatgagctgtatagccagccttgggcatgtgacttagactcaggttctttatctaccaacttgatagagttctgagatcatcaaggaaattgcatgtacaaaaatcctagaacattgact

SEQ ID NO: 6630 - DNA, 201 bp, Homo sapiens
gaatagtagatgcattgtaatatggtgatcaagaaaaagatctcaaagtcaaacagaagatgtttgaattctgacctttcattcatgagctgtatagccagccttgggcatgtgacttagactcaggttctttatctaccaacttgatagagttctgagatcatcaaggaaattgcatgtacaaaaatcctagaacattga

SEQ ID NO: 6631 - DNA, 201 bp, Homo sapiens
agttggcaactatcaatcaactcttcaaagattatatctctgatcaaggaaagcaggcatttgcaccaataatgacagaacaaaacaacatggggaagagyagtagtataaacaactttgagagttcataggtgggctgccatactttcagctagagtgataagtaaagactttggagacaggtaaatattaagaataaat

SEQ ID NO: 6632 - DNA, 201 bp, Homo sapiens
tgaatagtagatgcattgtaatatggtgatcaagaaaaagatctcaaagtcaaacagaagatgtttgaattctgacctttcattcatgagctgtatagccagccttgggcatgtgacttagactcaggttctttatctaccaacttgatagagttctgagatcatcaaggaaattgcatgtacaaaaatcctagaacattg

SEQ ID NO: 6633 - DNA, 201 bp, Homo sapiens
tcaacaagttttgtgaattgtaaatgaccataagcatataaagtattagtcatctattcactcattcacaaatggagcatgcctagcgttaggtggtgggrctgtggggtggtcattaacatggtgaatgagatctcaagaagcagtgtgttcccctgggtaagggcatgggctttggagttaaacccacctagagtaatt

SEQ ID NO: 6634 - DNA, 201 bp, Homo sapiens
aagttatatttcttacctgtgttgttattaaaccttgataaattaatgactatattaacagacatttgtcatttgaaatttttttgtggacaaaaaaaaaattcgccacttaattctgtttctcagagtggccagtttcagtacaaacaatgacatttttaaaagatggcaaacttgtaggaattattaaacagctaatga

SEQ ID NO: 6635 - DNA, 201 bp, Homo sapiens
tacagcactctgatcagtcttgactctttatccaatttgccagtctgtgtcttttaattggagcatttagcccatttatatttaaggttaatattgttatrtgtgaatttgatcctgtcattatgatgttagctggttattttgcttaatagttgatgctgtttcttcctagccttgatggtctttacaatttggcatgtt

SEQ ID NO: 6636 - DNA, 201 bp, Homo sapiens
gcagtggtgtttatagtattctctgatggtagtttgtatttctgtgggattggtggtgatatcccctttatcattttttattgcgtttatttgattcttcyctcttttcttctttattagtcttgctagcggtctatcaattttgttgatcttttcaaaaaccagctcctggattcattgattttttgaagagtttttttg

SEQ ID NO: 6637 - DNA, 201 bp, Homo sapiens
gtgatctcggctcactgcaagctcccactcctggattcacgccattctcctgcctcagcctcccgagtagctggggctacaggcgcctgccaccacgcccygctaattttttgtattttttttttagtagagacggggtttcaccgtgttggccagggtggtctcgatctcctgaccttgtgatccgccggccttggcctc

SEQ ID NO: 6638 - DNA, 201 bp, Homo sapiens
gatatgcttaaaataataatttttaagtagcacttttatttactaactgcttccggtggaatttcagattatcagttatttttattcttatttcttttacwtgtctaattgcattggttagcacatctggaatgacatggaatactgattgtgatgctgggcattcctgttttgaccctaatcctctaatactgcaatttt

SEQ ID NO: 6639 - DNA, 201 bp, Homo sapiens
catcaatgtcttatggttgtcagtacacagatcttccacctccttaaacttttgtctatgtattttatttttttaatgtgatggcacatagaatttttttyttaattggatagtttgttatttagtgtatagaaattcaaccgatttttatatattgattttgtatcctacaactatactgaatttgtttatgctaacagt

SEQ ID NO: 6640 - DNA, 201 bp, Homo sapiens
tttcttctatgttattatcgtctaatagttttaatagttttcccttttacatttaggtctatatgattcattttgagtttgtttgtttaaagagaataagrtctgtgcctagatttatttatattttttttgcatggggttgtccagttgttccagcactatttgttgaacccatccttttttttcacttagagatttgag

SEQ ID NO: 6641 - DNA, 201 bp, Homo sapiens
ctagagggctggatattctttgaaacttcatgccctccaagtggcacagttgggatgatgtgagctgcaagctcagaggctggtcaaagaaacaaattagygtgtagcaagagagaccaacctctaactcactaatgttctacatttctttttcattgaatataagaagaatcactattgatgaactagggcatggctgca

SEQ ID NO: 6642 - DNA, 201 bp, Homo sapiens
gtttcccgtcttgccatttgttattccagtgaatgactgctgtgatctttagaggaggtgacatatccagttaatcttagtgaagtttgaggcgattagtwtgttattcactcttccagccaactttttcctattgagggtttggagagtgaagtggggtgaaggcaacaccattcttattgctaaaataatttaataagg

SEQ ID NO: 6643 - DNA, 201 bp, Homo sapiens
tttgccagtattttattgagaattttcacagcgatgttcatcagggatattggtctaaaattgtcttttttggttgtgtctctgccaggctttggtatcasgataatgctggcctcataaaatgagttagggaggattccctctttttctattgattggaatattttcagaaggaatggtaccagctcctcattgtacctc

SEQ ID NO: 6644 - DNA, 201 bp, Homo sapiens
cttcatctattgagataatcatgtggcttttgtctttggttctgtttatatgctggattacgtttattgattttcgtatgttgaaccagccttgcatcccwgggatgaagccaacttgatcatggtggataaactttttgatgtgcttctggatttggtttgccagtattttattgagaattttcacagcgatgttcatca

SEQ ID NO: 6645 - DNA, 201 bp, Homo sapiens
ccatgcccatgcctatgtcgtgaatggtattgcccaggttttcttctagggtttttatggttttaggtctaacatttaagtctttaatccatcttgaattratttttgtataaggtgtaaggaagggatccagtttgagctttctacatatggctagccagttttcccagcaccatttattaaatagggaatcctttcccc

SEQ ID NO: 6646 - DNA, 201 bp, Homo sapiens
agtttctttcgctgtgtagaagctccttagtttaattagatcccatttgtcaattttgacttttgttgccattgcttttggtgttttagacatgaagtccwtgcccatgcctatgtcgtgaatggtattgcccaggttttcttctagggtttttatggttttaggtctaacatttaagtctttaatccatcttgaattaat

SEQ ID NO: 6647 - DNA, 201 bp, Homo sapiens
tttctctgatggccagtgatgatgagcattttttcatgtgtctgttggctgcataaatgtcttcttttgagaagtgtctgttcatatcctttgcgcacttsttgatggggttgtttttttcttgtaaatttgtttgagttctttgtagattgtggatattagccctttgtcagatgagtagatggtaaaaattttctcccc

SEQ ID NO: 6648 - DNA, 201 bp, Homo sapiens
tacagtcccaacaacagtgtaaaagtgttcctgtttctccacatcctctccatcacctgttgtttcctgactttttaatgatcgccattctaactggtgtsagatggtatctcattgtggttttgatttgcatttctctgatggccagtgatgatgagcattttttcatgtgtctgttggctgcataaatgtcttcttttg

SEQ ID NO: 6649 - DNA, 201 bp, Homo sapiens
ggaagtggaggttgcagtgagctgagacggtgccactgcactccagcctgtgcgacagagcaagactctgtctcaaaaaaaaaaaaaaaaaagaagaagamgacgatatattaagatacaacaactctttaagcctttgctgattgttgatgagttttaaactcacagaaggttttgaagaaaggctggcagaacttgaag

SEQ ID NO: 6650 - DNA, 201 bp, Homo sapiens
gggatggctgggtcaaatggtgtttctagttctagatccttgaggaatcaccacactgtcttccacaatggttgaactagtttacagtcccaacaacagtrtaaaagtgttcctgtttctccacatcctctccatcacctgttgtttcctgactttttaatgatcgccattctaactggtgtcagatggtatctcattgtg

SEQ ID NO: 6651 - DNA, 201 bp, Homo sapiens
aggatggagagaaataaaacaggaaaatgtgagcataatttatcatgtaaaatatgtgtgaatattgcttaatcaaatatatttgttatatttctttttttaatgtaaatagcatttcttttttttccttttttcttattatactttaagttctagggtacatgtgcacaacgtgcaggtttgttacatgtgtatacatgt

SEQ ID NO: 6652 - DNA, 201 bp, Homo sapiens
gcgcaagagaatagagggtattccctagaaagatcatagaacatgtctaggaataggagagaagagtcactatcatgggagcgaagcagtgtgacaaaacrgggtgattaatgaattgggaagtgtaggaaatcatagaattgttgcagtgaggatggaaggtggtgtccaaagaggaaacttttggagatgatatggtta

SEQ ID NO: 6653 - DNA, 201 bp, Homo sapiens
agattccctctcggagtcatgccctgggcatctcatttgcctcagcctagtcctggtcttgtcagacaataaaattttatcattttattaaacaatgttcrgcttcttgggtgcaggcaaagaagatgtacaattgaatttaattgtacaatgactgtgattttgatagagcaattcactggacagagagaagcgcaagag

SEQ ID NO: 6654 - DNA, 201 bp, Homo sapiens
ctttctcagggatgttccttgctgagaaaaagaattcagtgatatttctcccatttgcttttgaaagaagagaaatagggctctgttccgcccggctcacyggtggtcagagtttaaggttatctcttttattccctgaacattgctgttatcctgttcttttatcgaggtgcccagatttcatattgttcaaacacacat

SEQ ID NO: 6655 - DNA, 201 bp, Homo sapiens
cttacagtaggagctggagaattcttccttccactgtgtttattttctcagggattttgctgagggcttgagaggtagtcatatagggtgggacaatggcrgtgaggtatcctgtaggagggatttagtatgtgccagtagtggatcataagtcccatgctttaaaatgaactgtctgtgtactatagataagcaaatgca

SEQ ID NO: 6656 - DNA, 201 bp, Homo sapiens
aaaaatcataagagggccgggcatggtggctcacacctgtaatcccagcactttgggagaccaaggcggtttatcgcttcaggtcaggagtttgagaccasccttgccaacacggtgaaacccaatatctactaaaaatacaaaaattagccaggcatgctggtacatgcctgtaatcccagctactgaggatgctgagac

SEQ ID NO: 6657 - DNA, 201 bp, Homo sapiens
attgttacttaaaaaaaatgtcgaagttttaggaagaaaaataaaataccaagcataattcatgatatttcaaaattcttcttcctactatcaacctaccracgggttgtttttcctaagtactttaacaaataattgatacttgtttggggttaaacaaaatcttatttaattcacaataaagttaaataatagctcttg

SEQ ID NO: 6658 - DNA, 201 bp, Homo sapiens
ttgtcctcatttatcttaacagcttcctctaccaagacaacatatatcagttacagcaatcattcaatctgaaacagggaaatggcacaatctgaagagaygtggtatatgatcttaaatgatgaacatgagaccgcaaaaattcactcctggagatctccgtagactacaatcaatcaaatcaatagtcagtcttgtaag

SEQ ID NO: 6659 - DNA, 201 bp, Homo sapiens
gattgcttgatgacatgttctaagaaatgtgttgttaggcaattttgtctttgcgcaaacatcatacagtgtacttacacaaaccaaatggtatagcctaygacacacccaggcaatatggtgtagcctagtctatctaagctacaaacctgtacagcatgttactgtcctgaattgtgtacacagttgtaatgcaatgat

SEQ ID NO: 6660 - DNA, 201 bp, Homo sapiens
aaaaatttaataaactttttcaccactttaaaagaataaatacatgccctgaaaaacaaaattctcagtattgataagaaccaatctcatattattgaagyaaatctcatacagatactgttttcctttggttattttctattaatgttgaaatggaaattatatagcctgcatgtatttctctattttctctaaaataag

SEQ ID NO: 6661 - DNA, 201 bp, Homo sapiens
taaggatgggctttagtaacaaatcattacaatcatctctgagtataggtaagcaatttactaatgataaacctatttcggctcttagcaaaaggtatackgtaactgccattaaaggcatcaaagtagaatgcttgtgatttgaggacagaattttaccttttttcctaccttgacagcattagtgtaggaagttgaaag

SEQ ID NO: 6662 - DNA, 201 bp, Homo sapiens
agagtgtaatggtgtggtcttagctcactgcaacctctgcctcccaggttcaagtgattctcctgcctcagcctcctgagtagctggaactacaggcaccygccactacgcctagctaatttttgtatttttaggagagacagggtttctccatgttggtcaggctggtcttgaactcctgaccttgtgatccgcctgcca

SEQ ID NO: 6663 - DNA, 201 bp, Homo sapiens
gggaaaaatggaaggctcattaattttttatacccacaggtggaagacatgcagtgggctcatagagaacatactcacccggcgtctgtctgcagcctgcygtgtaagccaggggagaggaagaaaacggtgaaaggggtcccttgctgctggcactgtgaacgctgtgaaggttacaactaccaggtggatgagctgtcc

SEQ ID NO: 6664 - DNA, 201 bp, Homo sapiens
gggaagaacttagaagagtcttctttctgccaaaagaaatgtgcagctatagattaaaagcatgccgcaactttgtgatcatgttgggaatacctcattcwtatccttcccagagggaactcagtattgctacaggtgcatgtcatctggacttgcagacaattttacctttctttctaatagacatcatgtgtgcatgtg

SEQ ID NO: 6665 - DNA, 201 bp, Homo sapiens
atatcaactcttaaatcatattgagttcattttttttttttttttgctaaaacctatgtgtctttaaagtgtacttctgctgagccatggatagtgtccartgtcatttgtatacttttttaaagctcataaaatattgctgtattatttagggaagaacttagaagagtcttctttctgccaaaagaaatgtgcagctat

SEQ ID NO: 6666 - DNA, 201 bp, Homo sapiens
tctttgacaagaatgaagcagagtatgccaagagatattggactagcacaggtcagttctctcagggaactagattagatagatctcttaatgaatactaygatcacatcacatcatcttttatttggaagccatatcaactcttaaatcatattgagttcattttttttttttttttgctaaaacctatgtgtctttaaa

SEQ ID NO: 6667 - DNA, 201 bp, Homo sapiens
tctgcattaatttgcttaggattatggcctctagctgcatccatgttgctgcaaagggcaagatttcattcttttttatggctgtatagcattacacagtktatagctaccacattttctttatccagtccactgctgatgggcacctaggttgattccacgtctttgctattgtaatagtgctgtggggaacatataggt

SEQ ID NO: 6668 - DNA, 201 bp, Homo sapiens
gaaagaaaaggtaagattcaatatttgcagatgacataaattctgtgtaaagatattccaaaagaaattacagataaactattagaatcaataagtttaasaagttcactgaatataagatcaatatacaaaattacatttctatatagaaggaatgaatacataaaaataaaaatataaaatttacaacagcataaatat

SEQ ID NO: 6669 - DNA, 201 bp, Homo sapiens
gaagcatagggaagaataccaggttttgttggcatttcctattttgttgaattcccagttttaaattttccataatagaagtagatactgctggatattawacagtttttcttgaacatcagctggaagtttttgacagtaattgagttttagtctttaattaaacacagtggatctctggaacttctcgtagtttttaaa

SEQ ID NO: 6670 - DNA, 201 bp, Homo sapiens
ctttgtgagataagaactattttatcaaataaaagttaagagaagagggggtattgcagtttttaggaaagatacatgaattagtcatgttcttgaaaggyaggattgaagaggacaatctaatagtatagcatgctgcctgagattcacttgaggcttatcgttaaccatttaaaatgagtctaattgacaataagctaa

SEQ ID NO: 6671 - DNA, 201 bp, Homo sapiens
tgaaagctatctagtttaactatcctgagtttcaccagcctttggtgaaatatccgtgtagtgtttgctgtttttatcactacacatgcttgtcctgggaktcttaaaaaaaaaatacccgaagggtcaggtaagaagaccacacacattcattctaaacaatatgatcttactgcaggttttaaagcatatggattttag

SEQ ID NO: 6672 - DNA, 201 bp, Homo sapiens
aaaagtgaagaagtaaattatgctataaaatatttaccatcaactgccagctcattaatcagacaaaagcaatagagacagccaacagtacatgtcccccmacttttctggagacttactgcctcctgtgtgagtgagtgttttctgtagagccgttttcagttgtctatgatggtatgccagcaaggggcttcccatgct

SEQ ID NO: 6673 - DNA, 201 bp, Homo sapiens
gcattgcttttatctattataggcagtctcagagagagaaacagacaaacctagtaaagactgttccagatagtttcggaaatcaagctaaatattgaatrggcaaaacaaactttcacaaaattagcttacagcaaggcaagtctcctttaagaattttaaataaagagtaattcttgattgggtagaattctgtgtgct

SEQ ID NO: 6674 - DNA, 201 bp, Homo sapiens
gtttacttttgctataaaagaaatgtcagttttatctaatgacacttttaatttcttgcattgaatgcaggataataccctttaaaacaaaggggagacawttaagcataatgaggaactctcaagagcagattatggaaataaagcattgcttttatctattataggcagtctcagagagagaaacagacaaacctagta

SEQ ID NO: 6675 - DNA, 201 bp, Homo sapiens
aattataagccatatctccctttgctgttctccctgaatcactagccacctttcccagaactttgtttaaattcaagttttacatgatccttggagtgctrttatttgtaagtaaaaaatttaaataataataataagatgaaaatgaagattattgtaacagtgatttatctaacaagtaaagatggaacctgacatact

SEQ ID NO: 6676 - DNA, 201 bp, Homo sapiens
tttatttattgtttatttagtgggaaaggatctgctctgttgtgtgctttcactggtctaaagggatttggcacagttacctaaataggtgtaattataarccatatctccctttgctgttctccctgaatcactagccacctttcccagaactttgtttaaattcaagttttacatgatccttggagtgctgttatttgt

SEQ ID NO: 6677 - DNA, 201 bp, Homo sapiens
gtaaaaataagttaagaagatggtaaaacttgagttaccaagggggttgttacctggcagagaacgtaattaaaaaatgggcatgtctactggtcagttcraagtggtttgttttaatgcaaactgactctatatctcatactctcgtattcacagtggccctgtgtgggtggtttttattttgttttggttaggagtctt

SEQ ID NO: 6678 - DNA, 201 bp, Homo sapiens
tttgtttttatctttaaataaaggaaatgatgaaatatctatccttagaaggcatcaaagtttgattgtcattaactttaaaaaatacacggctgggcgtrgtggctcacgcctgtaatcccagcactttgggaggctgaggtgggtggatcatctggggtcaggagttcgagaccatcctgacccatatggtgaaacccc

SEQ ID NO: 6679 - DNA, 201 bp, Homo sapiens
aattttaaaatcatattaacaaaaggatgtattattatatactattttaatttgtcctcatttatcttaacagcttcctctaccaagacaacatatatcakttacagcaatcattcaatctgaaacagggaaatggcacaatctgaagagatgtggtatatgatcttaaatgatgaacatgagaccgcaaaaattcactcc

SEQ ID NO: 6680 - DNA, 201 bp, Homo sapiens
ctgcttattcagtatatcctaccacaggggtcacacacttttttttgttttgttttgttttttttgagacagattcttgctctgtcgcccaggctggagtscagtggcacgatctaggttcactgaaacctccacctcccaggttcaagcgattctcctgcctcagcctccagagcatctgggactacaggggcgtgccac

SEQ ID NO: 6681 - DNA, 201 bp, Homo sapiens
aacatatttttgcctatcctgtgggttgtcttctaacaatcttggtggtgtctcttgacccacacaattatttaacatagatgaagtgcaatttatttttkttgttgttgttgcttctgcttttggtgtcatgtctaaaaaacactgcctaacacaaggtcacagagatttactcctgttttcttctatgagtttttaagt

SEQ ID NO: 6682 - DNA, 201 bp, Homo sapiens
tttttctcattatttcaggtaattgtaggtatattaagaagttattgatatgcttaaaataataatttttaagtagcacttttatttactaactgcttccrgtggaatttcagattatcagttatttttattcttatttcttttacttgtctaattgcattggttagcacatctggaatgacatggaatactgattgtgat

SEQ ID NO: 6683 - DNA, 201 bp, Homo sapiens
ttatgtagtctatcattgatgggcatttgatttggttccaagtctttgttattgtgaatagtactgtaataaacattcacgtgcatgtgtctttatagcaraatgatttataatcctttgggtatatactcagtaatgggattactgggtcaaatggtatttctggttctagatccttgaggaaccaccacactgccttcc

SEQ ID NO: 6684 - DNA, 201 bp, Homo sapiens
taatacaaaaattaaacattagacctaaaaccataaaaaccctagaagaaaacctaggcattaccattcaggacataggcatgggcaaggacttcatgtcyaaaacaccaaaagcaatggcaacaaaagccaaaattgacaaatgagatctaattaaactaaagagctactgcacagcaaaagaaactaccatcagagtga

SEQ ID NO: 6685 - DNA, 201 bp, Homo sapiens
aacatgatccctgcccttgtgaaccattaacaaaattgtcttaaaattagataggaaagcaagatgaatttagaaacaacaaataacagaatacctttaarggcttttattttttccttgtttattttgtaaacagtaattggttcattaaaaagttcgttaatttggtgagtaggtgaaactagaaaagaggtactcagg

SEQ ID NO: 6686 - DNA, 201 bp, Homo sapiens
gattttatttgtttggatcgtctctttttttttttttcttagtctggctaaaggtttgccaattttgcttatctttaaaaaaaacaaacttctggttttgyttatcttttatgttttcttcatttcaatttcatttatttctgctctgatgtttatttttttcttctaataatttggggtttggtttgttctagcttttct

SEQ ID NO: 6687 - DNA, 201 bp, Homo sapiens
gctcattatttgaatcagtcagttgctaagtggtgcaacatgagggttatggttaaaattctacctatcatgttaatgttgaaaagatagtgttcaacccyggctggatatttgggtctacatgagaaattctagaaagaaccctatactctttgtatcatataatcaaatacctatttaaagcctctgccagaaagataa

SEQ ID NO: 6688 - DNA, 201 bp, Homo sapiens
accgagtataggtacatttcttttttaacacatcttatgttgttctgagaagtaaagcatattgagaattaaagcttccgacatgtggttagagaaactgrcctttaaggtttcttgaagtttaatgtttccaatttttttttgctgtttttcattttttgttttgttttgttttgttttgtgttttttgagcaggaacac

SEQ ID NO: 6689 - DNA, 201 bp, Homo sapiens
agtcattaaaacccaataagaaactagagggttataatagattacatttcctttgtagtgagctgacaggatagatctaatagtctcaaatgccctgatgwcatatgacagatgaagtagcatctactttctcaagggaggatatctgaaattaaagacacaaagtctctactctgaggagattcgacagccctctaaaag

SEQ ID NO: 6690 - DNA, 201 bp, Homo sapiens
gttctctacaagcatttgttcagcttaaatagattaatagtccagtgcctctttccaggaaaattcaaactgaccaggttgaaagatatgaggtgaggtgygggaatagcaaaaagtgaaatggatttaagctatgttaaaattcaactcagctaactcagctctttacaaacaaaaatgtttaataggtccatggtgaat

SEQ ID NO: 6691 - DNA, 201 bp, Homo sapiens
aaaagcttgtaattgccttccaataacagactgccttctagtttgtaaatctgaaatacctacagagtaaaacttggggaccaaatgagataagacaaacraaggtgatagacagaatgatgtgaatgaggttaaggataaggctaattaacatatgttggagttagtctctgctatattgtttttaggagatgataagac

SEQ ID NO: 6692 - DNA, 201 bp, Homo sapiens
tttatttcccactcacatagtagtctgaggtagttcctggttgaatggcaattttcttccatggagtgattcaggaacccctatgtcttccatcctatagytttgcatcccctgatgtctcttcatcataaataatagaatcagcaacaggaggtaagagtttctagggaaaagtgcacacacattaattctgtaaaacac

SEQ ID NO: 6693 - DNA, 201 bp, Homo sapiens
ttctcctgggtatggtggctggtattgatggtccccaagggtctagtgtctgaggaaagaagagtaagaagtttaaggagattatgaaaagaagtgtgtawaaagaggggatttcactccactctctatcaaaagaccctgtagtctaccttgttctgggaacaggaagagcctagatttgaataaattttgagatggata

SEQ ID NO: 6694 - DNA, 201 bp, Homo sapiens
tataggatttggccaagtttctacaaaggagctgattcctctcaggaagggggagttgacatagcactgttaggggaaatggccttatgtttatgtcctcrtaagcagagatttttccataaaattattacataaataaaaacaacaacaaaaacataggaggaagtgaaggaaataaaatggaattggtgagatcgtatg

SEQ ID NO: 6695 - DNA, 201 bp, Homo sapiens
ttatcagttcaaaggaagaaaataagtggtgttattctaataagatccaaaggcagttttaactatggcttactatgatgtttgggctgtgagccagctasttcctagccagaaaagttagaactgataagagcagttttaatattgtcatcaattattaatcacctacaacataggacttaggtttggatgacatattgt

SEQ ID NO: 6696 - DNA, 201 bp, Homo sapiens
ttagaggtgcttcaacagggaaatggcatagtggggtttgtattttaacagatgactcactagtttagacttgtcctcagcttcttctttttttttttttktttttttttttttttttgagacggagtctcgctctgtcgcccaggctggagtgcagtggcgcgatcttggctcactgcaacctccgcctgctgggttcaa

SEQ ID NO: 6697 - DNA, 201 bp, Homo sapiens
gagactcatgatgagaagtgggacccatgtaaagaactaagaatattctaggtgggaggaagaatatgtgcaaaagagctaaagtgagaatgaactaggcmcctttgaagagcagaaggaagctagtatggatagaatggagtgaacaagaggaagactgggagacaggcagggccacatctgggaggacctccttgtagg

SEQ ID NO: 6698 - DNA, 201 bp, Homo sapiens
gtagaatatctatttctctcaataggagaaagtgcaaagattagcccattttctgtgtgtttctataaatataggtaccctggaatgtgattttaatgctrtatctttcccttgtgtcatgctttggaaatgtatctaccttgggagtcagttaaaccacatgtggatgttttaaataatccttgtgattaagcaagtaaa

SEQ ID NO: 6699 - DNA, 201 bp, Homo sapiens
agctacttgggaggccaagatagggggagtacttgagcccaggagtttgagaccagcctgggcaacatactgagacattgtttctacaatttttttttttwaaaattagctggacatggtggcatgcacctatagtcccagctacttgggagactgagatgggaggatcatttgggcctgggaggtagaggctatagtgag

SEQ ID NO: 6700 - DNA, 201 bp, Homo sapiens
tgcacaggacaggactttgggatgtacagagggatatactatccttacaaatacttccttcagctgtttgctgatgagcaagattccaggaataggatacraggcccctaacttgtcttaactctctgattaggtcagatctccctactgtatgcccatagtgcaccatactcattttagcttttattacagttacagttg

SEQ ID NO: 6701 - DNA, 201 bp, Homo sapiens
ggctgcccctttcctggttctttggacaaagagaggagctttttttgcttatttgtttttggtctatgtgtattggtgtttccaggttgctggcttttcargtatagatgaggaaatacatgagggaaaaagaaaattcaggaactcgttgccatgtcattccctgggtcctgaggtccttaacccacttggcagctcccc

SEQ ID NO: 6702 - DNA, 201 bp, Homo sapiens
catagatgactagaaaaacttcaagatttagggattctggtcacctttctttgtaccacatgaacgataattgcattcgatcattaaaagacggactaggytcatataaatgcttaacaaacactcaagacacccaggaattcacagttgaggaaagcaacgtctttcaatactgtaagtatagcagatactaaaaaatac

SEQ ID NO: 6703 - DNA, 201 bp, Homo sapiens
atttgacaatattccaagtgtaaagggttttgatttggaaataaattctgtattgaaaatggcataaatgattatttttcttctttatgctgcagcactttaacttgtaatttctaccctggttaaccccacctatttaaatgagagctcaatgtgagatcttttgttgcctttgaaaccactggatagaattttaaatcc

SEQ ID NO: 6704 - DNA, 201 bp, Homo sapiens
ttaaatccctctttttcaattatgagattttgttaacaagcttctctgagaattaatttccttgtctgtaaaatggatgccctgtctgctcagtaataatycaatgatataattcttgtgaatgttctttataaactcaaaagtgctacttaatatcaggtattactagtgaaaggaatggggataatacagattttcccc

SEQ ID NO: 6705 - DNA, 201 bp, Homo sapiens
cattagttttctatttttttaaataaagttgcagtaaattttaatatcgtttcagcgccaaaagaaaaatacccttaggattcaattgtttaaaaaaaaaagaaaaagaaaaaaatcaccaattctggcttacagaggccacaggtttgatggtggagttgtggttgagcatgaacagctgaataaccccaggggtgggtg

SEQ ID NO: 6706 - DNA, 201 bp, Homo sapiens
tgtgtttgcaatggcaagctgttcagtgtgactggggcacaggatacatggagttcagggtggaggcaggtgggggaaatggggtatgagagaacaggctrttctgggcaaaggctagcccagaaaggacctttcgtgctattctagggattaagtgtctgctaaacatctctaattagaatctcatttctatattctctg

SEQ ID NO: 6707 - DNA, 201 bp, Homo sapiens
gctacagtgagccatgatcatgccactgcactccagcctgggaaacagagtgagaccctgtctgtctgtctgtctgtctctctctctctctctctctctcwcacacacacacacacacacacacacacaaagaagaaacagaactgatggcaggtctagattggctctggcatagggcaagcctatctagttttcttgaag

SEQ ID NO: 6708 - DNA, 201 bp, Homo sapiens
gattacttgggcctgggtggttgaggctacagtgagccatgatcatgccactgcactccagcctgggaaacagagtgagaccctgtctgtctgtctgtctstctctctctctctctctctctctcacacacacacacacacacacacacacacaaagaagaaacagaactgatggcaggtctagattggctctggcatagg

SEQ ID NO: 6709 - DNA, 201 bp, Homo sapiens
ttagaagaagtgtatgtattggtttagccttctaaatttctgtgtaattttgcatatgcactgattataattttttagaatcacagagtactgaaatatayggaaatttaaataaaactgttcaattttttaaaaaggcaaaattgaagataaggagatgctataaactagagaaactataaaattagttggaatattaaa

SEQ ID NO: 6710 - DNA, 201 bp, Homo sapiens
ggaggaagggagacccatgagatactacagtaattttccagaaatgatagtggcccagcctatgatggttgcactgtactaggaatggacagaagtagatsgatatattaataaaaagacattttagggatatatgtagggcttggcaattaattgcatgttaaaggagaggacaaatcatggatgatgccttgattcttg

SEQ ID NO: 6711 - DNA, 201 bp, Homo sapiens
ggggatccaaaatagcacctgtctatcagcaagaggagattgcagaaggggctgtgacaattttgcccaaacgagcatcaattgatggtaagaatgcaccrtagagaatttgttttattccagttggatctgaactcaaaggcaaaactggagtatcataatatgaggaaatgcactcattactgatgacttgatacaaat

SEQ ID NO: 6712 - DNA, 201 bp, Homo sapiens
tgtgttttagggctgaatgtcaagtatctctcagtgttggtgatgattcttgtctggctatgattattactgttattaacactaataataatatgctacaytggcataggaatttaccctttataattggattctcacagtatacctgagagatagttattatgaacctcattacagagatgaggaaactgagagatgaga

SEQ ID NO: 6713 - DNA, 201 bp, Homo sapiens
tacatatgtatcagatacaatgagtggaatgaaagttgaagcacccattgtgggaaggatggcaaagagaaatgggcaaggaccaagttgctgtgggagtkatctataataagatcactatttgatccctataaatagcccgacaaaactagagaagtcaacatgaaactttattttcacgttttaatattctacttgata

SEQ ID NO: 6714 - DNA, 201 bp, Homo sapiens
cacccccagactttgatatgtcctcctttccctcctcctcactttctttggaaatagctgttcaaataaaagatgtaatatactaaaagctagcacagacrtataaacagagacagaacaaggaggtggaaatgggtgccacactgtggaagaatctgatttcaggcttccatgtgccaggcacttttccaggagctgggt

SEQ ID NO: 6715 - DNA, 201 bp, Homo sapiens
cctctttaaagaccccgtcttcaaatgcagtcacattctgaggtactgggggttaggccttcgaaatacaaatgttggaggagacacaattcagcccatarcaccatttttcttgattcttactatattaagggatatcaccagaaaaaaaaaaatagcacttttaaaacatcatgtgcctccgcaaaagcacctgcactg

SEQ ID NO: 6716 - DNA, 201 bp, Homo sapiens
tttttgccttctatctgcaacttcctaaactcactctcattgccatctagctcagctctactccaccccaagacaactatacttctgttcactctttttakaaaccactgggaatatttattctaagcgaaactatgtctctaaaccccagagacctcttttacctttccttaattatacttagggctctattcatcaccg

SEQ ID NO: 6717 - DNA, 201 bp, Homo sapiens
tatgtaatgcttcttaatgagaattttataaatgatttattacactgatgtagataaaaacatatttgaaaagcggaaaagtcaaagcagttgacatcttygatgagcaacggatatatattttactttcactatatagaaagcagccttcaactatatagaatatactgtcatgaccaatgattgatgctttataatcct

SEQ ID NO: 6718 - DNA, 201 bp, Homo sapiens
actatgagcaaattactttgaaagatcatttaaggcctatgcttttgaacacagtcctgttgcacttgcaatagacattacaagtcagtttccccttcagmtttcctaagcaagggaaagagagaatgcctccttctctactctgtggttgaatgtgtgcagaacccagagtgtgagtcactacctcaagttggcagccta

SEQ ID NO: 6719 - DNA, 201 bp, Homo sapiens
taagaactgtgtgctatgcctgaataggtccctgtctctctccctggtgtaataactgcatgtatgagatgtacaagtcattattgcacattgtctgggtrggagtgacactctattcataagctaggcactttaggatgtacatttattccaacagatgcttagactccatttagaacactggcactgtcatttatcaaa

SEQ ID NO: 6720 - DNA, 201 bp, Homo sapiens
tcgcttgaacctgggaggtggaggttgcgatgagccgagatcatgccactgcactccagcctgggcaacagagcaagactctgtctcaaaaaaaaaaaaaagaaaaaaaaaaggtcctatgcacattagatttagaaatattaaaagaatatggagaagttggacagatgacaggtattgtgacaaatgtgaacaaagtga

SEQ ID NO: 6721 - DNA, 201 bp, Homo sapiens
cagatgactggcttgttgaatacatcacagaaaataatatttattatgattttgttgacaaaattagaatgctaaattcagatagctgcaaaaaaaaaaaacagatttgaaaagaaatggtgccatcagttgcaggatttttaccttcatggaaataaggtttattgaaataagatgataaataaaagtgctttctggttt

SEQ ID NO: 6722 - DNA, 201 bp, Homo sapiens
attacagactaagttagcaacaataactcctgtttaatgagccagatactatgctttccatgtgtgctgtgtggcaggttctatcacctttacagacaagraaagcaagcttcagagaggttacatgcaattaattctgtgttccagagacggaaactccagcaaaaattcaagtgagctgtccaataaatgaaactgaaa

SEQ ID NO: 6723 - DNA, 201 bp, Homo sapiens
aatgaattacagactaagttagcaacaataactcctgtttaatgagccagatactatgctttccatgtgtgctgtgtggcaggttctatcacctttacagrcaagaaaagcaagcttcagagaggttacatgcaattaattctgtgttccagagacggaaactccagcaaaaattcaagtgagctgtccaataaatgaaac

SEQ ID NO: 6724 - DNA, 201 bp, Homo sapiens
aaaaagtcactcaacttgcaaacaaaatcagttattgtgttcagttggcaaagccttgctctgatgtttgagcataatctcatattcccttattattaagyaatagaatctcagaataggaagctggaagacaccttagagatcacgtggtccatctcactcgtttcacagatgaggaaatggaagcacataggggtgagg

SEQ ID NO: 6725 - DNA, 201 bp, Homo sapiens
gaatactaatgatcatgaagttgaagtactacttagtactaatcagacaagccatgttttatttctctttccctcaccagaaaaacattttaaacttgtartgtggtcactcaatgggttcttcctgttcactgcatagacaaaattaatcaattgagatggtgctattgcagtatagagtttaactgacatgagttcagc

SEQ ID NO: 6726 - DNA, 201 bp, Homo sapiens; identical to SEQ ID NO: 635

SEQ ID NO: 6727 - DNA, 201 bp, Homo sapiens
aggattaggatattataaatgggggaaaaatggaaggctcattaattttttatacccacaggtggaagacatgcagtgggctcatagagaacatactcacscggcgtctgtctgcagcctgccgtgtaagccaggggagaggaagaaaacggtgaaaggggtcccttgctgctggcactgtgaacgctgtgaaggttacaa

SEQ ID NO: 6728 - DNA, 201 bp, Homo sapiens
acaactaaaaacataattctttatccttttagattgttttaacaaaacttctttattgaaaaaccagaaagaatgaaggtcctatttctcctacttgtgcwggctacaattccagttttctatcatttgtatagattgcctttgtttgtgcaacaagacgtctttgaaaggaagttttaacattaaataataacattctat

SEQ ID NO: 6729 - DNA, 201 bp, Homo sapiens
tgaggtttcagtgctgcagggacttgcagctgagagataagggtgtgcctgggtaaccaaattagaggggttgagagagaacagaatagaagtggaggaarggatgctgtttcaagaagttttgagagaaagaaagtaggtatggtgggagagcttgagaaagaattggagatttctttaggatagggcacatttaagcat

SEQ ID NO: 6730 - DNA, 201 bp, Homo sapiens
cattttaaacttgtaatgtggtcactcaatgggttcttcctgttcactgcatagacaaaattaatcaattgagatggtgctattgcagtatagagtttaaytgacatgagttcagcccatgtgggagaactggagctatcactcaacctccctaatagcttggaggctagggtttttatggactgtttggtgggcaggggg

SEQ ID NO: 6731 - DNA, 201 bp, Homo sapiens
gtgacttctggccacatgactccagagcagtaagagattagagaaactatgcctacatctcagaagagttcaggttcctcccataatcctattcttgtggmcttttattagtctaacaaaggtggtttttggtccctgagcaaggaaagggttagttttaaggggagactagtatcgtcctagctttcaagttaaactata

SEQ ID NO: 6732 - DNA, 201 bp, Homo sapiens
gtacacacaaacatatacgtaatcagagaggaaagttctataattaaatgctaaatttggatatagataattagggaagttcagaaaatgtatgtaagttyacattgtaaaatccaaagctctgtggaggagatgagtgtttgatgacaaggatttgggaaagacatccaagatgagaagaaatggggagtcagcaggaca

SEQ ID NO: 6733 - DNA, 201 bp, Homo sapiens
tttaaaatagttgcttcataattcagaaaaattcagggagaaactttaaaaaatacttcttaatctacaaatttagattgtgggattatttatactccaarctgagatggttgtaagaaaaaggcaaccaattggatgtttgatttccccagaattaagcaactggtatgacttccatttgttttttacttgaattgacca

SEQ ID NO: 6734 - DNA, 201 bp, Homo sapiens
cctgagctggtttggatgtagatctccataaaggcagaggattgcaaacagtaacctgttataaagttctctccacaatgagcatatttcttctccatacrgatgctgaaattaaattattaatggattttaacacttttacattctttttatttttatttttgaggtatctgtacctaaattttatgctcactgtagcta

SEQ ID NO: 6735 - DNA, 201 bp, Homo sapiens
caatactttgtggcatatatccagaagtggaattgctgggttatatagtaattctatttttaattttatgaggaactgccatattgttttccaaagcaacrttaccattttacattactacaaacagggcacagagattccaatatctccatattctcaccaacatgtgctttccgtttttatagtagtagccatcctaat

SEQ ID NO: 6736 - DNA, 201 bp, Homo sapiens
cacagtgttaatctcagagctgcagccaggatcctggtttcttttatttggatttgtccttgacatttatatcctccatttattatttacttatattagayattttaccacatagttgaaaaatattttcctgttttgctctttatgatactttatgtgtgatggaatacattttggaattttaatcaccaactataaagt

SEQ ID NO: 6737 - DNA, 201 bp, Homo sapiens
gagtacagtggcactacctcggctcactgcaacctctgccttcagggttcaagtgattctcctgcctcagcctcccaagtaactgggactacaggcacacrccaccactcccagctaatttttgtatttttaatagagacggggtttcaccatgttggccaggatggtctcaatctcttgacctcatgatccgcccgcctt

SEQ ID NO: 6738 - DNA, 201 bp, Homo sapiens
tatatataatttatatatatgtaaattatatatataaattatatataatatatgtaaattatatatttacatatattatatattatctataacatatatawtatatataacatattatatatataattatatatatatttttttcacaggctctcaggattaggcatgattctgcctatcacaagcactgtgccaaatatt

SEQ ID NO: 6739 - DNA, 201 bp, Homo sapiens
acataattcacaaagtcttgctttgcctgacattatggcaatatttctctaattcatattcttgcttctctgccatcctccctctgatctgtcaccacagygatttctctaaaattaaaaaataatactatcatgtcatatatttgcctaaaagtcctttaattactcaccacagctttaaagaataaagtctggaaacta

SEQ ID NO: 6740 - DNA, 201 bp, Homo sapiens
tgagatcttccttaccttccaggcacaagctccctctacatcaatgtagtagatacattgcagcatctatgtctgtaccagtgtagtagtctaactttatyaggctccagaatcagctgtggaactttaaaaaagtgttcacaccgtggtcctgtccctgggcttctgatttgttatctagagttgaaaaacattcatgta

SEQ ID NO: 6741 - DNA, 201 bp, Homo sapiens
agacagcttatgtttctaactattgtagtgatacgtaaggccacatatcaatactttactacttctaggtgcttcatgaaatcttatccattgttctgcawtccatattgacatttattgaaacacaactttgataatgccacaggttattgataatcaatagctttttgacagaagcccttttgaaagaggacctatagg

SEQ ID NO: 6742 - DNA, 201 bp, Homo sapiens
cttagactccatttagaacactggcactgtcatttatcaaatggccccctggtggtatcaaagagttaatgaggatctgaaatttcctaccaactgcccckcaggaaagacatctgactcccattcttcagtctagtagagcagttggcaccttctgacattcatgccaagtcatcctacccagagccctggattctcacc

SEQ ID NO: 6743 - DNA, 201 bp, Homo sapiens
aaataaaattacatttatactatttgaggggaaagcactttatttccatactacctctaatgaggtaacagaataatgaaaagacaacttggagtacatartggaaaatgtcatttaaaaaggtttcatttatacaattttaaaaatgtaaaaagttcatgtcctttgcccacttttgatggggttgtttttttcttgtaa

SEQ ID NO: 6744 - DNA, 201 bp, Homo sapiens
aagaaagcttctccatatggtagctggaacaaaacagtgaatagtttctcaaagaagctttctcatgtgctcagcagaaatgatcttgctctttctccccmaagggccactctgcaccatgcttactccatgtcacatactatttttttctttattttgattaatagtatttgtgtctttcttaccaaataaaggtaagct

SEQ ID NO: 6745 - DNA, 201 bp, Homo sapiens
atttatactatttgaggggaaagcactttatttccatactacctctaatgaggtaacagaataatgaaaagacaacttggagtacataatggaaaatgtcwtttaaaaaggtttcatttatacaattttaaaaatgtaaaaagttcatgtcctttgcccacttttgatggggttgtttttttcttgtaaatttgtttgaac

SEQ ID NO: 6746 - DNA, 201 bp, Homo sapiens
tgctaacagagctcttgaagaatatgattcaaaatgaaatataagctgatgttaactatgcaggcttttgtcagtgaccaaagtagtagtgtataaagcargtgattatgacattttatggtgcatttataccaattttctttaaaaagtgctaataatagtagaatatattgattcacactagataattaaacaccctct

SEQ ID NO: 6747 - DNA, 201 bp, Homo sapiens
tagaggtaattcactttttaatgacatattaccgagcagtatgttctttcagttattttgggtttgatatggcaagaagggtagcaaaatataattcagakagggacgctcttctcatgagctttcccacctgtatacacctgaaataaagaaagtgaaatcaggagacagggagagagcagaaaggaagaaggaagattg

SEQ ID NO: 6748 - DNA, 201 bp, Homo sapiens
gatttaattcttatatacattctttcaagctaatatgcaattattcttttttttcagaaatatatgtaaatatccttagattgaaagtcttttagaaattkcctatatctgatggggaattttctcaggagtggaatatttaaaaagagagcttgagctcttagcaatctggagcccttctgcttggtacacattcctctc

SEQ ID NO: 6749 - DNA, 201 bp, Homo sapiens
tttttcaaaaactcatctgttattttcaaataagtaagaaatatatttaaaaagcttttactgactcaactcttgatatgatatattcactggtctatagwtttatcatgacactaaaaataaactccatgctagcatttgatgcaagaactgaaacataatactcttaaaaacagaaatttggatgcagaatatttttga

SEQ ID NO: 6750 - DNA, 201 bp, Homo sapiens
tgcaattgtgtataatctcaggggtttgaggtataaaataatgttttctttttagattatttcgctttgttgtatatttaaatgatgaaatatacaacaargacatagaaatgtactaaattttactagtatttgattgctttcatttgttataaaatcatttttattgatgttattgtgagataattgcagatacatttg

SEQ ID NO: 6751 - DNA, 201 bp, Homo sapiens
atccctgcatccttaggatgaaacccacttgatcgtggtgaattatttttatgatgtgctattggatttagcttgctagtattttgttgaggatttttgcrtctatgttcatcagggatagtgacctatagttttctcttttgctgttatttcctttcctggcttaggtatcagtttgatatgagctttgtaatgagatag

SEQ ID NO: 6752 - DNA, 201 bp, Homo sapiens
caagctaataagggggccacattccagtgtttagtgctttctcaggcttggggccaagtagaattcagggacctgtaggaaggagagaatcctgactaaarttctgtcaaggcaaagtaagagggtaagaggtgaaccactgtgaacacttggtcagtttctgaggtcccatgcagacatcttaccactttttaaattatt

SEQ ID NO: 6753 - DNA, 201 bp, Homo sapiens
tcctttccccatttcttgtttttgtcaggtttgtcaaagatcagatggttgtagatgtgtggttattatttctgagggctctgttctgttccattggtctrtatctctgttttggtaccagtaccatgctgttttggttactatagccttgtagtatagtttgaagtcaggtagcatgatgcctccagctttgttcttttg

SEQ ID NO: 6754 - DNA, 201 bp, Homo sapiens
aaactctttaatggctagggttttacccaggatgaaggtccacttccactttggggatccttttctcactttccttgactagattgtctctttgttacaastaacaagcagcttgtgcttcctctccttaatgtctctctcactgggttgtagttgtttacctacttgtctgcatcccccactagactgtaagcaccatgt

SEQ ID NO: 6755 - DNA, 201 bp, Homo sapiens
agattcccaaagtatgagccactgcacccagtgtgaaaaccattttaaaaaattaatccacttttggctgggcacatttattcatgcctgtaattctggcrttttgggaggccaaggagggaggattgcttgaccccaggagttcaagaccagcctgggcagcatgcaaaaccctatgtctaccaaaaattacaaaaatta

SEQ ID NO: 6756 - DNA, 201 bp, Homo sapiens
tgttgccattgcttttgtgttttagtcatgaagtctttgcccatgcctatgtcctaaatggtgttgcctaggttttcttctagggttttcatggttttagrtctttcatgaagtctaggttttgatttatagtgagaggcttcctttcacttgaacacttagaagccattgtatggttactaattggcctaattttaatct

SEQ ID NO: 6757 - DNA, 201 bp, Homo sapiens
tgggcaaagatttgaggagtgtggtggaggagataaggtattcatatgaggttttccaagcttgtttgcattttttttttttttttgccatagaatcagcyaatctgcaaaatgggaataataagattgtgttagattgttgggtatatttaatgagaaaatgcaggaaggcttccatcaggacctggtcatgtcctttgg

SEQ ID NO: 6758 - DNA, 201 bp, Homo sapiens
ttatattaagatgcttttatgttgatctgattaaaattacatttgaaataatgaatgacatgtaatgtacaaatacccttatatttggaataatgaatgaygtgtacaaataccttcccagatatatgtattttttaaagtgtaaacattatcaacaagtgtaatgaaagtttttagaagcattcttctaggaggtacaaa

SEQ ID NO: 6759 - DNA, 201 bp, Homo sapiens
aaactagatgctgcttacaaagcccttcgttatatggtcactgactgtcttgtattgatacacaccatgttctaatcatgccatattgcttacagtgattrcaatgtacatttgcttatgggattcatccaacctgaaatgcctttctttgtcttctccagttccattttatctttcaaggcagtctcacctcccctgaga

SEQ ID NO: 6760 - DNA, 201 bp, Homo sapiens
ctgcctgagattctcttcctgtaaaactcaattcatagggcacattatccaggaattcttcttgatgtttacagtttcagctaggcagtcattccatctaytccttgtaattcagtacttccgtttcatagctgatactgtttcctggtcagcctggtctccatgctatgagctatttggaaacagggaccatatatttta

SEQ ID NO: 6761 - DNA, 201 bp, Homo sapiens
tatccattcatttattcatgccttacccttacaagcctcaggactcagagatctgtgagaatgtaatgcaagtccctgctgataaattacgtagcattttyttgatagtcctggcataagaaccccagttttgcatatagtatttgaaaacattatttgtaatatgcatgggagacggtggtctatggtttaatatttttc

SEQ ID NO: 6762 - DNA, 201 bp, Homo sapiens
gagcgcagtggcgcgattttggctcactgcaagctccgcctcccgagttcacgacattctcctgcctcagcctcctgagaagctgggactacaggtgcctrccaccatgactggccaattttttaaaatatttttagtagagacaggatttcaccgtgttagccaggatggtctcaatctcctgacctcgtgatctgccca

SEQ ID NO: 6763 - DNA, 201 bp, Homo sapiens
gttataaatactatataaatgttatcaaaatgtatgcattgttttataacctgcttttttttttttttttttttttttttgctcaacattatgtttttgaratttctctgtgttgatacatggaactccagtttattcattgtaactgtgagtagtatttctatgcacaaatatgtcacaatttgttaatttgtatttgga

SEQ ID NO: 6764 - DNA, 201 bp, Homo sapiens
ttctcgcattttgtgggttgtatgtttactctgttgattattttgctatgcagaagctgtttagtttaattaggcctcatttatttctttttattgcattygcttttggggtcttagccacaaattcattgcctaggccaatgtccagaagagtttttcttaggttttcttctagaggctttttggtttcaggtgttacat

SEQ ID NO: 6765 - DNA, 201 bp, Homo sapiens
ttatgcctaggtgatataaaatctattttaggtgaaaggacttatgcatgtgaaaaaaaattagagaacagagttcaattataagcaactgtgaaaatacrtgctcagttaataacctatcatggtggtcagaaaaaataaaatcagttttggttggaattatccataaaggaaatgggacagaaaagccattggcagtga

SEQ ID NO: 6766 - DNA, 201 bp, Homo sapiens
ttttacttaatatttagtattttattgagaactttttgcattaatatttataaatgagacttagttacagggctttatttttttttcctcttttttttccragcaagccacttatttttttaattaggaagaaagagacactgttcatttccaaacatatagcctgacataatacattattatattatcaatttaatgtat

SEQ ID NO: 6767 - DNA, 201 bp, Homo sapiens
gctaaattatctgttttgtctcctgtctaattttatttctttcatgaatacacatattttatacatctgatatttcagaaaatgtgcttaaaaatgtctayttttccatttcttcattgattatcagtttatctaatctgtgtatcatccatctctaaacctaatttttggatacatatacaaccaatagacatgggatat

SEQ ID NO: 6768 - DNA, 201 bp, Homo sapiens
ttggagtttttcatcaacatctgtggatctctccttctttcctcccctactcctcttcctccccctcctcctttttttccttcttttccttctcctcttcyagcaattaaatatttgtagtctatctaccactcatgctttcctcaacgtagaatttcccagggctctatgctggttcctctgttcttctttctgcatccc

SEQ ID NO: 6769 - DNA, 201 bp, Homo sapiens
gataatgtctgagaaagtaccttgtaaactcttaaatgctacacaaaggttaactattttcccataatgtggtttataattgcatgcgtttagatattccrtaagtcacaatgttaccttcaaaacccaaggcctgatatcagttattctgtgacacagatattagtcctctccccaggtataagcattataaaaggttag

SEQ ID NO: 6770 - DNA, 201 bp, Homo sapiens
tgctgacctcttctagcattttttgctgaggggcatcctgggaccatgggccttgctctccaggtactgggataacagcagcattttgcatgtaccacaascatttaaaatcaccactctgaaaccatatcacttataatctgtgaccttccattgaaaggatgtttccaaataccaggcactcctgatttcagaagcaaa

SEQ ID NO: 6771 - DNA, 201 bp, Homo sapiens
ttggtctctatactgggagtccaaaccacctgtccaaactcaaaacctgccgacaacctccattttaactaatctcttataaatggatattagttctcctyatggactcatagccctcctagaagattcagctaagttccttgatgaaggtggctaccattgtagtgtaatagttaagtgcattcataagactgaccttta

SEQ ID NO: 6772 - DNA, 201 bp, Homo sapiens
gactccataaggatgtgagagtgcaaaaagctagcattttcaggtatcttttcttctctgtaatattttaacttgtgagatgagattgagtttttgttatragaaagcaacattctctctcatattaatttgttttaatatttaaaacattaattgttgcacatactaaagagctttgtgttcagtcccatcgccgccttt

SEQ ID NO: 6773 - DNA, 201 bp, Homo sapiens
tgtaatcttcaaataaagacaataataaggtcataattatgcctaacataatacaactatccttcatgcaactggaaacacaccaatccccaagccaaatkctattccatagagttaacaatacttaaatactgatatggatatgaagtcaataaatcttatgtcacatgataaaggaaaaaggaaataaaatgaagatat

SEQ ID NO: 6774 - DNA, 201 bp, Homo sapiens
attgtctggaagattaaaataagttacaccagagggcacttgaaggtgaccaatactagtttaaacaagttatttaagaacaaatattcagatcctttaaraaaatttaaactagaacaatccaggatattttcataagaggactccataaggatgtgagagtgcaaaaagctagcattttcaggtatcttttcttctctg

SEQ ID NO: 6775 - DNA, 201 bp, Homo sapiens
tcctcttctcttcagcagtttgtaacttagaaatcacttgctttcagggtcagctaaagaaactataaagactcatctggtttgcagtatcctattgcctsttaaacatccctttctggtatccttctgctcaggaccatcctgttgtcctcctggatctacagctggctgtgcctttgtatttttctcttgctatttgac

SEQ ID NO: 6776 - DNA, 201 bp, Homo sapiens
ataaactttattaaaggaaatagtcttaacgaagattttgatatacctgatgtggcatcaacttcagttgtaaattacaaggaatcattgttattcattgyctataatattccttaaacaccaagctttattagtactaaatgtgaggcctttctggatatgcctatgccgactaaatgaagactataatgatcaatttaa

SEQ ID NO: 6777 - DNA, 201 bp, Homo sapiens
cctgttgaacttctgcttctagtattatgaagaatagatatttggagaaactctcccaattacagacactgagaaatgctgaatgtaatataaaaaacaaycttttaaatatgtagctaagctcacaaaaattgaatgtaagtctctacagaggcaaaaatggagagagagctgacaccagggtggtgagtgaggatctaa

SEQ ID NO: 6778 - DNA, 201 bp, Homo sapiens
ttgaaaaacagttgaaacaatgctagagcctcatccgaatactattagctctagaatgaattttggtggtgtagggccctttcttggaccaacaaaggggycagatgagtgaattgctgaaagcatcttgctgtaagacagggtcacaggacacaacattccaagtcatgtctcttcgaaacatgcaataacttagaatca

SEQ ID NO: 6779 - DNA, 201 bp, Homo sapiens
cagcttgtttccctggcagtcttcgcctaccctgctatgtttatgaagatatattttcttccaagagactccaccaattgtagcaaccacttctataaagycaagcatttttttgagttatttattgcatacaatgggttttattagcttcaaaactttgaaaaggtaaatctgccatatccgggctcatctagagatgaa

SEQ ID NO: 6780 - DNA, 201 bp, Homo sapiens
cacaaatatgcaatgctccaagttggatgtgaaacaaatggtagtataatactcgcccttaaatataatttcagatagccacaaaatataaaaccatttamggatgtgaaaaaattagtataataaagaagaaaatacagtataactttttcttctgttatttaactggtgtaaaattaattccttgactctcatattttg

SEQ ID NO: 6781 - DNA, 201 bp, Homo sapiens
tcaatgaaatactgagaagcagcttgtttccctggcagtcttcgcctaccctgctatgtttatgaagatatattttcttccaagagactccaccaattgtrgcaaccacttctataaagccaagcatttttttgagttatttattgcatacaatgggttttattagcttcaaaactttgaaaaggtaaatctgccatatcc

SEQ ID NO: 6782 - DNA, 201 bp, Homo sapiens
aagacccacagaatctaaaaatatgcccagaaattaatgtattgctagttattcccagataatggagttaaagaaggtagagcatctccactgaagatatrcaatgaaccttgatcataaggaatacaaacagggtcttaattcatgaacttactcactgtcctactcaacaataaacataaattggggttttaagaatgt

SEQ ID NO: 6783 - DNA, 201 bp, Homo sapiens
tgattggaggcaagttcacaaagtggcaacaagtatgaaaaataaggaatgaaataaatagtgaaagaaacattattactattggaatttgcattcttgcycatgtgatgcatttgctttaaattggtgtaagctcttcacatgcagagggcccatatgccttgatgtaacattagatcaagtggcagaagctaaatttgg

SEQ ID NO: 6784 - DNA, 201 bp, Homo sapiens; identical to SEQ ID NO: 640

SEQ ID NO: 6785 - DNA, 201 bp, Homo sapiens
aagagtcttatagaccaggcattagagaattgtgataggtttttgagcctgtgataaaagctgtgtttggggaagatttttctagcaaccatttgtaggarcagtggaattaggaaaaaagggtgacagtaaggagaacagttaaaaggcttttaaaataagccagtgtaaagtgattggaggcaagttcacaaagtggca

SEQ ID NO: 6786 - DNA, 201 bp, Homo sapiens
tgatcagaagttttgcagctgaacagatctttgattaaaagagaatattggaaatgggtggtgttttaacttaaatagttttatagaaaaatatttcaaakttaggatacatggaagaaaataacaaaaggggttcttgattaatggatggatgggctcattttactttcaatgaatatttattgaacacctactatctca

SEQ ID NO: 6787 - DNA, 201 bp, Homo sapiens
ttagcaagaggagaaaactaatagagtatgtattgaaataagttttccacagtgatcctggacattctgcaacttgaggacacattttgtgtgcatgagayagattactataaaaaattcaaaacaggacataatctgccatttgttgcagaatccaacaaaatggattgttctaaaagttaagtgaaaccacagttttat

SEQ ID NO: 6788 - DNA, 201 bp, Homo sapiens
tgctatcattataaggggcaaggaagctaaagctttatctttgaagataaaaggaatatgagagaacatatcttttcattgtagatttgcacagtatggcrgcacaccttctttaatcagtcatcatgtttatgaatggcttattgaagatgacaggccttcaagtcatcattgcatacattacagggggcagaatagacc

SEQ ID NO: 6789 - DNA, 201 bp, Homo sapiens
atggagaaatggtcattttgatttgacaacatgggggttaacttgacaaaagcagttttcataaaagagtgaggggaaagcctaattggagtaggttcagwaaagaatgaaaggaaggcaagtggattcagcaaatacagataatagtttcactgaattttactgtagaatggtgaaagttgatttttaaaatatttgtta

SEQ ID NO: 6790 - DNA, 201 bp, Homo sapiens
gttccaatttccttcaaatatggaaataacttaggatatattttctaagtttctctgctttagcaaaactgaacaattactatttgcttgttattacaaayatttactagctactcaattggatcaacctgtctaaattctttgtggcattgtgactctataggttaaaaggctactattattctaaggagacttgtgatt

SEQ ID NO: 6791 - DNA, 201 bp, Homo sapiens
tggttccttctccttttcttcctccctgtaccaatatttccttcagatctgatttgcacgttgctgaaggctccaaacatttgtgctgctcatcctaagtyatgttgttaaagcatctgagacacttaaccttcttggagtttttcatcaacatctgtggatctctccttctttcctcccctactcctcttcctccccctc

SEQ ID NO: 6792 - DNA, 201 bp, Homo sapiens
atatttgtagtctatctaccactcatgctttcctcaacgtagaatttcccagggctctatgctggttcctctgttcttctttctgcatcccccaacccccsactcaccccccacactggtaatcttgaccactcctatggcttcagccttctcttctatacagatgattctcatctctctagaaagatctagacctttcac

SEQ ID NO: 6793 - DNA, 201 bp, Homo sapiens; identical to SEQ ID NO: 636

SEQ ID NO: 6794 - DNA, 201 bp, Homo sapiens
tcaggtggtgccctttcttctgtggcaagaataaactttgggtcttggattgcaataccacctgtggagaaaatggtatgcgagggaaagcgatcagcctsttgcccttgtttcttcctcttgaccgccaagttctactggatcctcacaatgatgcaaagaactcacagccaggagtatgcccattccatacgggtggat

SEQ ID NO: 6795 - DNA, 201 bp, Homo sapiens
ttatcaaatcagggttagtttgagatccagcatggcctcctgcccccatggggcatggagtaagggaaggaacataatggcagtcctgcatttgaattctygcctgagactttagacacagtcatataatctttctgttttcaggttccttagatcctgaatggaggctgtgataccatcctcatagttgtattttagagg

SEQ ID NO: 6796 - DNA, 201 bp, Homo sapiens
aatagtagatgcattgtaatatggtgatcaagaaaaagatctcaaagtcaaacagaagatgtttgaattctgacctttcattcatgagctgtatagccagccttgggcatgtgacttagactcaggttctttatctaccaacttgatagagttctgagatcatcaaggaaattgcatgtacaaaaatcctagaacattgac

SEQ ID NO: 6797 - DNA, 201 bp, Homo sapiens
tgtcactctagagaaccccgactaataagatgcagtatttatttgtcttccctctgtcaaaccttgagccaaccacttttctcagattgcctgagaaggtrtagggaaaagaacatacaagatagatgagacatggaggaaagaactattaatggtggggacagcttctttacatggtgaagaggatgagaaaagccaccc

SEQ ID NO: 6798 - DNA, 201 bp, Homo sapiens
ttctttttgcaccagttgtctctctgggattgtaggcaagcaataagggcagatattgaaattttatggtcaacaccagatattcaaagtgtcctacagtgctttatgggcttcatggtttatgaggcaatttcatatgcattatcttatttatttttatagttatctagtgagacaattagagatgatatcgttataaaa

SEQ ID NO: 6799 - DNA, 201 bp, Homo sapiens
agacattttgtttgactgtcataaacatggctgagtcctctatttttaaagaaaatattttatttctttttatggtttcaaaattatttttcatttcctcrtttaaaaaatggaattccatgtgtgattgtcaggaagcatggaagccttgtttgtactgtgaatcgtgaagcaggcaaggcactctgggggagccctatt

SEQ ID NO: 6800 - DNA, 201 bp, Homo sapiens
tcttaactaatttttaagagcatgctgcattagtgtttactgtgggtgcagcgttgtacagcagatatctagagcttattcatcttgcttgactgaaactrtttgcccattgattaaataactccccatttttctcttcccatagttcctggcaaccatcattccagattttgattctatgaacttagctattttagatac

SEQ ID NO: 6801 - DNA, 201 bp, Homo sapiens
ctcccgggttcaagtgattctcatacctcagcctcttgagtagctaggactacagtcacacaccaccatgcctggctaatttttgtatttttagtagagayggggtttcaccatgttggccaggttggtcttgaactcctgacctcaagcaatcccaactcggcctcccaaagtgctgggattacaggtgtgagccaccac

SEQ ID NO: 6802 - DNA, 201 bp, Homo sapiens
ttaagggatcctgctgaatactctaggatatcaaattaaccatttgaaaaaaccttttaaagttgagttgaaaaactaggacattttttcaaatcttttgwgattccgttttttgaagtgaataaaactcagagctttttaggtattttttttccccagccacgatgaagagaacattaaaggacatttgcttaaactaca

SEQ ID NO: 6803 - DNA, 201 bp, Homo sapiens
aatggagtgggttttccccctgtgtaaatggagctcgaatgaagacctttaacctcatgcgtaccttcttctaatctactaagtttactaacttaggtaayagaaagtaaatgagaatttccagtgctattaggtgttcagaatcagtacctgaatgctagctgggagataaataatgacttgaagactaagattttgtga

SEQ ID NO: 6804 - DNA, 201 bp, Homo sapiens
tgcttaggggtctaccacaataaaataaaaatgagatgtgacttcatgaaaacttgaaaacttgtcttgaaatactattcatataccctgatgtgtattaytgtagagtgaaaaaataaaaatacaaatgcatactcttgcattgctttcccacacattgatctgcaaagagaaaactcttcaagactttggggagaaagt

SEQ ID NO: 6805 - DNA, 201 bp, Homo sapiens
aaggaagcacctagcagcaaaggcattcctggtgtcaggtgtcatagtacctgtccttaactggaggtgctctcctttccacccttatttattttttcctyggagaaactttagttttctccccagcttttggcatcgagccctccctgtgggccaacatatgcttcaggtctttatctcagcagcatgaacttgtgagtt

SEQ ID NO: 6806 - DNA, 201 bp, Homo sapiens
ggaagaggaatggcatccaagtcactagtgtaagataaaattgtctgcctgccaaatcctgaagatgtcctgccatatttgttaaggccaggggatggagkgtagaggtcagcaacaaaggtgaccattaacactcattgattcttgtcttttatgactcattcttttattattacatgttttgtaagaggttttatactt

SEQ ID NO: 6807 - DNA, 201 bp, Homo sapiens
gaagaggaatggcatccaagtcactagtgtaagataaaattgtctgcctgccaaatcctgaagatgtcctgccatatttgttaaggccaggggatggaggktagaggtcagcaacaaaggtgaccattaacactcattgattcttgtcttttatgactcattcttttattattacatgttttgtaagaggttttatactta

SEQ ID NO: 6808 - DNA, 201 bp, Homo sapiens
cgaaaattgcttgaactcacagggtggaggttgtagtgagctgagatcgtgccgtggcactccagcctgggcagcagagtgagacgctgtctttaaataayaaataaaaataaaataatggttacaatggagacaacaatgtgtactggctgcctgtggaaagaggggagagaaactttgtcttccaatgaaaatggttca

SEQ ID NO: 6809 - DNA, 201 bp, Homo sapiens
tctgatgcacttaggtagtacaagtagagccaccctcctattttgcatgcttgcagacatcactgaccatttatccatttatgtattcatccatatgtatrccacagagcacccattacatatgccaggtacatttagagaatatagagaaaagtaaagaataaatgagaaaatatacaaataacttgataatttaagata

SEQ ID NO: 6810 - DNA, 201 bp, Homo sapiens
acagagaaaagtcacgacattacaggaaaaagttggcttgcttgatatgtaccatagattgagatctgcagccgtggttgcctaccatttcagatagaagwttcaccttgacaacagatgacatacacttatgatatcgataaatacaatacagttctatgaatgaattttctcttccttatgattttcttaataccattt

SEQ ID NO: 6811 - DNA, 201 bp, Homo sapiens
ttctaggttcacaggatagcagaggatctccatttccagggtttagctattctttaagacacttgttaaaactaacttttttttttaagtctcaatgtcarcttcttggaagcttgaatctcattagccaaacttaggttgtatgtcagatctgttccagattatcagtgtacaggaggaagtagtacaaacttggttgtc

SEQ ID NO: 6812 - DNA, 201 bp, Homo sapiens
ccattctcctgcctcagcctcccaagtagctgggactacaggtgcccgccaccactcccggctaatattttgtattttttttttttttttttagtagagayggggtttcactgtgttggccagggtggtctcgatctcctgacctcatgatccacccgcttcggcctcccaaagtactgggattacagccgtgagtcaccg

SEQ ID NO: 6813 - DNA, 201 bp, Homo sapiens
cttctgtgcaataatagtgaaaaacttcaacattttactgacagtattagagagttcatcaaggcagaaaattaacaaagatattcaagacctaaactcarcattggaccaaatggatattatagaccttcacagaactttccacctaaaacaatagaatatacattcttctcattgccaaatggcacatactctaaaatc

SEQ ID NO: 6814 - DNA, 201 bp, Homo sapiens
ataattcgaggataagtttcaggtttttatggatttgtctatttctgatttacctttcctcctcagcaatatccctttagatatattggctaaatgtctgrtattttatgagtaatcattctcctccatggacctgaattctaactgaattctctctgaatctagattatgtttgattttttttttttttttttttttttt

SEQ ID NO: 6815 - DNA, 201 bp, Homo sapiens
gttattctcagaagttggtttggtttgattatagctactcctccatagccagaatcagaagtccttcatctactgagattttattttaatgattaaaatgwtagcttatatgaatttatttgatatttttatggatttgttatttttttttcaaaacttctctaagataacaataattttaattccacagtcttccttctt

SEQ ID NO: 6816 - DNA, 201 bp, Homo sapiens
tgtaccttctctaacaagagttatgattgccctcagctatcatgataatcgccactcttctgtcaggcttgatactaagattggaggagctgctctgaagrttcagtttcattctacaaggattattaaacaccaattctatgccaggaactgtgctagaggagctaaaagggaatgatctatgctgctaagcggctatgg

SEQ ID NO: 6817 - DNA, 201 bp, Homo sapiens
acagatatgccctaggatccgcaaggtaccttgtcctttcattattatgcagaaggagcaaattaatctttagggttattaaaggttgaatgggggctttmttcaaaatctattttataagccttggaagtagaatggatatttagaagataacctaatctgacaccctgataataacagtactcataatgataatagcta

SEQ ID NO: 6818 - DNA, 201 bp, Homo sapiens
ataatgagaaagaagagtaaaaataagttaagaagatggtaaaacttgagttaccaagggggttgttacctggcagagaacgtaattaaaaaatgggcatrtctactggtcagttcgaagtggtttgttttaatgcaaactgactctatatctcatactctcgtattcacagtggccctgtgtgggtggtttttattttgt

SEQ ID NO: 6819 - DNA, 201 bp, Homo sapiens
tgccctaggatccgcaaggtaccttgtcctttcattattatgcagaaggagcaaattaatctttagggttattaaaggttgaatgggggctttcttcaaamtctattttataagccttggaagtagaatggatatttagaagataacctaatctgacaccctgataataacagtactcataatgataatagctaacattta

SEQ ID NO: 6820 - DNA, 201 bp, Homo sapiens
ttataagccttggaagtagaatggatatttagaagataacctaatctgacaccctgataataacagtactcataatgataatagctaacatttactctcayctgtgtattagcttatttacgccgcagtcctgcaaacattgttcttattttacagatgaagaaactaaagctaagagagattgatgaagttatccaagat

SEQ ID NO: 6821 - DNA, 201 bp, Homo sapiens
agaacttggataagaggagaaagatgaaataaacaagacccaaatgttggtaagggtaatgtattagccagaattctccacagaaacagaaccagtaggcygcagatatagatatgtaagaggagatttagtatgggaatttgcatatgcagttatggaaactgagaagtctcaccatctgctctctgcaagcttgagaac

SEQ ID NO: 6822 - DNA, 201 bp, Homo sapiens
ttagtaaaggcgaacttatgaaaataagttgttctttttttctgaaacattccttcatctccctttgctgtgcctcttgagtaccctctatttccatatcscagtacttccaagctgtctccttattcctcagggctctgctctagtgcctttcccatcctttctccctcatgaattcaacaaatatgtatcgagggcaaa

SEQ ID NO: 6823 - DNA, 201 bp, Homo sapiens
attactgtcttcatacattgccaactacttcatcattcctgaaattaactatttgattggcctcttgcactgtggactagattcttccctagttaccattwgatcatgtttttacatcgttttccactggtcttcctgagtgtgcttcttaaattgactctttccagtgatccatttgtgccatcttctctttgtattttt

SEQ ID NO: 6824 - DNA, 201 bp, Homo sapiens
agtgcatctcaggctatgattttcacattggttctaaatttatcaaatttctatttataatttttctcacaaaatatgttttgatattcaaagcatgcaaygaaagtttaaagatgaaaatatttttaattctttttttgcatgtgcatgcattgaaagtttaaagatgaaactgttttcaatttttttttgtttttgtac

SEQ ID NO: 6825 - DNA, 201 bp, Homo sapiens
gatgttctctattttcaatgtatcaagttttaggtacctagtaaacatccagtaatataatagaacataggagtctaaagtgcagaggaactgtgcagccktgagatgaagattgagaatcaacaatatacaaaggctattttaaccacaggatgaataagacagagaagtaaagaagacctgggtaggcagttcgtctca

SEQ ID NO: 6826 - DNA, 201 bp, Homo sapiens
agcgcagtggcgcgattttggctcactgcaagctccgcctcccgagttcacgacattctcctgcctcagcctcctgagaagctgggactacaggtgcctgmcaccatgactggccaattttttaaaatatttttagtagagacaggatttcaccgtgttagccaggatggtctcaatctcctgacctcgtgatctgcccat

SEQ ID NO: 6827 - DNA, 201 bp, Homo sapiens
gcaaactcattttctaggatgctgttttatgtaaacaagtcatagttaaataattactccagagtgacaaacctttttaattttgtatccagataagaacrtcagttagaacatgtagcaagaacagtgattcctctgagaaagtagggtagagtatcttcaaaagcaatgggtggcttgttggtgatttatgttttgaga

SEQ ID NO: 6828 - DNA, 201 bp, Homo sapiens
tattttaactaacgcatttttcccttggatattctaaattttacctccattccaatgcattcagtatcatctctgctcacagacaaattgtttcactgccyttgagaggatttcctgaaaacttcaaaagtatctctccatctgcaccaagcagtgagcctgctggagagaggtggaagcagaagtgagggggtatgtgag

SEQ ID NO: 6829 - DNA, 201 bp, Homo sapiens
tatgttgatctgattaaaattacatttgaaataatgaatgacatgtaatgtacaaatacccttatatttggaataatgaatgacgtgtacaaataccttcscagatatatgtattttttaaagtgtaaacattatcaacaagtgtaatgaaagtttttagaagcattcttctaggaggtacaaagttaagggtctagaaac

SEQ ID NO: 6830 - DNA, 201 bp, Homo sapiens
tgatgccagctcatgttcagctatgtgggggtggaagtatgtggaaacctctttccctctcacagcatctctctgctatgacaaaacttcaaaggattatyttaggagtctctaggaggattaaaaatggggaaggttggagtgctgtgttcccaacttccattggacacaaaactgggggtcccagtaaaaacccaagcc

SEQ ID NO: 6831 - DNA, 201 bp, Homo sapiens
cttatgagttaattacctcttaaagatgccatctttaaataccatcacaatgagggttaggatttcaacatgaattctggtgggggatacacattcattcyatagcacaaggcttcatgcagtaatatgggattgggctgggctgggcttaaaggaatggataggagtgtgcaaactgagaggccgggagaggaggaagag

SEQ ID NO: 6832 - DNA, 201 bp, Homo sapiens
ggctgccaaactgctgaagctctcatctgttagtgtctctggttgcttgagaactactgcagagagtggtgggcttagcacctgacaggtgctctcaaacrgagaaaggtgggaacacacttggcacaggtgtacattttcaggggtgaaagactggggcaagggagcttccctagtgcagagaaggttgagagaggcaat

SEQ ID NO: 6833 - DNA, 201 bp, Homo sapiens
cgcttacaagggctccacgcttatgagttaattacctcttaaagatgccatctttaaataccatcacaatgagggttaggatttcaacatgaattctggtkggggatacacattcattctatagcacaaggcttcatgcagtaatatgggattgggctgggctgggcttaaaggaatggataggagtgtgcaaactgagag

SEQ ID NO: 6834 - DNA, 201 bp, Homo sapiens
ttcttgctctagtgtcttactcttgcttcctctcacatggattgagagtgacctctagctttgactagtgcttgtactatttctttatgttgtggcaattytatttgttagttttcagagtgatttatcgtctcatctcagagtgtttgaacttatattatttctagaacaaataccatgtcatactgatgtaaatttctt

SEQ ID NO: 6835 - DNA, 201 bp, Homo sapiens
agggaggctggtttccttggtgtaatacagccctggcttagtcccagcttcagggacaccatggatctgtctctgtatctcctgcagtgccactgaggctyctttgggacatgtggatggtgacttattcttgctctagtgtcttactcttgcttcctctcacatggattgagagtgacctctagctttgactagtgcttg

SEQ ID NO: 6836 - DNA, 201 bp, Homo sapiens
atactttaaatcaaacacaaaacatacaatagaggtatttggatctatagctctgaaagattgtgatttgtttaaaactcacagactccactaggatgagyttggattaaagctcacaagaattgtacaagagcaagataagtaatttaagattatacaatgaaacctaactgatgtagtttctcacaaactttcaaatat

SEQ ID NO: 6837 - DNA, 201 bp, Homo sapiens
tttattaatgtctttaagaacttttcactgtaattatttcagaggcataatcatttagaaccaatgacatttggctcagtcacttactagttatatgactkgggccatgtattaacctgtgtttcagttttctcatctataaagtggagttatcaataatgcttctgtcataagtttattgtgaggatacaatgagccctc

SEQ ID NO: 6838 - DNA, 201 bp, Homo sapiens
acaaaaaagattgttacatgagatcaaatgagttcggtggaggaataatgagatcagagataaaagagacctttgattctttcagccccattgtagtatcrtttttacagatgagaaaacaggtctgagtacattcagtcatttgaacctggtgaacaagaagatgatataaagatattgtattggagaaaaattattctt

SEQ ID NO: 6839 - DNA, 201 bp, Homo sapiens
gataaaagagacctttgattctttcagccccattgtagtatcatttttacagatgagaaaacaggtctgagtacattcagtcatttgaacctggtgaacargaagatgatataaagatattgtattggagaaaaattattcttgggtggaaagatgaaaggagtcaaggaagtgagaacaggaaccatgggctccaaggtc

SEQ ID NO: 6840 - DNA, 201 bp, Homo sapiens
ttactctttaaaaagtgtacaaagtgaaaaaaaatgaattaagctttttggcttaaaaatgtaatgcgattctaatcccacacagttatagtttataaacyggaaataacagacagaaggttgactgatgtaaaatctaaaaatgtgcagaaaagctgctttagagaattgggtaaaggcaattctgtatgtgacctattt

SEQ ID NO: 6841 - DNA, 201 bp, Homo sapiens
atattttaaatcttgtatgagtacagaattctgctctgtactcattctgtatgagtacagaattctgctctgtactcattctgtatgagtacagaattctkctctgtactcattctgtatgagtacagaattcaaaaaggatagacactagcctcatgtggctgtttaaatttaaatttaaggctggaaatggtggctcat

SEQ ID NO: 6842 - DNA, 201 bp, Homo sapiens
gggaagctcagatttacttttcagtgcatgttagtatgtaaaatgacccctatcttcaatatctctatgttttaacacctgctttgtttttacaatagagscccttgtttggaacaaagccacttaagctgaacgtcattgtacctgcacagttacctgggttatctgtggttgtgatgaaaattacaccaccataatcac

SEQ ID NO: 6843 - DNA, 201 bp, Homo sapiens
ggtgccctgccatcttgtttgctccttaagtctgtctacaatttatgcaaataactcctttattaaaatctctttatttgaacactctgggatgaattctrtttttttttctgggaccctgactaatacagaggccatatgaaaatatatcaaagataattttcaaagcatgtttgaaagctctacattaggatcactagc

SEQ ID NO: 6844 - DNA, 201 bp, Homo sapiens
ttcttctttgctggtgattcattacttgaaaatattgacatcaatttccagaaatttataaaagtctccagtcaatacaactaaatgtcaaataaacctayagtggtttgggtaagaaagtgcccaatttactactttttttcttttcttgtaaatcacgacagcgaatgtttggaacaaggctgcatcggggcagtgtaa

SEQ ID NO: 6845 - DNA, 201 bp, Homo sapiens
aatatgtaagagaccaatgactttgaactaagattttataattccatgctttttaaagagatcgaagtatcaggaaggctgatgtctcatatcccctaatrttgctgtgataccaattatgcatagtacgccccaaatcatgtcattttcttgtcagatctttagtttagagaagactgttacaggtgataaccactttaa

SEQ ID NO: 6846 - DNA, 201 bp, Homo sapiens
tctattaactatcatactatgtagccagtattgaatattcagcctatcaacttttatttatttagctgttatgtgcattgcttaacttggatactcatcayttactttctaatatgtacaataaagcacgtcttactcgtgtgtgtatgtctgggcttctttttcatgtaaaagatattatgctatcaagaatgaccttgt

SEQ ID NO: 6847 - DNA, 201 bp, Homo sapiens
gcaagcctaatttaagactagaaatcgcattaggaaaacaagatgcaagggtcatcagtaataaaaaccacttcagctactggtgattaactcagagcccmttcacagatatgtcaaagtttccccgtggtttctaatgtcacattaataacaaagtgagaggatttatttggtctctccgtttgtgaatataaaagatga

SEQ ID NO: 6848 - DNA, 201 bp, Homo sapiens
cccatccctttgctaaacaggtgaacttacatagaccagaaaaggtatgtgtggggatgagcctgaggaaacttggtagatttttataatggaattctccyttttaaaattaaaatcatgttgggtgtcttgattattgccacataactgatctgaaagttttgttttacctcccaaacaattttgggttagtccatacca

SEQ ID NO: 6849 - DNA, 201 bp, Homo sapiens
taacagcttgacaccttccttctaactgtgctatactctcctttgatctgattgactgatgtgttctggtcatgaacatgaccagttcatgcgggtaagtrctattcagtgggagaagtcttcttctaagtttagagggtgggtgctcttacaccaagaggaaatattttttgtttcataaacagtctatggaattaggtg

SEQ ID NO: 6850 - DNA, 201 bp, Homo sapiens
aaatgaatgtacttcatttgttttaaatcatcacattaaaactctagttgtaatattttataatggcccctttgtgactttaataagcagtattctcttasctttctttagggcaaataaatatatccaaatcaaaagagaattttcagaagatataaatttgttatatatctattgtacatataaatttattatatatct

SEQ ID NO: 6851 - DNA, 201 bp, Homo sapiens
cagcttatttgagtactataaatgcaattatagggtctatttctgtttctcaaatagtgctattcattaatgacaatgacactttgcaaccttaaagcacmttttatccaaggatcatgaagacatttccacaggagaaattactgttatctcagttttttgatagatcaagaagaagagttggttcagagaattagaaat

SEQ ID NO: 6852 - DNA, 201 bp, Homo sapiens
tttctcaaatagtgctattcattaatgacaatgacactttgcaaccttaaagcacattttatccaaggatcatgaagacatttccacaggagaaattactrttatctcagttttttgatagatcaagaagaagagttggttcagagaattagaaatgctattcaactacatttcttgtcgtgtctttttttttttaacaca

SEQ ID NO: 6853 - DNA, 201 bp, Homo sapiens
aagataggtgagtgacagagctgggatttgaagacatgctgtctggcttctgacatcatttctttatcagaaagcatattgccacaagaaaattacttgcrgaaagtaaaagtaggaggaccacttatttggctgtaggtgatttggaaggcttcattgagagcctctttagattgccacaagaaagcatattgccacgag

SEQ ID NO: 6854 - DNA, 201 bp, Homo sapiens
cattttcttgtcagatctttagtttagagaagactgttacaggtgataaccactttaaaaattaccactgtgttcaaaccatataaaaattgagtcaaggyagggcgcggtagctcacacctgtaatcccagcactttgggaggccgaggtgggtggatcatgaggtcagtagtttgagatcagcctgaccaacatggtga

SEQ ID NO: 6855 - DNA, 201 bp, Homo sapiens
gggtggatcatgaggtcagtagtttgagatcagcctgaccaacatggtgaaaccccatctctactaaaaatacaaaaattagccaggcatggtggcatgcrcctgtaatcccagctactcaggaggctgaggcaggagaattgcttgaatcggggaggcggaggttgctgtgagccgagattgcaccacagcactccaacc

SEQ ID NO: 6856 - DNA, 201 bp, Homo sapiens
tgatttctctaaaattaaaaaataatactatcatgtcatatatttgcctaaaagtcctttaattactcaccacagctttaaagaataaagtctggaaactwgatgctgcttacaaagcccttcgttatatggtcactgactgtcttgtattgatacacaccatgttctaatcatgccatattgcttacagtgattacaatg

SEQ ID NO: 6857 - DNA, 201 bp, Homo sapiens
cttaattctgtaataaataaatatgagaattaaatttgagaaataaattcctcagaacttgcattgcagagtgctggatacattttcgtgtctaacacatrttagtattccttcctttcactcttcccagttaacatattctcttcaagctataagggcagtggggaagttcaaattgctttaggaagagctataaacaaa

SEQ ID NO: 6858 - DNA, 201 bp, Homo sapiens
attcctgatcccaggactcccttgttaattaagactcaaaaactaactgggaagccaaccagccattctgttacccataccaaacagtttgaaataaactkggagtgtacacattcctattatcacagaaaattacaaggttttggtgatgcctttgatgcaagtaaatcttttgtgatttatctttatctagtgttttcc

SEQ ID NO: 6859 - DNA, 201 bp, Homo sapiens
tataaattaccttgggcagtatggccattttcatgatattgatttttcctatccatgagcatggaatgttcttccatttgtttgtatccacttttttttcrttgagcagtggtttgtagttctccttgaagagttccttcacatcccttgtaagttggattcctaggtattttattctctttgaagcagttgtgaatggga

SEQ ID NO: 6860 - DNA, 201 bp, Homo sapiens
agctactggtgattaactcagagcccattcacagatatgtcaaagtttccccgtggtttctaatgtcacattaataacaaagtgagaggatttatttggtytctccgtttgtgaatataaaagatgacagaaaatatacatgaagttcataatgtcatgaagagggaagcatggatttgcttgggatcattaggggatgcc

SEQ ID NO: 6861 - DNA, 201 bp, Homo sapiens
atcagcagtgtgaaaacagactaatacacagagttttgttctgttgcccaggctggagtacagtggtgcaatcttgattcatggcagcctcgacctcctgrgctcaagtgatcctcctacctcagcttcccatatagctgggactacaggcatgcaccaccatgcccagataattttgtatttttttgtagagattgagtt

SEQ ID NO: 6862 - DNA, 201 bp, Homo sapiens
tgccattaaccttccagaaactaccccagtcaagtaatagggtagtatcaaaataaataaatctataattatcagaaaaagttattaaaatattacttccrtctcgtgtggtggcacatgcctgtagtccctgctacttgggaggttgagaacagggaccgcttgagcccaggagtttgaatctagcctagacaacattgc

SEQ ID NO: 6863 - DNA, 201 bp, Homo sapiens
acagtagagcaaccggaagtggaaaataagctgacattgtgctgatggtgttagcaaagactggaaagtggctatgtatacaagtttcttccagttgcatwgtgcagatttgctagtgcccactgaacttcctaagaagtcctggtttaagaaatatactaacattaggtagagccagtgatggaaatgaaagctatctag

SEQ ID NO: 6864 - DNA, 201 bp, Homo sapiens
tcttaaatactttttttggtgagattggtgacgatattaacaagtgtattttttatattctatagtaaaatctgtcagctcagtgtacgaatgtttaccaratgagaaatgtatgatattaggaaatcatcatgaaaaaagtagatgcatagatgaaagatccatttaaagtgcaaaattgaccaatggattttaatataa

SEQ ID NO: 6865 - DNA, 201 bp, Homo sapiens
tctgcttatgttaccattttgattgtctatcacctctgccaaggaaaagaggtccatctgacagaattacttaattttgaaatctatatataaggaatacytatctataaagctatttacatctttatctgttaactcagtgattccaaaataataaaaatacctaagttcaaaatatgggttgaatcttaattcttatga

SEQ ID NO: 6866 - DNA, 201 bp, Homo sapiens
tgatcattgctccattagcacatccctattaatcttttggtacatgctactctcttctctgtctgagagaaacttcactcaatttcttcgagccagaaccrcctaagcctcatggtcactgtcctctgctctgcttcttcgctctaactctgccctctctcaccacatgtgagatactctgtgctctgtatctggacagtg

SEQ ID NO: 6867 - DNA, 201 bp, Homo sapiens
tactggtaaatatgtgatggaaagtagagcttggattagagagctgaactctggcttcctaataccccatgcttccccagtggccatgagtgtgattcttragactcattatcagagagaggaagcagctccgcagagctgtgacttcccctgccagtcatgccagggaagctgctcctcatgacagccttctacagccag

SEQ ID NO: 6868 - DNA, 201 bp, Homo sapiens
ttataatgacagaaatggggcaaggacatcaacaggccaaggagaatgtccaggcagggcagttccaactgggaccatctaatattatttcgaatatatcyacatacacagccagtcatttgacaagaatagccagtgaatccctctttagaaattagtaacttcaggcagttgcagcttaaaatgccaagttagatgtca

SEQ ID NO: 6869 - DNA, 201 bp, Homo sapiens
ttttttgtataataaccaagatgaaatgtatattcccccccccccctttttttttttgagacagagtctcgctctgtcactcaggttagagtgtaatggtrtggtcttagctcactgcaacctctgcctcccaggttcaagtgattctcctgcctcagcctcctgagtagctggaactacaggcacccgccactacgccta

SEQ ID NO: 6870 - DNA, 201 bp, Homo sapiens
acttagaatcctgactcgtatttagtagtactgtaaacctataccagttaagaagtatctacctctcagagttactgtaaggattaaaagagaaattgtcrtttaatgtcactagcatagtatatcaaatagtatgaacttaaaatgaatcctgttaattcagtaagtattaactgtatgctgttatgtgccagatattgg

SEQ ID NO: 6871 - DNA, 201 bp, Homo sapiens
tttatagtctccatccttcaccgtggatattttttttactgatttatctttaatgcatcagtcatttcctgccatgtagctaattagttattaaactcatmtattcaattcaattattatatttttcactcctataatttttgacttcaatacacacacacacacgcacacacacagacacattccagtcctctgatgaaa

SEQ ID NO: 6872 - DNA, 201 bp, Homo sapiens
tggtgattaactcagagcccattcacagatatgtcaaagtttccccgtggtttctaatgtcacattaataacaaagtgagaggatttatttggtctctccrtttgtgaatataaaagatgacagaaaatatacatgaagttcataatgtcatgaagagggaagcatggatttgcttgggatcattaggggatgcctctttc

SEQ ID NO: 6873 - DNA, 201 bp, Homo sapiens
ctggcactcctgtcacttttaatgaaaacggagatgctcctggacgttatgatatcttccagtatcaaataaccaacaaaagcacagagtacaaagtcatyggccactggaccaatcagcttcatctaaaagcaagtatcgtcataaacatatattaatgtatatagctctccaggagggatgctttatttttaagtgtat

SEQ ID NO: 6874 - DNA, 201 bp, Homo sapiens
tgctgggattacaggtgtgagccatcatgcccagcctgtcattttaaattttctagcagccacattaataaaagtaaaaagacacaaggtaaaactaattktaatatattttatttaacccaactatctgaaatattatttcaagaaataagataaacaatattgacatattttacattttttggtgctaagtgttcaaaa

SEQ ID NO: 6875 - DNA, 201 bp, Homo sapiens
ctggatcccacttactatttgtgataggcaagggctaaggactaaattccgccctctctcacaaataagttcatatgttggagccctaacctccaatgtgrctatttggagatagagcttttaggagcttattaaggttaaatgacagtataagagtgaagtcctaatccaatggtattggtggctttataagaagaagag

SEQ ID NO: 6876 - DNA, 201 bp, Homo sapiens
aaagctagaaagctgctggctatttattggctgacttttccagtggtcatgacccagcggtagaagcattatattgtacctacaacttaggaaggtttccrgttgtcttgttttcacaacaggagattatcttgtcaccactttcttcagaatagcgatttagatgctcagtgtccatgacctttagttttccaggtcagg

SEQ ID NO: 6877 - DNA, 201 bp, Homo sapiens
tggcaaagccttgctctgatgtttgagcataatctcatattcccttattattaagtaatagaatctcagaataggaagctggaagacaccttagagatcaygtggtccatctcactcgtttcacagatgaggaaatggaagcacataggggtgaggggacatgttcagtgttaccagccagtgactgtcagacaaagatcc

SEQ ID NO: 6878 - DNA, 201 bp, Homo sapiens
agaataggaagctggaagacaccttagagatcacgtggtccatctcactcgtttcacagatgaggaaatggaagcacataggggtgaggggacatgttcastgttaccagccagtgactgtcagacaaagatccgattccaagcgtctgttgccaagggagagctctgtctgccccatcctcactctgccccaccaagaat

SEQ ID NO: 6879 - DNA, 201 bp, Homo sapiens
ggtccagccagggtgcctgcttccaggagtcttaggccaggggactgcccatggagggcccaatgatgtatgatgtgccctgtaagtaagggtgggctggygggggagtgcacaggaagggctatgagggttcatggttaagcctccccaaagggttccacggcctctccctgtgggcccagacatagtgctgagaggatt

SEQ ID NO: 6880 - DNA, 201 bp, Homo sapiens
aacattactgtttcttttttctttttatgaaactaacatatgttcttaatttggcaattacaatcagcataatttgtttaagttttctactcagtaatctyggcccacacatgaggcatgtattgtctacctgagagtggatttgaacaatgagtctctctattttattaggcagaatctctcaagagacaggtggtcctt

SEQ ID NO: 6881 - DNA, 201 bp, Homo sapiens
accttctggcagtggagtctgatttttatgacaatgtatcagattttgaaataaatggaagatttaaatattttataagtagctctgattttattttttamagtgacaaacgaaattcagtaaaagctcaccaactgggcaaatacagaaagagttgctctgctccagtagaaaatgaattacagactaagttagcaacaa

SEQ ID NO: 6882 - DNA, 201 bp, Homo sapiens
tttctttttatgaaactaacatatgttcttaatttggcaattacaatcagcataatttgtttaagttttctactcagtaatctcggcccacacatgaggcrtgtattgtctacctgagagtggatttgaacaatgagtctctctattttattaggcagaatctctcaagagacaggtggtccttattagtgattacaaaac

SEQ ID NO: 6883 - DNA, 201 bp, Homo sapiens
aagtagctctgattttattttttaaagtgacaaacgaaattcagtaaaagctcaccaactgggcaaatacagaaagagttgctctgctccagtagaaaatraattacagactaagttagcaacaataactcctgtttaatgagccagatactatgctttccatgtgtgctgtgtggcaggttctatcacctttacagacaa

SEQ ID NO: 6884 - DNA, 201 bp, Homo sapiens
caaagagagtaaacaatactgcaattaccaataattttaaaagcgactcaattttattactttctggactgtacagcaagtggaactaggttaatgccacrtggataggtaaggatgcattgtgatgaacagatgggctgtttgtatgttcgtctataattgaaagccatttattctcttaagtgttttaagtacttgggg

SEQ ID NO: 6885 - DNA, 201 bp, Homo sapiens
gactgtcaaatcttaaagctccaaaatgatctcctttgactacatgtttcacatccaggtcatgctgatgcaagaggtgggttcccatggtcttgggtagytttgtccctatggctttgcagaataccaccccagttccggctgctttcatgggctggcattgagtgtctgcagcttttccaaatacaaggtgcaagctct

SEQ ID NO: 6886 - DNA, 201 bp, Homo sapiens
taattggaaaaggaaaatcaaagaaagtgatgctgcttaaagacataacgtgaagcaagaaatgtgtttttataccagcaccaaagatggataaaagaagytagtgactctagacttttatggagataataaagtaataaaaatgaaaataaatgatattttaatccttattttaaccttgggaggagtaaaataagtaca

SEQ ID NO: 6887 - DNA, 201 bp, Homo sapiens
cagtgagccaagatgacaccaccgagttccagcctgagtgacagagggagaccctttccaccaccctcctcaaaaacaaaattaatacacatcaaaatttmtgaaatacctaacgtataggatggagagaaataaaacaggaaaatgtgagcataatttatcatgtaaaatatgtgtgaatattgcttaatcaaatatatt

SEQ ID NO: 6888 - DNA, 201 bp, Homo sapiens
acatgcagatgctcaaagtgtccagcataacattttcattctagccagctaggaagagaaaagaccatagaagaccacttagggggttttaatgccctccwatgtagtgcatatcacgtgtgctcacaattgattgtctggaactaataatttggccatgcctaagtgcaaggaagactggaaaagggtagcctagctatg

SEQ ID NO: 6889 - DNA, 201 bp, Homo sapiens
tatactcacacaattatgctaaaggaatggtggattaacaggttagtagcacggatattcatgcactcacgctggaatccagcctaatgtaagttctgtcrtttttaacatgcagatgctcaaagtgtccagcataacattttcattctagccagctaggaagagaaaagaccatagaagaccacttagggggttttaatg

SEQ ID NO: 6890 - DNA, 201 bp, Homo sapiens
tatggtaggtatagccttacaaaatatatttcttaacaataagacttgaaaattgaaattattccttgatccatgggctacagaatggatattgtgttagmaggcatgaaaatcacagttatctccttgtatatctccttcagagctcctgggtgaccagttacattgtctacgaacaataatattttgaaaggaatctgt

SEQ ID NO: 6891 - DNA, 201 bp, Homo sapiens
cgattcttgcaggagtaagttggtgtcacattatggttttgatttgcatttccctgatcattagtgatgtgggtggggcattttttcatgtttgttggccrtttgtatatcttcttttgagaactgtctgttccatgaatcacaaatgtttttaatgtcatctagaatggtaaatcttttccagaaggttttctacatatt

SEQ ID NO: 6892 - DNA, 201 bp, Homo sapiens
tgggctgtttgtatgttcgtctataattgaaagccatttattctcttaagtgttttaagtacttgggggatggcttggtgtaaagaggaaaggtggtcccmagacccatccactccccctagacatttctccttcaccttatttattcatttagtctgtactctgtcagaacaagggtcggctcagccacgtggaattggt

SEQ ID NO: 6893 - DNA, 201 bp, Homo sapiens
gctgagtggtattccatggtatgtgtgtgtgtatcacaatttatgcactcattgattgatggggatttgggctggttccatgtttttgcaactgcaaattktgctgctgtatacatgcatgtgaaagcatcttttttatgtaatgacttcttttcctgtgggtaggtactcagtagtgggattgctggatcaaatggtagc

SEQ ID NO: 6894 - DNA, 201 bp, Homo sapiens
aagaggaaaggtggtcccaagacccatccactccccctagacatttctccttcaccttatttattcatttagtctgtactctgtcagaacaagggtcggcycagccacgtggaattggtctcaaattctcaactagtgatcagagttaatgaggttttactatcatgtgactggttttccttgtgaaactgttaaacacaa

SEQ ID NO: 6895 - DNA, 201 bp, Homo sapiens
atgcagctaaggggtaggttgaaggagacaatataacttttgagaagtaatcttccctgtctctttgtgctcgcaaacttgcaaaactttcagtaggataytttagggaatcccctgcagagatagccttgttttacatatattgtttgatatggaagcagcagactacgtagagatatggtaggccattggaaatatggg

SEQ ID NO: 6896 - DNA, 201 bp, Homo sapiens
acaaaaatcagagctgaactgaagaaaatggagacatgagaaaccatgagtttatttatttattttttctttttgtttgtttttgagacagagtcttactstgtcacccaggttggagtgcagtggtgcaatctctgctcactacaacctccgcctccctggttgaagtgatcctattgcctcagcctcccatatagctgg

SEQ ID NO: 6897 - DNA, 201 bp, Homo sapiens
tcttactctgtcacccaggttggagtgcagtggtgcaatctctgctcactacaacctccgcctccctggttgaagtgatcctattgcctcagcctcccatrtagctggaattacaggtgcctgccaccacaagtggctaatttttgtatttttagtagagacagggttttaccatgttggctgggctgctctcaaactcct

SEQ ID NO: 6898 - DNA, 201 bp, Homo sapiens
cgcctccctggttgaagtgatcctattgcctcagcctcccatatagctggaattacaggtgcctgccaccacaagtggctaatttttgtatttttagtagrgacagggttttaccatgttggctgggctgctctcaaactcctgacctcaagtgatttgcccaccttggcctccctaagtgctgggattacaggcatgagc

SEQ ID NO: 6899 - DNA, 201 bp, Homo sapiens
gtagatttgcgtgtagcctttttcacttcaagttatttctagtcttgatgaacttttccccactgagtcaggcaaaattaggcagctcttcaattgattgmcaactctgatttgctcctagtgattctgggatcaaggcatgtttccctcagaactgttaatatacccattgctcccacaccgacaaattaattggaaacc

SEQ ID NO: 6900 - DNA, 201 bp, Homo sapiens
actggattaattttgactcttttttttttttcctgaacaaagagaaaggtgaaaagttctgtgatatattgggtccttgtcatcttgggataacctctttrttaggctcattttaaattaaacaagcatttttgaagagaataatgaactcagcgcatttatcatggaaaacatttctatggtatttgagctatttaattt

SEQ ID NO: 6901 - DNA, 201 bp, Homo sapiens
gcatttacatattgaataaaattggaaatatggaataatatatgtaaaaatactttgaaaagtataaagtgcagtaaaaataaagttattgttaactcacyattttcattaactttctcattttatttattaataaccaatatgtagtcttttgtaatagacataatttgtttaattgaaaatactttcactctggtttct

SEQ ID NO: 6902 - DNA, 201 bp, Homo sapiens
gaaaaatggttcctggctgggtgcagtggctcacgcctgtaatcccagcactttgggaggccaaggcgggcggatcatgaggtcaggagattgagaccatsctggctaacacggtgaaaccccgtctctactaaaaagatacaaaaaattagcccggcatagtggcacacgcttgtagtcccagctacttgggaggctgag

SEQ ID NO: 6903 - DNA, 201 bp, Homo sapiens
aattagcccggcatagtggcacacgcttgtagtcccagctacttgggaggctgagggaggagaatcgcttgaacctgggaggtggaggttgcgatgagccragatcatgccactgcactccagcctgggcaacagagcaagactctgtctcaaaaaaaaaaaaaagaaaaaaaaaaggtcctatgcacattagatttagaa

SEQ ID NO: 6904 - DNA, 201 bp, Homo sapiens
ggagtggtgagcatatagaaggcagttgattaatatccagcactgttaggagacagggccaggagactggatgaaatattttggtcttacaggcaaagcarcttgtataatggggaaggatgctttgggttatctcgagaggcatgtctgaaaatcatcttctcatttcaaatgatagcgtgggttattgtgagccagttc

SEQ ID NO: 6905 - DNA, 201 bp, Homo sapiens
agtgtcttttaaagaatataatttgaaactctatgggagaataagaatataatggcgagcctctagttcctagggctagagtaaataaattcccaagtctrtaggtttatttgaagcaaatctaatacgtgaaaacttaggggcttttatccataagccattcaagaacaaaatccaggagtctggaactatagcatccaa

SEQ ID NO: 6906 - DNA, 201 bp, Homo sapiens
gagattatctggggaaaataatggccctgaaagaaaggggtaaagagtttgcagctctttgcctttgctagggggaggaattggaattgtttctctccaaygtagaattttagggaaagatgggttccaccttccatcaaggatcccagtgtctactcgacttcagttgacagactgaggctggctacgtaaaataaaaga

SEQ ID NO: 6907 - DNA, 201 bp, Homo sapiens
aatttaaaactcaagacggaaaatagaagcctactagggccacgtcctggtaacatatgtgaccttcatcatcctcccttctccctgaaatgtaaatcatrttttgtctccctaaataatcctcaaatctcaagattggaattcatgtttaagaagaaaaacctatcttggtctaacagcttgacaccttccttctaactg

SEQ ID NO: 6908 - DNA, 201 bp, Homo sapiens
tttaaaaggacattttacttacctcagtgaaattaattctttttcattgaggtgggttattgactcataaaacagcaatgctcaaacgacctccctttcarccactcccctcaaatgtctgcttctgaaaatcaattgctcaaaactgatgatagcaaaagtggttaggatgtgtttagaggatgataaatgatagggaag

SEQ ID NO: 6909 - DNA, 201 bp, Homo sapiens
ttggatgttatgggtgtctgctggaagaaatagactgacaacctgtaatgactcaaacagaatagaagtttgttttatactcacacaattatgctaaaggratggtggattaacaggttagtagcacggatattcatgcactcacgctggaatccagcctaatgtaagttctgtcgtttttaacatgcagatgctcaaagt

SEQ ID NO: 6910 - DNA, 201 bp, Homo sapiens
tgaagctttataatgtgacatgaagtgaaacatttatttccagacttaatatgatttcacttattcatttaataactattcattgagaactcactagatayttggatgttatgggtgtctgctggaagaaatagactgacaacctgtaatgactcaaacagaatagaagtttgttttatactcacacaattatgctaaagg

SEQ ID NO: 6911 - DNA, 201 bp, Homo sapiens
tagcatttcattttggcagaaaataatcatttttgtaaatgttttagatacatttgaaaagacaatatattaactaataattattgttttcatcagtttgrtaggccagcttctgaaaggattatgctaaagtcagactatgttttgctttttaattgacagcaattttaaaatatatttcactatgtcttttaatcatgc

SEQ ID NO: 6912 - DNA, 201 bp, Homo sapiens
agatggccgaataggaacagctccggtctacagctcccagtgtgagccatgcagaagacaggtgatttctgcatttccatctgaggtaccgggttcatctyactagggagtgccagacagtgggtgcagcgcactgtgcaccagctgaagcagggcaaggcattgcctcactcaggaagcacaaggagtcagggacttccc

SEQ ID NO: 6913 - DNA, 201 bp, Homo sapiens
tcatatttaatttcaaatgactagtatcaaaaggaaagtaggcctttgctactttgataacaaaagtaacactataggatttagttggaattattattackccctcccctctttttgttgactcccagaaatctgagaaaggggactttgggatagttgaaataaatggccatctaaatttgttgattgtcacacacatga

SEQ ID NO: 6914 - DNA, 201 bp, Homo sapiens
ttcatattcagccaaactaagcttcataagtgaaggagaaataaaatacttcacagacaagcaaatgctgagagattttgtcaccaccaggcctgccctamaagagctcctgaaggaagcagtaaacatggaaaggcacaaccggtaccagccgctgcaaaatcatgccaaaatataaagaccatcgagactaggaagaaa

SEQ ID NO: 6915 - DNA, 201 bp, Homo sapiens
gtgaggcataacactggaggaagggagacccatgagatactacagtaattttccagaaatgatagtggcccagcctatgatggttgcactgtactaggaayggacagaagtagatggatatattaataaaaagacattttagggatatatgtagggcttggcaattaattgcatgttaaaggagaggacaaatcatggatg

SEQ ID NO: 6916 - DNA, 201 bp, Homo sapiens
cattatcagcacctttttatcaaggtagttgcaaacagatagctagaaaggggccaactaagcaaacaatgctctacagagtccctttttcgacaatgtcwtctgcattgcttacacagtgggcactggctccaggctgggctcttagccgggacaaccagccaaggaccaaacaatccagctggacaaatccaaaagcat

SEQ ID NO: 6917 - DNA, 201 bp, Homo sapiens
tggggaaacatttgttagactagaaccaagatggatttgatgtttgattcttcatcttaacttttccctctgattgcttcatttctagatttacatgtttrgaaatgagttatgctgaagtatataagacagtggcataaaaatatttttgatatttaaagttttggtaactctttctcttctgtaaacgtggatataaag

SEQ ID NO: 6918 - DNA, 201 bp, Homo sapiens
ctcactactgtctaggttccccactaggtctttgcttgtatgggtgggtccacagttttgtgtgtgtgtgtgtgtgtgtgtgtgtgtgtgtgtgtgtgtgygcgtgtgtgtgtgtggtgtgtttcgagtagagtggttattatctaaaagttttcatttttttcttcaatctaaaagaagctaggctgcccctttcctggt

SEQ ID NO: 6919 - DNA, 201 bp, Homo sapiens
ctagtctggcccactcatggcactggaatcctctttgtaacacccccttgagtggctgtgcagcctctgtatggatttccctagtttagaagagaaaatgrtatgaggcaacttaatggctattttcagatagatgaaattttctcaaataaggaggatgctaagcagaagctctctgcgtctaaggagtactgaagaggc

SEQ ID NO: 6920 - DNA, 201 bp, Homo sapiens
aactgtggttcaaaaacatcacttttagaggagaggaaaagtttcctaagaatcttctccttttggtttccctctccttataaaccaattcgggttcctgycaataccattgtaattcctgtgaatcctggctgtttcctgtagcctggtgcccagccaaaagtgggcaaagatttgaggagtgtggtggaggagataagg

SEQ ID NO: 6921 - DNA, 201 bp, Homo sapiens
ttaatctagaatttcatatactttcattctggaaaaattttgatatttttgtttaatgattccaactccctatttgcttttccatgaattcttcttataawtattgggcatgctgaaattatctttaattaacttttttgcttcatttatttctgtatgtctttttgcttaaatttctgggagattatctcagctttacct

SEQ ID NO: 6922 - DNA, 201 bp, Homo sapiens
tgactagattgtctctttgttacaagtaacaagcagcttgtgcttcctctccttaatgtctctctcactgggttgtagttgtttacctacttgtctgcatsccccactagactgtaagcaccatgtgggcaggggcatgtctatctagtttgttgctgtattcctagcacctagcatgggcctgtcagagaaataatgaat

SEQ ID NO: 6923 - DNA, 201 bp, Homo sapiens
gagggcaatatgtttaggctttgtgtccccacccaaatctcatcttgaaatgtaatccctataatccccaaaggtcaaaggagagaccaggtggaggtaaytgaatcatgggggtggttttctccatgctgttctcgtgatagtgagtgagttctcacgagatctgatggttttataaggggctcttcccactttgtttgg

SEQ ID NO: 6924 - DNA, 201 bp, Homo sapiens
tttccatttaaatgtatttttaacattaagaaattgcgtgtatatttcaaaattgttgaaagagtagatcttaaatgttttcaccatacaccaaaaaaaaygtgagatgatggatttgttaattagccaatttaatcaccccatattgtaaacataaaccatcacattatgccccataaatacatataaattgtcaatcaa

SEQ ID NO: 6925 - DNA, 201 bp, Homo sapiens
cttttcctatccccaaacactgtcctcacaacctgcgtctacacatctaatctttatgtatcttgaatacataaggaacaccaggctggcaaggtgtaggrgtctaggcatagcattgtgcacagccactgttatctgtttctagaatgaggtcagtctctgctgtattacttcattaggctcagcaagctaatagacatg

SEQ ID NO: 6926 - DNA, 201 bp, Homo sapiens
ccttgaggactcagaaatatgttgaaggagaggaccctgccattccagtttctgtagaaattgttttcactgtccataagtggagcccctctggccatgtytctattctacaaccctgatcctctcccttgtgtctcttcagccacaactgattgatttaacactgagctcttcactaaagctaaattatcagagtccttc

SEQ ID NO: 6927 - DNA, 201 bp, Homo sapiens
actttgggaggccgaggcaggtggatcacaaggtcaggagttcaagacaagcctgacaaacatggtgaaaccccgtctctaaatacaaaattagctgggcrtggtggcatgtgcttgtaatcccagctactcaggaggctgaggcaggagaatcacttgaacctgggagacagaggttgcagtgagccaagatcgcgccac

SEQ ID NO: 6928 - DNA, 201 bp, Homo sapiens
agggaagaaaagcctgtggcaaaatgactgtaaatatgatttactaaatgaggattatcttaaggagatacacacaatttaaaaattacaatttttttaamgttcaactttcagtcctgtcattttttttttctcccagaaatttacatggctttttattgccatgtatttattccagcatgcttgacaactgtgttgaaa

SEQ ID NO: 6929 - DNA, 201 bp, Homo sapiens
tctttgactaattaattaaaataagtgcttagttttttgttctaaatctttggaggctattgtttttttcttatttggtgttgtgttaactttttaatttkttaaggcttttgttaagaatttcatgttttatcacataatggtcagagaatatgaactaagatttcaaaatcatgattgctagcatttcattttggcaga

SEQ ID NO: 6930 - DNA, 201 bp, Homo sapiens
attatcccaagtggccttcccaaattttctgttttcaaactactatcctgaggaagagaggctctttgagagagttttggaatattgaggttttcatgacyaatggtcattcagcctcctttccttccttctttaattttaccacatatgagttagggaggaaagagccaatataatgggactgctaacagttcatgaaag

SEQ ID NO: 6931 - DNA, 201 bp, Homo sapiens
catcaattgttgaacacacacatttcctttttattttctggtactaacatcttttagatgaaactacatgaatattattagtgttcttctcagttcaagtytggccaacttgaactggactcactggtgaactgtaatttgttttttgtttgtttgtttgttttttacagaaccagggtaatggaactaggctcttccaca

SEQ ID NO: 6932 - DNA, 201 bp, Homo sapiens
tatttttatgcaaatacagatttaagagagattgccttctctctccctgaacctctgctttgacacacacacacaaacacattatcttatatatggaaatmtggaaatccaccagccaccaaatttgcagctaggagagaaggcaaatttaggacctggaatgtggttgcttgttcaactcttgtgtacattgagttaagg

SEQ ID NO: 6933 - DNA, 201 bp, Homo sapiens
actcataacgtctgcaaataaggacccaataatcatttgataatattagtaatcatttcagtggagatgatgaaaatgtacaatctccctgaaaggtgggrggaggaaggaaggcaggaaggccagggggagaaggtaggcaggtgtgtttctaggtgtgttggaggactgggctatgttagaaagcgctctggtacacca

SEQ ID NO: 6934 - DNA, 201 bp, Homo sapiens
ctacctctcaactattcaagtgagcctactgagcccttgaaatgtggctgctctggattaacatatgttctgagtttaacatacacattgattgcagaaaygtagaatgaaaaaaagaatgcataatatctaaatatttttaatattgataacattttgaaatgataatattttggatgtattggctaaaccagatatgta

SEQ ID NO: 6935 - DNA, 201 bp, Homo sapiens
taaataccgaggtagtgtttatctctggaaagcaaggaggcgatggagaagaattggactgaaggaaaatttataattcttcagttgtatttgtatggttytattactcaaagcaaaactgaaagaaaaagtatccatagtatttatgaaagtggagaaaataggaagaatattattagcatcctgagaaaggtaagcata

SEQ ID NO: 6936 - DNA, 201 bp, Homo sapiens
cagtttatgtatcaggaagttttccatggaaggaagaatatatccaaaattctattttgaagctgatggcaggatgtggtgaacttatttggatgttaggraaacaccgtaaacaccaaaataaatacttgtggtttgcgcttactcctttcccaaactaaaataggacctgtgacagcatttcctgaacacatgagatca

SEQ ID NO: 6937 - DNA, 201 bp, Homo sapiens
ctctagatcaaatgatgagttgataaaatgaacatatttatattaagcttttcatttgcttctcgtttccatgtctagaatctagagtctagaatggttgratggatgtattaggaccagggtgtgtatgatattatttatgtccgaagaacaaactactcattttcacctctgtggggagagactggagttctaaccatg

SEQ ID NO: 6938 - DNA, 201 bp, Homo sapiens
tcattttcacctctgtggggagagactggagttctaaccatgtctcctgtaccttggcagaggaagagtattgggttctttcagccacttttttgggggtrgacttggtcggcagcccgacttatccatccttgtcccagtttcagagcctcccagtggcgctgctgagttttctcccatcactacagagtccgcctcctt

SEQ ID NO: 6939 - DNA, 201 bp, Homo sapiens
ttttactgcaaaaagcagaatttggaacatgagccctgcattgcaggcaaatggtttgggagctctagcatgaattctagtgttcactaatcagctcaagrcagaaagagccaaattaacttgaggcgttaattttcaaatttaacgttatattgaaaccatggaaccccatttccaatttttttgcaaccttcctgagtt

SEQ ID NO: 6940 - DNA, 201 bp, Homo sapiens
ttccagcagataggttgcacacaaagcatagcttttggctttttgtaaacagagtgcaaatgtactgttctcccccaggagggaaactccaccatgctgamggtgagctgagaccctgagccttgacaaggagccactttgggtgtgctggcaggtcagcctgcgggctttgagaagagccttccataagcaccagggcac

SEQ ID NO: 6941 - DNA, 201 bp, Homo sapiens
aaattgttcttcccctatggcttcatgcatcatttctctctggctactgtcaaggctttttcctttgtctttttgtgggactgtgatgcatcttggtgtgkatttctttgggtttatcccatttggtgctcagattcttgattctgtcttttgccaactttggaaagtttttagccattatttcttcaaatgcttttctag

SEQ ID NO: 6942 - DNA, 201 bp, Homo sapiens
ctcatgaactagaactccagccattaattgcactaaaggctatcataggttctgattaattatattgatatgttataaaattcttaaaacattctcttttwtctttatgtataaaatggactcttttgatgagttaggctctaagtgagactattggaaagatttcatatctcacattccttcgattgccctattatggtc

SEQ ID NO: 6943 - DNA, 201 bp, Homo sapiens
aagcttaggatccagcatgcaataagcttttaagaaatgtttgccattattattataatcgaggaaacatttacgcagtagtgttaatgactaataacagytaagattgttactttcccaggagagatttatgtcataatagggatcagagttttccattagaagaatggaaacttccattagcctcttagcttaatgctt

SEQ ID NO: 6944 - DNA, 201 bp, Homo sapiens
tacagatgctgaaattaaattattaatggattttaacacttttacattctttttatttttatttttgaggtatctgtacctaaattttatgctcactgtakctatgaagaaggaaggagatgaggtagagaaattgatgcaattaagtgttttgataggtgtgacaactgtgaaagtctttcatttcctgagaaaatatgt

SEQ ID NO: 6945 - DNA, 201 bp, Homo sapiens
tatattcatgtagcccaggcatctagtgagttttgctggtgtataaattaatatttacaggtaaaaccttgctgaaaataaaatagattaagtggagaatrtttttcccacagctttcgtctctaacaaaaatgaaaaaacccagcaccactcctttaccgaatgccccatctgtcagctccttgctgctctgagccaaca

SEQ ID NO: 6946 - DNA, 201 bp, Homo sapiens
ctggggcacagtggctgacacctgtaatcccagctacttgggaggccaagatagggggagtacttgagcccaggagtttgagaccagcctgggcaacataytgagacattgtttctacaattttttttttttaaaattagctggacatggtggcatgcacctatagtcccagctacttgggagactgagatgggaggatca

SEQ ID NO: 6947 - DNA, 201 bp, Homo sapiens
gctacttgggaggccaagatagggggagtacttgagcccaggagtttgagaccagcctgggcaacatactgagacattgtttctacaattttttttttttwaaattagctggacatggtggcatgcacctatagtcccagctacttgggagactgagatgggaggatcatttgggcctgggaggtagaggctatagtgagc

SEQ ID NO: 6948 - DNA, 201 bp, Homo sapiens
ttctcaccatcggaaagcatttgttatcactcatgcttttatgtggcaaacacattgcagttcttggcataatgagaggcaggtttcaggagttactgctscaaccaactcttacctgccaaactataaagacaaactattttgaggattaaaggatgggatccctttgtgctttgtggaagcagagctgaaaggttcata

SEQ ID NO: 6949 - DNA, 201 bp, Homo sapiens
ggagcaaacacgggagtatctaacagacctgcagagatggaagggatatgagagacctacgagccacatcctggttttatagctgctgaaggtgggggccyccaggggtagaatgactctcttagaaaccatatgattagttaatgggaaagtctgaaacaggactttgatatttggccacctggacatctctggacaaga

SEQ ID NO: 6950 - DNA, 201 bp, Homo sapiens
aagtgctgagattacaggcgtgagccaccatgcctggcctcagattcttaatacaatgctccaggcaatctctacttattgatcaatttgcacttaaggcragaaaatttttaggcattctagctaaactctttgagggccaagttcctgttttaatcacttttgtttgcctagcactttgtaccttgcaaagagcagatt

SEQ ID NO: 6951 - DNA, 201 bp, Homo sapiens
ttttctttttcttttttttttttttggaagatggcactatgttgcgtactaactcttggacaatgatctgagttctagtcatgattctgtccccaagcttraggcacactgagcttttggcacatagtaggtacacaataaatacttgaagatacatttttgcagttatataagtctgcacttatttattgatatggcttt

SEQ ID NO: 6952 - DNA, 201 bp, Homo sapiens
agcactttgtaccttgcaaagagcagattcttggtgaatatttattgtatgaatgaatggtttctgcattatttgatcctttggcataacaaagtggcaargctctctctgctaggtgactttttagcaagtccactgaatagtaggtggtagcatattgtgaaaatggattgattgacacctcacctcacctctgctcat

SEQ ID NO: 6953 - DNA, 201 bp, Homo sapiens
agtatccattctgcaacccatggatcaaggagtgattttgactttcaaatctgattattacaaaagtatatttcataaggctatagctcccatacatagtkacttctctgatggatctgggaaaagtacattgaaaacattctagaaaaaattcataattctagatgccattaagaacaatcatgattcatggaaataagt

SEQ ID NO: 6954 - DNA, 201 bp, Homo sapiens
cttggaggtagaaggaagaaaatcactttaaaattttttattagctactccaagggtagatctgatattttatttatcttaacctaaatatgcttcataaraatctaagaaatgctgctgtggatcagggaagaggcctttaaatgtaatgttttgtcttcgaggtctctggaggggagagaatgggagtgtgatattgag

SEQ ID NO: 6955 - DNA, 201 bp, Homo sapiens
acattcttgccatctaccaaatttttctggggattgagagaatattgggcttgcagtctgagacctacgaatgcttcccacacctgccctatgtaccccawgtaccccatgtaattataatctccatgagtcttagtttcctcgctttcaaaatgataatgttggatcatagttgatctctcatttatatttcatttaaaa

SEQ ID NO: 6956 - DNA, 201 bp, Homo sapiens
ttaccagttgtgtaagggttggtgagggatgtagaagtgacaggagatcattttttgttcccttaataaactcttgatgtccctttcataattttttcttstatgcccaacattcttgccatctaccaaatttttctggggattgagagaatattgggcttgcagtctgagacctacgaatgcttcccacacctgccctat

SEQ ID NO: 6957 - DNA, 201 bp, Homo sapiens
atgttttcatgagattttgattgaatagactaattttcaataggaggaaaaccatcctcttttgcagcatgacttctgtccttggggatgtatcatttctrtccatggaaaacactgccatatggtcacggcatcagacatatttaagccttgaaaattagatcttaaagcataaaagccaagggatgatgtgagttctca

SEQ ID NO: 6958 - DNA, 201 bp, Homo sapiens
aatggttatctattatgaccttttctgagtgtggttccctggaccctggtcatggttgtcactgcagacaatatccagttatttgtcttgataatcagctrttaaactgaaataattcactgtgttgccagttgttctttccccactgtgggaattagaaagcatttggaaattggttatatcatataatacttgcactgt

SEQ ID NO: 6959 - DNA, 201 bp, Homo sapiens
aaatggtatagcctacgacacacccaggcaatatggtgtagcctagtctatctaagctacaaacctgtacagcatgttactgtcctgaattgtgtacacarttgtaatgcaatgatatttgtatatctaaacatatctaaacatagtaaagatacagtaaaaatagagtatacaagataaaaaatggtatacatgtaaata

SEQ ID NO: 6960 - DNA, 201 bp, Homo sapiens
atggattgcttgatgacatgttctaagaaatgtgttgttaggcaattttgtctttgcgcaaacatcatacagtgtacttacacaaaccaaatggtatagcytacgacacacccaggcaatatggtgtagcctagtctatctaagctacaaacctgtacagcatgttactgtcctgaattgtgtacacagttgtaatgcaat

SEQ ID NO: 6961 - DNA, 201 bp, Homo sapiens
atgattttttttttcacgcattttgcagggaatagaatgtaatttaaaaccaggtctaaagtctacttcctttgcagggtgccacaataataacctagaargataagcaatgtagataagataagcagatatgtcaactatttttagcctgaagctcataatattcaatgaaataaaaaataacaacaatgaaaaaaacat

SEQ ID NO: 6962 - DNA, 201 bp, Homo sapiens
cactatgactcaccagagtctattgttttacctgtttttctcttttttttttcttttttagcagcaatccagaaaactttataaaatatggttgccaaatwaaagaaccaaacttatagtgatataaataccagtcattcagactcacctttggaaagtggtggagaaaaaatttaataaactttttcaccactttaaaag

SEQ ID NO: 6963 - DNA, 201 bp, Homo sapiens
ttatcttttagtacttggaaacaattccacaatttttcttgttccatactgggtgctttttatagtatcagtagtttgctgatacttacagaatatcactrcagatcttacacatataaatgatgttatttgtgcctttagggaaatgagaactctagttagccaatatgtttagttaagtcacagttaatacttgtttct

SEQ ID NO: 6964 - DNA, 201 bp, Homo sapiens
agtattacccccaaccccaccctgtgacatagataagaacttactgttcagagaagaaaataagataccatatttgtccaataaccagggaagattgattrgtttagattgtagcctgggaggttggtttggggactttaatcacccagaaaataactctagagtttctctgtaaactttatcttttaaaaaaatgtattt

SEQ ID NO: 6965 - DNA, 201 bp, Homo sapiens
ccttcttttgtcctatactcctgggaggatactttgttagcatatttttagatgcaaagttgtagggtaaagaatgtttcttgagctatcttgtatctgtragagattttataaatatatcatgctaccctgtaactcctctatgagaaaagtattacccccaaccccaccctgtgacatagataagaacttactgttcag

SEQ ID NO: 6966 - DNA, 201 bp, Homo sapiens
ataggtccttcttttgtcctatactcctgggaggatactttgttagcatatttttagatgcaaagttgtagggtaaagaatgtttcttgagctatcttgtrtctgtaagagattttataaatatatcatgctaccctgtaactcctctatgagaaaagtattacccccaaccccaccctgtgacatagataagaacttact

SEQ ID NO: 6967 - DNA, 201 bp, Homo sapiens
ctatgtttgtggtaatttgttacagcttcaataggaaactaatccatatatcaggagctttatctgtggtaggcatcaaatgtaatggaggaggcaaagayataccagagcagacacaatttgataatgaatagaggaggactctggaacctcaagaaatagttcttctggtttgcatttcatactacagtttaatttgca

SEQ ID NO: 6968 - DNA, 201 bp, Homo sapiens
gcatccgaagctctgcagagcaggataatggtgaatgtggggccatgggactctctttccatagggagcctgttttctgaatagaatcttagcagctctgkagctcaatgttccctttgaagatctttactaacctcctggaagaagaaatgaggcagcacaaggcaaaattataaagtagatgaaatgtggcttattgac

SEQ ID NO: 6969 - DNA, 201 bp, Homo sapiens
ctaactgtaaacattacattggcaacataggaataataaagatcacaaacacacctaaaattacatgaagataagtcagtaatggagaagctctggtatgkggctgttggaattactctttcctatctcaaatcttaactgtatctccaattcagaactgaattgtgtaaattgataaggtgaataactgggaataaaagt

SEQ ID NO: 6970 - DNA, 201 bp, Homo sapiens
acttccttttctaaccagtaggaaaattagcattgctgtccttttgtgaattgttttctcaattctcaatagaattctaccattttctttctagaaaccaygtttaagagttcaaaaaataatatgttaatttttaattagctacagagccccaaagttagaaagatccttaaaactgatctaatccaaactgccatctgt

SEQ ID NO: 6971 - DNA, 201 bp, Homo sapiens
gattcagacttacctaagcctgcagaatgccttctcttaagcatgtgggtggtatcacacagctgagaggccattgtgaggaagaactgataagcctctcytggtttggcaacatggacacaatttgtagcctttgaaatggaagtttcaatgctgagagagggaggaaattacagagggatgaaggatgaaggaagatgg

SEQ ID NO: 6972 - DNA, 201 bp, Homo sapiens
gaagaataacaccaagagtattaccagctataaaaactgacaactgtagaatctttgctatgtgccaagtacaagattaagcactttacatggattatatmatttaatcactacaaaaagccaatggaggaaaataattgctatcctcattttattgatgaggaggtttaaaagtttatagataaatccagtgtgtggtga

SEQ ID NO: 6973 - DNA, 201 bp, Homo sapiens
agtatctgtttttttttttccttcttggaaatacatgagttatattccttaaaacccaaatttgggagtatgaactcacaccaactcaaaagattatagasaatgtctgttatccaaacagttttctttcctttttttttttttattatactttaagttttacggtacgtgtgcacaacatgcaggttagttacatatgta

SEQ ID NO: 6974 - DNA, 201 bp, Homo sapiens
atatgggctttcaaattagagaaacctcagtttgaatctacactttattttcatgtattgtatgacttttcaaaagtgactgtgtctcaaaaatgacttcytcgtgactgtgtaattctcaaaaatagacttattcattcctaccttacaggattagtgtgaggggttaaataagtgcataaaagttttggcataatgctg

SEQ ID NO: 6975 - DNA, 201 bp, Homo sapiens
atccgtggactcagagttaaggggagaaggcactcttttacgtggctttttctgcatagaacttgagtgaaagatggggcacttcatgtaacaaatatcasaaaccattattaagagctgagattgtcggacgataaaaacaagtaatagcagatctggatgaaatccagagatggtggcttttgactttttgcttctgat

SEQ ID NO: 6976 - DNA, 201 bp, Homo sapiens
tttcctgccatgtagctaattagttattaaactcatctattcaattcaattattatatttttcactcctataatttttgacttcaatacacacacacacasgcacacacacagacacattccagtcctctgatgaaaatatcgtattatgtattttcttcaatacatttatgttaaagttttgtctgagaagcctggttct

SEQ ID NO: 6977 - DNA, 201 bp, Homo sapiens
ctggcatatttttaaaatcttatatcacatcttcttccctttttaggaataattaccaaattattggtaatttatgtcttgtttcttgttttcttggtcarccttgtgagtggtttaattttacagtctttccaaagatttttttttttagctttgttgattttctttatgttacatttgtgttctattttattgactttt

SEQ ID NO: 6978 - DNA, 201 bp, Homo sapiens
gctcggcattcaacttgcaaaaaaacatgctatcagtgaagtacaataaaaaaaagcaccgtaatgtgaggtgtacctgtattgcccttttatttgtatasagtaaacagttttatgtttgaaggtagatgtattagacctcaggtatagtgatcacgtctcaattctgtcttcatcacaggcatgaacttattcatttcc

SEQ ID NO: 6979 - DNA, 201 bp, Homo sapiens
tagctatacgtttatcagacaaaatagatttcaagacaaaaactataaaaagatggcaagccacacagtaaaagaagtggaagatatttgcattatacatrcaagaaacttgtatccataatatgtaatggaggagctaaagttgataagaaaaaagataaatgactcaatagaaaatgggcaaaaaatttgatcactttc

SEQ ID NO: 6980 - DNA, 201 bp, Homo sapiens
ccatggcaggtgtatacctgtgtaacaaacctgcatgttctgcacatgtatacccaaacttaaagtataataataataataaaagaatgtttattccttarttttatttagaatttacccagaaattcaaaaccaatgcagtatgtcctgaggattaagttttttgtgtcaacttaactgggcaaagggatgccttatagc

SEQ ID NO: 6981 - DNA, 201 bp, Homo sapiens
agttgtttccacattttctggtatcttattagcagtaccacactctaccagtaccaatttactgtattagtcctttcttacactgctaatgaagacatackcgagactaggtaatttataaatggaagaggtttaattgacacacagttcagtatggctgggagggcctcgggaaacttagaatcatggcagaaggagaaa

SEQ ID NO: 6982 - DNA, 201 bp, Homo sapiens
tggattcattgttgatattactgtcagcattttggtcaaaaccattcaaaaagtctctaggaagctccaaagtttcccacatcgtcctgtcttcttccgakacttccaaactcttccaacctctgcctgttcccagttccacagttccacagttgtttccacattttctggtatcttattagcagtaccacactctaccag

SEQ ID NO: 6983 - DNA, 201 bp, Homo sapiens
ttattctctctcagggggtgggaggcagtagtttgaggctgtgagatatgaggctgggaagtttccaccacaagggggaagctgacctggaagaataataytgacttgtgcaacagaataaaggtgacagatggaaagagttctgatggtgatgaggaccttaaccaggcttttcttgtagatatgtgagatagttcaagg

SEQ ID NO: 6984 - DNA, 201 bp, Homo sapiens
aacctcacactctggggactgttgtggggtggggggaggggggagggatagcattgggagatatacctaatgctaaatgatgagttaatgggtgcagcacmccagcatggcacatgtatacgtatgtaactaacctgcacattgtgcacatgtaccctaaaacttaaagtataataataataaaataaaataaaaaaaaga

SEQ ID NO: 6985 - DNA, 201 bp, Homo sapiens
tcagccacaactgattgatttaacactgagctcttcactaaagctaaattatcagagtccttccgagtaatatctaaaatgggagtgaaaggaggaagatyattctctctcagggggtgggaggcagtagtttgaggctgtgagatatgaggctgggaagtttccaccacaagggggaagctgacctggaagaataatatt

SEQ ID NO: 6986 - DNA, 201 bp, Homo sapiens
taccttatatgtcttcaaatatttaaaaatgagtggtggggattttactggatctgcattatagcacattaagctataatacctttatatgggaacatgastttttaaactgccaatcagttgtatcctttcactgaaatcgtactacatatgtcctaggctcagttatgcactagtctacttttcagatatgaatggctt

SEQ ID NO: 6987 - DNA, 201 bp, Homo sapiens
ataggtaggaattgaacaatgagaacacatggacacaggaaggggaacctcacactctggggactgttgtggggtggggggaggggggagggatagcattrggagatatacctaatgctaaatgatgagttaatgggtgcagcaccccagcatggcacatgtatacgtatgtaactaacctgcacattgtgcacatgtacc

SEQ ID NO: 6988 - DNA, 201 bp, Homo sapiens
agaactgacatcttaacaatattgagtcttcctatccttgaaaatggaatatccctccatttatttagattttgtttatcagttttgtagttttcctcttrtagatcttatacatattttctgagactttatacctaagtatttcatttttggggtgccattgcaaatgtattttctctcatttcaaatacaaattggtca

SEQ ID NO: 6989 - DNA, 201 bp, Homo sapiens
ctcttcagccacaactgattgatttaacactgagctcttcactaaagctaaattatcagagtccttccgagtaatatctaaaatgggagtgaaaggaggargattattctctctcagggggtgggaggcagtagtttgaggctgtgagatatgaggctgggaagtttccaccacaagggggaagctgacctggaagaataa

SEQ ID NO: 6990 - DNA, 201 bp, Homo sapiens
gtggcatctggcacaaataggcttccttaaaatatttgtggattaaatgaaagaattaaattcagcttattttctgctctttttcaagcactagctattaratgtcaaggacatgttcgtgagcaaaacaaaaatggttattgtcctcatggggcttacagtctaattgggaaggtgaataatttagcccagttcctgcaa

SEQ ID NO: 6991 - DNA, 201 bp, Homo sapiens
ttttttttttttaccctgcaagaacatgagcttcatataggaagagattttgtttcattcacagctgaatctcagtgccttgggtggcatctggcacaaayaggcttccttaaaatatttgtggattaaatgaaagaattaaattcagcttattttctgctctttttcaagcactagctattagatgtcaaggacatgttc

SEQ ID NO: 6992 - DNA, 201 bp, Homo sapiens
cacgggccactttgaagaagagataaatattgttttctttgtggtcacttaaagctgtacatgactcaaaggaaatgcagaatattaagaaatatatatakagagagacacatataatgcatataattacataattttatattctgttatcagattaactgtgcaacatgtactcattcatgtgtgaatcatgtgatatgc

SEQ ID NO: 6993 - DNA, 201 bp, Homo sapiens
tggttacttcattataaatgccatgactccatagtgttttgtttttctaaaaaaataaaattacatttatactatttgaggggaaagcactttatttccayactacctctaatgaggtaacagaataatgaaaagacaacttggagtacataatggaaaatgtcatttaaaaaggtttcatttatacaattttaaaaatgt

SEQ ID NO: 6994 - DNA, 201 bp, Homo sapiens
tgtctttaaattcctgactgcgatgctaatttaaatgggaatatgattctagaaacacatatagtcctgtgtcctataaaatcagtcaaattttattggartatttggttacctgaatatttaactggaatatttggttacctgaatatttaattggaatatttggttacttcattataaatgccatgactccatagtgtt

SEQ ID NO: 6995 - DNA, 201 bp, Homo sapiens
ccttgtataagagtagacctatgacaacattaagcaaaaaacaaaataggagaaactatcaactagaagtttctataactctaagtccaatgacattgaaktatagcagttcacattgctaaattagagttagtttactcatttattcattctcttaaagaaaaatatctattttaaagcaatatgggaagcactatgtct

SEQ ID NO: 6996 - DNA, 201 bp, Homo sapiens
gtgggttaagctgctaaacaaaagccagctccctctggactcaggccgggtcttttccttcctgtctccatcacgaattataaatagctctgtgcttatcraaacgacatcccttgactgatccagtaaatacagttgattccatatcctatcttaaaaccttcctttgtttcattcatccatccattcattcattattca

SEQ ID NO: 6997 - DNA, 201 bp, Homo sapiens
ctttgagataaagagctgttatattattctaagcatgtggcccaggcagtaaatatggtcttgagttcacatttggacaaaattttattctgtctacattraagtgagattacaaaggccttttcctcaacatcgtatagtcagagcctggctatcagctcttctctaaacaaaactggtttgaataagtgtgtaataggt

SEQ ID NO: 6998 - DNA, 201 bp, Homo sapiens
actatgttctcatgtttctttttttgtcttctctgaaattattttaactgatcaagttttctctcattttttttcatttgatagttcaggagttttagatmctattttcatttttttctaagttgctcttaaactttaaacatacactttatttttttttttggctaacaacatttagaagtaatttgctggcatattttt

SEQ ID NO: 6999 - DNA, 201 bp, Homo sapiens
aggtggcagatcatggaaattctcagcctctataattgtgtgagccaatttccataatatatacatatatcaataggaaattggtatttggagaaccctgwctaatatggacattatacagaatcaagaattctacttcttcaaaaggaagaggaaaaataatctttcttttttcaactatcatattcctagaatatcaac

SEQ ID NO: 7000 - DNA, 201 bp, Homo sapiens
caactattctgcctatattttaagttgggttagtttttttgctattgagttgtagaagtttcttaccaattttgaaaactaactcattctcagatatatcrctttcaagtatgttttctgatttcatagattgtcattttactgctttctttgctctgcagaagatttttggttgatgtagtgcctcttgtttatttttgt

SEQ ID NO: 7001 - DNA, 201 bp, Homo sapiens
tataatatttatatggtacatataaatagattaatatgaacattctatatgtaccaaatagttatttagtgaaagaggttattttaacatacaaaaaattktatttttggacatggatttaattcctagtgcttttcaaaaaaacagatatgtttttaactatttaaaggtcttcaacatttaagattaaatgatataaga

SEQ ID NO: 7002 - DNA, 201 bp, Homo sapiens
tgtcacagaccactccctatagaaaaaggtgacatttagaaagtttctgtaagtgccttatggggaaagcttaagcagggagttggaaacctgagagaggsgtgatgtctaggtatctgaatctcattgcttctttaggtggatgagtttgtgttagcctgagggagacaggaatcaggaaggatctgtgataattggaga

SEQ ID NO: 7003 - DNA, 201 bp, Homo sapiens
aagaatttattggaaactgggagtataattatcaggaaacttttaattacataaaatgaggcatatgcaggtatatatcacatgaaccaaaaggtgcatcygcctgaaaggtctaaaatcattttcagaaccaaacaggttataattcttactcctaagtaaaatggtaaaaataacagaattattcaattttagggttat

SEQ ID NO: 7004 - DNA, 201 bp, Homo sapiens
attttttctggtgttgccagttacctggtattctgcttatccttaaacttgatttatacccacattccagcttacttgtgggtaagcttagccatattgckttgatgatgcactctgtcacagcctcagcaagtatataatgtagattcagtaatgggtatagatccttatttctactcttaaaatcttctttactgaggc

SEQ ID NO: 7005 - DNA, 201 bp, Homo sapiens
ctagtggcaagcttctcttccatcaccatgacaacatgtctgcatagcctgctctagaggatgagagatacgtggaacagggcagaggaatccctgtttcyccagccaaggccagctgatatcagctaactgccagctgactgcagacgtgaacaagtctggccaagattagcagagccatctagccagccctcagctggc

SEQ ID NO: 7006 - DNA, 201 bp, Homo sapiens
agcagttgttaaacaccattttacaaaaaaggggagaaacgtgtttcatcagtttgctaccacaaattgaaacatacatgcaaaaccaagagttgtaataratatgacataagttaacagagcatggaagatagaaaaatggaaaatggtgtccctaaatcaatttaatgcggtaccagccccaaataaacaacagattgg

SEQ ID NO: 7007 - DNA, 201 bp, Homo sapiens
tgccatttgacctagtaatcccattactgggtatatacccaaaggactataaatcatgttgctataaagacacatgcacacgtgtgtttattgcagcactrttcacaatagcaaagacttggaagcaactcagatgtccaacaatgatagactggattaagaaaatgtggcatatatacaccatggaataccatgcagcca

SEQ ID NO: 7008 - DNA, 201 bp, Homo sapiens
aggctacagtgagccatgatcatgccactgcactccagcctgggaaacagagtgagaccctgtctgtctgtctgtctgtctctctctctctctctctctcwcacacacacacacacacacacacacacacaaagaagaaacagaactgatggcaggtctagattggctctggcatagggcaagcctatctagttttcttga

SEQ ID NO: 7009 - DNA, 201 bp, Homo sapiens
cactgttggtgggactgtaaactagttcaaccattgtggaaatcagtgtggccattcctcagggatctagaactagaaatgccatttgacctagtaatccyattactgggtatatacccaaaggactataaatcatgttgctataaagacacatgcacacgtgtgtttattgcagcactgttcacaatagcaaagacttgg

SEQ ID NO: 7010 - DNA, 201 bp, Homo sapiens
caatcattaaaaagtcaggaaacagcaggtgctggagaggatgtggagaaataggaacacttttacactgttggtgggactgtaaactagttcaaccattrtggaaatcagtgtggccattcctcagggatctagaactagaaatgccatttgacctagtaatcccattactgggtatatacccaaaggactataaatcat

SEQ ID NO: 7011 - DNA, 201 bp, Homo sapiens
cactcctattcaacatagtgttggaagttctggccagagcaattaggcaggagaaggaaatacagtgtattcaattaggaaaagaggaagtcaaattgtcsctgcttgcagatgacatgattgtatatctagaaaaccccattgtctcagcccaaaatctccttaagctgataagcaacttcagcaaagtctcaggataca

SEQ ID NO: 7012 - DNA, 201 bp, Homo sapiens
aattttcataggcattacattgaatttgtagatcatgttggatagtatgagaattttaacaatattaattattccaattcatgaacatggactctctttcracttttttgtgtctttcttcaattttttcatcaatgtcttatggttgtcagtacacagatcttccacctccttaaacttttgtctatgtattttattttt

SEQ ID NO: 7013 - DNA, 201 bp, Homo sapiens
agttttcccaccaccatttgttggatgatgttttccccattgcatatttttggaacccttgtaaaagattaggtgactgcatatgtgtagctttatttctragctctttattgtgttccattggtctataagtctgtttttatttgcaccatgctgttttgattactatagctttgtaatgtagtttctaatcaggcagtc

SEQ ID NO: 7014 - DNA, 201 bp, Homo sapiens
tgattttattcacttaaagaagataatcaaacccttagccaataccacagaaaattaaatttagatttaacgggttttagggcatgcttttactaaatatytcaagttacgtttcctaagatttatggaatgaaaatatctcgtctagaagccaattttattgtttgactggtacaaatgagacatttctgttaatattac

SEQ ID NO: 7015 - DNA, 201 bp, Homo sapiens
atatgccactatgcctggctaatctttttattttcatatttttagagatgagtattgctatgttgcccagcctcaaaacaacataacttggtttgtctcaractcctgtccttaagctgtcctcccacctcagcctcctgagttgctgggattacaggatgcagaagctttttaatttgatgtagtcccgtttgtttattt

SEQ ID NO: 7016 - DNA, 201 bp, Homo sapiens
agcatgttgttgcctgacccactggaagtggtcagtgtatgttagccgttgctgctataattgctgttatgtcccatttaattacctccctgcaaaatcaytatattgccctcagcctgcctgacaccatccctggctggacagtccctctaaattagctctgctttcctgcttgacatggagggatttgaagtttcaagc

SEQ ID NO: 7017 - DNA, 201 bp, Homo sapiens
gaccagagaagtgatcgttgatttccttatctcacgccagtaatgtctctgatccagctttggatatttaaagaataatctcatatttatgttttaccttkctcaagatggatttaagacaatatgcatacatacttaaaatcagaatattaaagtaaaaagtaaatgtggcattcagaacaaagaaaagaaaattaattt

SEQ ID NO: 7018 - DNA, 201 bp, Homo sapiens
catcttgattttgtttttgacccaatgctcattcaggaacaggttatttaatttccatgcatttgcatggttctgaaggttccttttggagttgatttccrgttttattccactgtgttctgagagagtgcttgatataatttcaactttcttaaacttattgaggctcattttatggcctgtcatatggtctatcttgga

SEQ ID NO: 7019 - DNA, 201 bp, Homo sapiens
ttttttaatgtaataaacagtatgcaaaatattgcttttattctgaattttgagtctaagtaatatacaaaaaccatgaaaattaaatagattatttactsttaggtattaattattctaattatgagaaaaataatcatagataaacaggaaaaaaatggaaactgaccagagaagtgatcgttgatttccttatctcac

SEQ ID NO: 7020 - DNA, 201 bp, Homo sapiens
ttgagttctgaatgttattgtttgattctctttaaattcatttcctgttatttagactgtattagtgaaaataccccagttaatgaaatggatggactcayacacacacacacacacacacacacacacactgttaaccagtcacataactttttaataggctgttttcagaataaccagtttctccaaactcatattttc

SEQ ID NO: 7021 - DNA, 201 bp, Homo sapiens
ttcaaatctaggtctaacttatcccaaagccctgatactttctagtgattaccagcatgaattttgagaatgataactagatttctcaattagcatgctcrtatcatttggctactttgaagacaattttatagcttctaagagaaatcattttttaatgtaataaacagtatgcaaaatattgcttttattctgaatttt

SEQ ID NO: 7022 - DNA, 201 bp, Homo sapiens
tttctttggaaatagctgttcaaataaaagatgtaatatactaaaagctagcacagacgtataaacagagacagaacaaggaggtggaaatgggtgccacrctgtggaagaatctgatttcaggcttccatgtgccaggcacttttccaggagctgggttgagtgaagaaaggcaatattcatgctcacgggcttacattt

SEQ ID NO: 7023 - DNA, 201 bp, Homo sapiens
atagcacctgtctatcagcaagaggagattgcagaaggggctgtgacaattttgcccaaacgagcatcaattgatggtaagaatgcaccgtagagaatttsttttattccagttggatctgaactcaaaggcaaaactggagtatcataatatgaggaaatgcactcattactgatgacttgatacaaattttagctttgg

SEQ ID NO: 7024 - DNA, 201 bp, Homo sapiens
tattcataattgtggtatttttaatacatgtgatatgcattatttatttttattcctgtaggaggatattggaagcagcaaaaaaactaaaccaaagtggscattttctctggattggctcagatagttggggatccaaaatagcacctgtctatcagcaagaggagattgcagaaggggctgtgacaattttgcccaaac

SEQ ID NO: 7025 - DNA, 201 bp, Homo sapiens
gaggtgcgggaatagcaaaaagtgaaatggatttaagctatgttaaaattcaactcagctaactcagctctttacaaacaaaaatgtttaataggtccatkgtgaataaataaatcaatgaattcagactaaactatgtttggattgcttgtttgcttcttctgaaacagtaataataaaaattttcagaacttaattttt

SEQ ID NO: 7026 - DNA, 201 bp, Homo sapiens
ttgttttgctcattgctattatctgaaggcatgttcataagaaataaataatggtggatgggctgtatcacatttttattagatcaaaagatgtttaattytaggcaaatttcttatggtcaaactgtaagtctaatcatttttaaccaatagtctagtcattctctttaacaactgataaaatggtaattttgtttgctt

SEQ ID NO: 7027 - DNA, 201 bp, Homo sapiens
tgttagccacctgtatgtcttcttttgagaagtgtctgcttctgttgcagtcccgtttcacagtggattgtctttatttccctatgcatggtagcacatgyctcttctgtaccattccttcattgcattgcttttcagagtccctttaagattccacatggcatttgatagaggaaaaagtataaaatgtttgaaagtgag

SEQ ID NO: 7028 - DNA, 201 bp, Homo sapiens
cttttaataatagtcattctgactggtgtgtgatgatgtctcatagtggttttgacttgcatttctctgtgaccagtgatgttgagcatttttttcgtatrtttgttagccacctgtatgtcttcttttgagaagtgtctgcttctgttgcagtcccgtttcacagtggattgtctttatttccctatgcatggtagcaca

SEQ ID NO: 7029 - DNA, 201 bp, Homo sapiens
atcaacatgttattttttgacttttaataatagtcattctgactggtgtgtgatgatgtctcatagtggttttgacttgcatttctctgtgaccagtgatrttgagcatttttttcgtatatttgttagccacctgtatgtcttcttttgagaagtgtctgcttctgttgcagtcccgtttcacagtggattgtctttatt

SEQ ID NO: 7030 - DNA, 201 bp, Homo sapiens
ccagctttccaaaaatggggtcagttatttaatatttttaatagcacgtttgttttacgaaggccagctctcacattttaaggtcactgttacaaatttgwtttccgtggaagaggttttaaagaaacaaaaacttttggaataaagatttagcataactttaaaaaaaatcactgtactaatgttaaaatatgaataaat

SEQ ID NO: 7031 - DNA, 201 bp, Homo sapiens
tctagcctagacaacattgcagaccccatctcttagaaaaattaaaatacgtctcaatttttcaaccatattgcgtgtctgaagcggggttttcattatawacctttaccaaaacaacttatagattaaatctagaagaaaatatgagaatttagttgtcttctattaagccactaactaaagatatttgcaaaaatgtaa

SEQ ID NO: 7032 - DNA, 201 bp, Homo sapiens
aaagacaatcactgtttctgtgtgggggctgttgattttgattttaaacaatttacaactagcaggtgttttctgaggaaaacgtaatgtgttgagtgtckattgaatctcttcacaaagcccatttgggtgccatcttctcaatcttcagatgagggacagaggtacaaagaagccacctcacttacccagtctcacata

SEQ ID NO: 7033 - DNA, 201 bp, Homo sapiens
ttaaaatgtggatatgcttatctatttattagataatttcactgtatcaggaaacagtggcttctcatttattcacgtatttgtcacacatccaatgagtrttcacagctatcaggcttcactagacttagagatacactggggtgtttaattgctgcagttctgtaatgaaattattaattctgtaatgggcttaattca

SEQ ID NO: 7034 - DNA, 201 bp, Homo sapiens
gtatttttctgttcaaatatattattatttgcgatttgttctaaaagtagatctttcattaaggaaaaggtaatagaatcgtgtgtgtgtgtgcgtgtccrtgtgtgtgtgtgtgtgtgtgtgtgtggttggaggaggtccttgcatctcaagctactaattgtcttctattttgaataaaatctagtccaaaatgtattt

SEQ ID NO: 7035 - DNA, 201 bp, Homo sapiens
gttcatctcctgtaggcttttcaaaaagcaatttattgtattttacatgatgttctattcccatattagaatttacataattcacagtactcatgggaggsagctatgtggtatattcatagaaacacaaaatgttgaaattcaaaggcatcttgagatcatcctgtcaagcacccttctttttacaaatgaaggaactga

SEQ ID NO: 7036 - DNA, 201 bp, Homo sapiens
attggaaaagttttctgatgtaccctctagttcatctcctgtaggcttttcaaaaagcaatttattgtattttacatgatgttctattcccatattagaayttacataattcacagtactcatgggagggagctatgtggtatattcatagaaacacaaaatgttgaaattcaaaggcatcttgagatcatcctgtcaagc

SEQ ID NO: 7037 - DNA, 201 bp, Homo sapiens
cttgtgaagtcaggatttataattttgaattggaaaagttttctgatgtaccctctagttcatctcctgtaggcttttcaaaaagcaatttattgtatttwacatgatgttctattcccatattagaatttacataattcacagtactcatgggagggagctatgtggtatattcatagaaacacaaaatgttgaaattca

SEQ ID NO: 7038 - DNA, 201 bp, Homo sapiens
aataccataaactgagtagcttaaacaagagacatttatttatcacagttctggaggctggaaagtctgagattaggatgttagcctggttgggtttttcrtgagggctgtcttcctggcttgcagacaatggccttctcactgtgttctcacacggtgaatggagacagagagagacagagagagatcagtctgatcttt

SEQ ID NO: 7039 - DNA, 201 bp, Homo sapiens
ctcactgagctttttctattctggtaagtcaattgcaacttggtaatcatctgcttttcagctttcaaaacattggtgacatttctctcctcttttcccckctttttttttatagtagacaacttagttgggtatttggaggaattagagtgttttagctcaggttgctaaatcaaaataccataaactgagtagcttaaa

SEQ ID NO: 7040 - DNA, 201 bp, Homo sapiens
ggggcatcagtataagatatacagtcatccctatgtagatatggggaattggtttcaggaccccacatataccaaaatctatgcatgatcatttcccctartcagaagccatgcatatgaaaaatcaggccttcttataggcaggtttcacatctgccaatacaatattttctgtctgtgttcgattgaaaaaaaccaatg

SEQ ID NO: 7041 - DNA, 201 bp, Homo sapiens
catagatggatgatccaagattatctattaggaagtacactcatgtacagattatttattcagtgactgttccctgccaggcaggatgatagtccatggcrgggcatcagtataagatatacagtcatccctatgtagatatggggaattggtttcaggaccccacatataccaaaatctatgcatgatcatttcccctag

SEQ ID NO: 7042 - DNA, 201 bp, Homo sapiens
acatagatggatgatccaagattatctattaggaagtacactcatgtacagattatttattcagtgactgttccctgccaggcaggatgatagtccatggyggggcatcagtataagatatacagtcatccctatgtagatatggggaattggtttcaggaccccacatataccaaaatctatgcatgatcatttccccta

SEQ ID NO: 7043 - DNA, 201 bp, Homo sapiens
tcttctagaagttttatagtttctggtcttatgtttaggtcttttatttagagttgatttttgtgtgtggtgtaagataaaggtctgatttcattcttttmcatgtggaaatccagttttccctgcaccatttgttgaagactcacctttctccattgttttcccttggtgcccttgacaaaaattactatgctgtgtttg

SEQ ID NO: 7044 - DNA, 201 bp, Homo sapiens
aaagacagattagggagaactgcatatagagttggtagttgaaaactctagggtagccattattattccaacttagaaaatgaaaaagcaccctgatagargtcagggactctgtcaaggtcacagagctagtcactgatggagcaaagcttcacatgttctacttagggaggctgcgttagtcaaaggtagcgcagctgt

SEQ ID NO: 7045 - DNA, 201 bp, Homo sapiens
gatatgtctaggtttctggtatagccttggctgtttagctcatatgacaatccatcattcttcaagattcgtcatgggttgaaatgacccatcatttgttytgcagatacctcaaatcagctatgcatccacagccccagagctaagtgataacaccaggtatgactttttctctcgagtggttccgcctgactcctacca

SEQ ID NO: 7046 - DNA, 201 bp, Homo sapiens
ttcactgagttaaagactttcattgatgactgctcaagattgcttcggaatttggatacatagctttctgaattgtttaaaaaaatactgggccaggcgcrgtggctcacgcctgtaatctcagcacttttggaggccgaggcaggcagatcacgaggtcaggagatcgagaccatcctggctaatatggtgaaacctggc

SEQ ID NO: 7047 - DNA, 201 bp, Homo sapiens
caaatttgagagttacagaacaagaatttaatgatctgaactttttagatgcactagtgtaccctaacacacacacacacacacacacacacacacacatrcacacacacatcgtatatcagctaacatggggcagagcagacctaggtgattgcttcactcatataacatgctaatggctttagataacagaagtatcaa

SEQ ID NO: 7048 - DNA, 201 bp, Homo sapiens
aaatactttgttctgtttcctttccttgcaacaagatgatttttaaagctgtgtatttgtttattagatgctaatttattctttcaaaaagtcattttgargtcattacttatatctctgtttataaaataacaagataaaagataacaatatgatttggtagagtcatattattcacacattgagcaagtgttaaggtga

SEQ ID NO: 7049 - DNA, 201 bp, Homo sapiens
acaaatttgagagttacagaacaagaatttaatgatctgaactttttagatgcactagtgtaccctaacacacacacacacacacacacacacacacacaygcacacacacatcgtatatcagctaacatggggcagagcagacctaggtgattgcttcactcatataacatgctaatggctttagataacagaagtatca

SEQ ID NO: 7050 - DNA, 201 bp, Homo sapiens
gggaaatggcatagtggggtttgtattttaacagatgactcactagtttagacttgtcctcagcttcttctttttttttttttgtttttttttttttttttgagacggagtctcgctctgtcgcccaggctggagtgcagtggcgcgatcttggctcactgcaacctccgcctgctgggttcaagaaattctcctgcctca

SEQ ID NO: 7051 - DNA, 201 bp, Homo sapiens
tggagtgcagtggtgctatcacagctcactgcagcttccacctcccgggctcaagccatcctcccaactcagcctcttaagtggctggaattacaggtgtrtgccaccatgcctggcctagatatgggccttgtttatttttacctctggagaagtttagattttattttaggatctggtctccagatctggcatccactg

SEQ ID NO: 7052 - DNA, 201 bp, Homo sapiens
agcactctatgattttaattttaattttttctttgactaattaattaaaataagtgcttagttttttgttctaaatctttggaggctattgtttttttcttatttggtgttgtgttaactttttaattttttaaggcttttgttaagaatttcatgttttatcacataatggtcagagaatatgaactaagatttcaaaat

SEQ ID NO: 7053 - DNA, 201 bp, Homo sapiens
tagaggaaatgcccactcaaatgaaaacaatagcttctggaaacagggttaatgtattatttaagcagctgatgtcagttcttaccagagtgataatttakcaagaggagaaaactaatagagtatgtattgaaataagttttccacagtgatcctggacattctgcaacttgaggacacattttgtgtgcatgagataga

SEQ ID NO: 7054 - DNA, 201 bp, Homo sapiens
atagcactctatgattttaattttaattttttctttgactaattaattaaaataagtgcttagttttttgttctaaatctttggaggctattgtttttttyttatttggtgttgtgttaactttttaattttttaaggcttttgttaagaatttcatgttttatcacataatggtcagagaatatgaactaagatttcaaa

SEQ ID NO: 7055 - DNA, 201 bp, Homo sapiens
gaagacagcttgagtaagaactgagcaatcaaagcgaatggagagaaactggagttcagggggtaatttcagtggtatcagtggcattccacatagcaaarctgggcatgtgggagtagagagggaaaatactgaaagcaaagatacctatttctatttttaccatactgaatttcagttgggggtctgatattcagtttg

SEQ ID NO: 7056 - DNA, 201 bp, Homo sapiens
tatgatttttatctttagttctgtgtacatgatgaatcacatttgttgacttgtatatgttgaaccacccttgcatctcggggatgaagtctacttgatcrtcctggataaacttttgtgtgtgctgctggattcagtttgctagtattttgttgagcgtttttccattgatgttcatcaaggatattggcctgaagtttt

SEQ ID NO: 7057 - DNA, 201 bp, Homo sapiens
taggaagaaatccttctccatgtgtgccccagttctagttgaaggttttccctcaacctgaccctagagtgactaacctggtttgtctaggactgtcttgrgtttagcaccaaaagtcccatgtctcaggaaatgttgctgtcccatgcatccacaaatggttagttacactgcaagcccccattctgataatgtgcctgg

SEQ ID NO: 7058 - DNA, 201 bp, Homo sapiens
atatgatttttatctttagttctgtgtacatgatgaatcacatttgttgacttgtatatgttgaaccacccttgcatctcggggatgaagtctacttgatyatcctggataaacttttgtgtgtgctgctggattcagtttgctagtattttgttgagcgtttttccattgatgttcatcaaggatattggcctgaagttt

SEQ ID NO: 7059 - DNA, 201 bp, Homo sapiens
tatagaagagtggatttggagagattcaaatttggagaggtttgttgagagacaacaacttcataaacggaaaagataataaatatgaattctgagtaaawctctcatagattctcccaaatttcacatctgttctcccaggaatttttaaaaaatgttacatatctagtaacaaaataaatatgcatttgtattcttgtc

SEQ ID NO: 7060 - DNA, 201 bp, Homo sapiens
caaaggccttttctgcatccattgagataatcatatgatttttatctttagttctgtgtacatgatgaatcacatttgttgacttgtatatgttgaaccamccttgcatctcggggatgaagtctacttgatcatcctggataaacttttgtgtgtgctgctggattcagtttgctagtattttgttgagcgtttttccat

SEQ ID NO: 7061 - DNA, 201 bp, Homo sapiens
taagataaaaatctctcctacagtcatgagtgatgaatgtattctctagttttaaaaaggtgaggggtaattaaacaaaaatggcaactcattagcataartgaaaacaagtactgtatctaccatgccaaccagcaatttgtattaattttatatataaatatttctgagattatctggggaaaataatggccctgaaag

SEQ ID NO: 7062 - DNA, 201 bp, Homo sapiens
ttagctatattcctaggtgttttattatttttgtggcagttgtgaaagggagttcatacatgatttggctcttggcttgcctgttggtgtatagaaatgcwagtgatttttgcacattgattttgtatcatgagactttgcagtagtggtttatcaacataagaatcttttagacagattatagggttttctatgctagat

SEQ ID NO: 7063 - DNA, 201 bp, Homo sapiens
ttttcttacgattgtcttgcctatgcgagtttttttttgtttttaatatcaattttaagatagtttttttctgattctgtgaagaatatcattggtagttkaatgggaatagcattgaatctataaattgctttgggcagtatggccatttttacgatattgattcttcctatccatgattatgaaatgagtttccgtttg

SEQ ID NO: 7064 - DNA, 201 bp, Homo sapiens
ctcactggtgaactgtaatttgttttttgtttgtttgtttgttttttacagaaccagggtaatggaactaggctcttccacatttcttctccactttatgrgggaaagcattgtggtcagcagattctgagagctacttctatctgctaaaatttgcatatattagccattgatacgatgtgtattgtttaccaaaatata

SEQ ID NO: 7065 - DNA, 201 bp, Homo sapiens
tgtagtttatcttctgtaaaagataactaatatactaataaaatctataaaattacattgaaagcatagctgttttaagataaaataggcattttttcatrtacttgtgatatactaaaaatatgagaaatagagtgttctctcttaattagcattaaaactaaatggaattaattataaaatagggacttaaattctttc

SEQ ID NO: 7066 - DNA, 201 bp, Homo sapiens
tgtctcaggaaatgttgctgtcccatgcatccacaaatggttagttacactgcaagcccccattctgataatgtgcctggaatccccttagcactaggcayggcattcttattgtctcttgctatgtttgaaagctttgaataaattgtcaaatactctggctattgatgagggagttaataaattgaatttggaatgctg

SEQ ID NO: 7067 - DNA, 201 bp, Homo sapiens
tttcactgtgttggccagggtggtctcgatctcctgacctcatgatccacccgcttcggcctcccaaagtactgggattacagccgtgagtcaccgcgcamggcctgaaacactttcaaataagtatattttatttctaggaagggatttaattttcttgctttgattatggcaagattttatttcaggaagtgcagaatt

SEQ ID NO: 7068 - DNA, 201 bp, Homo sapiens
ttgacttttaataatagtcattctgactggtgtgtgatgatgtctcatagtggttttgacttgcatttctctgtgaccagtgatgttgagcatttttttcrtatatttgttagccacctgtatgtcttcttttgagaagtgtctgcttctgttgcagtcccgtttcacagtggattgtctttatttccctatgcatggtag

SEQ ID NO: 7069 - DNA, 201 bp, Homo sapiens
cttgcatttctctgtgaccagtgatgttgagcatttttttcgtatatttgttagccacctgtatgtcttcttttgagaagtgtctgcttctgttgcagtcycgtttcacagtggattgtctttatttccctatgcatggtagcacatgcctcttctgtaccattccttcattgcattgcttttcagagtccctttaagatt

SEQ ID NO: 7070 - DNA, 201 bp, Homo sapiens
ttagcataacattttcctgagtgtgacctgaacacatccaggatacccaaagacattttcagggactgtgaagaacgatgaaccctattttcatcataatwctaaaccatcatttgtctttttcactgagttgacatctacactgctggcacaaaagtactggtgggcagaattgctagtgtgttaatatgaatgttggca

SEQ ID NO: 7071 - DNA, 201 bp, Homo sapiens
gaatgaaaaatgaggaaacagatgtaggaacagagaagatttgaggtggtgggaaaaatttctgaaggagtttatgtctaatagtttgtattttttctagygatcagaaacacaaattttatactcagtttgaatctagctttacaacattcaacaccttgtaatagtggccaagcaacaaaacctctatacatttttgtt

SEQ ID NO: 7072 - DNA, 201 bp, Homo sapiens
agtttttcattggatgtccaggactattatacaaactgagtattactcttatattaaaggtaaggaaatagcttctaactaagcaaagttgctcaaagtgrcacatagagtgaggtctgtggctgttctcttactccaaatgtgggatatctcagaaattgccatcctccagaaggctacagagtagctcagactgtgcaa

SEQ ID NO: 7073 - DNA, 201 bp, Homo sapiens
tcaaaataaagagatggaggaaaatctaccaagcaaatagaaaacagaaaaaagcaggagttgtaatcccaatttcaaacaaaacagatttcaaaccaacraagaataaaaaaaggcaaagaagggcattacaaaatggtaaagggttcaattcaacaaaaagacctaacctaagtatatatacactcaacacaggaacac

SEQ ID NO: 7074 - DNA, 201 bp, Homo sapiens
tttggtcttacaggcaaagcaacttgtataatggggaaggatgctttgggttatctcgagaggcatgtctgaaaatcatcttctcatttcaaatgatagcrtgggttattgtgagccagttccaaggtggctagcaaaattgagttgctggatatacaaagctgagactcatcacctagaacagggcaagtggggacatct

SEQ ID NO: 7075 - DNA, 201 bp, Homo sapiens
agaccttaaatttgtgaaaaatggaatatctgtaaagtgcaataaaacgtatgcctgtataaaaggatgagcagtaaaaacgtgctaatttaaagtttgcrtatatattattaaaacccaacagtaaccacaacaattgttagaacttatacaacaaaattttggtggggagggaacagcattttatcacttatattagtt

SEQ ID NO: 7076 - DNA, 201 bp, Homo sapiens
tcagcaatgaaaataagtgaattacagataaccataacaatggagatacttctcacaagcaaactcaaaagtggcctagcagataaagttcaagtggagakaaagtgatttcttttatgtaaagttagaaaaataacaggcaaaaactaaactaaaaggtttaggaatacactgttaggtgaaaatgattttaaaaaatca

SEQ ID NO: 7077 - DNA, 201 bp, Homo sapiens
aaatctgctttcttcaactctatctctatcgtatttggtgtaacaaccctttgcttgaatgttgtattacagcattattattattattgttattattattwttttttttagatggagtctcgctctgtcacccaggctggagggcagtggcatgatctcggctcactgcaagatctgcctcccaggttcacactattctcc

SEQ ID NO: 7078 - DNA, 201 bp, Homo sapiens
acttaaaatgaatcctgttaattcagtaagtattaactgtatgctgttatgtgccagatattgggaattttttgtataataaccaagatgaaatgtatatycccccccccccctttttttttttgagacagagtctcgctctgtcactcaggttagagtgtaatggtgtggtcttagctcactgcaacctctgcctcccag

SEQ ID NO: 7079 - DNA, 201 bp, Homo sapiens
ccccatggggctcaagccatctttctacctcagcctcccaagtagctgggaccacaggcatgcttcaccatgcccagccatttttttgtattttggtagaracgggtcttgccatgttgcccaggctggtctcaaattcctatgctcaaacaatccaccctcctcaccctcccaacatgctgggattataggcttgagcca

SEQ ID NO: 7080 - DNA, 201 bp, Homo sapiens
tgccccatggggctcaagccatctttctacctcagcctcccaagtagctgggaccacaggcatgcttcaccatgcccagccatttttttgtattttggtaragacgggtcttgccatgttgcccaggctggtctcaaattcctatgctcaaacaatccaccctcctcaccctcccaacatgctgggattataggcttgagc

SEQ ID NO: 7081 - DNA, 201 bp, Homo sapiens
tatatatatatatatatatatatatatatatatttttttttttttttttttttttttttttgagacaagttctcactctgtcacccatgctggagtacagkggcacaatctcagctcactgaaacttctgccccatggggctcaagccatctttctacctcagcctcccaagtagctgggaccacaggcatgcttcaccat

SEQ ID NO: 7082 - DNA, 201 bp, Homo sapiens
atctcaaaaataatgacctttattgcctcaagtgtctgtctttctggtgtcataagccacatcccagaagtcaaaattccactatgtgatattagctatgmagccaaccattctcttgcagcaataacctacctatttcgatattttaaccatattgaaaatttaacactttttggaagaaaaaggtgttaaaaatgttta

SEQ ID NO: 7083 - DNA, 201 bp, Homo sapiens
gatgttggatttataacatgataatacacattttttttttttacctacagtgatcattgcttcaaactatatatatatatatatatatatatatatatatatttttttttttttttttttttttttttttgagacaagttctcactctgtcacccatgctggagtacagtggcacaatctcagctcactgaaacttctgcc

SEQ ID NO: 7084 - DNA, 201 bp, Homo sapiens
tatacacaagggtttaattatatgtgtatatattctttcttaaaaattggaaaccacttgatgttggatttataacatgataatacacattttttttttttacctacagtgatcattgcttcaaactatatatatatatatatatatatatatatatatatttttttttttttttttttttttttttttgagacaagttct

SEQ ID NO: 7085 - DNA, 201 bp, Homo sapiens
agccaatggaggaaaataattgctatcctcattttattgatgaggaggtttaaaagtttatagataaatccagtgtgtggtgagccttggattcagacttacctaagcctgcagaatgccttctcttaagcatgtgggtggtatcacacagctgagaggccattgtgaggaagaactgataagcctctcctggtttggcaa

SEQ ID NO: 7086 - DNA, 201 bp, Homo sapiens
atatagatatataaatagatatatttatatatctatttatatctatctatatctatatctatctatctatctatctatctatctatctatctatctatcatcatctatttatgtagagagcaagatccccctaaatccttcacaataaatgtgcttatacatttgttgatttaggggggtcttgctgtgttgcataggctg

SEQ ID NO: 7087 - DNA, 201 bp, Homo sapiens
tttattagatcaaaagatgtttaattctaggcaaatttcttatggtcaaactgtaagtctaatcatttttaaccaatagtctagtcattctctttaacaaytgataaaatggtaattttgtttgcttatttgtacaccaaaaccaaggtctgtcgtgtagctctaacaaattatataaccacagacttgagttgatttatg

SEQ ID NO: 7088 - DNA, 201 bp, Homo sapiens
tatatagatatataaatagatatatttatatatctatttatatctatctatatctatatctatctatctatctatctatctatctatctatctatctatcatcatctatttatgtagagagcaagatccccctaaatccttcacaataaatgtgcttatacatttgttgatttaggggggtcttgctgtgttgcataggct

SEQ ID NO: 7089 - DNA, 201 bp, Homo sapiens
tgttcattataaatatacaagcaatagaggaaagtccagagaaacatgtaataactcaaatttcacctactagacataatcattataattttgaaggttaygattctggaaatctctctgtgtttatatgtataggtaaaaggatggatagcaagaactgatagccaagttatttttcttcatccttaaagttggggaaaa

SEQ ID NO: 7090 - DNA, 201 bp, Homo sapiens
acatctgtcctacttgtaaccactggggtcaaacacaacacctctaattctttttcccagtgaagttattaggatatttgagcatgctgatcagatctccmgggtaaatatgctcaagtactttgaggaattcttggatattattgatttgattgtttgtacatctcaggtcatgcttgaatgtgctcagtttctccatgc

SEQ ID NO: 7091 - DNA, 201 bp, Homo sapiens
aggttagattccctagaagcagagctgaatataagagaatcttagcaaaatgagttattaacgagcattctcaggagaaaggatgcactttcaggtgaggsccattctgagcctgatcctgtggatgctctgaagcatcaatcatagcagggtgtgttcttccttgaggcaggaaagtaggaattttgtatctttgcatca

SEQ ID NO: 7092 - DNA, 201 bp, Homo sapiens
tgaggctgaggcaggtgaatcacttgagtccaggagtttgagaccagcctgggcaacgtggcgaaaccccgtctctaaaaaagatacaaaaattatccagscatggtggtgcatgcctatagtcccagctacttgggaggctaaagcaggaggatcatttgagcccaggaggttgcagtaagctgagatcgcaccaccgta

SEQ ID NO: 7093 - DNA, 201 bp, Homo sapiens
agtagtactcttgaaggcctttattggtggtgcaaaatgaggctttctcattgactctaaataggcttattagcagcacgcagaaggatttccactgtgaycttttctttgtccctagtcagagtgaaggcataggtctgaagcaggctgatagctttggaagtgaaaagtactggcaggctgagggcacagaatgggctg

SEQ ID NO: 7094 - DNA, 201 bp, Homo sapiens
aaaaaaaaaatcctgtatatttggaattggtctcctctgctgctatgaaaaacgattgacttgtttttgccctagatttctgatctgaaggggaaggcagsccagggattcagactctatgcagatcaaaggagagtgggaaatacttgttggcaggcaaagaggatatttgttcctatgggaagggccagcacacacact

SEQ ID NO: 7095 - DNA, 201 bp, Homo sapiens
gtcagagtgaaggcataggtctgaagcaggctgatagctttggaagtgaaaagtactggcaggctgagggcacagaatgggctggctgccagtgttgggtycagcaccctgaggagtgtcatttgtcagagccacttttatgaaacagaagccctcttttgtgtatttgtacctgtgaaagggagcagtggtatagctgat

SEQ ID NO: 7096 - DNA, 201 bp, Homo sapiens
aaatggtatttctggttttaaatctttgaggaattgccaaactgtcttccacagtgggtaaattaatttacattcccaccaacagtgtaaaagtgttcctrttcctccacaacctcacaagcatctgttgtttcttgactttttaatagtcgccattctgactggcatgaggtggtatctcattgtggttttgatttgcat

SEQ ID NO: 7097 - DNA, 201 bp, Homo sapiens
ccttctgtgggtatcccaaactctttgatattatataggtgaggaagtatgtattgcttactacctatttaagttcttcctagtattctggccctttaacmgtttattctgtttgtttttttttttccttctttgattacttacagttgtaataccttttaaagacatttgatatctcttccttgacttattccacattca

SEQ ID NO: 7098 - DNA, 201 bp, Homo sapiens
aaagaaaaaaaaaacacaaagcccacatgtatatataaataaatgtcattgcctaatacttcaattatgcttatatatcatggttggatggcttgatgtarcagtatctggaagatgagatcaaaattattgattagaagtgttaagttgaaatttcctatttctttcatacatccttttccttatagatgaatgtcaatt

SEQ ID NO: 7099 - DNA, 201 bp, Homo sapiens
acagtgtggtgattcctcaaggatctacaactagaaatactatttgacccagcgatcccattactgggtatatacccaaaggattataaatcatgctactrtgaagacacatgcacacgtatgtttattgtggcactattcccaatagcgaagacttggaaccaacccaaatgtccatcagtgacagactggattaagaaa

SEQ ID NO: 7100 - DNA, 201 bp, Homo sapiens
ctgtacagttaaagcaatatggttttcttttattttctttttttgcttatcatatccttccctcgcacccaaattgtatgactatttcaaaaatagatttytggtgtcatgactccttcgagctttgaattaattattctctcctggataatgcattttcacatgcatgctagcatatttaattggatattggccctcaga

SEQ ID NO: 7101 - DNA, 201 bp, Homo sapiens
ggttgggagtttgagaccagcgtgaccaaaatggagaaaccccgtctctactgaagattaaaaaacaaacaaacaaacaaaaaaaacaaacaaaaaaaaaaacaactagctggacatggtggtgcatgcctgtaatcccagctacttgggagactgaggcaggagaattgcttgaacccgggaggtggaggttgcagtgag

SEQ ID NO: 7102 - DNA, 201 bp, Homo sapiens
cagagatgggtttccatggcctggggcagcttcacccctgtgactttgcaggatacagctccctcctggctgctttcatgggctgagtgtttgcttttccrggtgcacagtgcaagctgtcattggatctaccattctggggaatggaggatggtggccctcttctcaaagctccactaggcagtgccccaatggggactc

SEQ ID NO: 7103 - DNA, 201 bp, Homo sapiens
cacctgaggttgggagtttgagaccagcgtgaccaaaatggagaaaccccgtctctactgaagattaaaaaacaaacaaacaaacaaaaaaaacaaacaamaaaaaaaacaactagctggacatggtggtgcatgcctgtaatcccagctacttgggagactgaggcaggagaattgcttgaacccgggaggtggaggttg

SEQ ID NO: 7104 - DNA, 201 bp, Homo sapiens
gaggtgggcagatcacctgaggttgggagtttgagaccagcgtgaccaaaatggagaaaccccgtctctactgaagattaaaaaacaaacaaacaaacaamaaaaacaaacaaaaaaaaaaacaactagctggacatggtggtgcatgcctgtaatcccagctacttgggagactgaggcaggagaattgcttgaacccgg

SEQ ID NO: 7105 - DNA, 201 bp, Homo sapiens
gccgaggtgggcagatcacctgaggttgggagtttgagaccagcgtgaccaaaatggagaaaccccgtctctactgaagattaaaaaacaaacaaacaaamaaaaaaaacaaacaaaaaaaaaaacaactagctggacatggtggtgcatgcctgtaatcccagctacttgggagactgaggcaggagaattgcttgaacc

SEQ ID NO: 7106 - DNA, 201 bp, Homo sapiens
aaaacaaaacaaacaacactgaaactatcattcaatgaataaaataaaggctcttactctaaagacaaataatttgaatggcaatgtcaaatacaaatatwccaattttttttggtgacaaaactccaactttccacacagcccgtaatggattcatgtgcagttgatgaatgaaagtccacatccaaagcttgcttagtc

SEQ ID NO: 7107 - DNA, 201 bp, Homo sapiens
agatgcactgttataataaggtaaacattgaaactgaatatatttgaattcaaaactacagattttaattactttttacttaaatattttaagcaattaamaatttaaccacagcaccttatcagcatcgtagtatctagtaattctatttttatatcaaagaagtatacatttttgtccatttttgaataattagtaaat

SEQ ID NO: 7108 - DNA, 201 bp, Homo sapiens
agccaaggccagaggttgtcgggcggggtcggggtgggggcggggcggggtggagaatgttggggtctgctgtaggttgttaataataaaagctaaaacctatgtactaggcacattaattcacatgttttttttttcttcaactcctactttaagttccagggtacatgtgcaggatgtgcaggtttgttaaataggtaa

SEQ ID NO: 7109 - DNA, 201 bp, Homo sapiens
ggcagatcacctgaggttgggagtttgagaccagcgtgaccaaaatggagaaaccccgtctctactgaagattaaaaaacaaacaaacaaacaaaaaaaamaaacaaaaaaaaaaacaactagctggacatggtggtgcatgcctgtaatcccagctacttgggagactgaggcaggagaattgcttgaacccgggaggtg

SEQ ID NO: 7110 - DNA, 201 bp, Homo sapiens
gttcaagtgattctcctgtctcagcctcccaagtagttgggagtataggtgtgtgtcaccatgcctggctaattttgtattttttttttttttttttttttagtacagatggggtttcaccatgttggtcaggctggtctccaactcctgacctctggtgatccacccacctcggcctcccaaagtgctggaattacaagc

SEQ ID NO: 7111 - DNA, 201 bp, Homo sapiens
ggttcaagtgattctcctgtctcagcctcccaagtagttgggagtataggtgtgtgtcaccatgcctggctaattttgtattttttttttttttttttttttagtacagatggggtttcaccatgttggtcaggctggtctccaactcctgacctctggtgatccacccacctcggcctcccaaagtgctggaattacaag

SEQ ID NO: 7112 - DNA, 201 bp, Homo sapiens
gggttcaagtgattctcctgtctcagcctcccaagtagttgggagtataggtgtgtgtcaccatgcctggctaattttgtattttttttttttttttttttttagtacagatggggtttcaccatgttggtcaggctggtctccaactcctgacctctggtgatccacccacctcggcctcccaaagtgctggaattacaa

SEQ ID NO: 7113 - DNA, 201 bp, Homo sapiens
ggtcatcagatatatgatgctcatatggagagctgagaggcttaaagaagagacaacaataatttatgattaaaaattaaggttggctgggtgcggtggckcatgcctgtatcccagcactttaggaggctgaggccagcatatcacgagatcaggagttcgagaccagtttggccaacatagtgaaacccggtatctact

SEQ ID NO: 7114 - DNA, 201 bp, Homo sapiens
tgggttcaagtgattctcctgtctcagcctcccaagtagttgggagtataggtgtgtgtcaccatgcctggctaattttgtattttttttttttttttttttttagtacagatggggtttcaccatgttggtcaggctggtctccaactcctgacctctggtgatccacccacctcggcctcccaaagtgctggaattaca

SEQ ID NO: 7115 - DNA, 201 bp, Homo sapiens
gggaggcagaggttgcagtgaggcgagatcacaccactgcactccagcctgggcaacagtgccagactccgtctcaaaaaaaaaaaaaaaaaaattaaggwtgacaggtttgccagcctgcttctgagctttctatctccaatagctggtaagtggtaacatagttattattctttgtagacttgctcgatcagaattaca

SEQ ID NO: 7116 - DNA, 201 bp, Homo sapiens
caacccttctccccaaccctcctcccacacctcatgcccccaaatcctcctcagcccctaaatcctcctccatccacctcacaccctcaaccctcttaccsccacctcacgctcccaaaccatccccaccaactcatgccctcaatcctcccctgcacttcatactcccaaaccctccccaccaactcacgccctcaaccc

SEQ ID NO: 7117 - DNA, 201 bp, Homo sapiens
tttcaggagcctggagacagatggaggggaagacagaagagagattaaggagaagaatggtaagagtataagaaaagagaaaatacatcttgcatgtccayccttaattcagtgagctccccagcttctctacgtggctgtcttgcagagataaaggggcgtccatagctcatcagggccccctgggatcaggccagaggg

SEQ ID NO: 7118 - DNA, 201 bp, Homo sapiens
gcttcagcagctatctagaaccatatggtggaagccacttactgagaactgtgaaacaagagcctgggtccctgacatatgaagccaccatacctaccttmaagtgtctttcacttgagggaaaaatacatctttcttaggtaagccactgttcatcgtttctgttgtgttatcagaacgaatcgatatacttaattaatc

SEQ ID NO: 7119 - DNA, 201 bp, Homo sapiens
taactaatttgcaaaaggcagtattgctggaaagtggaagaactgggattggaactcacgctgtctgactgtagaatctgggctcttaatcactgagtatwacctcagctggccccactcactgcctaacacacaggagactagctgtcttctttacctccagttgagggtagggctttacctagagttggagtcaaaaac

SEQ ID NO: 7120 - DNA, 201 bp, Homo sapiens
cggtggctcatgcctatagtcccagcactttgggaggccgagttgggcggatcacaaggtcaggagttcgagactagcctggccaacaatagggtgaaacyccgtctctactaaaaatacaaaaattagccgagtatggtggcgcatgcctgtagtcccagctacttgggaggctgagggagaagaatcgcttgaacccgg

SEQ ID NO: 7121 - DNA, 201 bp, Homo sapiens
agcaattctcctgtctcagcctcccaagtagctgggattacaggcacctgccaccatgcccagctaatttttgtaattttagtagagacggggtttcaccrtattggtcaggctggtctcgaactcctgacctcaggtgatccgcctgccttggcctcccaaagtgttgggattacaggcgtgagctaccgtgcccggcac

SEQ ID NO: 7122 - DNA, 201 bp, Homo sapiens
aaaaggacttgatggtgtggaattacataaatgtaaagcttctgggagtatccaaacttaggttgtttggtttaagtacataaagaagtttttcaattttyctgaaaaacaaaacaaacaacactgaaactatcattcaatgaataaaataaaggctcttactctaaagacaaataatttgaatggcaatgtcaaatacaa

SEQ ID NO: 7123 - DNA, 201 bp, Homo sapiens
agcttggtaggacatgccaatttccagctaaaggcatgaataaccctgtatttgtttttcatggcactctcattttctaattatatttgtcattgaacccraacacttttataggtatgtccatccatagcaatatatagtgactatgattcataaaataaggaaatcactcacaaaataaagcttcataaaataaaggga

SEQ ID NO: 7124 - DNA, 201 bp, Homo sapiens
tgaggcgggcagatcgcgaggtcaggagatcgagaccatcctggctaacacggtgaaaccccgtttctattaaaaatacaaaaaaaaaaaaaaattagccrggcgtggtggcaggcacctgtagtcccagctactcgggaggctgaggcaggagaatggtgtcagcccaggaggtggagcttgcagtgagctgagatcagg

SEQ ID NO: 7125 - DNA, 201 bp, Homo sapiens
ttttatcccaactaattctctcaataatgctatgagggaggcattatttacattttgtgtgtgcgaacacagaggttcaggtaggggaaatgatttttagyttgcaaggttcaactataaatggtcttctagctggtgagtggtttaatgtgaattctgatccagacctgaccgttttgaaggccgttcccttctcactgc

SEQ ID NO: 7126 - DNA, 201 bp, Homo sapiens
gtttcccatagaccatttctcttggctcttcaggaccaagtgcaggctgaaaaaattcatatttattgcttcactcataggagttcatgcacctggtatcygatcctttgtaaattaaaagatttgttgataggaagcgtctgctgatggagactgaaatcatggatcaaagaatggttggtaaatatagaattagagtag

SEQ ID NO: 7127 - DNA, 201 bp, Homo sapiens
gggaagtcccttccacctatgagcctgtaaagtaaaaaacaagttagttacttcctagatacaatggggtacaggcattgggtaaatacagccattccaawtgggagaaattggccaaaacaaaggggctaaaggtcccatgcacgtccaaaatctagcagggcagtccaatcttaaagctccaaaataatctcctttgac

SEQ ID NO: 7128 - DNA, 201 bp, Homo sapiens
taattgaactgagctgggtacctggagctttcctctgtgagtgctggttatatggtatgtgagtgatgagtcatacttaaagatgcaggatgaaagcgggkaatcatttttcaaaatcatgctgacaagctaaatggacccaaactaaaaagtacaaaattcagtgggaatatattcacatcacataaattcaattctaca

SEQ ID NO: 7129 - DNA, 201 bp, Homo sapiens
cacagttctctccatggctggggaggtctcacaatcatgacagaaggcaagaaggaacaactcacaacttacgtggtagcagggaagacagagagcgtgcrcagggaaactcccctttttaaaaccatcagatcttgtgagacttattcactttcacaagaacagcacaggaaagacccgccctcatgattcaattactcc

SEQ ID NO: 7130 - DNA, 201 bp, Homo sapiens
tgtccatttttgaataattagtaaatcagtagcgtttgcttatattgaataaccttgattgtgaacaatataagcaactctaatggactatttagaaaatsgtaatgttctaattagaaaataccagtatcaacaatgttatttgttgaatgcaaatgataattactttcagcaatcaactaaataccagattgactacaa

SEQ ID NO: 7131 - DNA, 201 bp, Homo sapiens
cagttttatggagtagagatggcttttatccccatgtatagatgatgcattcaagacacagagaagctgaataaattgccaaggttcacacagctagtaaytgaactgagctgggtacctggagctttcctctgtgagtgctggttatatggtatgtgagtgatgagtcatacttaaagatgcaggatgaaagcgggtaat

SEQ ID NO: 7132 - DNA, 201 bp, Homo sapiens
catgaaagctcagggctccaggagtgagcatctatattagtccattttcacactgctggtaaaaacatacccaagactgggtaatttataataaaagagakttaattgactcacagttctctccatggctggggaggtctcacaatcatgacagaaggcaagaaggaacaactcacaacttacgtggtagcagggaagaca

SEQ ID NO: 7133 - DNA, 201 bp, Homo sapiens
taccaaagtttaaaaatcccaagtatgtaataaaacaccaaattttaaaatataacttttaacatttccttttacttttctgaagaaacatttaagatgcmctgttataataaggtaaacattgaaactgaatatatttgaattcaaaactacagattttaattactttttacttaaatattttaagcaattaacaattta

SEQ ID NO: 7134 - DNA, 201 bp, Homo sapiens
acatcattttggtctctgctttaaagtgcctgcctttcaatttcttatttatgaagacatccctccctgtatagctttgcaaaattagactctaataatgyatataataaaatatcaaaagcccatatttccatataaaaacaatctattaaactaaaggtgactgactgcttccaaaactttttctcataatattagtca

SEQ ID NO: 7135 - DNA, 201 bp, Homo sapiens
ttagcttgcaaggttcaactataaatggtcttctagctggtgagtggtttaatgtgaattctgatccagacctgaccgttttgaaggccgttcccttctcrctgcacccatagccaactctcatgataacgaaaaaggacttgatggtgtggaattacataaatgtaaagcttctgggagtatccaaacttaggttgtttg

SEQ ID NO: 7136 - DNA, 201 bp, Homo sapiens
ttggacattgctctgtgacgtcaccaggacgaggcggggagcaatgcgccgctgccctggcaaccgcaatcaacacagtggaggcgagaagtctggccttkcgccggccggggagcttttcgccaaggctcctgtgggatgggatagcttgttctctgggctgcaggaaccaaaacattagaccaccctttctgtgacctt

SEQ ID NO: 7137 - DNA, 201 bp, Homo sapiens
aaaaaaaaaaaaaaaaaaaaaaccaagagaaacaaagtatctaccaagagttttgtaaacttttatcccaactaattctctcaataatgctatgagggagkcattatttacattttgtgtgtgcgaacacagaggttcaggtaggggaaatgatttttagcttgcaaggttcaactataaatggtcttctagctggtgagt

SEQ ID NO: 7138 - DNA, 201 bp, Homo sapiens
ctcgggttcaagcaattctcctgtctcagcctcccaagtagctgggattacaggcacctgccaccatgcccagctaatttttgtaattttagtagagacgsggtttcaccatattggtcaggctggtctcgaactcctgacctcaggtgatccgcctgccttggcctcccaaagtgttgggattacaggcgtgagctaccg

SEQ ID NO: 7139 - DNA, 201 bp, Homo sapiens
gactttacaaaattttacagtatgcattgtggagattaacctcattccttctaacttcttacctatttgtattagtctgttttcacactgctataaagatyctacctgagactgggtaatttagaaaggaaagaggcttaattgactcagttctgcatgactggggagatctcgggaaacttataatcatggtggaaggca

SEQ ID NO: 7140 - DNA, 201 bp, Homo sapiens
cccagactggtctggaactcctggcctcaagcaaacctcctgcctcagcctttcaaagtgctgggattacaggtgtgagttaccatgctaggcctagttcatatatatatatatatatatatatatatatataattttttttttttttttgagacagagtcttgctctgttgcccaggctgaagtggcatgatcttggctc

SEQ ID NO: 7141 - DNA, 201 bp, Homo sapiens
ccagactggtctggaactcctggcctcaagcaaacctcctgcctcagcctttcaaagtgctgggattacaggtgtgagttaccatgctaggcctagttcatatatatatatatatatatatatatatatataattttttttttttttttgagacagagtcttgctctgttgcccaggctgaagtggcatgatcttggctca

SEQ ID NO: 7142 - DNA, 201 bp, Homo sapiens
cagactggtctggaactcctggcctcaagcaaacctcctgcctcagcctttcaaagtgctgggattacaggtgtgagttaccatgctaggcctagttcatatatatatatatatatatatatatatatataattttttttttttttttgagacagagtcttgctctgttgcccaggctgaagtggcatgatcttggctcac

SEQ ID NO: 7143 - DNA, 201 bp, Homo sapiens
agactggtctggaactcctggcctcaagcaaacctcctgcctcagcctttcaaagtgctgggattacaggtgtgagttaccatgctaggcctagttcatatatatatatatatatatatatatatatataattttttttttttttttgagacagagtcttgctctgttgcccaggctgaagtggcatgatcttggctcact

SEQ ID NO: 7144 - DNA, 201 bp, Homo sapiens
gcaatatatagtgactatgattcataaaataaggaaatcactcacaaaataaagcttcataaaataaagggaacataaaatcagaaaattatagtattgtyatttttaactatttaaaaaattggttctgcttctttgctaggcattgtgctaagtgttttatgcacatcaactctaatccacatgagaactctgcatgac

SEQ ID NO: 7145 - DNA, 201 bp, Homo sapiens
atatatatatataattttttttttttttttgagacagagtcttgctctgttgcccaggctgaagtggcatgatcttggctcactgcaacctccgcctctcrggttcaagcaattctcctgtctcagcctcccaagtagctgggattacaggcacctgccaccatgcccagctaatttttgtaattttagtagagacggggt

SEQ ID NO: 7146 - DNA, 201 bp, Homo sapiens
attgctgctgttcattgattgtttactagtttagatgtgaaaggtacataccctatggctcagcaattccacttttaggaatctatgcagccactaaaaaraatgaggcatatagctatactgctttggaaagttatccaatgtatataaccagggaaaaaagttaactggggaccagtatgtttctcatggtcctcagta

SEQ ID NO: 7147 - DNA, 201 bp, Homo sapiens
atggattttactcaagacgtgggattttagcagttcattttcatttatttattgtttagagagagggtcttgctctgtcacccaggctggagggcagtggygtaatcacagttcattgcagccttgaattcctaggctgaaacaatcctcctgcctcagcctccaaagtaggtggtactacagccatgcaccattgcacct

SEQ ID NO: 7148 - DNA, 201 bp, Homo sapiens
tcctgacctctggtgatccacccacctcggcctcccaaagtgctggaattacaagcgtgagccaccaagcctcgcctctggctttcaaaagagagaatcayaataatacaaaaatttaaacctgttaaaataacactgtccatatcccaacagctcctaaacacgttaactaaaatggcataataaatttgcctgagttca

SEQ ID NO: 7149 - DNA, 201 bp, Homo sapiens
tgaacctgggaggcagaggttgcagtgaggcgagatcacaccactgcactccagcctgggcaacagtgccagactccgtctcaaaaaaaaaaaaaaaaaaattaaggttgacaggtttgccagcctgcttctgagctttctatctccaatagctggtaagtggtaacatagttattattctttgtagacttgctcgatcag

SEQ ID NO: 7150 - DNA, 201 bp, Homo sapiens
tgggcagatcacctgaggttgggagtttgagaccagcgtgaccaaaatggagaaaccccgtctctactgaagattaaaaaacaaacaaacaaacaaaaaamacaaacaaaaaaaaaaacaactagctggacatggtggtgcatgcctgtaatcccagctacttgggagactgaggcaggagaattgcttgaacccgggagg

SEQ ID NO: 7151 - DNA, 201 bp, Homo sapiens
ggagtttgtcacctttatgaattctttatgtttaacttaagaaatggatactcattttgtttgggggttgaggtaaaacgggtgggtcaaatagattaccygaaataaacataaactcatattctttttctcccttatccccaaaagtgtgttaaatataattcattgtggagaaaagaaattgttaagtgtgaatcaatt

SEQ ID NO: 7152 - DNA, 201 bp, Homo sapiens
cctttaccacaattaagctcaatgtgtctagggtttcgttgtcctaatccctttgtcttaaacagtgcacagaggtcctctgagaatgagatgccatagcraactcacaaggggctatgggacaaattttgagagaaacttggcatgtgttagacattgttcaatgtactagtttagggcagttcacatatttcaatatta

SEQ ID NO: 7153 - DNA, 201 bp, Homo sapiens
aatatggtggtaatgaaagatggtagtctgtaagcagagttctggccactattttgtatatttaaaaggtctatgcaaaagctttgtgatgaataaaggarattaggcttaaaaaaagttaactgcaacaattttaccttcaatttttatgatatggctccttgcatttgaaaaaggctatagatagtgataactgaaaga

SEQ ID NO: 7154 - DNA, 201 bp, Homo sapiens
tacaataacggacctattcagtatttctttaaacctagggggcacaatgaaaaaattactgaggaactaagggctcatgaactaagatagtttggggacckctgtctaatcccacaatctttcttcaaattaaaaagaaatgtaaaatatcatgcattccttttctaaaaaatatgtttcattttatttttcatgtttatc

SEQ ID NO: 7155 - DNA, 201 bp, Homo sapiens
tatttaaaaggtctatgcaaaagctttgtgatgaataaaggagattaggcttaaaaaaagttaactgcaacaattttaccttcaatttttatgatatggcwccttgcatttgaaaaaggctatagatagtgataactgaaagagtaactgatggtccttttcaccctaagcacagaggaagagttcttctgtatgcttact

SEQ ID NO: 7156 - DNA, 201 bp, Homo sapiens
cgtgagccaccgcgcccggcctaatcctttactttctaccataaagacacatacacatgtatgttcattgcagcactatttacagtagcaaaaacatggamtcagcctaaatacccataaatgatggactagataaagaaaatttggtacatatacacaatggaatactacacagccataaaaaagaatgaggtgacgtcc

SEQ ID NO: 7157 - DNA, 201 bp, Homo sapiens
acacttcatatattccaaggattgcactaagtgcttcacatatgttttctcgtttaacctttacagcaaccatgtctaatattatgtttatccctaaattrcattaaaaaaagctgggacccagataaatttgataattgaattttgataattgatttgaaagttgataatttgattaaattttgatgattgaaatttgat

SEQ ID NO: 7158 - DNA, 201 bp, Homo sapiens
cccatcagcttccctgtcctatttctagttttgacagaaagcggagtcccttcacaaacaaggttagctctgtaacaaagcgagcaaagaaaacagcgcamttggcatggcaacttccaacaacttcgaagagaaagcacaactctccaactttgtcgtgctctcattgacacattccccactcacatggaaaatgctgtt

SEQ ID NO: 7159 - DNA, 201 bp, Homo sapiens
ggaggttcccaaaccttaattcttgacttctgtgcacccacaggtccaacaccacatggaagctgccaaggcttggggcttgcacccactgaagccacagrtcgaactgtaccttggcccgttttagctacaactggagtggcttgatgcagggtatcaagtccctaggctgcacagagcagggggggccctgggccccac

SEQ ID NO: 7160 - DNA, 201 bp, Homo sapiens
tcacagcccaagatgagatggcacagcccatccaggaaagaggatattttcttttcctctggactcagaataaagctcagagaacatatacacaaaatttygaaaatttctaaataaatttcaaggcaaacaaaattgttttataagaccttaaattgtttttctctttaaaatagtataagcacaagatgtgaaggaggc

SEQ ID NO: 7161 - DNA, 201 bp, Homo sapiens
gtcacctggtcaggagaaaaaaaagcagcagcagaataggaggggcagactttctttacattccacagttcgttgcctatggatgactttcctttcctttyatgttttttagcattttccaataaaaaaacccaatcataaaaatatggaatatctcacttaagaaaaagcttaaatcgggatataattttcattttgtgt

SEQ ID NO: 7162 - DNA, 201 bp, Homo sapiens
cgctgccctggcaaccgcaatcaacacagtggaggcgagaagtctggccttgcgccggccggggagcttttcgccaaggctcctgtgggatgggatagctygttctctgggctgcaggaaccaaaacattagaccaccctttctgtgaccttgggcatgccgccctcggttccgagccgcaagtctttctttcggggaaaa

SEQ ID NO: 7163 - DNA, 201 bp, Homo sapiens
cccctcgataccttaattcccgcgcgaccccggactcctggctcccgtaactcacgagaagaaggggtcatcctcaaaactgctgttcagcatcctgaacrttctggctctgtcttgggtggcggcagccgcggacagattggaaaaacgatgttaactcgccgcggccgcgacaagagctagcctccagtacggacgacg

SEQ ID NO: 7164 - DNA, 201 bp, Homo sapiens
tatataatgtacagtcctactcatatgccttaaaactcaccttctgagtgaggaatgagatgagccaagtaaactgaaaattgcctaatagggtaatagcyctcatttacacttcatatattccaaggattgcactaagtgcttcacatatgttttctcgtttaacctttacagcaaccatgtctaatattatgtttatcc

SEQ ID NO: 7165 - DNA, 201 bp, Homo sapiens
tgctgctcattctttgggtccgcactacctttaagagctgtaacacttgctgtgaaggtctgtggtttcactcctgaagtcagcgagaccatgaacccacyggaaggaagaaactccggacacatcagaacatctgaaggacaaactctggacacaccatctttaagagctgtaacactcaccgcgagggtctgcggcttc

SEQ ID NO: 7166 - DNA, 201 bp, Homo sapiens
atgaatcgtccttccctaaataccaatagcagtcctctccttttaagaaatacactctctagagcaaatatttcctccagcgaagtaaaaatttaacgaakaattgagttaacaaaggaaaaaagtggcagacttttaaagttatatttacttttacagcttttatctgtagatgtgtatgcctatgactagtggtttatt

SEQ ID NO: 7167 - DNA, 201 bp, Homo sapiens
cttggaaatatatcatgacagcattttcttttagaaaaaactcaccaaatagagttgaatatattaatcaatgtccatccctatgataaaaggttaagatrattacagaatttacagtgttctttcttatatccatttgtattcctgctgtgctctactgactcaaatgttttcttatgaagagtacttacttttccatta

SEQ ID NO: 7168 - DNA, 201 bp, Homo sapiens
cttcattaaaacatatttattgagaccttctgtatgtcaggcattaggccagattctggagaaacaatgatagccaaaataacttggaaatatatcatgayagcattttcttttagaaaaaactcaccaaatagagttgaatatattaatcaatgtccatccctatgataaaaggttaagataattacagaatttacagtg

SEQ ID NO: 7169 - DNA, 201 bp, Homo sapiens
agaagaaggggtcatcctcaaaactgctgttcagcatcctgaacattctggctctgtcttgggtggcggcagccgcggacagattggaaaaacgatgttawctcgccgcggccgcgacaagagctagcctccagtacggacgacgcctcactcgccgcggcgcaggcggtgcccgccgggataggaggtgcgtgacaccga

SEQ ID NO: 7170 - DNA, 201 bp, Homo sapiens
tctactaaaaatacaaaaattagccgagtatggtggcgcatgcctgtagtcccagctacttgggaggctgagggagaagaatcgcttgaacccgggtggcrgaggttgcagtgagccgagatcatgacactgccctccagcctgggcgacagagcaagactccatcgcaaaaaaaaaaaaaaaaaaaaaaaaaccaagaga

SEQ ID NO: 7171 - DNA, 201 bp, Homo sapiens
acgagaagaaggggtcatcctcaaaactgctgttcagcatcctgaacattctggctctgtcttgggtggcggcagccgcggacagattggaaaaacgatgytaactcgccgcggccgcgacaagagctagcctccagtacggacgacgcctcactcgccgcggcgcaggcggtgcccgccgggataggaggtgcgtgacac

SEQ ID NO: 7172 - DNA, 201 bp, Homo sapiens
aaatttaacgaagaattgagttaacaaaggaaaaaagtggcagacttttaaagttatatttacttttacagcttttatctgtagatgtgtatgcctatgamtagtggtttattttgcacaaattataattgaggcatattttattttgaaaactgttgagtaaataccacttttggggggttggtaacaagagattggctt

SEQ ID NO: 7173 - DNA, 201 bp, Homo sapiens
cttctgccagatgccctaaatcatctccctcaagttcaaagttccacaaatctctagggcaggggcaaaatgccgccagtctctttggtaaaacataacargagtcacctttacttcagttcctaacaagttcctcatctccatctgagaccacctcagcctggatttcattgtccatatcattatcagcattttggtcaa

SEQ ID NO: 7174 - DNA, 201 bp, Homo sapiens
ggatatctcataagaatgccccactacctcggtaccaatgttctgtattagtctgttttcacactgctataaagatactacctgaggtctcaggaaacttacaatcatggtggaaggccaaggggaagcagggtatgtcttacatggtggtgggtgagagagagagagaagggggaagcaccagacacttatcaaacaacc

SEQ ID NO: 7175 - DNA, 201 bp, Homo sapiens
attgcactccagcctgggcaacaagagcgaaactccatctcaaacaaacagacaaacaaacaaacaaacaaaaaaagagttaataataataataataatawctaacatttgttgagtttctactgtgtgccaagcactgctctaagtgctttacaaattttaactcccttaatcccccaggtgatctaatgagataaacac

SEQ ID NO: 7176 - DNA, 201 bp, Homo sapiens
attttatttttcatgtttatcttctttacagtcagctgacttaccagtcctctaacagttttgctttatatctttttgaaagatgggaaaatggtgcatascgattaagtgacctgtaagagcatagatcccaaggtcttcaaactcccagtagggctgcctctagtccataatggcatctttgctcaaattagaaaaagt

SEQ ID NO: 7177 - DNA, 201 bp, Homo sapiens
gataatatttatataaaagagagtgggcatgagctatgtgtttcacatctctatgttcctaaggtcagtggatgattcattaaggagtttgtcacctttaygaattctttatgtttaacttaagaaatggatactcattttgtttgggggttgaggtaaaacgggtgggtcaaatagattacccgaaataaacataaactc

SEQ ID NO: 7178 - DNA, 201 bp, Homo sapiens
aacatggactcagcctaaatacccataaatgatggactagataaagaaaatttggtacatatacacaatggaatactacacagccataaaaaagaatgagrtgacgtcctttgcagcaacatgaatccagctggaggtcattatcctaaggtgattaatgtaggaagagaaaatcaaatactgcatgttctcacttataag

SEQ ID NO: 7179 - DNA, 201 bp, Homo sapiens
ctgtgacgtcaccaggacgaggcggggagcaatgcgccgctgccctggcaaccgcaatcaacacagtggaggcgagaagtctggccttgcgccggccgggsagcttttcgccaaggctcctgtgggatgggatagcttgttctctgggctgcaggaaccaaaacattagaccaccctttctgtgaccttgggcatgccgcc

SEQ ID NO: 7180 - DNA, 201 bp, Homo sapiens
cactttaatgtggctatctagagtgttatttttaaatccttgataagatttgaagagagttcacactgtagtttggaggccccactgccaaggcaatcaaytgaagtctgtccagaggacaagtaaattattttggaaaacattaaggacctggaataccttcatctctttgtcatatgcttagatgtctttactatttga

SEQ ID NO: 7181 - DNA, 201 bp, Homo sapiens
ctttactgaactagctttggaaattatgctgtgtcccttcggatgtattctgttggctatgaccaagttactaagattgacacagagtcatgtaagggacrtagatcttcacctctcaatgggagaagcatcaaaaagtttgcagacatgttttataacaccattacagagagtatcaactctattatatattgtcacttc

SEQ ID NO: 7182 - DNA, 201 bp, Homo sapiens
cacagaggtcctctgagaatgagatgccatagcaaactcacaaggggctatgggacaaattttgagagaaacttggcatgtgttagacattgttcaatgtrctagtttagggcagttcacatatttcaatattagattgcactacattgttttagatgatgtcatatcattggaaaggtaggtttctgaaagttactatga

SEQ ID NO: 7183 - DNA, 201 bp, Homo sapiens
tttagggcagttcacatatttcaatattagattgcactacattgttttagatgatgtcatatcattggaaaggtaggtttctgaaagttactatgatgaaratgaagtacctgtcaatgtggaacaggaaagattggtggcaacattcagtctgtttctaaagtttgaaaaattgtgctgtgctaggcgggcacccatctg

SEQ ID NO: 7184 - DNA, 201 bp, Homo sapiens
aatagacaaggctgtaatgtatatgatttgactggtgctcgcttaggtgttgtatacatgtccatggcagcgctgttcctaatcttgaattctttccgctrcataggagttaattgagtgccaagcttcatccccaaactcccaaactcatgtgcaagaaatgtaattttattttcctgcaatcaaccttaatttatcttc

SEQ ID NO: 7185 - DNA, 201 bp, Homo sapiens
agagaacatatacacaaaatttcgaaaatttctaaataaatttcaaggcaaacaaaattgttttataagaccttaaattgtttttctctttaaaatagtayaagcacaagatgtgaaggaggccacacttaaaaaaaaacttgaaatggagtaagttatgtgataaaagatggtgttaaaatagttctggattaaggccaa

SEQ ID NO: 7186 - DNA, 201 bp, Homo sapiens
gtggctcatgcctgtaatcccagcactttgggaggctgaggcgggcagatcgcgaggtcaggagatcgagaccatcctggctaacacggtgaaaccccgtytctattaaaaatacaaaaaaaaaaaaaaattagccgggcgtggtggcaggcacctgtagtcccagctactcgggaggctgaggcaggagaatggtgtcag

SEQ ID NO: 7187 - DNA, 201 bp, Homo sapiens
aaaaaattaaggttgacaggtttgccagcctgcttctgagctttctatctccaatagctggtaagtggtaacatagttattattctttgtagacttgctcratcagaattacatttttgtagctcagaagattcacagttcctgtttcgtatcaaatagaaaattctgggtcgtactaaatatttataaactttcatacta

SEQ ID NO: 7188 - DNA, 201 bp, Homo sapiens
tgcagtgagctgagatcaggccactgcactccagcctgggcaacagagcgagactccatctcaaaaaaaaaaaaaaaaacaaacaaaaatttgttttttawaaaaacatttcaagtatgaaatgaaatatcagacattataattttggatgatcttccattttcacctcatgtaattagactgcagatgattcaagtttac

SEQ ID NO: 7189 - DNA, 201 bp, Homo sapiens
aaagatctagaaccaaaaataccatttgacctagaaattacattactagttacatacccaaaggaatataaatcattctattacaaagatacatgcacacrtatgttcactgtagcactattcacaataatgaatcatttggaatcaacccaaatgcccgtcaacattagactggttgaagcaaatgtggtacatatacac

SEQ ID NO: 7190 - DNA, 201 bp, Homo sapiens
ttgatttgtactcctctgatgatcagtgatgttgagcttttttcatacgtttattggctgcataaatccctttttgagaagtgtctgttcatatcttttgyccactttttgatggggttgtctgtctttttcttgtaaatatgtttaagttccttgtacattctggatattagccctttgtcagatggatagattgcaaaa

SEQ ID NO: 7191 - DNA, 201 bp, Homo sapiens
aacagatatatcacagtggcaactggaattactggagagtccctcaggtgtgggaggcaaccgtgggagaacacagaggttcaccatgttatttttacatyttaaaaaaatatgtacacctagatactaatcggatctctccaggattaggtataataagtaaggaaaatcttgaaggctgtattttatgtactttgttta

SEQ ID NO: 7192 - DNA, 201 bp, Homo sapiens
attaaagaatggtcctttcctatcagggaaggtcatactcttcaaccaagttttcaacttgaggagggctacacgtggaacagtggagaaaggggacaccygcatagccagacatcagctgaatcaacctggtgatcagtgggtggcagatgttgaagtgagatcaccctcacatgagaccttcaccttgagtgatgcact

SEQ ID NO: 7193 - DNA, 201 bp, Homo sapiens
ttagaggaacaatcatgcagagcggtttgccaatacataaaattaaatcttttgttcctaagatagaaaaacatcagtaactgggttgaattgaatatagmcatatctgaaagacaggcaaaacatggtttagcttgcttggcactgaaagcacattttcttaactatatcactcctcttttttttaaaataaatttatgg

SEQ ID NO: 7194 - DNA, 201 bp, Homo sapiens
catctacttgtctatgcgtcttactacatattttgggtgactttggatccattatatgagcataaaactctgatcatgtaacttcttcaacacaaactgcyaagcgacagattggaaagggctgcacatgccttggccatgcgtcataaccctcattagagtaaaccttgttaatagtctcacattgtttctactcactat

SEQ ID NO: 7195 - DNA, 201 bp, Homo sapiens
tcattcatggattaaatgtatgacaatgaaatagctgatatgagtgggtagactatattgtagatttaagtttttgttgaaattctaaactttcctttagmctgatttctttaagcctattaagaacatcctaatttccccaattattggattactgtactacttaaagttaaatatcttattttttcctaacatttaaaa

SEQ ID NO: 7196 - DNA, 201 bp, Homo sapiens
tgctattattacatataccaagttattcttatgggcatcttaatgactattagtgcatattggcaataatcataacagttgaataccttccacaggtgttsaataccttccacaggtgttcaacacccaggtactaaccaaacttggcatctgatgaagttctttctattagggagataattttacaacacatctaactat

SEQ ID NO: 7197 - DNA, 201 bp, Homo sapiens
aaccaatatatacattttgcagttgtccatttaaatcttaaagccacaattgctctaacagcaacaccagtgaagccattctgtgtgttattcagttgcartattcaggaaatttgctagatatagagaagaacattttgattatagcatttgctaaaatctgctgtggaagaagatcatgtatccacttccaccttggat

SEQ ID NO: 7198 - DNA, 201 bp, Homo sapiens
tgacagctacaattcaagataagatttgggtggggacacagccaacccatatcaatctggctcctggcacaaaggggacactggtgctagaggtggcatcragagtccaaggccaggagagtcagcagagctagtctagagcctggtgcctctgatagtttgggcagccaggctagacccgttctgctgtctgctctcaag

SEQ ID NO: 7199 - DNA, 201 bp, Homo sapiens
gagctagtctagagcctggtgcctctgatagtttgggcagccaggctagacccgttctgctgtctgctctcaagtcttctccaaggttctgagagttatcyccatatccctttaataaacacttatcttttaaaccagccagagtcagtttctgttgcttgcagtcaggtttttgctctgacagtggcatggacctttaac

SEQ ID NO: 7200 - DNA, 201 bp, Homo sapiens
cattatgaaccctggaaatactgtggaatggcggacaggactgggggtgactacctgtaggaatctaccttataccttagatgagaacacgtaagataagacaagtcagcaaagtttaaatctggtggattaaaaaaatttttatatcaaaataaacatcatatggctaaaaaattaaaatgtgtgacaaagcatatagtg

SEQ ID NO: 7201 - DNA, 201 bp, Homo sapiens
attatgaaccctggaaatactgtggaatggcggacaggactgggggtgactacctgtaggaatctaccttataccttagatgagaacacgtaagataagacaagtcagcaaagtttaaatctggtggattaaaaaaatttttatatcaaaataaacatcatatggctaaaaaattaaaatgtgtgacaaagcatatagtga

SEQ ID NO: 7202 - DNA, 201 bp, Homo sapiens
ttatgaaccctggaaatactgtggaatggcggacaggactgggggtgactacctgtaggaatctaccttataccttagatgagaacacgtaagataagacaagtcagcaaagtttaaatctggtggattaaaaaaatttttatatcaaaataaacatcatatggctaaaaaattaaaatgtgtgacaaagcatatagtgaa

SEQ ID NO: 7203 - DNA, 201 bp, Homo sapiens
gtaatcccagcagtttgggaggccgaggcgggcggatcatgaggtcaggagatcaagagcatcctggctaacacagtgaaaccccatctctactaaaaatvcaaaaaaaatacaaaaaaaaaaaaaaaaaaaaaaaagcctgtcctggtggcgggcgcctgtagttccagctactcgggaggctgaggcaggagaatggca

SEQ ID NO: 7204 - DNA, 201 bp, Homo sapiens
ctgcaacctccccctttcagtttcaagcgattcttatgcctcggcattccgagtagctgggactacaggcacgtgccaccacgcctggctaatttttgtattttttttagtagagactgggtttcaccatgttggccaggctggtctagaattcctgacctcaagtgatccgcctacctctgcctcccaaagtgctgggat

SEQ ID NO: 7205 - DNA, 201 bp, Homo sapiens
tgtgcaggtaggttctatagatagtgtgtcctgggggtttggggtacagattgttacccaggtaacaagcatattacccaataggtaggttttcttttttwaaaaaatttatttaattcaataggtttttggggatttggttacatggataagttctttagtggtgaattctgaaattttggtaaacccatcacctgagtg

SEQ ID NO: 7206 - DNA, 201 bp, Homo sapiens
gtatcaaatcactaagtattaatatatactattataatatgtagtaccatttaacatgagtaagcctgtgctaccatttttattaagtttttatctttttwaaaaaaaatgtcactgatgaagtttttagtgttatgcccctcatcctacttttcccataaactgtgaattttattgtgtgatttgtacagtgcaatgatt

SEQ ID NO: 7207 - DNA, 201 bp, Homo sapiens
tatttagcaaagcaataaaatgactgtcttcattgttgttgttggagatatgtacgtagagaagaaaagctattgaaaggactttttaaagcaaagaagtgggggtgcttagaaaaacagggagcaataataccatgcctatcctgtggtcctactgacctaatggggtggaaaggggatagagagagaagattagtaaca

SEQ ID NO: 7208 - DNA, 201 bp, Homo sapiens
acaaaagacaccctagacgtttctgtggagaggtagtgatattacattttttttttctgtgtcacgggaattagctgtggataaaatgtatattttatggkttccaagctgtgcactgatgtgctccaggccattacagcaatctcatgaggagccatggagtattttaaacactcaaggtaaacacagagatatgtgaaa

SEQ ID NO: 7209 - DNA, 201 bp, Homo sapiens
gagaaataatttcacacatacagaagaaaccagcacctgtgacttgagaaatcacttggaaagctgttactgcaatgatatatatattatctttttttaatttttttttttttttttgagacgaagtcttgctctgttgcccaggctggagttcaatggcacgatctcggcactgcaaactccacctcctgggttcaagca

SEQ ID NO: 7210 - DNA, 201 bp, Homo sapiens
agaaataatttcacacatacagaagaaaccagcacctgtgacttgagaaatcacttggaaagctgttactgcaatgatatatatattatctttttttaatttttttttttttttttgagacgaagtcttgctctgttgcccaggctggagttcaatggcacgatctcggcactgcaaactccacctcctgggttcaagcaa

SEQ ID NO: 7211 - DNA, 201 bp, Homo sapiens
gctaagaaataagtgcaaattagcagtattttttataattcaagataaataatagtggtagaaatatttaattcaaaataaaatagtggctaaaaatgtcatgtgtaaaatggattatagataaaaataatttgataaagtatagttagttggttaattctgaaattgtagtactacaattggaagttaattctagaaaaa

SEQ ID NO: 7212 - DNA, 201 bp, Homo sapiens
ctaagaaataagtgcaaattagcagtattttttataattcaagataaataatagtggtagaaatatttaattcaaaataaaatagtggctaaaaatgtcatgtgtaaaatggattatagataaaaataatttgataaagtatagttagttggttaattctgaaattgtagtactacaattggaagttaattctagaaaaaa

SEQ ID NO: 7213 - DNA, 201 bp, Homo sapiens
gaagccagggacccttatcactaatgacagagaggaagccaaaggggcttgaccatagatattgtggagatagttaataaagcatgtattagtttcttctcacactgctgtgaagaaatacctgagactgggtaatttataaaggaaagaggtttaattgactcacagttctgcagagctggggaggcctcaggaaactta

SEQ ID NO: 7214 - DNA, 201 bp, Homo sapiens
aagccagggacccttatcactaatgacagagaggaagccaaaggggcttgaccatagatattgtggagatagttaataaagcatgtattagtttcttctcacactgctgtgaagaaatacctgagactgggtaatttataaaggaaagaggtttaattgactcacagttctgcagagctggggaggcctcaggaaacttaa

SEQ ID NO: 7215 - DNA, 201 bp, Homo sapiens
caagagaccaagaatagccaaagctatcctaagcaaaagaacaaaactggaggaattacattacctgacttcaaattatactacagagctatagtaaccaraacagcatgctactggcataaaaatagacacacagatcagtgaaacagactagggaatccagaaagaaatccacacacctacagtaaactcatttttgac

SEQ ID NO: 7216 - DNA, 201 bp, Homo sapiens
ctctcagaagtgttttatagtttttagtgtagatgtctaacatatcttttattaggttaatgcctaggtatctaatttttttaatgctttatatatgttaytttttaaaattccattttctaaatgttcattactagtgtgggaaaatacaattgctttttgtatatgactttgtatcttatacatttttaagttaattta

SEQ ID NO: 7217 - DNA, 201 bp, Homo sapiens
cggggtttcaccatgttagccgggatggtctcgatctcctgacctcgtgatccacccacctcaggctcccaaagtgctgggattacaggcatgagccaccrcacccagccagaatacacattattttcctcagcacatgaatcgttcttaaggataggccagatgttaggtcacaaaacgaaccttaaaacattaaaaaaa

SEQ ID NO: 7218 - DNA, 201 bp, Homo sapiens
ttttgagatggagtctcgctctgtcgcccaggctggtgcagtggcgcgatctcggctcactgcaagctccgcctcccgggttcatgccattctcctgcctmagcctcctgagtagctgggactacaggcgcccgccaacacgcccggctaattttttgtattttttagtagagacggtgtttcaccatgttagccagggag

SEQ ID NO: 7219 - DNA, 201 bp, Homo sapiens
ctcgtgatccacccacctcaggctcccaaagtgctgggattacaggcatgagccaccacacccagccagaatacacattattttcctcagcacatgaatcrttcttaaggataggccagatgttaggtcacaaaacgaaccttaaaacattaaaaaaactgagataatatcaagcatcttctctgacaaaaataaaactag

SEQ ID NO: 7220 - DNA, 201 bp, Homo sapiens
acaaaatggacaaacctttagccagtttaagaaaaaaagaaagaagatcaaaataaataaaatcagaaatgaaaaaggagacattacaactgatatctgcrgtattcaaaggatcattagtggctactctgagcaactatatgctaataaatggaaacatatagaagcaatggacaagttcctagatacatataacctgcc

SEQ ID NO: 7221 - DNA, 201 bp, Homo sapiens
atcatatcaaaagaatgaaggatcaaaagcatatgatcattttaattgatgctgaaaaagcatttggtaaaattcaacatccttttatgataaaaaccctaaaaaaaaaaactggggatagaaggaacatacctgaacataataaaagccatatataacctacccacagctagtattatactgaatggggaaaaactgaaa

SEQ ID NO: 7222 - DNA, 201 bp, Homo sapiens
tcatatcaaaagaatgaaggatcaaaagcatatgatcattttaattgatgctgaaaaagcatttggtaaaattcaacatccttttatgataaaaaccctaaaaaaaaaaactggggatagaaggaacatacctgaacataataaaagccatatataacctacccacagctagtattatactgaatggggaaaaactgaaag

SEQ ID NO: 7223 - DNA, 201 bp, Homo sapiens
catccttttatgataaaaaccctaaaaaaaaaaactggggatagaaggaacatacctgaacataataaaagccatatataacctacccacagctagtattrtactgaatggggaaaaactgaaagcctttcctctaaggtctggaacatgacaaagatgcccacttcaccaccgttattcaacacagtactggacatccca

SEQ ID NO: 7224 - DNA, 201 bp, Homo sapiens
attagtagttgtcttgaaacctgaaatcggtttggccacaggataatgcctgctaattccagctgtgtagggagctggatgaaaaaggaagcagatacagwtgccatgtaaaataatattttaaagcaataattatttgtacatttctttatttctgtttgtgcatttattattttagttagtgagttttttatatggaaa

SEQ ID NO: 7225 - DNA, 201 bp, Homo sapiens
tcagacttcaccactatataatttatccatgtaaccaaaaaccacttgtaccccaaaaggtattggaaatatatatatatttcctatatatatatatattscaatataatatatataattccaatataatatgtattccaattcatatattccaatataatatataatatatattataaaaatggctaaaaagcatgtgat

SEQ ID NO: 7226 - DNA, 201 bp, Homo sapiens
acgaccactaagtttagatggcacaggtaactttgagaatatcacattgggagcaaatatcatgtggaattaaaatacagatcattctgctctgttccatttattattattattattattattatttaaaattttattattattatactttaagttttagggtacatgtgcacaatgttcagttttgttacatatgtatac

SEQ ID NO: 7227 - DNA, 201 bp, Homo sapiens
cgaccactaagtttagatggcacaggtaactttgagaatatcacattgggagcaaatatcatgtggaattaaaatacagatcattctgctctgttccatttattattattattattattattatttaaaattttattattattatactttaagttttagggtacatgtgcacaatgttcagttttgttacatatgtatact

SEQ ID NO: 7228 - DNA, 201 bp, Homo sapiens
gaccactaagtttagatggcacaggtaactttgagaatatcacattgggagcaaatatcatgtggaattaaaatacagatcattctgctctgttccatttattattattattattattattatttaaaattttattattattatactttaagttttagggtacatgtgcacaatgttcagttttgttacatatgtatactt

SEQ ID NO: 7229 - DNA, 201 bp, Homo sapiens
ccctcaacaggccctggtgtgtgctgttcccctctctgtatccatgtgttctcaatgttcaactcccacttatgagtgagaacacgtgctgttttgttctstgttcctgtgttaggttgctgaggatgatgacttccagcttcatccatgtccctgcaaaggacatgatctcattccttcttatggctgcatagtattcca

SEQ ID NO: 7230 - DNA, 201 bp, Homo sapiens
gagtatacactgcatgatatagaatggtgacaaggacatatttgtaagggaagatcctccatgccaagactatagttttcattgttaatttacttacaagrtataagaaatacatttaggattattaaaagcctcttcatttcattccattgccagtttattgctatttgagaaccgaagttttattctttacttttagat

SEQ ID NO: 7231 - DNA, 201 bp, Homo sapiens
aacacaaattagatcttatcattgcatcttggcctttggctatatagctatatatagaatgaaacaaaagaatatatatacatatatatttatatatgtartataaaatagtcaaaatagatcttattatagccaattgatcttattgtacctgaaacatttcaatggctttttactgctctttggaaaaaattacaaaat

SEQ ID NO: 7232 - DNA, 201 bp, Homo sapiens
tcagttttgttacatatgtatacttgtgccatgttggtgtgctgcacccattaactcgtcatttagcattaggtatatctcctaatgctatccctcccccmtccccccaccccacaacatttattagggtaggaagtaaagaatgagattagttctgcctgaggtgggcagaatagaaaagcttatgtcaagaagtgggta

SEQ ID NO: 7233 - DNA, 201 bp, Homo sapiens; identical to SEQ ID NO: 690

SEQ ID NO: 7234 - DNA, 201 bp, Homo sapiens
tttggttgtttatcaatggtggggcaataaattaatttgaaatgattgtacagctcagtgtcactaaaattatttacaactttcaagattttaagtagtctttttttttttctatgcagaatgatacttatgccaccgtttgtgaggtgagttggcaatcacaaaaaagatgtaatcaagccacatgtcttcatctctggt

SEQ ID NO: 7235 - DNA, 201 bp, Homo sapiens
aatggaggggagagaaggaagaggcacattcagagatatctctgctgattccattttcttccccacaatgtatagtgctctatcattaaatataggacatkaaaagagaatcctttaattgcaactttctttcttgcttgcttgcttgcttactttcttgctttcttcctctctttctccctctctttctctctctttctt

SEQ ID NO: 7236 - DNA, 201 bp, Homo sapiens
tcatcaaattatgtactgtgtttttcattaatgagataaaatgtaaatatcattaagttttcatagattttaaaactcagcattggtataaagatattcattgaaatattcagctactctacaaatttatagtccacttttaattttccaaggaagaccgggatatataaaataaataggtaatccctaagcatcatttta

SEQ ID NO: 7237 - DNA, 201 bp, Homo sapiens
taggaccagattttgtcctcaagttcagtaggtacactcacttctctcttaatgacagacaaatgtacatcctgagcagacttgatgtcagagaatgccactgtttttttttctctcttttttatttatttatttattttattatactttaagttttagtgtacatgtgcccaacgtgcaggtttgttacatatgtataca

SEQ ID NO: 7238 - DNA, 201 bp, Homo sapiens
aggaccagattttgtcctcaagttcagtaggtacactcacttctctcttaatgacagacaaatgtacatcctgagcagacttgatgtcagagaatgccactgtttttttttctctcttttttatttatttatttattttattatactttaagttttagtgtacatgtgcccaacgtgcaggtttgttacatatgtatacat

SEQ ID NO: 7239 - DNA, 201 bp, Homo sapiens
gaccagattttgtcctcaagttcagtaggtacactcacttctctcttaatgacagacaaatgtacatcctgagcagacttgatgtcagagaatgccactgtttttttttctctcttttttatttatttatttattttattatactttaagttttagtgtacatgtgcccaacgtgcaggtttgttacatatgtatacatgt

SEQ ID NO: 7240 - DNA, 201 bp, Homo sapiens
gtcctcaagttcagtaggtacactcacttctctcttaatgacagacaaatgtacatcctgagcagacttgatgtcagagaatgccactgtttttttttctstcttttttatttatttatttattttattatactttaagttttagtgtacatgtgcccaacgtgcaggtttgttacatatgtatacatgtgccatgttggt

SEQ ID NO: 7241 - DNA, 201 bp, Homo sapiens
gtcacaatcatgcaatatttttggataggcagctttgaaattgatcactaaactatcagttttgactgatgtgtttgattattttgtttggggcagggggrttaataacaaattgctgtattgtggagcagaaaaaggtagacaagttgaactttgctctatctaaaggtataaaaaatgcaactagaaggaggaaggagc

SEQ ID NO: 7242 - DNA, 201 bp, Homo sapiens
aatggggtgttaacaaaatttgaaattttctacaatatatccaatcaaagtattacaaacaaaacatgtgaagactggattgctgtcaatgtcactccctyagtgatgtcttttcaacttgaaggcatgagtcccagatgctttattgccttccaggtatgagagagaaaacagaagatatgagagtcttaatagcggcat

SEQ ID NO: 7243 - DNA, 201 bp, Homo sapiens
atgggtatgtgttagccttgtaaagatgaattctcttccattggcaataaataatctttgagaaacttgcttgctaatgaaacattgtagtaccagatgarcctatctatgcatcttactttaggtgaatttaattaaattcaggcaaagttttcattctgtagagccaggagggaatgttttttcaaacataaatcaact

SEQ ID NO: 7244 - DNA, 201 bp, Homo sapiens
ggtagtccagagtagcatctagagtcaaggaaacccaacatgcagtgatgaggtatcccaacaggttgatacatgggatatcagaaagagagaatagtcaragatccaagcaggcaggcagcattatgaaaatctgtcagcagggaacagggcactagccaccagactgaaattagggagtaggatcctaggcctagagaa

SEQ ID NO: 7245 - DNA, 201 bp, Homo sapiens
ctgcagagcaagtagtctatagaggccaatcttctgagcctgggtacaggcaatcctcagacaaaaggttctcctttcttttatcttcaataaggagcatrttttgcaagtgaattctgaagctgtttggcttttgacatgcttgtattcatctaaatgtgtgataatggtcaagtatacccagtaagagagagttctctc

SEQ ID NO: 7246 - DNA, 201 bp, Homo sapiens
tccacccttttgcttttatgagttaacatgcatttttgaaggggtaggaaaagattcaattttcaactcattatctctcacctgatttttatttgcttgcrattcaaccaacttttgaacaaaatcatgaaaacacagtactattaagcactcggttgcaaaattcatctaacagatagaattcttactgtctaaatgttt

SEQ ID NO: 7247 - DNA, 201 bp, Homo sapiens
acccctcatgttatataataattttgctgtgaattggtttgtttattctctgcagttcataaatatgttgaaggcttcactaaaatatgtaaacaggatgsgaaacgtatactaaatcttgaaattaaataattccaaacccaaactgaggtatttaaattaatccttacctaagcaaacctgggcttatcaggcaccgtt

SEQ ID NO: 7248 - DNA, 201 bp, Homo sapiens
ctgcatcatttttaaaaacatggacatttactctgaaggtcatctataattttattgggtgattcttgatattgagaaatgttttcttaaaaaaaaaaagycaccacaagaatgtcttgtccaaaaataaaatgttagaattgtgggccaaattgcacgaagcagagttctatgcttgagcattggtattttacattactt

SEQ ID NO: 7249 - DNA, 201 bp, Homo sapiens
ggtacactcacttctctcttaatgacagacaaatgtacatcctgagcagacttgatgtcagagaatgccactgtttttttttctctcttttttatttattyatttattttattatactttaagttttagtgtacatgtgcccaacgtgcaggtttgttacatatgtatacatgtgccatgttggtgtgctgcacccattaa

SEQ ID NO: 7250 - DNA, 201 bp, Homo sapiens
tggttttgatttgcatttctctgatggccagtgatgatgagcattttttcatgtgttttttggctgcataaatgtcttctttggagaagtgcctgttcgtwtccttcgcccactttttgatggggttgtttgtttttttcttgtaaatttgtttgagttcgttgtagattctggatattagccctttgtcagataagtaga

SEQ ID NO: 7251 - DNA, 201 bp, Homo sapiens
attgcttttggagttttagacatgaagtccttgcccatgcctatgtcctgaatggtattgcctaggttttcttctagggtttttatggttttaggtctaaygtttaagtctttaatccatcttgaattaatttttgtataaggtgtaaggaagggatccagtttcagctttctacatatggctagccagtattcccagcac

SEQ ID NO: 7252 - DNA, 201 bp, Homo sapiens
tgtgctcatttcacatggcatgtctgtttcaaaacatctcctgtaccccataaatacatacacctactatgtacccacaaaaattaaaaaacaaacaaacmaaaatccaatcaaaagacgttcagctcaaaacaaaacctcatgcatgtgttactcatagggagaaccttatatcattaagaaaaggttaagttacattta

SEQ ID NO: 7253 - DNA, 201 bp, Homo sapiens
aaataatttttaatcaggaaagtacttgctgtccatttatttatttgtccagcaatcatttatctactaccaatgcgttgaaatccttgaaagaaggcaargtagggaatataaaacaaatagccgacatgtccctgctattttaaaaacaactttgttgtgatataattcacataacacaaaattcattcttttattgtg

SEQ ID NO: 7254 - DNA, 201 bp, Homo sapiens
tggaaggggaaacttatcttgctgttctgatttgcttctgccctttagtgtcccacaaaagacaccctagacgtttctgtggagaggtagtgatattacattttttttttctgtgtcacgggaattagctgtggataaaatgtatattttatggtttccaagctgtgcactgatgtgctccaggccattacagcaatctca

SEQ ID NO: 7255 - DNA, 201 bp, Homo sapiens
ccacaaaagacaccctagacgtttctgtggagaggtagtgatattacattttttttttctgtgtcacgggaattagctgtggataaaatgtatattttatggtttccaagctgtgcactgatgtgctccaggccattacagcaatctcatgaggagccatggagtattttaaacactcaaggtaaacacagagatatgtga

SEQ ID NO: 7256 - DNA, 201 bp, Homo sapiens
caggccctggtgtgtaatgttccccttcctgtgtccatgtgttctcattgttcaattaccacctatgagtgagaacatgcagtgtttggttttttgtcctygcgatagtttgctgagaatgatggtttccagcttcatccatgtccctacaaaggacaggaactcatcattttttatggctgcacagtattccatggtgta

SEQ ID NO: 7257 - DNA, 201 bp, Homo sapiens
caaaagacaccctagacgtttctgtggagaggtagtgatattacattttttttttctgtgtcacgggaattagctgtggataaaatgtatattttatggtktccaagctgtgcactgatgtgctccaggccattacagcaatctcatgaggagccatggagtattttaaacactcaaggtaaacacagagatatgtgaaat

SEQ ID NO: 7258 - DNA, 201 bp, Homo sapiens
ttgaggattcatatctttcatcaaaattccaaaaaagtctcctaaagttcaataactattttatgaagacaatgctgacaatatttttagaataaaaattmctttttttggtaagtagaaaaactccaagtcatggagaccctgaaaaaggagtgtatgtatgtgtatatttatctatctatagatatagatttatacaca

SEQ ID NO: 7259 - DNA, 201 bp, Homo sapiens
ctaataacataataaataaataaataaacatatatatttgcatatacaaaatatgtatgcatgtatatgtgtgtgtgtatatatatatatgagagagagaragagagagacagagtctcattctgtcacccaggctggagtacaggggcacaatcacagctcactgtaacctcaaactcctgagttcaagcagtcctcctg

SEQ ID NO: 7260 - DNA, 201 bp, Homo sapiens
tggtgctattgccttttaactgggtcttttcagaaaataatttcttaacaaaggaatgattgtcagacaagggataccagcatttcagggatgatttttgtgttgttgtttttttttcggtggggaagacctggacaatgatcgcatcttgccatgtaggtgacatttaacttgcttcaatggtggaagatcacatttggg

SEQ ID NO: 7261 - DNA, 201 bp, Homo sapiens
ttgaattgttccctttaccattatataatgcccttctttgtctattttgatctttgttggtttaaagtctgttttgtcagagactaggattgcaaccctcyttttttttttttttgctttccatatgcttggtaaattttcctcaatccctttattttgagcctgtgtgtgtctttgcatgtaagatagatctcctgaata

SEQ ID NO: 7262 - DNA, 201 bp, Homo sapiens
gactatattgtagatttaagtttttgttgaaattctaaactttcctttagcctgatttctttaagcctattaagaacatcctaatttccccaattattggwttactgtactacttaaagttaaatatcttattttttcctaacatttaaaaatattttccattgctattattacatataccaagttattcttatgggcatc

SEQ ID NO: 7263 - DNA, 201 bp, Homo sapiens
ggtgctattgccttttaactgggtcttttcagaaaataatttcttaacaaaggaatgattgtcagacaagggataccagcatttcagggatgatttttgtgttgttgtttttttttcggtggggaagacctggacaatgatcgcatcttgccatgtaggtgacatttaacttgcttcaatggtggaagatcacatttgggc

SEQ ID NO: 7264 - DNA, 201 bp, Homo sapiens
agaaatggtgatgaagtagatatttctcatactgtaaaattaggtcaggttctgaaatggtctgaagtgtagaggtcacacaggattctgtattcattggraagattacagtttgcaatgtgttcccagggactgaaaacacaccgtcgatgaaaaccagccactgatgaacagcctcagacctggccagtacggggagca

SEQ ID NO: 7265 - DNA, 201 bp, Homo sapiens
agggcttttaaaagtcagtggtgatgcagagcatttgccaaaagtgttcagagggagagaaatctactcaagagcaaagtaacttctaattgtgtctttcyatggaaagaggagagaaagagtctggttttaggggtttggtttgaaaagcaggtggagacacagatggaagctaggctgtcagatcatttgttgtccttt

SEQ ID NO: 7266 - DNA, 201 bp, Homo sapiens
cttgttcgtggtggatatgttttttgatgtgctgctggattcagtttgccagtattttattgaggatttttacatcaatgttcatcaggtatattggcccraagtttgttgttgtgtctcttcccagttttggtatcaggatgatgctggcttcataaaatgagttaggaaggaattcctccttttccattgtttggaaca

SEQ ID NO: 7267 - DNA, 201 bp, Homo sapiens
gggtacaaaaaatgtagaaagaataaataagacctactatttgatagcacaacagggtgactacagtcaataataactgtacatattaaaatgacttagarcatacttggattgtttgcaactcagtggataaatgcttgaggggatggacaccccattcttcatgatgtgctcatttcacatggcatgtctgtttcaaaa

SEQ ID NO: 7268 - DNA, 201 bp, Homo sapiens
tcatcactcacctaggagtcctttgacttgattaactgaccaatgccacaggattatttaattctgcatgagactctctccctatagccacattcttactyccacctttgtagtacctgcaaagttcttaagacattatatctataatttgcaccagcattttgtctggtagtgatgaatttaatgcctctaaaacatttg

SEQ ID NO: 7269 - DNA, 201 bp, Homo sapiens
tttgtccctcacagtcattagcaatagttgctctgcattagaaaccaatatttgaaatgatgtattttactcattaagttggggggacttttttttcctcyatagtcgcttgtattggacagaagtttccaattttggctaccagatgttctactacagtattatcagtcacaccttgcaccgaattctgcaacccacagc

SEQ ID NO: 7270 - DNA, 201 bp, Homo sapiens
tgactccttatccaatttgccagtctgtatcttttaattggggcatttagcccctttacatttaaggtaggtattgttatgtgagtttgatcctgtcaccrtgatgctatttggttattttgcatgctagttgatgcagtttcttcatagtgtcattgatctttatagtttggtgtgtttttgcaatggctggtaccagtt

SEQ ID NO: 7271 - DNA, 201 bp, Homo sapiens
ctgttttcattaagcactgtatttttaaggtctgtccatgttgctatgtatatatctaatcctttgcttctgatgagtaattttgctatgattattgtagkggatcaggtcttgctaagatctagtctgattctatgacttcagtatttggtgattaagttaataatattctgtgccgggtgcggtggctcacgcctgtaa

SEQ ID NO: 7272 - DNA, 201 bp, Homo sapiens
aaggcataaaacacagattgaagagatagaggaactatcacaatcatttaaatatggcagggatgttagaattatcagactgagaatttaaaacaactatrattaatatgctaggggctctaatggataaagtagtcagtatacaagaacagatggtcaatgtgagcaaagatatggatatttgaggaaaaaaaagaaatg

SEQ ID NO: 7273 - DNA, 201 bp, Homo sapiens
aggtggacttggattagttgtaaatatacattgcaaattcaagggcaaatcactgaaaaatatttttagaaaagtataactgattcccaagaaaggagagwaaatagaatcatttagaatgctcaaataaaaccacaaaagtcagaaaaaaagtggaagacaaaagtaggaacaaagaacaagggcaacaaatgaaaaata

SEQ ID NO: 7274 - DNA, 201 bp, Homo sapiens
attccatgtcatagataggaagactcaatattgtcaagatgtcatttcttctcaacttatctatagattcaataaaatcccaatgaaaatcccagctaaarttattttgtagatattaacaaactgattctaaagtttatatggagaggcaaaagacctagaataggtagctatcacagtattgaaggagaagaacaaagt

SEQ ID NO: 7275 - DNA, 201 bp, Homo sapiens
gatacagctcattacacatttgtccaaacccgtaaaatgtacaatacaaaactgaactctaatgtaaactatagactttgggtaataatgatgtcattgtrggctcattgattgtaacaaatgtactactttggtaggggtattgataatgggggaaagttatgcatgtgtggagaaaaggagtatctgggaaatcttggt

SEQ ID NO: 7276 - DNA, 201 bp, Homo sapiens
taaggttaggcagatggggaagatcattccaacctgaagagactacctatgtgaagggttggaggggtagaagtcctgcagtgtgtagatagtgtactgtrgttagagtgaaggatggctttgcatagcagagactggatatgcgggcaggagccagattgcacagtgccacgcacaatgagttaaagagttggctaactg

SEQ ID NO: 7277 - DNA, 201 bp, Homo sapiens
tacagaaggtagacttttaatgcaagtctttattttatgatatagaataaattggaaagggctttttcatgcatctagaacatgctcatgtataaataaamaatatatttgacaactttcattgatttatgtttggcatgcagaagcagtgagttatccagactaatttctggtgggaagaattctcagggagattaattt

SEQ ID NO: 7278 - DNA, 201 bp, Homo sapiens
cataccaatttgcattttctccctgctcttaattttaaaaaggaaaagtctgaacacagttcatcactcacctaggagtcctttgacttgattaactgacsaatgccacaggattatttaattctgcatgagactctctccctatagccacattcttacttccacctttgtagtacctgcaaagttcttaagacattatat

SEQ ID NO: 7279 - DNA, 201 bp, Homo sapiens
tcctgtgatgtcttaaatgaaaattagagagtgaaagggaccacatgaattatctccttgatctgtgtcctcaaacttatccccctgtcctgatcttgtcrgtatctctacatcttccacattagcattgtcagatattttaaaaataaattttacacttttattttaaaaaattagttaaaatatacataatgtgaaata

SEQ ID NO: 7280 - DNA, 201 bp, Homo sapiens
tgcctcatataaaatattatttttcagaaaattcaataagcaaaaaagtttaaaaaattaaaatcatgttttagtaggaagttttccaatatgctcattcwtggattaaatgtatgacaatgaaatagctgatatgagtgggtagactatattgtagatttaagtttttgttgaaattctaaactttcctttagcctgatt

SEQ ID NO: 7281 - DNA, 201 bp, Homo sapiens
ctgttgagcatgtttctgataatttgttgtctatttaaaaaattgccaccttataaaaatgcagttaaattggagaaattggaggagtgccttttaaaatracatctattttagtaaacttaatgcagttcagtctaaaaccaagaggaaggatgtaaagttcatttccaagattatcaaagaaatgaaatgggaaaagac

SEQ ID NO: 7282 - DNA, 201 bp, Homo sapiens
aagaaactcacaacagtgtatagaagaagaacatatttaaaatggggaggaaacaaataattttgtttggtaatttttttcacggaagtccattaaaattrtgtttttctcagctgttcaggcaaatccctagcagaaccataagtttctgaagttccaaactctcagacatcttagctcacactccccctcactcccacc

SEQ ID NO: 7283 - DNA, 201 bp, Homo sapiens
tcccccagggagttcagtaagcttaggcagattccagctgagaggccataagaatctgtacattctagggttgggatgctaggcctcggtggcatgggatygagagtgggatcttccaatccatgagttgcacagttctttggaaaagcaatttccccggctgggtagcctgctcgctcgccgctccccttggctggaggg

SEQ ID NO: 7284 - DNA, 201 bp, Homo sapiens
ggttcaggatagtgtgtcaggtcagagccagtatctctgaaattttcttggctgttgttcatgcttgctgcctcattgttccaagatggctgacaaagaarcaagcatcacatcttcattcgggccagggagaggaggaaagatggtgtgagatgtacatgttcaggaaggcaaagtcttcttcaaagctcccttcccgcc

SEQ ID NO: 7285 - DNA, 201 bp, Homo sapiens
aagtagtctatagaggccaatcttctgagcctgggtacaggcaatcctcagacaaaaggttctcctttcttttatcttcaataaggagcatgttttgcaartgaattctgaagctgtttggcttttgacatgcttgtattcatctaaatgtgtgataatggtcaagtatacccagtaagagagagttctctcaaatgctat

SEQ ID NO: 7286 - DNA, 201 bp, Homo sapiens
ggtaagcacaaagaccaggagttggaaaacgaagtgttagagacactaagtcaggggttttgaaggaaactattgataaagaattgctgtactccataaaraccctcggctaggactcctgcttctgtcatatcatccagcctgtgtctttccacctttcagcaaatttaatcatcccaacattctgaagcagcttggagt

SEQ ID NO: 7287 - DNA, 201 bp, Homo sapiens
tgttgatttttcaatttggggtaaattgattgcccagtatggaagatgaggatttaactctcttagacttcctcataatatacctgtccatccctcaccaygctacacacaggaaaactttgcttgcctcatcctctgacaattatcacaattttgcagataaaccatccttccaggtttgcattattagaactatttagt

SEQ ID NO: 7288 - DNA, 201 bp, Homo sapiens
ataaactgaatatgcataccattgattattcaagtgagttattgtggcaagatgcagttttagcaagagaatacggagagccctagatgagagaggcacasactctcttgcgctgatggacaggagtgcgtggtgagtgaaatcttgttttttccccagaaaatgcagaccttccaactgctccctttgcttcttccattg

SEQ ID NO: 7289 - DNA, 201 bp, Homo sapiens
gcagtttgggaggccgaggcgggcggatcatgaggtcaggagatcaagagcatcctggctaacacagtgaaaccccatctctactaaaaatacaaaaaaawtacaaaaaaaaaaaaaaaaaaaaaaaagcctgtcctggtggcgggcgcctgtagttccagctactcgggaggctgaggcaggagaatggcatgaacccgg

SEQ ID NO: 7290 - DNA, 201 bp, Homo sapiens
ttgtaaatttgtttgagttcgttgtagattctggatattagccctttgtcagataagtagattgcaaaaattttctcccattctgtaggttgcctgttcastctgatggtagtttcttttgctgtgcagaagctctttagtttaattagatcccatttgtcaattttggcttttgttgccattgcttttggagttttagac

SEQ ID NO: 7291 - DNA, 201 bp, Homo sapiens
agaatattcaagaactgtggggaaactacacaaggtgtaagataggtataatatgaatactagaaaaagaagagagaaaggaacagaagaaatatttggargaaatatttgaaaaataatgactgataatttccccaaattaatgtcagataccaaactacaggtatgggaagctcaaagaataccaagaaggataaatgc

SEQ ID NO: 7292 - DNA, 201 bp, Homo sapiens
ttcttgtattttgactgctttttaaaataatattctggttttgttcatagatgcaaaattttactcatcttcttttagggtattaattatgcttttcaaaragtgttaatttgcttcctgcattgtcttggcttccttgttcctctttgttttggaatctgattcaatgtgagaatctttctcaaatgtttagtattcttg

SEQ ID NO: 7293 - DNA, 201 bp, Homo sapiens
acctgagagggcttcatggaagaggtcttctgattcagacacaaccaaagcaggaggtagaacagtagctgaactatactttcccactgagttatgaaagkctttgactagggatagattgagatcaaagtttaatctatctgaagggtttaacaagagatgacaggtggtagtccagagtagcatctagagtcaaggaaa

SEQ ID NO: 7294 - DNA, 201 bp, Homo sapiens
tcatggatgaactggttagtccgagaagttaaagaggaatagtgatagacagtgatactgatatgcatatcttggtatatttaatactaaacacaattgcyttattcaatacatactcaagtatttactatgccttagatactaggttatcaatgaatcatagatctggcctataggagggtgtagcctttacctagtgct

SEQ ID NO: 7295 - DNA, 201 bp, Homo sapiens
gcatgagccaccatgcctggccaaaaatagctattttttattaggcatttatgagttgaccacttttctcattaattaatatgtattagctccttttgtcstcagagttatacatactattattaacctcattttacaggtgagaaaattgaggcacaaagtttatatacttgcttgaggccacatagctggtaagggata

SEQ ID NO: 7296 - DNA, 201 bp, Homo sapiens
ttgggagcaaatatcatgtggaattaaaatacagatcattctgctctgttccatttattattattattattattattatttaaaattttattattattatrctttaagttttagggtacatgtgcacaatgttcagttttgttacatatgtatacttgtgccatgttggtgtgctgcacccattaactcgtcatttagcat

SEQ ID NO: 7297 - DNA, 201 bp, Homo sapiens
cttggaatatagagagcatctacagtcctttagctccttgttaatgttttaagtactagattttaattgtctgtgtaaaaacatacaattttatataaggwtagtcaaattaaaaaaggcagtgaatagagccctcattccttccaagccctggggaagtgaagaaagaagagaacttgatagaggcgggagggtgaagat

SEQ ID NO: 7298 - DNA, 201 bp, Homo sapiens
aaagttccacatcaccgtgtcacataaaacacacaatactgcaaagccatgagatatttctttctctctcaaacacaaataccaataccaacacaaacttktacaccctatatatgtggagggtggggagacaaaaatgttgctattttacagtactcttccaacccaagaggagattgaaaatcttcctgccttccctcg

SEQ ID NO: 7299 - DNA, 201 bp, Homo sapiens
tcaccaccgttattcaacacagtactggacatcccagctagagcaatcagacaagagaaagatattaagggcatccaaattgtaaaggaggaagtcaaatyatccttgtttgcagatgacatatctcacatgctgagaaacctggagactccacaggaaaactagcagaactgataaacaaatttagtaattcagtagtag

SEQ ID NO: 7300 - DNA, 201 bp, Homo sapiens
ctcagggatcttggtaaggaatgtggcttttattctggaaggagagtcactgtaaggttttgaggagaggagtgacacgatctgatgcgaactgccttatwcattaaaaggaaaactggctgctgtatggagaatgaactctggggtgtgggaggaagcaggaagaactggtaggaagccatgtggtgacccaggtgagag

SEQ ID NO: 7301 - DNA, 201 bp, Homo sapiens
tattctagttagcaattcctccaactttttatcaaggttcttagcttcttcgcattgggttagaacatactcctttagctcatcatagttttttctacccrtcttgtgaagcctacttctgtcagttcatccatctgatcctccgcccagttctgcacccttaatggagacattgtgatcatttagaggagaagaggcact

SEQ ID NO: 7302 - DNA, 201 bp, Homo sapiens
ctagttgtggtctttgaggctgctgacccttgtatgggttttttgtgggggcccttgttgttgttgttgatgatgatgctgttgttgtcactttctgcttrtttgtttttctttcaatagtcacttccctcttctgtagggctgctgcagtttgctggggttcactttaggccttattcatctgatttgctcccacgcctg

SEQ ID NO: 7303 - DNA, 201 bp, Homo sapiens
gaagattctgcagggaagccccacccactgaggaaggatgggtgagggttagacctgaagaggcactctggccgctgactaccacagctggtgtgttgggytgtggcgacaagtcttgggaccaagctgtccagcctcgctggctcccgcaggggaaaagcacagcctggagctatagaaatggatgctgcatttctcccc

SEQ ID NO: 7304 - DNA, 201 bp, Homo sapiens
ggttctcaggtgggctcactgctcttccttctctctgtgggtcacgccagccttctagtcaattttgatgagcgaatctagataccttgccggtgaaggaytcacacacttattatggtttttttcaataggaacctctgaacggagttgcttctagtcggccatcttggccccgcctctgaatatttctttaatgttgtc

SEQ ID NO: 7305 - DNA, 201 bp, Homo sapiens
ccaggaaaagagatttggggaaaaactaaaaatggaggtaagttatgggcttgttgtgggtttctcaagcagaatattgtgatatatgtgctgtgtatgtygatgtttattttttaaaatctgaatgcgaagtaattttagtaagcttttttaagtttaataagaaaaatgtgtttgtagaaaactttgacctgaccctta

SEQ ID NO: 7306 - DNA, 201 bp, Homo sapiens
agaacacatggacacagggaggggaacatcatacaccagggcctgtctggggttgggggcaagggaagggagagcattaggagaaatacctaatgcaggcrgggcttaaaatctagatgacaggttgataggtgcagcaaaccaccatggcacatgtatacctatgtaacaaacttcatgttcagcacatgtaatccagaa

SEQ ID NO: 7307 - DNA, 201 bp, Homo sapiens
tttcaggatatgttaaagaaaagaaaaattttgtttcagttctaattattagtaattgctattgattttctatgatttctatattggtcaataatccccawttttttctcctatttcttttttttgtttcatcctgtagggaacttttcctttacccctaaggttattccagattctgttcaagagtcttcatttaggatt

SEQ ID NO: 7308 - DNA, 201 bp, Homo sapiens
gtaacttataaagaagctgggtaatttataaagaacctgggtaatttataaagaaaagaggtttaattggctcatggttccacaggctctacaggaagcasggctcaggaggcctcaggaagcttacaatcatggcagagggtgaaggggaagcaggcacagtctttcccatggccagaacaggaggcaaagagggagcaa

SEQ ID NO: 7309 - DNA, 201 bp, Homo sapiens
ttctctttctccacatccttgctagcatttgtcttgcctgtcttttcaatgtaagccattttaacttgactgagatgatatctcaatgtagttttggtttkcatttctgtgatgatcaatgatgttgagcactttttcacatgtctgtttgccatttgtatttctttttattagaaatgtctattcaaatcttttgcccat

SEQ ID NO: 7310 - DNA, 201 bp, Homo sapiens
taagatttatccctgggatgcaaggatagttcaacatatgtgtatatgttgaagacacattttgtggaatctttaggtttttctagatataagataatatyatctgtgaatgccttttatgagatgcctttttattttctttcccctgcctggttgctctggctaggacttacagtactatgttgaataagagtggtgaaa

SEQ ID NO: 7311 - DNA, 201 bp, Homo sapiens
caaatttgtggctagggtggcttcagaagccaggagacaacaaaggccctttctgagtttccctgtcaaaaggtagagtaaggaattaaaaggctaaggastgggaatgctgaagtggacatataatgtgaagccagaagacccaccagaggatgcagcattcatcaaggtcatcaggaatgtgctgatgaaaggagcctc

SEQ ID NO: 7312 - DNA, 201 bp, Homo sapiens
agggtcaccaagattggattctaaggcatggagggaaattagtcagtatgccatctgctggaagcatagaatacaggaagaaaaatagtgagaataacacygggaaggcagactaggtccagattaccaagaatcttaaatgtcctgggtaaggagtttgtactttatttagaatgcagttaggagctatggaaggtttta

SEQ ID NO: 7313 - DNA, 201 bp, Homo sapiens
aactcagcattctatagtgctgcagagcttgagacgtttaagtgctcattcaaggtgggtctgttgagaaaacctggtgccctgaaacacagaataaaggkatttagataaatacctcaaagattttggctcagcagacccttctgatccctcagagcttgtagaggtggcccacccctccaaagtaagagccagcacttt

SEQ ID NO: 7314 - DNA, 201 bp, Homo sapiens
ggctttacctttgacaactacccagtgtacggtgtcttcgctgaaggttggctgttctctggcttctaggcctgcacatgccaggcttaactccactcagmaactctgctgccctgcagtgagccacaagacttgttctacctgtagataggacagctctgtttggaatcccaaaatcctggatcttttggaggcctcagg

SEQ ID NO: 7315 - DNA, 201 bp, Homo sapiens
ctaaaatgcagaaagtattgttacaggtgctaaaaatagagcattaaacaaagcaaagtctctgccttgatggaggttacattccagcattgtagttggargaggagacataataaataaaaaatatacatataggtgaggagcaaactcagcattctatagtgctgcagagcttgagacgtttaagtgctcattcaaggt

SEQ ID NO: 7316 - DNA, 201 bp, Homo sapiens
aataatagctggagacttccacacctcactttcagcattggacagatcattcagacagaaaatcaacaaagaaacatcagacttaatctgcaatatagatsaaatggatctaatagatatttacagaacatttcatccaagggctgcagaatacacttttttttttttttttttttttttttgagacagagtctcagctca

SEQ ID NO: 7317 - DNA, 201 bp, Homo sapiens
ggcggatcacgaggtcaagagatcgagaccactctgggcaacatggtgaaaccccatctctactaaaaatacaaaaattagctgggcatggtggcgggcgyctgtagtctcagctactcgggaggctgaggcaggagaatcgcttgaacctgggaggcggaggttgcagtgagctgggatcatgccactgcactgtagcct

SEQ ID NO: 7318 - DNA, 201 bp, Homo sapiens
tggctttcactttcctattggactctcttggcctattcttttctgcttactaaatctcactcaacttttataaccagctcatattccaactctttggaaargcctgcccctaaccctgttccttcccagaattacttttgcccttactgtctttaaatctcattggcagtaactgcaagttttttccattctatttctatg

SEQ ID NO: 7319 - DNA, 201 bp, Homo sapiens
tgtgtctttatagtagagtgatttatactcctttgggtatgtactcaataatgagattactgggtcaaatgttatttctggttctagatccttgaggaatygccatactgtcttccacaatggttgaaataatttactttcccaccaacagtgtaaaagtattcctatttctccacaccctcatcagcatctattgtttcc

SEQ ID NO: 7320 - DNA, 201 bp, Homo sapiens
tagcaatccccataccagctgcctgactttcagtagaattatgagatgaacactaagcatgtggaaagcttaggaagactcagaagtctggaagggaaacrctgctctcccttctcccttgaggtgctttaggctcttacccacctttcagtttgggctgtaataaaaatatcttggccacatgtttagagacagaatagg

SEQ ID NO: 7321 - DNA, 201 bp, Homo sapiens
gaagtggagcctttggagaagtgtatgaaggaacagcagtggacatcttaggagttggaagtggagaaatcaaagtagcagtgaaggtaatgtgaatcttygaactccttgacacattatatcaccatatctacaaagattgacctggatataattataataaaagttgagtgctctttgttgaaaagaggactggttgaa

SEQ ID NO: 7322 - DNA, 201 bp, Homo sapiens
gaagtgaatgtacaattgaatgtaaccatggttcacaggagaggatatacaaagtgctcaagtttattatattttctgcatcatttttaaaaacatggacwtttactctgaaggtcatctataattttattgggtgattcttgatattgagaaatgttttcttaaaaaaaaaaagtcaccacaagaatgtcttgtccaaaa

SEQ ID NO: 7323 - DNA, 201 bp, Homo sapiens
gcattcaaggactattttattgggttgaatgcctaagaattgactgcagctaggcccggaaagcttagtctagtcctttgttctgaggactcagtttcttyatctacaaaatggaatattgaatcaaaagcttcctaagtctccttttaacttttttttttttttggacagagtctttctctgtggcccaggttgaagtgc

SEQ ID NO: 7324 - DNA, 201 bp, Homo sapiens
caagtgggaattttactgcaggggaaatagttgacataaagatgtacttgcgtattaggcactccgatttcaaagatttactcgtatattggtcaaagatrtacttgcatattaggcattcggattttaaaatttagttgaagcttatcagcaaaaccagtatcaaggctgccctgactgtcatgctccctgtcttccaca

SEQ ID NO: 7325 - DNA, 201 bp, Homo sapiens
tgagataaacactctcattcagtagttactgaaagaaaactctgctagaatgataaatgtcatggtggtctataactccaaataaacaatgcaacgttccygatttctaatcttggttctgagagccatttggtttcagttgtagcaatccccataccagctgcctgactttcagtagaattatgagatgaacactaagca

SEQ ID NO: 7326 - DNA, 201 bp, Homo sapiens
taatgtgcaaagatacattataaaagtcacagagggccaggcgctgtggctcatacctgtaatcccagcactttgggaggccaaggcgggcagatcacaargtcagaagatcgagaccatcctggctaacatggtgaaaccgcgtctctactaaaaaatagaaaaaattagctgggcatggtggtgggcgcctgtattccc

SEQ ID NO: 7327 - DNA, 201 bp, Homo sapiens
gacaagtgggtggaacccagagagcagccggtataggaggggcttacaaagatggtggacatggggaggagcagccagaaagggaagaggaaagccatagkgagtgttgttatggaaatccagaggagagaggcttagaaaggaaagagtgaacaaatgctgcagagaggtaaagcaatccagagggttgcacagattttg

SEQ ID NO: 7328 - DNA, 201 bp, Homo sapiens
aagtagagtgtatgaaataagaagagagtgacaagtgggtggaacccagagagcagccggtataggaggggcttacaaagatggtggacatggggaggagyagccagaaagggaagaggaaagccatagggagtgttgttatggaaatccagaggagagaggcttagaaaggaaagagtgaacaaatgctgcagagaggta

SEQ ID NO: 7329 - DNA, 201 bp, Homo sapiens
tttaggtaatctaaaggaattcatgggctgtagattctgtagtaggttctccagcatttttttcttacaaataagcttatttttaaggatttggtgagaaratgattttgtattacatcttctgccagaatccaggaaatgagcattctatgttgttattgagaagaaatccatgttctgtgggagtccagaggaaggatg

SEQ ID NO: 7330 - DNA, 201 bp, Homo sapiens
ttctgtaggttgtctgttcactctgatgatagtttcttttgctgtacagaagctctttagtttagttagatcccatttgtctattttggcttttgttgccrttgcttttggtgttttagtcatgaagtctttgcccatgcctatgtcctgaatggtattgcctaggttttcttctagggtttttatggttttggtttttac

SEQ ID NO: 7331 - DNA, 201 bp, Homo sapiens
tgagcactttttcacatgtctgtttgccatttgtatttctttttattagaaatgtctattcaaatcttttgcccattttttgatcagactattagcttttytcctatcgagttatttgagctccctatgtattctggttattaaccccttgtcagatgggtagtttgcaaatattttcttccattctgtggattgtccctt

SEQ ID NO: 7332 - DNA, 201 bp, Homo sapiens
attagctgtggataaaatgtatattttatggtttccaagctgtgcactgatgtgctccaggccattacagcaatctcatgaggagccatggagtattttaracactcaaggtaaacacagagatatgtgaaatctgttggatggtgatacccaatctgatcataagattggaggagttgtgcagtgcccaacaggtacaca

SEQ ID NO: 7333 - DNA, 201 bp, Homo sapiens
acacaggccccattagcatgcaattatttttatttaaagatgaaataaatatacagttttatctttcaatttcttatttgtttcaaatatctaccaaattrttagataccaaattgactattaacacatacttattaagtgatactacttaaaaagtcgaactgttagagaattcttttggttcagggaaccataaaaaaa

SEQ ID NO: 7334 - DNA, 201 bp, Homo sapiens
cttggtaaggaatgtggcttttattctggaaggagagtcactgtaaggttttgaggagaggagtgacacgatctgatgcgaactgccttatacattaaaargaaaactggctgctgtatggagaatgaactctggggtgtgggaggaagcaggaagaactggtaggaagccatgtggtgacccaggtgagaggcccagggg

SEQ ID NO: 7335 - DNA, 201 bp, Homo sapiens
acactgaggtccagagatattcacacattttcctaatatcacattgttaatcagaggaatggtcaggaagtgattaaagtaaagcaaaatatcatatactytaaaggtaaagatttctggtattaggttcttgggtccccaaagggttcatagaaggctttaggatgtgtcagtgctctgcaattgaggattcatatcttt

SEQ ID NO: 7336 - DNA, 201 bp, Homo sapiens
tgcatggagaatagactgggagggtggaaggagggccagggaagctggggagctgttaggaggccaagcaagtcaggcttgatttggtgatggctctgacwaggatggtgatgggaaaacagggaaaggtttgtcatatattttgaagattgagctgttggggtggctgaatggatttggcaaggaagatgggaaaatcaa

SEQ ID NO: 7337 - DNA, 201 bp, Homo sapiens
atgttgatgtttattttttaaaatctgaatgcgaagtaattttagtaagcttttttaagtttaataagaaaaatgtgtttgtagaaaactttgacctgacscttactctaacccctgaagctaactaataatattctattaaaatagaaagcaactaggaggtaaaacattgaaatcaatattgtttgaccaagaaacaca

SEQ ID NO: 7338 - DNA, 201 bp, Homo sapiens
gagtggctttcctagataaaatcgtcagttctgttttggccaagcaaaatttgagatgtctgttagatatccaagtggagttgctgaggaagcaattaaayggaaggatttggaactgaggaggtaagtcgaaggtatccaaactaccaatttaggagttatcaccacggagatgtgattcaagccatgggcctggaggca

SEQ ID NO: 7339 - DNA, 201 bp, Homo sapiens
tgcatggatactttaagaagcttactcccttgtagaagagataaagcacatgcctaactaacctcatagtaaggtaaagctttattaaacacatagaaaasgtactgacaaattcccatggaagtttagaggagggaagtatttatttctgaaatgaaatatcaaataaatctctttggaggaagtctcatttgttgagtt

SEQ ID NO: 7340 - DNA, 201 bp, Homo sapiens
taaacacatagaaaacgtactgacaaattcccatggaagtttagaggagggaagtatttatttctgaaatgaaatatcaaataaatctctttggaggaagwctcatttgttgagttagacatgaggtgaggagagaaaagggcaggtccaggtgtctatgtgaccagggtcaccaagattggattctaaggcatggaggga

SEQ ID NO: 7341 - DNA, 201 bp, Homo sapiens
caagattggattctaaggcatggagggaaattagtcagtatgccatctgctggaagcatagaatacaggaagaaaaatagtgagaataacactgggaaggmagactaggtccagattaccaagaatcttaaatgtcctgggtaaggagtttgtactttatttagaatgcagttaggagctatggaaggttttaaagcacaa

SEQ ID NO: 7342 - DNA, 201 bp, Homo sapiens
tgtacttatgtaaagataacgaaacacctctcaaaacatcttgatttctgcatctcaatatgatcaaaaatatctatttagagaattcaataatttcaaaygtataggccattctgataaaattcagcaagattcttctttcagaacaaaacagagtaaacagtacatgactaatgtttaggaccagattttgtcctcaag

SEQ ID NO: 7343 - DNA, 201 bp, Homo sapiens
aatgcagttaggagctatggaaggttttaaagcacaatagtaattgcttcacttgcttctcaaaaagagaattttggcaactgcacatagaatagattgaragaatgagtgagatttgaaagtacagaggtagagaccagctgggaggttactatattattttaagattttatcaaaacagctttttaaaaacagaacata

SEQ ID NO: 7344 - DNA, 201 bp, Homo sapiens
gggtattctctgacttattattttgaagatgtgacttccacaccaggaaaagcattcaagcctagaagccttagaggaaggcgaatgctggggcagacacygagggagagttgtctggtgccctcaccctcagagttagctgaggcaacccaggaagacatgctccaggctggatgccctaaccctcagctctggagatgt

SEQ ID NO: 7345 - DNA, 201 bp, Homo sapiens
ctcaagcgattggtccacgtttggccttccaaagtgctaggattacaggtgtaaaccactgcacccggcctaaatggtgctattgccttttaactgggtcytttcagaaaataatttcttaacaaaggaatgattgtcagacaagggataccagcatttcagggatgatttttgtgttgttgtttttttttcggtggggaa

SEQ ID NO: 7346 - DNA, 201 bp, Homo sapiens
agtctgttataatgaatcctttcatccatgatcctaagaccttatttgtctttaacacatctgatttctaggtcatttatcggtgagtatgctacgttcaytttagatacctcccatatctcttttcacatgatggaaaatggtaatagctaataacatattaaataaatagctaataacataataaataaataaataaac

SEQ ID NO: 7347 - DNA, 201 bp, Homo sapiens
ggtcccaaagcccttctgcttcacatccgtaggctaacttcacatctataggctaatttattgcattgattggtcccaaagcccttctgcttcacctctayatatggcaaatttatacttcaggcattggtttttacgggtttcatttctggatgattaccttatttccaggtcctgtaagaaccttgcctcatgtctttc

SEQ ID NO: 7348 - DNA, 201 bp, Homo sapiens
atctatagtctgttataatgaatcctttcatccatgatcctaagaccttatttgtctttaacacatctgatttctaggtcatttatcggtgagtatgctaygttcattttagatacctcccatatctcttttcacatgatggaaaatggtaatagctaataacatattaaataaatagctaataacataataaataaataa

SEQ ID NO: 7349 - DNA, 201 bp, Homo sapiens
aatacataaaattaaatcttttgttcctaagatagaaaaacatcagtaactgggttgaattgaatatagacatatctgaaagacaggcaaaacatggtttwgcttgcttggcactgaaagcacattttcttaactatatcactcctcttttttttaaaataaatttatggagtacaagattgtttagtaatgaagtcaggg

SEQ ID NO: 7350 - DNA, 201 bp, Homo sapiens
ggaggagttgtgcagtgcccaacaggtacacaggccccattagcatgcaattatttttatttaaagatgaaataaatatacagttttatctttcaatttcktatttgtttcaaatatctaccaaattgttagataccaaattgactattaacacatacttattaagtgatactacttaaaaagtcgaactgttagagaatt

SEQ ID NO: 7351 - DNA, 201 bp, Homo sapiens
gtcataacttcacatatggaaactttagaggaacaatcatgcagagcggtttgccaatacataaaattaaatcttttgttcctaagatagaaaaacatcartaactgggttgaattgaatatagacatatctgaaagacaggcaaaacatggtttagcttgcttggcactgaaagcacattttcttaactatatcactcct

SEQ ID NO: 7352 - DNA, 201 bp, Homo sapiens
ctcactatcatcctggacagagctgattcttagaatgccaatggcagaacacttgggaattataactggcacagcaactccatccttttggggggctctayatatatacttgcctatgtgaagatcacacaggattaggcaaacatacccttaagccattctaggtactattaaggccttgtcattttctaagcatttact

SEQ ID NO: 7353 - DNA, 201 bp, Homo sapiens
cttttggcttaggattgacttggcaatgtgggcatttttttggttccatgtgaactttaaagtagtttttctaattctgtgaagaaagtcattggtagctkgatggggatggcattgaatctgtaaattactttgggcagtatgttttaatgactggaaagtataggcatattgtattgaatgcacctttcattattcagc

SEQ ID NO: 7354 - DNA, 201 bp, Homo sapiens
agcctcttccttcaaagcgtctgtggattctctcggctttcctggtatgttcctgtggtagttcttggagcaaaagttcatgatgtgagtctccacatgcygctctgtccatctgaatgggagctgcaagttagtccttgcctcctattcactattttgggaactgatctgagtctttacatttaaagtgcctttcttgta

SEQ ID NO: 7355 - DNA, 201 bp, Homo sapiens
ataaggtctgttctccttctcttctccccccacacaccagtttggacctcaagtacagagttaattatagactctttgcttacggtacattatcatcattrgcctatgcagggctcctgtcttgtttgtttgtttagccattttatccccatattcctctcctcttcaacttcctccctccctgtcaggcaactattctaa

SEQ ID NO: 7356 - DNA, 201 bp, Homo sapiens
ggacatctctgtagaacccatggagattaaaaggataatcaaggaatactattaacaactctatgctcacaaatttaataacctagatgaaatggaccaaytcttttaaagacacaatatgccaaaactcacagaagaagaaatagacaatctgaatatgtccacatctattaaataagtggaatcaataattaatagcct

SEQ ID NO: 7357 - DNA, 201 bp, Homo sapiens
cagtgctgggctcaagaacccgaccaaagacctacttttcatagaattcagaaccaacttcagttattcagaaattttttcttaaatagcatttatcagtscagagatgaagcaaacaacagtggagtcataaatgaaagctttgaaggtaagtttgattcttcagaattttctagttttcgctgcactgtgaactgaaca

SEQ ID NO: 7358 - DNA, 201 bp, Homo sapiens
attttcatgaattgttggttggatgtaaatggataaatttctagaaaagaatgcgttattaaatctcaaaattgaaagagaaaatatacctctaatttatrcatcaaatttatctgaggatattattgtttaactaaccaaagatatgtatgcaaaaggctgttaacagcaagttgggacataatactactaatacatttc

SEQ ID NO: 7359 - DNA, 201 bp, Homo sapiens
ctatctatctatctatcacctcagttatccacatctttaggaaatcaaactccttactcattgatgtttgaacgtaggaagcttgtcatttttgcaattcwtatttcttggaaagaataatcttgaaagtgatagctcagtgaaatagaacttggaaaatgacgatggctagtgagatggcttgtccctgataattaaaac

SEQ ID NO: 7360 - DNA, 201 bp, Homo sapiens
tagcatgttgtcctaggtattatagttacaagttgaaagacagcaggaagattgatcatgattgtgttgtagttttacaatatgcgccttttctgcaagtktgtgtgtgtgtgttttgtagctgatgttaatgcatctgttaagagttgcaggaaatttgtgtttcagtcatcaaattatgtactgtgtttttcattaatg

SEQ ID NO: 7361 - DNA, 201 bp, Homo sapiens
aagaaatacatttaggattattaaaagcctcttcatttcattccattgccagtttattgctatttgagaaccgaagttttattctttacttttagatgackgttgcttatatagctcctcttttcttagtcctcatttgtccctacatggtggaacagaaagggtttatatattaacaggtcaaatgtgtttgtcatcaga

SEQ ID NO: 7362 - DNA, 201 bp, Homo sapiens
cttccaatccttgagcatggaatatttttccatttgtttgtgcctcctacaatttctttcatcagtgttttgtagtttcccttgtagagaattttcatctmcttggttaatatattcctaggtgtttcattctttatgtggctcttgtaaatggcattgccttcttgatttaattatcagctagattatttttggtatata

SEQ ID NO: 7363 - DNA, 201 bp, Homo sapiens
cctacttccaattaggccaatgaatgagtttattctaggccagaattaccctaaaaccaaaactagacaaatatattacaagaaaagaaaattttagaccrgtgtctctcttgaatattgcaagaattgcaaaagtcctgaacaaaatattagcaaatcaaatcgagcaatatattaaaatagttttatatcacagtcaag

SEQ ID NO: 7364 - DNA, 201 bp, Homo sapiens
tcagttgtttcatacatgctcctttaatcctttgccagggcaggggtgctgaagctcagtcagcctggatttccaggacctgagagctggggtaaggaaartgtagtctgggtcattagagctgatgccaacaaaagtgaagccaactgttcgaattccagcttgtctgaacccacatctccagctggaaccagcaaggct

SEQ ID NO: 7365 - DNA, 201 bp, Homo sapiens
aaaaatttagggttttaaaaaaatggcctcaaatctttggtttcagttgaaatcactagtgtttctgactcacatttacacacttaagggatacatataamttttctgccctaatccctattttagattatatataattatttaatatatatcagacattgttttccagtatctttgtttttaaatatatctggactttaa

SEQ ID NO: 7366 - DNA, 201 bp, Homo sapiens
tctgcagccttccaatgtcattcctttaaggacctttcttctgccctaaaggcaaagatactgaagacaacacagagacaaccagtgtctgacaatatgtktgtgtcatgcataacccactctggcctggggtggaccacctccaccgagccaattctcatggctgaaaataataagctgagctggggcaaggttgttgag

SEQ ID NO: 7367 - DNA, 201 bp, Homo sapiens
agaattaaaattctaagtaatattcccaacaatagagaagcagacaaatattcaaagtaatgatgcaggaagaatttaacagggaatatcatcaaactatwacaatttagaaagaaacaagcatttctgggccatgacagaaataaaattttaggaaaagagaaattgctgttctgttatttacaatgaatgtaaatcctg

SEQ ID NO: 7368 - DNA, 201 bp, Homo sapiens
tcacgaatttttgagtctagctaagctaattcggttctttgcttttagcagcagtgcatgtggttttactagtaagagcgtgtgtgtgcatgagaaaagaytgagtaattaaaataacaaaacagtcacaattattttaaaatttgtattgtgctgagggcactcatcagttataaacataaaattagacaatttttaaaa

SEQ ID NO: 7369 - DNA, 201 bp, Homo sapiens
gagacaaccagtgtctgacaatatgtgtgtgtcatgcataacccactctggcctggggtggaccacctccaccgagccaattctcatggctgaaaataatragctgagctggggcaaggttgttgagaatagtgatacatcatgtgatgtcatttctgggttatttaggggcatatgaacataaatcctatttgattgtta

SEQ ID NO: 7370 - DNA, 201 bp, Homo sapiens
gtccaccagcaaattgtttatttctctgaaggaactctcatatgggcgaagaaggctgccaacatgtctgatgtatctgacctgagaattttttacagagsttcaggattaatttcttctatctccatagattggctttatcaaagaatgtatttcatcatggatgaactggttagtccgagaagttaaagaggaatagtg

SEQ ID NO: 7371 - DNA, 201 bp, Homo sapiens
gttataactgatagaattgttttctctttatgaggagttttcttatgagaagtggtggcaacaaggcaagatagattattttttcttaaataagttaggarcccttataattgcagaagataaagcaggctattttatttctttagggtatgtggtcatatattttttgggctagaggactgggtaaaggaggtttaaatg

SEQ ID NO: 7372 - DNA, 201 bp, Homo sapiens
taaaattatatcataaccagagggaaatttagtagttctccaaaaacacagtagtactgtacttttcggaagaccattttttgttgttgttggtggtggtkgtggtgcataaggactattttgagctgatgaagacacagtcttgacatgtttcaaattctacttctttggaaggtacaggcttatcacagtaagcaacag

SEQ ID NO: 7373 - DNA, 201 bp, Homo sapiens
tgatgtttctttcaagaggaaatttgtgtaagaggattcccatttgcatttccattggctttcaactagtttgcttgaccctaagacaaaacaaaacaaarctaaaaaaccaatagcctggataatacatagtaatggaaaagagattgagattaacatttttaatgtgactagaggtcacggaaggttattgccaataac

SEQ ID NO: 7374 - DNA, 201 bp, Homo sapiens
ctgcactataataattattgcatttaattgaatcttcacagaagcttatgaattaagtattatcctacttatgtcccggatacgaccactaagtttagatrgcacaggtaactttgagaatatcacattgggagcaaatatcatgtggaattaaaatacagatcattctgctctgttccatttattattattattattatt

SEQ ID NO: 7375 - DNA, 201 bp, Homo sapiens
ttttattatactttaagttttagtgtacatgtgcccaacgtgcaggtttgttacatatgtatacatgtgccatgttggtgtgctgcacccattaactcatsatttaacattaggtgtatctcctaatgctatccctccaccctccccccaccccacaacaggccctggtgtgtaatgttccccttcctgtgtccatgtgtt

SEQ ID NO: 7376 - DNA, 201 bp, Homo sapiens
caaatgtacatcctgagcagacttgatgtcagagaatgccactgtttttttttctctcttttttatttatttatttattttattatactttaagttttagkgtacatgtgcccaacgtgcaggtttgttacatatgtatacatgtgccatgttggtgtgctgcacccattaactcatcatttaacattaggtgtatctcct

SEQ ID NO: 7377 - DNA, 201 bp, Homo sapiens
gctttcagcttttctctattcagtgtaatgttggccatgcgtttgtcatagatggcttttattacattaagatatgccccttctatgcctgtgttgctgargttttaatcataaaggatgctgaagtttgggggctatagagcccccaagagagtatgtcctttgtcttcagctaccaggattggtagagaaagaccctca

SEQ ID NO: 7378 - DNA, 201 bp, Homo sapiens; identical to SEQ ID NO: 691

SEQ ID NO: 7379 - DNA, 201 bp, Homo sapiens
agcctgagacctaatagcttcactgctgaattctagcaaatatttaaagaaaaactaatacgaatcctactcaacttattctgaaaaacagagaaggaggsaatacttccaaactcattctatgaggccagtacttccctgatactgaaaccagataaagacacaccaaaaaagaaaactacaggccaatctttgatacat

SEQ ID NO: 7380 - DNA, 201 bp, Homo sapiens
tatttactttcccatctttccccatatatttaggtggaatttaatgacccagtgctgggctcaagaacccgaccaaagacctacttttcatagaattcagraccaacttcagttattcagaaattttttcttaaatagcatttatcagtgcagagatgaagcaaacaacagtggagtcataaatgaaagctttgaaggtaa

SEQ ID NO: 7381 - DNA, 201 bp, Homo sapiens
accctcacaggagaccttcaccttgagtagttgagtgttgagtagatattttcccaccatctacttatccatctatttatttggaataataactgttaaawtaatgtcagcttttcaaaagaaaggtgttatctaataaacgtagtaatgttaaaagccactcttaaataagaaatcaaagcctttgttttgattcactta

SEQ ID NO: 7382 - DNA, 201 bp, Homo sapiens
agtttagtagtaaactagctttaactggtgatactgaaagttgtccttgtcataagactacatctatatccataggaaatattggtgtcaccagttcactrtttaataataatgttttgctcaagccattttaatctgctccagcatggcctggttcttatttgtcataacttcacatatggaaactttagaggaacaatc

SEQ ID NO: 7383 - DNA, 201 bp, Homo sapiens
accaccaaagccaactgctcagtcacccctagtttgggagaattacaaagagatcattgagtggaggaccctcactttgacatgggagacccagcattgtsaagaaggtagaatgacttgtccagacagaaaggtctagcttatgcttccaaacttcctttgtttcctatattgggtgaacattttgttgagagctagaga

SEQ ID NO: 7384 - DNA, 201 bp, Homo sapiens
aaagatatggagggcacagtggggttcaaaggattcttcaccatgcctctagaagtcacataagcctcgtactcaacatatatcctgacactaccttagamaggaaggcagagggagtggggatggcctgaaaataagagaggttgggttattatccagaaaagactgaatattacttaaaaagattgtttaaaatagtgg

SEQ ID NO: 7385 - DNA, 201 bp, Homo sapiens
acatcagagacaaggggtttcttttggggacaacgaaaatgttctaaaattagattgtggtgattattgcacaactctgaatattctaacagcactgaacygtgtactttaaataagtgagtttatggcaggtgaatatatttcaataaaacttctaaaaatgatgggaaaagtaaggatcatttcaggaatctttttttc

SEQ ID NO: 7386 - DNA, 201 bp, Homo sapiens
agagagaatagtcagagatccaagcaggcaggcagcattatgaaaatctgtcagcagggaacagggcactagccaccagactgaaattagggagtaggatsctaggcctagagaaagtcttcacaggtagagtaggttttgtcaagagcagagcagggttccatgtacacaggaaccagtgaaccattcaagacatccagc

SEQ ID NO: 7387 - DNA, 201 bp, Homo sapiens
ggtttcttttggggacaacgaaaatgttctaaaattagattgtggtgattattgcacaactctgaatattctaacagcactgaaccgtgtactttaaatamgtgagtttatggcaggtgaatatatttcaataaaacttctaaaaatgatgggaaaagtaaggatcatttcaggaatctttttttcaacatgtatgtgtgt

SEQ ID NO: 7388 - DNA, 201 bp, Homo sapiens
ttattgcacaactctgaatattctaacagcactgaaccgtgtactttaaataagtgagtttatggcaggtgaatatatttcaataaaacttctaaaaatgrtgggaaaagtaaggatcatttcaggaatctttttttcaacatgtatgtgtgtactaagttgttttgttaaattattttttgctatggagcatggtcaaaa

SEQ ID NO: 7389 - DNA, 201 bp, Homo sapiens
ggactgggggtgactacctgtaggaatctaccttataccttagatgagaacacgtaagataagacaagtcagcaaagtttaaatctggtggattaaaaaawtttttatatcaaaataaacatcatatggctaaaaaattaaaatgtgtgacaaagcatatagtgaaaaacaggagccctgtgcactgcctcattcctacct

SEQ ID NO: 7390 - DNA, 201 bp, Homo sapiens
tattgcacaactctgaatattctaacagcactgaaccgtgtactttaaataagtgagtttatggcaggtgaatatatttcaataaaacttctaaaaatgawgggaaaagtaaggatcatttcaggaatctttttttcaacatgtatgtgtgtactaagttgttttgttaaattattttttgctatggagcatggtcaaaag

SEQ ID NO: 7391 - DNA, 201 bp, Homo sapiens
attagataattgctctgattgctcacatgtgtatcccattctctgttcagatcagaaatcagtacaaactgaatatattggataaatattggttgaactgragagtggttcatcttgtaactttagtaaggttatccatctctaaacccccatactttccaaatgtcctcaaacttaggttcacagtgcccttgacactgt

SEQ ID NO: 7392 - DNA, 201 bp, Homo sapiens
ttttcggaagaccattttttgttgttgttggtggtggtggtggtgcataaggactattttgagctgatgaagacacagtcttgacatgtttcaaattctamttctttggaaggtacaggcttatcacagtaagcaacagccattgctgtggttgaaagtgcataaacctagatatcgcttaaatgttaaaaatagttgaat

SEQ ID NO: 7393 - DNA, 201 bp, Homo sapiens
tttcatgtgtaaaggtctacggtcctatgaaatgtaactttgttgttgacacttacacaaaatgactcattctgaggataatgaactttacccactaatcratcattcaaatgcgatcactgaggtcttcagtggctctttttttccattaggataaaatggatttgtgcttagattttgcaatgtgactagaaatgataa

SEQ ID NO: 7394 - DNA, 201 bp, Homo sapiens
tcgttactgtgaggtttgactttaaattagatgtgcttctctaattcttccgttggcttctttctcctgattgctggattttcctgcttcagtcatgtgtsgggtatttctttgtggtttataaaatggtagctctattgcctgcatcaattgtagattaaaaaaaattagtccactgcaaatgcaaagtagccatgctag

SEQ ID NO: 7395 - DNA, 201 bp, Homo sapiens
ctaacagcactgaaccgtgtactttaaataagtgagtttatggcaggtgaatatatttcaataaaacttctaaaaatgatgggaaaagtaaggatcatttsaggaatctttttttcaacatgtatgtgtgtactaagttgttttgttaaattattttttgctatggagcatggtcaaaagtttgggaaatgccagtctagc

SEQ ID NO: 7396 - DNA, 201 bp, Homo sapiens
ggagtcagcctgcacggattcaaatacttgccatttgttaatagaatgaccctgggcaagttactaaaccactctgtgtctcagtttccacacctggaaayggggaatatttattatatcttttaatggaactgttgtacagataaaattaaaacacattagtagagcacttagaacagtatctagcacagaggtcagcaa

SEQ ID NO: 7397 - DNA, 201 bp, Homo sapiens
tttgaatctcttttcagtttaggaagaatgaatatctcaaaattttgaatcttccaatcaatgaaaatggtgtatctctccatttttttaggttttctttratttctctcagaagtgttttatagtttttagtgtagatgtctaacatatcttttattaggttaatgcctaggtatctaatttttttaatgctttatatat

SEQ ID NO: 7398 - DNA, 201 bp, Homo sapiens
catgtgcacaatgttcagttttgttacatatgtatacttgtgccatgttggtgtgctgcacccattaactcgtcatttagcattaggtatatctcctaatrctatccctcccccctccccccaccccacaacatttattagggtaggaagtaaagaatgagattagttctgcctgaggtgggcagaatagaaaagcttatg

SEQ ID NO: 7399 - DNA, 201 bp, Homo sapiens
ttcttataaaataagctttgtagttcaggtgttaaacttaataaataggtagatccattaaatttttattgggaaaaataggtacactggtacctcccttmgtcttttgaaattatggtattttcctcatatttcaattgaagttcattaaaaataaatcaaacctggatgtgtgtcagggctgaatgtagaaatgttttt

SEQ ID NO: 7400 - DNA, 201 bp, Homo sapiens
ccagttccggaaacagtgctattgttttgtgtacattaattttgtattctgaaagtttactgaattaatttgtcagtattaggagctttatggagaagtayttagggttttctagatatatgatcatgtcatcagcaaacagtgatagtatgacttcctctttactgatttggatgccctttctttctttttgttgtctgc

SEQ ID NO: 7401 - DNA, 201 bp, Homo sapiens
atgcaaaagcatacagagtaatataatagactttggagactcagaaggagggagggtggaagttgggtgggggataaaaaaaaccctacatattgggtacrtttttacactactcaggtgactggtgcactgaaatctcagcctttacagctgtacaattcatccatgtgaccaaaaactacctgtaccccaaaaagctat

SEQ ID NO: 7402 - DNA, 201 bp, Homo sapiens
ccacaacatttattagggtaggaagtaaagaatgagattagttctgcctgaggtgggcagaatagaaaagcttatgtcaagaagtgggtattaggttaagmaagtttgagatctgggactgaatttgactactggaagcagataattggcgtagttggagctaaggcaaaccagcggggatcctaatgttcaaaatgaaaa

SEQ ID NO: 7403 - DNA, 201 bp, Homo sapiens
agaatctcctttttaaaatagatgaaatagacttaatttgtaatgtagaaactctagtgtatctcattgtaaataaccaaacaaggttaacctgatttctytttaactgaaaaaaaaaaatcaatagatctctctcagcatggagcaaggacatgattcaactcctaaaaggctgagaattgccagaatacatttttacct

SEQ ID NO: 7404 - DNA, 201 bp, Homo sapiens
gaggtgggcagaatagaaaagcttatgtcaagaagtgggtattaggttaagaaagtttgagatctgggactgaatttgactactggaagcagataattggmgtagttggagctaaggcaaaccagcggggatcctaatgttcaaaatgaaaaatgtgattttggtggagattatggaaggcatccggttaagagcacaggt

SEQ ID NO: 7405 - DNA, 201 bp, Homo sapiens
gaagcagataattggcgtagttggagctaaggcaaaccagcggggatcctaatgttcaaaatgaaaaatgtgattttggtggagattatggaaggcatccrgttaagagcacaggttctggagtcaatcactctgcccccttcaaatcctaatccaggtaatttactaaacttccctgtgccccagctgtaaaatgaggtt

SEQ ID NO: 7406 - DNA, 201 bp, Homo sapiens
acctcacagcttctaggtatgttacagggagattgcactgctccgaaatcaggctactggcaatcttagcttatttgaaaaatatttgtaaagccaaagawagcaaaaacaggatctttggatagtaacttctatctgtctcatggattctatgccatatctcatggattctgtgccatcaggcctcatctagatgactgg

SEQ ID NO: 7407 - DNA, 201 bp, Homo sapiens
agggtaaagaggtttgtaaataactagttacagtagaatatggtaagtgctgtgatggggtatgaagagagtacagtatagacactcaggagaatgctgcytaagagcccaggaagtgtatggataagcttttctgcttcttcacaaaatagagtatacattatggagtgaaggcagaactcttcctgtgatgtcttaaat

SEQ ID NO: 7408 - DNA, 201 bp, Homo sapiens
tttcttctaacaatgacattttatggttttattactgttctgcacatgtattcatttgtttaacaagtgtttagtgacttaaggtataagcatgcacaagkcactgtgccaggaactagaaacttaacaatgaaaaaaatagggtctctgtttaaaaggactctcaacctttttgagatgcatacttaaaaccagagagac

SEQ ID NO: 7409 - DNA, 201 bp, Homo sapiens
agggcaactcagggttttcagggcagctgtggggtgaaaggtgctagtaggcagccgactccccaaactgtctacctatttaggtttgacatgctaccatytagttgaatcaccagttttgagttttgcttgatatgtgaggacaccttagggacccaggatataccaatgccacattgtcctgggctttacctttgacaa

SEQ ID NO: 7410 - DNA, 201 bp, Homo sapiens
tctcttgcagtgtatccaaggatgtcacttttggaactctgtagatcagaaaaactgtgctttaaagtgtgtaagtattaattagatttctattttgataytgatgtttctttcaagaggaaatttgtgtaagaggattcccatttgcatttccattggctttcaactagtttgcttgaccctaagacaaaacaaaacaaa

SEQ ID NO: 7411 - DNA, 201 bp, Homo sapiens
cagaacccagggatgttcaatcgctccaaaactataaatgttttttagtagaatctccggtatttgttaaatttcctaggcctatgcgtctcaaattttartgtgcaattatccgggatcttattaaaatgctgattctgattcaataggtcttgggtggagcctgagattctgcacttgtaacaagctcccaggtgttgc

SEQ ID NO: 7412 - DNA, 201 bp, Homo sapiens
ttggtcaaagatatacttgcatattaggcattcggattttaaaatttagttgaagcttatcagcaaaaccagtatcaaggctgccctgactgtcatgctcyctgtcttccacagcgggagtcgtgtgaggttggctgtagcagcgcggaaggtgcatatgaagaggaagtactgggtaagaggacacacacgacttttaaa

SEQ ID NO: 7413 - DNA, 201 bp, Homo sapiens
ttagttatattacttgtttctgttaaacctgtgacaaagaccttttctttgatcaaaatgtggttatgctcctctgagtcctcttcttgactaggcctcarccttggtcttcatgtgtccatccttgctgagttcagttttagcaagaatcctacaaagtcagtttaggagaaccccctaccactgatacctgatcaagtt

SEQ ID NO: 7414 - DNA, 201 bp, Homo sapiens
cgcccgatcccattgaccgcccaagggctgaggagtgcaggcgcatggtgtaggactggcgggcagctccacccacggccctggcacaggatccactaggygaagccagatgggctcctgagtcaggtggagacttggagaacttttatgtctagctggaggattgtatatgcaccaatcagcactctgtgtctagctcag

SEQ ID NO: 7415 - DNA, 201 bp, Homo sapiens
cggggcaaggctcgggacctgcatcctgccatgcccaagtccccccgtggtgggcttccgcgcagcccgagcctccctgatgggtgccgccccctgctccrtggcgcccgatcccattgaccgcccaagggctgaggagtgcaggcgcatggtgtaggactggcgggcagctccacccacggccctggcacaggatccact

SEQ ID NO: 7416 - DNA, 201 bp, Homo sapiens
gtcctttattcttccctcacacttggttgataatttggttggacttttaggttgaaaactctttatctaacagataaagccactacatctttctttcctcrcttctacaattgccaataagaattcttatgccactctgattcctgagcttattatcagtggtctgttttttgcctcctccccttcaaaaatttgaggaaa

SEQ ID NO: 7417 - DNA, 201 bp, Homo sapiens
gaattagagtataaaatttcagaaatatattggggtacacatcccaggataatggatggttctgttgtgccacagacatgctctgagcattggctcccccsgcctgtaagagagtggtattgtaagagaaaactggacagctcagaaccctctgtgtcatctgcctgtaaaagcaaaacctgaacaaaaaaatactgtgtt

SEQ ID NO: 7418 - DNA, 201 bp, Homo sapiens
ggatgaaaaaggatggactgaaaaaaaaagtggatctactttttccagatcgttttgagtcacccaggatcctaatgcttataaagattggttctcacatkcacttcagctgttccgcagcctttcctggtggttgccaaaaacagcttccagggcttcgtctccttcgctgcaaccatagagacatcgttaggtgctgaa

SEQ ID NO: 7419 - DNA, 201 bp, Homo sapiens
aaatatattggggtacacatcccaggataatggatggttctgttgtgccacagacatgctctgagcattggctcccccggcctgtaagagagtggtattgwaagagaaaactggacagctcagaaccctctgtgtcatctgcctgtaaaagcaaaacctgaacaaaaaaatactgtgttcaaagataacaataaattctgt

SEQ ID NO: 7420 - DNA, 201 bp, Homo sapiens
ggaaattactccaccctctattagtgcacctcaaaaaattgtggctgattcatacaatgggtatgtgttagccttgtaaagatgaattctcttccattggsaataaataatctttgagaaacttgcttgctaatgaaacattgtagtaccagatgagcctatctatgcatcttactttaggtgaatttaattaaattcagg

SEQ ID NO: 7421 - DNA, 201 bp, Homo sapiens
atattttctttttttccctaaagctggagtcccaaataaaccaggcattcccaaattactagaagggagtaaaaattcaatacagtgggagaaagctgaasataatggatgtagaattacatactatatccttgagataaggtatgtgtgtttgcaaagtacttgtaaatgacaaagaactaagaagataattataaagta

SEQ ID NO: 7422 - DNA, 201 bp, Homo sapiens
aatattttgataacatatcaaaatgtcacttcaacatgcaatctgaataaaaattataaagttattttatattctttttttcacattaattcttggacgtyctgtttgtattttacatttatagcatagcttaatttgcaaactaagttttcatagaaaatatttgatctgtatttagatttcataaaatttacaggcaaa

SEQ ID NO: 7423 - DNA, 201 bp, Homo sapiens
acattatggagtgaaggcagaactcttcctgtgatgtcttaaatgaaaattagagagtgaaagggaccacatgaattatctccttgatctgtgtcctcaarcttatccccctgtcctgatcttgtcggtatctctacatcttccacattagcattgtcagatattttaaaaataaattttacacttttattttaaaaaatt

SEQ ID NO: 7424 - DNA, 201 bp, Homo sapiens
ggtggatagcctaaggtcaggagttcgagaccagcctgaccaacgtggtgaaactccgtctctactaaaaatacaaaaactagctgagcgtggtgatgggygcctgtaatcccagctactcagaaggctgaggcatgagaatcaattgaaccggggaggcagaggttacagtgagctgagatcgcgccattgcactccagc

SEQ ID NO: 7425 - DNA, 201 bp, Homo sapiens
gtgacaacgtgctagcagccctcgctcactctcagcacctctttggccttgatgtctgctctggccatgcttgaggagcccttcaggctgccgctgcactktggtagcccctctctgggctggctgaggctgaagccagctccctctgcttgtgcggaggtgtggagggagagacgcaggtgggaaccagggctacgtgtg

SEQ ID NO: 7426 - DNA, 201 bp, Homo sapiens
tgttcaatcgctccaaaactataaatgttttttagtagaatctccggtatttgttaaatttcctaggcctatgcgtctcaaattttagtgtgcaattatcygggatcttattaaaatgctgattctgattcaataggtcttgggtggagcctgagattctgcacttgtaacaagctcccaggtgttgcaatgctggtggtt

SEQ ID NO: 7427 - DNA, 201 bp, Homo sapiens
gagtgcctcacagaatggaagttaccaaaaggtacagcatgtgctatctggacttagtggctattaaatatttctcagaaattgcaactcaaacaaataakttgtctagttgtgtgtttagtatcttttatcccaacatgtaagctgtgttggggcaggatgctgtctgtcttttttagattgttatctcttgcactgaat

SEQ ID NO: 7428 - DNA, 201 bp, Homo sapiens
ttggctccacactgcgtttatgagctgtaacacttaccctgaaggtctacagcttcactcctgaggccagtgagaccacgaacccagtgagaggaatgagygactccagatgcgccagcttaagagctgtaacattcaccacgaaggtctgcagcttcactcctgaagccagagagaccacgaacccaccagaaggaagaa

SEQ ID NO: 7429 - DNA, 201 bp, Homo sapiens
gggcatatagcagctgctcagtcaacatttgctgaaggaatgaatgggaagcaccatttgttgctgggaaacaatccaggaggctgtgtggctgctgcagyggccagcatgggcagaggaatctgctgtcctttgctagcaagagctattggtggttttcatttcctgttctatttacctttggcatttgcaaatactcct

SEQ ID NO: 7430 - DNA, 201 bp, Homo sapiens
ttatgagctgtaacacttaccctgaaggtctacagcttcactcctgaggccagtgagaccacgaacccagtgagaggaatgagtgactccagatgcgccascttaagagctgtaacattcaccacgaaggtctgcagcttcactcctgaagccagagagaccacgaacccaccagaaggaagaaactccaaacacatccga

SEQ ID NO: 7431 - DNA, 201 bp, Homo sapiens
attactctgagtatacagatgactgtaaaattccattttggcacaaatatttactgttttatgtatctatgtgcatgtatataatatatatgttcctatgkgcatacacacacattcaccatttgcatatatattactctaatctggtttgggaggttataatccctggaccctgggcagagttggagttggggtaatgga

SEQ ID NO: 7432 - DNA, 201 bp, Homo sapiens
taccctgaaggtctacagcttcactcctgaggccagtgagaccacgaacccagtgagaggaatgagtgactccagatgcgccagcttaagagctgtaacaytcaccacgaaggtctgcagcttcactcctgaagccagagagaccacgaacccaccagaaggaagaaactccaaacacatccgaacatcagaaggaacaaa

SEQ ID NO: 7433 - DNA, 201 bp, Homo sapiens
tgcaacaaaatcctttgccaacattttgcaagacagcttctacccaccccttctcccaatggtaagtaatgtctcacactgccctgcccaggtgtccttayggtgctctaagcaacctctgctacacttgattttctctctttcaaagagaccttgacgttttgatgtttcctacttagtcttcagctgaacttacctgtc

SEQ ID NO: 7434 - DNA, 201 bp, Homo sapiens
gtagttctcaggctgatggagttatgttcccagggatattatggctgactttactgcattatacaggccaccaggggagtggggaaaagccagcagtgacyggcctcgcccaactcccacacagcctgaaaggccagtctcactcccaccatgtctcccatgcagccagtgagtaggactaagaacttgccgcaggttaca

SEQ ID NO: 7435 - DNA, 201 bp, Homo sapiens
ccttcaaaataaggttatttgacaatagatgatatgaagaagctacattatttatcagtttaaaacctatgttggctgggtatggtggtgtgcacctgtartcccagctacttcggaggttcaagtaggaggattgctggaggtcaggagtttgagagcatcctgggaaacatagcacgactgtcccctaaagaaaaaaaa

SEQ ID NO: 7436 - DNA, 201 bp, Homo sapiens
gcagtataaattatccttcattagtaaaacagaaaaaattccctcttaatagagagcaaaaatacaaacaaaaaattaaattggcatgttttctcagttgytactggttggttataaaaattgcatctgagcaatttttcttgggaatgggtggaggtgagggttggctaagaagagagacagaaaacagaggagaaaagt

SEQ ID NO: 7437 - DNA, 201 bp, Homo sapiens
aatttttgtatatggtgagggtaagggtccagtttcattcttctgcatatatccaatttccccagcaccatttattgaaaggggtgtttttctccccagtrtgtgttcttgttgactttgcaaaagatcagttggctataaatatgtggctttatttctggattctggattctgttccattaaactatatgtttattttta

SEQ ID NO: 7438 - DNA, 201 bp, Homo sapiens
ccaaagaatagtccctaggataaatgtaccagtgtcaggaaaatcagggagagagagcctttaaagcatcgaagcagcccaggattagatctgtaatgtgmtaattctttgttaatcattatgctgctcagttttctgtgattatatagtgtaaatctttcctctcagtgttataacttgtataactattctttctcttta

SEQ ID NO: 7439 - DNA, 201 bp, Homo sapiens
aactgaacaggaatacatgctatgtgtatatctatctatctatctatctgtctatctatctatgtacctatctatctatctatcacctcagttatccacayctttaggaaatcaaactccttactcattgatgtttgaacgtaggaagcttgtcatttttgcaattcatatttcttggaaagaataatcttgaaagtgata

SEQ ID NO: 7440 - DNA, 201 bp, Homo sapiens
caagcatttaaaattatatcataaccagagggaaatttagtagttctccaaaaacacagtagtactgtacttttcggaagaccattttttgttgttgttgktggtggtggtggtgcataaggactattttgagctgatgaagacacagtcttgacatgtttcaaattctacttctttggaaggtacaggcttatcacagta

SEQ ID NO: 7441 - DNA, 201 bp, Homo sapiens
tacattcccataaaaaatgtatgaaaattgtggttcttccatatcctctcaacagttggctttgacaatctttattatattcaccattctttggtgtgggragcagtaaatattgtgattttaaccagcacttccctgatgactatcaattttgatcactttttcatttgttatcagccatttatatatcttcttttatga

SEQ ID NO: 7442 - DNA, 201 bp, Homo sapiens
ttagaatgccaatggcagaacacttgggaattataactggcacagcaactccatccttttggggggctctacatatatacttgcctatgtgaagatcacayaggattaggcaaacatacccttaagccattctaggtactattaaggccttgtcattttctaagcatttacttaatgagacatttctctgaataaaatttt

SEQ ID NO: 7443 - DNA, 201 bp, Homo sapiens
atttcataaaatttacaggcaaaatagttgatttacatacttgttctaaaatactcaaaaatattttaatatattatacgtgattcataatatatgaatcmaatattagttttaaaatttaccacaagttaattaaaactaaataacattaaacttttggttcctcggtcatactaaccacatttcaagggctccgtagtc

SEQ ID NO: 7444 - DNA, 201 bp, Homo sapiens
atgacaagatttggcctttgccttcaggaaatttacaatatagccaggaaattatccaaattgaccaatatttattaaccacttactgtatgccagttctrtactagatatgggaagatttaacaaggaataagaagagatgctttctctgatggagttcataaaacaggagggagacaaacacatgcacagcaaatgata

SEQ ID NO: 7445 - DNA, 201 bp, Homo sapiens
accacttactgtatgccagttctatactagatatgggaagatttaacaaggaataagaagagatgctttctctgatggagttcataaaacaggagggagayaaacacatgcacagcaaatgataatagatactagagagttatacctgagcagcagtggcatagagtgagtagacaagcctatgaaaccttcacctatatc

SEQ ID NO: 7446 - DNA, 201 bp, Homo sapiens
ttgtctacatatactaatcaaataagttatacatgaaagttaaagatagtacacgttcctatttggtaaaaattaggagtgttttggtaaaataatattcrggttaagtgtgtctatatatagaatatatagtatttatatagaatatataatataaatatgtatatagatatatagtttcaaattttggtcaccatggaa

SEQ ID NO: 7447 - DNA, 201 bp, Homo sapiens
gtatttagcttctagccttgctacttagtagcttcataatagtgggcaaaatttttcttcttttggctatgtaggcttccagtatataaaaataaagaatyctgtttacatgtctgaagagggtgttaggaggaaaaaaaagtcttagtttgtaagtcactgtggacttctttatcaaaatatgtaatcaaaacatgtaaa

SEQ ID NO: 7448 - DNA, 201 bp, Homo sapiens
ttttagtaagcttttttaagtttaataagaaaaatgtgtttgtagaaaactttgacctgacccttactctaacccctgaagctaactaataatattctatyaaaatagaaagcaactaggaggtaaaacattgaaatcaatattgtttgaccaagaaacacattatttggtctcaccacacagtgtcactttttccagata

SEQ ID NO: 7449 - DNA, 201 bp, Homo sapiens
aaaactaaataacattaaacttttggttcctcggtcatactaaccacatttcaagggctccgtagtcacatgtagctagttgctgctgcactgagcagtayggctctagtctgtagtagagatgagataaactgattgctgtcactcatcatattccgaacttgagaattgtaattgaattgcccctcaaactactcttcc

SEQ ID NO: 7450 - DNA, 201 bp, Homo sapiens
tgttacaacttcagaaacaaccaagcagatttttcaagcaaaaataattgcaaaatttccttccattgaggggaaaaaaacctctaaacacaatttaaagytttttacttgaatttcctagtctgaaaaggagcactttgatcaaactatagaaactgatacacattgaaataacatacagttgtgagtagtataaagtga

SEQ ID NO: 7451 - DNA, 201 bp, Homo sapiens
gtctctgtgctggccatactgacctttccctctttcttgacatagaagacacattcctgcctcaaagttttcatcgtgctgttgcttctgcttttgcccaratctctgcaagcccagctcctcctaatgactgaagtcttggcttggatcaccctaataaagtctccttctctgcctagttatacctgtgcctttgactta

SEQ ID NO: 7452 - DNA, 201 bp, Homo sapiens
agtcttggcttggatcaccctaataaagtctccttctctgcctagttatacctgtgcctttgacttattttcgtcctagcaattttcattatcagaattaytttttctttttaaaaatttgtcactcagttattatctacctccttctaagggaagtcctgtaaggcagggagtttaactttcttgcttactgtcatattc

SEQ ID NO: 7453 - DNA, 201 bp, Homo sapiens
tatctacctccttctaagggaagtcctgtaaggcagggagtttaactttcttgcttactgtcatattcttagatcccaaaaccatgcttggcatgaaaaargccaattgttcaaatattcttgaatgaatgaatgaataatttttaagggaacaatgcctcagttcatatggagggcagtgggcgaggcttcctagtgtta

SEQ ID NO: 7454 - DNA, 201 bp, Homo sapiens
tttttacgggtttcatttctggatgattaccttatttccaggtcctgtaagaaccttgcctcatgtctttcttatgctaatgcaagagttgtaggagcacrtagaataaaccaaagatgtaatctctgaactaatgaagtaatgagaatccaggttgtgcctttgttgtagagtattaccaaaatcacaagcattttttaa

SEQ ID NO: 7455 - DNA, 201 bp, Homo sapiens
caaaaaattagccaggcttagtggtgtgtgcatataatcccagctacttgggagggtgaaacaggagagtatcttgaagctggaaggcagaggttgcagcraactgtgatcatgccactgcactccagcttgggcaacagagtgagactccatctcaaagaaacaaggaaagcccccagaaaatttactttaggtctacta

SEQ ID NO: 7456 - DNA, 201 bp, Homo sapiens
gggaggtgaaaggagtggggggatggagagagtgggagggagggagggagagagagaagagagagagagagagagagagattgagagaaggaaacgtagtwgttagctttgcctccacttgagataacttttaaactcccagaaggatgggaattttattatcgatttcccctgaaaatatcagaaaaaacaggaccacaa

SEQ ID NO: 7457 - DNA, 201 bp, Homo sapiens
atgcgtacagatactcacaaacatatattctcatgactacttgcatggaccagcccttccaccactccagaaacacacactaattggtgttatgttttagyagcactggggataccaccatcacagaatttgcagcctggagtacttctgaaatttcccagaatgcactgatgtactatagtggtcggctgttctggatca

SEQ ID NO: 7458 - DNA, 201 bp, Homo sapiens
tgcgaaacgtatactaaatcttgaaattaaataattccaaacccaaactgaggtatttaaattaatccttacctaagcaaacctgggcttatcaggcaccsttccttttagtatgcagatcaatcattgaactgttcatgtttgcaagttatagctcttctttttagggcaaatgtattgtgcctgctttccgctattacc

SEQ ID NO: 7459 - DNA, 201 bp, Homo sapiens
ttttctcctatttcttttttttgtttcatcctgtagggaacttttcctttacccctaaggttattccagattctgttcaagagtcttcatttaggattgarggaaatgcttcaagttttcaaatcctgtggaatggtccccctgcggtagactggggtgtagttttctacagtgtagaatttagtgctcattctaaggtat

SEQ ID NO: 7460 - DNA, 201 bp, Homo sapiens
ctgcaagtatgtgtgtgtgtgttttgtagctgatgttaatgcatctgttaagagttgcaggaaatttgtgtttcagtcatcaaattatgtactgtgttttycattaatgagataaaatgtaaatatcattaagttttcatagattttaaaactcagcattggtataaagatattcattgaaatattcagctactctacaaa

SEQ ID NO: 7461 - DNA, 201 bp, Homo sapiens
aattttactgcaggggaaatagttgacataaagatgtacttgcgtattaggcactccgatttcaaagatttactcgtatattggtcaaagatatacttgcmtattaggcattcggattttaaaatttagttgaagcttatcagcaaaaccagtatcaaggctgccctgactgtcatgctccctgtcttccacagcgggagt

SEQ ID NO: 7462 - DNA, 201 bp, Homo sapiens
gagtggtataatggactttggagactcagaagggggagggaaggagaggagtgagggatgaaaaactacatgttgggtacaatgtatactacttgggtgamaggtgcactaagatctcagacttcaccactatataatttatccatgtaaccaaaaaccacttgtaccccaaaaggtattggaaatatatatatatttcct

SEQ ID NO: 7463 - DNA, 201 bp, Homo sapiens
ttgtaccatctcttttcagttgtaatttagttgtgcttaaaacagtcactgaattaactttaaaaaccaagtactctatagacagagaaaatgcactcttyctgtctaaagacaaataaaatatcatgatagtttgcatatgaccctatctatagccatacttttaaacataatgcaagtactaaatatagtattcattat

SEQ ID NO: 7464 - DNA, 201 bp, Homo sapiens
ttaagagaaaacccacagaatgggagaaaatatttgcaaactacccatcagacaagggattaataaccagaataaataaaaagctcaaacaactctatagraaaaaaatcaaataatccaatcaaaggatgggcaaaagatttgaatagacatttctcaaaagacatacgaatgacaaacaggcatatgaaaaggtgttta

SEQ ID NO: 7465 - DNA, 201 bp, Homo sapiens
catatataacctacccacagctagtattatactgaatggggaaaaactgaaagcctttcctctaaggtctggaacatgacaaagatgcccacttcaccacygttattcaacacagtactggacatcccagctagagcaatcagacaagagaaagatattaagggcatccaaattgtaaaggaggaagtcaaatcatccttg

SEQ ID NO: 7466 - DNA, 201 bp, Homo sapiens
tacttagtagcttcataatagtgggcaaaatttttcttcttttggctatgtaggcttccagtatataaaaataaagaattctgtttacatgtctgaagagrgtgttaggaggaaaaaaaagtcttagtttgtaagtcactgtggacttctttatcaaaatatgtaatcaaaacatgtaaaaatattattgctatgaaatta

SEQ ID NO: 7467 - DNA, 201 bp, Homo sapiens
gtgttatttagaggattattcagacttgagccaaaagatgattaagagctgggcaccttggttagatgttctactggtgaatgtttttgtattatttaaawcttccagctagaagaagattggaattaccacttgtttctgatttaacttaatagtctctgcgatgtttacagggagatcagatacacacacatctgacca

SEQ ID NO: 7468 - DNA, 201 bp, Homo sapiens
tgtacagaagctctttagtttagttagatcccatttgtctattttggcttttgttgccattgcttttggtgttttagtcatgaagtctttgcccatgcctrtgtcctgaatggtattgcctaggttttcttctagggtttttatggttttggtttttacatttaagtgtttaatccatcttgagttaaattttgtataagg

SEQ ID NO: 7469 - DNA, 201 bp, Homo sapiens
tagactgggagggtggaaggagggccagggaagctggggagctgttaggaggccaagcaagtcaggcttgatttggtgatggctctgacaaggatggtgaygggaaaacagggaaaggtttgtcatatattttgaagattgagctgttggggtggctgaatggatttggcaaggaagatgggaaaatcaaagttgctaact

SEQ ID NO: 7470 - DNA, 201 bp, Homo sapiens
atctaaatttaatgttttggggaaaagatattttaaaaaagatactagccatatcattacatgtgtgtatcaccttaaagtgtacaaaacacatttttatrtatcactcctttattaactatttactacatacctatcatgtgtcagaaacatcatttcatttgatcctcacagagctctgaggtgggtaggaaagtctta

SEQ ID NO: 7471 - DNA, 201 bp, Homo sapiens
gggttgttacataggtatacatgtgccatggtggtttgctgcacctattgacctgtcctctaagttccctcccctcagctcctatccctcaacaggccctrgtgtgtgctgttcccctctctgtatccatgtgttctcaatgttcaactcccacttatgagtgagaacacgtgctgttttgttctctgttcctgtgttagg

SEQ ID NO: 7472 - DNA, 201 bp, Homo sapiens
caaaataacaaatgaaaatgctttctaagaagtactggaaatttgaggggaaactaataaaagatttttgagaacatccaaagattcacaattctgggagsctgttttctatttttactagaaccctatttgctgacttgactgccccttactctaatctgtacatgcctgtgccaatgggtattgagtgtcatccatcat

SEQ ID NO: 7473 - DNA, 201 bp, Homo sapiens
cacagcaaatgataatagatactagagagttatacctgagcagcagtggcatagagtgagtagacaagcctatgaaaccttcacctatatcaagctgcctyaggcatttttaagagagaaggtgcctttgggaaatggaaactttagtgcactctgaaagatggagcaagaagaggtatcccatgtgagaagagaagccta

SEQ ID NO: 7474 - DNA, 201 bp, Homo sapiens
gattaggaaagcaaataaagcactgtgtgatatttaattagtgtttctaacctgccattttaaactttccaagatattttttaaggaaacactataattgwttctttacgggtttcttctttcttatggtatattaagcagtggcatttctgaactctgagggtcttgctgagagaagttgagaggctgtgaattatgctg

SEQ ID NO: 7475 - DNA, 201 bp, Homo sapiens
gaaactttagtgcactctgaaagatggagcaagaagaggtatcccatgtgagaagagaagcctaatgtaagaaggcctggagattgaataatagtatgagygttaaacattaaatagcaatgtgattggaatgagggagggaatgaagaccttgtggaggagtcctaagagaggagagggccatccagagagaatgactta

SEQ ID NO: 7476 - DNA, 201 bp, Homo sapiens
gttgtgtgatgattgcccacaaaaccttcttaagatagatgagttttgaacttttgttgccgtcataattaaggaaaatattcaagtgtcttatgcaaagrttcattatattaggatctatgcaaaaaggaattaaatgatcataggccttgctttcagaaatttataatgcaaggtgtaaaaacaaaggatttgaagtag

SEQ ID NO: 7477 - DNA, 201 bp, Homo sapiens
atttccatgtgaagtgcacttctaagaactaacctttagtcactgggtgactttatgggagtaaaaggaagctgttatgaaatagctcttatggaactgtwacaagctttcaagcattcaaaggtctaaatgaaaaaggctaagtattatttcaaaaggcaagtatatcctaatatagcaaaacaaacaaagcaaaatcca

SEQ ID NO: 7478 - DNA, 201 bp, Homo sapiens
actcagctattaatggaatgccaggttcagagcattcctgcccttctctccatagcctgagatgtacgatagaaagcccagccatcaggattctcttcagkttttagtttgcacaacaaccacaccactcctgagaagaaatgggatcaaagggcaatctacttcaagtgagagctttctggggttttataacagatatat

SEQ ID NO: 7479 - DNA, 201 bp, Homo sapiens
tttatctttcaatttcttatttgtttcaaatatctaccaaattgttagataccaaattgactattaacacatacttattaagtgatactacttaaaaagtygaactgttagagaattcttttggttcagggaaccataaaaaaatttctgagaaactaaggacaccagaactgaggaagtgtggaatcttttatttacatt

SEQ ID NO: 7480 - DNA, 201 bp, Homo sapiens
tcaagaaaaatggaagtttatcataatttgtacagttttatttctgttaaatgttctatgtaacttaattttgaaaataatgaccttactttatttaaaartattcaattgatatatatatattcaagctgtacaacatgacttaataaatgtatacattgtgtaattatcacaattgaattaattagacattcatcacca

SEQ ID NO: 7481 - DNA, 201 bp, Homo sapiens
tatatatatatatgagagagagaaagagagagacagagtctcattctgtcacccaggctggagtacaggggcacaatcacagctcactgtaacctcaaackcctgagttcaagcagtcctcctgcctcagcctcctgagtagctaggcatgagccaccatgcctggccaaaaatagctattttttattaggcatttatgag

SEQ ID NO: 7482 - DNA, 201 bp, Homo sapiens
atccaggtagaaaatgttatgggcctgagtgaggggatgagcatgaggtgagaaaggagatgacaaactggacatttaaaatgggactagttcaagctgcrcacagtgattcacacctgtaatcccaacactgtaggaggccaaggcaggtggatcactggatgccgggaattcgataccagcctggccaacatggtgaaa

SEQ ID NO: 7483 - DNA, 201 bp, Homo sapiens
tttttattaggcatttatgagttgaccacttttctcattaattaatatgtattagctccttttgtcctcagagttatacatactattattaacctcatttyacaggtgagaaaattgaggcacaaagtttatatacttgcttgaggccacatagctggtaagggatatctctgaaattataacccagctgcctggtaacag

SEQ ID NO: 7484 - DNA, 201 bp, Homo sapiens
tatattgtgatgaaatagatatagacatatttaatgtaatgtctttggtttaatagtagaagacaattatggaaaaataagatgcttagggctcttggccmactatattatagtaagtagttcttcatataaattaggaggcacaactacaaatatgtaaacttaatgcatactgacaatttgactaacaaagttaggcta

SEQ ID NO: 7485 - DNA, 201 bp, Homo sapiens
ttctcattaattaatatgtattagctccttttgtcctcagagttatacatactattattaacctcattttacaggtgagaaaattgaggcacaaagtttayatacttgcttgaggccacatagctggtaagggatatctctgaaattataacccagctgcctggtaacagagccttttcttacccactgtgccatgtactg

SEQ ID NO: 7486 - DNA, 201 bp, Homo sapiens
tacatactattattaacctcattttacaggtgagaaaattgaggcacaaagtttatatacttgcttgaggccacatagctggtaagggatatctctgaaaktataacccagctgcctggtaacagagccttttcttacccactgtgccatgtactgaaaataggatggagctcagtctagcttccctttttcatttggctc

SEQ ID NO: 7487 - DNA, 201 bp, Homo sapiens
aaatatgtctatgtttagctatgatatttacatttacttgtacttatataactgatcacatctgcccagttctcaacttttgtcatttctgatgcctcctrgttatttttcctcactctgctgacaactccatcattggactccccttcaaggtgtccacagcatacctaattcctgctattgagagtctcacaacaagaa

SEQ ID NO: 7488 - DNA, 201 bp, Homo sapiens
tccacagcatacctaattcctgctattgagagtctcacaacaagaaagggaaggaaaatggagctgtgctttgcttattcagttataatagtcaaaaatgractataaaaagaagaataagcagagaagggttgtgctaggcctctttgtgggctaggtcctcggatgacaatggccttgatttttctggattacagagta

SEQ ID NO: 7489 - DNA, 201 bp, Homo sapiens
ggtgcggtggctcacgcctgtaatcccagcagtttgggaggccgaggcgggcggatcatgaggtcaggagatcaagagcatcctggctaacacagtgaaaycccatctctactaaaaatacaaaaaaaatacaaaaaaaaaaaaaaaaaaaaaaaagcctgtcctggtggcgggcgcctgtagttccagctactcgggagg

SEQ ID NO: 7490 - DNA, 201 bp, Homo sapiens
ttccacagaccaggagaagattgaattcctgaaggaggcacatctgatgaggtagctctgaaataattttctcctggtatgggtaagaagttttaagtccrcttgacttatttttaacacccaaaatgacatgacttaacggatcatgactaaaacaacatggttgaaacgtttaaatggaactacatctgcagagcaagt

SEQ ID NO: 7491 - DNA, 201 bp, Homo sapiens
cggtggctcacgcctgtaatcccagcagtttgggaggccgaggcgggcggatcatgaggtcaggagatcaagagcatcctggctaacacagtgaaaccccrtctctactaaaaatacaaaaaaaatacaaaaaaaaaaaaaaaaaaaaaaaagcctgtcctggtggcgggcgcctgtagttccagctactcgggaggctga

SEQ ID NO: 7492 - DNA, 201 bp, Homo sapiens
acatctgatgaggtagctctgaaataattttctcctggtatgggtaagaagttttaagtccgcttgacttatttttaacacccaaaatgacatgacttaayggatcatgactaaaacaacatggttgaaacgtttaaatggaactacatctgcagagcaagtagtctatagaggccaatcttctgagcctgggtacaggca

SEQ ID NO: 7493 - DNA, 201 bp, Homo sapiens
taaaaatacaaaaaaaatacaaaaaaaaaaaaaaaaaaaaaaaagcctgtcctggtggcgggcgcctgtagttccagctactcgggaggctgaggcaggaraatggcatgaacccgggaggtggagcttgcagtgagccgagatcgtgccactgcactccagcctgggcgacagggtgagactccatctcaaaaaaaaaaa

SEQ ID NO: 7494 - DNA, 201 bp, Homo sapiens
cgtgtcacataaaacacacaatactgcaaagccatgagatatttctttctctctcaaacacaaataccaataccaacacaaacttgtacaccctatatatrtggagggtggggagacaaaaatgttgctattttacagtactcttccaacccaagaggagattgaaaatcttcctgccttccctcgggaaaaactgactct

SEQ ID NO: 7495 - DNA, 201 bp, Homo sapiens
ttgaattgaatatagacatatctgaaagacaggcaaaacatggtttagcttgcttggcactgaaagcacattttcttaactatatcactcctctttttttwaaaataaatttatggagtacaagattgtttagtaatgaagtcagggcttttagggtatctatcacctgaatattgtaccttgtacccattaagtaatttc

SEQ ID NO: 7496 - DNA, 201 bp, Homo sapiens
aaaattaaggtgcctagaagtggaccatcatgctctgtctgggtaaaaggttgtagaatagtaaagtaaagtaattaggaacccaaagttccacatcaccrtgtcacataaaacacacaatactgcaaagccatgagatatttctttctctctcaaacacaaataccaataccaacacaaacttgtacaccctatatatgt

SEQ ID NO: 7497 - DNA, 201 bp, Homo sapiens
gcaggaatgtcaatattatttctgataagggccaaattgtatgatgatagattttaaagtaggaagtgcgatgtgacacatagccagagacttggtcgcayagggccatactgaccctgataaggagtacagattttattctaagtgggacagaatgtctttggagtgttctaaggaggggagggacttgttcaaatttta

SEQ ID NO: 7498 - DNA, 201 bp, Homo sapiens
agatattttaaaatcaaattatgaaaacttctataactattctactgatagtgttcttgcataaaaacacttcaaatgcactgttaacatttcctaaaggwaaaaagaagcaatattttattttgtaaattatgtcattttttcctttatagtctggcatagaagattaaagaatcaaaaaagtgccaaggaaggggtgac

SEQ ID NO: 7499 - DNA, 201 bp, Homo sapiens
gggcttttagggtatctatcacctgaatattgtaccttgtacccattaagtaatttcttattcactctcccacacccttaccctttcaagttttcattgtytatcatttcatactctacgtctatgtgtacacattgtttcaatcctactgatgagtgagaacatgtgatatttctttctgtgtttgtcttgtttcattta

SEQ ID NO: 7500 - DNA, 201 bp, Homo sapiens
taacaactggcttgcaaaaatccagtagtagctagctctgctatattactctgtgtgcttaggtagagctggggcaacttagcttttatctatgaattaawttctttttctgatttatattattagatgatttttggataccagaaacaagtttcatacttactattatagttggaatatttctggttgttacaatcccac

SEQ ID NO: 7501 - DNA, 201 bp, Homo sapiens
tttgatttcacatggcataaacactgtctgtatggatgctttcaagctaccaacggtctaacaactggcttgcaaaaatccagtagtagctagctctgctrtattactctgtgtgcttaggtagagctggggcaacttagcttttatctatgaattaatttctttttctgatttatattattagatgatttttggatacca

SEQ ID NO: 7502 - DNA, 201 bp, Homo sapiens
atgtgtttaataatagcttactgctttgcagactggtgggcatatttagcaaagcaataaaatgactgtcttcattgttgttgttggagatatgtacgtasagaagaaaagctattgaaaggactttttaaagcaaagaagtgggggtgcttagaaaaacagggagcaataataccatgcctatcctgtggtcctactgac

SEQ ID NO: 7503 - DNA, 201 bp, Homo sapiens
ttaaaatggtttactccaaatgttcttgagaaaaagtctgtttctgggcccagatgcactctacatttcttacctatgttggctttcactttcctattggrctctcttggcctattcttttctgcttactaaatctcactcaacttttataaccagctcatattccaactctttggaaaggcctgcccctaaccctgttcc

SEQ ID NO: 7504 - DNA, 201 bp, Homo sapiens
cagtttttttcttatcacttatttcactaatcctagagatatatgaaattgttctttaaaagcagtacattattatttctagaacttgaatgaagaaattsagaaaatataggagaccttgcaggcagtaatgaaataatactggctgggtctggctggatcctgaactgggcaaaattacttcttctttcagtatcctta

SEQ ID NO: 7505 - DNA, 201 bp, Homo sapiens
gaaactcctctaagacaaagtgaatttccaaatggaaggctcactctccttgttactagactgtctggtggaaatatttatgtgttaaaggtacagtgagyttactaggcactctttattgtcattctcaagtgcaaggctctcaaaaggttaagcaattgttcttttttaccaaaaggttcttgcctgccactctgagga

SEQ ID NO: 7506 - DNA, 201 bp, Homo sapiens
gataaaaactatgaaaactgtggaacaacactgaatattgagttgataaactcaaagaccatagtttcattggactttttctgttgagcatgtttctgatratttgttgtctatttaaaaaattgccaccttataaaaatgcagttaaattggagaaattggaggagtgccttttaaaatgacatctattttagtaaactt

SEQ ID NO: 7507 - DNA, 201 bp, Homo sapiens
cactacttcttaaaatgcagttattccccaggatgtttaaaattattatgtaaggtatttttgtgatcttatactttatagataaaaactatgaaaactgyggaacaacactgaatattgagttgataaactcaaagaccatagtttcattggactttttctgttgagcatgtttctgataatttgttgtctatttaaaaa

SEQ ID NO: 7508 - DNA, 201 bp, Homo sapiens
attttcattatcagaattattttttctttttaaaaatttgtcactcagttattatctacctccttctaagggaagtcctgtaaggcagggagtttaacttycttgcttactgtcatattcttagatcccaaaaccatgcttggcatgaaaaaggccaattgttcaaatattcttgaatgaatgaatgaataatttttaagg

SEQ ID NO: 7509 - DNA, 201 bp, Homo sapiens
gtagggatatccagttgttctagcgccatttgctgaagagattttctctttctttatttagttgctttgggacctttattgaaaataatttgggccgggcrtggtggctcacgcctgtaatcccagcactttgggaggctgacatgggtggatagcctaaggtcaggagttcgagaccagcctgaccaacgtggtgaaact

SEQ ID NO: 7510 - DNA, 201 bp, Homo sapiens
tattggggtacacatcccaggataatggatggttctgttgtgccacagacatgctctgagcattggctcccccggcctgtaagagagtggtattgtaagakaaaactggacagctcagaaccctctgtgtcatctgcctgtaaaagcaaaacctgaacaaaaaaatactgtgttcaaagataacaataaattctgtggaaa

SEQ ID NO: 7511 - DNA, 201 bp, Homo sapiens
aagagaaaactggacagctcagaaccctctgtgtcatctgcctgtaaaagcaaaacctgaacaaaaaaatactgtgttcaaagataacaataaattctgtrgaaaaaagactgacagactgactgattgattttttaaaataaactgaatatgcataccattgattattcaagtgagttattgtggcaagatgcagtttta

SEQ ID NO: 7512 - DNA, 201 bp, Homo sapiens
aagccacaatatgacattacgatggaaatctgcaaacttctctggagtaaaatacatcattcagtggaaatatgcacaacttctgggaagctggacttatmctaaggtatgaaaggctgcctttgtacctcaacccagaccccttcccaatttttttttttttttgagacggagtctcgctctgtcgcccaggctggagtg

SEQ ID NO: 7513 - DNA, 201 bp, Homo sapiens
ccgccatcgcgcccggctaattttttgtattttcagtagagacacggtttcaccgtgttagccaggatggtctcatctcctgacctcgtgatccgcccgcytcggcctcccaaagtgctgggattacaggcatgagccacctcgccctgcccccaatttttaaaagtgccaaattattacttataagcgtaaaggccttct

SEQ ID NO: 7514 - DNA, 201 bp, Homo sapiens
ctgcacgctgatatctgaatggcttagctctaagctccaggcctcttatttcatcttctctgttgagccatccatcttctacaaattaatctatgcttttkagtcccaatgtggggtgctgattctataatgctgattattgatcactccttgatctagactgtgtccagaccgtcctatgtggtcaagcccctgcacccc

SEQ ID NO: 7515 - DNA, 201 bp, Homo sapiens
caggcctcttatttcatcttctctgttgagccatccatcttctacaaattaatctatgcttttgagtcccaatgtggggtgctgattctataatgctgatkattgatcactccttgatctagactgtgtccagaccgtcctatgtggtcaagcccctgcaccccttcactgagtacattttccgagtggtttggatcttca

SEQ ID NO: 7516 - DNA, 201 bp, Homo sapiens
gattctataatgctgattattgatcactccttgatctagactgtgtccagaccgtcctatgtggtcaagcccctgcaccccttcactgagtacattttccragtggtttggatcttcacagcgcagctgcagctctactcccctccaagtcccagttacaggactcatcctcatggaggtatggtgtgcacacatttctta

SEQ ID NO: 7517 - DNA, 201 bp, Homo sapiens
attctgcaataaacataagaaataaataaagtatattgtaagtgggatggtgctgtgtgctatagtaagaggaatattttgagcagggtttgtcatttagrggattggaaatgaagagtgaagagggaaggagaggccagtggcagtatgaaataaggtggccagaatgagccttggtgagctggtggggtaaagtttgag

SEQ ID NO: 7518 - DNA, 201 bp, Homo sapiens
gatgggggccagacccagtctacctcagggatcttggtaaggaatgtggcttttattctggaaggagagtcactgtaaggttttgaggagaggagtgacaygatctgatgcgaactgccttatacattaaaaggaaaactggctgctgtatggagaatgaactctggggtgtgggaggaagcaggaagaactggtaggaag

SEQ ID NO: 7519 - DNA, 201 bp, Homo sapiens; identical to SEQ ID NO: 695

SEQ ID NO: 7520 - DNA, 201 bp, Homo sapiens
tccttgagctggagtcagagaatgatttggtcactgggcaaaaataagtgggagccttttaggcagtctgttaacctacgattatagaagaggctgacttkctttctggacatgtgttatttattctgctcataccacatgattactcttcaacccaaactccattacttctttccatctttcagtgctattgcagcatcc

SEQ ID NO: 7521 - DNA, 201 bp, Homo sapiens
ggttattccccgttggccatatccttgagctggagtcagagaatgatttggtcactgggcaaaaataagtgggagccttttaggcagtctgttaacctacrattatagaagaggctgactttctttctggacatgtgttatttattctgctcataccacatgattactcttcaacccaaactccattacttctttccatct

SEQ ID NO: 7522 - DNA, 201 bp, Homo sapiens
agagacttggtcgcacagggccatactgaccctgataaggagtacagattttattctaagtgggacagaatgtctttggagtgttctaaggaggggagggrcttgttcaaattttaaaactttcagtatggctgatgcatggagaatagactgggagggtggaaggagggccagggaagctggggagctgttaggaggcca

SEQ ID NO: 7523 - DNA, 201 bp, Homo sapiens
agttatgggcttgttgtgggtttctcaagcagaatattgtgatatatgtgctgtgtatgttgatgtttattttttaaaatctgaatgcgaagtaattttartaagcttttttaagtttaataagaaaaatgtgtttgtagaaaactttgacctgacccttactctaacccctgaagctaactaataatattctattaaaat

SEQ ID NO: 7524 - DNA, 201 bp, Homo sapiens
gacaaacctcacatggtatggcatcaccagccctactccaacatacctggtttattatgcagaagttaatgacaggaaaaacagctctgacttgaaatatrgaattctggtaagattggaactagtggtctttgtcttttcacaagatgttcttttttgatataaaattatgagccatagtaaagtatttcctatatgttc

SEQ ID NO: 7525 - DNA, 201 bp, Homo sapiens
gagtaaaatcatttcatcccagtgacataccattcagaaatctagcccttagtaccatgcctggcaagcagcacctgagaaattgctgccaattgtaatacgtctaatgtttagatgtcctgaaatattttataatgtgaaacagccaatcatagtgtcctttggagtaaaggcaattgctctgtacatataaaaaataat

SEQ ID NO: 7526 - DNA, 201 bp, Homo sapiens
aaacagctctgacttgaaatatagaattctggtaagattggaactagtggtctttgtcttttcacaagatgttcttttttgatataaaattatgagccatrgtaaagtatttcctatatgttctgaaatggactagtacgcaacttttttacagctaatgattcatcaaaacatattgtgttctagttttcttgactggga

SEQ ID NO: 7527 - DNA, 201 bp, Homo sapiens
tctatctccatagattggctttatcaaagaatgtatttcatcatggatgaactggttagtccgagaagttaaagaggaatagtgatagacagtgatactgwtatgcatatcttggtatatttaatactaaacacaattgccttattcaatacatactcaagtatttactatgccttagatactaggttatcaatgaatcat

SEQ ID NO: 7528 - DNA, 201 bp, Homo sapiens
acggagagccctagatgagagaggcacacactctcttgcgctgatggacaggagtgcgtggtgagtgaaatcttgttttttccccagaaaatgcagacctwccaactgctccctttgcttcttccattggaagccacaatatgacattacgatggaaatctgcaaacttctctggagtaaaatacatcattcagtggaaat

SEQ ID NO: 7529 - DNA, 201 bp, Homo sapiens
cttggcttacagttcagttatgcagccttttccaggtaataaagtcacattcgtaatcagcttgttctcccaatttagggtcagaaaaatctcataacatytccttctccaaggctgtccctttagcccctttgttgtgctctcatccttgctccaaactctgctagtcttctgtgtgcactgtgattgctgtttgccctg

SEQ ID NO: 7530 - DNA, 201 bp, Homo sapiens
ttcaagtgagttattgtggcaagatgcagttttagcaagagaatacggagagccctagatgagagaggcacacactctcttgcgctgatggacaggagtgygtggtgagtgaaatcttgttttttccccagaaaatgcagaccttccaactgctccctttgcttcttccattggaagccacaatatgacattacgatggaa

SEQ ID NO: 7531 - DNA, 201 bp, Homo sapiens
ggccttgagcagattatttaactcctttaaacttcagtttgcctttccacaaaatgaggttagtaataatagtagttacctgattggcttgatatggtgcyaaaatgagagaacatctctaaaacccttagtcaaatgacataaaataaaggtattttttaatgttgaaataatagattcaaaatttagcaattataatat

SEQ ID NO: 7532 - DNA, 201 bp, Homo sapiens
gatctgcatgtactagttgaaagtattaactgaaaagtttttttgaattctagaagccatgtgctgcagaaaacaacaaacaattaatgctcttcagaacwctagtattgtgagatcctttatgataaagaaaaaagaattcacggttgaatcatttgtggaagtgtattttgctatgccctctttttgtagattcacagg

SEQ ID NO: 7533 - DNA, 201 bp, Homo sapiens
tttctacctaatatatcccttaagattttcttattttaagtcatttttttctgcagagataaaatatacataatacagaataccagatgattttaaaaatrtatgtatatatatgaactaatagttgagtcacttgatctccaattccaataacatatatgggccataattcctaggatatttaaagagacctgatttgca

SEQ ID NO: 7534 - DNA, 201 bp, Homo sapiens
taatcctgggttctaatttgattgctctgtggtctgagagactgtttgttatgatttcagctcttttgcatttgctgaggagtgttttacttccaattatrtggtagattttagaataagtaccatgtggcactcagaagaatgtatattctgttgatttgggctagaaagttctgtagacatctactaggtccacttgat

SEQ ID NO: 7535 - DNA, 201 bp, Homo sapiens
ctcaaacatattttgccccaaacggagctcttgatttcgtacgtcctctcctactccacccatctacttccttgctttctctttccctacatccatgctarcaaactctgcctgcaaaacgcagccgcagtccttcttctcttgtatccccagtgcctggagcagtgcacagcacattatgaaccctggaaatactgtgga

SEQ ID NO: 7536 - DNA, 201 bp, Homo sapiens
tctgccctttggtggccttgagcagattatttaactcctttaaacttcagtttgcctttccacaaaatgaggttagtaataatagtagttacctgattggyttgatatggtgctaaaatgagagaacatctctaaaacccttagtcaaatgacataaaataaaggtattttttaatgttgaaataatagattcaaaattta

SEQ ID NO: 7537 - DNA, 201 bp, Homo sapiens
gggattacaaatgagaagtgcagtaaacaaatgatatgggtgaatatagaaaagtcttcaaataaaaaaataaccactctcttcttggctgtgttctctayctgttgttaagcttttccaagattcactggtttttgatatcacagttattacaattgactggatttcaaggcacctctactttgcactgaaagaatcaca

SEQ ID NO: 7538 - DNA, 201 bp, Homo sapiens
atttaggaaaaatgtgagaacagtgcccatgttacaatggtataccgtccagattgctgaggtttgggattacaaatgagaagtgcagtaaacaaatgatrtgggtgaatatagaaaagtcttcaaataaaaaaataaccactctcttcttggctgtgttctctacctgttgttaagcttttccaagattcactggttttt

SEQ ID NO: 7539 - DNA, 201 bp, Homo sapiens
tggacgttttcagcagaaagagttatcagtgccgtttgctacacagctgataatgagatgggatattatgctgaaggggactcactctttcttctgcactwgcacaatcgctctagctctgaggtatttcactatgtaattcttccgaaataaaggaagtgaagtatttgcatatgacactactttgtagttaaaatgact

SEQ ID NO: 7540 - DNA, 201 bp, Homo sapiens
tttttttgctttcagaaatcaacccatttcctcacctcataactcttcttggtaacaagatagtttttttagatatggatcaaaatcaagttgtgtggacrttttcagcagaaagagttatcagtgccgtttgctacacagctgataatgagatgggatattatgctgaaggggactcactctttcttctgcacttgcaca

SEQ ID NO: 7541 - DNA, 201 bp, Homo sapiens
attttttcttaaatagcatttatcagtgcagagatgaagcaaacaacagtggagtcataaatgaaagctttgaaggtaagtttgattcttcagaattttcyagttttcgctgcactgtgaactgaacaaagttaaaatggaatgtacacagaaagcattttggggtaggcaaaaagaataatatactggcacctttgtcat

SEQ ID NO: 7542 - DNA, 201 bp, Homo sapiens
gattcttcagaattttctagttttcgctgcactgtgaactgaacaaagttaaaatggaatgtacacagaaagcattttggggtaggcaaaaagaataatayactggcacctttgtcatcataattaagtgtttattgcattcctctttgaaaattatttgtattatgcactaaattgaaaaaataaaggatagttctatgg

SEQ ID NO: 7543 - DNA, 201 bp, Homo sapiens
cagtgagtttaatcttaacccaaatttacagcctgaaaaagtcagaaaaagatgatttttttcaggatatgttaaagaaaagaaaaattttgtttcagttytaattattagtaattgctattgattttctatgatttctatattggtcaataatccccaattttttctcctatttcttttttttgtttcatcctgtaggga

SEQ ID NO: 7544 - DNA, 201 bp, Homo sapiens
agtcaatgtattcacctgtacacagctgttcttcggggacagaggtaagtagagtccctcaaaggcaattgattgagaagaaaacttgtcagtcataaatsataatgcatggaaattcatttattccttcaataaacattttctggttatccactgtgttgcaggcattgggcttgtagggtaaagaggtttgtaaataac

SEQ ID NO: 7545 - DNA, 201 bp, Homo sapiens
acaaagttatgcttcaaacatgtatttggtttattttcttaccttactttctacttaggtaattgctctaactttagacctcagtgatgggctcctgtatyggttggttcaagacagtcaatgtattcacctgtacacagctgttcttcggggacagaggtaagtagagtccctcaaaggcaattgattgagaagaaaact

SEQ ID NO: 7546 - DNA, 201 bp, Homo sapiens
tagaaatgccttaagaagcctaattaaaaaatttagactccctaaaaagaaattatcaataaatttgactacttagaaacttaaactgttatgacaacagwatacaataactgcaaagccaaaaagtggaaaaaaagtattacacatgataaataatgtttttaaagaaaaaatccctgatacacataaaagcatgtaaga

SEQ ID NO: 7547 - DNA, 201 bp, Homo sapiens
ttttctgcacaagctttttagcttaattaagtcacatttgtctatttttgttcatgttgcctgtgctttcagtgtctaagtcatgaattatttgcctagaycaatatccagaagagttttccttaggctttcttctagtattttcacagtttcatttattacatgtaagtctttaatccatctttgagttaatttttgtat

SEQ ID NO: 7548 - DNA, 201 bp, Homo sapiens
tgatttactgggatatcctgtggcacctctccaagttggtggtctgcccagacactcattgctgtggtgatgccaacactctaccattttccagcggtaascttggtcaaacatctcctgacatttcaaggagctctgataatttcttgatggtttggaatgttgggttacctagactattcactataggtaatttctcca

SEQ ID NO: 7549 - DNA, 201 bp, Homo sapiens
ttttatagtcagaaaaaagtaaaaattactgaatttattattccaaagaggatgttaaagagaaatctatagcttaagtgtgacctgttcacaaagttatrcttcaaacatgtatttggtttattttcttaccttactttctacttaggtaattgctctaactttagacctcagtgatgggctcctgtattggttggttca

SEQ ID NO: 7550 - DNA, 201 bp, Homo sapiens
gctctttggaaaaaattacaaaatacaaaggtctaccagctccactgcctgcctgtcttgacttcatctcatactctccccttggtctctgtgctggccayactgacctttccctctttcttgacatagaagacacattcctgcctcaaagttttcatcgtgctgttgcttctgcttttgcccagatctctgcaagcccag

SEQ ID NO: 7551 - DNA, 201 bp, Homo sapiens
cactacccagcacatagtgccaatcactatttgtggttgaatgaatgaatgattaatcaagcaatttattaatgattgcaataaatattcagaaataatartgtcacttgaaagccattaactggccatacaattatgttttttagatacaaaggcagtctgtgttgacgggacacacagacattgttacccacgtgaagc

SEQ ID NO: 7552 - DNA, 201 bp, Homo sapiens
cctttttgagaagtgtctgttcatatcttttgcccactttttgatggggttgtctgtctttttcttgtaaatatgtttaagttccttgtacattctggatrttagccctttgtcagatggatagattgcaaaatttttctcccattctgtaggttgtctgttcactctgatgatagtttcttttgctgtacagaagctctt

SEQ ID NO: 7553 - DNA, 201 bp, Homo sapiens
gcttgttgctgtgtttccaaggcttattacactacccagcacatagtgccaatcactatttgtggttgaatgaatgaatgattaatcaagcaatttattartgattgcaataaatattcagaaataataatgtcacttgaaagccattaactggccatacaattatgttttttagatacaaaggcagtctgtgttgacggg

SEQ ID NO: 7554 - DNA, 201 bp, Homo sapiens
attttatccatactcatggccactaggggttgccatattacctctttaaggtaagcacaaagaccaggagttggaaaacgaagtgttagagacactaagtyaggggttttgaaggaaactattgataaagaattgctgtactccataaagaccctcggctaggactcctgcttctgtcatatcatccagcctgtgtctttc

SEQ ID NO: 7555 - DNA, 201 bp, Homo sapiens
tttggaggcatgaaaacagataagccccatgagggcaggtgccatgcctgtttgcttgttgctgtgtttccaaggcttattacactacccagcacatagtrccaatcactatttgtggttgaatgaatgaatgattaatcaagcaatttattaatgattgcaataaatattcagaaataataatgtcacttgaaagccatt

SEQ ID NO: 7556 - DNA, 201 bp, Homo sapiens
aaagccattaactggccatacaattatgttttttagatacaaaggcagtctgtgttgacgggacacacagacattgttacccacgtgaagctattggtgartgacatggtggtggattcagttggtggatatctctactggaccacactctattcagtggaaagcaccagactaaatggggaaagttcccttgtactacag

SEQ ID NO: 7557 - DNA, 201 bp, Homo sapiens
taagtggaaccatgctgaatgtacctgagctgcagagtgctatgaaatacaaggtttctgtgagagcaagttctccaaagaggccaggcccctggtcagarccctcagtgggtactaccctggtgccaggtgagaaaatgttctggatttagggagtgactctcacaaaaagaggactagctgagtgccctttaaatttcc

SEQ ID NO: 7558 - DNA, 201 bp, Homo sapiens
cctgaagtcactcatattttcttgaacataagtggaaccatgctgaatgtacctgagctgcagagtgctatgaaatacaaggtttctgtgagagcaagttytccaaagaggccaggcccctggtcagagccctcagtgggtactaccctggtgccaggtgagaaaatgttctggatttagggagtgactctcacaaaaaga

SEQ ID NO: 7559 - DNA, 201 bp, Homo sapiens
tccatgttcattaattggaaaagtcaatattgttaaaatgtccatactccccaaagcaatctacagattcaatgcaatccctataaaaataccaatgacaytcttcacagaaatagaaaaaaacaatcctaagatttatattgaaccacaagagaccaagaatagccaaagctatcctaagcaaaagaacaaaactggagg

SEQ ID NO: 7560 - DNA, 201 bp, Homo sapiens; identical to SEQ ID NO: 681

SEQ ID NO: 7561 - DNA, 201 bp, Homo sapiens
cacgtccaacaacatggatggaactggagattattacgttaagtgaattgagctaggcacagaaaggcaagcattgcatgttttcacttatttatgggatytagaaatcaaaacaattgaattcatggacaaagagagtataaggatggttgccagaggctgggaagggtggtggtgggtggggtgggggatgggagatgg

SEQ ID NO: 7562 - DNA, 201 bp, Homo sapiens; identical to SEQ ID NO: 683

SEQ ID NO: 7563 - DNA, 201 bp, Homo sapiens
acaacatggatggaactggagattattacgttaagtgaattgagctaggcacagaaaggcaagcattgcatgttttcacttatttatgggatctagaaatyaaaacaattgaattcatggacaaagagagtataaggatggttgccagaggctgggaagggtggtggtgggtggggtgggggatgggagatggggacagtt

SEQ ID NO: 7564 - DNA, 201 bp, Homo sapiens
tccatagattggctttatcaaagaatgtatttcatcatggatgaactggttagtccgagaagttaaagaggaatagtgatagacagtgatactgatatgcwtatcttggtatatttaatactaaacacaattgccttattcaatacatactcaagtatttactatgccttagatactaggttatcaatgaatcatagatct

SEQ ID NO: 7565 - DNA, 201 bp, Homo sapiens
tgagaaatgttttcttaaaaaaaaaaagtcaccacaagaatgtcttgtccaaaaataaaatgttagaattgtgggccaaattgcacgaagcagagttctaygcttgagcattggtattttacattacttttatcttacgttaacagagatctgcatgtactagttgaaagtattaactgaaaagtttttttgaattctaga

SEQ ID NO: 7566 - DNA, 201 bp, Homo sapiens
aaaaaatccctgatacacataaaagcatgtaagatgaatttagaatataaacagccacttcaaaaaagaagtataagtgtccatcaactgatgagtggatwaaaaaatgtgatatatatacaccatggaatactactcagccataaaaaggaatgaaataatgtctttgcagcaacttggatggagctggaggccattatt

SEQ ID NO: 7567 - DNA, 201 bp, Homo sapiens
gccaccgctcccggcctcatctcacttttaaaatatgtttttttgtaaattaaatttgttatcactatttgttgaattaggtattttttccccaataatartttaaataaatacatgaaaatgctcacctgagcgttggttcttggcaggaacatggcatgctccaaaagcatgattcaaggcaactaagtgaagagacta

SEQ ID NO: 7568 - DNA, 201 bp, Homo sapiens
tggcagtaactgcaagttttttccattctatttctatgcattttacctactcaaataaattgcaagctttatgaagataggatggtgtcttttattccttyatatagtctccatgccaaagtaggtatttgtttttaatggattgataaatagattttctcatcatctacttccagcctattacaggacaagtccttgctt

SEQ ID NO: 7569 - DNA, 201 bp, Homo sapiens
acatttttctgctcattatgtcaccattatctcttccagttcctgaaactgcacctttgattaggaatattgagagctcaagtcccgacactgtggaagtyagctgggatccacctcaattcccaggtggacctattttgggttataacttaaggctgatcagcaaaaatcaaaaattagatgcagggacacagagaacca

SEQ ID NO: 7570 - DNA, 201 bp, Homo sapiens
ttaataaaattatttcgtttccattaagttttcaaaaaaaaaaacaagacttttttccatcttattttaaaaacatcatgcttgcacatttttctgctcaytatgtcaccattatctcttccagttcctgaaactgcacctttgattaggaatattgagagctcaagtcccgacactgtggaagtcagctgggatccacct

SEQ ID NO: 7571 - DNA, 201 bp, Homo sapiens
tatgctcctccctgaatcagttttgttatgaaatagatacatttcattcaaatattttattacattccaaagatgtaaaagcctatgactaataggaattrgtacttaggaattaatgtccaagtgtgtgcccaaatacctactatttgggaatgtttggtcattaatttatcagtaaactttaaatcatggatttaaaag

SEQ ID NO: 7572 - DNA, 201 bp, Homo sapiens
tcaacctcacagcaaccacagaattgcagaataaaaataaattatcaatttttcttctatcaaattggcaaagataaaaacatttatagttgggaaaaggyacaggtaaacttctattttcatgaattgttggttggatgtaaatggataaatttctagaaaagaatgcgttattaaatctcaaaattgaaagagaaaata

SEQ ID NO: 7573 - DNA, 201 bp, Homo sapiens
taaattctgtggaaaaaagactgacagactgactgattgattttttaaaataaactgaatatgcataccattgattattcaagtgagttattgtggcaagrtgcagttttagcaagagaatacggagagccctagatgagagaggcacacactctcttgcgctgatggacaggagtgcgtggtgagtgaaatcttgttttt

SEQ ID NO: 7574 - DNA, 201 bp, Homo sapiens
gctaccttatagggttgctgagatgattcaatgagatttagtgtaaaacacctataagagtgcctgaaacatagcaataattcaataaatgttagctattrtaattgtgaggagaagaatggggaatgagtggagattagggaagagtgttgacaaaatctgcctcattagaaacccttagacctgactgtgaggctaccc

SEQ ID NO: 7575 - DNA, 201 bp, Homo sapiens
ggaaggtgcatatgaagaggaagtactgggtaagaggacacacacgacttttaaaaaataggctgcaccactctagtgacttgtacttatgtaaagataaygaaacacctctcaaaacatcttgatttctgcatctcaatatgatcaaaaatatctatttagagaattcaataatttcaaatgtataggccattctgataa

SEQ ID NO: 7576 - DNA, 201 bp, Homo sapiens; identical to SEQ ID NO: 680

SEQ ID NO: 7577 - DNA, 201 bp, Homo sapiens
ggtttttggcaagtggtaaatggcaaaacagaaaattgaggcagtgagtgatgaactcagatggattttagttaatgaccagataagtcaatagggcttcrtgatgggttttccatgagaggggagagtggggtgagagaagaaaacaccctggttccaggcttggacaactcaggagaatgtaacgcgttaatgggaaac

SEQ ID NO: 7578 - DNA, 201 bp, Homo sapiens
taaaaatccctttaaaacatcagatacatacatgcatatgcatatacatgtatccacttatattcacacatatatgtatatatttcatgcaaactagatarctacctgtaatttttctttcatttcttacagttttatggtcctttactcaccttggttgaccttgtagacctgtgtgtagatatttcaaaaggctgtgtc

SEQ ID NO: 7579 - DNA, 201 bp, Homo sapiens
aatggcaaaacagaaaattgaggcagtgagtgatgaactcagatggattttagttaatgaccagataagtcaatagggcttcgtgatgggttttccatgakaggggagagtggggtgagagaagaaaacaccctggttccaggcttggacaactcaggagaatgtaacgcgttaatgggaaacacaggagaaagagcaaat

SEQ ID NO: 7580 - DNA, 201 bp, Homo sapiens
acctgacacctggaggtctttccaataaagattccatattgcctctacttactaaacatagctgtcattttttatgtatatttgcgtaggaaacatataartttgttttcctctttgtttgaattcttataatcataactaaaaatccctttaaaacatcagatacatacatgcatatgcatatacatgtatccacttata

SEQ ID NO: 7581 - DNA, 201 bp, Homo sapiens
ggaccagattttgtcctcaagttcagtaggtacactcacttctctcttaatgacagacaaatgtacatcctgagcagacttgatgtcagagaatgccactstttttttttctctcttttttatttatttatttattttattatactttaagttttagtgtacatgtgcccaacgtgcaggtttgttacatatgtatacatg

SEQ ID NO: 7582 - DNA, 201 bp, Homo sapiens
ccagattttgtcctcaagttcagtaggtacactcacttctctcttaatgacagacaaatgtacatcctgagcagacttgatgtcagagaatgccactgttkttttttctctcttttttatttatttatttattttattatactttaagttttagtgtacatgtgcccaacgtgcaggtttgttacatatgtatacatgtgc

SEQ ID NO: 7583 - DNA, 201 bp, Homo sapiens
ttttcttctagggtttttatggttttaggtctaacgtttaagtctttaatccatcttgaattaatttttgtataaggtgtaaggaagggatccagtttcasctttctacatatggctagccagtattcccagcaccatttattaaatagggaatcctttccccatttcttgtttttgtaggtttgtcaaagatcaggtagt

SEQ ID NO: 7584 - DNA, 201 bp, Homo sapiens
actatttgatagcacaacagggtgactacagtcaataataactgtacatattaaaatgacttagaacatacttggattgtttgcaactcagtggataaatrcttgaggggatggacaccccattcttcatgatgtgctcatttcacatggcatgtctgtttcaaaacatctcctgtaccccataaatacatacacctacta

SEQ ID NO: 7585 - DNA, 201 bp, Homo sapiens
tagtggagatggggtttcaccatgctggccaggctggtcttgtattcctgacctcaagtgatctgcccgccttggcctcccaaagtgctgggattataggygtgagccacctcgcccagctggagctcacatgttgttggaacagaaatattctgcaataaacataagaaataaataaagtatattgtaagtgggatggtg

SEQ ID NO: 7586 - DNA, 201 bp, Homo sapiens
gtgatctgcccgccttggcctcccaaagtgctgggattataggcgtgagccacctcgcccagctggagctcacatgttgttggaacagaaatattctgcartaaacataagaaataaataaagtatattgtaagtgggatggtgctgtgtgctatagtaagaggaatattttgagcagggtttgtcatttaggggattgga

SEQ ID NO: 7587 - DNA, 201 bp, Homo sapiens
cctccagtataaaaaagttcttaaaatttgtatgtgagccataaaagagtaatcttatgttttactacataccaatttgcattttctccctgctcttaatkttaaaaaggaaaagtctgaacacagttcatcactcacctaggagtcctttgacttgattaactgaccaatgccacaggattatttaattctgcatgagac

SEQ ID NO: 7588 - DNA, 201 bp, Homo sapiens
cagggataccagaaaattgatctaatgccactggggactcatgaggattctttcaataatgagttatcagttgagacctagacagattatagaagttgggsaactgccttgaagttaatatcagacataagtgaggaccaaacttcttcttgaagcccttgaagtaatagtgaacatatgctaaaggaaaaaaacatttat

SEQ ID NO: 7589 - DNA, 201 bp, Homo sapiens
gccctatcccaaacccaccttttaccctcagaatagcttctatgaatgtaggatggatgttagggtgtccttgacttctctttgatactccttggtaaaargaagcctgtccaactttccttttggcagctggtcagggttacagggagcctgaatcagatgacctatcctgattctttcgggcttcttcacatacaacca

SEQ ID NO: 7590 - DNA, 201 bp, Homo sapiens
attttattttgtaaattatgtcattttttcctttatagtctggcatagaagattaaagaatcaaaaaagtgccaaggaaggggtgacagtgcttataaacraagacaaagagttggctgagctgcgaggtctggcagccggagtaggcctggctaatgcctgctatgcaatacagtatgtagctttggccatcattatgga

SEQ ID NO: 7591 - DNA, 201 bp, Homo sapiens
tgaactatactttcccactgagttatgaaaggctttgactagggatagattgagatcaaagtttaatctatctgaagggtttaacaagagatgacaggtgrtagtccagagtagcatctagagtcaaggaaacccaacatgcagtgatgaggtatcccaacaggttgatacatgggatatcagaaagagagaatagtcaga

SEQ ID NO: 7592 - DNA, 201 bp, Homo sapiens
gaaacctgagagggcttcatggaagaggtcttctgattcagacacaaccaaagcaggaggtagaacagtagctgaactatactttcccactgagttatgaraggctttgactagggatagattgagatcaaagtttaatctatctgaagggtttaacaagagatgacaggtggtagtccagagtagcatctagagtcaagg

SEQ ID NO: 7593 - DNA, 201 bp, Homo sapiens
tccttcacctggaataggaaggcagaaagggcttcccaggaaaaatgatgcatgaattgaggcttaagtaaggttaggcagatggggaagatcattccaamctgaagagactacctatgtgaagggttggaggggtagaagtcctgcagtgtgtagatagtgtactgtggttagagtgaaggatggctttgcatagcagag

SEQ ID NO: 7594 - DNA, 201 bp, Homo sapiens
gtgagctggtggggtaaagtttgagcaaagacttaaaggaggcaaggaagtcaaccaggcagctatctcacatagagagtttcaggcagagggatggtccrtgtggaagacctaaggcaagaacatctgtggcctgatcaaggagcaactagaaggcccacgtggctgaacaagagtgcaggaggcagaggagtaacagct

SEQ ID NO: 7595 - DNA, 201 bp, Homo sapiens
ggcagaggagtaacagctaaggtcagagagatgggggccagacccagtctacctcagggatcttggtaaggaatgtggcttttattctggaaggagagtcmctgtaaggttttgaggagaggagtgacacgatctgatgcgaactgccttatacattaaaaggaaaactggctgctgtatggagaatgaactctggggtgt

SEQ ID NO: 7596 - DNA, 201 bp, Homo sapiens
aaatatgggaatatgggaaagacctcctgtctgggagtcaggggttgggttctagtcctggatttgccacttctttatcatgggattgagtctcactttcygcctcaacactacctgtgataaagccccttcattccacctgttccttttgctgagccattcaactgtagttcattcctctggtttggttctcacatctat

SEQ ID NO: 7597 - DNA, 201 bp, Homo sapiens
attgagttcagacttactgtaaaacctctgcttttcttcctaccaccacttccccatcttcttccaccccagcttctcctcctcactctgtcctcctcttyccatgcaccagatctcttcaccttttctatttttctttctcttcctccctgcttcaatataataattgtaatatttaccacagatagttttccttttatc

SEQ ID NO: 7598 - DNA, 201 bp, Homo sapiens
ggtaattcagataagagtgactaaagtaaactgttaaagaaatggaaagtggaccttttgaggattaatatgcaggaattcgtttttattccattaaagaygactgcagttaaaaaaaaaagtttaaacagaagaataattaaaggactaggttaagaattctgccaccctgtcaataatttaggtatactgtgatcaaag

SEQ ID NO: 7599 - DNA, 201 bp, Homo sapiens
aattcagataagagtgactaaagtaaactgttaaagaaatggaaagtggaccttttgaggattaatatgcaggaattcgtttttattccattaaagatgaytgcagttaaaaaaaaaagtttaaacagaagaataattaaaggactaggttaagaattctgccaccctgtcaataatttaggtatactgtgatcaaagagg

SEQ ID NO: 7600 - DNA, 201 bp, Homo sapiens
ctttggaaggccgaggtgggtagatcacttgaggtcaggagttcaagaccagcctggccaacatggtgaagccctgtttctactaaaaatacaaaaattarctgggcacagtggtgcatgcctgtaatcccagctactcaggaggctgagacaggaagactcacttgaacccaggaggtggaggttgcagtgagccaaggt

SEQ ID NO: 7601 - DNA, 201 bp, Homo sapiens
ctattatatatgtgcatgtgcatgtttgtatatttctgggcctatgtatgtgtacgtgtttttaaagattaattagaaatgttttgttcagtggtaactcraaagcaaatcagtataatcatggcctcactacttcttaaaatgcagttattccccaggatgtttaaaattattatgtaaggtatttttgtgatcttatac

SEQ ID NO: 7602 - DNA, 201 bp, Homo sapiens
agcactattcacaataatgaatcatttggaatcaacccaaatgcccgtcaacattagactggttgaagcaaatgtggtacatatacaccatggcatactaygcagccataaaaaggaatgagataatgtttttttgcagggatatggatgaagctggaagctattaacctcagcaaactaattcaggaacagaaaaccaaa

SEQ ID NO: 7603 - DNA, 201 bp, Homo sapiens
catgcaaccagtattaacttaatatcagttttgtttaaaaagcttagctgatgtttaatgttaaataatgatggcatgtaaattcctgatgataatttgcwttagcaaggtgaatactctctagtgagaaatggtgatgaagtagatatttctcatactgtaaaattaggtcaggttctgaaatggtctgaagtgtagagg

SEQ ID NO: 7604 - DNA, 201 bp, Homo sapiens
agatatttctcatactgtaaaattaggtcaggttctgaaatggtctgaagtgtagaggtcacacaggattctgtattcattgggaagattacagtttgcartgtgttcccagggactgaaaacacaccgtcgatgaaaaccagccactgatgaacagcctcagacctggccagtacggggagcacgtgaaccataactggc

SEQ ID NO: 7605 - DNA, 201 bp, Homo sapiens
agccttattagtttccaagggttgccacaataaaggaccaccaactgggtggcttgaaacagtagacatttattcttacagctctagaggttagaagtctraaaccaacgtatcagcgggactgcttgttctgatggttctagggcagaatccatctttgcctcttagcttctggcgtttactggcagtccttggtattcc

SEQ ID NO: 7606 - DNA, 201 bp, Homo sapiens
tgctgccctgctgctcccgatgttcttaccctttccctgcctcttatgagggccagccttcactctctgttggtcttcagaaggatgagtcaattagcagraatagaaccagattctcccacatatccctaagcttaccgtggattggcaccaagtcctaaaactattgcggtctgaaaagtttcagacctgaaatattct

SEQ ID NO: 7607 - DNA, 201 bp, Homo sapiens
gaattgccatactgtcttccacaatggttgaaataatttactttcccaccaacagtgtaaaagtattcctatttctccacaccctcatcagcatctattgkttcctgactttttaatagttgccattctgactcgcgtgagatggtatctcattgtagttttgatttgtactcctctgatgatcagtgatgttgagctttt

SEQ ID NO: 7608 - DNA, 201 bp, Homo sapiens
gcaggcagcagaagcctgtgctggtcacccctcccccagggagttcagtaagcttaggcagattccagctgagaggccataagaatctgtacattctaggrttgggatgctaggcctcggtggcatgggatcgagagtgggatcttccaatccatgagttgcacagttctttggaaaagcaatttccccggctgggtagcc

SEQ ID NO: 7609 - DNA, 201 bp, Homo sapiens
tgccagaggctgggaagggtggtggtgggtggggtgggggatgggagatggggacagttaatgggtacaaaaaatgtagaaagaataaataagacctactrtttgatagcacaacagggtgactacagtcaataataactgtacatattaaaatgacttagaacatacttggattgtttgcaactcagtggataaatgctt

SEQ ID NO: 7610 - DNA, 201 bp, Homo sapiens
tcaggacactctagttagactctgtgtactcactgatggggtagtggaagtgcaaagtgcatgaacttgggagttgaacaagccttattagtttccaaggkttgccacaataaaggaccaccaactgggtggcttgaaacagtagacatttattcttacagctctagaggttagaagtctgaaaccaacgtatcagcggga

SEQ ID NO: 7611 - DNA, 201 bp, Homo sapiens
tattacctaaaggttcagtaataaatatcagtacattcttaacattagcaatagataatggtgactatatatatatatatatatatatatatatatatatwatcttattatccaaactattaaactattccattcatgtgatgtgatctttctaaaacatcattatcatcatgtcatttttctccccaataataatcagcc

SEQ ID NO: 7612 - DNA, 201 bp, Homo sapiens
tttgtcagtctctgactacatgattatttatcatagtatacttaatgtatttttaaggaagcacttgatatactcatatttttgcaaaaactttcttttgrtaaagggaggatgaatcttttatgtaattgagcaatatcctgatctctgcttattagagatttattgctttgagagtgagctatacaactagaaaagttg

SEQ ID NO: 7613 - DNA, 201 bp, Homo sapiens
atcgaccagccatatatgtaacttacttgaattttgcaaggtcagtattattgcccattttacacatgagaaatttgcttagtgagttaagtaacttaagyaagttcacacaactagtaagtagcagaactaggtttcacatctcgatctgtctgacctgacacctggaggtctttccaataaagattccatattgcctct

SEQ ID NO: 7614 - DNA, 201 bp, Homo sapiens
ccttatttttgtttgttgactccaacttttgaatagaacagctcaaaatgtaaaagtttgttcaatgacttttaagttgggctggccctaggcaaaattaygaatgagataaaatttctcagtgctgccaatttttattcatgccttccctctcaatgtttactggcactttatcccctgcaaacttgggaggaaaatgct

SEQ ID NO: 7615 - DNA, 201 bp, Homo sapiens
agtgggactaagttataaacaacattgtactaaatgaagtttcttttcttatgctaggtagggactctgaaaaagacctagttaattataaacaatataawatacttacaatttttctgcttatatgagttgaggtgtgatgaattttgcctttctcttataattactatacatatcatctatgaggacaagagtcacatg

SEQ ID NO: 7616 - DNA, 201 bp, Homo sapiens
tgtgccgggtgcggtggctcacgcctgtaatcccagcagtttgggaggccgaggcgggcggatcatgaggtcaggagatcaagagcatcctggctaacacrgtgaaaccccatctctactaaaaatacaaaaaaaatacaaaaaaaaaaaaaaaaaaaaaaaagcctgtcctggtggcgggcgcctgtagttccagctact

SEQ ID NO: 7617 - DNA, 201 bp, Homo sapiens
gtgcataaaaaatgattcataatcattttggggggaaatggggaaaaattatataaattaaggataagaaattatacaaaatttgaaaacctttcatgtarggtttaagaaaaaagcccaggatacctaaatacaaaataaattttaattaaatatttacaaactaatcactgttttgcatctcttacacctctgtcaaac

SEQ ID NO: 7618 - DNA, 201 bp, Homo sapiens
cacttgaacaggatatcaagcagagttctgcagccttccaatgtcattcctttaaggacctttcttctgccctaaaggcaaagatactgaagacaacacaragacaaccagtgtctgacaatatgtgtgtgtcatgcataacccactctggcctggggtggaccacctccaccgagccaattctcatggctgaaaataata

SEQ ID NO: 7619 - DNA, 201 bp, Homo sapiens
tcttttgaacccagcccttgtgctccttccatgtttcaaatgaaaaacaattggattgactttgaggtggaatgtaggtcaatacaaaaggaagcaacgarcctcagaatctcagatataatgataactttggtagctgaactgtcacactttccttatcaattttgtattctgtattttattgaaatatggcataagtaa

SEQ ID NO: 7620 - DNA, 201 bp, Homo sapiens
tggctatggatttgtcatatataacctctattattttgagatatgttccttccatgcctaattttttgagagcttttattatgaaagaatgctaaatcttrtcaaatgccttttctgcctctgctgatatgatcatatggtttttgtctttcagtctgttgatgtaatgtatcatgtgtcttcaacatatacacatttgtt

SEQ ID NO: 7621 - DNA, 201 bp, Homo sapiens
tctttggttcttgagtctgattacttttcaagtcaacccacacaatattaagccattggataatgttttcaagggacttttggagcatccttacatgggaraccactttgaattaatggatttactcctttagcacatcagtatttattgaacacctgtttctagcaggcagtgttccaggtgctgaggatggagtgaaga

SEQ ID NO: 7622 - DNA, 201 bp, Homo sapiens
gttgattttaccatcttgatttttctctgatgagttctcatcttcctctttccaccttggctttcctaatttaaggtatcatttcttgcctgtgcccttgrcttacgcatactgctgacagttaaatttagttgaagcacaggctggattacttaatccctctctgaaatacccacaatggctctccatttactgctttca

SEQ ID NO: 7623 - DNA, 201 bp, Homo sapiens
tgatgctccttagtcaaatgaattattgcattttatacactcacatgctatataaaacttacatgattcttgtttatattatagttagttatctagttagytgtgtacagaagtttgctacccagctcagcaaactttttctgaaaagaaccaaatagtaaatatgttagactttgcaggctacatgtgatctctgtagca

SEQ ID NO: 7624 - DNA, 201 bp, Homo sapiens
tggcaggtgcctgtagtcccagctactcgggaggctgaggcaggagaatggattgaacctgggaggcggagcttgcagtgagcccagattgcgccactgcwctccagcctgggcgactgagcgagactcgtctgaaaacaaaaacaaaaacagaattgcatggcctcattggtattttgtcaaagccgtctttgccactaa

SEQ ID NO: 7625 - DNA, 201 bp, Homo sapiens
actaacttctgtgaattgttttctgatctaggcataactattttatggaaaatatacatgtacatttcatgttatactttagataaaactacttgcaaggrcaccaacttttaggtttctttaaaacagtatttatttctgattggctgcatacaaatgttttgtggcttatggtttaaaataaataaaagaaaaataacc

SEQ ID NO: 7626 - DNA, 201 bp, Homo sapiens
ggggtaacttccttgagaaagaacatgtataaaaaaacttgttgttaacatcattacttaatagtgagaaattagaggctttctcactaaatcagaaacarggtaaggatgttccctctcccaatttcttttcaacactgcagtggaagtcacagcatgcaacaatacaagaaaaggtatacaatacaagaaaaggtatac

SEQ ID NO: 7627 - DNA, 201 bp, Homo sapiens
accctgggtacagaaaaaagtatagaattaatgggaggccagtgacaatctttgattgggatagttttggtttctaagcagacaggctggtttggaatgartagggcctcttttgcagaagatccatttctggcttgtgggatcgactcttgctttcagacatctgatctgcttatttcaaatccctgctcatttataaat

SEQ ID NO: 7628 - DNA, 201 bp, Homo sapiens
tttcaaatccctgctcatttataaatgaccaggaaggcagaaaaattaggttaggtagatagaaagctattttttttctaagaagatttactttaatgatrataaaatgcagtaaaaacctcaaagggaatggtcaagtactgattggacttttagagttatcacagtgatcatacattcttgtttatttctgtttcagca

SEQ ID NO: 7629 - DNA, 201 bp, Homo sapiens
tgaccaggaaggcagaaaaattaggttaggtagatagaaagctattttttttctaagaagatttactttaatgataataaaatgcagtaaaaacctcaaarggaatggtcaagtactgattggacttttagagttatcacagtgatcatacattcttgtttatttctgtttcagcacaaataataatagcactttctttca

SEQ ID NO: 7630 - DNA, 201 bp, Homo sapiens
tatttggcagttggcatataggcttgactgcttgtctgctttcctactgggaaggagaattacatgaagaatccttcagctgacctttgcttgctttcttrtacatcaccattgtttaaacccataactctagtggatgaacatgagataatttcagacaacctattgtgcttccaagacatcctatggatatctgacttt

SEQ ID NO: 7631 - DNA, 201 bp, Homo sapiens
tttcctcttaacactgctttagttgtgtcccagagattctggtacattgtctctgttctcatttgtttcaaagaacttatttatttctgccttaatttcaytatttacccaggagccattcaggagcaagttgttcaatttccaggaaattgtgtggttttgagtgagtttcttaatcctgggttctaatttgattgctct

SEQ ID NO: 7632 - DNA, 201 bp, Homo sapiens
gctgacctttgcttgctttcttgtacatcaccattgtttaaacccataactctagtggatgaacatgagataatttcagacaacctattgtgcttccaagrcatcctatggatatctgactttctcaggacttaaaggtctttattctgtttgaaattcacgaatttttgagtctagctaagctaattcggttctttgctt

SEQ ID NO: 7633 - DNA, 201 bp, Homo sapiens
ttaatatcagttttgtttaaaaagcttagctgatgtttaatgttaaataatgatggcatgtaaattcctgatgataatttgctttagcaaggtgaatactstctagtgagaaatggtgatgaagtagatatttctcatactgtaaaattaggtcaggttctgaaatggtctgaagtgtagaggtcacacaggattctgtat

SEQ ID NO: 7634 - DNA, 201 bp, Homo sapiens
taatgcataacattagccttctgctgggagtaggggaaaatgtaaacctgtaaaatacaactgctgacctcaggagcttgccatttaatgagggagttaasacatgcctgtgtgggaagacaaatagcaagatatgtgttaaataataacaaaagacaaaaatagatgaaataagtaagacagtgcataggataagcactc

SEQ ID NO: 7635 - DNA, 201 bp, Homo sapiens
tctctctgcttctaaatgatgtcatttaaaagttctttaatttactcccaccttgactgttttaaacaaatgtttatttctctcatgtaacaagatgactrctggctttggttcaggatagtgtgtcaggtcagagccagtatctctgaaattttcttggctgttgttcatgcttgctgcctcattgttccaagatggctg

SEQ ID NO: 7636 - DNA, 201 bp, Homo sapiens
aaagcacagcctggagctatagaaatggatgctgcatttctccccgccgcccagggagattagcgtgttaggcagttgggagtcccagtgctggctgctgyccctccctcaaggagctcaaagggcttagacagcaggcagcagaagcctgtgctggtcacccctcccccagggagttcagtaagcttaggcagattccag

SEQ ID NO: 7637 - DNA, 201 bp, Homo sapiens
tgtacattaattttgtattctgaaagtttactgaattaatttgtcagtattaggagctttatggagaagtatttagggttttctagatatatgatcatgtyatcagcaaacagtgatagtatgacttcctctttactgatttggatgccctttctttctttttgttgtctgcttgctctggctaggacttccagtactatg

SEQ ID NO: 7638 - DNA, 201 bp, Homo sapiens
agttcagatatgaaagattagtagaggttgctgaggtttcagaaggcatcattgaggatgtgggcttacattgggcctttaaaagtgaagcgaggtggtgrgaacatttcaagttggaaaaattaatttagcaaaaggtacttgtgatctttcactgtgtagcccttcaaattgaatttcatgtgaataaaactctaactt

SEQ ID NO: 7639 - DNA, 201 bp, Homo sapiens
aggatctatgcaaaaaggaattaaatgatcataggccttgctttcagaaatttataatgcaaggtgtaaaaacaaaggatttgaagtagacacaaaggtgmtctaaatcagctgtttagaggtgactttcctttgagcaaatactcagcatatctgctactcaagattctctattaaaaattgaaagcatttttaacatag

SEQ ID NO: 7640 - DNA, 201 bp, Homo sapiens
aaaagccattttcagatcataggctatacaaaaagaggtgacaggctggatttggcccacaggctgtagtttgtcagtctctgactacatgattatttatyatagtatacttaatgtatttttaaggaagcacttgatatactcatatttttgcaaaaactttcttttgataaagggaggatgaatcttttatgtaattga

SEQ ID NO: 7641 - DNA, 201 bp, Homo sapiens
tcaaagctcccttcccgcctcagcagtttttctcttatatgccattgaccatcaccgagttatatgaccaccccaatttccaagggaggctggagaatttyagaatacaattttcatgattagctttgatcaattgcttgggactgggaacctggcctccaagaaataaatcgaaagcaaggagatggagaaaacatattg

SEQ ID NO: 7642 - DNA, 201 bp, Homo sapiens
tcttatatgccattgaccatcaccgagttatatgaccaccccaatttccaagggaggctggagaattttagaatacaattttcatgattagctttgatcarttgcttgggactgggaacctggcctccaagaaataaatcgaaagcaaggagatggagaaaacatattgaaaagaaaattttgaaaattaagaaattggcc

SEQ ID NO: 7643 - DNA, 201 bp, Homo sapiens
gaaaagaaaattttgaaaattaagaaattggcctaaacaacaaaacttggtctcttaaaatttctaccttttggaggaatattgtgtaaacattactagamctcttattttgcatattcttctactagcaataacaggaggtaacatttgaagggtttgtagaatacatgcacatgttttatctacgatctgtttccagct

SEQ ID NO: 7644 - DNA, 201 bp, Homo sapiens
ttcagggtagatattacagaacaaacagaacaatctccattaacccactgagctcacagaaatgtctgctatactgattcctgacttgtttttatgttgtrtagactttgaagaagggttccacagaccaggagaagattgaattcctgaaggaggcacatctgatgaggtagctctgaaataattttctcctggtatggg

SEQ ID NO: 7645 - DNA, 201 bp, Homo sapiens
aggcacatctgatgaggtagctctgaaataattttctcctggtatgggtaagaagttttaagtccgcttgacttatttttaacacccaaaatgacatgacwtaacggatcatgactaaaacaacatggttgaaacgtttaaatggaactacatctgcagagcaagtagtctatagaggccaatcttctgagcctgggtaca

SEQ ID NO: 7646 - DNA, 201 bp, Homo sapiens
actaaaacaacatggttgaaacgtttaaatggaactacatctgcagagcaagtagtctatagaggccaatcttctgagcctgggtacaggcaatcctcagrcaaaaggttctcctttcttttatcttcaataaggagcatgttttgcaagtgaattctgaagctgtttggcttttgacatgcttgtattcatctaaatgtg

SEQ ID NO: 7647 - DNA, 201 bp, Homo sapiens
caataaggagcatgttttgcaagtgaattctgaagctgtttggcttttgacatgcttgtattcatctaaatgtgtgataatggtcaagtatacccagtaaragagagttctctcaaatgctataatgtcagtgaaaatatcctttgtcttagtaaacttgtctatcagtttgagtttgtggtcataaaaactgctcaagca

SEQ ID NO: 7648 - DNA, 201 bp, Homo sapiens
cccaccaccatgtccagctaagtttttgtatttttagtagagacggggtttcaccatgttagccgggatggtctcgatctcctgacctcgtgatccacccrcctcaggctcccaaagtgctgggattacaggcatgagccaccacacccagccagaatacacattattttcctcagcacatgaatcgttcttaaggatagg

SEQ ID NO: 7649 - DNA, 201 bp, Homo sapiens
agtcaagtgggatttatcccagctatgcaagtttgagtcaacatttgaaaatcaattaatgtagtccactatatcaacagactaaagaggaaaaatcaggyggtcacattgatagatgcagaaaatgcttttgacaaaattcaacacggattcaggatgaaaaatcctcagcaaactaagaataggggtaacttccttgag

SEQ ID NO: 7650 - DNA, 201 bp, Homo sapiens
tagtcagtatacaagaacagatggtcaatgtgagcaaagatatggatatttgaggaaaaaaaagaaatgttagagataaaaacactgtaacatgtgaggartgtttgatgggcttaatagtagactggatgtggctgaggaaggaatctctgagcttgaaaatatctcagtagaaacctgcaaaactataaaggtaaaaaa

SEQ ID NO: 7651 - DNA, 201 bp, Homo sapiens
tcacaccattctcctgcctcagcctcccgagtagctgggactacagtcacccaccaccatgtccagctaagtttttgtatttttagtagagacggggtttyaccatgttagccgggatggtctcgatctcctgacctcgtgatccacccacctcaggctcccaaagtgctgggattacaggcatgagccaccacacccagc

SEQ ID NO: 7652 - DNA, 201 bp, Homo sapiens
atttatgggatctagaaatcaaaacaattgaattcatggacaaagagagtataaggatggttgccagaggctgggaagggtggtggtgggtggggtggggkatgggagatggggacagttaatgggtacaaaaaatgtagaaagaataaataagacctactatttgatagcacaacagggtgactacagtcaataataact

SEQ ID NO: 7653 - DNA, 201 bp, Homo sapiens
aatataatatatataattccaatataatatgtattccaattcatatattccaatataatatataatatatattataaaaatggctaaaaagcatgtgataratattcaacctcacagcaaccacagaattgcagaataaaaataaattatcaatttttcttctatcaaattggcaaagataaaaacatttatagttgggaa

SEQ ID NO: 7654 - DNA, 201 bp, Homo sapiens
gtactcaataatgagattactgggtcaaatgttatttctggttctagatccttgaggaattgccatactgtcttccacaatggttgaaataatttactttmccaccaacagtgtaaaagtattcctatttctccacaccctcatcagcatctattgtttcctgactttttaatagttgccattctgactcgcgtgagatgg

SEQ ID NO: 7655 - DNA, 201 bp, Homo sapiens
catattcttctactagcaataacaggaggtaacatttgaagggtttgtagaatacatgcacatgttttatctacgatctgtttccagctttcagggtagayattacagaacaaacagaacaatctccattaacccactgagctcacagaaatgtctgctatactgattcctgacttgtttttatgttgtatagactttgaa

SEQ ID NO: 7656 - DNA, 201 bp, Homo sapiens
agaggtcacacaggattctgtattcattgggaagattacagtttgcaatgtgttcccagggactgaaaacacaccgtcgatgaaaaccagccactgatgarcagcctcagacctggccagtacggggagcacgtgaaccataactggcttagaaggactgatttcatgccaacttgaggggagaattccaaattccaaaga

SEQ ID NO: 7657 - DNA, 201 bp, Homo sapiens
caacgttatgtaaagccccagtacagtatgttgtaaatagaaggtgctcaaccaacatcagaattcttctttcttttctcaatggccattgtgtagagccrcttcacaaattctcaagggcctctttcttttggatcagagttgtttggttaaacagtgaaatggccaatgctaaaggtgagacgtcacaaaatgtgtaaa

SEQ ID NO: 7658 - DNA, 201 bp, Homo sapiens
ctctgcctagttatacctgtgcctttgacttattttcgtcctagcaattttcattatcagaattattttttctttttaaaaatttgtcactcagttattayctacctccttctaagggaagtcctgtaaggcagggagtttaactttcttgcttactgtcatattcttagatcccaaaaccatgcttggcatgaaaaaggc

SEQ ID NO: 7659 - DNA, 201 bp, Homo sapiens
gctgcagtggtaaaaccttagaagacttacatggaaagaattattctgtttccttcacattagcttttgacaatcagaaccctgggctaacattctggcaytttctggtcatgtgagcccgagcctgtttttagtatttaatgggagaacatgaccctcattgccagaatcatgtttttctggagcacagggatagcgtgg

SEQ ID NO: 7660 - DNA, 201 bp, Homo sapiens
tttctgaccataatagtgacatatttcaactgtgaaaaacttgaaaattgcagaaatgcattaagaataaataaattattcacaccatttctacctaatayatcccttaagattttcttattttaagtcatttttttctgcagagataaaatatacataatacagaataccagatgattttaaaaatgtatgtatatatat

SEQ ID NO: 7661 - DNA, 201 bp, Homo sapiens
gatttttcaatttggggtaaattgattgcccagtatggaagatgaggatttaactctcttagacttcctcataatatacctgtccatccctcaccacgctrcacacaggaaaactttgcttgcctcatcctctgacaattatcacaattttgcagataaaccatccttccaggtttgcattattagaactatttagttatt

SEQ ID NO: 7662 - DNA, 201 bp, Homo sapiens
aaaatggaatattgaatcaaaagcttcctaagtctccttttaacttttttttttttttggacagagtctttctctgtggcccaggttgaagtgcagtggcrtgatcttggctcactgcaacctctgcctcccaggttcaagtaattctcttgcctcagcctcctgagtagttgggactacagacatatgccaccataccca

SEQ ID NO: 7663 - DNA, 201 bp, Homo sapiens
tggtaggttgtaagtctacagacacaagtctacagatacctaaataatccacttaaagtaggaagtaggtggactcattagagtgcagtggagaatatacygcagaagcccagaggaaggagtgatttccaactgaggaaacctgagagggcttcatggaagaggtcttctgattcagacacaaccaaagcaggaggtaga

SEQ ID NO: 7664 - DNA, 201 bp, Homo sapiens
tccttgaaactggtaaccagaagcctggggaagcagtataaattatccttcattagtaaaacagaaaaaattccctcttaatagagagcaaaaatacaaamaaaaaattaaattggcatgttttctcagttgttactggttggttataaaaattgcatctgagcaatttttcttgggaatgggtggaggtgagggttggct

SEQ ID NO: 7665 - DNA, 201 bp, Homo sapiens
aaataatccacttaaagtaggaagtaggtggactcattagagtgcagtggagaatatactgcagaagcccagaggaaggagtgatttccaactgaggaaasctgagagggcttcatggaagaggtcttctgattcagacacaaccaaagcaggaggtagaacagtagctgaactatactttcccactgagttatgaaaggc

SEQ ID NO: 7666 - DNA, 201 bp, Homo sapiens
catgtgtctttatagtagagtgatttatactcctttgggtatgtactcaataatgagattactgggtcaaatgttatttctggttctagatccttgaggarttgccatactgtcttccacaatggttgaaataatttactttcccaccaacagtgtaaaagtattcctatttctccacaccctcatcagcatctattgttt

SEQ ID NO: 7667 - DNA, 201 bp, Homo sapiens
agtaggtataaggaactgcaatcggaccagtgtaacggaagcacagattgagagaggagaaacagtaggaaattaatagacttgtagaaaggctggtgcakcctgggggtgctgtggaggctgtgctcaggaattcataatggactctacaggaagggggtcacaacaaatcaagctaatgaaaaagcacaggaggctgga

SEQ ID NO: 7668 - DNA, 201 bp, Homo sapiens
tttacagacctactagggctacttctttgatttctggaactttattgttgttattattattattattaaatataacttctgccacagggatctggcagctmgaaattgccttgtttccgtgaaagactataccagtccacggatagtgaagattggagactttggactcgccagagacatctataaaaatgattactatag

SEQ ID NO: 7669 - DNA, 201 bp, Homo sapiens
atgatatttcactgagaaacaaaattttggagagtaaaatacttctggttaagtaaaatacttctggttaagtgaattctaataaaagcactccgagtgtrtgtgtgtgtgtgagagagagagagtatacacacacatatgccttttattttgggagatatgatttgactagtatcttaatctacatattaaaatattata

SEQ ID NO: 7670 - DNA, 201 bp, Homo sapiens
gtgctattgccttttaactgggtcttttcagaaaataatttcttaacaaaggaatgattgtcagacaagggataccagcatttcagggatgatttttgtgttgttgtttttttttcggtggggaagacctggacaatgatcgcatcttgccatgtaggtgacatttaacttgcttcaatggtggaagatcacatttgggca

SEQ ID NO: 7671 - DNA, 201 bp, Homo sapiens
aaaatttagggttttaaaaaaatggcctcaaatctttggtttcagttgaaatcactagtgtttctgactcacatttacacacttaagggatacatataacttttctgccctaatccctattttagattatatataattatttaatatatatcagacattgttttccagtatctttgtttttaaatatatctggactttaat

SEQ ID NO: 7672 - DNA, 201 bp, Homo sapiens
ctgtatgatatatgtgtgagcaaaataacaaatgaaaatgctttctaagaagtactggaaatttgaggggaaactaataaaagatttttgagaacatccaragattcacaattctgggagcctgttttctatttttactagaaccctatttgctgacttgactgccccttactctaatctgtacatgcctgtgccaatggg

SEQ ID NO: 7673 - DNA, 201 bp, Homo sapiens
tttctctcgcttattgtgagtacttaaagcagactcctaaaggaaatagtgttttggtaagatcttggtttaaccaagttttctgttatttgaaaaaaaarcgccttatttgatggtcacaattgaaagccttatttgatggtgataagtgattatgtaagttcaaatgcactatggagattttttttgtttactttattt

SEQ ID NO: 7674 - DNA, 201 bp, Homo sapiens
ttctctcgcttattgtgagtacttaaagcagactcctaaaggaaatagtgttttggtaagatcttggtttaaccaagttttctgttatttgaaaaaaaagmgccttatttgatggtcacaattgaaagccttatttgatggtgataagtgattatgtaagttcaaatgcactatggagattttttttgtttactttatttt

SEQ ID NO: 7675 - DNA, 201 bp, Homo sapiens
tgagatttttaaaaaactccacagatcattgtaatatgcagctatgtttgataacaacaggtttaaacaacaacaaaattcactggctcatgttgctaaakaggccagagttaccactacctttaggcaagcttgacacaggctcaacatttcagattcagtaactctggagtgtgactgataatttatatttgttccaag

SEQ ID NO: 7676 - DNA, 201 bp, Homo sapiens
tatagccttatagtacagtttgaagtcaggtaatgtgatgcctccagatttgttctttttgcttagtcttgctttggctatatgggctcttttttggttcyacatgcattttaggattgttctctcttgttctgtgaagaatgatgctggtatttcaatgggaattacattgaatttgtagattgcttttggcagtatggt

SEQ ID NO: 7677 - DNA, 201 bp, Homo sapiens
tccttgttcctctgtttctacttctttgccatttttgtgggtgaataaaataatttttagtattccattttatctcctctaatgacattttaagtatgtctatttatttttttaggttgcattagaaattaaaatatgcatttttttacatgatacatcttcaacttatcaagtcaatatccaaatatatccttcataaat

SEQ ID NO: 7678 - DNA, 201 bp, Homo sapiens
catcccaacattctgaagcagcttggagtttgtctgctgaatgaaccccaatacattatcctggaactgatggagggaggagaccttcttacttatttgcrtaaagcccggatggcaacggtaggcagttgggatccataatattggtttcataatgcaaatgccctataattccctattaattttctttaaatttaatag

SEQ ID NO: 7679 - DNA, 201 bp, Homo sapiens
ccttgttcctctgtttctacttctttgccatttttgtgggtgaataaaataatttttagtattccattttatctcctctaatgacattttaagtatgtctatttatttttttaggttgcattagaaattaaaatatgcatttttttacatgatacatcttcaacttatcaagtcaatatccaaatatatccttcataaatg

SEQ ID NO: 7680 - DNA, 201 bp, Homo sapiens
agcaacgagcctcagaatctcagatataatgataactttggtagctgaactgtcacactttccttatcaattttgtattctgtattttattgaaatatggsataagtaaactacaaataatgtaaaagactgaaaattgagaaaatggaaacttcccagttaaaaatcatggaataattgtcttataggtttggaattctg

SEQ ID NO: 7681 - DNA, 201 bp, Homo sapiens; identical to SEQ ID NO: 688

SEQ ID NO: 7682 - DNA, 201 bp, Homo sapiens
gagaaacaaaattttggagagtaaaatacttctggttaagtaaaatacttctggttaagtgaattctaataaaagcactccgagtgtgtgtgtgtgtgtgwgagagagagagtatacacacacatatgccttttattttgggagatatgatttgactagtatcttaatctacatattaaaatattatactaaatgggaata

SEQ ID NO: 7683 - DNA, 201 bp, Homo sapiens
ccaaaagatgattaagagctgggcaccttggttagatgttctactggtgaatgtttttgtattatttaaatcttccagctagaagaagattggaattaccrcttgtttctgatttaacttaatagtctctgcgatgtttacagggagatcagatacacacacatctgaccaaatttgatagtagtgcataaaaaatgattc

SEQ ID NO: 7684 - DNA, 201 bp, Homo sapiens
tgagtcctgtgctattttgaaaaaaaaaaaaaaaaaaacttgaggagaagagttgtaaagagtttgcatggtgagtggaggaattggaacctctacttagscaaatgagatacttcaagtataatgagtatttttctggagccaaaacaaccagcccaggtaaattttaacaaacttgaaggacctgcaaatttgtttaga

SEQ ID NO: 7685 - DNA, 201 bp, Homo sapiens
caggttataagtaagtatggcaatagcccttttttgtgggagatatgttccaaggcccccagtggatgcctgaagccaagaataatacctgtattagttcrttctcacactactatcaggaactggtaacttataaagaagctgggtaatttataaagaacctgggtaatttataaagaaaagaggtttaattggctcatg

SEQ ID NO: 7686 - DNA, 201 bp, Homo sapiens
ataatatctcatttcaaaggctaatgatccttcattgacatctttgtatcatccccatttctaaatggcacaggttatagagaactatgtaaaagattagrttgtcttttggttatttctcagatatgattctaattttaaaaaatagagccaagcttggcactgtatacccattatgtaaattgcttgtaatacatgtga

SEQ ID NO: 7687 - DNA, 201 bp, Homo sapiens
aaatgtaaagattatgtccgcttaaaaatcttgaaaagcttccccttgtagtgttgtaaaatccaactccttgcctgccctgtgagacctgcatgatctckcttccctcctctgatctcatctcatcctttcccctcaatgaccacacttcagtgacactggctttctttcaggttctaaaatgtgccaagctctttccaa

SEQ ID NO: 7688 - DNA, 201 bp, Homo sapiens
caggttctaaaatgtgccaagctctttccaaatttaggactttacacatgctttccccacttgtagttccctgactcccatccacaccctattcccatgastagtatcttattttcttacaaagttctttggcttaaatgtcacctctggagaggggccttctgtaagcaactttccaaaactgtttcatgtctattagaa

SEQ ID NO: 7689 - DNA, 201 bp, Homo sapiens
gctttccccacttgtagttccctgactcccatccacaccctattcccatgactagtatcttattttcttacaaagttctttggcttaaatgtcacctctgsagaggggccttctgtaagcaactttccaaaactgtttcatgtctattagaactcgtgtttgttttctttataactttgcaaagaacttataatttgtgat

SEQ ID NO: 7690 - DNA, 201 bp, Homo sapiens
gagcagaccaataacaagtaatgagattgaagctgtaataaaagtctcccagtaaagaaaagcctgagacctaatagcttcactgctgaattctagcaaayatttaaagaaaaactaatacgaatcctactcaacttattctgaaaaacagagaaggagggaatacttccaaactcattctatgaggccagtacttccctg

SEQ ID NO: 7691 - DNA, 201 bp, Homo sapiens
tcttgaaggctgtattttatgtactttgtttaaatacctgtagaaacttttccctttaatactgaaaaatactatgacgttttcatgtattgaagttcaaytgctttgtgaattcaaagtctttaatatgcatagaggctaacattggatatagctaatgagtcctgtgctattttgaaaaaaaaaaaaaaaaaaacttga

SEQ ID NO: 7692 - DNA, 201 bp, Homo sapiens
cttttcatagaattcagaaccaacttcagttattcagaaattttttcttaaatagcatttatcagtgcagagatgaagcaaacaacagtggagtcataaakgaaagctttgaaggtaagtttgattcttcagaattttctagttttcgctgcactgtgaactgaacaaagttaaaatggaatgtacacagaaagcattttg

SEQ ID NO: 7693 - DNA, 201 bp, Homo sapiens
tgaaaaactacatgttgggtacaatgtatactacttgggtgaaaggtgcactaagatctcagacttcaccactatataatttatccatgtaaccaaaaacmacttgtaccccaaaaggtattggaaatatatatatatttcctatatatatatatattgcaatataatatatataattccaatataatatgtattccaatt

SEQ ID NO: 7694 - DNA, 201 bp, Homo sapiens
tgttagactacattttcataaggtctgttctccttctcttctccccccacacaccagtttggacctcaagtacagagttaattatagactctttgcttacrgtacattatcatcattagcctatgcagggctcctgtcttgtttgtttgtttagccattttatccccatattcctctcctcttcaacttcctccctccctg

SEQ ID NO: 7695 - DNA, 201 bp, Homo sapiens
atccttgaaactggtaaccagaagcctggggaagcagtataaattatccttcattagtaaaacagaaaaaattccctcttaatagagagcaaaaatacaamcaaaaaattaaattggcatgttttctcagttgttactggttggttataaaaattgcatctgagcaatttttcttgggaatgggtggaggtgagggttggc

SEQ ID NO: 7696 - DNA, 201 bp, Homo sapiens
tcattgaactgttcatgtttgcaagttatagctcttctttttagggcaaatgtattgtgcctgctttccgctattaccatgagaaacaatagcatgttgtyctaggtattatagttacaagttgaaagacagcaggaagattgatcatgattgtgttgtagttttacaatatgcgccttttctgcaagtatgtgtgtgtgt

SEQ ID NO: 7697 - DNA, 201 bp, Homo sapiens
ttcatatccatatacacatccgtatgtacatatatgtatatacatatgtgtatatgcatgtacatatacatatatatggatgtgtatatatatgtgtatgyacgtggatgcatgtagatagatatttatgtatatatccatatatatacacacacacacataatgcctataagcacataaacacaacaaatctgattgatc

SEQ ID NO: 7698 - DNA, 201 bp, Homo sapiens
catatccatatacacatccgtatgtacatatatgtatatacatatgtgtatatgcatgtacatatacatatatatggatgtgtatatatatgtgtatgcaygtggatgcatgtagatagatatttatgtatatatccatatatatacacacacacacataatgcctataagcacataaacacaacaaatctgattgatcaa

SEQ ID NO: 7699 - DNA, 201 bp, Homo sapiens
tgaataaaaattataaagttattttatattctttttttcacattaattcttggacgtcctgtttgtattttacatttatagcatagcttaatttgcaaactaagttttcatagaaaatatttgatctgtatttagatttcataaaatttacaggcaaaatagttgatttacatacttgttctaaaatactcaaaaatattt

SEQ ID NO: 7700 - DNA, 201 bp, Homo sapiens
tatagtttcaaattttggtcaccatggaaccatgcaaagtgatatgcatggatatgtatgagtttcatttaacacagttttgtacaaaagtaaacactactatatatatatatatgcaccattataaatcatacagatagtaatatataaaatacagtaaaatatgtttaatactaaaagtataataaaaataatacaatg

SEQ ID NO: 7701 - DNA, 201 bp, Homo sapiens
atagtttcaaattttggtcaccatggaaccatgcaaagtgatatgcatggatatgtatgagtttcatttaacacagttttgtacaaaagtaaacactactatatatatatatatgcaccattataaatcatacagatagtaatatataaaatacagtaaaatatgtttaatactaaaagtataataaaaataatacaatgt

SEQ ID NO: 7702 - DNA, 201 bp, Homo sapiens
atgctgacgttgtaaagtctacaacatcaggtatttgttttctaaaatctgtgcaaataataatttagaggcgtgtgtgtgtgtgtgtgtgtgtgtgtgtktcccattggtgtctttagggatatgaacactgtctctttgctaaagtttaggtcaaaaacatgtttttgaccccaacacaccaccaaaatatgtttaaat

SEQ ID NO: 7703 - DNA, 201 bp, Homo sapiens
cttgtactggttttcaaagggaattcttccaggttttgctcattcaatatgatattggctgtaggtttgtcataaatagttcttattatttagagatatgytccataaaaacctagtttattgagagtttttaacataaagggatgttgatgttgaattttatcaaaggccttttctgcatctattcagataatcgtgtga

SEQ ID NO: 7704 - DNA, 201 bp, Homo sapiens
gttaccatgtctgtctacacactagcttattacctaaaggttcagtaataaatatcagtacattcttaacattagcaatagataatggtgactatatatawatatatatatatatatatatatatataatcttattatccaaactattaaactattccattcatgtgatgtgatctttctaaaacatcattatcatcatgt

SEQ ID NO: 7705 - DNA, 201 bp, Homo sapiens
cagaccactgctaacatttggtaagcttcgttccaatactttttctacatattcgagtatgtgtatatgaacaacaatgataaacactcttgtactctgcaaaaaaaaaaaaaaaaaaaattgccattatactgaaagcattttcttttctactgaggaatataacctggatgtgactgaactcaaaaatgaatttgtttc

SEQ ID NO: 7706 - DNA, 201 bp, Homo sapiens; identical to SEQ ID NO: 866

SEQ ID NO: 7707 - DNA, 201 bp, Homo sapiens; identical to SEQ ID NO: 1478

SEQ ID NO: 7708 - DNA, 201 bp, Homo sapiens; identical to SEQ ID NO: 723

SEQ ID NO: 7709 - DNA, 201 bp, Homo sapiens
ggaattaaaccagaaagaaagcaagcggctccgtgtcctgcttcccctccttgcgcctttcctcccggtctccgcggagacagccctcggttatggaggtmccgcctgcgggattggagtgccccttgcggctgtgggaggggcagtcgggggctggggggacgcaggtacgcctgtcgccaggacgcctctaccctggac

SEQ ID NO: 7710 - DNA, 201 bp, Homo sapiens
gcttggtacaatgtatgttctctcccccaacagtacctacttcttaaacaaacactgagatccccagaggcgggcccgatcagagaggaaccccgcgtgtkcctagaacatggggaacaggcctgtgagagggaccagtcacaaccaagcgcaccactggaggaccagtcctacagagacaggaccactggagagctagaa

SEQ ID NO: 7711 - DNA, 201 bp, Homo sapiens
ccccccaggtgctatgggggaggggggcgttgaatggaattaaaccagaaagaaagcaagcggctccgtgtcctgcttcccctccttgcgcctttcctccyggtctccgcggagacagccctcggttatggaggtaccgcctgcgggattggagtgccccttgcggctgtgggaggggcagtcgggggctggggggacgca

SEQ ID NO: 7712 - DNA, 201 bp, Homo sapiens
ccagaaagaaagcaagcggctccgtgtcctgcttcccctccttgcgcctttcctcccggtctccgcggagacagccctcggttatggaggtaccgcctgcrggattggagtgccccttgcggctgtgggaggggcagtcgggggctggggggacgcaggtacgcctgtcgccaggacgcctctaccctggacggtaggagg

SEQ ID NO: 7713 - DNA, 201 bp, Homo sapiens; identical to SEQ ID NO: 871

SEQ ID NO: 7714 - DNA, 201 bp, Homo sapiens
atcacttgaacctggaaggcagaggttgcagtgaaccgagattgtgccactgcactccagcctgtgtgacagtgagactctgtctcaaacaaaaaaaaaawtttttttttaattaaaaaaaaagaagagggctaggggcagtggctcaggcctgtaatcctagcactgtggaaggccaagacaggcagatgacctgaggtc

SEQ ID NO: 7715 - DNA, 201 bp, Homo sapiens
gaaccataaagttacccatttatgctagtaagtagatgggcagatgagttagtgcagatagacagataaactggtgcataggcagatggcacaaaagatcrggaggtgcctgactgccccctaccctgtgatcatggtcatgtccaccccacccagagtaggcaaagagaagtgccgcccagtcctggctggaggtggaag

SEQ ID NO: 7716 - DNA, 201 bp, Homo sapiens
tacatttcctctgccagccccgccccccagccaccgtgacaggaagccccagtagcgccaagatagttgtgactggtcccaccctttcaggaggggcctargttttcaggcagaaggggaattaggttgggccttagaaggtccttcaagtgtacatccacgatcccagcagcagacactggcatctggctctgcccctac

SEQ ID NO: 7717 - DNA, 201 bp, Homo sapiens
tgacaggaagccccagtagcgccaagatagttgtgactggtcccaccctttcaggaggggcctaggttttcaggcagaaggggaattaggttgggccttakaaggtccttcaagtgtacatccacgatcccagcagcagacactggcatctggctctgcccctaccgtatagatgaggtgacaagctggaaggtcccaggg

SEQ ID NO: 7718 - DNA, 201 bp, Homo sapiens
aggggcattcaattttatcctgagagcagtggaaattttaagacagtttttttggtttattggtttggctttgttttctatgtatttttgtttttgtttaraagagtttttaaatagaagagggttggctgggcatggtggctcagcctataatcccagcacttggggacgctgaggcaggcagatcacctgaggtcagaa

SEQ ID NO: 7719 - DNA, 201 bp, Homo sapiens
tgctgtggctgcaacaggccatcaatagccgtaaggaggtaacactaacctggaactctttctgaacatttagggtcaagggtgggggttagggagagacsacctgccatgcccaagcaggcctgcttggtacaatgtatgttctctcccccaacagtacctacttcttaaacaaacactgagatccccagaggcgggccc

SEQ ID NO: 7720 - DNA, 201 bp, Homo sapiens
gctgtggctgcaacaggccatcaatagccgtaaggaggtaacactaacctggaactctttctgaacatttagggtcaagggtgggggttagggagagacgwcctgccatgcccaagcaggcctgcttggtacaatgtatgttctctcccccaacagtacctacttcttaaacaaacactgagatccccagaggcgggcccg

SEQ ID NO: 7721 - DNA, 201 bp, Homo sapiens
tggaccgagggccgcattcccaggccgcgattcctcccagaggtagaacacacctaggagagaagggaaggagggacttgggcagggtggaacccaccctwcccagtgataagcttttctcactggaagaggcagtagactcacctcctcacaccccactccttaaccctcaccaacttgtctgctagatcatggtgccca

SEQ ID NO: 7722 - DNA, 201 bp, Homo sapiens
gatcacctgaggtcaggagctcaagaccagcctgaccaacatggagaaaccccatctctactaaaactacaacattagctgagcgtagtggcgcatgtctrtaatcccagctgctcgggtggctgaggcaggagaatcgcttgaacctggaggcagaggttgcagtgagccgagatcgtgccactgcactccagcctgggc

SEQ ID NO: 7723 - DNA, 201 bp, Homo sapiens; identical to SEQ ID NO: 865

SEQ ID NO: 7724 - DNA, 201 bp, Homo sapiens; identical to SEQ ID NO: 1479

SEQ ID NO: 7725 - DNA, 201 bp, Homo sapiens; identical to SEQ ID NO: 867

SEQ ID NO: 7726 - DNA, 201 bp, Homo sapiens
cactacatttcctctgccagccccgccccccagccaccgtgacaggaagccccagtagcgccaagatagttgtgactggtcccaccctttcaggaggggcmtaggttttcaggcagaaggggaattaggttgggccttagaaggtccttcaagtgtacatccacgatcccagcagcagacactggcatctggctctgcccc

SEQ ID NO: 7727 - DNA, 201 bp, Homo sapiens; identical to SEQ ID NO: 868

SEQ ID NO: 7728 - DNA, 201 bp, Homo sapiens
cctaggcctgaggcccagccagcgcccaatggatgacaaaaagaagaaacggagtcccaagccctgcctggcccagccagcccaggccccaggcacactayggagggtccctgtgcctaccagccacagcggctccttggccctaggacttcctcatctgccatcccccaagcagcgggccaagttcaagaggtgggtaca

SEQ ID NO: 7729 - DNA, 201 bp, Homo sapiens; identical to SEQ ID NO: 869

SEQ ID NO: 7730 - DNA, 201 bp, Homo sapiens
ctgtttcctagagggggccagctttggactcggtctgctctcagccttgttaaagtgtttgccgccaagtggtgatggtaagtgggaggttgatggggcayggcactgaaggtctcatttctttccctagaaaacagtccgggataaagaactggagggcctgcaggtaaaaatccaacggctggagaagctgtgccgggc

SEQ ID NO: 7731 - DNA, 201 bp, Homo sapiens
tcattcagggtcataaaacaaatgagtgaggcactcagacaggaacccagggaccccctttcaggcactgctctggctgtgttattagcagaaaagacttmtttttgacctcttcacgcctcctcaccccttcccagtgcccaaggggaaccataaagttacccatttatgctagtaagtagatgggcagatgagttagtg

SEQ ID NO: 7732 - DNA, 201 bp, Homo sapiens
acgcctgtcgccaggacgcctctaccctggacggtaggaggttgccgtgggaacggctggggcaaagcccacgcccgcgcatgctcaggagcgacgccgaycaatgacgtacttcgcaggcgcgcgggcgggcctggcagttggcgcccatggagccagagctgctggttcggaaggtgtctgcattgcaggtgcgggggc

SEQ ID NO: 7733 - DNA, 201 bp, Homo sapiens; identical to SEQ ID NO: 727

SEQ ID NO: 7734 - DNA, 201 bp, Homo sapiens
acgttcgggagatgcaggagaagctagcccggctgcacttcagcctggatgtgtgtggggaggaggaggacgatgaagaggaagaggatggggtcactgargggctgccagaggagcagaagaagacaatggctgaccgtaacctggaccagctgcttagcaatgtgggttcatgtctgggtgctttggttcctgggggca

SEQ ID NO: 7735 - DNA, 201 bp, Homo sapiens
gtgaaactccatctaaaaaaaaaaaaaaaaaaaaaaatcagccaggcctggtagcacgtgcctataatcacagctactcaggaggctgaggcagaagaatygcttgaacccgtgaggcggaggttgcagtgagctgagatcgcacaactgcactccagcctgggggacagagtgagactctgtctcaaaaagaaaaaaaaa

SEQ ID NO: 7736 - DNA, 201 bp, Homo sapiens; identical to SEQ ID NO: 1480

SEQ ID NO: 7737 - DNA, 201 bp, Homo sapiens
gaatattcttgggatacagcaggatgcataatgcactagtttctagtttctcttgactttttttttttttgagacagggtcttgctctgtcacccaggccrgagtgcagtgcactggcgcgatcatggctcactgcagcctcgaactcctgagctcacgcaatcctcctgcctcagcctcccaagtagctggggccacagg

SEQ ID NO: 7738 - DNA, 201 bp, Homo sapiens; identical to SEQ ID NO: 872

SEQ ID NO: 7739 - DNA, 201 bp, Homo sapiens; identical to SEQ ID NO: 873

SEQ ID NO: 7740 - DNA, 201 bp, Homo sapiens
ccccaacagtacctacttcttaaacaaacactgagatccccagaggcgggcccgatcagagaggaaccccgcgtgttcctagaacatggggaacaggcctrtgagagggaccagtcacaaccaagcgcaccactggaggaccagtcctacagagacaggaccactggagagctagaacaggaggatgactcctgtcacagg

SEQ ID NO: 7741 - DNA, 201 bp, Homo sapiens
gtgtggatagggctgtagggcccagtccatggggcatggctgggaccatggttccagggttccagggttccaggactctttcccagggttcagacaggggyttcgttccagggaaggaatgctcctttgagcagctggagcacgttcgggagatgcaggagaagctagcccggctgcacttcagcctggatgtgtgtgggg

SEQ ID NO: 7742 - DNA, 201 bp, Homo sapiens
cgttcgggagatgcaggagaagctagcccggctgcacttcagcctggatgtgtgtggggaggaggaggacgatgaagaggaagaggatggggtcactgagrggctgccagaggagcagaagaagacaatggctgaccgtaacctggaccagctgcttagcaatgtgggttcatgtctgggtgctttggttcctgggggcat

SEQ ID NO: 7743 - DNA, 201 bp, Homo sapiens; identical to SEQ ID NO: 870

SEQ ID NO: 7744 - DNA, 201 bp, Homo sapiens; identical to SEQ ID NO: 1475

SEQ ID NO: 7745 - DNA, 201 bp, Homo sapiens
gtgttctgagtgttggaagtacccaggaagaagccctgagcaggtgccctcaggagcagtgcccatggctccccacatcagccaagaggcccaaccccagraagccactcctgcccggggatggggaaggtgggctgggtggctgtgtgcactgccctgggccagctcacttgagcctgctgagccgcctggccaaacatg

SEQ ID NO: 7746 - DNA, 201 bp, Homo sapiens; identical to SEQ ID NO: 1481

SEQ ID NO: 7747 - DNA, 201 bp, Homo sapiens
ctttaatgagttacttagcttctttaaacctcagttttctcatacgtaaaaaggtgatttaatagttatttcaaactatcactatgaagataaaaggaagyggcgtgtggaaagggcttgacagtatccctagtgcacagcaagagcgtatcaatgaccgctattgtcactctttaattttcaacctagatattttaattc

SEQ ID NO: 7748 - DNA, 201 bp, Homo sapiens
acagtctccctgtggatgaagacggattgccctcatttgatgcgctgacagatggagacgtgaccactgacaatgaggctagtccttcctccatgcctgayggcacccctccaccccaggaggcagaagagccgtctctagtaagaacccttcctactgtttagcaggaattggagttgcctctggctacccgctgcatgg

SEQ ID NO: 7749 - DNA, 201 bp, Homo sapiens
ctgtgtttaaattttattgtttcattctgatgtagcacatcccttcctgcatctctttgccagcctaattccttataacaatccagacttcccctcctacmtcacttctcccaaaccaccaacacctggcaccctaccacagcttaggtgcctctgatgtgggccctgtagaagctttacattctcccaggatttctcaat

SEQ ID NO: 7750 - DNA, 201 bp, Homo sapiens
gggattctctctacagaggctaaagggaaatgactaagctacttgctgagtggctatcattagtgcataattttcaaaagcaatcatagaatgggcaagaygtttaatctctgtcatgaaatgtaacctttagagggaagacaagcaatcacaatgtgacttctccgagtgtcctgcagctttgagcatggcccgggcctc

SEQ ID NO: 7751 - DNA, 201 bp, Homo sapiens
agaggagtctcatcacgattcaaatgtcaataggttttccctattctgtgctagccctggagtggtgagaatagtgtgaggcttttgcttactggctctcrgtgtgtatccagtcaaggagggataattctgtgaaaggaaagtgtggtgcatttacaaatctactgggcagtcaagaaacaaccagtgacagttctgagg

SEQ ID NO: 7752 - DNA, 201 bp, Homo sapiens
atggaatagaaaacaaagaatcaactctagcttcctcaagcagaaaggcagaaggatatgtatggctgatggaattgatgagagggtgttgaactaggctyagtacctaaaagacctggagcctgggaactaaactgcaagaggagtctcatcacgattcaaatgtcaataggttttccctattctgtgctagccctggag

SEQ ID NO: 7753 - DNA, 201 bp, Homo sapiens
gtactcagtagctggtgaatgaaggaatgaatgaatgacatttaacttgtgatcatctaaaccattactaaaccaaattggaaatatttttaggggactgrgaaaattacctgggtaacatgagctgttgagcagcttctgggctgggtctggtgactgtatcaaaatcttcagatacgtcagtaattccacttcagcatg

SEQ ID NO: 7754 - DNA, 201 bp, Homo sapiens
agatactccagaaattaaatcgttgttttatcagatagttttctaaatgtctcataatcctatcaagtttctgtctatccttctgggtaggagatataagscagttgttattgtcttaatattcttggtgagagtataaaggataagggtttatttcaggtacagcaaagaattttctacagaaatccctcctcattatca

SEQ ID NO: 7755 - DNA, 201 bp, Homo sapiens
ttcttcatcctcactgtgtatgtggttgatactcgttgactgattgactaagatttttgctggcatttggttgagaaggaaggcaattaccaagtattgayaatgcatcttaaacctagctttaaagtcttttattgaactcttgggcatgtcttcatactaaattcagtagaatatgcctgttagataagtctcctgaga

SEQ ID NO: 7756 - DNA, 201 bp, Homo sapiens
actgtagaacctgtacccttgtttactttattgtttgtcttctctagatgtcttgtgctttactacatgctgacttgcatgtggaagatactccagaaatyaaatcgttgttttatcagatagttttctaaatgtctcataatcctatcaagtttctgtctatccttctgggtaggagatataaggcagttgttattgtct

SEQ ID NO: 7757 - DNA, 201 bp, Homo sapiens
ttgtacttaaaagcatatattagaattgtgaaactgggcactgtttgtgacattcttcatcctcactgtgtatgtggttgatactcgttgactgattgackaagatttttgctggcatttggttgagaaggaaggcaattaccaagtattgataatgcatcttaaacctagctttaaagtcttttattgaactcttgggca

SEQ ID NO: 7758 - DNA, 201 bp, Homo sapiens
gataaatgtatatttatctatttagtacataaaatctatttagtacgtgcgtgtgtgtgtgtgtcacacacacacacgcacatactaaatagattttatgwaacttcatccctggctttatttgccaaaggcgagtcctccatcttgtggtttctgcatctctttggcatttgtcactatgcacttgttgccttttatatt

SEQ ID NO: 7759 - DNA, 201 bp, Homo sapiens
tttgccttttttttgtttctggaccaaggagtcaaaccatgccccattcatctttttcttatatacaattccttgcacataataggagctcagtaaatatrtaacactgcatggtattctctcacctacattataagcagggataatggcttttatttcttttggttcctgtgttctcctagcaactccctggtttctagt

SEQ ID NO: 7760 - DNA, 201 bp, Homo sapiens
ttttgccttttttttgtttctggaccaaggagtcaaaccatgccccattcatctttttcttatatacaattccttgcacataataggagctcagtaaataygtaacactgcatggtattctctcacctacattataagcagggataatggcttttatttcttttggttcctgtgttctcctagcaactccctggtttctag

SEQ ID NO: 7761 - DNA, 201 bp, Homo sapiens
catttctttaacaagtaatagtcctttggaccattgtaatagaacacataaagtataatgaccctaagttaatgttgttttatgctttattttctgtaccmtgtttctatcttacatgtctctcacttttccccctttaaaagatgttctagggagtgcctgccactaaaaactaacccctttctgtactttcctttaatc

SEQ ID NO: 7762 - DNA, 201 bp, Homo sapiens
gagttcgagaccagtctggccaacctagagaaaccctgtctgcactaaaaatacaaaaattagccaggcgtgatggcacgcgcccataatcccagctactsggaaagctgaggcaggagaatcacttgaacctgggaggcagaggttgcagtgagctgagattgcgccactgcactccagcctgggtgacagagctaaact

SEQ ID NO: 7763 - DNA, 201 bp, Homo sapiens
accattgtaatagaacacataaagtataatgaccctaagttaatgttgttttatgctttattttctgtaccatgtttctatcttacatgtctctcactttyccccctttaaaagatgttctagggagtgcctgccactaaaaactaacccctttctgtactttcctttaatcgaactatgaaattttgtgtatttaaaaat

SEQ ID NO: 7764 - DNA, 201 bp, Homo sapiens
tgaggcaggtggatcacctgaggtcaagagttcgagaccagtctggccaacctagagaaaccctgtctgcactaaaaatacaaaaattagccaggcgtgayggcacgcgcccataatcccagctactgggaaagctgaggcaggagaatcacttgaacctgggaggcagaggttgcagtgagctgagattgcgccactgca

SEQ ID NO: 7765 - DNA, 201 bp, Homo sapiens
gcaaaagacaaagtgcattatagtttttttttagggcagtgatgatgtagctggaagttgaaataattggtgtacaaatacatgtgcaaacacgcacacaygcatatgcctgtctgggtcatgtgtcttgtacatatctatttccctaaaggctgataaaaatgtgctcacgaaaagataaaaactaggctttatatggta

SEQ ID NO: 7766 - DNA, 201 bp, Homo sapiens
tcccagcactttgggaggctgaggcaggtggatcacctgaggtcaagagttcgagaccagtctggccaacctagagaaaccctgtctgcactaaaaatacwaaaattagccaggcgtgatggcacgcgcccataatcccagctactgggaaagctgaggcaggagaatcacttgaacctgggaggcagaggttgcagtgag

SEQ ID NO: 7767 - DNA, 201 bp, Homo sapiens
cttacatattcacaactctttgtgagcctattgctctgtcaattcttgtctgtctgtctctatatagtgtatacaaacaacttcatcaactattattcacsaccttctaagtgcacatgtacatgtgtgcgtgtgtgtgtgtgtgtgtaggaataaatgtgggctgtctcagtttaagccatataactgcatgtgtagatt

SEQ ID NO: 7768 - DNA, 201 bp, Homo sapiens
tagtgactgctttatcctcttaaatcttattataaaattgaggctacagttgtgaaatagctgtcatagttgcaaagaggcagtagaatgtgtctgtgtarttgcaataaagcacacctgttacagaggtatagggaaacagtaaatatcagcatgtcagatgaggacagttacagggcttggactgttaagtctggcatt

SEQ ID NO: 7769 - DNA, 201 bp, Homo sapiens
ctgtatatgtgtgtgtgtgtaataagataacagagtgtactgtctatgtggttaatgaaattaacaaagaatacaaaattggataagaagttatctgcaartatttccagttgtttatttaaaaaaaaaaacctaataaaaaatattgaagcgcttaaaaaacttagactaactgaagagctcttaggcaaacttctgagt

SEQ ID NO: 7770 - DNA, 201 bp, Homo sapiens
catttagaagtctttgggataccgcatgcagtattcactctgcatttctcccttcaggtggcagttagcatctcagagtccctcctctcctccttaatttwgtggatttattgaccctctgtgtgcagttgggtgagttgaatgcactgtctgccacaccatgtataaccagttggaagatccttttgccaactgtgcaca

SEQ ID NO: 7771 - DNA, 201 bp, Homo sapiens
tgtatttcatttaaatataattgtattcagaacagttaaataacctcaatttaatttttgtatgtgggggaatcaaagaagggagttattgaaatctttgrataccagattatgatcctgggcagaaaataaggaatatcatttcagcctatttaatattagaattacatatacagggtcctttcaaaggcatattgaaag

SEQ ID NO: 7772 - DNA, 201 bp, Homo sapiens
tacatcatagtaaacaaaattatccatttattggtaaatattcttaactctttttcttgaactgtttttgaacatcaatgaaataagcctttttgaaaaayggaatacttggaaaaatgcccaatttactgaaagtgtgtatatgtgtctgtgtgtgcatgtgtatttgatgtattttctaaaattattagataatatgga

SEQ ID NO: 7773 - DNA, 201 bp, Homo sapiens
gcattttataatgtgttacgaaatgtaaggtggtatttattgtcttgatttttttattgcacacatatgcttgagatttcttttctttttccccaccgtcyagtgcccataccttattctcagccctgtatttcatatgacaaacaaaaagtaattgggttattttaaggactcctcctttgagtgaggtaggagctagga

SEQ ID NO: 7774 - DNA, 201 bp, Homo sapiens
ggaggtgaggattacaaagaaaataacaacaacaacaacaaaagaagaatgaaaatccatatattcttatattatcaggatggattagactctttagttascattctaactcattttagttaagcctctcctatatactaagtatctcaataataatcaaataggtctcacagacctccccttttagatagttcatgaaga

SEQ ID NO: 7775 - DNA, 201 bp, Homo sapiens
atagtagtgaaccagggagtaaaaaaaatcctgccctcctggagcttatgttctagttggttgttgttaaaattaaatgagacaatgcattgaaaatgtcytgtatagtgcctggaatagagggggtatgcattttgacagaattaagacaaagtctacaaactcctggaagtaatagcttttgcctttccttgaatctat

SEQ ID NO: 7776 - DNA, 201 bp, Homo sapiens
gttctcttactacattccctgggaatattccctggaaagcccacagagttgataatgtatttgaatcatgtactggaatgggctagtattaaaagttattmcaatactattttaatttatatttataaacttatttatttgtattatataaatttatatttacatactttaatttatgtttatatttaatttattctacaa

SEQ ID NO: 7777 - DNA, 201 bp, Homo sapiens
gtctgaatgggttggcatcatctttaagaatcttgtcttggcctaacttgggactgacattttaagcattaaaactcttcactaattaacagaggcaacckaaagaatagtttttgaaatgatgcttgagtgttctcttactacattccctgggaatattccctggaaagcccacagagttgataatgtatttgaatcatg

SEQ ID NO: 7778 - DNA, 201 bp, Homo sapiens
attttcccttcaggagttggttggctagtgagaaagacagacttcggcaactaattataaaataaggggatgcattctgtattaaagtcagaaatgaagtmccatgaagacacacatagaggagtaaaaatgtccgtgaaaagggtgagaagagaggaaatttgataattgttgctagatttttttactcgtgagtcttca

SEQ ID NO: 7779 - DNA, 201 bp, Homo sapiens
atattactggggattattaccaacacttttcttttcatcccatatcacttgggatatggctggtcacatttttttctttattttttttttttttttttttwtttttgagacggagtctcgctctgtcgccccggctggagtgcagaggcacaatcttggctcactgcaagctctgcctcctgggttcatgccattcttctg

SEQ ID NO: 7780 - DNA, 201 bp, Homo sapiens
gttatcagagacttattttaaatagcattatttgttactgtatatatttaagatatagaacattatgttttgatttacaaacacatagtgatgattaccgyagccaagcaaatgaacacatccatcacctcacatagttacttttttttgtagtaagagcacctaaaatctactctcagaatccagtacaatattactaac

SEQ ID NO: 7781 - DNA, 201 bp, Homo sapiens
ctatgcaatattactggggattattaccaacacttttcttttcatcccatatcacttgggatatggctggtcacatttttttctttatttttttttttttwttttttttttttgagacggagtctcgctctgtcgccccggctggagtgcagaggcacaatcttggctcactgcaagctctgcctcctgggttcatgccat

SEQ ID NO: 7782 - DNA, 201 bp, Homo sapiens
taaagcactatgcaatattactggggattattaccaacacttttcttttcatcccatatcacttgggatatggctggtcacatttttttctttattttttwtttttttttttttttttttgagacggagtctcgctctgtcgccccggctggagtgcagaggcacaatcttggctcactgcaagctctgcctcctgggttc

SEQ ID NO: 7783 - DNA, 201 bp, Homo sapiens
aagacaaaaaggcattgcaatctgtattacccgcttaaactgctaacttcaacaccttgagatagtacttcagtttctctaaagcactatgcaatattacwggggattattaccaacacttttcttttcatcccatatcacttgggatatggctggtcacatttttttctttattttttttttttttttttttttttttga

SEQ ID NO: 7784 - DNA, 201 bp, Homo sapiens
tggacattttattcaaacttagttgagatagagaatcatctaaagagatgcagaaaaaaattattgaaccaaatttgcaccttactaaaaagataaaggaygaatgaaatgtgcttgccggtagctacggagaaactcagagaccagtttccacagtggctgatatttctgcaccagaggcatggtagaaactgatgcaag

SEQ ID NO: 7785 - DNA, 201 bp, Homo sapiens
tgccatgaaaattctatgtcagggctgtaggggtggagacagtggaaatctgaggagagcagcctctctgtaaagtgatcagctcctcctcaaatcccagyttctctagatcttcagatttattttttaaaagcagaaatttcagatacaatttgcggttcaataactgttgttaagtaatctaataatgtttaaaaacct

SEQ ID NO: 7786 - DNA, 201 bp, Homo sapiens
gtgatgtaaaacaatttcagtaagggccatttttttttcttcttcttaacctctcaggttccttttaactttttttttttttttttttttttttttgagakggagtctcgctctgtcgcccaggctggagtgcaatggcaagatctcagctcactgcaacctccccctcctgggttcacgccattctcctgcctcagcctc

SEQ ID NO: 7787 - DNA, 201 bp, Homo sapiens
caggagttctgacccacagggctctgtctcttggtatcaacccctgctaataaatagcaactcacaggatgcaggttacgtgaccatctttcactggcacwaactttcctgctggtggcttttgttaatggaaggtgtggctaggagagatgaaattggctgctttttttttttttttttatggacgttgattcggttctt

SEQ ID NO: 7788 - DNA, 201 bp, Homo sapiens
aaaactactaactcccacctccaaagatactgacttaattgctcaagggtgtagggaaggggcaagcatatttttttaaatgcatatgtgattaaatttaragccaacattgagagtcactactttacaagcatctattactctgtaagagtcagaagaaaacctttatcccagtatgaaaccttttctaagaaaaaatat

SEQ ID NO: 7789 - DNA, 201 bp, Homo sapiens
cttatcttgggaacatctggtttatcaccctatttcttccctgccattatgctgaccactggaaaaatatggctcaggagttctgacccacagggctctgyctcttggtatcaacccctgctaataaatagcaactcacaggatgcaggttacgtgaccatctttcactggcactaactttcctgctggtggcttttgtta

SEQ ID NO: 7790 - DNA, 201 bp, Homo sapiens
agacttctcggcttgataacatctggcttatcttgggaacatctggtttatcaccctatttcttccctgccattatgctgaccactggaaaaatatggctmaggagttctgacccacagggctctgtctcttggtatcaacccctgctaataaatagcaactcacaggatgcaggttacgtgaccatctttcactggcact

SEQ ID NO: 7791 - DNA, 201 bp, Homo sapiens
ttactgggatgggagttgccaatgtaagtgctttgacagatgacatgttgagttcagaaccttatttattttctttcatccctgtttattaatctttctasttgagatttcctgtcccagaaataagtatttagctgcttgacaggacaatcacactgataaatggattcagtggctcagacgttggcactggagaagtct

SEQ ID NO: 7792 - DNA, 201 bp, Homo sapiens
aaatacatatttatggaaggttaaagggttatgagcaagtcatgccaaagagggcagttaaagagagggacaggaagaagttgtccacaaatcagtatgcyactttagcattccaaaacatggttggttcctaagtttcacaacaggaacttaagccatatgtagacagcctacattttcttgattatttttacttttgtg

SEQ ID NO: 7793 - DNA, 201 bp, Homo sapiens
atttcatgtaaggggatgaaatgctttgacaatctaaaataatcttggtgataagcagcccagccatggtagagatattttaaacctctcaatatgtagamattattttaaaactctaaacaaaaatagttattttgaattcacgtagagcacagtttagatatacataaataatgaacaaaatatagtgatggtatgcta

SEQ ID NO: 7794 - DNA, 201 bp, Homo sapiens
taaaccattactaaaccaaattggaaatatttttaggggactgggaaaattacctgggtaacatgagctgttgagcagcttctgggctgggtctggtgacwgtatcaaaatcttcagatacgtcagtaattccacttcagcatgttcattctttgtttcgaataatacaggtttttgtgcattgatgtttaagataaagtg

SEQ ID NO: 7795 - DNA, 201 bp, Homo sapiens
gaagtcatggagtgcttgataaggaggggtgtcttcaagaacattgtttatttggcaaataaactggaggaaagatttaagggatccccttttgccccacrtagtaaagatttttctcttgctttgagtttgataattcgccaggcttcttcttgccaataataataatactacagtagctttgggcttgcccagcactgg

SEQ ID NO: 7796 - DNA, 201 bp, Homo sapiens
gaagaaaggttatcttagagcttgcaaccaggggcctggtgaggaagctgttgaggttttcaggcttgaggtcatagagcttgaattagggggtgatggtracaatgaaaggaaggaatgcatatggcagacttcccgaaggaaggatcaataaagattgttgtcatattaagtgataggttggatgttgtggtgaaaaaa

SEQ ID NO: 7797 - DNA, 201 bp, Homo sapiens
ttgctgctactcctgaaggtatactaccccacacataccatacttgattgttaaaccaaacattatttttcagcatctgctgtgtacctagaattttgccrgaaaccatgataattacagaccaagtatatgggcttgggattcccttcctttggggatgcccagctgtataaggaggcaagacttacccgggtgacacaa

SEQ ID NO: 7798 - DNA, 201 bp, Homo sapiens
cagaagcagggataaaataaggtgtgcagttgggagttatcagaaattaaatctgtcttcctttgagtgccattggaaatgagtcttaaggaatgagaacygaaaggaaactttccatagacaccatttccataaacggtattgtcacaatatgctattttaaagactggttgttttggtctgtgtttacattaagccttt

SEQ ID NO: 7799 - DNA, 201 bp, Homo sapiens
gctgccctgccatctctgcaccctccatgaaaccaagcagtggaaaggagagtatccatgcaaattaagtgcagaagcagggataaaataaggtgtgcagytgggagttatcagaaattaaatctgtcttcctttgagtgccattggaaatgagtcttaaggaatgagaactgaaaggaaactttccatagacaccatttc

SEQ ID NO: 7800 - DNA, 201 bp, Homo sapiens
gactttgataataaagaagaaaatgctccatgaaataccgaacttcattttataatctgttagattacatcttcccttaaaaatacagctattgaaatttycttgaataaagagaccactggattctttttccttatcaatagtaaagctttttggctacagggacgttggtcaagacaaatatagctcagtagagttatc

SEQ ID NO: 7801 - DNA, 201 bp, Homo sapiens
aagccaaccaagggaagagagcaagaccgtcagtggagagttctttaaccagtgtgcaagtctgacctgaccagagtgctgtgcccttggtggggcttctrtggatgagaactgtttggtaccattttaggtctgttgacctttctatttgagaatggtatttcagtccagctggaaggactgacacgctttttgcctgtt

SEQ ID NO: 7802 - DNA, 201 bp, Homo sapiens
cagccacagactggtcaacagatcagttcatgccctactgaccacagagctgtagacacttccatttgcagaggcttgtacttaaaagcatatattagaawtgtgaaactgggcactgtttgtgacattcttcatcctcactgtgtatgtggttgatactcgttgactgattgactaagatttttgctggcatttggttga

SEQ ID NO: 7803 - DNA, 201 bp, Homo sapiens
aattgtatgttgtcaacctgtcacataaatagagtcatattctggcttgcgataatgttgaactaacattttttcccccagaattgttgagaggttcacaraaaagtgaggaggtagcatttcctttgggtagataaccagtcaaggctattgtaaagttgatattactgttgatgggttccttttctcccctccctccaa

SEQ ID NO: 7804 - DNA, 201 bp, Homo sapiens
gagtaggcatttttagaagcatcgagcatagtaggtccttgcttgtcccaagagagcgttcagttagctaagtaatcctcatatatttgacaaatgctttytgaatgccaattatgttccagtttaccatctatttggaagtaaagataagtattttaaaatataactaacattaaaagtcttgagtggtaaaagccagat

SEQ ID NO: 7805 - DNA, 201 bp, Homo sapiens
gctattgtgagttttcttttccaggtactaggtgattccaaccgtacacacacatacgtgtgcaaacacatacacacacacacaccatcttgcaagttacrtacaaaagccgtatagaaaaaaaattatgatttttgtccttcatcttaaggaacttgcttttgcctttaaggatgaagtccagaaagtcatgaagagtca

SEQ ID NO: 7806 - DNA, 201 bp, Homo sapiens
aagaaagggaggaggtagggaagaggaggaaaaaacttgaccaaaagcagttgctgtgacagcttatgatttgatggtttgtggtcttgtcctgttctcargcacctgatcaagaaagtggtacaatcctgctatgcagacattctggaaatcttgccaacattcacctgacatgaccaaggtttaaagtccttgctgtaa

SEQ ID NO: 7807 - DNA, 201 bp, Homo sapiens
tcttctctatccaaactctcttgactgattctggcacctttcacctgagaatgcacagctcaagattctctatacggacccagagccttggtcgggccacracccttcattaatattcaaactttggcagtttcaaagaatgctgccctcctcgaccactgtgagcagtccagctcccctgctactttctctcatgcttat

SEQ ID NO: 7808 - DNA, 201 bp, Homo sapiens
ataaacttgggttaagtggcagttgcaaatgccctttttgcttttctcctctggcgcagatcctgctattactatgagtcaagccactacagacaccgcaygcaccgaaattctcccttgtatgtgagatcacgttcaagatcgccctacagccgtcggcccaggtaatgaggcatgtcattttcctttagctccctttat

SEQ ID NO: 7809 - DNA, 201 bp, Homo sapiens
ttagttctactttcccaggcttctcagccgggtcttagaaagttcatgtgaggacttggccagttagaactggtaaattgaacattcctcactcagtacayttgtcaagttacaggcccattctaagtcatgctgcattaaataaacaatgctttaaaaaatgtccatctccatagacctcttatctaaaaatcacctatt

SEQ ID NO: 7810 - DNA, 201 bp, Homo sapiens
ttttcacttttgagaaattcttagatgtgttcaaccttcctcatctttcttccaatggcctgaagacaaaaaggcattgcaatctgtattacccgcttaarctgctaacttcaacaccttgagatagtacttcagtttctctaaagcactatgcaatattactggggattattaccaacacttttcttttcatcccatatc

SEQ ID NO: 7811 - DNA, 201 bp, Homo sapiens
tagggatatgacctaatattaagcaaataaacaaaaaagaaacaaaagaattacaagaacatcctggagaactaattctatatttcaaatattttggactsatgtttcttaattctcaaataaagatgttgaggacttctaagtccacaaacaattatctttttaggtctccctattgagggatactaacttgaacttctt

SEQ ID NO: 7812 - DNA, 201 bp, Homo sapiens
tgctaccagttatacttcatttttattcttgacacagacacctaaatcagagaacagtaacatttcagagattatggaagcagtttgggtatgctccagcmctataataggatcagaattttaaggccttttgtattattaccaatagtcacttagtttctactgcagtgtactttgtagggaattacagcttttactaaa

SEQ ID NO: 7813 - DNA, 201 bp, Homo sapiens
acttacagagaacatagacttcaagtaagaaaataatagccatttaagtggagagataattggctgtaacataagaacattgaagaatgttgaaactcatrgagacttatggagtattttaaaaatttatgttgtacttatctttgcatttgtagtctaccacaaaattccaaattctgggtataaatcagttagatgttc

SEQ ID NO: 7814 - DNA, 201 bp, Homo sapiens
tgtttgtaaaagggaaaatgtgctggtgaactgtattcagcaaacttaaaatgtcaaagctcttggccacctttttatgcccagtaatgataaactgtcarcttccttacattatttgggaatttactagcaacttgttgcagctctcacagcacacaaatctcttataatatgtatggtctgaaagaagcagcagtctgc

SEQ ID NO: 7815 - DNA, 201 bp, Homo sapiens
agagccaatgacctttgtcctgaattttaataatttactgaagttttacattaaatcagaatataattgggaagaaaattagtgtttctttgtggggagtrcagagtaatgccactaattgcttgtataaaagcattcccgaggttgtattttcctgttctttcattagaaaattaaaactacagtaattttctgctgttt

SEQ ID NO: 7816 - DNA, 201 bp, Homo sapiens
acttcctggctaccacgttaatgggagacccttgaggatttctccacagctaggtttttggatagaacttttaagctttaattttgtggaatgataaaaarataatccctacattcatagaatacaaagagctctttagatttcaataatgcattgaggaggcccccctattttcttctcattgtttgtttcagttctacc

SEQ ID NO: 7817 - DNA, 201 bp, Homo sapiens
aatatcacaatggaagaatcacatgataataattaataaacattgactcttcttggccaggtgaccaatattatttcacagttgatcgttgagggcagagycaatgacctttgtcctgaattttaataatttactgaagttttacattaaatcagaatataattgggaagaaaattagtgtttctttgtggggagtgcaga

SEQ ID NO: 7818 - DNA, 201 bp, Homo sapiens
gacatgaccaaggtttaaagtccttgctgtaattttacaaagcgtagtgagagtgtgtgcctgtgtatgtgcatatacactctctcatatccttttttttyttttagggggaaaaaagtgatctttgccatagaagggtggtaaaataattagtccaatagacaaatgtcttggcccatgtttaaacagagctttaaggac

SEQ ID NO: 7819 - DNA, 201 bp, Homo sapiens
ctgttaggaactctatagtcaagcttctctttaacaatactaattgatgaaaaaaagtggctatagtattatagttaccacaaaatgccctccagcaagtyatttaaggaaattcacaggtactttcctttgatggacgttggtgttgctgaaaatcaagtcctgtcttcattcgtatcatcattgctttctcacttcatt

SEQ ID NO: 7820 - DNA, 201 bp, Homo sapiens
ttgctgctgatctttagtcccctttaagacgggctgttaatctttagcacaaggctgactctgcaatacagcacacaccaggttgcctaacttcttgtttrtgtgctcccagggatcagaaaccagtttgctgtttccccctaaaaccacaagccttggggtcattgtctctatctgtcctttgttctccatgtacagtct

SEQ ID NO: 7821 - DNA, 201 bp, Homo sapiens
atgattgagactgtaattgttctcgttgctcttaccttaaaaaacttgctgaaaaaaactcagtaaagaccaaaggtgatcagaatgaaaggaaaacatawataaagacatttctttgtctttaaatctaggtatgtaaaggtagattgaaactttggaaatgggatggtcaggccggagctagagagcttggtttgcaat

SEQ ID NO: 7822 - DNA, 201 bp, Homo sapiens
gggggaatcttccctcttgatctacaatgcaagtggaattctgatttcagactaatctctagcaatgagctagacattttttttttgtctctacaaaaaarattttgatttgaacagcagttgtttgtgaggccttagcaatacaagaaaaccattcattagcctatgaagagaagcgttgaagccagtgtaatttaagaa

SEQ ID NO: 7823 - DNA, 201 bp, Homo sapiens
taacacctgctttaatgcctccatgatacaactgaatgggcatctttcattcattcgtctgttacttctgaatgaagctacttggggttcgttagaatgayggcaagtgagaatgcagtcgtctctaggtcattacttgtaatacgttctgaggactgcctttgctgatggggggagaaggactctcacagctgtagccag

SEQ ID NO: 7824 - DNA, 201 bp, Homo sapiens
agaaataatatccaatcagtacaacaatgagccttcaaacatatttgaggtaaggacatcctttggaaacattaatttttcattgagtttggcttgggccmgactaacatggtaatagacctgaatgcataatgagttcttactttgctatcatcaaaagacttttcatcacagttacatactttctaatttatggaaaaa

SEQ ID NO: 7825 - DNA, 201 bp, Homo sapiens
aaagtctgagaacacaccaacttcttgcttccgtcccatcagcgtcactctgtggaaagagaattcagcacttattacagagcgggggaagaaacctttcyttggacacaggttaaacatattctattcagctgataggcagtctaattcacaagcaccaaaagactcctgaaatgttagccaggtggtgaggaattgcaa

SEQ ID NO: 7826 - DNA, 201 bp, Homo sapiens
agggagaattagctttgaataataaaaattgccaaatattggtgtaaaatatttcactttagagaaaacattcattctttccatttcttaattataaagtrggagagtgaggcagcatcttcctgttcatatcaaaatctcatgtggctttctgtgacctacttggctctcgatatatgtgtgttgtgtatgtctgtgttt

SEQ ID NO: 7827 - DNA, 201 bp, Homo sapiens
ttggtcaggtacatgatgttctttcaatgtttgaaacaaccttaaagtaatgagtaagaagcaaattacatttaagatatcttggggtcagtgttgggttrttcattaatcaaagcaatcatatatttagggaaccagaaaaacagagactccaaaaggcaatgaaaaaaaaaaccttcagaaatttaataattgttattt

SEQ ID NO: 7828 - DNA, 201 bp, Homo sapiens
acttggagtgccccgtgtttcacagtttaatgaaggtgatatacagtaaggttactaagattgatagagacaattcacatgacatacaccccactaagacygtcattctttactgcccctctctccaccccctttcccctgtcttaactaatttttttaagaacccagtttcttttttcattaatataattaatgtggcca

SEQ ID NO: 7829 - DNA, 201 bp, Homo sapiens
gctacttggagtgccccgtgtttcacagtttaatgaaggtgatatacagtaaggttactaagattgatagagacaattcacatgacatacaccccactaasactgtcattctttactgcccctctctccaccccctttcccctgtcttaactaatttttttaagaacccagtttcttttttcattaatataattaatgtgg

SEQ ID NO: 7830 - DNA, 201 bp, Homo sapiens
ctacttgtccagccatggatagagtcgccagtcggctgagattggccagtcacttctctgttgcactataggcagctagctgctagaagctttgcctacayggcagcggctctgggaatcacctccgcctgtataaaatattacgagcagcaggtagcgttggcagttttcattttttgaatcattaatgtttgctgtcat

SEQ ID NO: 7831 - DNA, 201 bp, Homo sapiens
tctctggagtctagtggggggacggaggacctcggcgtgtttgcattcagcacaatggaatgctctcggaaggaaagtttgggcaacttgggaaacaagcraaactttctgtggactctggtgagatggactcgaattgaattgcatggaggatcccagctgctaacaatgaatctggcaaaagactgcgagtgtttcctc

SEQ ID NO: 7832 - DNA, 201 bp, Homo sapiens
agcaaggtttggacagaggtttcccgtggtttcttatttgccttgtatgccaactcattccatgagattatatagacaaaagaggcaattgtgcagctagsctgtagaattgtgaagaaaggaatgaacctcacatattggttctatatgtgagggtagttctgtgtcacatagacagccgctggcctttgattaaaatcc

SEQ ID NO: 7833 - DNA, 201 bp, Homo sapiens
atttgaacttcaggcacgaagcaaggtttggacagaggtttcccgtggtttcttatttgccttgtatgccaactcattccatgagattatatagacaaaakaggcaattgtgcagctagcctgtagaattgtgaagaaaggaatgaacctcacatattggttctatatgtgagggtagttctgtgtcacatagacagccgc

SEQ ID NO: 7834 - DNA, 201 bp, Homo sapiens
aatcccagcactttgggctgaggcgggcagatcacttgaggtcaggagttcgagaccggcctggccaacatggtgaaaccccaactctactaaaaacatawgaaaattagctaggcgtggtggtgtgcacctgtaatcccagctacttgggaggttgaggcaggagaatcacttgaacctgggaggtggaggttgccgtga

SEQ ID NO: 7835 - DNA, 201 bp, Homo sapiens
ggatttatttcatattgtcctcaaaacattgactcactttcattcttgttgatactaatggcaaaataattattaaaaccaaaattgggctgacaaaaaaataacatttgatatagctttttttaaaaaaagattgtctcaattcaaaagtcctccaaaccaaatctgtctaaactgtatacaatatgatattgaattgaa

SEQ ID NO: 7836 - DNA, 201 bp, Homo sapiens; identical to SEQ ID NO: 734

SEQ ID NO: 7837 - DNA, 201 bp, Homo sapiens
aggatttatttcatattgtcctcaaaacattgactcactttcattcttgttgatactaatggcaaaataattattaaaaccaaaattgggctgacaaaaaaataacatttgatatagctttttttaaaaaaagattgtctcaattcaaaagtcctccaaaccaaatctgtctaaactgtatacaatatgatattgaattga

SEQ ID NO: 7838 - DNA, 201 bp, Homo sapiens
gtaggttataaattactgatgactttcagactatgatgatattgactccacttgtgaaaattaggccacacccctctagtctgttcctaaaataagactakatttattggcaaagtgaaatttatagcctcttttatttagctcttattcttcggagactcatggcttaaaatggcctacattttaagactgtatttctta

SEQ ID NO: 7839 - DNA, 201 bp, Homo sapiens
tgaatgacagaggtgattcatggaaaggaatgtggaggaaattaagctctccataggctaacctgacttggagagccttcagggaaaacaaacaaacaaamaaaatgcacagattttgaagcgtaggggtggaatggagagaagatgttgatggagcagaagcaagaaagcaggaaaccaaagggatgctcagatgacaat

SEQ ID NO: 7840 - DNA, 201 bp, Homo sapiens
aaaatcacctatttcatatcaggtgaatgccatgcattttgtagaggctagagaataacttagcggtaggggagatggcataggagtcaatgcctctctgrtgggctactttaaaaaaaatacaactttctccataacttttatgtccctatattttgtgttgtggtatttgtgagaggtactttgcatttataccttcag

SEQ ID NO: 7841 - DNA, 201 bp, Homo sapiens; identical to SEQ ID NO: 756

SEQ ID NO: 7842 - DNA, 201 bp, Homo sapiens; identical to SEQ ID NO: 757

SEQ ID NO: 7843 - DNA, 201 bp, Homo sapiens
tgtattcagcaaacttaaaatgttaaagctcttggtcacctttttatgcccagtaatgataaactgtcaatttgcttacgttatttgggaatttactagcmacttgctgcagatatcacagtagacacatctcttataatatgtatgatctgaaagaagcagcagtctggtagttttttgtttgttttattaaaataaaaa

SEQ ID NO: 7844 - DNA, 201 bp, Homo sapiens; identical to SEQ ID NO: 739

SEQ ID NO: 7845 - DNA, 201 bp, Homo sapiens; identical to SEQ ID NO: 741

SEQ ID NO: 7846 - DNA, 201 bp, Homo sapiens
gctccaatatcctttcattagcgggagagaaattggtggagtagatgttattgcctcagaaattaaatgtaaccacattctatctcatgcaacaaaaaatatttttggttgttttctgagtaacagtgtgcctgtataagtgggtatatatgtgaacactatatttcacagtgaagaaactcttgagaactactatttcac

SEQ ID NO: 7847 - DNA, 201 bp, Homo sapiens
tttccactgtgtccagtaccttgagtttgttatgtattcaatatgtagtgtcatcataaaacagttgcacctacctgcattagccctcattgtctcaaggkacaagctgaaaaataatagaaagtaaagctcaggaattgaatatttctgctaatagtgtgttggtatttttccctcagttcacagacattcttgatttca

SEQ ID NO: 7848 - DNA, 201 bp, Homo sapiens
ccttgttgtctgaaaccagatatttgggaattttggagacagagttgacgaaggggtgaaaggagggctgtgggtagagagtaagagaaatagtcaaagcwgagagagaattaaatagagaaatggcccggggaaccagaaaaaaaccaaggttggtgagcaatgaaccatttaagttctcctgagaaaagaaaaaaaaaa

SEQ ID NO: 7849 - DNA, 201 bp, Homo sapiens
cggtggcagggaagccaatggttaaatcttcctgtaccacggagagctgcctgaagctgagagagaatagagtttatgcaggactgtgtgtggagctgctygctgctagtgtaaaaatagacagcaatacatcaattccacagtctctgctggctacaattcatacaggggggaaaataacgcaagcagtttcctcgtaat

SEQ ID NO: 7850 - DNA, 201 bp, Homo sapiens
ttaaaatatgtgttagggcaaataaccatgtttttctgtttaaggagatggacaatgaagaacagtgtaaattaacctcagtagaataatgctttacaaaytatatttaggtaactgggggattgttttcaggtaaattattatcaagtaaaagaattgagctgattctaaaagtatattgggtttaacattttatgaaaa

SEQ ID NO: 7851 - DNA, 201 bp, Homo sapiens
aaaggtatcagtgaatatcacaatggaagaatcacatgataataattaataaacattgactcttcttggccaggtgaccaatattatttcacagttgatcsttgagggcagagccaatgacctttgtcctgaattttaataatttactgaagttttacattaaatcagaatataattgggaagaaaattagtgtttctttg

SEQ ID NO: 7852 - DNA, 201 bp, Homo sapiens
attttctgctgtgtgtaagagagaaaatgtgcttatgaactgtattcagcaaacttaaaatgttaaagctcttggtcacctttttatgcccagtaatgatraactgtcaatttgcttacgttatttgggaatttactagcaacttgctgcagatatcacagtagacacatctcttataatatgtatgatctgaaagaagca

SEQ ID NO: 7853 - DNA, 201 bp, Homo sapiens
tgttctttcttgatttagaaaactaaaactacagtaattttctgctgtgtgtaagagagaaaatgtgcttatgaactgtattcagcaaacttaaaatgttraagctcttggtcacctttttatgcccagtaatgataaactgtcaatttgcttacgttatttgggaatttactagcaacttgctgcagatatcacagtaga

SEQ ID NO: 7854 - DNA, 201 bp, Homo sapiens
catacgtggtctgctgtatatgtcttgctttccacctttctttcttgagaagtttctgcatacatatattcttatgtagttattgtataaatagtgtatakggaaacattcccgaggttgtattttcctgttctttcttgatttagaaaactaaaactacagtaattttctgctgtgtgtaagagagaaaatgtgcttatg

SEQ ID NO: 7855 - DNA, 201 bp, Homo sapiens
tacattaaatcagaatataattgggaagaaaattagtgtttctttgtggggagtgcagagtaatgccactaattgcttgtataaaagcattcccgaggttktattttcctgttctttcattagaaaattaaaactacagtaattttctgctgtttgtaaaagggaaaatgtgctggtgaactgtattcagcaaacttaaaa

SEQ ID NO: 7856 - DNA, 201 bp, Homo sapiens
atctatgtatctgtgtatctatctatcttctatcatctatctatctatcatctatttatccatctgtttatctgtctatccacctacctacatatattgcrttttgtggaaagtatattgctgtaagaccaatgtctatgagggttgaggccagagatcctcatacttaatgggcaggaatgacctagtgctgtgattcca

SEQ ID NO: 7857 - DNA, 201 bp, Homo sapiens
accgtctgactgaaaccaaaatctgcttgtattgcattcatcattctatattgatggaacttctccaacgtactagaaactccacatctagttggcagtayagtaagaaaaaattaaaaaatatattttgtaatagcttcggtaggacactctcaccagaatccttattgtgagtatctatatatctatgtatctgtgtat

SEQ ID NO: 7858 - DNA, 201 bp, Homo sapiens; identical to SEQ ID NO: 753

SEQ ID NO: 7859 - DNA, 201 bp, Homo sapiens
gtgctccaatatcctttcattagcgggagagaaattggtggagtagatgttattgcctcagaaattaaatgtaaccacattctatctcatgcaacaaaaawtatttttggttgttttctgagtaacagtgtgcctgtataagtgggtatatatgtgaacactatatttcacagtgaagaaactcttgagaactactatttc

SEQ ID NO: 7860 - DNA, 201 bp, Homo sapiens
tgctttttttttatctcgctgggaattgcaagtggtaattgaaggtagcatgtagaagaaatcagtatgcatgaataaggcagtgcaattcgtaaataaarcaagtgaaaatggagagaaaagataagattgaccaaataggaatttattaggttgagtaaaagacatacttatctatgagagaggaaacaagagttgagt

SEQ ID NO: 7861 - DNA, 201 bp, Homo sapiens
ttcacaataaaggcgctgtagggtcttgttagttacatgttgctgagtaggaacattgaaatgtaggagaaataaaataaaaagctgcataaatgtcattkaggaattttaaatgtaattttctttccttgttctgcaaacagttattcacagctcatagatctagtacacttagactgaacacttcattgaaaaatccca

SEQ ID NO: 7862 - DNA, 201 bp, Homo sapiens
tgctccaatatcctttcattagcgggagagaaattggtggagtagatgttattgcctcagaaattaaatgtaaccacattctatctcatgcaacaaaaaatatttttggttgttttctgagtaacagtgtgcctgtataagtgggtatatatgtgaacactatatttcacagtgaagaaactcttgagaactactatttca

SEQ ID NO: 7863 - DNA, 201 bp, Homo sapiens
acccagttggggagcttttgagccaggatgagccaggagaaggaatttcacaagacaatgtcatcagttaaggcaggaacaggccattttcacttctttcrttgtggaatgtcatcagttaaggcaggaaccggccatctggatgtgtacgtgcaggtcacagaggatatgatggcttagcttgggctcagaggcctgaca

SEQ ID NO: 7864 - DNA, 201 bp, Homo sapiens
agggagatggggtggggccgttgtataagatttgggtaggtaaaggaaaaaggggggttgttctctggtgggcaggagtgggggtcacaaggtacccagtkggggagcttttgagccaggatgagccaggagaaggaatttcacaagacaatgtcatcagttaaggcaggaacaggccattttcacttctttcgttgtgga

SEQ ID NO: 7865 - DNA, 201 bp, Homo sapiens
tcagagaagggagatggggtggggccgttgtataagatttgggtaggtaaaggaaaaaggggggttgttctctggtgggcaggagtgggggtcacaaggtrcccagttggggagcttttgagccaggatgagccaggagaaggaatttcacaagacaatgtcatcagttaaggcaggaacaggccattttcacttctttcg

SEQ ID NO: 7866 - DNA, 201 bp, Homo sapiens
cattgctaagctcgctctgtattttctgaaaagtatgtttgatgtgcattgtagtaggatggatttttccaattccctcaagctgtacgatggcacaaagrtagtttttttctgagctccatcattgtatagtctgaagaggccaggctttggaatcccgcagacctgggattgaaatctgacttaccactgccgttgggc

SEQ ID NO: 7867 - DNA, 201 bp, Homo sapiens
tttgtgtgtgcgtgtgttatgcagatgtgtgtggctatcatgtgtctttgtgtgtgtatgtatgcaggtattgtatgtgtctacatgtgtttatgattcaygtgtgtgtgtgtgtgtgtgtgtttgtaacctgattttgccttccaggcctaccctgaatcctttcacgaaccatagcattgccatcattgttttatggaa

SEQ ID NO: 7868 - DNA, 201 bp, Homo sapiens
acaagaacattgggaaagaaccaaatggggagagggcaaggctggagggtcgggcttcggtaatgttggtgtagtgtgaggttcctcaggcacaaccaacytgagatgtcaagtagacagttgattatttgcacctgaggctcagatgaacttactttcctaataaaaaatagaggcgagcatgttacatgtggtagaata

SEQ ID NO: 7869 - DNA, 201 bp, Homo sapiens
gtgataaaacaccaaatctaactttccttctcctttgtattggagagtctcagagaagaaggaccactcttaggcatctttgatgtaatgaagggaatgggataagtgttcaagatgattaattgattagtaactgattgattttatagcagatattcattgatagtctgttatgttttgatgctttgtttaaaatacagt

SEQ ID NO: 7870 - DNA, 201 bp, Homo sapiens
gcataaacagaatggaatgtggtgttatgattcccttgctcaagtgtgtatcgatggtctgggatgtgcctcttcatccatttctactttctgactgccargatgtgctcggtgctctgaagtggcacaatcacagccttcaattgagacatacaatctacatggaagggcgtcaggcagcctgcactggttactctgctt

SEQ ID NO: 7871 - DNA, 201 bp, Homo sapiens
atgttatgtattgaagttctgtagcactttaaaattttaaatagtgccaaatttgacaatatgtaatatgccttgttcagttccacttaaaaaaattgctrgataatcctattgaacatttattgtctaaataatcaataactgtctgcattatagataaattaacctggaataattaaggtaaatgaaaatgtggattca

SEQ ID NO: 7872 - DNA, 201 bp, Homo sapiens
ctttccagctgccctccaaaccttgcccagccttatttttctccatcataaaatgggtacacaggtcatttttattggatagtttggaggactaaattgaytgagatgtggtatatgaagtgctgatcttaatgtctagcccatacgtggtctgctgtatatgtcttgctttccacctttctttcttgagaagtttctgca

SEQ ID NO: 7873 - DNA, 201 bp, Homo sapiens
gcaaatataaagtaagagtttatctgtcaccacaaaactgagcttagacctcaaagctaattgcttcttaagatgagaatttatttcccttctacctctcygacatgtttgggatatatgtatatacatatcagtttagctagagcaaaattcaaatatcaaagcactggaaaaacccataacagaaacacaagtcaaata

SEQ ID NO: 7874 - DNA, 201 bp, Homo sapiens
tttagtcattttacttagctgtttacatgaattttcttcattaatcctcctaaacaaactgtaaggtaggtatacaactcttcccattttattgaggaggraatggagggttaaggtagctggaaaactgcccagatttgggcaaagtccagttggtcctaaaacttatttttgaaagtctcgtcctatatataatgcctc

SEQ ID NO: 7875 - DNA, 201 bp, Homo sapiens
gcgtcattctcctccacttatctgtttacatgggaaaagcatcctggtactgattcaatgagctgccttttccagggtcaacagtctgaattgcagttccractatccaacaggaaaacaattgaacagaaagcaaagattggagttcaccatccactgtttggcttcagtatttggagggtgggaagtacctatctgttg

SEQ ID NO: 7876 - DNA, 201 bp, Homo sapiens; identical to SEQ ID NO: 748

SEQ ID NO: 7877 - DNA, 201 bp, Homo sapiens; identical to SEQ ID NO: 749

SEQ ID NO: 7878 - DNA, 201 bp, Homo sapiens
aaaccattcattagcctatgaagagaagcgttgaagccagtgtaatttaagaattgactatttaagatgctattgaggaaagattggccagttttgtctcygttttttatgattgagactgtaattgttctcgttgctcttaccttaaaaaacttgctgaaaaaaactcagtaaagaccaaaggtgatcagaatgaaagga

SEQ ID NO: 7879 - DNA, 201 bp, Homo sapiens
aagtctgtacctcagttctctgcttctagtctttgcttcaacctagcttaaatctctgcaaccttaaattcattttatcattgtttgtccttagtatacayacaaactagttggtgagcacattctttatattaactccttatgttcttaaaactttgagagacatcataacttttggccttatcttcttggaacaagagg

SEQ ID NO: 7880 - DNA, 201 bp, Homo sapiens
caaagtgctcagagttattcttttttggagaaaatgaaatagctttctatgcaagcctctttaaagagatattttgtgtgggtgagtatatgttatattgkgactctaagttcaatatttagaaatattcagttttatggaaagatgaataattatagagatctgctatacaacatagtacctatagttaattatgctatt

SEQ ID NO: 7881 - DNA, 201 bp, Homo sapiens
tcaaaatcaagcattggccaacagttaccagctggaggaaaaaggttaaatgagagatttgttcaacacaggcacttaaggagaaataagtgagaagtaaytgaacacttaggtcaaagttttggagggtttgctgccatttaactttgaatctacctaagactgactcaaaggcattttgcaaattacaacaatttgcct

SEQ ID NO: 7882 - DNA, 201 bp, Homo sapiens
aaaaaaaaaaagatgccattggtgaatagcacatcacaagaaacagagccagggactcaccatttatcagagtcattcaattaaacaaacaaacccaaaaraaaactcctccaagaaaatcgtttcatagcgataatgaaaaacaaaacaaaacttgtctttgccttttttttttaaataaaagggctgtttaaaaagatg

SEQ ID NO: 7883 - DNA, 201 bp, Homo sapiens
aacataaagaggagattgagggagatttgttttttctctagagatattctgggcttgaaatgcagtgcaacatataatgtctacaattgtcatctcctctwaaaatcttcagcaaaattggtcgcttagtagtgtttgaagattgtgacaaacactaattgtacctagaaagaatcacaaagggagaaaaagagttatcaa

SEQ ID NO: 7884 - DNA, 201 bp, Homo sapiens
tatgctcacagattttattctgtaaataaagatttgaaaaatcctgattgttttctttctatttaagaaagtgcctagattaaactaaacatctgggttgrtttttattatcaccatatattgctggagaaggctgatggttctgaggcagatcctggtgatttggggaaaacctctcttggcagagatacaattttctat

SEQ ID NO: 7885 - DNA, 201 bp, Homo sapiens
acacttagactgaacacttcattgaaaaatcccatctctccagaaaacctatatccattctgataaggttcagttcactaattttagctttctttatgccytgtttttaagactgagaattcatggagcaataaagcgaagagtatttgtcaacagcaaaagccacaaagacgtccctgctcggagcttctcaaatatctg

SEQ ID NO: 7886 - DNA, 201 bp, Homo sapiens
gcattcggctgtcgtatttcactgaacttactttgaagttgcttatgtcactctcaccattgccccatatttcctgtcatcccatctttttttttttttttcttctaagttgcttaattccttggctccaagggtagattctcttgattggacaaagacccctgagctgcttgcatcctctgcaatgttctttgcagacaa

SEQ ID NO: 7887 - DNA, 201 bp, Homo sapiens
acctacattagccatggtttactaggttaatgaactgtggcgacaaagaatcactgccgttaagttgtagagttgctctaggtccctgcattcggctgtcrtatttcactgaacttactttgaagttgcttatgtcactctcaccattgccccatatttcctgtcatcccatctttttttttttttttcttctaagttgct

SEQ ID NO: 7888 - DNA, 201 bp, Homo sapiens; identical to SEQ ID NO: 730

SEQ ID NO: 7889 - DNA, 201 bp, Homo sapiens
atttaattagttagctgctgaagcttggctgagtttcaatccctcagtctcataaccctcccttatgttgtgctctatataaaatggtcggctggcactgygatatttagtgttactgttcacttaggtttctgttgcagaaccatattttagacagaatgtattagttatgcttacaagaatgtattatacctacattag

SEQ ID NO: 7890 - DNA, 201 bp, Homo sapiens
caaagagccatccaagagcagctgttaacaaagggaagcctttttgagactcaggtgtgaccatgagtggagtacagtgtcccattcactttgtgtttgcrtttctctgtctttctgagattttctgagttggaactccgaagtcaaaccaccttgcatttgtataccttttcttctctcagggagaattagctttgaata

SEQ ID NO: 7891 - DNA, 201 bp, Homo sapiens
agagtgtactgtctatgtggttaatgaaattaacaaagaatacaaaattggataagaagttatctgcaaatatttccagttgtttatttaaaaaaaaaaamctaataaaaaatattgaagcgcttaaaaaacttagactaactgaagagctcttaggcaaacttctgagttggttgcaaatggtgcccttgcactaagtgc

SEQ ID NO: 7892 - DNA, 201 bp, Homo sapiens
gagagaacactagggcagcttttatctactgaatattttaacaactgctgtagaggtaacggttggtactcagtgaatatcagctttccctctgcactctygacacccactccaaattcatgaggcctgaaatatgtgagtaggacaagtcacacacctctctttgctcagtcttcctattttggtgtgtttttaagcaac

SEQ ID NO: 7893 - DNA, 201 bp, Homo sapiens
taaatattgacaaatggctgtagccttttggcatacatactccttgtgtatgtgacatatctttgggaaagtggaccaaagtaaaatatgggtagttgtcrgtagttttaaaaggaaaagcatagcatcagagaactggaaggtgattttgacaggccacataatctattcctgtgcttcaagaatctaagaaaggaagac

SEQ ID NO: 7894 - DNA, 201 bp, Homo sapiens
acacaaaaatggaattttatgtggttcgatctgaagtaaaacagtttataagcagcaaagcttcaattaaaagtagtatatcgtgattttaaagagcagayggcatagcttggtgaagtttacaaaaccttggcttggatgttgggcaaacccaagtttaaattctgaatgacctcccatctagtgtgtggccttggtcca

SEQ ID NO: 7895 - DNA, 201 bp, Homo sapiens
cagagtgtactgtctatgtggttaatgaaattaacaaagaatacaaaattggataagaagttatctgcaaatatttccagttgtttatttaaaaaaaaaaacctaataaaaaatattgaagcgcttaaaaaacttagactaactgaagagctcttaggcaaacttctgagttggttgcaaatggtgcccttgcactaagtg

SEQ ID NO: 7896 - DNA, 201 bp, Homo sapiens
ttgtcaaaatccagcccatgcccatggcagacattcctaatcgataatggaactctttcccattgagccccctcagagccttacggtcttttctgacatgrtgctctagggagccatgactaatcaatgagatatagcactgcttttattcagtgcagctgctccctgtgtgctagccactcagagttagctcagtgaaga

SEQ ID NO: 7897 - DNA, 201 bp, Homo sapiens; identical to SEQ ID NO: 729

SEQ ID NO: 7898 - DNA, 201 bp, Homo sapiens
ttcttccatatttcaaccatattcttcattttctattttcaatttcattcattttgacccagtgtctataatgacaattcctttattcctaatttttcttytctggaaatggtaccatcctatttcttgtaagccaaggatagcaaaggaattttctctcccacatcagctttggggtttggcaatagccacctgaaatgc

SEQ ID NO: 7899 - DNA, 201 bp, Homo sapiens
aggagtaaaatcaactgaatattcataatgttctgtcgccttatagttgctctgctgttttcttgtctaaacaaaccgtgtactgtattccaaattaaaayagaaaacattatttctctctgatggtatgatgcaaattttgtatctgtaacagggagggttcatttttggaaaaattctattttcatatgtgttttcgaa

SEQ ID NO: 7900 - DNA, 201 bp, Homo sapiens
gcaaatactatttatccaagtaaagtgtctaatttcaggttaatttggacatgaataatattttcacatttcaaaaaaattgattgctggggttgattaawttactttaaagtcgttgaatgcaatttcttttgacaataggataaaggaaacagaatcttggccaactctgtgagtaactattttatggccctgaaaata

SEQ ID NO: 7901 - DNA, 201 bp, Homo sapiens
tcttcctttgagcatttcaaatagcctaccctacctcttgaaaaccagaatttcagtgactgattttcaatgtacatttattgtgtcacatagcatatagytaatatctggttatattttctatggaagttgtatgaattatcctaattattagttgagtatcataaaacttggtaaagtttcttcataaatggattcttt

SEQ ID NO: 7902 - DNA, 201 bp, Homo sapiens
acaaaacgctcaccccagaacaaaacctgttgacaaacagacaaaattctttagttatgaaaggcttaaaagaaatgaaacatggctgacaagtaagaacyaataaatgctcaacttcagtgattatttgaattattattcaaaatcaaaatgcggaaaatacatgaacaattagagataactaggaggatcgattgaaat

SEQ ID NO: 7903 - DNA, 201 bp, Homo sapiens
aaaatggtccagaagatattgttggcaataaatgcagatcaatgaattatttagcaagtaatcattgattagctatgccatgtgcccagtgttggtactgkttgtccacgtgcatagaatatcacacactgccttgttaacaaggtacatgtttggaagtccttgaacattttttacagagtactgaaataaatattatat

SEQ ID NO: 7904 - DNA, 201 bp, Homo sapiens
gctaaaagaaggaaaagaaaatggtccagaagatattgttggcaataaatgcagatcaatgaattatttagcaagtaatcattgattagctatgccatgtrcccagtgttggtactgtttgtccacgtgcatagaatatcacacactgccttgttaacaaggtacatgtttggaagtccttgaacattttttacagagtac

SEQ ID NO: 7905 - DNA, 201 bp, Homo sapiens
ctaagacctccagaataatgcctctgccccatctgcagtgtctttgagaaacaggagggatgagataggaagtttgctttattaggtattgccagctggtytgacttctttgtgattgtcctaaactagctcattttggctgataaaaaaactcttctcttttacaggtgtaaaaactaatttgatttcaaaatagctgtt

SEQ ID NO: 7906 - DNA, 201 bp, Homo sapiens
ccacttttatgttgaattttacattgcctttgtggactctcaatttaaaagttcactttgctggaaaaatgtactgacaaacagcataaatattgacaaayggctgtagccttttggcatacatactccttgtgtatgtgacatatctttgggaaagtggaccaaagtaaaatatgggtagttgtcagtagttttaaaagg

SEQ ID NO: 7907 - DNA, 201 bp, Homo sapiens
tctcctaattttttttttcttaaatacctgaattggcatgcaacatatgcaaaatcccactgttaaacaaacttgaaagtaagttgcagattttgcagtasattctgcaaaatgttataaactccaaaaaaaaaaaaaaaaaaaaaaaaaaagatgccattggtgaatagcacatcacaagaaacagagccagggactcac

SEQ ID NO: 7908 - DNA, 201 bp, Homo sapiens
aacaaataagtttgtaggtattaattcagctgggaccccgaagctgcctcataatgatgaaatagattatgaatgggattccgtaaacagcgcttgagctrctttaaactaggcagagttcatttacgcatcgtctttgggtgtttggaatggaagtgccactgtctgttagttcttgcccactttattgttacctgcagc

SEQ ID NO: 7909 - DNA, 201 bp, Homo sapiens
tttcattacataaataactaccacttgaccttttgaaagtaattattttaatgagaaaaaattgacataaacctacatacacataaacatatgcttatagmtaagcatagatatacataatacatgaatgtatagcccaagtatgcctctcatcatattttcccctccttctgttcaaaatacaagattgccacagagaag

SEQ ID NO: 7910 - DNA, 201 bp, Homo sapiens
ggctcatgcctgtaatcccagcactttgggaggccaaggcatgtggatcacttaaggccagaagtttgagaccagcctggccaacataggaaacaggaaaygacataggagacaggaaaccctgtctctactaaaaatacaaaaattagccaggcgtggtggtgcatgcctgtaataccagctactagggaggctgaggca

SEQ ID NO: 7911 - DNA, 201 bp, Homo sapiens
gctgctccctgtgtgctagccactcagagttagctcagtgaagatcagcttttgacatatcttgcatctaagctagccaaggcttagggaaatgatttttgactgtaaaggttagatttatgtgttatctttaaaaaaactcactaacatcaacacaattttgcaaaagctatataaaagagctgactaatggaatcaaaa

SEQ ID NO: 7912 - DNA, 201 bp, Homo sapiens
gtcagtttatggaagtaggtggcaccattttgaagttaacagttaccccttctgattaggatttgcctcctaaactagaggtttggttgttttttttttttgagacagagtctccctctgtcacccatactggagtgcagtggcgtgatcttggctcactgcaacctcagcctcctgggttcaagcaattttcttgcctca

SEQ ID NO: 7913 - DNA, 201 bp, Homo sapiens
tcattacagccctatggtagatactggttgaatagtagcccttactacccacatactccaacacacacacacacacacacacacacacacacacacacacaagccgccatgctaatctcccatcttacaaatcctccctctcattgtgtttccagtagagaggggaattaaaatagttggtggtttaatcagatcttataa

SEQ ID NO: 7914 - DNA, 201 bp, Homo sapiens
atcattacagccctatggtagatactggttgaatagtagcccttactacccacatactccaacacacacacacacacacacacacacacacacacacacacaagccgccatgctaatctcccatcttacaaatcctccctctcattgtgtttccagtagagaggggaattaaaatagttggtggtttaatcagatcttata

SEQ ID NO: 7915 - DNA, 201 bp, Homo sapiens
ttattttatttttacaggaattagccctggtttttgatcgttgctttcctcagttagagtggctgagaggagcaatgtatgtacagattatacatttttttatagtcaactacaattgaatatcagagaatgcactcaaggcattgagatatatatgtgcattagattctgttttaaatatgtgtgcttgagatataaact

SEQ ID NO: 7916 - DNA, 201 bp, Homo sapiens
agtgctttgacagatgacatgttgagttcagaaccttatttattttctttcatccctgtttattaatctttctagttgagatttcctgtcccagaaataartatttagctgcttgacaggacaatcacactgataaatggattcagtggctcagacgttggcactggagaagtctcacaaagtagaaagggttacagtccc

SEQ ID NO: 7917 - DNA, 201 bp, Homo sapiens; identical to SEQ ID NO: 737

SEQ ID NO: 7918 - DNA, 201 bp, Homo sapiens
tatattattatatgataaataatatagattgtcatattataatctataatatattatagattattatattataatatataatatagtttatgattattcthatataatatgttgtcatgtacacatggccttgtgtcattagttgtattttcactgctcctgtctcactcccttgactagattataaactctctgaggcta

SEQ ID NO: 7919 - DNA, 201 bp, Homo sapiens
ttttatatgaagtctggatgtgctgatgatgtgccttcatttcccaggtcagagggaaaatctggatgccttaatacacccaaaggttaggagaggccttktctgaaattgttttcaaagggatttccatgaccaaaataacataactatgctaaaaattctgtgacctgataagaaatcccttgcctggattcctggcaa

SEQ ID NO: 7920 - DNA, 201 bp, Homo sapiens
ttacccggtgtctaccatattccaagcatcgtattagatacttggaatataaaaatgaatgacacactccaacctcaggaaatacacagcagtaaaaaaaattttaaaggtgaatcttgcctttgaaccaaacagtttagtacagtgtttattttcagtataaaaactcatatttgtgggacaaggccatcttcatttata

SEQ ID NO: 7921 - DNA, 201 bp, Homo sapiens
cttcttgtttgcaattttctcaaattttaaaatcacaggaacctctcaaattcaggaagtgttccctgattaattccacctctacctaaacatctagcagmgacttgacctgactttgtccaagtagattttgtattatttagtggagagatcagcatgaatctgttcagccacagactggtcaacagatcagttcatgcc

SEQ ID NO: 7922 - DNA, 201 bp, Homo sapiens
tacaatattactaaccatagtcctcatgtggtacattagatctctagacatatccatcccacataattgcaatttgtacactttgacctttatctttccayaccttcccctccccccacccctggtaaccatcattctactcgtttattttttgtttttaaggtagggtgtctcttgctctgttgcctgggctgggtgcag

SEQ ID NO: 7923 - DNA, 201 bp, Homo sapiens
gcagagtaatgccactaattgcttgtataaaagcattcccgaggttgtattttcctgttctttcattagaaaattaaaactacagtaattttctgctgttygtaaaagggaaaatgtgctggtgaactgtattcagcaaacttaaaatgtcaaagctcttggccacctttttatgcccagtaatgataaactgtcaacttc

SEQ ID NO: 7924 - DNA, 201 bp, Homo sapiens
gtagactgtccctcagttataaagttgcctccagggtctttgctatggctttgatttgaggatgattattattcttatggatgaaactttagttcttcctrgaaaggctttcagcgatttgcatgctctttccagctgccctccaaaccttgcccagccttatttttctccatcataaaatgggtacacaggtcattttta

SEQ ID NO: 7925 - DNA, 201 bp, Homo sapiens; identical to SEQ ID NO: 736

SEQ ID NO: 7926 - DNA, 201 bp, Homo sapiens; identical to SEQ ID NO: 735

SEQ ID NO: 7927 - DNA, 201 bp, Homo sapiens
ctttttccatttagcaatagtttattgagtgtctattatgtgtgataaaatttccaaggtaaaatcaagtttgtattatggttaactataagacagtttaraactttggaagcagtaactatcaaacaggtatcaaggattttgtacaaagaggtccaaaaatatctagttgatttctaactggaagaatcagagaaagct

SEQ ID NO: 7928 - DNA, 201 bp, Homo sapiens
aggtttctcatatggagaatatctcataagtaattgttatttattctccaatttctccatttgttagtgtcattggctttgctccctagtaccctgatttmtttccattgatatcagattgttttcatctattcaatttgttcatttgggaagagcagttgactcagagacatactgtatgtcagaacagggaagtccttg

SEQ ID NO: 7929 - DNA, 201 bp, Homo sapiens
ttttccttttaactgcagagtgggagccagtgatttctgctttgaaccatgattaattcgtgtaggtatgctgttattgctgctgattcaatacgcttttyttccccagtgttctgaattttcttccctcttcactacctcagtattagcccaggattttcagaagccttcctgtaatattttaaaatggctttccattag

SEQ ID NO: 7930 - DNA, 201 bp, Homo sapiens
ccactgcccatcactttctgtcagtttgggaaaatataattagtgaaatggaccgcattctcattgctccagctggatcttcctcataagcactagaacartttttcctggagtagaaccactctgccataggccttgttggtcatgaaggcctcaggtgaggggaagcagatgagctcgctctagtgagtgaacaaatga

SEQ ID NO: 7931 - DNA, 201 bp, Homo sapiens
tcctcaccctgtgctggtcatgcatgcattttctggggccaaatttaaagtccttgtaatatgtgacccagcccggcagcacaggttttaaagttgttttytttttcttttagtaaacttttacaaatcatgacaatgaagaattaaataggcctttggaggaaattttctttagatgagactggctgtatttggtatata

SEQ ID NO: 7932 - DNA, 201 bp, Homo sapiens
ctagtgagtagaggccagggatgctgttaagcattctaaaacacacaggacagcccccaaaacaaaggattatctggcttaatatgtcaacagtgctgcarcccagaaactcatatctagagattttgattcagtggtctgtgatgaggctttgaaatctgcatttctgtctatggatccaagtttttctgataaaagatt

SEQ ID NO: 7933 - DNA, 201 bp, Homo sapiens
tatttatataagtatatatttatataccttaatttgtatttatatttcaactcagccagtccataaaacttgtagttatttttcctgtctttctaaaaagkctaaaaggcaaatgttctgcagtatggaactgagtctccgagttaagaggtttgccaggtaattgctagcaatgacaaaggtgagatttgactgtcaatt

SEQ ID NO: 7934 - DNA, 201 bp, Homo sapiens
agatatgtatacctgagagtacaaagtggcgtgcggcagacactctagggctggggttctcagatgtggcctgtgaagcatctcattaaaaatgtttaccyggtttcccaagtgattcttgggctgctgaaatgtgagacccacgactaaaggagaatctagaaaaaataaaattagtacaaaataataatgcaacaaatg

SEQ ID NO: 7935 - DNA, 201 bp, Homo sapiens; identical to SEQ ID NO: 752

SEQ ID NO: 7936 - DNA, 201 bp, Homo sapiens
taggctttaccccaactccctaccgctgtttatcaacctagactttggatggcaaaaataagtcagtccagttgtcaaaatccagcccatgcccatggcaracattcctaatcgataatggaactctttcccattgagccccctcagagccttacggtcttttctgacatgatgctctagggagccatgactaatcaatga

SEQ ID NO: 7937 - DNA, 201 bp, Homo sapiens
actgttaaacaaacttgaaagtaagttgcagattttgcagtagattctgcaaaatgttataaactccaaaaaaaaaaaaaaaaaaaaaaaaaaagatgccwttggtgaatagcacatcacaagaaacagagccagggactcaccatttatcagagtcattcaattaaacaaacaaacccaaaagaaaactcctccaagaaa

SEQ ID NO: 7938 - DNA, 201 bp, Homo sapiens
atttgacgtgtcgggggaaggggagggtggttatctgccagagatatattaacgtgtgctctgcctaactcccagggtgtttaagcctaaacgagtcaacmggtgcgtgtttttgaaagctcactactccccatcctcttcctatatatccatatatatccaataaaatctgactattgttttctaaagtatattgattgg

SEQ ID NO: 7939 - DNA, 201 bp, Homo sapiens
gtagcatttttttccttgcaacttgccttaagtctaaccccaggcttgttagcagacttgaagttctttttgctgaatggtattcaccccgcctcctaaayagaaaatgtattgtaaactaaaatgctccattgtaagcgtaaactcatttgaactccagcctgcccttcttcaaagttccttggactctggagccacttg

SEQ ID NO: 7940 - DNA, 201 bp, Homo sapiens
gacagaggtaaaaggctttgtttttaacccaaagaaagtacaatcaaggtgtcgccactccccagagcaacttgagaaccagttatttaagcgataatgarcttgggtactaggacaagggtttcaaattttcaagactcagaaggatttctatatttgaaatccctagatacctgagctatttttagaaccagtcgctct

SEQ ID NO: 7941 - DNA, 201 bp, Homo sapiens
cagccattctggcccctgaccactgcaattctggcactgctggaactaacgagaacattgttacactcacatctctctccatgttctcttaaatctgtcasctctgagcacagtgccttgagccagtcctatcagagagagcaatttgttaagaaacttgctcatccaactttttccattacctggagagctgccctgtgc

SEQ ID NO: 7942 - DNA, 201 bp, Homo sapiens
gagcaacttgagaaccagttatttaagcgataatgagcttgggtactaggacaagggtttcaaattttcaagactcagaaggatttctatatttgaaatcyctagatacctgagctatttttagaaccagtcgctctttaatagtggcctaatttggcgttcctgaagtttaaggtttctttttataaatctaaaatatct

SEQ ID NO: 7943 - DNA, 201 bp, Homo sapiens
ctgcttcatctggtcatttatttagtctcaatgctattgttcgtagagttctgttttaccaactgtttgttatctcctacctttgattttcagaggtgatktttatgagtgagattcctgcaaacatgtagctacttcttacacttaaatctgtaaaaacaaattatggaaatctttgtttcttcactcagctgagctact

SEQ ID NO: 7944 - DNA, 201 bp, Homo sapiens
ttaaagtcagaaatgaagtaccatgaagacacacatagaggagtaaaaatgtccgtgaaaagggtgagaagagaggaaatttgataattgttgctagattwttttactcgtgagtcttcaataagtcagaagttaaataccctcttatttatttataaaatttagcaaactgcacttcccacctcttaggaggaagacaag

SEQ ID NO: 7945 - DNA, 201 bp, Homo sapiens
attaaagtcagaaatgaagtaccatgaagacacacatagaggagtaaaaatgtccgtgaaaagggtgagaagagaggaaatttgataattgttgctagatwtttttactcgtgagtcttcaataagtcagaagttaaataccctcttatttatttataaaatttagcaaactgcacttcccacctcttaggaggaagacaa

SEQ ID NO: 7946 - DNA, 201 bp, Homo sapiens
ttcagattcaaactcagatgactttgaccctgcttccaccaagagcaagtatgactctctggattttgatagtttactgaaagaagctcagagaagcttgygcaggtaacatgttccctagctgaggatgacagagggatggcgaatacctcatgggacagcgcgtccttccctaaagactattgcaagtcatacttagga

SEQ ID NO: 7947 - DNA, 201 bp, Homo sapiens
ctttgataataaagaagaaaatgctccatgaaataccgaacttcattttataatctgttagattacatcttcccttaaaaatacagctattgaaattttcytgaataaagagaccactggattctttttccttatcaatagtaaagctttttggctacagggacgttggtcaagacaaatatagctcagtagagttatcgt

SEQ ID NO: 7948 - DNA, 201 bp, Homo sapiens
cgggatgcctggggctccaggactaatatgtcaggtatcctcttagtgtcagagggcaaaagtgactgtttaggtaagttcccataacagttttctctgaygtcacaaagcccattctttatcgaggcaaagggtaaagtcatatgtggcaatgcccttaccaacagcagcagcttcaggagtatttgcatggcatgagga

SEQ ID NO: 7949 - DNA, 201 bp, Homo sapiens
aatatagtgatggtatgctattgtgagttttcttttccaggtactaggtgattccaaccgtacacacacatacgtgtgcaaacacatacacacacacacamcatcttgcaagttacatacaaaagccgtatagaaaaaaaattatgatttttgtccttcatcttaaggaacttgcttttgcctttaaggatgaagtccaga

SEQ ID NO: 7950 - DNA, 201 bp, Homo sapiens
gtttagatatacataaataatgaacaaaatatagtgatggtatgctattgtgagttttcttttccaggtactaggtgattccaaccgtacacacacatacrtgtgcaaacacatacacacacacacaccatcttgcaagttacatacaaaagccgtatagaaaaaaaattatgatttttgtccttcatcttaaggaacttg

SEQ ID NO: 7951 - DNA, 201 bp, Homo sapiens
acattcagaagcacagattttattagcatgtcaacattggcaagaacacatgcacttttctcaaccataacataaaagcaaaatgagagagagagagagarcgcacgagcgaacaagtgagaggaaggaaaggaatatgtaaatgacaagatagcaccaatacaacaaattgacctggtcttttcaatggttttcaaaagt

SEQ ID NO: 7952 - DNA, 201 bp, Homo sapiens
cagagtaatgccactaattgcttgtataaaagcattcccgaggttgtattttcctgttctttcattagaaaattaaaactacagtaattttctgctgtttrtaaaagggaaaatgtgctggtgaactgtattcagcaaacttaaaatgtcaaagctcttggccacctttttatgcccagtaatgataaactgtcaacttcc

SEQ ID NO: 7953 - DNA, 201 bp, Homo sapiens
actgaagaaaaaatttaatctgaagagttaattaacaaaattataaaacctctaaaacatccctctcattacagttgtagttttaagacaaaaaaaaaaaatatcgtggaaagcactctaatttgtcctaggaatctatttaattttgatttgtccagtaatagaaatttgagggggaaatgcaatatactgtagtttatg

SEQ ID NO: 7954 - DNA, 201 bp, Homo sapiens
agagagaattaaatagagaaatggcccggggaaccagaaaaaaaccaaggttggtgagcaatgaaccatttaagttctcctgagaaaagaaaaaaaaaaaaactggactgaagaaaaaatttaatctgaagagttaattaacaaaattataaaacctctaaaacatccctctcattacagttgtagttttaagacaaaaaa

SEQ ID NO: 7955 - DNA, 201 bp, Homo sapiens
gcttctttcaaattttccaaatgcctggaattatttctgtcttcttgtttgcaattttctcaaattttaaaatcacaggaacctctcaaattcaggaagtrttccctgattaattccacctctacctaaacatctagcagagacttgacctgactttgtccaagtagattttgtattatttagtggagagatcagcatgaa

SEQ ID NO: 7956 - DNA, 201 bp, Homo sapiens
caaggatatatttgcttgactgaggtggtccattgatggttgaaggatcaagctgtgactctttcttttcttttggaggcagtctcactctgttgcccacrctggagtgcagtggtatgatcttggttcactacaacctccacctcccaggttcaagtgattctcctgcctcagcctcccgagtagctgggattacaggcg

SEQ ID NO: 7957 - DNA, 201 bp, Homo sapiens
actcagatttcctggttcttactgcttctcctcagtgtcagagaagaaatgggtattttctatcaggaatcctcagaaacgctggccagtcacattgccaygttcaaggatatatttgcttgactgaggtggtccattgatggttgaaggatcaagctgtgactctttcttttcttttggaggcagtctcactctgttgcc

SEQ ID NO: 7958 - DNA, 201 bp, Homo sapiens
cagtatgttcctatgcaggatgctctaatgcagagactgatttcattcattcttaaactgacccatttatcaactattttaaaaagcaacaactacatgcyaggcactaatttaagtgcgcataatacaaagatgtattaagtacataatgcctacgacacagaattttcccttcaggagttggttggctagtgagaaaga

SEQ ID NO: 7959 - DNA, 201 bp, Homo sapiens
attcagacttaaaatttttgcaactgtttttgtcgttgttgttgttgtagtttcctcgtttacgattgtaatgaaaacagtttacctcttgtggaaaagtrtgcatgattgtacaagtttactgtgccatacttgtatcgcagttgccttatttttggaagaatcaagcttaggggctagaaagaaatcctgggctgggga

SEQ ID NO: 7960 - DNA, 201 bp, Homo sapiens
tagctagaggaatattctattccaaaccaagatctgtcccactgccccaacaaatgcagggcagtgggacagaatatttgaggttggaagacctgaaattkatgatgtcctacacacagtatattaaaataacagtttgctcattggaagtgctgggtggccagggagtgtggagggaaaacaagaggaagccaaccaagg

SEQ ID NO: 7961 - DNA, 201 bp, Homo sapiens
gcatttcctttgggtagataaccagtcaaggctattgtaaagttgatattactgttgatgggttccttttctcccctccctccaaagcactagcttttctygggtgaatgctaattggctaatctggtgtgtttctgctgtcatctaacggtatcattttcagctagtacttggaggctctttttgggttgtgtatgtgtg

SEQ ID NO: 7962 - DNA, 201 bp, Homo sapiens
agagtctgtttagaaagtaggatgtcattgaagattttttagcagatcaacataatggaggtggtatttaagagtgataatgctgacagtcgtaagaggtrtaggcaagtaggaaatacggaaaatcagacagcaggcagtgctgcattccaaacccaatgtgatacaggtacagggaagggacaaggtgatagcagaggg

SEQ ID NO: 7963 - DNA, 201 bp, Homo sapiens
caagtaaaagaattgagctgattctaaaagtatattgggtttaacattttatgaaaacatgtttattcacacagatacatacacgtgtacatctcctgggracttggaagggttaagtcagaccactgtcatgttacaggaagtgtttttccactgtgtccagtaccttgagtttgttatgtattcaatatgtagtgtcat

SEQ ID NO: 7964 - DNA, 201 bp, Homo sapiens
tgattcaatattcagagaattccttagtttagtctttgagttttctggttgtttttccaacttgactgttgtggagagaaaagaaatctaaaagacactcmatattacataattagtttcttttttttttctttagccaaaccaacaactttatctcttcctctgaccccagagtcaccaaagtaagtattaagaaatgta

SEQ ID NO: 7965 - DNA, 201 bp, Homo sapiens
aggggttgcatgggtatattagtccagtctcactctgctgctaaagacatacctgagactgggtgatttacaaagaaaaagaggtttaatggactcacagytccatatggctggggaggcctcacaattgtggcaggaggtgaaaggcacatcctacatggcagcagacaagatagaaaatgagagccaagtgaaaggggt

SEQ ID NO: 7966 - DNA, 201 bp, Homo sapiens
ttgtcgggtgcctactccttaccagattcttggccaaatactgggcataagaaaaggaaaaccattcagtaaataagaaagggcatctttttgctttcagyccaaattactcttttcatcacccaagaccagggactctcagtacatccaaagaaaactcttgggcaagctaagtctgtacctcagttctctgcttctagt

SEQ ID NO: 7967 - DNA, 201 bp, Homo sapiens
ctttaatttggagtaggagtgaggaaggaaacccaaatgttatacacttcagtcaacgtatttgttagagaattgaattattctcttgaggttttttttttctctttgttagcaactcgagatagattctcctgcctctactaatattgaaaccctggaaaatgttaacagaactacagaggggagaaattatcaggatgg

SEQ ID NO: 7968 - DNA, 201 bp, Homo sapiens
tcttaatttcctttccaattttaattttgttcctttgcatgtcattccccatctaatgtgtgcatagtaagcctttaaattctttgaggaaggaaagtgayaagtgtcttgtgcatatgacataattatattaaatttatttgtaatatttatcatgaaattaacatataaatctagtcctcatcattattagatatctat

SEQ ID NO: 7969 - DNA, 201 bp, Homo sapiens
cctaatgtattttgaacactctcccattatgctattaaatatattttacaactgattttaatgataatattaaatataaatatgtgtgtgtatatatatayacacacacacacacacacacacacacacacacacacatctctataatttattgaaccaggtcacttaatgttggatattcacattgcattcaagttttca

SEQ ID NO: 7970 - DNA, 201 bp, Homo sapiens; identical to SEQ ID NO: 744

SEQ ID NO: 7971 - DNA, 201 bp, Homo sapiens
gctggtagcaagatttatgtttcagaatattgcaacataacttccttccctctgttgcctttgtgcattgtttgaaggaggagaataaaggactacttttrcagcacagcagtctgtaaagatggatggcatggggttagtttaaatagcatattggcctttctgggtcactgtgggcaaccttgtccctggtttatttta

SEQ ID NO: 7972 - DNA, 201 bp, Homo sapiens
ctgtacccttgtttactttattgtttgtcttctctagatgtcttgtgctttactacatgctgacttgcatgtggaagatactccagaaattaaatcgttgwtttatcagatagttttctaaatgtctcataatcctatcaagtttctgtctatccttctgggtaggagatataaggcagttgttattgtcttaatattctt

SEQ ID NO: 7973 - DNA, 201 bp, Homo sapiens
ctagtccttcctccatgcctgacggcacccctccaccccaggaggcagaagagccgtctctagtaagaacccttcctactgtttagcaggaattggagttrcctctggctacccgctgcatgggtatgatgtagtcacaataaggtttggattttttcatttagaatgatgccaaagcaatccccaagcacactcagagtt

SEQ ID NO: 7974 - DNA, 201 bp, Homo sapiens
tcaaaaaaggttctgcttggatgataaattatatggcgatccttggttagtaaggcactcttaagatttagcttttagtcttagagacatgagaagccacrgagggtttggtcagaagaggggtttcacatgacttaggttgcatcaggatcacttcgtcttctgtgttgagaataaaatattgagatgggttggcaaatg

SEQ ID NO: 7975 - DNA, 201 bp, Homo sapiens
tagacttctcggcttgataacatctggcttatcttgggaacatctggtttatcaccctatttcttccctgccattatgctgaccactggaaaaatatggcwcaggagttctgacccacagggctctgtctcttggtatcaacccctgctaataaatagcaactcacaggatgcaggttacgtgaccatctttcactggcac

SEQ ID NO: 7976 - DNA, 201 bp, Homo sapiens
agcgatttgcatgctctttccagctgccctccaaaccttgcccagccttatttttctccatcataaaatgggtacacaggtcatttttattggatagtttrgaggactaaattgattgagatgtggtatatgaagtgctgatcttaatgtctagcccatacgtggtctgctgtatatgtcttgctttccacctttctttct

SEQ ID NO: 7977 - DNA, 201 bp, Homo sapiens
cactgtggttttagacttctcggcttgataacatctggcttatcttgggaacatctggtttatcaccctatttcttccctgccattatgctgaccactggraaaatatggctcaggagttctgacccacagggctctgtctcttggtatcaacccctgctaataaatagcaactcacaggatgcaggttacgtgaccatct

SEQ ID NO: 7978 - DNA, 201 bp, Homo sapiens
gcactgtggttttagacttctcggcttgataacatctggcttatcttgggaacatctggtttatcaccctatttcttccctgccattatgctgaccactgkaaaaatatggctcaggagttctgacccacagggctctgtctcttggtatcaacccctgctaataaatagcaactcacaggatgcaggttacgtgaccatc

SEQ ID NO: 7979 - DNA, 201 bp, Homo sapiens
cctcatttaagcactgtggttttagacttctcggcttgataacatctggcttatcttgggaacatctggtttatcaccctatttcttccctgccattatgytgaccactggaaaaatatggctcaggagttctgacccacagggctctgtctcttggtatcaacccctgctaataaatagcaactcacaggatgcaggtta

SEQ ID NO: 7980 - DNA, 201 bp, Homo sapiens
tgtgtgtgtgtgtgttcatctacacacctcatttaagcactgtggttttagacttctcggcttgataacatctggcttatcttgggaacatctggtttatsaccctatttcttccctgccattatgctgaccactggaaaaatatggctcaggagttctgacccacagggctctgtctcttggtatcaacccctgctaata

SEQ ID NO: 7981 - DNA, 201 bp, Homo sapiens
ttctacctctccgacatgtttgggatatatgtatatacatatcagtttagctagagcaaaattcaaatatcaaagcactggaaaaacccataacagaaacmcaagtcaaataaccaaaaatctttccaagactctgcctggtggtattaaaaaaaaaagaaaaagaaaaagaaaaaaatatatatatttattgttaccttt

SEQ ID NO: 7982 - DNA, 201 bp, Homo sapiens
ccatgatacaactgaatgggcatctttcattcattcgtctgttacttctgaatgaagctacttggggttcgttagaatgatggcaagtgagaatgcagtcrtctctaggtcattacttgtaatacgttctgaggactgcctttgctgatggggggagaaggactctcacagctgtagccagcgttcatgtttggtcattgc

SEQ ID NO: 7983 - DNA, 201 bp, Homo sapiens
ggaaccatgggcaagtcatttgacgtgtcgggggaaggggagggtggttatctgccagagatatattaacgtgtgctctgcctaactcccagggtgtttargcctaaacgagtcaacaggtgcgtgtttttgaaagctcactactccccatcctcttcctatatatccatatatatccaataaaatctgactattgttttc

SEQ ID NO: 7984 - DNA, 201 bp, Homo sapiens
atttactgaagttttacattaaatcagaatataattgggaagaaaattagtgtttctttgtggggagtgcagagtaatgccactaattgcttgtataaaarcattcccgaggttgtattttcctgttctttcattagaaaattaaaactacagtaattttctgctgtttgtaaaagggaaaatgtgctggtgaactgtatt

SEQ ID NO: 7985 - DNA, 201 bp, Homo sapiens
ttaaaaatatgatgaatatctagcattggataaacacaaataaaggtatcagtgaatatcacaatggaagaatcacatgataataattaataaacattgaytcttcttggccaggtgaccaatattatttcacagttgatcgttgagggcagagccaatgacctttgtcctgaattttaataatttactgaagttttacat

SEQ ID NO: 7986 - DNA, 201 bp, Homo sapiens
gtgctgatttgattttttagaagtagaattagatggcaaaaaataagaaaaccctaacaatacaatctgggcaggttagaatatcaaaaattataacgagyctgttctaatgtaaagaacatctctaaaagatgtgaataggttttaaaaatatgatgaatatctagcattggataaacacaaataaaggtatcagtgaat

SEQ ID NO: 7987 - DNA, 201 bp, Homo sapiens
ctctctggaactgcaggtaagccttatatttcacttagaacttgtgtgtgtctgtctgtatatgtgtgtgtgtgtaataagataacagagtgtactgtctrtgtggttaatgaaattaacaaagaatacaaaattggataagaagttatctgcaaatatttccagttgtttatttaaaaaaaaaaacctaataaaaaatat

SEQ ID NO: 7988 - DNA, 201 bp, Homo sapiens
ttgaaatacattattttttataggaacaaacatttagtgagtactctggcaagtgaattaaacgaaggatgacatatcggctagttttctttatcacaacygccagtgccatcatcatcatcatctaatgttttctgagcacctactatgtgctggacttttcttattcatcagcaaagacatttcttatacttccatgtt

SEQ ID NO: 7989 - DNA, 201 bp, Homo sapiens
agaaaaagaaaaagaaaaaaatatatatatttattgttacctttttgagactatttgcaaaatacagttttgttttgtttctctaagatcgagaaaagctmagctaattagtactcaagcactaaaaaataagtatcacgggaatggtttgattgcttttttttttttttttttcagttaaacaatttgtgtaccttaatt

SEQ ID NO: 7990 - DNA, 201 bp, Homo sapiens
ttataaacttataaaaacaaatgaacaaatatatttatcctaatagctcttctgagtttgcttctgaaatcacctatattcaatatagacaacaaaaccarttgtttttgctattctctgaggtttttgagtttgagggtttgaatttgattctaatttttagaaatgggcagttgtctgaaatatggagggatgggaaaa

SEQ ID NO: 7991 - DNA, 201 bp, Homo sapiens
acacagtaaggtttcaatagatccttgttgtctgaaaccagatatttgggaattttggagacagagttgacgaaggggtgaaaggagggctgtgggtagasagtaagagaaatagtcaaagcagagagagaattaaatagagaaatggcccggggaaccagaaaaaaaccaaggttggtgagcaatgaaccatttaagttc

SEQ ID NO: 7992 - DNA, 201 bp, Homo sapiens
ttgtcctgtctctcccatgggatgagaagctatttaagggtctgggctgtggttgtcactaacccagtatcattacttaactcagtgtctgaaatatagtyggtgcttattaagcatatattaaatgcatgcagaatatggaattaaataaacctgaaattattttttggagtacattatacaatgcacaagagtaggcat

SEQ ID NO: 7993 - DNA, 201 bp, Homo sapiens
ctaattttttttttgtatttttagtagagacggggtttcaccgtgttagccaggatggtctctatctcctgacctcgtgatccgcccacctcggcctcccraagtgcgggattacaggtgtgagccactgcacccggcccacattttcttagacaagaaccaattcactggctaaagctctcagtttccaacttttgcaac

SEQ ID NO: 7994 - DNA, 201 bp, Homo sapiens
cgtgagccactgcacccggcctccttttaacttttaagactgtgcgctcagaggtacgtttgaaagcaaggcagcatcctatgctttactgtagctagaawgagagcagggaaaaggggagagagatccacaatgaaatacacactcttattcttggcaatggcagagttgtttgaagctaaatgacttcttatccattaa

SEQ ID NO: 7995 - DNA, 201 bp, Homo sapiens
tcttgagtgcatgttcaccatcttcctccatcatttcctttgaaccctcagtaactcatacttaggtgatttagccttcctctcccctgccagggctggtygctgctactcctgaaggtatactaccccacacataccatacttgattgttaaaccaaacattatttttcagcatctgctgtgtacctagaattttgccgg

SEQ ID NO: 7996 - DNA, 201 bp, Homo sapiens
tcctgagtgagtagctgggactacaggtgcctgccaccatgactggctaattttttttttgtatttttagtagagacggggtttcaccgtgttagccaggrtggtctctatctcctgacctcgtgatccgcccacctcggcctcccgaagtgcgggattacaggtgtgagccactgcacccggcccacattttcttagaca

SEQ ID NO: 7997 - DNA, 201 bp, Homo sapiens
gcaagacttacccgggtgacacaatcagacaatgggtaaaatgtagatagtaaaatgtggacaaagccctgttctaggcaccatataaataaaagagacartgaattagcccctgccttcagtgtccttaaaaactaaggaaacatgtgagcattggcctgatattaacaaactactctaagaattttagaggtgggaaga

SEQ ID NO: 7998 - DNA, 201 bp, Homo sapiens
gttcaagatcgccctacagccgtcggcccaggtaatgaggcatgtcattttcctttagctccctttatcccctccttgagatgacaagatgttctccaaarccctatacccctccccatattattattcattttgctcatgaaaattgaggtggttgacttagtgataaagttatgtttcccaggtatgacagctacgagg

SEQ ID NO: 7999 - DNA, 201 bp, Homo sapiens
tctcagcatgtctaatttcttacagttgaatttatatatatatttatttatatatatataaacttccaaattctacttttctcaattaatatataaattcrtgttctgctgtgactcacaagattaaaaataatttattaacatactttaatggttgtacagtattttgctgagtgaatagtaccattatatttagtcatt

SEQ ID NO: 8000 - DNA, 201 bp, Homo sapiens
ctcaagatgggaacaaacataatccgtaggcaccttgggttgaaccatcactttattttactaaagggaatgtttgaatacagatttttaagaaaaacgtrtaagacagtttcagaagaaaggggcctaggttttggcaagaaaggacagaagtaaattctttgtactatctactcaggtgctgaaaattgtggtaggtat

SEQ ID NO: 8001 - DNA, 201 bp, Homo sapiens
tcaattatttattttatggaaatggaaaataaaaatctaccattatcttatcttacccaaatactgaatttatctgccactgtggataccaagcactcctragtttcaatagataagtaagtctcagttcctgacttgtcttctattgttgcttaaattgcataaggcatttttaatcttccggttggaaccagcaaggac

SEQ ID NO: 8002 - DNA, 201 bp, Homo sapiens
taaatttttttcttaaggaggaaaggtcttggctacttgtccagccatggatagagtcgccagtcggctgagattggccagtcacttctctgttgcactayaggcagctagctgctagaagctttgcctacacggcagcggctctgggaatcacctccgcctgtataaaatattacgagcagcaggtagcgttggcagttt

SEQ ID NO: 8003 - DNA, 201 bp, Homo sapiens
tacttgtccagccatggatagagtcgccagtcggctgagattggccagtcacttctctgttgcactataggcagctagctgctagaagctttgcctacacrgcagcggctctgggaatcacctccgcctgtataaaatattacgagcagcaggtagcgttggcagttttcattttttgaatcattaatgtttgctgtcatc

SEQ ID NO: 8004 - DNA, 201 bp, Homo sapiens
aaccatgcaaatcacaatcacaggatcagaacaaaccctgcaattgttaaggtacaaatgtaaattttttaatacaggggggatgtaccaaaggattttgrcttgaagcagtaaaacaaataagtttgtaggtattaattcagctgggaccccgaagctgcctcataatgatgaaatagattatgaatgggattccgtaaa

SEQ ID NO: 8005 - DNA, 201 bp, Homo sapiens
tctttctcaaaaagcaattcactttctgcctttctcagactcgtaagcttgaaataattcaggttatattgggactctgcaaaccagagtttagtacttartgtctaaactgtcactgctctaatttcttgtggagttctaagtccaactccatttgcaatctgtacagttttctgccagaaaacatgataatgggatgtt

SEQ ID NO: 8006 - DNA, 201 bp, Homo sapiens; identical to SEQ ID NO: 751

SEQ ID NO: 8007 - DNA, 201 bp, Homo sapiens
cagtggtgtttagtggcctggttggaaaaatgccatttctatttataataagacgaagataaaaatattaaaatggatgtgttcaaatatagtccgttttractctagtccggatttttcccccctctctctctgttcatcagacagagaacttacaaaatcctaaataatcctgctgggctattttagattgcttttccc

SEQ ID NO: 8008 - DNA, 201 bp, Homo sapiens
tcatgcatgcattttctggggccaaatttaaagtccttgtaatatgtgacccagcccggcagcacaggttttaaagttgttttttttttcttttagtaaayttttacaaatcatgacaatgaagaattaaataggcctttggaggaaattttctttagatgagactggctgtatttggtatatatctgtggcaaggtacaa

SEQ ID NO: 8009 - DNA, 201 bp, Homo sapiens
aaggtggcatttggacttcatcagaacacaaacaaccaagctataaattgccacttctggagttactttgaataagtgtatactgtttcatatttataatrgtgaagcttcataatattcacagtgaatatgtaacaccgatcagttcaacaagcatgaaattgtatgttgtcaacctgtcacataaatagagtcatattc

SEQ ID NO: 8010 - DNA, 201 bp, Homo sapiens
gtgtgataagtgctattataaggggtgcatctgtggcactgttggggtggtatattgggggcatccagatctatatatgaaggagaacatcctcagagagrgtataagactgatccaaatcctaaagggagaaaggacaaagattttctccacctgcagcatccaatatggtagcctttagccacacggttaatttgattg

SEQ ID NO: 8011 - DNA, 201 bp, Homo sapiens
aggaaacaggaaacgacataggagacaggaaaccctgtctctactaaaaatacaaaaattagccaggcgtggtggtgcatgcctgtaataccagctactasggaggctgaggcaggagaattgcttgaaccagggaggtggaggttgcaatgagctgagatcgcaccacggaactccagcctgggtgacagagtgagactc

SEQ ID NO: 8012 - DNA, 201 bp, Homo sapiens
aacacttacaaggtaggctggggaccaaaacgagctgttggtgagggcactggaagcaaagaaagcacatgcaaagtctgagaacacaccaacttcttgcytccgtcccatcagcgtcactctgtggaaagagaattcagcacttattacagagcgggggaagaaacctttctttggacacaggttaaacatattctattc

SEQ ID NO: 8013 - DNA, 201 bp, Homo sapiens
aacaaaacaaaacttgtctttgccttttttttttaaataaaagggctgtttaaaaagatgactgtagagtatgtaccacttctcccagatttgctgtgcaraagtgcgtaagtgtgagtgatgtagaggtgcttgtttattatggagcacatttcaatgcagtaatcataaatattgctaaggttgtgctctgttgaaata

SEQ ID NO: 8014 - DNA, 201 bp, Homo sapiens
cgctgtttggaatttgttttagcataatggacttttgtctgactttgattcaatattcagagaattccttagtttagtctttgagttttctggttgttttyccaacttgactgttgtggagagaaaagaaatctaaaagacactcaatattacataattagtttcttttttttttctttagccaaaccaacaactttatct

SEQ ID NO: 8015 - DNA, 201 bp, Homo sapiens
gcaggtcagattgaacaaacaatgtgaagtgctaaaagaaggaaaagaaaatggtccagaagatattgttggcaataaatgcagatcaatgaattatttakcaagtaatcattgattagctatgccatgtgcccagtgttggtactgtttgtccacgtgcatagaatatcacacactgccttgttaacaaggtacatgttt

SEQ ID NO: 8016 - DNA, 201 bp, Homo sapiens
tttatgcatcagaaccaaaatctgtacatttctgcaaatattttttgctgatccatgcatgaaacaggtacaaggttttatctatggagattcaagaaagrgacacacctctgacccactgtatttcttatttgaactcctgaatctattataaaagttgctttcccatgtagttatttgaagtcctggtggggcctagcg

SEQ ID NO: 8017 - DNA, 201 bp, Homo sapiens
agagcaaatcacacccagtaggataaaaaaaggctgtgaaccaacactgggccagccagcaataaatagtgagaatcatttgcaaagcaacctcctctttstgcatggaaggccaactgtgcctcatggcatgtaacttgcatctcccaccttagattttagctgacaataaatgcatgctatgtcattctaactcacttc

SEQ ID NO: 8018 - DNA, 201 bp, Homo sapiens
tggattagctcagtcagttctgaaaacagccctgtactgtaggtcttattaaggttaagtaacttgcagaaggtcacacaccttgtaagtgatgtactcasgaccccaaatcaggaaatctaactttggagtctgtattttgcctcactgcctatttcaaataatatagcaatattatacggcctttaaaaaatcttaagt

SEQ ID NO: 8019 - DNA, 201 bp, Homo sapiens
aagcaattcactttctgcctttctcagactcgtaagcttgaaataattcaggttatattgggactctgcaaaccagagtttagtacttagtgtctaaactrtcactgctctaatttcttgtggagttctaagtccaactccatttgcaatctgtacagttttctgccagaaaacatgataatgggatgttaatttaaaggg

SEQ ID NO: 8020 - DNA, 201 bp, Homo sapiens
tctgtaaaaacaaattatggaaatctttgtttcttcactcagctgagctacttgagcaaggtttttttttttttctgtgataaaacaccaaatctaacttyccttctcctttgtattggagagtctcagagaagaaggaccactcttaggcatctttgatgtaatgaagggaatgggataagtgttcaagatgattaattg

SEQ ID NO: 8021 - DNA, 201 bp, Homo sapiens
gatatgtatacctgagagtacaaagtggcgtgcggcagacactctagggctggggttctcagatgtggcctgtgaagcatctcattaaaaatgtttacccrgtttcccaagtgattcttgggctgctgaaatgtgagacccacgactaaaggagaatctagaaaaaataaaattagtacaaaataataatgcaacaaatgt

SEQ ID NO: 8022 - DNA, 201 bp, Homo sapiens
catgtgctgatttgattttttagaagtagaattagatggcaaaaaataagaaaaccctaacaatacaatctgggcaggttagaatatcaaaaattataacragcctgttctaatgtaaagaacatctctaaaagatgtgaataggttttaaaaatatgatgaatatctagcattggataaacacaaataaaggtatcagtg

SEQ ID NO: 8023 - DNA, 201 bp, Homo sapiens
tgaataggttttaaaaatatgatgaatatctagcattggataaacacaaataaaggtatcagtgaatatcacaatggaagaatcacatgataataattaayaaacattgactcttcttggccaggtgaccaatattatttcacagttgatcgttgagggcagagccaatgacctttgtcctgaattttaataatttactga

SEQ ID NO: 8024 - DNA, 201 bp, Homo sapiens
aacatttattgtctaaataatcaataactgtctgcattatagataaattaacctggaataattaaggtaaatgaaaatgtggattcacaaatacaaccgakttgaacatcagacaaaatcagattttaaccacccttttattatctcttatctctgtgcttaataagtacaattgttgctttaagtttagattagtccaat

SEQ ID NO: 8025 - DNA, 201 bp, Homo sapiens
attaatcccattgaataggaaaattagttccagcttgtactctcacgtctacatctaagttattgaggaaccatgggcaagtcatttgacgtgtcgggggraggggagggtggttatctgccagagatatattaacgtgtgctctgcctaactcccagggtgtttaagcctaaacgagtcaacaggtgcgtgtttttgaaa

SEQ ID NO: 8026 - DNA, 201 bp, Homo sapiens
agtttacctacatgaattttttttattgattcccttcctccaaatagttagctttctagtaccataatgcatccccaaagtatatttttatggacttgagwgcagggatacatgcaatgatttttaactgatttgaaaaaattagcttgaaaattcatacatagaagagctaagggaacaaggacagtccagacttaagtt

SEQ ID NO: 8027 - DNA, 201 bp, Homo sapiens
gtgagacccacgactaaaggagaatctagaaaaaataaaattagtacaaaataataatgcaacaaatgtgcccaagcaacatcctgcaaagcgcttataaytgatttggaaagacaagacataattcacattcgaaaagagataagcaaaaatgtatagtaatatgtgattggtatcaatagagggatcctgacagtaaat

SEQ ID NO: 8028 - DNA, 201 bp, Homo sapiens
gctcatggggaatgtcatgatcaattagtgatgtctaccataggtgcagcaggtgggtggcaagggtagaaatagcatttatattggtggtttgttgatcsttggtctacaggcttaatcagtttgactgcagcagcagaagtgacccaagctttggctcaggccttctggtgtcttctttttctttactctcacaaattt

SEQ ID NO: 8029 - DNA, 201 bp, Homo sapiens
ttattagcagtaaagataaatcctcactatataccaggcactgttctatatgatttgcatggattagctcagtcagttctgaaaacagccctgtactgtasgtcttattaaggttaagtaacttgcagaaggtcacacaccttgtaagtgatgtactcaggaccccaaatcaggaaatctaactttggagtctgtattttg

SEQ ID NO: 8030 - DNA, 201 bp, Homo sapiens
ataagcatagatatacataatacatgaatgtatagcccaagtatgcctctcatcatattttcccctccttctgttcaaaatacaagattgccacagagaarcaattgaaattttgggtgagaagattcttaatccacccttcattattgggaaatgcctcctgtaggaggtaagattcagaaaagcacaaaaggcagtagt

SEQ ID NO: 8031 - DNA, 201 bp, Homo sapiens
tattttgtctcacttattttgaattcaatttagtgcatgaaaatgataatgttattgttattagcagtaaagataaatcctcactatataccaggcactgktctatatgatttgcatggattagctcagtcagttctgaaaacagccctgtactgtaggtcttattaaggttaagtaacttgcagaaggtcacacaccttg

SEQ ID NO: 8032 - DNA, 201 bp, Homo sapiens
ccattggattttgaggtttctcatatggagaatatctcataagtaattgttatttattctccaatttctccatttgttagtgtcattggctttgctccctrgtaccctgatttctttccattgatatcagattgttttcatctattcaatttgttcatttgggaagagcagttgactcagagacatactgtatgtcagaac

SEQ ID NO: 8033 - DNA, 201 bp, Homo sapiens
ttcatgtcttatctcttcctcagatttgttttcaacaaatccatattttgtctcacttattttgaattcaatttagtgcatgaaaatgataatgttattgktattagcagtaaagataaatcctcactatataccaggcactgttctatatgatttgcatggattagctcagtcagttctgaaaacagccctgtactgtag

SEQ ID NO: 8034 - DNA, 201 bp, Homo sapiens
cctgtagaagctttacattctcccaggatttctcaatctgcctgtttcttatttgtcctgtctctcccatgggatgagaagctatttaagggtctgggctrtggttgtcactaacccagtatcattacttaactcagtgtctgaaatatagtcggtgcttattaagcatatattaaatgcatgcagaatatggaattaaat

SEQ ID NO: 8035 - DNA, 201 bp, Homo sapiens
tattaacaatatacaatataattatgtgataatatataatatattatatgattatattatgtgattattatattattatattatatattatgattattatwatatattaatatagaatatataataaatatattctatattatatataatatatataatatattatatattattatatgataaataatatagattgtcata

SEQ ID NO: 8036 - DNA, 201 bp, Homo sapiens
ctaccatgagaacagtatcggggagtgcgcccccacgattcagttatgtcccactgggttcctcctacacacgtgggaattataggagctacaattcaagrtgagatttggatggagacacagccaaatcatatcagtgggtgaggatatcacttaggctggtaaagtatttcaacctagtttatattggaaacaggcctt

SEQ ID NO: 8037 - DNA, 201 bp, Homo sapiens
tttctctttctgtatgtatgtgtgtgtgtgtgtatataatatatatcatatattataataatatatatcatatattataataatatatatcatatattatwaataatatatatcatatatttattataatatatatcatatattatgatatatcatatattataataatatatatcatatattatgatagatcatatatta

SEQ ID NO: 8038 - DNA, 201 bp, Homo sapiens
tacaattcaagatgagatttggatggagacacagccaaatcatatcagtgggtgaggatatcacttaggctggtaaagtatttcaacctagtttatattgraaacaggcctttctttcccttccttcccctttttttctttatagcttctcattcatccatctgggatttacccggtgtctaccatattccaagcatcgta

SEQ ID NO: 8039 - DNA, 201 bp, Homo sapiens
attgaatagagtgaccctttgatactctatgaaatcgactgcatttcctaagattctgtggtttcaattaccataaatttttgatattgggtccatagccrttgcattgtcccagcataacaatatcttatcatcttatcattggttctgataatacagtctgcatcagcacaacatattgttactaatattgtatgtgtg

SEQ ID NO: 8040 - DNA, 201 bp, Homo sapiens
ggggaaggggagggtggttatctgccagagatatattaacgtgtgctctgcctaactcccagggtgtttaagcctaaacgagtcaacaggtgcgtgttttkgaaagctcactactccccatcctcttcctatatatccatatatatccaataaaatctgactattgttttctaaagtatattgattggaagagttgttatc

SEQ ID NO: 8041 - DNA, 201 bp, Homo sapiens
agaaaactattttatagtgaagataccaaaatgtggaggtagaaaaatgggggagggtggatttttaaaacgacaatcagaggagagtgactccagtgctsatgggaggtaggcaggaaagagaatgagtgatgtggccttgatggggagcaagtacaatgaagactgccatgaaaattctatgtcagggctgtaggggtg

SEQ ID NO: 8042 - DNA, 201 bp, Homo sapiens
cttaatattcttggtgagagtataaaggataagggtttatttcaggtacagcaaagaattttctacagaaatccctcctcattatcaccactgaaaattcmcagtgcctaagtgcttatcaggttcaaatatgatggaaacctgtcccatctccaaatttgagattcctcttgtacacatctaggacatttgagtacctcc

SEQ ID NO: 8043 - DNA, 201 bp, Homo sapiens
ttatctgtatgcatatgcagataaatgtatatttatctatttagtacataaaatctatttagtacgtgcgtgtgtgtgtgtgtcacacacacacacgcacrtactaaatagattttatgaaacttcatccctggctttatttgccaaaggcgagtcctccatcttgtggtttctgcatctctttggcatttgtcactatgc

SEQ ID NO: 8044 - DNA, 201 bp, Homo sapiens
ttttatcagatagttttctaaatgtctcataatcctatcaagtttctgtctatccttctgggtaggagatataaggcagttgttattgtcttaatattctkggtgagagtataaaggataagggtttatttcaggtacagcaaagaattttctacagaaatccctcctcattatcaccactgaaaattcacagtgcctaag

SEQ ID NO: 8045 - DNA, 201 bp, Homo sapiens
ctccagaaattaaatcgttgttttatcagatagttttctaaatgtctcataatcctatcaagtttctgtctatccttctgggtaggagatataaggcagtkgttattgtcttaatattcttggtgagagtataaaggataagggtttatttcaggtacagcaaagaattttctacagaaatccctcctcattatcaccact

SEQ ID NO: 8046 - DNA, 201 bp, Homo sapiens
aagcaagatgagagaaaagagaatgctcttttggcagaaggcatttaaatctattgcatatggagattttcagagtgctacacttttttgtttctgaaatrggaatggcaaagcaatgtcagctcaacaaggtgacggtttaaaccacagacacgaaggaatttgggtagggaccaaagtgaccccaaaattttatgtata

SEQ ID NO: 8047 - DNA, 201 bp, Homo sapiens
taaacaaacttgaaagtaagttgcagattttgcagtagattctgcaaaatgttataaactccaaaaaaaaaaaaaaaaaaaaaaaaaaagatgccattggkgaatagcacatcacaagaaacagagccagggactcaccatttatcagagtcattcaattaaacaaacaaacccaaaagaaaactcctccaagaaaatcgt

SEQ ID NO: 8048 - DNA, 201 bp, Homo sapiens
acttgagcaaggtttttttttttttctgtgataaaacaccaaatctaactttccttctcctttgtattggagagtctcagagaagaaggaccactcttagkcatctttgatgtaatgaagggaatgggataagtgttcaagatgattaattgattagtaactgattgattttatagcagatattcattgatagtctgttat

SEQ ID NO: 8049 - DNA, 201 bp, Homo sapiens
ttttggagggtttgctgccatttaactttgaatctacctaagactgactcaaaggcattttgcaaattacaacaatttgcctcatttttctcaacttccaratgagcagtgatattaagatttgccaaagtgtcattagttaacacttacgaagactaatgaaaattaaaattcaatttttctaatatcactgtatttaat

SEQ ID NO: 8050 - DNA, 201 bp, Homo sapiens
atctgggcaggttagaatatcaaaaattataacgagcctgttctaatgtaaagaacatctctaaaagatgtgaataggttttaaaaatatgatgaatatcyagcattggataaacacaaataaaggtatcagtgaatatcacaatggaagaatcacatgataataattaataaacattgactcttcttggccaggtgacca

SEQ ID NO: 8051 - DNA, 201 bp, Homo sapiens; identical to SEQ ID NO: 728

SEQ ID NO: 8052 - DNA, 201 bp, Homo sapiens
aaaggggcacagatatactgtcagtgcccacacttgggtataaaagaagcaaaaacaaaacccacagtggattgcagagattttagaggagaaagataacraagagggaaaaaaaatcaattgtttgaatgtgggtattcaaaatacttaacaacctataagcaaaggctcagagcactttaagtagacacatgcagtgaa

SEQ ID NO: 8053 - DNA, 201 bp, Homo sapiens
tttttttttgagatggagtctcgctctctcgcccatgctgaagtgcagtggcacaatctcagctcactgcaacctctgcctcccgggttcaagcaattctstgcgtcagcctcctgagtagctgggattgcaggtgcccaccaccacacctggccaatttttgtatttttagtagagatggggtttcaccatcttgcccag

SEQ ID NO: 8054 - DNA, 201 bp, Homo sapiens
agtggggcaatctcggctcactgcaagctctgcctcccgggttcatgccattctcctgcctcagcctcccgagtagctgggagtacaggcgcccgctaccmcgcccggctaaattttttgtattttcagtagagatggggtttcaccgtgttagccaggatggtcttgatctcctgacctcgtgatctgcccgcctcggcc

SEQ ID NO: 8055 - DNA, 201 bp, Homo sapiens
aggaacagtaacagagaacttcccagaattaaggaagcacatagaaacctcagattcagaaggttctgagctgtatgagatgcgtcttgggtcccacatcrtatccacacaggagcccaccttttactccagccatcgcaactccctgcaaggacatcttgacagcccacatccactaagctgccctcagcacctcttgtg

SEQ ID NO: 8056 - DNA, 201 bp, Homo sapiens
caatatcacatgaacaagaattcaagtcctctttggtctgactacaaatgatgctctttcactataccggtttcattaagctctatacaaggttctgaaaagacattcattctctgtgttacaaacatttgatttgttaagtattagtgggatactacctcccctcacgcgtctgttttttttaaggctacttcataaaca

SEQ ID NO: 8057 - DNA, 201 bp, Homo sapiens
gtgtgtatacacatgtatgtatatatatgtgtgcatacacatgcatgtatatatgtgtgtgtatacacatgtatgtatatatgtgtgtatacacatgtatrtatgtgtgtgtacacacatgtatgtatatacgtgtgtgtatacacatgtatgtatatatgtgtgtgtatacaatacacacatatttgaaaaagtctaaaa

SEQ ID NO: 8058 - DNA, 201 bp, Homo sapiens
acacacgcacaccgtttatatatgtatacacacacaaacacagtttatatagtgtatatgtatatatgtgtgtatacacatgtatgtatatatatgtgtgyatacacatgcatgtatatatgtgtgtgtatacacatgtatgtatatatgtgtgtatacacatgtatgtatgtgtgtgtacacacatgtatgtatatacgt

SEQ ID NO: 8059 - DNA, 201 bp, Homo sapiens
tgcatacacatgcatgtatatatgtgtgtgtatacacatgtatgtatatatgtgtgtatacacatgtatgtatgtgtgtgtacacacatgtatgtatataygtgtgtgtatacacatgtatgtatatatgtgtgtgtatacaatacacacatatttgaaaaagtctaaaacagtgcatgtgtatatatatgtgtgtgtgtg

SEQ ID NO: 8060 - DNA, 201 bp, Homo sapiens
aatacacacacacgcacaccgtttatatatgtatacacacacaaacacagtttatatagtgtatatgtatatatgtgtgtatacacatgtatgtatatatrtgtgtgcatacacatgcatgtatatatgtgtgtgtatacacatgtatgtatatatgtgtgtatacacatgtatgtatgtgtgtgtacacacatgtatgta

SEQ ID NO: 8061 - DNA, 201 bp, Homo sapiens
ctgaagggtttttgacgcttagttgccatgctttggaccttgtgaccctgcactcttgccctgactggccagaccaactgtctgactcaaacattaatatmtgcagactcaccggagtcacaagagtgctctatgctggatggtggttgcccggccccattatcccctcctgtcttggttagattgagtggttagaaagta

SEQ ID NO: 8062 - DNA, 201 bp, Homo sapiens
acttcttgttatagtaaaaaatagacccctattaatgtaagcccctgcaaattgggctgccaattattcacaggtaaacataattctggctaatatgtatsttgacccgagccacagcgtctgaataaaggaagtttgagtcctgctgctgaaattcaggacaactccagatcacccaattttatggagaggtaatgctct

SEQ ID NO: 8063 - DNA, 201 bp, Homo sapiens; identical to SEQ ID NO: 758

SEQ ID NO: 8064 - DNA, 201 bp, Homo sapiens
atgtaaactaaattgtggccaaactattaatacacacacacgcacaccgtttatatatgtatacacacacaaacacagtttatatagtgtatatgtatatrtgtgtgtatacacatgtatgtatatatatgtgtgcatacacatgcatgtatatatgtgtgtgtatacacatgtatgtatatatgtgtgtatacacatgta

SEQ ID NO: 8065 - DNA, 201 bp, Homo sapiens
ggcattcaacaaatggtggaatggctgggtgaataagtggtctccaaagtgcctgcctggcgagtacataactctcttttgacagatatctgtccatttcmaaatctcaccctgaagggtttttgacgcttagttgccatgctttggaccttgtgaccctgcactcttgccctgactggccagaccaactgtctgactcaa

SEQ ID NO: 8066 - DNA, 201 bp, Homo sapiens
aagccttacagaaggtactttagcaatgattgtagaaatttaaaatatagatgccctttaatgaaaaaaagagatttctagaaatttgccctaaaaaaaaattgggcaaactcttaaaaaaaaggataaaaatctatattgacattggcgtagcccaagtctgcaaaccaaaatacaaacagtgaattcttctggtggcaa

SEQ ID NO: 8067 - DNA, 201 bp, Homo sapiens
cagcccccgtgccttttgtatcttaggttcttagcataggttagtgaaacacatacaaaatatgattttacctttctccctcatcttaaagaaaaatggcyggcctatcttgcatcttgtttacatcttaaattttggaactcaatgttatgagcaagagaaaatctcagcttgtgcctcaagatggctcctctgatctca

SEQ ID NO: 8068 - DNA, 201 bp, Homo sapiens
aaaaatagccactaggaatggtagaacatgtaactgttgaaaaatctgtataaatataatatgtaaactaaattgtggccaaactattaatacacacacaygcacaccgtttatatatgtatacacacacaaacacagtttatatagtgtatatgtatatatgtgtgtatacacatgtatgtatatatatgtgtgcataca

SEQ ID NO: 8069 - DNA, 201 bp, Homo sapiens
gatcagtgcttgacaagtggaactgctaaaccaacatcagcaactctctaaggccagacttcttgttatagtaaaaaatagacccctattaatgtaagccmctgcaaattgggctgccaattattcacaggtaaacataattctggctaatatgtatcttgacccgagccacagcgtctgaataaaggaagtttgagtcct

SEQ ID NO: 8070 - DNA, 201 bp, Homo sapiens
tatggatatataactatcaaagcctggaatacaagggtccgctgtagttgattattcaattcttacagaaaaaaagctcacaccgagtgccaaaattacaygagtcgacaaaattacatgagtcagaacagtaatcaaccagttacacctccggtcactgtgtgttttgtacttcccagttccctctgtcattgtttgttt

SEQ ID NO: 8071 - DNA, 201 bp, Homo sapiens
ctggaagttttgatggcaatgggttgcttaggatctttaaaaaattctccattgccagtccttaaattagagataaatatgtatttgatagaaacaatttmtatttagagtggttaatccatgactggggtatcactgcatagttttaatacattcagggccaggtatgatggctcacattataatcccagcactttggga

SEQ ID NO: 8072 - DNA, 201 bp, Homo sapiens
tctccagttaaccaaagtggtagctggaagatcaaatatcctttgaccaatgtaatagtatatcttaactcgcagaaacaatagagctttacagaaaactstatcagttgagaactttgtttcttaccctctatttaacacactgaataggactgagtctgccaggcattctctcagaagctcattaggtctgtgtcggaa

SEQ ID NO: 8073 - DNA, 201 bp, Homo sapiens
tttttgtccttcttggtttgtataacactactgatgttactgtctaacctctcagcttctacagaatttgtcaggcctgtttattttctttcccttcttgkttctcactgcagctctcatgaattactttcctaagggagagttttcagagttattttcaattactacacgagaagaagcctaataatgtagaatcgtttt

SEQ ID NO: 8074 - DNA, 201 bp, Homo sapiens
tagaaatttgccctaaaaaaaaattgggcaaactcttaaaaaaaaggataaaaatctatattgacattggcgtagcccaagtctgcaaaccaaaatacaarcagtgaattcttctggtggcaagaattccttcaatatataatatcttttacactacttacaaatttttgtgagaagaaaaccattttatgtctatttatt

SEQ ID NO: 8075 - DNA, 201 bp, Homo sapiens
ccgctgtagttgattattcaattcttacagaaaaaaagctcacaccgagtgccaaaattacatgagtcgacaaaattacatgagtcagaacagtaatcaaycagttacacctccggtcactgtgtgttttgtacttcccagttccctctgtcattgtttgttttttaataaactacattaagtgtggtgggaatgaaaggg

SEQ ID NO: 8076 - DNA, 201 bp, Homo sapiens
ctctggcagctggcccccggcaggatgtgatggaacatagctcacaggatcagagacaatcgattcagttcagcagagagtgatttatagcaaggagtttytaaacaagcttagacttcaccgcaaactggtgggatggtctgaattttcattgttggtggagctcattagagggaagaaagaggaaggagcagttgtggc

SEQ ID NO: 8077 - DNA, 201 bp, Homo sapiens
tcattagagggaagaaagaggaaggagcagttgtggcagctgtcaggaaacctgagcaaatggcagagtatggcgcaggctcttggagtagaccccagaamcagaaaacaactccgtttgctgatattaggtccaaaccaggaagggcctggtccccagtgaccaagggtccagtcagagcctcctggtatgtaatcatgg

SEQ ID NO: 8078 - DNA, 201 bp, Homo sapiens
atcaaggagatgaatgccctcaggagaacaggagctctgagggaaaaacactgagactgccaaggagaataaagagaaagactcctggtggaaagctatcygagatgcaacatagttgatgggccaggaagattaaaataagcatatcaaatattataaaagagttgagggaagatagacatgaaacagcaataagaagtt

SEQ ID NO: 8079 - DNA, 201 bp, Homo sapiens
aatttatatagaagattattagggaaccagtaatttcactgtgtgttatactttatgaagtctcttatagtaatttttgcatagttgactttttttttttwaaaggaagaggcaaatgacattgcattttattccactataaatctcaggagcaaagccttaattcatgtgactatttgggatggttctagacacgtaggt

SEQ ID NO: 8080 - DNA, 201 bp, Homo sapiens
ggtgggtgggaaagcctgaggttgcacgtagaagagagcatgtgcttttggtctgaatttcaaagctgaacttttgattggactcgtcttcctttttttcytttttcttttttttttgcctggtgactggtagtgtctttactaaacaaagtacttttcttggctaacaagatatatgctgagcagaaaaggtagagctga

SEQ ID NO: 8081 - DNA, 201 bp, Homo sapiens
ccaccataccacaggcttaggcatcatcccatgtttattacatagtacagatctcagtagatcactgtgctttggaaaagtgtctaatttattctttcacrcttgccaaaatatagctgcattgggaaacttaaaatagcccagtatttaattggttctaggcatgcacataaacaggtattgttaaagaaaccaagttat

SEQ ID NO: 8082 - DNA, 201 bp, Homo sapiens
gtgtgtatacacatgtatgtatatatgtgtgtatacacatgtatgtatgtgtgtgtacacacatgtatgtatatacgtgtgtgtatacacatgtatgtatrtatgtgtgtgtatacaatacacacatatttgaaaaagtctaaaacagtgcatgtgtatatatatgtgtgtgtgtgtgatatacacacacatgcactgttt

SEQ ID NO: 8083 - DNA, 201 bp, Homo sapiens
atctagttggtccagggtggggtctaggcatcggtattttttttttaatcccccaaatgaatttaatgggcagccaggcttgagaaccactgctccagggsctgaaaacataggatccaagtcagagcaccaggagattgattaattggttagaatgacttgaagtgaccaccagaaacatcacatttggagctcagttaa

SEQ ID NO: 8084 - DNA, 201 bp, Homo sapiens
cagttgtggcagctgtcaggaaacctgagcaaatggcagagtatggcgcaggctcttggagtagaccccagaaccagaaaacaactccgtttgctgatatyaggtccaaaccaggaagggcctggtccccagtgaccaagggtccagtcagagcctcctggtatgtaatcatggacagcttccaggatctgcttccaggat

SEQ ID NO: 8085 - DNA, 201 bp, Homo sapiens
tgtatgtatatatatgtgtgcatacacatgcatgtatatatgtgtgtgtatacacatgtatgtatatatgtgtgtatacacatgtatgtatgtgtgtgtayacacatgtatgtatatacgtgtgtgtatacacatgtatgtatatatgtgtgtgtatacaatacacacatatttgaaaaagtctaaaacagtgcatgtgta

SEQ ID NO: 8086 - DNA, 201 bp, Homo sapiens
accgtttatatatgtatacacacacaaacacagtttatatagtgtatatgtatatatgtgtgtatacacatgtatgtatatatatgtgtgcatacacatgyatgtatatatgtgtgtgtatacacatgtatgtatatatgtgtgtatacacatgtatgtatgtgtgtgtacacacatgtatgtatatacgtgtgtgtatac

SEQ ID NO: 8087 - DNA, 201 bp, Homo sapiens
atacacatgtatgtatatatatgtgtgcatacacatgcatgtatatatgtgtgtgtatacacatgtatgtatatatgtgtgtatacacatgtatgtatgtrtgtgtacacacatgtatgtatatacgtgtgtgtatacacatgtatgtatatatgtgtgtgtatacaatacacacatatttgaaaaagtctaaaacagtgc

SEQ ID NO: 8088 - DNA, 201 bp, Homo sapiens
gtatacacatgtatgtatatatatgtgtgcatacacatgcatgtatatatgtgtgtgtatacacatgtatgtatatatgtgtgtatacacatgtatgtatrtgtgtgtacacacatgtatgtatatacgtgtgtgtatacacatgtatgtatatatgtgtgtgtatacaatacacacatatttgaaaaagtctaaaacagt

SEQ ID NO: 8089 - DNA, 201 bp, Homo sapiens
ttcttctggtggcaagaattccttcaatatataatatcttttacactacttacaaatttttgtgagaagaaaaccattttatgtctatttatttttggggrctactggtagaggtgatagcatgggtggtagcagctacagagactgggtagaacaaacatgctagccgctggtccgcagatgcaccaagcccagtgtgtc

SEQ ID NO: 8090 - DNA, 201 bp, Homo sapiens
agaaaagacagtttgtggggaggaagaagagaaatatctaatgaggctttctaaagaggtcttgatacatgttacatgatgtagtaattcctcttctagcygcttcaagaaacttcaatgaacgcttacattatgtattgcaagaattttggatatggattcatgtttctttgggaagtgatgtcatactgatgtaggtca

SEQ ID NO: 8091 - DNA, 201 bp, Homo sapiens
agagtgattcatagaagttagggtatagaaaaatccaaacaaatgaaaaaccaaaatagcagcagcaacaacaacagcagcagcaataacaacaaacagcyctggatatcagagatggattaagagaaaagacagtttgtggggaggaagaagagaaatatctaatgaggctttctaaagaggtcttgatacatgttacat

SEQ ID NO: 8092 - DNA, 201 bp, Homo sapiens
gcctgctgaacacgggcaaatcccactgtgccttcatacctggcaatatttctgcatggcttcatctaattaatggaactttgctcagagttcacgtatgsagtcttttgtattccctgcttctctgggttccctagatctgaacacatttctcttttggcagttgtcacactgggtgatatttgttgatttacctgttaa

SEQ ID NO: 8093 - DNA, 201 bp, Homo sapiens
gaccaaccatgctggaggaaaaatgacttatatttctattctctctacataatgtattataacattgttgcatgaaatgatactcagaaagaatgtatcaraaatatagggaaaagttagtagagagctatgccaggcagtacatcaataaatattatgttattattctagattttgcaatgtttgtggtatatgtcatgt

SEQ ID NO: 8094 - DNA, 201 bp, Homo sapiens
taacatttgattactcttctgcaagtctactaaggagcatatcaacagtcttaaagtactttatgatataaagtttacaatataaagatttttagatgaasaaaaaactgctgtatgttttctcagaaaaataaatcctgagatacttttaattataacttagatcaagaatatttaagtggtctattaaaatgttgataa

SEQ ID NO: 8095 - DNA, 201 bp, Homo sapiens
acaagaaacatccccaacaaaacataatgaacacatttaagcagctgtgcctaacatagaacaagctgtacttttctgaattttgaaaaataggtctttcytgaagttattaaatggtaataaaatgtcattgataaaattatacattcataattaactggacacattttcatctgtataacatttgattactcttctgca

SEQ ID NO: 8096 - DNA, 201 bp, Homo sapiens
tcttgtttctcactgcagctctcatgaattactttcctaagggagagttttcagagttattttcaattactacacgagaagaagcctaataatgtagaatmgttttttccagattatgtttcacgattaataccatgagatatttctggatataaaagggatttatactcaagtatgtttgggaaatgctgcagactatct

SEQ ID NO: 8097 - DNA, 201 bp, Homo sapiens
ctttgtgtcttccaaattctctgtatgccttaatcaagcgttgttagtctggtaatgtaactatgctctatttgttatgtctagagatgttcaaattcagkcactgttatatcatttttgcagattgtttggccgattgttaaactggccatgttacgtgttccatgtatgagattttatgagatttttctgggtgttgtg

SEQ ID NO: 8098 - DNA, 201 bp, Homo sapiens
gaagaagagaaatatctaatgaggctttctaaagaggtcttgatacatgttacatgatgtagtaattcctcttctagccgcttcaagaaacttcaatgaaygcttacattatgtattgcaagaattttggatatggattcatgtttctttgggaagtgatgtcatactgatgtaggtcatgaagtctcagtctcatgaaga

SEQ ID NO: 8099 - DNA, 201 bp, Homo sapiens
actgtatcagttgagaactttgtttcttaccctctatttaacacactgaataggactgagtctgccaggcattctctcagaagctcattaggtctgtgtcrgaattttggatgagtcaccaccagtggcattgttaggtagcgagcatttccccagtgggatcctttccagtcactgacagcaggaattctcagagacatg

SEQ ID NO: 8100 - DNA, 201 bp, Homo sapiens
attgtttaactaaacaggtggaccaaccaaggtctcttctttggaattgtaaaaacgggacctactgaacaagagccagctctttaagtggtgggacctawaaaatgcaaacttgtgagcagctggtagccatatttccagccccttggactgcaggaacagagtaagattggcagcaaagacagggaggcagagggcaga

SEQ ID NO: 8101 - DNA, 201 bp, Homo sapiens
ctctacagccacagcgattgtttaactaaacaggtggaccaaccaaggtctcttctttggaattgtaaaaacgggacctactgaacaagagccagctcttwaagtggtgggacctataaaatgcaaacttgtgagcagctggtagccatatttccagccccttggactgcaggaacagagtaagattggcagcaaagacag

SEQ ID NO: 8102 - DNA, 201 bp, Homo sapiens
acaagatatatgctgagcagaaaaggtagagctgagaggtctctcttcctccccttaatcagaacagatccagcagagagaagctggagcccatgatattygaaagaatccaagaaactttagctgtgttggaaaaaagcttagtaggagagatgagagtttagaagaatggagagggaaaatctgatgaaagagatgaaa

SEQ ID NO: 8103 - DNA, 201 bp, Homo sapiens
atggagtataaatagtatacttaaactaccaaaaaatctaattactattagtagtacatttataacaacacaagcatggtatgggttgctttggtcataaytgaaagttgggtattctgtttttttttttttttccttttcaatttttatttcaggttcacaaggtacattacatgtgcaggttggttacaagggtaaatt

SEQ ID NO: 8104 - DNA, 201 bp, Homo sapiens
aggttagatcatttgacccaatatcacatgaacaagaattcaagtcctctttggtctgactacaaatgatgctctttcactataccggtttcattaagctstatacaaggttctgaaaagacattcattctctgtgttacaaacatttgatttgttaagtattagtgggatactacctcccctcacgcgtctgtttttttt

SEQ ID NO: 8105 - DNA, 201 bp, Homo sapiens
aatgtgaactgagcccacctgtctagggttttctccaaaggtgaagacaaatagccgccaccaattccaatttgctttttgccattcctaatacttggcayttaggtaatctccctctcctactcttcatttaaatgtttacattctcccaaagtacctcaaatggtgtaatctggagaaaaataagtggcttaagatcac

SEQ ID NO: 8106 - DNA, 201 bp, Homo sapiens
gccgcgctgtggccctgcggggtcgaggagtctggtagcggacaggtttccagccttgtacaagccaccggcagcccgagagaagtcagtcggactcccaycgaacccggggcgcacgccagagggccggacgcagcgagtccttctgccccgcttcagcacgtgtcccatttcggttatctcattggctctattcagccc

SEQ ID NO: 8107 - DNA, 201 bp, Homo sapiens
ccagtgactattagcacacctatgtgccagatgccttacatatctaacctcatgcaagtcccaccaccaccctgccctttgttgattcaatagatacttgscaaaggcctgctctgtgcaagacggtggggccagtaagtatagcccctgccctcaaggagcttaagccccattttctgctgaaatggggagcagaggtgg

SEQ ID NO: 8108 - DNA, 201 bp, Homo sapiens
acctgcacgagtacatggagatgtgcagcatgaagcgaggcctggacgtgcagatggagacctgccgccggctcatcaaaggctccgcagacaggtacccrcccatcctcccaggggattcagctatggcatccttggaggggaattcccaaggctgcaactcggccatgtgtcatgctcccaacctgtctctctgtccgt

SEQ ID NO: 8109 - DNA, 201 bp, Homo sapiens
tgccttgcctggaggcagaaggagggggctctgggtttgactgggattgtggtccccaggggtccgtggcctttaaggctcttctctcttttctgtttccsccacctgtgttacagtcttaaaaatactgtacataaaagatatatgtagagagagagagagagcgtgagaatgtgttagtgactatgtgtgatgtaattt

SEQ ID NO: 8110 - DNA, 201 bp, Homo sapiens
tggcatttcccaccattccttagacattctctgctcttgaactcctccaaccagtggctggggcagtgcctttggcctggaatgtcctgctggccacctcrgtgagcccatccagtgctttgtggccttggcaaggcagcttctgtcccttcagtatcctcgtctgcaaaatggggatgattgtattaacagccacgtagc

SEQ ID NO: 8111 - DNA, 201 bp, Homo sapiens
tgatccgtttccccccgaggatcgaggtggtgcgctctggacggggttgtgcattctcgccgcgcccgggcggacgatccagcgaacagccccgcttctarcccgagatgctgctgccggcgcccgcgctccgccgcgccctgctgtcccgcccctggaccggggccgggtgagtgagcacggggcccggggcggcccgag

SEQ ID NO: 8112 - DNA, 201 bp, Homo sapiens
tctgagttaatcagtggccctctcccttcccccaagggatggcatggtggtgctctgagcacaagtgagttgcaacactgctgtgtgtcctctgtgggtgragaggggataggaaagggcgcaggaagaggacatgggacagaggggttcctcttctaggctgagactggggccacacttgccatactccctgtgtgatcc

SEQ ID NO: 8113 - DNA, 201 bp, Homo sapiens
ttgatgtccggaggcagggtcctgatggcatggtgtccaatggtggccttgatggcaccatccctgaggaatccaggaggagaggttgccgaggcttctgycacgaggatgacttgccctcacccttattcctcattggttcctcccagctcgagctggccacagccaaaagtgacatgaaccgacacctgcacgagtaca

SEQ ID NO: 8114 - DNA, 201 bp, Homo sapiens; identical to SEQ ID NO: 763

SEQ ID NO: 8115 - DNA, 201 bp, Homo sapiens
ggagctaggtttggagaggtaggtgggacacagaccctgccccagaggggttcctagtctggtggggctgcccacctgtggatcagccccccctcccattkgaggtttgtttgcttgacccctggggctgttagtggcagtgtctttcctgatgagctgtgccctttctgagttaatcagtggccctctcccttcccccaa

SEQ ID NO: 8116 - DNA, 201 bp, Homo sapiens; identical to SEQ ID NO: 760

SEQ ID NO: 8117 - DNA, 201 bp, Homo sapiens
agagaaaggtggaaggaagggaaggaggacacattttaattttttggggggatcgagtggcaaagttgaagggacaaggcactgtgaggggaaggcagagsctcactgtgtttaaactactatgcaaaaaacaaaacaaacaacaaaagcagcttgccttatatcattgtggaaggcaggacctctcctgggctcctggct

SEQ ID NO: 8118 - DNA, 201 bp, Homo sapiens
gtgacatgaaccgacacctgcacgagtacatggagatgtgcagcatgaagcgaggcctggacgtgcagatggagacctgccgccggctcatcaaaggctcygcagacaggtacccgcccatcctcccaggggattcagctatggcatccttggaggggaattcccaaggctgcaactcggccatgtgtcatgctcccaacc

SEQ ID NO: 8119 - DNA, 201 bp, Homo sapiens
cccagaggggttcctagtctggtggggctgcccacctgtggatcagccccccctcccatttgaggtttgtttgcttgacccctggggctgttagtggcagkgtctttcctgatgagctgtgccctttctgagttaatcagtggccctctcccttcccccaagggatggcatggtggtgctctgagcacaagtgagttgcaa

SEQ ID NO: 8120 - DNA, 201 bp, Homo sapiens
ttgggtccctgagacctcgtcatcagagaagacttcagaatccaagttttaaatagcattctagtgtttaccaagcacacaacattttgcaaagaaagctraaatttttacttgggggtaaaaggctcaggaacaactggttttgcggccaaaggctttaaatgaaaagctaagcgttggccagctcaggttttatcttgc

SEQ ID NO: 8121 - DNA, 201 bp, Homo sapiens
actaccgtgtcccctgcagtgatcctgggtggttttggactcttctcaggctacctgatggtttaattttcaaaatatcaaaagcacacaatgcttttccyagtctgcccagcccttggatgggcacagcttgccctgggtcgagggctggcatttcccaccattccttagacattctctgctcttgaactcctccaacca

SEQ ID NO: 8122 - DNA, 201 bp, Homo sapiens
ggtccctgagacctcgtcatcagagaagacttcagaatccaagttttaaatagcattctagtgtttaccaagcacacaacattttgcaaagaaagctgaawtttttacttgggggtaaaaggctcaggaacaactggttttgcggccaaaggctttaaatgaaaagctaagcgttggccagctcaggttttatcttgcatt

SEQ ID NO: 8123 - DNA, 201 bp, Homo sapiens
tctggtagcggacaggtttccagccttgtacaagccaccggcagcccgagagaagtcagtcggactcccatcgaacccggggcgcacgccagagggccggrcgcagcgagtccttctgccccgcttcagcacgtgtcccatttcggttatctcattggctctattcagcccctctctgctccgctttggaaggctgccgca

SEQ ID NO: 8124 - DNA, 201 bp, Homo sapiens
gctaggtttggagaggtaggtgggacacagaccctgccccagaggggttcctagtctggtggggctgcccacctgtggatcagccccccctcccatttgargtttgtttgcttgacccctggggctgttagtggcagtgtctttcctgatgagctgtgccctttctgagttaatcagtggccctctcccttcccccaaggg

SEQ ID NO: 8125 - DNA, 201 bp, Homo sapiens
gttagtggcagtgtctttcctgatgagctgtgccctttctgagttaatcagtggccctctcccttcccccaagggatggcatggtggtgctctgagcacawgtgagttgcaacactgctgtgtgtcctctgtgggtgaagaggggataggaaagggcgcaggaagaggacatgggacagaggggttcctcttctaggctga

SEQ ID NO: 8126 - DNA, 201 bp, Homo sapiens
gagcctgagagtcactgggcgtcccccgcgccgcactccctccctgccggacccccaagctgcctcggtcaacgccgggttcctcaggggctcccctccgwcccccacccaggcctttctcccactgagatcccttagcctcctccctcaggtagtcaccttcctttagcgaggggacccctcttcccgaatcctgcgacc

SEQ ID NO: 8127 - DNA, 201 bp, Homo sapiens
caaggagtaccaggaaacgataggtcagatcgaggtgagggctcgggacgtggagcccactcgtgaggctctcctgaggtccacatggttgagatcctggygatcaaacacccatgtgtcatgggcaggggctggtagagtggggcaggcgcaggatcgggagtcaggaggcctcggggcgagtaatgtctttcttagggc

SEQ ID NO: 8128 - DNA, 201 bp, Homo sapiens
gatctgtgtgcagggccgtagccttgcctttcagacctttaactcctcaaacccccagaacccagtgtggttatctccattatccagacagaagagcagaygctcaggcaggttaaacggtttgcccaagttcccccacccccagctcatccgagatagaatcagaactgcaccccagtgatgttaaccatatcccgcatg

SEQ ID NO: 8129 - DNA, 201 bp, Homo sapiens
ctgtgggtgaagaggggataggaaagggcgcaggaagaggacatgggacagaggggttcctcttctaggctgagactggggccacacttgccatactccckgtgtgatcccgtttgcaggccttccctgcactctgagactcaggaagatggagcttatagagtcctgtgtttactgagtgcctactgtgagctggtgctc

SEQ ID NO: 8130 - DNA, 201 bp, Homo sapiens
atacaaacagaggattggggagggataggaagactagcatccttttggctccctggttggttgtgaaatacacacacacacacacacacacacacacacactcgcactcctctgagactccgaacagagaaaaaaattattggcaaatcaacacatttttctttctcgtcttgagaaaatgtcttgaggtccctgaagggc

SEQ ID NO: 8131 - DNA, 201 bp, Homo sapiens
tatacaaacagaggattggggagggataggaagactagcatccttttggctccctggttggttgtgaaatacacacacacacacacacacacacacacacactcgcactcctctgagactccgaacagagaaaaaaattattggcaaatcaacacatttttctttctcgtcttgagaaaatgtcttgaggtccctgaaggg

SEQ ID NO: 8132 - DNA, 201 bp, Homo sapiens
gacacacgcaagccgctctcagcagttccctcgactggccagtcggggtattgatctgagccagcatcccccaagacttgaatggcttgagtgggactgcrttgaagggcactgtgtggcccccttccaaatctcagcttggagccagctgagcaggctttgctttattattattttttaagcctactgcagtgggtctgt

SEQ ID NO: 8133 - DNA, 201 bp, Homo sapiens; identical to SEQ ID NO: 1128

SEQ ID NO: 8134 - DNA, 201 bp, Homo sapiens; identical to SEQ ID NO: 764

SEQ ID NO: 8135 - DNA, 201 bp, Homo sapiens
ctggcttccccctggagctgggagagaggccggggttagggtgatctgtgtggcagcactgactgggtagtgtgggtttggccgaggttggtcatgaggcyggggttcccgcaaggcactggcctccctgaccgcttgcttccttccggacctctgggttcagggcgggggcggagggatccttgatttccctgataactt

SEQ ID NO: 8136 - DNA, 201 bp, Homo sapiens
gtgatctgtgtggcagcactgactgggtagtgtgggtttggccgaggttggtcatgaggctggggttcccgcaaggcactggcctccctgaccgcttgctyccttccggacctctgggttcagggcgggggcggagggatccttgatttccctgataacttgatgttcttccctccctcgccagccaacaatagaggctta

SEQ ID NO: 8137 - DNA, 201 bp, Homo sapiens
agaagagcagacgctcaggcaggttaaacggtttgcccaagttcccccacccccagctcatccgagatagaatcagaactgcaccccagtgatgttaaccrtatcccgcatggcctccttttgagctctgagtcattcaggttttacttagcacctactatatgcccagacatgggttaggtgcttggagagtaacagcca

SEQ ID NO: 8138 - DNA, 201 bp, Homo sapiens
gtgggtttggccgaggttggtcatgaggctggggttcccgcaaggcactggcctccctgaccgcttgcttccttccggacctctgggttcagggcgggggyggagggatccttgatttccctgataacttgatgttcttccctccctcgccagccaacaatagaggcttagagatctgtaatttctctgtgagaaagtctg

SEQ ID NO: 8139 - DNA, 201 bp, Homo sapiens; identical to SEQ ID NO: 761

SEQ ID NO: 8140 - DNA, 201 bp, Homo sapiens
gctcagccttcccactccttgacccttcagaggcccagggctgctctctgaatttccccactctcttgtgcttctcaggaattcaccgtcccccagctccrtggccagcagcgactcaggaagtacagatgagatccaggatgagttcgagcgcgaggcggatgtggagcccatggtcagctgatgactgaggccctgcga

SEQ ID NO: 8141 - DNA, 201 bp, Homo sapiens
cagtgtctttcctgatgagctgtgccctttctgagttaatcagtggccctctcccttcccccaagggatggcatggtggtgctctgagcacaagtgagttkcaacactgctgtgtgtcctctgtgggtgaagaggggataggaaagggcgcaggaagaggacatgggacagaggggttcctcttctaggctgagactgggg

SEQ ID NO: 8142 - DNA, 201 bp, Homo sapiens
ccctgcactctgagactcaggaagatggagcttatagagtcctgtgtttactgagtgcctactgtgagctggtgctctgccaaacaccctagagatgaggrgtacccagggaatttacatggggtggggcctttgaggagttttcggcttaataggggagaaatgcataggaaaaccctccaatatctagtagaaagcaat

SEQ ID NO: 8143 - DNA, 201 bp, Homo sapiens
cgtcttgagaaaatgtcttgaggtccctgaagggccaaatccatcgtggactaactctgtgggtagagctcagatgacctagggagaattaaaccacttamgcttggagtgggaggagagggggtggggtgggggagaatataagatgtaacttaagctaaatgtaatctatttataaagcaagagactctcatctatttt

SEQ ID NO: 8144 - DNA, 201 bp, Homo sapiens
tcctccttgtatacataggtcatttgtctttgaggactagggtactctagggagtttgaaaactgcaggagccagaaagagatcctggcctgagagtcccytctggctggcttttaatatctgctctcctcttgggagtgaggacttggggcaggtgggtaggagagggaaagccagagtgtgatgggcctgcctcctggg

SEQ ID NO: 8145 - DNA, 201 bp, Homo sapiens
aagctctggctctagaagagctctctcctggagtggggagtctggaggggactgggtgggtgcaggtaaagccagattctctctggaagggaattttctakgaatggatgatttccaggctcagggtgggctgtgtgttagttctgagcaaatccctcaccaagacccttccctcccaagccctcaaagaaatgaggcaaa

SEQ ID NO: 8146 - DNA, 201 bp, Homo sapiens
aagtgacttgcccaaggccttgcggccaggaagcagcattgaagtataattctctctggctccagaggctgtgcatgtgatcacttctataaacgatagtyattgctattatgcaggagaaagggaagcccagctccttccctagaggaagtatcacttgatagaggacaagagtcagaaacatgaaaaagccttcaggat

SEQ ID NO: 8147 - DNA, 201 bp, Homo sapiens
tccttgtatacataggtcatttgtctttgaggactagggtactctagggagtttgaaaactgcaggagccagaaagagatcctggcctgagagtcccttcyggctggcttttaatatctgctctcctcttgggagtgaggacttggggcaggtgggtaggagagggaaagccagagtgtgatgggcctgcctcctgggctg

SEQ ID NO: 8148 - DNA, 201 bp, Homo sapiens
ccctgcttgtcccctcaccatgagcccacagcttgccaagaaagaccccaacgctcgctggggcagcaccagtcctagctgggacgaattggtccatcctytgtaaagctgtaaatacttaattttgactttctatttctaagcccagtgtcatattgacactggtattttagaattttctcagatgggctctcctgcgct

SEQ ID NO: 8149 - DNA, 201 bp, Homo sapiens; identical to SEQ ID NO: 759

SEQ ID NO: 8150 - DNA, 201 bp, Homo sapiens
tccgtttccccccgaggatcgaggtggtgcgctctggacggggttgtgcattctcgccgcgcccgggcggacgatccagcgaacagccccgcttctaaccmgagatgctgctgccggcgcccgcgctccgccgcgccctgctgtcccgcccctggaccggggccgggtgagtgagcacggggcccggggcggcccgagcgc

SEQ ID NO: 8151 - DNA, 201 bp, Homo sapiens
cttggacctcagctgctaaaaagattttccgtttcctcgagggcaggaaaacatccaccctcgtgggtctcctccgtccagggccgagggaggcattggayaatgtggtatgggagtttcgtgggcagcgtggaagccggccctgggttgttccccaaggtggtgggagggtgacagatatatctttagacttaagactgt

SEQ ID NO: 8152 - DNA, 201 bp, Homo sapiens
tgcaggagaaagggaagcccagctccttccctagaggaagtatcacttgatagaggacaagagtcagaaacatgaaaaagccttcaggatttttgtaatcrggtctggataaaggaacccaaagatgttgagttctcagaaccgggtggggtgcatcagagccaggctgctgctggggttgctaagcaaccattccccttt

SEQ ID NO: 8153 - DNA, 201 bp, Homo sapiens
gctgctggggttgctaagcaaccattcccctttggccagaaggagttctaggggaagtggacccatgtgcagagagcagagggtgagggaggttgatgtcyggaggcagggtcctgatggcatggtgtccaatggtggccttgatggcaccatccctgaggaatccaggaggagaggttgccgaggcttctgtcacgagga

SEQ ID NO: 8154 - DNA, 201 bp, Homo sapiens; identical to SEQ ID NO: 762

SEQ ID NO: 8155 - DNA, 201 bp, Homo sapiens
ctattatgcaggagaaagggaagcccagctccttccctagaggaagtatcacttgatagaggacaagagtcagaaacatgaaaaagccttcaggatttttrtaatcaggtctggataaaggaacccaaagatgttgagttctcagaaccgggtggggtgcatcagagccaggctgctgctggggttgctaagcaaccattc

SEQ ID NO: 8156 - DNA, 201 bp, Homo sapiens
ctctgtgggtgaagaggggataggaaagggcgcaggaagaggacatgggacagaggggttcctcttctaggctgagactggggccacacttgccatactcyctgtgtgatcccgtttgcaggccttccctgcactctgagactcaggaagatggagcttatagagtcctgtgtttactgagtgcctactgtgagctggtgc

SEQ ID NO: 8157 - DNA, 201 bp, Homo sapiens
accatgagcccacagcttgccaagaaagaccccaacgctcgctggggcagcaccagtcctagctgggacgaattggtccatcctttgtaaagctgtaaatrcttaattttgactttctatttctaagcccagtgtcatattgacactggtattttagaattttctcagatgggctctcctgcgctgccctctgtctcctgt

SEQ ID NO: 8158 - DNA, 201 bp, Homo sapiens
cctgcggggtcgaggagtctggtagcggacaggtttccagccttgtacaagccaccggcagcccgagagaagtcagtcggactcccatcgaacccggggcscacgccagagggccggacgcagcgagtccttctgccccgcttcagcacgtgtcccatttcggttatctcattggctctattcagcccctctctgctccgc

SEQ ID NO: 8159 - DNA, 201 bp, Homo sapiens
caaatcaacagaatatgtattcttctcagcaccacatcgcacttattccaaaattgactacatagttggaagtaaagcactcctcagcaaatgtaaaagcmaagaaattataacaaactgtctctcagaccacagtgcaatcaaattagaactcaggattgagaaactctttcaaaactgctcaactatagggaaactgaa

SEQ ID NO: 8160 - DNA, 201 bp, Homo sapiens
cagaactttccaccacaaatcaacagaatatgtattcttctcagcaccacatcgcacttattccaaaattgactacatagttggaagtaaagcactcctcrgcaaatgtaaaagcaaagaaattataacaaactgtctctcagaccacagtgcaatcaaattagaactcaggattgagaaactctttcaaaactgctcaac

SEQ ID NO: 8161 - DNA, 201 bp, Homo sapiens
acaattgcaaaaatgtggaaccaacctaaatgcccatcaatcaacgagtggataaactgtggtatgtgtatgtatatatgtgtgtgtgtgtatatatataygtatatatatacacacatatacacacacacatatatatgtgtatatatatgcgtatatatatgtgtgtatatatatgcgtatatatatacatatgtgtat

SEQ ID NO: 8162 - DNA, 201 bp, Homo sapiens
gggagactttaacactccactgtcaacattagacagatcaacgagacagaaagttaacaaggatatccaggtcttcaactcagctctgcaccaagcggacstactggacatctacagaactttccaccacaaatcaacagaatatgtattcttctcagcaccacatcgcacttattccaaaattgactacatagttggaag

SEQ ID NO: 8163 - DNA, 201 bp, Homo sapiens
aagacagcatgactattatctcttagtattctccaaagccttgtgccagatttcatgacagtacttttagtatcagagggctatggaaattttcttacttwttttcttttgtttctgggagttttataggaaaagtgagggcaaaggggagctttattctgccatcttcttaaggatataaaaatagaaaataaccagaga

SEQ ID NO: 8164 - DNA, 201 bp, Homo sapiens
tttctggtaaccccatagatgaatgaatgtcatcaaggatcccacatagggaaaatgagagtgtatttatcgaaacagttccagtaactgctgggcttgtkttttttttttgagacacggtctcactttcttgcccagactggagtgcagtggcccgatcttggctcactgcaacctccgcctcccgggctcaagtgattt

SEQ ID NO: 8165 - DNA, 201 bp, Homo sapiens
ccatctcacaccagttagaatggcaatcattaaaaagtcaggaaacaacaggtgctggagaggatgtggagaaataggaacacttttacactgttggtggractgtaaactagttcacccattgtggaaggcagtgtggcgattcctcagggatctagaactagaaataccatttgacctagccatcccattactgggtat

SEQ ID NO: 8166 - DNA, 201 bp, Homo sapiens
atggggaaaggattccctgtttaataaatggtgctgggaaaactggctagccatatgtagaaagctgaaactggatcccttccttacaccttatacaaaaattaattcacgtggattaaagacttaaatgttagacctaaaaccataaaaaccctagaagaaaacctaggcaataccattcaggacataggcatgggcacg

SEQ ID NO: 8167 - DNA, 201 bp, Homo sapiens
atttacctgtatgagttttttctctttaataggttcactaagtttgctttcagttttagtttcttcttatcctttgtgatttaatttaattttttttttttgaaatatacgaaacctgaaactgattccaaaagtaaaaaatatgcgaggtatacttagagaagttccattccttccctagttcaccctccttcatcttgt

SEQ ID NO: 8168 - DNA, 201 bp, Homo sapiens
ctgcagaagctctttagtttaattagatcctatttgttaatttttgtttttattgcagtggcttttggcatctttctcatgatatctttgccaagtcctayatccagaatgatattccctaggttaattttcagagttttatatttttgaattttacatttaagtctttaattcatcttgagtttatttttttatgtggtg

SEQ ID NO: 8169 - DNA, 201 bp, Homo sapiens
ttgtcagttaatatctgaattttgtggtgggccaattgactggacctgtgtctgtgggaggtagtgctggggaaggctaggattggttaagtccagaataytgagtcagaactgagaaaagtttctttaaggatttcctctaccccactacttcacaccataggtggtctggccagacgcactgactgaacaatacagtca

SEQ ID NO: 8170 - DNA, 201 bp, Homo sapiens
ggcactgtgctgtgacagcttggggaaggtgtgacatgagtagagatgaaactgttcttattatcctttaattgcacttttgccttgtttctgtgttccaytgctgtgctgtagcctctcatttgaattccagaggtctcataaaggtaattttatccttgtctggttgttaagtcttcatttttgtggaagaaagagggc

SEQ ID NO: 8171 - DNA, 201 bp, Homo sapiens
ctcccaaattgctgggattacaagcgtgagccactgcacccgaccaatttctgttgttttacatttgctaaggagtgctttacttgcaactgtgtggtcarttttggaataagtgtggtgtggtgctgagaagaatgtatattctgttgatttggggtggagagttctgtagatgtctattaggtcttcttggtgcagagc

SEQ ID NO: 8172 - DNA, 201 bp, Homo sapiens
taatgatatactttatttccttttcatcttttttgtgtctgatataggtttttctttacgattaccatgaggtttgattaccataaagttaaaattacagttacgattaccataaagttaaaatggtctattttaaattgttatctattttaaattgttaacaacttaacttcaattgtatacaaaaattttacattttta

SEQ ID NO: 8173 - DNA, 201 bp, Homo sapiens
ttgtttttttcttgtaaattcgtttaagtttcttgtaggttctggatatcaaccctttgtcagatggatagattgcaaaattgttctcccattctgtaggytgcttgttcactctgatgatagtttcttttgctgtgcagaaactctttagtttaattagatcttatttgtcaattttggcttttgttgccattgcttttg

SEQ ID NO: 8174 - DNA, 201 bp, Homo sapiens
gtgtggacatttttaaaaatcatgggatatctttccatttatttgtgtcttcaatttctttcatcaattgttttatcatttttagtgtacaggtcttttayctctttggtcaaactttattcctaatttattttttaaatagctgttgtaaatcagattgttctcttcatttctgttttggatagttcattgttaatgtat

SEQ ID NO: 8175 - DNA, 201 bp, Homo sapiens
gtcttgatttctgtagggctacaggaatttttaaagttgggtagtgtcaatcctttgattttgttttcctttaatattgtgttaactattctgggtctttwgcctttccattcaaattagaatcagtttgttgattccattttgattcccacagaatggcttgtgggaattttgattgcgattgcattgaactgagttgaa

SEQ ID NO: 8176 - DNA, 201 bp, Homo sapiens
gtccactcttacaatctcattttaccttaattatctccgtgagggcatatgtccaaatacagtcacattagagattagagttttgacatataaagttgagrgataaaattcagattggcttatttcaacttagtaatatacattttaaggttcctccatttcttcagtggcctagtggctaatttccttttagccctgagt

SEQ ID NO: 8177 - DNA, 201 bp, Homo sapiens
aaaagaaacagccaaagtgtcttccagagtggctatgccattttgtattctcaccagcaatgaatgaagattcctgttgctacacgttcttttctgcattkatgtcagttttttggagttaggccattctaataactgtgtaattgtgtttcattgttgttctaatgcacaatttcctaatgacatatatgttacacatct

SEQ ID NO: 8178 - DNA, 201 bp, Homo sapiens
gcctgatcgttcctctggaagttttgtcttagaggagtacccagctgtgtgaggtgtcagtttttccctactggggggtgcctcccatttaggctactcargggtcagggacccacttgaggaggcagtcagtccattctcagatctcaaactccatgctgggagaaccactactctcttcacagttgtcagacagggaca

SEQ ID NO: 8179 - DNA, 201 bp, Homo sapiens
ccctgtttgcctgggtgtcagcagcggaagctgcagaacagtggatattggtgatcagcgaatgttgctgcctgatcgttcctctggaagttttgtcttakaggagtacccagctgtgtgaggtgtcagtttttccctactggggggtgcctcccatttaggctactcaggggtcagggacccacttgaggaggcagtcag

SEQ ID NO: 8180 - DNA, 201 bp, Homo sapiens
tgagttgaaaattcttttctttatgaatgttgaatattggcccccactctcttccggcttgtagagtttctgccgagagatccgctattagtctgatgggyttccctttgtgggtaacgcgacctttctttctggctgcccttaatattttttccttcatttctactttggtgaatctgacaattatgagtcttggagttg

SEQ ID NO: 8181 - DNA, 201 bp, Homo sapiens
cggtggtgatatcccctttagcattttttattgcgtctatttgattcttctctcttttcttctttattagtcttgctctagcggtctgtcaattttgttgrtcttttcaaaaaaccagctcctggattcattgatttttttgagggttttttgtgtctctatttccttcagttttgctgtgatcttagttatttcttgcct

SEQ ID NO: 8182 - DNA, 201 bp, Homo sapiens
ttttattgtttggtttatgacatctatatgatctatacaatataaagaacctaggaaaaatatagactaactatatatgattcctagaaatgtttataaaktgagaaagcatcaacatacagccattaaaattcttttcagcattttctcatcaaatctattattattgtaatttagttataactttgtagaagtgactga

SEQ ID NO: 8183 - DNA, 201 bp, Homo sapiens
tggcgacgtacagatggggttttgatgtggatgtcctttctgtttgttagttttccttccacagtcaggaccctcagctgcaggtctgttggagtttgccrgaggtccactccaggccctgtttgcctgggtgtcagcagcggaagctgcagaacagtggatattggtgatcagcgaatgttgctgcctgatcgttcctct

SEQ ID NO: 8184 - DNA, 201 bp, Homo sapiens
tgtgacttgatgacccatagtcaaatgtttagtttctaccaaagcccagtaacaggccaagagctgactctcaaaaggagaatgattatctgcagaagacrgcagggccttgctccaaaatccgagagggctccactgtgattcacctatgggggcctgccaatgtctccaaacagcatccctatctgccactgacacttc

SEQ ID NO: 8185 - DNA, 201 bp, Homo sapiens
ggttcaagaccagtgagacactgtctctaccaaaaaactttttttaatttgaaaagtgccctatccaaccaacatcatagatagcatcttcaggaaaaagwtttgctctgtgaaagccaatccacaaattgagagaagtgagtgttacatgagatgacagacacataagtacacaagaaacatgaaaaagcgaggaaatgt

SEQ ID NO: 8186 - DNA, 201 bp, Homo sapiens
atccacacagtttgagctgctctggagttggggcacagtccagctctctatgatggctaaaccagtgtctggagcatgggcacacacagtgaacgtgtggytctgggatttggaatgcaaactaccttgctgtgacaacgattcccaatgtctgaggtgtgggtgggttcaatgtagacacaaaacccaggtctggaatgt

SEQ ID NO: 8187 - DNA, 201 bp, Homo sapiens
ttacaattatggtggaaggagaagcaaagacatcctccttcacaaggtggcaggagagagaagtgctgtgcaaagggggaaaaacctcttataaaaccattcatatctcgtaagaactcatttactatcatgagaatagcatggaggttggcgccctcatcattcaattacctcctgctgggtccctcccatgacacatgg

SEQ ID NO: 8188 - DNA, 201 bp, Homo sapiens
aagttacttaaaagtgaggggaaaactgagacaacaatgcaagtgggtaatagtcaaacaaaagttaaaggtgaagattcaaaaaatataccattggagamagaaacaagaaaatcactggtttcagattcaggtggacaaaggacaagtgataaaatccaagaatatccacaggtgaggaaataaccaaaatggagacag

SEQ ID NO: 8189 - DNA, 201 bp, Homo sapiens
taacagccaggaaaaactcctgggtataaaaatagccctcaaaggtggaagaggtttcttcacaacttctgattttaactgtggaattgttaaagtatcarttatagcaatagcttacctttgctcccttcaactcagtaaaaatgagttgagaaatcatgtaggcgtaaatatatgtagattcctgaatgtggtagtatt

SEQ ID NO: 8190 - DNA, 201 bp, Homo sapiens
gacattttgctataacttttattcattaataacaaaggctgattaatttaatacacacacacacacacacacccctcacattcctatgtaaggattacctygcaaagtatttttaaatccatctatttctatagagactgatatagaaagcttgagaggtgctttgggaagacgcttattaaatgatgaattcaagacaca

SEQ ID NO: 8191 - DNA, 201 bp, Homo sapiens
cactaaacatttctatgcctcaatacactaaggcttatatgattgctaacagaccttccactcctaatgtttagtgatttggcaattcagacattttgctrtaacttttattcattaataacaaaggctgattaatttaatacacacacacacacacacacccctcacattcctatgtaaggattacctcgcaaagtattt

SEQ ID NO: 8192 - DNA, 201 bp, Homo sapiens
tttacttataactttataaaaataagagaaatgtacatattatacattcatagatttatgtttccatttgatggactaaatgcatctcttgatatagctcrtattgtagtaccaaatgaaaatgtgatttctgttcatcaagattcaaagtcaaaactccaaatgcaagaaaagaaacaaataaattctggagtggaaaga

SEQ ID NO: 8193 - DNA, 201 bp, Homo sapiens
aaataaattctggagtggaaagacacaagagtgagtataataattatcgataactttaaattattttatgttgaactcatcagatcttttcctttgattcrtcagtgtgtacttcagactatatttcatcaacttttaactttgacctaaagtgtgaataccctatgataactagagaacaaaagtaatgatactttttgg

SEQ ID NO: 8194 - DNA, 201 bp, Homo sapiens
aaagaacttttttctttggttcatacttacgtatttgagaacatatattttattgataatttatactctgtaaatactctaacataactcaagaaagaaarcaaagataatgatatgttttggttagaatttcttgtcgtaatattattacacaacttaatttatgctctcagtatccatctcaggacaataataggccaa

SEQ ID NO: 8195 - DNA, 201 bp, Homo sapiens
gattcaagaaacttctgaaggagaaggacgtagcagtaagtataatgatgatagctattttatattattttaagtaaatctcaaaagaacttttttctttkgttcatacttacgtatttgagaacatatattttattgataatttatactctgtaaatactctaacataactcaagaaagaaaacaaagataatgatatgt

SEQ ID NO: 8196 - DNA, 201 bp, Homo sapiens
agaagaatgtatattctgttgatttggggtggagagttccgtagatgtctattaggtccgcttggtgcagagctgagttcaattcctggatatccttgttkactctctgtctcgttgatctgtctaatgttgacagtggggtgttaaagtctcccattattattgtgtgggagtctaagtctctttgtaggtctctaaggg

SEQ ID NO: 8197 - DNA, 201 bp, Homo sapiens
gcactaggacttgcctaggagttgcagtccttgtggcctatattgcctttgaagttaagttccagggaacttttagcccatggtggtaaggcttgccagawctcaagttccaacagcagggatatgcaattcccttttggcctctctccataggtgggcatcagctgagtttagcttgatttttctttctgccatgacagg

SEQ ID NO: 8198 - DNA, 201 bp, Homo sapiens
ctagtttatttgcatagaggtgtttatagtattctctgatggtagtttgtatttctgtgggatcggtggtgatatcccctttagcattttttattgcgtcwatttgattcttctctcttttcttctttattagtcttgctctagcggtctgtcaattttgttgatcttttcaaaaaaccagctcctggattcattgatttt

SEQ ID NO: 8199 - DNA, 201 bp, Homo sapiens
gtgccaccctttctttgactaggaaaaggaattccctgaccctttgcacttcccaggtgaggtgatgcctcaccctgcttcagcttaggctcggtgccccrcacccactgtcctgcaaccactgtctgacactccgcagtgtgatgaacccagtacctcggttggaaatgcagaaatcatccgtcttctgcgtcactcaca

SEQ ID NO: 8200 - DNA, 201 bp, Homo sapiens
ctttccccatttcttgtttttgtcaggtttgtcaaagatcagatagttgtagatatgcggcattatttctgaggactctattctgttccattggtctatakctctgttttggtaccggtaccatgctcttttggttactgtagccttgtagtatagtttgaagtcaggtagcgtggtacctccagctttgttcttttggct

SEQ ID NO: 8201 - DNA, 201 bp, Homo sapiens
cactagtttttgaaaatactattttctccccactgaattttcttagtgctcttgtagaaaaaattgcttggccataaatgtaagggtttgtttctgaactytcaattctattgcatttatgtatatgcctttgcttatgccagtgccacactcttgattactgaaattttgtaccaagtttttaaattgggagtgacaggc

SEQ ID NO: 8202 - DNA, 201 bp, Homo sapiens
tttactctctgttcctatgaacttgactttttaaaactcctcatataggtaagataatgcagtatttgtttttagtgactggcttactttatttaacattrtgttctccacattcatccatattatcacaaaagacaaaatttacttcctttttttaagggtgattttcgttatctattgatctgtggctggacactaagt

SEQ ID NO: 8203 - DNA, 201 bp, Homo sapiens
aaataataaaaagaaccagaaactataaacaagaatgttcatataacaaacattataaatatgtacttgttcttctttcttttctcagttctttaaaaggyataaagttatatagagaaataattataacaatggttttaatatttataggtgtaacaacagtacaaatgtcaggaagagggaatagaaaatatagcagta

SEQ ID NO: 8204 - DNA, 201 bp, Homo sapiens
tcttcttttgaaaaatgtctgttcatatcctttgcccactttttgatggggttgtttgtttttttcttgtaaatttgtttaagttccttgtagattctggrtattagtcctttgtcagatggataattgcaaaaatgttctcccattctgtagattgcctgttcactctgatgatagtttcttttgctatgcagaagctct

SEQ ID NO: 8205 - DNA, 201 bp, Homo sapiens
gttgctggagtaattgtcaagccacatgtagaagaatgaaactggatcctcatctctctatgcaaaaatcaactcaagatggatcaaagataaatctaagwcttgaaatcataagcttctagaagataacattggaaaaacccttctagacattagcttaagcaaagacttcatgacaaagaacccaaaagcaaatgcaac

SEQ ID NO: 8206 - DNA, 201 bp, Homo sapiens
gtctaaagtgactaatccactctagcatcctgatctcctaagactttggatctttttctctacattaaaccaagagagatcaggcatttccagctcgctcmcagtgggccatcttttaatccatatttcagctaacaaagccaataaactattagaatcttttttaactccccagtctgcaacattaaatgcagaatccct

SEQ ID NO: 8207 - DNA, 201 bp, Homo sapiens
cgatctcggctcacttcaagttctgcctcctggcttcacgccattctcctgcctcagcctctccgagtagctgggactacaggtgcccgccagcactgccrgctaattttttgttatttttagtagagatggggtttcaccatggtctcgatctcctgacctcgtgatccgcctgcctcggcctcccaaattgctgggatt

SEQ ID NO: 8208 - DNA, 201 bp, Homo sapiens
attgagcaccgctaaatgtcccctgggggaaaaacacctccagttgagaactactgtgttaaataaatggcatatgctttgtattgcaaactgttacagggttagcaataattatttctatgataataagtttaaaaaatagatattattaataataataaaatgtttttatgcctgagcattgcaaggttggcttaacac

SEQ ID NO: 8209 - DNA, 201 bp, Homo sapiens
ctaatttttgtatttttagtagagatggagttttgccatgttggccaggctggtctcgatctcctggcctcaaatgatccacccgtcttgacctcccaacrtgctgggattataggcatgagccactgtgcccagccccaatgtgtcttttaattctgttattgcattttaggttttcttgcattgttttattttggtgat

SEQ ID NO: 8210 - DNA, 201 bp, Homo sapiens
ctggttttttgaaaggatcaacaaaattgatagaccactagcaatattaataaagaagaaaagagagaagaatcaaatagacgcaataaaaaatgataaasgggatatcaccaccgatcccacagaaatacaaactactatcagagaatactacaaacacctctccgcaaataaactagaaaatctagaagaaatggataa

SEQ ID NO: 8211 - DNA, 201 bp, Homo sapiens
ttcctattgctgctaaagtaagtattgttgtaaaatgtataaccaatgtaataaaaaagaaaacctgttattataaatattagaagaaatgatacaacacrattattacttacagattattagattttgacttttaaagcttaaaagaatcaaataaaagaaaatttaatatcagtatgatgttcagcaatgtggctaaca

SEQ ID NO: 8212 - DNA, 201 bp, Homo sapiens
ttttgctaattcttctggaaaatgatgctatacttggaggctcaactttggcctacgcttttgacaatttcagcactcagcagaggcaatatccatattayttttgataggaaaaaccctataccattaagtttattcaaaagccagtgtcaccgtggcctcttggtacttaagtccatggaataagcactaatgtagctg

SEQ ID NO: 8213 - DNA, 201 bp, Homo sapiens
ttaattaggagaaacttacttctttccaattattgagatcaagccagtaccgaaacttttttctctgtgtcgatttatttaatggcatgggatcccaaatkccaagatggcagtctcagcttctagtttattggaagcatgaatatttggtgggagcattcttcctttgagcaccaggaagaatgcttttgcatggagctt

SEQ ID NO: 8214 - DNA, 201 bp, Homo sapiens
ctgataaactggaaaatctagaggaaattgatagatttctggacacatatagcctaccaagattgaattaagaagaaatagaaaatctggttaatgggtaytacaaacgtgctgttagataaaaagaataagttctaaagttccgtagcagaggagattgattatagttaataacaatgtattttgtatttcagaatagct

SEQ ID NO: 8215 - DNA, 201 bp, Homo sapiens
ccccacaattacaggcatactttgcttgcaaagagcacagaattctcaaacccttcagtttgggcagaggtcacagtggtaaaatgtatgtgtggatacartctcgcctgtgagatctcatcttctcatagttaagtctatcagttcagagcacacattcatcatcgaggatcacgacacaagttcatctaacttgcttaa

SEQ ID NO: 8216 - DNA, 201 bp, Homo sapiens
atttctggacacatatagcctaccaagattgaattaagaagaaatagaaaatctggttaatgggtactacaaacgtgctgttagataaaaagaataagttmtaaagttccgtagcagaggagattgattatagttaataacaatgtattttgtatttcagaatagctagagagaggtctagaaatgttcccaacacatgac

SEQ ID NO: 8217 - DNA, 201 bp, Homo sapiens
aattgttaagaggagatatcaagtgtagagggattcttgcttaaccggcctaacaagattcttcttagaggcagattaaggacttagacattaacggcgargggtgagaaacttggttagatatcaagcatgagagattctcgctaaactgacttagtaggatttttgcttaaggcaggccaaggatgaggcctagttgag

SEQ ID NO: 8218 - DNA, 201 bp, Homo sapiens
ttttaagttgcatggtcccattcttttccaatcaatgtcctcactttaatagtggatacctggtgaggttgtgcatgcatcttttgttgcaggtcagccaytcacaggataagagcttgtgtctgattttccacaatttcagctttttttctacagaagataagactctcacttagggcaaccttagaagatttgaggctt

SEQ ID NO: 8219 - DNA, 201 bp, Homo sapiens
ccaaaatctgtattagggttctcttgagggctggactaagaggatagatatatagacaaaagggagtttattaaggagtattgactcacacaatcaaaagrtgaggttcctcagtaggccatctgcaagctgaggagcaaggaatccagtcctatttccaaaacctcaaaagtagggaagctgacagtgcagcagaaggcc

SEQ ID NO: 8220 - DNA, 201 bp, Homo sapiens
cgagttaatgggtgcagcacaccagcatggcacatgtatacatatgtaactaacctgcacattgtgcacatgtatcctaaaacttaaagtataataataawaaaaaaaaagaattccctttatcactccttgtaaggctggtctagtgttgattaactccctaaatttttgtttgtctggaaaagtatctatgcttaactt

SEQ ID NO: 8221 - DNA, 201 bp, Homo sapiens
ctgtacagaagctttttggtttaattaagtcccatatgtctattttcatttttgttgcatttgctttgaggacttgttcataaattctctgcttaagtcartgtccagaagagtttttcctaggtttcttctaggatatttataatgtcaggtgttagtttaggtctttaatccatcttgagttaatttttgtatatggtg

SEQ ID NO: 8222 - DNA, 201 bp, Homo sapiens
tgagaaacttggttagatatcaagcatgagagattctcgctaaactgacttagtaggatttttgcttaaggcaggccaaggatgaggcctagttgagaagrgggcgtagagaagcctagctaaagtttgaacacggagggagtcattgtcaatgttcagctaaaaagaatattttaggattgaaagatcattgatttttga

SEQ ID NO: 8223 - DNA, 201 bp, Homo sapiens
tctatggctgtgaagattaaatagtatatttgaaagtggtgttgctgagtgggatcattaaggaaagttctactcagactcaaagacagaatagggatacrttatatcttattccattatagaatatattcctaatattatatcaatactctgcttaattaagaataatcctcaaatgttttaacaacataatattgactg

SEQ ID NO: 8224 - DNA, 201 bp, Homo sapiens
cttaagctgtagaaacagtggaaggcagtggtaggcaccatgccacatggaaactgcagggggaaagcagatatatgtatgtctaggcacagaaattatgrgcagaaggatataatagaacatgtgaggcccaaaaagcagctggggtgagactctttggaaaattaagacatctaagcagccgtctatatgagagaaatt

SEQ ID NO: 8225 - DNA, 201 bp, Homo sapiens
agccgtctatatgagagaaattggggaggaaaaggcacactaaggccctggaaggacacattcccagaaaatacccatgaagacaagctgatcctaaaacycaagggcctgctgattagtgaagatcttttacaccgatctgcaaagactgagagaggtgtttgttttctcacatgcccagttttcaaatgaataccacaa

SEQ ID NO: 8226 - DNA, 201 bp, Homo sapiens
aaactaaatatatatttaaagcataatacgataattatgtagaggataaaatataaattgttcacttaggagattaatacataaatcatatttacagaccwttgacttgagaaatacagttcgatgacatttcaatttgagcaaaagatgaggtgctcaagtatggcattctgtctcattaagacagaattcaaactttct

SEQ ID NO: 8227 - DNA, 201 bp, Homo sapiens
ccaatgactttcttcacagaattggaaaaaactactttaaagttcatatggaaccaaaaaagagcccgcatcaccaagtcaatcctaagccaaaagaacaragctggaggcatcacgctacctgacttccaactatactacaaggctacagtaaccaaaagagcatggtactggtaccaaaacagagatatagatcaatgg

SEQ ID NO: 8228 - DNA, 201 bp, Homo sapiens
tgccaaaatctgcacatagtcaagtcctgtagttggccctgtggaacttgtatatgaaaagtgggtcctctgtatatgttgggttttgcatcccacaaatmctgtatttgtaatctatatttggttggaaaaaaagccacgtatgagtggacccacacagttcaaactcatgttgttcaagtatcaactgtatttcctccc

SEQ ID NO: 8229 - DNA, 201 bp, Homo sapiens
ggggtttcaccgtgttagacaggatggtctcgatctcctgaccttatgatccgcccgccttggcctcccaaagtgctgggattacaggcgtgagccaccgygcccagccaaattttttaattattattatattttaagttctgggatacatgtgcagaacgtgcaggtttgttacataggtatacatgtgccatggtggtt

SEQ ID NO: 8230 - DNA, 201 bp, Homo sapiens
catttctggctgcaactatgtgcaaaggataatggcatatcttctatctcccaaatatagtatggatatctttttttggtaaattctatcttagaaaaatrcagagaaatggatttagcaatgtagtttcctaaactttctgtgcagagaatagatcttagaaacatggagcaatgatacttatttgccatgcccaaaatg

SEQ ID NO: 8231 - DNA, 201 bp, Homo sapiens
ctttatttccttttcatcttttttgtgtctgatataggtttttctttacgattaccatgaggtttgattaccataaagttaaaattacagttacgattaccataaagttaaaatggtctattttaaattgttatctattttaaattgttaacaacttaacttcaattgtatacaaaaattttacatttttattccaccccc

SEQ ID NO: 8232 - DNA, 201 bp, Homo sapiens
cacatatgccaaaatctgcacatagtcaagtcctgtagttggccctgtggaacttgtatatgaaaagtgggtcctctgtatatgttgggttttgcatcccwcaaatactgtatttgtaatctatatttggttggaaaaaaagccacgtatgagtggacccacacagttcaaactcatgttgttcaagtatcaactgtattt

SEQ ID NO: 8233 - DNA, 201 bp, Homo sapiens
actttatttccttttcatcttttttgtgtctgatataggtttttctttacgattaccatgaggtttgattaccataaagttaaaattacagttacgattaccataaagttaaaatggtctattttaaattgttatctattttaaattgttaacaacttaacttcaattgtatacaaaaattttacatttttattccacccc

SEQ ID NO: 8234 - DNA, 201 bp, Homo sapiens
atactttatttccttttcatcttttttgtgtctgatataggtttttctttacgattaccatgaggtttgattaccataaagttaaaattacagttacgattaccataaagttaaaatggtctattttaaattgttatctattttaaattgttaacaacttaacttcaattgtatacaaaaattttacatttttattccacc

SEQ ID NO: 8235 - DNA, 201 bp, Homo sapiens
tatactttatttccttttcatcttttttgtgtctgatataggtttttctttacgattaccatgaggtttgattaccataaagttaaaattacagttacgattaccataaagttaaaatggtctattttaaattgttatctattttaaattgttaacaacttaacttcaattgtatacaaaaattttacatttttattccac

SEQ ID NO: 8236 - DNA, 201 bp, Homo sapiens
gatatactttatttccttttcatcttttttgtgtctgatataggtttttctttacgattaccatgaggtttgattaccataaagttaaaattacagttacgattaccataaagttaaaatggtctattttaaattgttatctattttaaattgttaacaacttaacttcaattgtatacaaaaattttacatttttattcc

SEQ ID NO: 8237 - DNA, 201 bp, Homo sapiens
tgatatactttatttccttttcatcttttttgtgtctgatataggtttttctttacgattaccatgaggtttgattaccataaagttaaaattacagttacgattaccataaagttaaaatggtctattttaaattgttatctattttaaattgttaacaacttaacttcaattgtatacaaaaattttacatttttattc

SEQ ID NO: 8238 - DNA, 201 bp, Homo sapiens
tcatctagttttatttatttgagtcttctctttttaataattaatctagctaatagtgtgtcaattttctttatcttttcaaaaaccgaactcacattttmatcaattttttctatatttttttcctattttatttatttctgttctaattttatttttttttctgtgaactttggctttagtttcttatttttctttttc

SEQ ID NO: 8239 - DNA, 201 bp, Homo sapiens
tggatagttcgttgttagtatattaaaacaaaaccaatttgtgtatgttaattttatattctgtacctttactgaatttattagttctaaccattgtgcaygtgtgtgtgtgtgtgtgtgtgtgtgtgtgtgtgtgtgtagtttagggttttctacattaaaaaatcaataacaaatagtgagactgaaccagtaaccaga

SEQ ID NO: 8240 - DNA, 201 bp, Homo sapiens
caggtttgttacatatatatacatgtgccgtgttggtgtgctgcacccattaacttgtcatttacattaggtataacttctaatgctatcagtcccccctycccccaccccatgataggccccagtgtgtgatgttccccttcctgtgtccaagtgttctcattgttcaattcctacctatgagtgagaacatgtagtgtt

SEQ ID NO: 8241 - DNA, 201 bp, Homo sapiens
acacaacgtgcaggtttgttacatatatatacatgtgccgtgttggtgtgctgcacccattaacttgtcatttacattaggtataacttctaatgctatcrgtcccccctccccccaccccatgataggccccagtgtgtgatgttccccttcctgtgtccaagtgttctcattgttcaattcctacctatgagtgagaac

SEQ ID NO: 8242 - DNA, 201 bp, Homo sapiens
cccattaacttgtcatttacattaggtataacttctaatgctatcagtcccccctccccccaccccatgataggccccagtgtgtgatgttccccttcctstgtccaagtgttctcattgttcaattcctacctatgagtgagaacatgtagtgtttggttttttgtccttgcgatagtttgctgagaatgatggtttcca

SEQ ID NO: 8243 - DNA, 201 bp, Homo sapiens
tcagtttggaaaacaggcagcattgtatggaagaaagcactggttaaggagtaacaaacatctatttctgtataagttttatagttaactgtatatctgaktttgttcaaatcactaaacttctctaggcttatatgattgctaagaatgcttccaattctaaggctttgtaattctgcagtccagggctttttttttttt

SEQ ID NO: 8244 - DNA, 201 bp, Homo sapiens
tctcctggtgtgccatttgctaagactgttggaaaagcgcagtattaggttgggagtgactcgattttccaggtgccatctgtcacacctttccttggctrggaaagggaattccctgaccccttgcacttcccgggtgaggcgatgcctcgccctgcttcgggtcccgctcagtgcgctgcgcccactgtcctgcaccca

SEQ ID NO: 8245 - DNA, 201 bp, Homo sapiens
catttcttctagattttctagtttatttgcatagaggtgtttatagtattctctgatggtagtttgtatttctgtgggatcggtggtgatatcccctttakcattttttattgcgtctatttgattcttctctcttttcttctttattagtcttgctctagcggtctgtcaattttgttgatcttttcaaaaaaccagctc

SEQ ID NO: 8246 - DNA, 201 bp, Homo sapiens
cagcatatctcagagtctcacctgatgcccatagcatactaccgagatcttgctgctgattattcagggcccaagggctctttagtcagcaggtgatagawcttgccaggactgaattcttctcttgaaggtggcaagttcccttttggcccaggatgtgtctagaagtgtcatccaggaactaaggcctggaacggaggc

SEQ ID NO: 8247 - DNA, 201 bp, Homo sapiens
ccagagctctacatgagtcagactattctgattgctactttgcctctgctgtccattgcagtaactatgcccaccttgcctttgatggttgagtgccaccrcttggcctctgccatcttgggatccaattattcccactgcatttaaattttatagctgaagtgactgtggttcccactgtaagatcggcatacagagaag

SEQ ID NO: 8248 - DNA, 201 bp, Homo sapiens
atttgctaataagttgtaaaaatgagagagatactgcttaatattgacatttattttgaaattctgagatttctcaataaattattttttcctaggtagtrgattaaaaacatctcttcttgcaacttacagaatggctttacttactgaaactcttttgttcaaagataaagttttaatcctttattaaaactcaatctc

SEQ ID NO: 8249 - DNA, 201 bp, Homo sapiens
ctgtggcttgaatgtgagcatggcagcagatgaatggtcccatttattgctcacattatttttacttttcgagtcagagctggccaaaagcatcgacaatmatcatctctggaatggagcaccatagcctttacagattacaccatagcctttacggattacacccaggaatttcacttgggttttaggtccttgtgcctt

SEQ ID NO: 8250 - DNA, 201 bp, Homo sapiens
tacttcacctcagatcctttaaagttcttgtcactattttcatgtcagatctagaattatagtaatttacttatattttacatgtataaaaatgagacagaatatggctgtatacttgttataaatctgaaatctagaaatttcactatagtttatgtttagtgcactaaatttattaatttgtgtagctcataatgatgt

SEQ ID NO: 8251 - DNA, 201 bp, Homo sapiens
ctacttcacctcagatcctttaaagttcttgtcactattttcatgtcagatctagaattatagtaatttacttatattttacatgtataaaaatgagacagaatatggctgtatacttgttataaatctgaaatctagaaatttcactatagtttatgtttagtgcactaaatttattaatttgtgtagctcataatgatg

SEQ ID NO: 8252 - DNA, 201 bp, Homo sapiens
acttcaagcagaaaaacatttttaaaagatttaaagcaaagggaggatattgtgaaggagaaagattgtaactcttagtaaattataagtgtctccagcayataccttttaatttctagtatttaacccaatatttcctcagatggtctcatttttttccctgattgtgtaaggatcatttgcttgctcatttcaaatgaa

SEQ ID NO: 8253 - DNA, 201 bp, Homo sapiens
agtatggtgattcatcaaagacctaaaaacagaaatagcatttagcccagcaatcccgttactgggtatatacccaaaggaatagatatcattctcctatraagacgtgtgcacatgtacgtgcctgtttggtgctcactgctttttgcctgagtgggtacctaaggtacaagacaaagtcctctttactttttcctctgt

SEQ ID NO: 8254 - DNA, 201 bp, Homo sapiens
tgagaatagcatggaggttggcgccctcatcattcaattacctcctgctgggtccctcccatgacacatggggattatggaaactacaattcaatatgagrtttgggtggggacacacacaaaccatatcagtgtcctttgacaaatgaatagataaaaatgtgctgtatatatacacaacgaaatattatgtggccttaa

SEQ ID NO: 8255 - DNA, 201 bp, Homo sapiens
ctaggcctctgggcctgtgatgggaggggctgctgtgaaggtctctgacatgacttggagacattttccccattgtcttggtgattaacattagctcctcrttacttatggaaatttctgcagcaggcttgaatttctccccagaaaatgggtttttcttttgtattgcatcatcaggctgcaaatttttcaaacttttat

SEQ ID NO: 8256 - DNA, 201 bp, Homo sapiens
ccaaggcttggggcttgcaccctctgaagcaatggtctgagctgtacattggtctatttcaggaatggctggaggtgaagcagctgggatgtagggcaccrtgtcctgaggctgcacagagcaggggaacctgggcctgatccaggaaaccattttttcctcctaggcctctgggcctgtgatgggaggggctgctgtgaa

SEQ ID NO: 8257 - DNA, 201 bp, Homo sapiens
cctcttctcacagctctactaggcagtgccccagtggggactctgtgtgggggctccaactccacatttcccttctacactgccctagcagaggttctccrtgaatgctccccacctgcagcaaacttctgcctggacatccagacatttccgtacatcctctgaaatctaggcagaagttcccaaatctcaattcttgac

SEQ ID NO: 8258 - DNA, 201 bp, Homo sapiens
agttcaaaatccaatagggcagtcattaaattttaaagttccaaaatgatcttctttgacttcatgtctcacatccagggcacactggtgcaagaggtggrcttccgtggccttaggcagctccacccttgtggctttgtggggtacagccccattcccaggtgccttcacagctggccttgagtgtctccagcttttcca

SEQ ID NO: 8259 - DNA, 201 bp, Homo sapiens
tcacctcccactgggtccctcccatgtcatgtggggattatgggagctacaattcaagatgagatttgggtgcggcgagccaaaccatatcattccacccrgcccctcccaaatctcatgtcctcacatttcaaaacacaatcatgcccttccaacagtcccccaaagtcttaacttattccagcattaactcaaaagtct

SEQ ID NO: 8260 - DNA, 201 bp, Homo sapiens
ggtggcctcaggaaacttacaatcatggcagaaggggaagcaaacacatccttcttcacaaggcagcaggagagagaagtgccaatcaaagggggaaagcmcctcagaaaaccatcagatcttgtgataactcacaatcatgagaatagcatgggggtaactgcccccgtgattcagtcacctcccactgggtccctccca

SEQ ID NO: 8261 - DNA, 201 bp, Homo sapiens
cacttgtctctgacaacacacacacacacacacacacacacacacacacagagacatgcaatgtaacagtggtgagacagggacagaccacagaagacackcccattaacaaacagcagggagaaacgaaggcaaatatggcagtcaataatccatacagtaaggtcacctatttcacccttcaatagcattataattttc

SEQ ID NO: 8262 - DNA, 201 bp, Homo sapiens
acacttataaccctagaaatctgagacttgttaaaaatcttatcattgactgctctcactctcgtcattgactgctctcactctcaagcaagagaccaagrgatcaccagtatggtttgtgggtctgtatagccagataaatctgaaaatgtattttagtcatagggaagagagcatgggtttgccaaagttgtcagaacc

SEQ ID NO: 8263 - DNA, 201 bp, Homo sapiens
aagtaagtaattatttataaatcttataaattgtttttattaaattcaggagaaatttgtttttggtttataaatatgccttcaaccatatgcttcttctrctaattatttccatcacactaccagatctttattgataacttgtttcttttataattactcagttgcatgtgtcaaatctgccactttgtggatttctct

SEQ ID NO: 8264 - DNA, 201 bp, Homo sapiens
tctatttagcgtttcctttagaaatcaaaaaaaaggatatatcacttgaacatctgttgcctgaggagaaagttttattatcaagaagcgaatctcaaacsaagaaacttcaagctaaagtaacttcaagaaaaagtaagtaattatttataaatcttataaattgtttttattaaattcaggagaaatttgtttttggtt

SEQ ID NO: 8265 - DNA, 201 bp, Homo sapiens
tttgttcatcaagattcagtgtcaaaactccaaatgcaagaaaagaaaaaaataactcctggaagggaaaggcgtaatagtaagtgtagtaattatagatractttaaattattttaaaattaaacttatcagaagatctttgcctttgattcctgaatgtgtattttagcatatattttatggaaatcgtagactttgcc

SEQ ID NO: 8266 - DNA, 201 bp, Homo sapiens
ttttatttctgaggcctctgttctgttccattggtctatgtatctgttttggtaccagtaccaagctgttttggctactgtagccttgtagtatagtttgragtcaggtagtgtgatgcctccagctttgttgtttttgcttaggattggcattgacctaaacttttaagacaaaattaaatggctgtggtggaggataca

SEQ ID NO: 8267 - DNA, 201 bp, Homo sapiens
acttcccaagtagctggaactacttgggatgccacccaagtagtgcgtgccaccatgtccagctaatttttgtattttttagtagagatggggtttcactrtatgttggccaggctggtctcaaactcctgatctcaagtgagccacctaccttggcctcccaaagtgctgggattacaggcattagccacgatgtctggc

SEQ ID NO: 8268 - DNA, 201 bp, Homo sapiens
atagtttaaaaaagaagaagaaggagaaggagaaggagaagaagaagaaggaaggaaggagaagaagaagaagaagaagaagaggaagaggaagaggaagrgaagaagaagaagaagaagaagaagaagaagaagaagaagaagaagaagaagaagaagaagaagaagaagaagaaagaagaagaagaagagcagcagtgg

SEQ ID NO: 8269 - DNA, 201 bp, Homo sapiens
gacaaacacatagtctgatggaataggatagagagctgagaaataaaccctcacatatatggtcaaatgattttttacaagagtgctaagactaatcggtmtggaaaaaatagtctttacaacatatgatgctgagaaaactagatatccacatgcaaaataatgacgttgtgccctttatcttacacatacaaaaattaa

SEQ ID NO: 8270 - DNA, 201 bp, Homo sapiens
tatgatttattgtgggacccattggtagtttaagagcatgttgtttaaattcaacatatttgtgaatttaaattttccatctctaatttctagtttttaaraattatattagaaaagatacttcatattcattttaatttctttatatttattaagacttgttttgtgtcctaacatgtggtctttcctacagagtgttct

SEQ ID NO: 8271 - DNA, 201 bp, Homo sapiens
actcaaccacaacaacagaactcaattttaaaatgggcataggccagcctcctagagaaacactaatctgatctgatcaccctaccctctggactgaacaygcacagcaccctgcctccctggattgggaaagccctctacagcctgagttgctgaggtgccccacctccctaggagtgaagccaacattgcactgctgca

SEQ ID NO: 8272 - DNA, 201 bp, Homo sapiens
atttgtatttctctaacgatcagagatactgaattttttttcatgtttgttggccacatgtatatattcctttgagaagtgtctgttaatgtcctttgtcmacttttttatggtgttttatgtcgttacagcactatttacaataggaaagtcatggaattaacctaaatacctatcaatgacaaattggataaagaaaat

SEQ ID NO: 8273 - DNA, 201 bp, Homo sapiens
cagaactcaattttaaaatgggcataggccagcctcctagagaaacactaatctgatctgatcaccctaccctctggactgaacacgcacagcaccctgcytccctggattgggaaagccctctacagcctgagttgctgaggtgccccacctccctaggagtgaagccaacattgcactgctgcacaccccccagggcca

SEQ ID NO: 8274 - DNA, 201 bp, Homo sapiens
tggattgtgtgtctgtttttgtaccagtaccaaactgttttggttattgtggctttatagtatagtttgaagttggctactgtgatgcttctggcttttttctttttgcttagtattgctttggttatttgggctcttttttgcttccatataagttttagaatagtttttcctaattctaggaagaatggtggtgttagt

SEQ ID NO: 8275 - DNA, 201 bp, Homo sapiens
ttacacttgagagatgtgcagttcaatgtctatgctcaattcttatcttgggtatctatgggttttggaaaagtaatactggtaaaactaaattaattaaraataccaaagtaaataccttttttcccccttcttacttcctagaaagtagcacgtctggaaattgagaacaaagtccttcaggagcaattgaaacaggct

SEQ ID NO: 8276 - DNA, 201 bp, Homo sapiens
ttggattgtgtgtctgtttttgtaccagtaccaaactgttttggttattgtggctttatagtatagtttgaagttggctactgtgatgcttctggcttttttctttttgcttagtattgctttggttatttgggctcttttttgcttccatataagttttagaatagtttttcctaattctaggaagaatggtggtgttag

SEQ ID NO: 8277 - DNA, 201 bp, Homo sapiens
gatctaaaatcgataccctaacatcacaattaaaagaactagagaagcaagagcaaacacattcaaaagctagcagaaaccaggaaataactaagatcagwgcagaattgaaggagatagagacacaaaaaacccttcaaacaatcaattaatccaggaaatagttttttgaaacagtcaacagaatagatagatggctag

SEQ ID NO: 8278 - DNA, 201 bp, Homo sapiens
attggattgtgtgtctgtttttgtaccagtaccaaactgttttggttattgtggctttatagtatagtttgaagttggctactgtgatgcttctggcttttttctttttgcttagtattgctttggttatttgggctcttttttgcttccatataagttttagaatagtttttcctaattctaggaagaatggtggtgtta

SEQ ID NO: 8279 - DNA, 201 bp, Homo sapiens
agctgcaggtctgttggagtttgccggaggtccactccaggccctgtttgcctgggtgtcagcagcggaagctgcagaacagtggatattggtgatcagcraatgttgctgcctgatcgttcctctggaagttttgtcttagaggagtacccagctgtgtgaggtgtcagtttttccctactggggggtgcctcccattta

SEQ ID NO: 8280 - DNA, 201 bp, Homo sapiens
tcctggattcaagtgattctcctgcctcagcctgccaagtagctgagattacaggagcctgacaccatgcctggctaattttttatatttttagtagagayggagtttcaccatgttggccaggctggtctcgaactcgtgacctcaggtgatccacctgcctcagcctcccaaaatgctgggattacaggcatgagctac

SEQ ID NO: 8281 - DNA, 201 bp, Homo sapiens
ttttattggattgtgtgtctgtttttgtaccagtaccaaactgttttggttattgtggctttatagtatagtttgaagttggctactgtgatgcttctggcttttttctttttgcttagtattgctttggttatttgggctcttttttgcttccatataagttttagaatagtttttcctaattctaggaagaatggtggt

SEQ ID NO: 8282 - DNA, 201 bp, Homo sapiens
tggccattttcacgatattgattcttcttatccatgagcatggaatgttcttccatttatttgtgtcctcttttatttcactgagcagtggtttgtagttmtctttgaagaggtccttcacaggccctgtaagttgtattcctaggtattttattctctttgaagcaattgtgaatgggagttcactcatgatttggctcc

SEQ ID NO: 8283 - DNA, 201 bp, Homo sapiens
attttattggattgtgtgtctgtttttgtaccagtaccaaactgttttggttattgtggctttatagtatagtttgaagttggctactgtgatgcttctggcttttttctttttgcttagtattgctttggttatttgggctcttttttgcttccatataagttttagaatagtttttcctaattctaggaagaatggtgg

SEQ ID NO: 8284 - DNA, 201 bp, Homo sapiens
tattttattggattgtgtgtctgtttttgtaccagtaccaaactgttttggttattgtggctttatagtatagtttgaagttggctactgtgatgcttctggcttttttctttttgcttagtattgctttggttatttgggctcttttttgcttccatataagttttagaatagtttttcctaattctaggaagaatggtg

SEQ ID NO: 8285 - DNA, 201 bp, Homo sapiens
cagaataaaacctagaatcaacatttatactataggaaaatatgtattatattcacaagaggtaatttattaataaaaatcacacttttaaggtcactggscttttttttttttttttttgagagagagtctcactctgttgcccagactggagtgcagtggtgagatcttggctcactgcaacctctgcctccttggttc

SEQ ID NO: 8286 - DNA, 201 bp, Homo sapiens
tctattttattggattgtgtgtctgtttttgtaccagtaccaaactgttttggttattgtggctttatagtatagtttgaagttggctactgtgatgcttctggcttttttctttttgcttagtattgctttggttatttgggctcttttttgcttccatataagttttagaatagtttttcctaattctaggaagaatgg

SEQ ID NO: 8287 - DNA, 201 bp, Homo sapiens
tgtattcttcaattctattttcttcttgatctaatgcttagttgttcagtctattatttaaagtgggatgttaaagtctccacctatgattgttgtagtayctatctgtaattgctaatgattgggcatgaaagttcacacataggattttaacctggagctggtctcctcaatttgcacgtacacacagggctcctcagt

SEQ ID NO: 8288 - DNA, 201 bp, Homo sapiens
agcttctgatgaggcctcagggagtttttagctatggtggaagggaaggggaaccagcatgtcacatggcaagagaagcaagagagagatgggggacatcmcaatgtctttgtcaacaaccagattttatgtgaactcattaccatagagagggcaccaagccattcatgaaggatctgcccccatgacccaaacacctcc

SEQ ID NO: 8289 - DNA, 201 bp, Homo sapiens
gggcttgttcttgatttccttcattttgtatgtatatatcctttcttttgtattttgaatcctttctctcgaagcaccaactgatttatgcagttgctctmtcctataatactttgaaacttttacaaaattgcttagcatatactactacaaaaacaaacctactaaaagaatttcatgatttctttgcagtctgccccc

SEQ ID NO: 8290 - DNA, 201 bp, Homo sapiens
cacacatacacatgcatgagcacatatgcatgcatgtgtacatgaatacacatattttagaaatcatgagatctcttggacacctttaattttagtgtctmagggcttgttcttgatttccttcattttgtatgtatatatcctttcttttgtattttgaatcctttctctcgaagcaccaactgatttatgcagttgctc

SEQ ID NO: 8291 - DNA, 201 bp, Homo sapiens
tctctcttttggatttataatttaacccaccaagcaagctcagctagggaattggaagctaaaaggaaggatcattagttctccctgagacctgaaaagcktatatatacaatcactagcattccccaaaagcactcccagggcccacaaaatatttcctgagacacattgtcatggctggtgaagtgctctatgggactc

SEQ ID NO: 8292 - DNA, 201 bp, Homo sapiens
tacactgagaaatggactccactactgtgcctacccagaatgagagccactgcactttgcccaactaatacctgcagacaatatctgcaggtgacagtctycccaaggaagccactataaaaacaaaaattagcaaatagaacttaattaaactaaagaccttcagcactttccatccaacagcagcagaacatacatttt

SEQ ID NO: 8293 - DNA, 201 bp, Homo sapiens
aactggaagttaagagtgccacatggacactttgggctcctcctacctttaaatcaacaggctaagaagggggctacattgttgacttgggtgattgaccyggactatcaagatgaattcagtctactactccacagtggagatcaggaagagtatgcatggaatacaggagattcattagggcatctcttagtattacca

SEQ ID NO: 8294 - DNA, 201 bp, Homo sapiens
ttacaggcatgagctaccacacccagccagatgatttatagtttaatctcatttgtcctcttagcagcatttaatatgtttaatcatttattttttaatayttttgtattatactttaagttctggggtacatatatagtctatagtttgagaaatagcataattatttgattttccttgtatatttttgggacacctctt

SEQ ID NO: 8295 - DNA, 201 bp, Homo sapiens
ccttttaatttctagtatttaacccaatatttcctcagatggtctcatttttttccctgattgtgtaaggatcatttgcttgctcatttcaaatgaacccrtccttctttgatatatcagttgaagaaagaacaaaggaagctaaaatacatctgccgatgtttccagttttgagtcgctatatctcttatattgttactt

SEQ ID NO: 8296 - DNA, 201 bp, Homo sapiens
cacaaaatgtatgatggctcaaacacaatggaagcttctttcctggtgttaatagtccaaggaagttcaaggtcagtcttcgtggtagggagttctgctcyacagggttgttaaggtatcccagcatatggaaggtttgccatcttatgtgtggcttcctgagccacactaggcatagttatctagctatcagaaaagaat

SEQ ID NO: 8297 - DNA, 201 bp, Homo sapiens
ggttacatacttctgtaaacatatttgaacatgtattctcagtatacttattttaaaattgataaattacaaaaagtacctccacagtttattatatatartattagcattataaacacttcaacaagaatatttaaaaggattagataattatgtaatagataagtttaaaataaattttgagctactctgcctgtggag

SEQ ID NO: 8298 - DNA, 201 bp, Homo sapiens
aatcatttttaccttccattttaactcagttactatatgcacacatatgtatgtacatgcatacacataaataattgagttgattgattcatccaattaawtcttatagttttcactagtgagtctctttgattagtatattatgatcgactcacagactttcttgattcacattaccatggagtaaagaggaattaccta

SEQ ID NO: 8299 - DNA, 201 bp, Homo sapiens
ctattctattttattggattgtgtgtctgtttttgtaccagtaccaaactgttttggttattgtggctttatagtatagtttgaagttggctactgtgatgcttctggcttttttctttttgcttagtattgctttggttatttgggctcttttttgcttccatataagttttagaatagtttttcctaattctaggaaga

SEQ ID NO: 8300 - DNA, 201 bp, Homo sapiens
acaggcgtgagccaccatgcccagctggtgctcttatattcatactcagattatggtagagcatggaatgctactatagttttccatgcaatcatggtgaygtatagcctttgaaaatcctacagagccagtagtttatcaccctgaagaacatgaggtggttaacttttgatataagttgttttaatattgaacatttag

SEQ ID NO: 8301 - DNA, 201 bp, Homo sapiens
aaatcttataaattgtttttattaaattcaggagaaatttgtttttggtttataaatatgccttcaaccatatgcttcttctgctaattatttccatcacrctaccagatctttattgataacttgtttcttttataattactcagttgcatgtgtcaaatctgccactttgtggatttctctatttcttcttgtattagt

SEQ ID NO: 8302 - DNA, 201 bp, Homo sapiens
tctattctattttattggattgtgtgtctgtttttgtaccagtaccaaactgttttggttattgtggctttatagtatagtttgaagttggctactgtgatgcttctggcttttttctttttgcttagtattgctttggttatttgggctcttttttgcttccatataagttttagaatagtttttcctaattctaggaag

SEQ ID NO: 8303 - DNA, 201 bp, Homo sapiens
gttctcccactctctatcataatttagtttgcaaggaacttgaaagcctttctacaagatatcatacttgtttattatattgatgatatgctgactggacytcttgagtaaaaagtactctagatatattagtaagatatttgcatgtcagaaggtgggacatgaatccaaaaaatttaggggccttctacatcatgaaat

SEQ ID NO: 8304 - DNA, 201 bp, Homo sapiens
gttttaatattgaacatttagttgctgctgataaatgtgataggctctttgtacattggtaaatctcagaaaatagaaacactggcttacaaaaagcattktaaagagagtttctggtctctatgaagacatggtaaggcagtttcagttactttccatgggtgtttggaaaaatcttaaagaggggttatgataatgtta

SEQ ID NO: 8305 - DNA, 201 bp, Homo sapiens
ttctattctattttattggattgtgtgtctgtttttgtaccagtaccaaactgttttggttattgtggctttatagtatagtttgaagttggctactgtgatgcttctggcttttttctttttgcttagtattgctttggttatttgggctcttttttgcttccatataagttttagaatagtttttcctaattctaggaa

SEQ ID NO: 8306 - DNA, 201 bp, Homo sapiens
gccagctctgtgaaaccacaaaaagagggaagaaagagaatcaccgggaccatccgtaaataaagatttgcctcactgctgtctatcctttgatcttagaractcattattatagatctctccatcagccctggctgacacctggttctgagcataccaatttccttagtattgtctgggagaagaatattagtaaggtca

SEQ ID NO: 8307 - DNA, 201 bp, Homo sapiens
ttttctattctattttattggattgtgtgtctgtttttgtaccagtaccaaactgttttggttattgtggctttatagtatagtttgaagttggctactgtgatgcttctggcttttttctttttgcttagtattgctttggttatttgggctcttttttgcttccatataagttttagaatagtttttcctaattctagg

SEQ ID NO: 8308 - DNA, 201 bp, Homo sapiens
gcaatgcatcttcactgtcctaccttaagggtatatcagttctcccactctctatcataatttagtttgcaaggaacttgaaagcctttctacaagatatsatacttgtttattatattgatgatatgctgactggacctcttgagtaaaaagtactctagatatattagtaagatatttgcatgtcagaaggtgggacat

SEQ ID NO: 8309 - DNA, 201 bp, Homo sapiens
atcaccaggtgtaaaatgtgatatcaccactacctaacaaggaaaatcgtttgtggttgggactggaggcccgataaattttcctttaaagcagcagtttyctgcctttttagcaccagggaccagtttcgtggaagactccacagaccaggatggagggggtggtttcaggatgattcaagcacattacctttattgtac

SEQ ID NO: 8310 - DNA, 201 bp, Homo sapiens
agtaagcatagtactacataggtagtttttaaacccactaccaccttccacctctagtaggccacagtgcctattgttgtcatatttatatccacatgtgstcaatacttagctcccacttataaatgagaacatgcagtattcagttttctgttcctgtattaatttgtttaggattatgccctccagctccatccatgt

SEQ ID NO: 8311 - DNA, 201 bp, Homo sapiens
aagattgctttattttctgctttcctatagtgaagaagcagttttcttttagctggaaagtctagcaatgcatcttcactgtcctaccttaagggtatatsagttctcccactctctatcataatttagtttgcaaggaacttgaaagcctttctacaagatatcatacttgtttattatattgatgatatgctgactgga

SEQ ID NO: 8312 - DNA, 201 bp, Homo sapiens
tttactgggttttgtcccacattgaaaatgtgtaacaggaattaaaacattctcaagaaggattattaaaggtatatgtactaatcttggcatatcttgcsaaatcctcagctacatatgtgtgtcagtagtggcagcaatttattctatagcttgtgtaaggacagagactggagtaagtagagctgtttctttccttgt

SEQ ID NO: 8313 - DNA, 201 bp, Homo sapiens
aattttcatcagtgatactgacctgtagttttattttctgttgagtccatgtctttttttttttttttttttttttaatcagagtaatgctggccttgtaraatgtgctggaagtattccttcctcttcaagtttttgggatagtttgaatagaactggcattagttcttctttaaattttggtagcagtcagcagtgaac

SEQ ID NO: 8314 - DNA, 201 bp, Homo sapiens
aagcaatttgttctttcttgagtttttaagactatatacgatatggacactgagatattggccatttcaacttagtagtttgtctggtataaggcttccartggggttatttcccacttcagcggtagcccaaactctctgtttttcaaaagctgtaacatacacgagtcacataccactagctacacataacaaggttta

SEQ ID NO: 8315 - DNA, 201 bp, Homo sapiens
tgttgaaaaattctgcataaattttcatcagtgatactgacctgtagttttattttctgttgagtccatgtctttttttttttttttttttttttaatcaragtaatgctggccttgtagaatgtgctggaagtattccttcctcttcaagtttttgggatagtttgaatagaactggcattagttcttctttaaattttg

SEQ ID NO: 8316 - DNA, 201 bp, Homo sapiens
gttgcaaatgacagggcaccatttctgttttatggctggtgatatggtttggctatgttcccacccaaatctcttcttgaattgtactcctataatttccrcatgttgtgggagggacccagtgggagataatgaatcacgagggcgatttcccccatactgctgctagtgaataagtctcatgagctctgatggttttat

SEQ ID NO: 8317 - DNA, 201 bp, Homo sapiens
gcctggcttgttttacttgacataatattcctctaggttcatccatgttgttgcaaatgacagggcaccatttctgttttatggctggtgatatggtttgsctatgttcccacccaaatctcttcttgaattgtactcctataatttccacatgttgtgggagggacccagtgggagataatgaatcacgagggcgatttc

SEQ ID NO: 8318 - DNA, 201 bp, Homo sapiens
attgtggtcttttacttaaatttttataaaaatgaatggaaactttgatttctggcatatttttaacaattcagaggcttcacaattaaatggtgtcactctttattgtagtctaagcctctcttcctttttatttaagattttaatttataattgacataatggtacacattcatggggtacaatatggtgttttagtcc

SEQ ID NO: 8319 - DNA, 201 bp, Homo sapiens
tcagtgaccttagagacagcggagtgcctcaaggggccattgtagcctctgcagatgatggcccaaacatgttttccagtagcagggaacatgtcatgggkgggcaatcctgtcagagccaaaaatagttcccaactgaggaaggagagggtttcagatgtttacatcattcgtccccctttcctccacttccttaggcaa

SEQ ID NO: 8320 - DNA, 201 bp, Homo sapiens
agaaaagcacttagcaagggtcagatgcatcagtgtagactgtgtgagtgggcatgggatggggttgtctcatggtggaaggagtcccaaacaagaagctrttttccattttatggaccctgaggctgagttagctggagctctgaaccacatgaatacctttagctatttgctccctattctaattcctctcaaattgag

SEQ ID NO: 8321 - DNA, 201 bp, Homo sapiens
ttcctctcaaattgagttcagattgcttaacacatactagaacaacaactaaaaagatttcatgatttgtttacactccacctccacctctcatgtccaayagtgagggtttatgtcaaatactatattgatgagttactgcttttattttttcttcaatgatttcatttcattatttccttttaattttcaccccacctt

SEQ ID NO: 8322 - DNA, 201 bp, Homo sapiens
tcctctcaaattgagttcagattgcttaacacatactagaacaacaactaaaaagatttcatgatttgtttacactccacctccacctctcatgtccaatwgtgagggtttatgtcaaatactatattgatgagttactgcttttattttttcttcaatgatttcatttcattatttccttttaattttcaccccaccttc

SEQ ID NO: 8323 - DNA, 201 bp, Homo sapiens
cataaaacatgcccctggttagagatgatgtataggatactatggcagtcgaaaagatattcttcaagtttatgaaccacaatattggtagaagttctatmggcagagaacgtgattcagtgcctataataaatgcctaactcactgaaggcagttcgcttgcctctgtatgatagaaaatttacagtagtccatctgcaa

SEQ ID NO: 8324 - DNA, 201 bp, Homo sapiens
caagcttgaatacagcattgcttgcacaccttcctagtagtttttattcctgaccccctcagtggaagtatcatggttgttatgctgtggttccttatggwtgcaagagacaacagaagtggggaaagcctgaacgtgggaatatggttataaatgtacagtatattagcatttaaggcattgttctttgtattgccacat

SEQ ID NO: 8325 - DNA, 201 bp, Homo sapiens
acgtatcccctggtaactggcatgcaaatattgatctggaagattgctttattttctgctttcctatagtgaagaagcagttttcttttagctggaaagtstagcaatgcatcttcactgtcctaccttaagggtatatcagttctcccactctctatcataatttagtttgcaaggaacttgaaagcctttctacaagat

SEQ ID NO: 8326 - DNA, 201 bp, Homo sapiens
gaaattaatcttgctttgtccgaagaaactataattgcctcccttgagatagttaccttgcaaaacacttctgattctccccaagactcacccccaccacyctcttttgcttgtagacctataattagacacaagtcccaccagccccctaaagatgaagtacaaagtatggctcatgagaaggtgcactgcattccaaaa

SEQ ID NO: 8327 - DNA, 201 bp, Homo sapiens
tagttcgttgttagtatattaaaacaaaaccaatttgtgtatgttaattttatattctgtacctttactgaatttattagttctaaccattgtgcatgtgygtgtgtgtgtgtgtgtgtgtgtgtgtgtgtgtgtagtttagggttttctacattaaaaaatcaataacaaatagtgagactgaaccagtaaccagaatct

SEQ ID NO: 8328 - DNA, 201 bp, Homo sapiens
gaaactatggagggcaagtgatcaatgggactttagcacagatctgtctcacagtggatccagtggaagctgaactcatcctcttgtcatttccccagttygtgaatgtataatttaataaatatactcatcaactggcagaattttcacattggtttcctgacctgtggagtaaggaccattatggtagaagaggccaat

SEQ ID NO: 8329 - DNA, 201 bp, Homo sapiens
gcctttcgaataagtgtattgctagtattttttcctttttgatgtgattgtaagtaggattgattttgaattcctttttggatagttcgttgttagtataytaaaacaaaaccaatttgtgtatgttaattttatattctgtacctttactgaatttattagttctaaccattgtgcatgtgtgtgtgtgtgtgtgtgtgt

SEQ ID NO: 8330 - DNA, 201 bp, Homo sapiens
aatattttgatcaacattaattgtattgtattgtaaaaactatcaaaatatttataacttttgacttttataacacctatattgaaatttttctataaaaktgatttttagaatcatgttagtttgtactgtattacaaacttcgggtcctagatatttttgtttttcttgtatataggaatgagttccacatgttgtatt

SEQ ID NO: 8331 - DNA, 201 bp, Homo sapiens
cttcaactcacctatttgtcctgttcagaaaacaggtggatctcagaaaataacagtggattatcataaatttaaatagatggtgattctaattgtagatrctgtactaaataatgatttcattgcttgagcaaattaacgtatcccctggtaactggcatgcaaatattgatctggaagattgctttattttctgctttc

SEQ ID NO: 8332 - DNA, 201 bp, Homo sapiens
gcttacaaccttgaataatgattatattggagtattttaaatgatttccttagtattatgtatccctttaaatcacaggacatatgttactatcttcaacktgttacctagcatcaatttcatattggaataaccataaactaatgagtaattatacttacttatttaatatccttatatattattaaaatgattcttcag

SEQ ID NO: 8333 - DNA, 201 bp, Homo sapiens
atagctgggcagctaagaatgagaatattgatatccacacagtttgagctgctctggagttggggcacagtccagctctctatgatggctaaaccagtgtytggagcatgggcacacacagtgaacgtgtggctctgggatttggaatgcaaactaccttgctgtgacaacgattcccaatgtctgaggtgtgggtgggtt

SEQ ID NO: 8334 - DNA, 201 bp, Homo sapiens
ggctgtacatatttgacatgtatccacaatatatttttatcatacattttattaaagtattcctataataataattttgtaagccatttgagttcttctaragattaaaacagactaaaatataaatctaaacaagaatcttaataattattaacactatttgcttagaactatttgcgagggaaaaatcacaatattgcc

SEQ ID NO: 8335 - DNA, 201 bp, Homo sapiens
atttccttttagccctgagtagtgctgaatactctggatataccacagttaatgtatctatttacctactgaagaatgttatgggttttttccccaagttktggcaattatgaataaagctgctgtaaacatccatgtgcaggtttgtatatggacatgttttcaattcatttgggtaaatatcaagtagtgcaattgctg

SEQ ID NO: 8336 - DNA, 201 bp, Homo sapiens
agcagtagactatatcatataacttaggtgtgtagtaggctataccatgtaggtttatgcaatgataaaattgcctaatgacacgtttcaagacatatccytgtcattaagtgacacacataactattttttctaacttgtctgatcctcctaaaaaatgttttgaattttttatgaggcagttcttatatctgcatttct

SEQ ID NO: 8337 - DNA, 201 bp, Homo sapiens
ttgcctctcaggtccattaattgttctgactttttaatttgatacattcaggaaataatgaaaaataaaatgtttctgcaatgacattgtagatgagagcraaaagctagctctttttctcaaagcaggtaattaaataccagtcttgatatatatatatatgtatataatttctaattacttattacaacttttgttatt

SEQ ID NO: 8338 - DNA, 201 bp, Homo sapiens
cagctccatcaggtcctttaaggacttctctgcattggttattctagttagccattcatctaattgtttttcaaagtttttaactcctttgcaatgggttmgaacttcctcctttagcttggagtagtttgatcgtctgaagccttcttctctcaactcgtcaaagtcattctccatccagctttgttccgttgctggtga

SEQ ID NO: 8339 - DNA, 201 bp, Homo sapiens
gacctgtggagtaaggaccattatggtagaagaggccaattagaagctactagaactgattctacctaggaaaattttaaaccaaaagcaatattacattmtcagagagatttggaagattagtgacttcatcaaggacttgaaaaatgtagaggttgtgatttcaaccacatccttcaactcacctatttgtcctgttca

SEQ ID NO: 8340 - DNA, 201 bp, Homo sapiens
tttacttgcaactgtgtggtcaattttggaataagtgtggtgtggtgctgagaagaatgtatattctgttgatttggggtggagagttctgtagatgtctrttaggtcttcttggtgcagagctgagttcagttcctggatatccttgttaactttctgtctcgtcgatctgtctaatgttgacagtggggtgttaaagtc

SEQ ID NO: 8341 - DNA, 201 bp, Homo sapiens
agaattcatcagtgaggccatctggtcctagacatttctttgttgaaagcgttatgattaccggttcaattttcttactagttataggtctgttcagattytcttttttaaatttttagtttataatttttttctgggtacctagttggtgtatatatttatggggaatatcagatattttgatactggcatataatgtgt

SEQ ID NO: 8342 - DNA, 201 bp, Homo sapiens
tgttttacatttgctaaggagtgctttacttgcaactgtgtggtcaattttggaataagtgtggtgtggtgctgagaagaatgtatattctgttgatttgrggtggagagttctgtagatgtctattaggtcttcttggtgcagagctgagttcagttcctggatatccttgttaactttctgtctcgtcgatctgtctaa

SEQ ID NO: 8343 - DNA, 201 bp, Homo sapiens
cttccatgagctttattattttcttccttctataaactttgggtttagtttgttctattttccttagttccttgtggtgtaacattaggttgtttatttgrgatcttttatttaatgtgggcttttagttctataaatggtacaattgtacagtgtgtttgtgttttaagctgtgtcattacaaaagagtaaaaaagtaaa

SEQ ID NO: 8344 - DNA, 201 bp, Homo sapiens
attgcttctatttcattcttctctcttttcttctttattagtcttgctctagcggtctatcaattttgttgatcttttcaaaaaaccacctcttggattcrttgatttttttgaagggttttttgggtctctatttccttcagttctgctctgatcttagttatttcttgccttctgctagcttttgaatgtgtttgctgt

SEQ ID NO: 8345 - DNA, 201 bp, Homo sapiens
tcttccatgagctttattattttcttccttctataaactttgggtttagtttgttctattttccttagttccttgtggtgtaacattaggttgtttatttrggatcttttatttaatgtgggcttttagttctataaatggtacaattgtacagtgtgtttgtgttttaagctgtgtcattacaaaagagtaaaaaagtaa

SEQ ID NO: 8346 - DNA, 201 bp, Homo sapiens
gagtgtgcgagcacttctcatggctagctataggtccccagaatctagtttattcctggaagtggtttgttggcacactcttccagaagctgcctgatatwtatataataaatatatatatactacccagagtcacatagattcaacacagtgcttatcaatattccaattacatttttagagaaacagaaaacaaaaatt

SEQ ID NO: 8347 - DNA, 201 bp, Homo sapiens
agtgagaatatgcggtgtctggttttttgttcttgcgatagtttactgagaatgatgatttccaatttcatccatgtccctacaaaggacgtgaactcatmatttcaaaataccaactcttagttttgttgatcttttctattgtttttttctcccttctattgtttttctagtatctattttgtttatttcttccatgag

SEQ ID NO: 8348 - DNA, 201 bp, Homo sapiens
ctttgagttatagtttccctttctaattctattgatttagctttgtgtatatatatatatatatatatatgtgtgtgtgtgtgtgtgtgtgtgtgtgtgtrtatatatgtgtgtgtgtgtgtgtatatatatatgttttggaattgtgcattaacttacttcccaaagtgaaaaatatgcagaaggtatacttagagcagt

SEQ ID NO: 8349 - DNA, 201 bp, Homo sapiens
tgtttctttcctcagtaggttcacttatttctttgagttatagtttccctttctaattctattgatttagctttgtgtatatatatatatatatatatatrtgtgtgtgtgtgtgtgtgtgtgtgtgtgtatatatatgtgtgtgtgtgtgtgtatatatatatgttttggaattgtgcattaacttacttcccaaagtga

SEQ ID NO: 8350 - DNA, 201 bp, Homo sapiens
taaatttttatttttgttttcatttgtctcaagatatatattttttaattttactttaagttctagggtacatgtgcataacgtgccagtttgttacataygtatacatgtgccatattggtgtgctgcacccgttaactcgtcatttacattaggtatatctcctaatgctatccctccctgctccccacaccccccgac

SEQ ID NO: 8351 - DNA, 201 bp, Homo sapiens
ttgtttctttcctcagtaggttcacttatttctttgagttatagtttccctttctaattctattgatttagctttgtgtatatatatatatatatatatawgtgtgtgtgtgtgtgtgtgtgtgtgtgtgtatatatatgtgtgtgtgtgtgtgtatatatatatgttttggaattgtgcattaacttacttcccaaagtg

SEQ ID NO: 8352 - DNA, 201 bp, Homo sapiens
taatgctttgtttctttcctcagtaggttcacttatttctttgagttatagtttccctttctaattctattgatttagctttgtgtatatatatatatatrtatatatgtgtgtgtgtgtgtgtgtgtgtgtgtgtgtatatatatgtgtgtgtgtgtgtgtatatatatatgttttggaattgtgcattaacttacttcc

SEQ ID NO: 8353 - DNA, 201 bp, Homo sapiens
tctcctcaatttgcacgtacacacagggctcctcagtttgcacatacacacagggctcctcagtttgcgcgcgtgcacgcacacacacacacacacacacattcatacacacatgttcttatgtacacaaacatgcatatacatgcaaataaacatatttagaaatgaggaattctcatggacatcttcaattccagttta

SEQ ID NO: 8354 - DNA, 201 bp, Homo sapiens
aattcaggatggtattcttgtctttgaataatttctagttgtattttttttctaggggaagtgatgctgggagatcttctagtctgccatcttgcttacaycactctgtgattttcctggttatttatcttttaggtttatttgtgattgttgcagtttctgtgctggcttctcatgctggttggattattattaattttt

SEQ ID NO: 8355 - DNA, 201 bp, Homo sapiens
ctagtttacagtcccaccaacagtgtaaaagtgttgctatttctccacatcctctccagcacctgttgtttcctgactttttaatgatcgccattctaacyggtgtgagatggtatctcactgtggttttgatttgcatttctctgatggccagtgatgatgagcattttttcatgtgtctgttggctgcataaatgtctt

SEQ ID NO: 8356 - DNA, 201 bp, Homo sapiens
catcttcttaaggatataaaaatagaaaataaccagagactttgcaagattactgtatgactttctgacgttgagtactttgaagattactaagagcacargtttaaatacctatagtaactatctgtttttagaaaaaaaccgtaatgctctagatctccaaagtgatttggtgaggaataaacctatatactatataat

SEQ ID NO: 8357 - DNA, 201 bp, Homo sapiens
cttcatcattacatttatttttaggtatattactttttcttatagctatttaaatgggattgctttcttgattttttttcagctagttctttaatgttgtwtagaaatgcaactgattttttttatgttgactttgtatgccataaatttattgaattcattgagcagttttacgagttttctggtggaatctttaggtat

SEQ ID NO: 8358 - DNA, 201 bp, Homo sapiens
tatggaatgacatcagcaagatggcagaataagatttcctagtgcttttgcccttatagaaacatcagtttgaacagctatctacacatgaaaataccttyacaacagctaaagaaaccagatgagagattacagcacttgaatgtaacgcagatgtaagaaagatgcattgaataggggaggaaggacagttttacataa

SEQ ID NO: 8359 - DNA, 201 bp, Homo sapiens
ataccattgggggatctgagaaccagccctctcagcctagagccgtgtttcagtgcccaaaaatgcctcccaggggccaggggattaccttgccccatcakttgccctgattaccaggggacctcacaataggcccagaaacctgtcagcagcaccaaagcatgacacccaaaggccgggggctcatcctgccccatttac

SEQ ID NO: 8360 - DNA, 201 bp, Homo sapiens
ctaatgaggccaaggactgattcacctggggtccctgtccccagcaaagcctcacggcagcatccactagcaactacagcctaagtcattgaagaaatgayggacatcactgacactgtttatagctgaaaaaaaaaattatacagaggccgtataccactgcatacacccagaatcaaagctaaaatgcccaacccaggg

SEQ ID NO: 8361 - DNA, 201 bp, Homo sapiens
ttacaacatttatcagtttattttggcttagggaatgagttagtggtaaatagttaatcaaacaatagattttaataatttattgtttcacatcatgtgcrttgttagcttttcttaaatgttttgtggcattgaaattcacactttttagaaatgaaaatgtgaactaattcatggtgttttattttgaagagttacaca

SEQ ID NO: 8362 - DNA, 201 bp, Homo sapiens
tgatttaatcaccttactcattattagtttattcatatttctcttcttcatgatttagtcatggtaggttgcatgtgtctaggaattattcatttcttcayggttattgaaattggtgccatatagttattcatagtagtctctcatgatcttttgtatctctgtgtcatcagttgtgacagttcttcttttattcctggt

SEQ ID NO: 8363 - DNA, 201 bp, Homo sapiens
gaatttagtttgttagtattttgttgaggttttgcatgatcatcagagatattggcctttgtcttttcttgtagtgtccttgtctggctttggtatcagtratgctggcctcctaaaatgagtttggaagtgatctctcttcttctatttttttgaaacatttgaggggcattagcattaattcttcttaaaacattgggt

SEQ ID NO: 8364 - DNA, 201 bp, Homo sapiens
gaaactaccatcagagaatactataaacacctctacacaaataaactagaaaatctagaagaaatggatacattccttgacacaaacaccctcccaagacyaaaccaggaagaagttaaatctctgaatagaccaataacaggctctgaaattgaggcaataattaatagcttaccaaccaaaaaaagtccaggaccagat

SEQ ID NO: 8365 - DNA, 201 bp, Homo sapiens
tcaaagggacctatggcctttttgctgggttactacgcaacatataaaaggaaataataagattttttagggattaatggacagtgcctctgaactgacastaattccaaaaggccaaaaatgtcatgatggtccactggaaaggaaactatggagggcaagtgatcaatgggactttagcacagatctgtctcacagtgg

SEQ ID NO: 8366 - DNA, 201 bp, Homo sapiens
gaatcctttccccatttcttgtttttctcaggtttgtcaaagatcagatggttgtagatgtgtggtattatttctgagggctctgttctgtcccattggtycatatctctgttttggtaccagcaccatgctcttttggttactgcagccttgtagtatagtttgaagtcaggtagcgtgatgcctccaactttgttcttt

SEQ ID NO: 8367 - DNA, 201 bp, Homo sapiens
atgtgccatattggtgtgctgcacccgttaactcgtcatttacattaggtatatctcctaatgctatccctccctgctccccacaccccccgacaagcccyagtgtgtgatgctccccaccctgtgtccatgtgttctcattgttcagttcccacctgtgagtgagaacacgtggtgtttggatttctgtccttgcaatag

SEQ ID NO: 8368 - DNA, 201 bp, Homo sapiens
aataaaagcacagtcatggcctctcaatcaattcccagacttgatcaagtttacagacccaggaccccttgaaggaagggtaccttgaggaaggacctagkatactgccaaaaatttatacctttaatttttctcccagccttcctcaaagggacctatggcctttttgctgggttactacgcaacatataaaaggaaata

SEQ ID NO: 8369 - DNA, 201 bp, Homo sapiens
ataatatttttctaacatacacaataatcctgcaaggttggacttagtatttcttttgttttttttatactttacgttctagggtacatgtacacaacgtrcaggtttgttacatatatatacatgtgccgtgttggtgtgctgcacccattaacttgtcatttacattaggtataacttctaatgctatcagtcccccct

SEQ ID NO: 8370 - DNA, 201 bp, Homo sapiens
atatccgctgttctgcagcctccgctgctgatacccaggcaaacagggtctggagtagacctccagcaaactccaacagacctgcagctgagggtcctgamtattagaaggaaaactaacaaacacaaaggacatccacaccaaaaccccatctatgcatcaccatcatcaaagaccaaaggtagataaaaccacaaagat

SEQ ID NO: 8371 - DNA, 201 bp, Homo sapiens
ttggattctattttgatattaatttttccacctatgcttaattttatttatttatttattttgcctcatacactttttcttttcttagaattctgctctgmcactcactaatgatgtgaccttgggaaagtttcttaaactctctttacctcagattccttatctaaaatgaagatcaagtaagttaatataagttgagta

SEQ ID NO: 8372 - DNA, 201 bp, Homo sapiens
gtctcctcaatttgcacgtacacacagggctcctcagtttgcacatacacacagggctcctcagtttgcgcgcgtgcacgcacacacacacacacacacacattcatacacacatgttcttatgtacacaaacatgcatatacatgcaaataaacatatttagaaatgaggaattctcatggacatcttcaattccagttt

SEQ ID NO: 8373 - DNA, 201 bp, Homo sapiens
acagggtctggagtagacctccagcaaactccaacagacctgcagctgagggtcctgactattagaaggaaaactaacaaacacaaaggacatccacaccmaaaccccatctatgcatcaccatcatcaaagaccaaaggtagataaaaccacaaagatggggaaaaaaaagagcagaaaaaacagaaactctaaaaatca

SEQ ID NO: 8374 - DNA, 201 bp, Homo sapiens
aatccaggaacatgggatatctttttatttatttgtgctttcttaaacttcttttactaatgttttatagttttcattgtagaactttttttcctccttgkttaaatttattcctaggaacttaattttttgtagatattgtaaatgagattactttttgacttctttttcagacagttcattgttagagtataggaacac

SEQ ID NO: 8375 - DNA, 201 bp, Homo sapiens
ggtctcctcaatttgcacgtacacacagggctcctcagtttgcacatacacacagggctcctcagtttgcgcgcgtgcacgcacacacacacacacacacacattcatacacacatgttcttatgtacacaaacatgcatatacatgcaaataaacatatttagaaatgaggaattctcatggacatcttcaattccagtt

SEQ ID NO: 8376 - DNA, 201 bp, Homo sapiens
tgataaaatcggggtctttaggatattcatcacctcaaacatttatcatttctttgtgtgggaacattttaaatcttattttatgggctattttgaaatayaaaatattttgttaatatagtcatcctactgtgctatcacacactagagcttattccttttacctaattgtgtgttttaacgcattagctaatgtcgctt

SEQ ID NO: 8377 - DNA, 201 bp, Homo sapiens
ccaatccaggaacatgggatatctttttatttatttgtgctttcttaaacttcttttactaatgttttatagttttcattgtagaactttttttcctcctygtttaaatttattcctaggaacttaattttttgtagatattgtaaatgagattactttttgacttctttttcagacagttcattgttagagtataggaac

SEQ ID NO: 8378 - DNA, 201 bp, Homo sapiens
gataccgttaatgtgttgttgaatttggtttgatagtattttgttgagtatctttgcatctatgttcatcaaggatattggtcagtaatttttttttcttrtaatgtccttatctggttttggtattagggtagtagtggtctagtaaaccaaaattggaagtattccctcattttcaattttttagaacagtttaagaaa

SEQ ID NO: 8379 - DNA, 201 bp, Homo sapiens
tgaaatataaaatattttgttaatatagtcatcctactgtgctatcacacactagagcttattccttttacctaattgtgtgttttaacgcattagctaaygtcgcttcattctcccaccccttcccaggctcttgtagctatcattgtactctatatccccatgaaattcactttttttttttttagctcatacataaga

SEQ ID NO: 8380 - DNA, 201 bp, Homo sapiens
ttttggattttttctatttctgtcaaaaaatgttactgggattttgatagggattaaattcataactgatgggcattttaacaatattaattcttccaatscaggaacatgggatatctttttatttatttgtgctttcttaaacttcttttactaatgttttatagttttcattgtagaactttttttcctccttgttta

SEQ ID NO: 8381 - DNA, 201 bp, Homo sapiens
gaagtggtgagagtgggcattcttgtcttgtccagatcttagaggaaaggctttcaatttttaactattgattataatgttacctgaaggcttgtcatatrtggcctttattgtttacatacattccttctatatgtaatttggtgagagtttttttttaatcatgaaagtatgttgaattttgtcaaatgcctcttctgc

SEQ ID NO: 8382 - DNA, 201 bp, Homo sapiens
caaaatttacttcctttttttaagggtgattttcgttatctattgatctgtggctggacactaagtttgattccgtatcttggttattgtgagtaatgttrcagtgaacatgggagtacaaatatctcttttatatactgatttcatatcctttggaggtacatccagaggtgaaattgtggataatattgtagttctatt

SEQ ID NO: 8383 - DNA, 201 bp, Homo sapiens
tagctgttgtaaatcagattgttctcttcatttctgttttggatagttcattgttaatgtatagaaacactactgatttatgtgtgttaatttgtattgcrcaactttatagaattcaacattttttgatggagtcataagggtttttatgtataatattatattgttagcaaacaatgataattttatttctttctggtc

SEQ ID NO: 8384 - DNA, 201 bp, Homo sapiens
atttagttccttatatattttatgtattaaatccttgatgaatgtatggcttgtacatgttttctcctaattcataggttgtctcttcaaattattaatartttcctttgctgtgcagaaacttttcaattttatgtaatcacacttgtctatttttgcttttgttgcctgtgcttttggggtcaaataaaaaaaattgcc

SEQ ID NO: 8385 - DNA, 201 bp, Homo sapiens
accagccatgtgtgatagttcttttttttttttttacatctttgacagtgtttgttattttttgtctttttgataataagcattcgatctagaataaaatratatctcattctggtcttgatttagatttcgttatgattaatgatgttgagcattttttaaatatttgctgcctgcttgtatgttgtctttaagaaatgt

SEQ ID NO: 8386 - DNA, 201 bp, Homo sapiens
atgggtgcagcacaccaacatggcacatgtatacatatgtaacaaacctgcacgttgtgcacatgtaccctaaaccttaaagtataataataataaaattwaaaaaaaaagatattacaaaaaaaaagaacacccaaagcaagatggctccggaaggttcaaaataaaaattatcaccccaccctgcacacacaagacaaa

SEQ ID NO: 8387 - DNA, 201 bp, Homo sapiens
tttttacatctttgacagtgtttgttattttttgtctttttgataataagcattcgatctagaataaaatgatatctcattctggtcttgatttagatttygttatgattaatgatgttgagcattttttaaatatttgctgcctgcttgtatgttgtctttaagaaatgtctatttagattttttgcccaacttttaatg

SEQ ID NO: 8388 - DNA, 201 bp, Homo sapiens
gaaattgatcctgagctcaagcaatcttcttcctgcttcagcctcctgagcagctaggactacaggctcgcaccaccatgccagtctatttttaaaaaaawttttttttgttgagacaaggtcttgctatgttgcccagcctggtctcaaactcttggtctcaagtgatcctcccacctcagtctccaaaagtgctgatat

SEQ ID NO: 8389 - DNA, 201 bp, Homo sapiens
tttttcctccagctttttgaagtgtgatgttaagttgttaatttgtggtctttctacttttttgttgtaggctttaatgctataaacccctcttagccccrcttttgctgtatctaacaggttttggtatgttgtgttttcattttcattcatttaataaaatttttaaatttatatcttattttttcattgacccagtga

SEQ ID NO: 8390 - DNA, 201 bp, Homo sapiens
tgctttttctgtgcctgttgaaatgattatgtggtttttgtccttaatgtttatgtgatgtatttcatttattgatttgatacttattattggtctgtttgagagttttagttttttctggttcgatattgggtgtttgtatgtttccagaaatttatttatttcctctaggttttctagtttgtgagtgtagagttgttg

SEQ ID NO: 8391 - DNA, 201 bp, Homo sapiens
ttctttttaatgtgtgtctacagctctaaatttcatttttttgtacaactttcgctgcatcttataagttttaggtaaatttttatttttgttttcatttrtctcaagatatatattttttaattttactttaagttctagggtacatgtgcataacgtgccagtttgttacatatgtatacatgtgccatattggtgtgc

SEQ ID NO: 8392 - DNA, 201 bp, Homo sapiens
tcattgctaagaccaatgtcagggagatttttccctacgttttcttctagtagttttattgttttatatttattatggcagttcctcaaaaaattaaaaayagaattaccatcagatccagcagttccatttctgggcatacagtcaaaagaaattaaattagtatgtcaaagagatatcagcaatcctatgtttattgca

SEQ ID NO: 8393 - DNA, 201 bp, Homo sapiens
atccagcagcacatcaaaaagcttatccaccatgatcaaatgggcttcatccctgggatgcaaagctggttcaaaatatgcaaatcaataaacgtgatccmgcatataaacagaaccaatgacaaaaaccacatgattatctcaatagatgcagaaaaggcctttgacaaaattcaacaaccttcatgctaaaaactctca

SEQ ID NO: 8394 - DNA, 201 bp, Homo sapiens
cccctccatgttctcactagtctttgcctccaccttggctgcacaatatttttttatctggtaaggtaacccaaacctttattgttatgaaagctgatacyttagtggttttgttaaatttctgcagtcctctatttatctagtattttgagcaagggagtatttaaaggtagcccagtgaacccccagggatcaaaatta

SEQ ID NO: 8395 - DNA, 201 bp, Homo sapiens
aaacaaaaatctttccaagataatcaactcagtagtaagtgtaataattgtagataaccttaaaataatttaagatttatttttaattggcaagtaaaaawtatatacattcatcatgtactacatagtgttttaatatataaattgtggaataataaattgtggaatttaaatataaattgtggaaaataaaatcaagct

SEQ ID NO: 8396 - DNA, 201 bp, Homo sapiens
cagtaggttcttttgtctggcatggaaatttttcagttaagatctggattgtgctgctaactatttcacatcatcaagttcaattgagctagataaccaaygagagtagcacaaatgaacctaggtctgagtttggtaaatgatcttatttgtcttctgttgttcttactccttattgctgaagtaagagactatcaggta

SEQ ID NO: 8397 - DNA, 201 bp, Homo sapiens
tgagagtgtttttcaaaccatgaaatggtaacagattttgtcacatgcatttttttgcatcaattgagatgagatgatcatgtggctttttccattgttckattaatgtggtgtattatactgagtgattttcctagtttgaaccacactttctttcctgggataaatcctacttggtcttggtgtatgattcttttaata

SEQ ID NO: 8398 - DNA, 201 bp, Homo sapiens
gttgcactgcctgggtttggagtaggggtggcacagcactcctttagctgtcctggctggtgtctcagtagatgccccctaagtccactggctctgaatcyggctcagcactaggacttgcctaggagttgcagtccttgtggcctatattgcctttgaagttaagttccagggaacttttagcccatggtggtaaggctt

SEQ ID NO: 8399 - DNA, 201 bp, Homo sapiens
taatgttactacccctaaccttgaagaggaaaggagaaggaatggttattggagacctaggtaaaagagagctctatggagagagtagtgtaataagaggwaagaggtctgggaaaggtacatgcccactgctgtgatgctgcagggaagaaaccatggaaatacattccttgatctcattgtatttcctccctctgatct

SEQ ID NO: 8400 - DNA, 201 bp, Homo sapiens
actgaattcttctcttgaaggtggcaagttcccttttggcccaggatgtgtctagaagtgtcatccaggaactaaggcctggaacggaggcctcaaaattytgcccagtgccctatcctactgtggctgagctggtatccaagatacaagatgaaatcttttttattcatccctctcttctcctcaagaagaaggtctttt

SEQ ID NO: 8401 - DNA, 201 bp, Homo sapiens
ctttaatgtattttgcattgatttttgagagattggggcctagtttcatttctttgcacatgaagatttagttttccaagcaccatttttagagtctctcytatccccagtgtatgttcatggcacctttgtaaaaagtgagttgactgtaagtgcatagctttacttctgggttctctattctgttccattggtctatgt

SEQ ID NO: 8402 - DNA, 201 bp, Homo sapiens
gaggctacatgccccaatcaagttcaaaatccaatagggcagtcattaaattttaaagttccaaaatgatcttctttgacttcatgtctcacatccagggmacactggtgcaagaggtggacttccgtggccttaggcagctccacccttgtggctttgtggggtacagccccattcccaggtgccttcacagctggcctt

SEQ ID NO: 8403 - DNA, 201 bp, Homo sapiens
aattttctttgtttttttttttgttgtgtctctgccaggttttggtaccaggatgatgctgacctcataaaatgagttaggtgggagttcctctttttctrttatttggaatagttgtagaagtaatggtactagctcctctttgtacctctggtagaattcgactgtgaaacatgtggtcctgaacgtttttggttggta

SEQ ID NO: 8404 - DNA, 201 bp, Homo sapiens
gcatgtagacacacataggctaatacgtctcctgaatacagcacagcaatgggtattgactccttatctaacttgccagtctgtgtcttttcattggggcrtttagcctgttcacatttaaggttaatattgttatatgtgaatttgatcctgtcattatgaagccagctggttattttgcccattagttgattcagtttc

SEQ ID NO: 8405 - DNA, 201 bp, Homo sapiens
ctgcaatgtatacatatatcaaaacaccactcataccccataaatatatacaataaaaagacagaagcagccttttcattcctgtcagaagaaattaatcktgctttgtccgaagaaactataattgcctcccttgagatagttaccttgcaaaacacttctgattctccccaagactcacccccaccaccctcttttgct

SEQ ID NO: 8406 - DNA, 201 bp, Homo sapiens
ctaacttgccagtctgtgtcttttcattggggcatttagcctgttcacatttaaggttaatattgttatatgtgaatttgatcctgtcattatgaagccasctggttattttgcccattagttgattcagtttcttcatagtgtcaacatgtgcatatttcttatatgcatatatttcatagtggtgaaatatgggcattt

SEQ ID NO: 8407 - DNA, 201 bp, Homo sapiens
taaacctgtgcacagccctacatatgtgttttgtctattagattccctgatacatgttagagctttatagagccactccttatggacatctaatttcccartttttctttttgagattttgatggtcagccccaacctggtagtgctcatcacatgtctactatgttaagcagttaccactgatcattttttgacaaatgc

SEQ ID NO: 8408 - DNA, 201 bp, Homo sapiens
cttaccctgctttccacagctggtactcacacacaccactggggaaacagggtggaaccacccaccttctgccattagcacctgcacatgtcctttggggrccaaggagtttgatctatcccacccactgctgctttctatttttccactctgtgtgtccattgtacctatagtttagctccacttataagtgagaacatg

SEQ ID NO: 8409 - DNA, 201 bp, Homo sapiens
ctcttttcttcttctggaatgcccattatgtatatgttggtacacttggatggtgttgtaccaatttctgaggctctgttaatttgcttcattcctttttstttatgtttctctgactaggtaatttcaacttatttgtctttaatgtcactaatttttttgtcttttaaaatagtcctttgattccatctttccatttca

SEQ ID NO: 8410 - DNA, 201 bp, Homo sapiens
atgttgctgcaaaaaacatgaattcattttttatggctaaatagtattccatagtgtgtgtgtatatgcatacctacacccacccaccactacctccacawacactacattctctttatccattcctctgttgatggacacaggttgttgtttccgtatctttgctattatgaataattctagggtaaacatacaagtgca

SEQ ID NO: 8411 - DNA, 201 bp, Homo sapiens
acctgattcctttagttcttgtgaaggtgtattcttgcatggatagtcattcaatttgatgttcctgtggatggatagggttcttcctccatcttgctctrgtgattctatctcaaagcctttcttcttatagctgagaaaatgggtgaggttttttcagccaaaggaaaaatcttacacctgaatataaattttaaactc

SEQ ID NO: 8412 - DNA, 201 bp, Homo sapiens
ctgagaaattgccatatgattttccataaaggttgtactaatttacattcccaccaacagtgtatagtgttcccttttctctgcatccttgccaacatctsttgtgttttgactttttaataacagccattctgactggtgtaaaatgatatctcattgtgttttttatttgcatttctctgatgatttctaagattggac

SEQ ID NO: 8413 - DNA, 201 bp, Homo sapiens
ctattcagcctcagcatgtgagtcttttttccatccacatttggtgttttctgtccagagattggttcaaattatgttggtatagtcgaaactgtgagctstatctatgagagcagcagttcctggttgcgtctagtcagttgtcttggaaaatgtaagagttaaagaaaaaggaaagaaacatgaaaaatggctcagcag

SEQ ID NO: 8414 - DNA, 201 bp, Homo sapiens
atgtcaggtgttagtttaggtctttaatccatcttgagttaatttttgtatatggtgagaattatgggtccaatttatttcttttgtatataacaatccarttttcccaacactgtttattgaattaggatatcttttcctcagtgtaaatttttgttgaattggtcaaaaatcagttgattgcaggtatattgttcttta

SEQ ID NO: 8415 - DNA, 201 bp, Homo sapiens
ttgatgaaattctattgtgattccatttgattcctttattttcctcctttttgtgattattttataaaaactaagttttatatttctgtatgttttcatartggtaattatcaacctttcattcccatgtctaagtactctcagcattttcggcaagaccagtccagtcaccaaaaattttctaagtatttgcttatctga

SEQ ID NO: 8416 - DNA, 201 bp, Homo sapiens
cctgctattatggcattagagtcgatctttacctttagatctagtaatatttactataaatatctgggttctttgatgttgtttgcatatatatttagaaytgttatatcctctggctgagttgatcctgttattattatgtaatgatcttctttgtcactttttactgttttgacttagagtcttttttatctgatatag

SEQ ID NO: 8417 - DNA, 201 bp, Homo sapiens
gaatttccataggctacatatacttgagtcattttttaaaaaatccattcagttggtctatagcttttaagtggggaactcatttatattcaaggttactrttgatacacaagggctaatatggtttggatctgtgtccccaccaaaatctcatgttgaattgtaatccccagtgttggaggtggggcatggtgggaggtg

SEQ ID NO: 8418 - DNA, 201 bp, Homo sapiens
caaaataaaaatgtaatgttaataaatcctaaagcatcaagtaacatgaaaaacatagtaaaacttttgagcaatataagagaaaatgacttgtacatctrtaaaacgaaagagattccattataaagctacttgaattgataaaaacagaattcaacaaaatggtaggatgagataaatatacaaaaatcaatagctagc

SEQ ID NO: 8419 - DNA, 201 bp, Homo sapiens
tcttcttcccagctgtaaagtccgcctgctaaaagaaccagagagaagagacttttttcacattacatgcgttatttattattcttttttatcactgatgmctatttgaattatagttacaccacctaaaatagactattaaaatatttctggatgagtcaaggaacttctgttttattatattttgtgagttgtgatgac

SEQ ID NO: 8420 - DNA, 201 bp, Homo sapiens
aaggtagcataagtctgtgcctcagttttgttattacttgctatatggtcttggtcaaatcactaaatataactaagcctcaatataatgaggcttatatrattgttaattgttaattttcctttcaatttgaattcctatgttgctgcaatctggacactttattataattctactccaatgaagaatattaattatgat

SEQ ID NO: 8421 - DNA, 201 bp, Homo sapiens
aacgaaagagattccattataaagctacttgaattgataaaaacagaattcaacaaaatggtaggatgagataaatatacaaaaatcaatagctagcctgyataataacaataatgtattaaaattatgatgaaaaaggaaatagcattgaaaatataataatggtagggagcacactgggatcaatatttgatcaaatta

SEQ ID NO: 8422 - DNA, 201 bp, Homo sapiens
tctagtaagattaataggtgacatagcatcagaaactatggaggccaaggccaggtgcagtggctcatgcttgtaatcccagcactttgggaggccaaggygggggtggatcacttgaggtcagtggttcaagaccagtctggccaacctggtgaagccctgtctctactaaaatacaaaaattagctgggcatggtggtg

SEQ ID NO: 8423 - DNA, 201 bp, Homo sapiens
cacaaatctcagctcaaccctcctgagccacaggctacagcctgagggctctagggtctgcttgcaactccctcctccaggcactcagggatgggttctgsgtgcagtgtgggatctgaagggctcccaggatgccagaatgcactcaggtggagcaaaacacccagtctgggcagtggaggctgcattatgtacattctc

SEQ ID NO: 8424 - DNA, 201 bp, Homo sapiens
gttacctagctagcagttaggctgtgttttctgtttgctgaaattgtaggtatcaaatgataaaattttctaaaatattgtcattatttttgcccccccccaccaaactgctgtttctggtttccttttagatagggtctgaggcttgcagatattttagctgtaatctgctattattatgcaggagcctgattaatgtgg

SEQ ID NO: 8425 - DNA, 201 bp, Homo sapiens
ttccatggaatactatgcagtcataaaaaggaaccagatcatgtccttttgtaggaatatggttggagttggaaactattatcctcagaaaactaatgcargaacagaaaactaaataccacatattcttacttctaagtgagagctgatggatgagaatacatggatacatggggggatcaacacacactgggcacctgt

SEQ ID NO: 8426 - DNA, 201 bp, Homo sapiens
accttgagagtttttcttgactgcttactttctctcacaatccttattcaatgcactagaacattcttttcttccttttatcaaaatatataaaaaattcmaccacttttcaccacctccaccactttcacatttaccatgttagtttattccattatcttttttgttgccctggactattacaatagttgcttgattccc

SEQ ID NO: 8427 - DNA, 201 bp, Homo sapiens
tttcttgttgatttgtttaatttccctataggttctggatattaggcctttgttggagacatagttcatgaatactttctctgattctatagattgtctgkttgctctgttgacagtttcttttactgtgcagaagttctttagtttaattaaatcctacttgtctatttttgtttttgttgcatttgcttttggggactt

SEQ ID NO: 8428 - DNA, 201 bp, Homo sapiens
ccacttataaatgagaacatgcagtattcagttttctgttcctgtattaatttgtttaggattatgccctccagctccatccatgttgctgcaaaggacaygatctcattctttctaatgggtacatagtattgcatggtatatatgtcccatatttcctttctccaatctgccatagttgggcaacgagattgattccat

SEQ ID NO: 8429 - DNA, 201 bp, Homo sapiens
ggatgagataaatatacaaaaatcaatagctagcctgtataataacaataatgtattaaaattatgatgaaaaaggaaatagcattgaaaatataataatkgtagggagcacactgggatcaatatttgatcaaattaatataaaatttatttagaagaataaaacatatagaataacatacatatgcacacatacaggca

SEQ ID NO: 8430 - DNA, 201 bp, Homo sapiens
ttactgactaaagggagaattttatcaccatatgatatagctggagaggtctacagtcattgttactactttcagcagtgcaacttaaggaggatactgtrttccttcacgattgtaaatatggtatgcagagttttagtgtcttcatagccaaaataataccattaagtacagaaacatttgagctgaatttaatcttga

SEQ ID NO: 8431 - DNA, 201 bp, Homo sapiens
cctcttatgatcctttgtatttctgtggcatcagctgcaatgttacccttttcttctcttgttttagttatttgaatttcctcacttttatttttagtctrtctaaaggtttgtcaagtttgtttatcttttcaaaatacagctttttgttttgttcatcttttatattttttaatctcttttttgtttatttctgctctg

SEQ ID NO: 8432 - DNA, 201 bp, Homo sapiens
cgattgtaaatatggtatgcagagttttagtgtcttcatagccaaaataataccattaagtacagaaacatttgagctgaatttaatcttgacattggaakttttgataaattactgaatataatcccatctccaacctactctgcactattcttattattaagaaataatgtgttttagttttccgggacaaagctggtt

SEQ ID NO: 8433 - DNA, 201 bp, Homo sapiens
acactgtttgtgggtatataaattagtgtaaacactatggaaatcagtatgttttttgtcctttattctgttaatgtgatgtgtcacatttatttgtttgkggatattgaaccatctgtacttccctgatatgaatcccactcgatcatggtaaatgatctttttaatgtgttgttaaatttggtttgttagtcttttgtt

SEQ ID NO: 8434 - DNA, 201 bp, Homo sapiens
atctctatcaatatatagatacacatgaggatatttattatgagaattggctcacatgataatggatgctgagaagtcccatgatatgccatctgggaaasgccatagtgtaattcagtctgaatctgaaggcctgagaaccagaggtgctgatggtgtaacctccactccaaggtcaaaagcttaagatctgggaggcca

SEQ ID NO: 8435 - DNA, 201 bp, Homo sapiens
tttcaaggatatggagaaaagggaactcatacactgtttgtgggtatataaattagtgtaaacactatggaaatcagtatgttttttgtcctttattctgktaatgtgatgtgtcacatttatttgtttgtggatattgaaccatctgtacttccctgatatgaatcccactcgatcatggtaaatgatctttttaatgtg

SEQ ID NO: 8436 - DNA, 201 bp, Homo sapiens
tctatcaatatatagatacacatgaggatatttattatgagaattggctcacatgataatggatgctgagaagtcccatgatatgccatctgggaaaggcmatagtgtaattcagtctgaatctgaaggcctgagaaccagaggtgctgatggtgtaacctccactccaaggtcaaaagcttaagatctgggaggccattg

SEQ ID NO: 8437 - DNA, 201 bp, Homo sapiens
agtccattaaacctctttcttttgtaaattgcccagttacagatctgtctttatcagcaacatgaaagtgtacgaatacaactggatagtattcattgcasaaccatgagccaattaaacctcttttctttgcaaattacccagtctcaggtatttctttattagcaatgtggaaccagactaatacaaatcttattttaa

SEQ ID NO: 8438 - DNA, 201 bp, Homo sapiens
cctggaatctgaaggcccaacaaccaggagctccaattccaagggcaggagaagatggatatcccagccaagaagaaagggagaacttattgttgctctgygtttttgttctatttaggccctaagtgatttggatgacacctgtccacattggtaagggtggatcttctttagcccatctactgattcagatgcttatat

SEQ ID NO: 8439 - DNA, 201 bp, Homo sapiens
tgtaaggcctccccagtcacctggaactgtaagtccattaaacctctttcttttgtaaattgcccagttacagatctgtctttatcagcaacatgaaagtktacgaatacaactggatagtattcattgcagaaccatgagccaattaaacctcttttctttgcaaattacccagtctcaggtatttctttattagcaatg

SEQ ID NO: 8440 - DNA, 201 bp, Homo sapiens
tgttgctctgcgtttttgttctatttaggccctaagtgatttggatgacacctgtccacattggtaagggtggatcttctttagcccatctactgattcakatgcttatattttctagaaacacccttacagacacactgagaaataatgttttactagctatctgggcatcttttagccccatcaacttgacacataaaa

SEQ ID NO: 8441 - DNA, 201 bp, Homo sapiens
tttataaaaatgaatggaaactttgatttctggcatatttttaacaattcagaggcttcacaattaaatggtgtcactctttattgtagtctaagcctctyttcctttttatttaagattttaatttataattgacataatggtacacattcatggggtacaatatggtgttttagtccatgtatacatagtataatgatt

SEQ ID NO: 8442 - DNA, 201 bp, Homo sapiens
atcacaagcaccattgtacttacagagcttatcaatctcagatctcacaaattcaagtgttcactcaatttatctgtgttttatctctcacctttctctayggaattcagtttgcaaatgtactgtcttctgtgtgtacttcattctgtattctgagattctttttgactcttggctaactctcactctcatgatctcagt

SEQ ID NO: 8443 - DNA, 201 bp, Homo sapiens
agactcttactacattttgtttgttacacaaaatattgtgttattaaatgtacctatatttcttttgtgaattcaggaattccttttttatttaaaagggscttgtccttccaaatgttttataaaaattatcctatatgttctgaaattttattttgtttcacagttggatctttattgcagttggattttatttttgta

SEQ ID NO: 8444 - DNA, 201 bp, Homo sapiens
tgaatgttgaatattggcccccactctcttccggcttgtagagtttctgccgagagatccgctattagtctgatgggcttccctttgtgggtaacgcgacmtttctttctggctgcccttaatattttttccttcatttctactttggtgaatctgacaattatgagtcttggagttgctgttctcgaggagtatctttgt

SEQ ID NO: 8445 - DNA, 201 bp, Homo sapiens
ttaaaaaagattaatactcttggaaaaataaaattgactttcaactttttaagtgcatatagtatatgaagtaatagagtgtttccatatccttgcagtakaaacactttcatgatttttacatgtaacttcatagtttattttgaaaattaatttggtctttttttgaaaattaattttcaaaattattttgaaaattaa

SEQ ID NO: 8446 - DNA, 201 bp, Homo sapiens
actggagctgttcctgttcagccatcttggctccagcacctcatttagttcttaaaaagattttcttattgtatcctagagtatggatgatgaattagatraaaatattttgcctgacacttagaactgttagaagaaaaagactcagcagtaaatgtaatgatgaatattattaaattattttaaattaaagttaacttt

SEQ ID NO: 8447 - DNA, 201 bp, Homo sapiens
ggaaatgcagaaatcatccgtcttctgcgtcactcacactgggatctgtagactggagctgttcctgttcagccatcttggctccagcacctcatttagtycttaaaaagattttcttattgtatcctagagtatggatgatgaattagatgaaaatattttgcctgacacttagaactgttagaagaaaaagactcagca

SEQ ID NO: 8448 - DNA, 201 bp, Homo sapiens
gccccgcacccactgtcctgcaaccactgtctgacactccgcagtgtgatgaacccagtacctcggttggaaatgcagaaatcatccgtcttctgcgtcaytcacactgggatctgtagactggagctgttcctgttcagccatcttggctccagcacctcatttagttcttaaaaagattttcttattgtatcctagagt

SEQ ID NO: 8449 - DNA, 201 bp, Homo sapiens
tattgattgctagtttcatatcattgtggtgagtaaagatatttgatatgatttcaatcttcttaaatttgcaaaggcttttttgtgccttatgtgtgatyttttccagagaatggctgcatgtgcttgagaagaatgtgcattctagtgctgttggatggaatattctgtatatatctattaggttcgcttgatctaaag

SEQ ID NO: 8450 - DNA, 201 bp, Homo sapiens
tttttgtattttttgtagagctaggtctttgccatgttgcccaggctgatcttgaactcctgagctcaagcaatccatctgctttagcctcccaaaatgcwgggactacaggcaagagccaccattcctggagttttttacttttattccttgtctaatattttttctctctttatgtagacctgtgtttctgacatgtat

SEQ ID NO: 8451 - DNA, 201 bp, Homo sapiens
agtattagtttgggaatgacccaattttccaggtgccacctggaaaagggtgccaccctttctttgactaggaaaaggaattccctgaccctttgcacttyccaggtgaggtgatgcctcaccctgcttcagcttaggctcggtgccccgcacccactgtcctgcaaccactgtctgacactccgcagtgtgatgaaccca

SEQ ID NO: 8452 - DNA, 201 bp, Homo sapiens
agcacatggatcattctgatctgtataatattcattactgggttgatccaaaataattgtaaattaagatcaatttttataatttatatgctgtgtcagtkagaaaatatagccccaaattctttgagtcttcttccagtcaggaaatggggtctacccaacctcttgtgagtttagctggcttatattcattttcattaa

SEQ ID NO: 8453 - DNA, 201 bp, Homo sapiens
gggcgcccctcccccagcctggctgccgccttgcagtttgatctcagactgctgtgctagcaatgagcgaggctccgtgggcgtaggaccctccgagccakgtgcgggatataatctcctggtgtgctgtttgctgaccgttggaagagcgcagtattagtttgggaatgacccaattttccaggtgccacctggaaaagg

SEQ ID NO: 8454 - DNA, 201 bp, Homo sapiens
tcatgtttattcttttacatctgtatattcagttcccagcactagtttttgaaaatactattttctccccactgaattttcttagtgctcttgtagaaaamattgcttggccataaatgtaagggtttgtttctgaactctcaattctattgcatttatgtatatgcctttgcttatgccagtgccacactcttgattact

SEQ ID NO: 8455 - DNA, 201 bp, Homo sapiens
taggctactcgggtcagggacccacttgaggaggcagtctgtccgttctcagatctcaaactccatgctgggagaaccactactctcttcaaagctgtcasacagggacatttaagtctgcagaggtttctgctgccttttgtttggcaatgccctgcccccagaggtggagtctacagaggcagtgagacctccttgagc

SEQ ID NO: 8456 - DNA, 201 bp, Homo sapiens
tgcacattgtgcaggttagttacatatgtatacatgtgccatgctggtgcgctgcacccactaatgtgtcatctagcattaggtatggattttctgccgaragatccgctgttactctgatggtcttccctttgtgggtaacctgagctttctgtctggctgcccttaacatttttccttcatttcaactttggtgaatct

SEQ ID NO: 8457 - DNA, 201 bp, Homo sapiens
aatattggcccccagtctcttctggcttgtagattttcttttttttttttttttttttttattatactctaagttttagggtacatgtgcacattgtgcakgttagttacatatgtatacatgtgccatgctggtgcgctgcacccactaatgtgtcatctagcattaggtatggattttctgccgagagatccgctgtta

SEQ ID NO: 8458 - DNA, 201 bp, Homo sapiens
gttgaatattggcccccagtctcttctggcttgtagattttcttttttttttttttttttttttattatactctaagttttagggtacatgtgcacattgkgcaggttagttacatatgtatacatgtgccatgctggtgcgctgcacccactaatgtgtcatctagcattaggtatggattttctgccgagagatccgct

SEQ ID NO: 8459 - DNA, 201 bp, Homo sapiens
cctccataagcccctaccttaactggaggatcacaataacatttttgagtcccccggaatcaatgtcagctcagagccagtgaccagtagtccctgaaagktctgattatttccctttcccctatgcacagttaccctagtaaaaggctggaggtctctttggggaaagatggaagaaagattaacagcataaactgttgg

SEQ ID NO: 8460 - DNA, 201 bp, Homo sapiens
gacacatatgccctccaaagactaaaccaggaagaagttgaatccctgaatagtccaataacaggctctgaaatagaggcaataattaatagcttagcaaycaaaaaaggtccaggacctgatggatttacagccgaattctaccagaggtacaaagaggagctgataccattccttgtgaaattattccaatcagtagaa

SEQ ID NO: 8461 - DNA, 201 bp, Homo sapiens
gcagatgcagcatagtgccttttttcctctgcctcctgggttcaagtgattcttctgtcttagcctcccaagtagctgggactacaggcatgcaccaccaygcccagctaatttttgtattttcagtagtgatggggtttttccatgttggccaggctggtgtggcccaacatccctacatcgtagagccccactgacatc

SEQ ID NO: 8462 - DNA, 201 bp, Homo sapiens
ctctgatttttagaattttccatttttctgctttgttttttccccatctttgttatctacctttggtatttgaggatggcgacgtacagatggggttttgrtgtggatgtcctttctgtttgttagttttccttccacagtcaggaccctcagctgcaggtctgttggagtttgccggaggtccactccaggccctgtttg

SEQ ID NO: 8463 - DNA, 201 bp, Homo sapiens
tgaggcttgagtaggtggttttcccctcacagtgtaaacaaagctgctgggaagttcgaattcggtgcagaacccaccacggcgcagcaaagccactgtarccaggctgtctttctagattcctcctctctgggcagggcatctctgaaagaaaggcagtagccccagccaggggcttatagataaaactcccatctccct

SEQ ID NO: 8464 - DNA, 201 bp, Homo sapiens
attatttttacttttcgagtcagagctggccaaaagcatcgacaataatcatctctggaatggagcaccatagcctttacagattacaccatagcctttayggattacacccaggaatttcacttgggttttaggtccttgtgccttttccaatgataatggcacagtacatgctgcacgtgggtgaacagagcatctggt

SEQ ID NO: 8465 - DNA, 201 bp, Homo sapiens
actgaaaactaccatataatgctgaaaacaattaagaagacataaataaatggaaagacatctcatgttcatggattagaagataacttgttttttttttktttttttggtttttttttgagattgagtcttcctctgtcacccaggctgtgcagtggcgcaatctcagctcactgcaacctccgcctcccaggttcaaac

SEQ ID NO: 8466 - DNA, 201 bp, Homo sapiens
ccagctttgtttttcttgctcaagattgctttggctattcagcgtcttttatggttacatatgaatttttggattttttctatttctgtcaaaaaatgttrctgggattttgatagggattaaattcataactgatgggcattttaacaatattaattcttccaatccaggaacatgggatatctttttatttatttgtgc

SEQ ID NO: 8467 - DNA, 201 bp, Homo sapiens
cccagatcaacataattgagtgtttcccatattttcttctagcaattctagtttcagatcctaaatttatgtgtccttaatccaatttgagttgatttttrtatatagtgtgagatgaaggtataattttattcttctgcatgtggatatctagtttttcaacaccattgtatattttattccagtgatctacatgtctgt

SEQ ID NO: 8468 - DNA, 201 bp, Homo sapiens
gcttagtttggctggatatgaaattctgggttgaaaattcttttctttaagaatgttgaatattggcccccagtctcttctggcttgtagattttcttttytttttttttttttttttattatactctaagttttagggtacatgtgcacattgtgcaggttagttacatatgtatacatgtgccatgctggtgcgctgca

SEQ ID NO: 8469 - DNA, 201 bp, Homo sapiens
atgaagcttagtttggctggatatgaaattctgggttgaaaattcttttctttaagaatgttgaatattggcccccagtctcttctggcttgtagattttyttttttttttttttttttttttattatactctaagttttagggtacatgtgcacattgtgcaggttagttacatatgtatacatgtgccatgctggtgcg

SEQ ID NO: 8470 - DNA, 201 bp, Homo sapiens
aaaatgactgtgatgatggtttaacaactgtgaatatattaaaaatatttgaattagatgctttacaagggcaaattgtatgatatattaccctttttttwtaaaaaaaaaaagaaagctcaataaaatccatgtgtaacagtttcaaaaagagatgtaaagtactgggaggatgttacgaagaaggaaaattgtgaatct

SEQ ID NO: 8471 - DNA, 201 bp, Homo sapiens
ttatgaagcttagtttggctggatatgaaattctgggttgaaaattcttttctttaagaatgttgaatattggcccccagtctcttctggcttgtagattwtcttttttttttttttttttttttattatactctaagttttagggtacatgtgcacattgtgcaggttagttacatatgtatacatgtgccatgctggtg

SEQ ID NO: 8472 - DNA, 201 bp, Homo sapiens
actgatgggtcttgactctttatccaatttgccagtctgtgtcttttaattggagcttttagcctatttacatttaaggttagtattgttatgtgtgaatytgatcctgtcattatgatgttagctggttattttgctcgttagttgatgcagtttcttcctagcctctatggtctttacaatttggcctgtttttgcagt

SEQ ID NO: 8473 - DNA, 201 bp, Homo sapiens
gtccccagaatctagtttattcctggaagtggtttgttggcacactcttccagaagctgcctgatatatatataataaatatatatatactacccagagtyacatagattcaacacagtgcttatcaatattccaattacatttttagagaaacagaaaacaaaaattctataacttctatggaatcacaaaagacatcaa

SEQ ID NO: 8474 - DNA, 201 bp, Homo sapiens
aggactctattctgttccattggtctatatctctgttttggtaccggtaccatgctcttttggttactgtagccttgtagtatagtttgaagtcaggtagygtggtacctccagctttgttcttttggcttagaattgacttggtgatgtgggctcttttttggttccatatgaactttaaagtagttttttccaattctg

SEQ ID NO: 8475 - DNA, 201 bp, Homo sapiens
ggctagccagttttcccagcaccatttattaactagggaatcctttccccatttcttgtttttgtcaggtttgtcaaagatcagatagttgtagatatgcrgcattatttctgaggactctattctgttccattggtctatatctctgttttggtaccggtaccatgctcttttggttactgtagccttgtagtatagttt

SEQ ID NO: 8476 - DNA, 201 bp, Homo sapiens
agcatttagcccatttacatttaaggttaatattgttatgtgtgaatttgatcctgtcattatgatgttagctggttattttgctcattagttgatgcagyttcttcctagcctcgacgatctttacaatttggcatgtttttgcagtggctggttgttcctttccatgtttagtgcttccttcaggagctcttgtaaggc

SEQ ID NO: 8477 - DNA, 201 bp, Homo sapiens
ttcagctttctccatatggctagccagttttcccagcaccatttattaactagggaatcctttccccatttcttgtttttgtcaggtttgtcaaagatcasatagttgtagatatgcggcattatttctgaggactctattctgttccattggtctatatctctgttttggtaccggtaccatgctcttttggttactgta

SEQ ID NO: 8478 - DNA, 201 bp, Homo sapiens
cgtgatgcctccagctttgttcttttggcttaggattgacttggcgatgcgggctcctttttggtttcatatgaactttaaagtagtttactccaattctktgaagaaagtcgttggtagctagatggggatggcattgaatctataaattaccttggggaatatggccattttcacgatattgattcttcctatccatga

SEQ ID NO: 8479 - DNA, 201 bp, Homo sapiens
atcatgtctccccataatcccagcactttgggaggtaaaggtgagtggatctcttgaagccaggaattcaagaccagcctgggcaatgaagtgagaccctyattgccacaaaaacaaaacaaaacaaaacccaaaacaaacaaacaaacaaaactatcacatctgctattaatgtaaatctaccaactttcttctgattgg

SEQ ID NO: 8480 - DNA, 201 bp, Homo sapiens
ttctctctcccacagatgcagagaataaacatttccacatggatcaattctctctgagagccagaaagtggttgagcgactcctacacattgggaaactgwaaaaatatccacatattgggtagggaaagcaaagactcatgcacaaactgcatcctaagcacagtgtcatacaattgggaaataatccacaactgataac

SEQ ID NO: 8481 - DNA, 201 bp, Homo sapiens
tgttgttcctgcaagagggataattggtgtaaccttctatttgaccatcttgctccaccactttgggtatccaggatagcgcttttattagctacaggagwcctcactatttggactgtagtggggctctgtgttgtgcccccatgactattaaatgatgataagcatctaatggagagcccctcaatctcttccttgaga

SEQ ID NO: 8482 - DNA, 201 bp, Homo sapiens
ggttttctttctccagtttctcaccatttgttatcttttgcgtttttcattatagttgttctaataggtgtgaggtgatatctcattgtggctttaatttkcatttccctgatgattaaaaatgttgagcattttttcatatacttgttgactatttatgtgtcttttttgtttgtttgtttttgagagacagagtcttgc

SEQ ID NO: 8483 - DNA, 201 bp, Homo sapiens
tttctgatgtttcgttgttaaacattagaatcctttgccatcagattgagtaacttcctttagtatttcttataaaacaggtttggatgtggtaagttttmtcaccttttgtttgtctaggaaagtcgttatcttcccttcatgttagaaggatagctttgttgaatacactattttaggttgtcaattcttttccttcag

SEQ ID NO: 8484 - DNA, 201 bp, Homo sapiens
ttctagttgttattttttaatagttttgtctgtcttcaaactaaatatatgagtcctttatataccacagttacagtattagagtattctgaatttgtatkgtttctattagcagagatttttataaaaaatttctgatgtttcgttgttaaacattagaatcctttgccatcagattgagtaacttcctttagtatttct

SEQ ID NO: 8485 - DNA, 201 bp, Homo sapiens
actaaaaaaaactttatactttactcctcacattttgacttttagatatctcaatttctatatttttgtactgcctaatgcataataaatttttctagttrttattttttaatagttttgtctgtcttcaaactaaatatatgagtcctttatataccacagttacagtattagagtattctgaatttgtattgtttctat

SEQ ID NO: 8486 - DNA, 201 bp, Homo sapiens
tgctcttttttggtttccctttggttggaagatctttttccaaccctttttttcagcttatgcatgtctttataggtgaagtaggttttctatagggcacrtatacttggatcttatttttttcattcagccactctatgtctttaatttggagaattctgtcctttaacattcatggttattatgcataattaaggtctt

SEQ ID NO: 8487 - DNA, 201 bp, Homo sapiens
ccagtttctttgttgattttttgtctggatgatctgaaagtgtagtgttgaattcccctcctattattgtatcacgttcaatcgcttttagtctgttaatrtttgctttatatgtttaggtgctcctgtgttgtgtgtacatatatttataattgttacatccttctgttgtattgagccctttatcataatataatggct

SEQ ID NO: 8488 - DNA, 201 bp, Homo sapiens
tttctgtcttgtaatgtttctgctgagaggtctgctgctaggctgatggaattccttctctaggtgactggcaccttctctctagctgcctctaaggattyttcttttgcaatccctttgatgaatctgatgattaattgccataggaatgattatcttatatcgtatctggctgaagttctctgtatttcttggatttgc

SEQ ID NO: 8489 - DNA, 201 bp, Homo sapiens
tgtcaacattgtgatgtaaattaaatttttaaagaaccaaattaatatttggaattgaaaggtaaaataactacaagggaaaattcattacagggtcaagraaagatttgaaatgtcagaaggagtaagcaaacttaatataatgggaataccagaaggagagtcttccaagtagagagagaataagaaaaaatatttgaa

SEQ ID NO: 8490 - DNA, 201 bp, Homo sapiens
gacatgattgtaaggcctccccagtcacctggaactgtaagtccattaaacctctttcttttgtaaattgcccagttacagatctgtctttatcagcaacrtgaaagtgtacgaatacaactggatagtattcattgcagaaccatgagccaattaaacctcttttctttgcaaattacccagtctcaggtatttctttat

SEQ ID NO: 8491 - DNA, 201 bp, Homo sapiens
aacagatcctagtgaggttgtagagaaaagggaaggcttatacactgctggttggaatgtaaattagttcagccactctgggaagcagtttagagattggytctcaaagaacttaaaacagagctaccatttgacccaggaaccccattactggttatatagccaaaggaatataaatcatcctaccataaagacacatgc

SEQ ID NO: 8492 - DNA, 201 bp, Homo sapiens
tatacctaatgctagatgacgagttagtgggtgcagcgcaccagcatggcacatgtatacatatgtaactaacctgcacaatgtgcacatgtaccctaaamcttaaagtataataaaaaaaaaatctagatttctagcttctttggggaatttagaacacctgagaatatctgtcatgcatttgtagtggtaagaataatg

SEQ ID NO: 8493 - DNA, 201 bp, Homo sapiens
tgatgaatattattaaattattttaaattaaagttaactttgaataaattaagcagaatttggtttatggatgtgtatcacgttaggactgtagaaacatkcattaaattgtgctatttaaagtagtatttattttttgatttcctttaattttttgttagttctgacatttactaagagaggcatgttgaattctcctcc

SEQ ID NO: 8494 - DNA, 201 bp, Homo sapiens
cctgcaagcatagcaggtgtttaacctcaaggagccagagagaaaagccacaggcctggccccataggaagaagattgaaactggaccccccttcctttcwccacatgtaaaaatcaacccaagatggatcaaagacttaaatgtaaaacctacaactataaaaaccctagaaggaaacctaggaaatacccttctggaca

SEQ ID NO: 8495 - DNA, 201 bp, Homo sapiens
actgggatctgtagactggagctgttcctgttcagccatcttggctccagcacctcatttagttcttaaaaagattttcttattgtatcctagagtatggwtgatgaattagatgaaaatattttgcctgacacttagaactgttagaagaaaaagactcagcagtaaatgtaatgatgaatattattaaattattttaaa

SEQ ID NO: 8496 - DNA, 201 bp, Homo sapiens
tggatgcaccctgagaacaggctctccctgacaactgccattgctgttaatgccacccaggcacaccacttggggtcctggggatttccccaccctgcctrccaaagcatgtgcccatgcataccattgggggatctgagaaccagccctctcagcctagagccgtgtttcagtgcccaaaaatgcctcccaggggccagg

SEQ ID NO: 8497 - DNA, 201 bp, Homo sapiens
tggaggctattatccttagcaaactaacacaggaatagtaaaccaaatactgcatgtcctcacctataaatgggagctaaatgatgagagcatatggacayatggaggggaacaacgaacactggggccttttgcagagtggaggatgaaagagggacaggatcaggaaaaataactaatgggtactaggcttaatacttg

SEQ ID NO: 8498 - DNA, 201 bp, Homo sapiens
tatccatacctggtgtatggatatgcttgtatgaagtatgaatgtgtttaaaaattatattcttatcataaactctctaggataatttcagtttggaaaasaggcagcattgtatggaagaaagcactggttaaggagtaacaaacatctatttctgtataagttttatagttaactgtatatctgattttgttcaaatca

SEQ ID NO: 8499 - DNA, 201 bp, Homo sapiens
cggaatcaccatcttatatgtagtctaaacatcatgtttgtatggttacatgagtgtaaccatacaaaagttaattctagtaagattaataggtgacatarcatcagaaactatggaggccaaggccaggtgcagtggctcatgcttgtaatcccagcactttgggaggccaaggtgggggtggatcacttgaggtcagtg

SEQ ID NO: 8500 - DNA, 201 bp, Homo sapiens
gcaatccgagatcaaactgagaggtggcagcgaggatgggggaggggcatctgccattgctgaggcttgactaggtaaacaaagcaactgggaagctcgarctaggtggagcccaccgcagctcaacaaggcctgcctgcctgtatagactccacctctgggggcagggcatagctgaacaaaaggcagcggaaacttctg

SEQ ID NO: 8501 - DNA, 201 bp, Homo sapiens
tgagagtgtatttatcgaaacagttccagtaactgctgggcttgtgttttttttttgagacacggtctcactttcttgcccagactggagtgcagtggccygatcttggctcactgcaacctccgcctcccgggctcaagtgattttcctgcctcagcctcctgagtagctgagattataggcacacaccaccacgtctgc

SEQ ID NO: 8502 - DNA, 201 bp, Homo sapiens
ttattagtaagtataaaaagtaaagataactttaaattatttaaaagtaagttcatccgaaggtatttttgctttgattcacaaaagttttacactttgaytaaaatgtgaataccctaccataattaaagaaaaaagtgaaaaatattgatacattttggttgagagatttctggcccttagattatttcatgaccacag

SEQ ID NO: 8503 - DNA, 201 bp, Homo sapiens
gtgaatacccattggtgtgctgtattcaggagatccaattcatatgcagagacacacatagcctcaaaataatgggatggaggaatatttaccaagcaaayggaaaacagaaaaacccaggggttgcaatcctagtctctaataaaacagattttaaacaaacaaagatcaaaaaagacaacgaagagcattacataatgg

SEQ ID NO: 8504 - DNA, 201 bp, Homo sapiens
ttttgaggaacctccatactgtttttaatagttgatgtactagtttacattcctgctaacagtgtacaagagttatcttttcttcatatcctgaccaacayttatctttggtatttttgataatagacattctgaccgatgtgaggtgacatatcattgtggttttaattttcatttccttaataattaatgatgttgagc

SEQ ID NO: 8505 - DNA, 201 bp, Homo sapiens
agtgtgggtatgtgtctgagtgcgccctgatatggcatagcattctgtcgagggctggctccccccttgtgctctgagctgctaggatatgttccaaccasctgcaacccttaactgggataagtaggctgcaaaacatgtgaatgaatgaatgaatacaagttattataaaataaaaattcatatacaataattatacaa

SEQ ID NO: 8506 - DNA, 201 bp, Homo sapiens
aactgtatatctgattttgttcaaatcactaaacttctctaggcttatatgattgctaagaatgcttccaattctaaggctttgtaattctgcagtccagkgcttttttttttttactaattcatcttctttaatgactgatgctaattaagttattactattcatacatacaaatatactatcacatacacacagcacgg

SEQ ID NO: 8507 - DNA, 201 bp, Homo sapiens
cctaatgctagatgacgagttagtgggtgcagcgcaccagcatggcacatgtatacatatgtaactaacctgcacaatgtgcacatgtaccctaaaacttraagtataataaaaaaaaaatctagatttctagcttctttggggaatttagaacacctgagaatatctgtcatgcatttgtagtggtaagaataatggttt

SEQ ID NO: 8508 - DNA, 201 bp, Homo sapiens
gtaagaacaagaatttttcaagtctcctgttaatggcttatttagctctgaagttaaatatggatctttgatgacaactgtagctgtaagttattacatgygaaaatatcttcatgaatttcctcctgtaatttgtggaactctagtatttgctatcaatggaacattagttagatatgattagttttagaactcatttac

SEQ ID NO: 8509 - DNA, 201 bp, Homo sapiens
aaatagcacatgtgttataggtatcgtcaccattttgactctagtggggctgtatgttggccctatgccctactgcctggccagaagatccttagtggggrgtccatcaagctcttctttgagacttcattgttgagtaactagacaatgcttgcagtgtcagggaactcatcatgagtgggccaaactttcagagaacaa

SEQ ID NO: 8510 - DNA, 201 bp, Homo sapiens
gccatggtttttagtttctgtctctagtgataagcagaaaagaggaatgagaaaggggctttactggctcaaccagaagcagaaactaagaatccatgacygtattctctcccttggacacccctagaactttatggtatatacattggcttattcaaccaatatccaatgcttgaacatttatgtggttttgagtatttt

SEQ ID NO: 8511 - DNA, 201 bp, Homo sapiens
ttattacttggctatattgtgtattgctggagttcgatgtacaaatgattttgtcaccaaggtagtgagcatagtacccaataggtagtttttcagtcctyacactctgcctaccctccaccctcaagtaagccctggtgtctatttttcccctctttgtgtccatgtgtactcaatgtttaagtgtacccacttacaaga

SEQ ID NO: 8512 - DNA, 201 bp, Homo sapiens
tcctgactaatccacaacacaattacccaattgtatcagcatcattattatttttcaacttttattttaggttcaagtggtacacttgcaggtttattacwtggctatattgtgtattgctggagttcgatgtacaaatgattttgtcaccaaggtagtgagcatagtacccaataggtagtttttcagtccttacactct

SEQ ID NO: 8513 - DNA, 201 bp, Homo sapiens
catatgtttcatagaaatttttaactttgacctaaagcatgtatactctaagataattagaaaataaaagtattgataacttttggttggaatttcttgtyttgagactatttcacaagcatgggttgtgtgctcagaattcaccaaagcccaataaaaggccaataattgtctcttaaagggtatatacttttcaggtat

SEQ ID NO: 8514 - DNA, 201 bp, Homo sapiens
ataaaggtaattttatccttgtctggttgttaagtcttcatttttgtggaagaaagagggctgggcctcctattccatgatcttacttacatcaatccccmtattttaatttattttaagttcaacttatcagaaattttttttgattcatgaatatgtatttgggcatatgtttcatagaaatttttaactttgacctaa

SEQ ID NO: 8515 - DNA, 201 bp, Homo sapiens
ataaataaataggctgggcgcagtggctcatgcctgtaatcctagcactttgggaggctgaggcgggcagattgcctgagctcaggagttcgagaccagcstgggcaatatggtaaaaccccgtctccattaaaatagacaaaaaattagccaggtgtggtggcatgcacctgtaatcccagctacttgggagggtgaggc

SEQ ID NO: 8516 - DNA, 201 bp, Homo sapiens
aagctgaagaattttgttcttagctttgtgactgtttagtcaatatgtcttttgtatacatctattagatcaaatatgtttattctgttcagttcttacttttttcattgaggtttttctgtttattctatattactaagataagtatgttaatttctcccactgtgattatggatttctctatgccttatggtagttctg

SEQ ID NO: 8517 - DNA, 201 bp, Homo sapiens
taagctgaagaattttgttcttagctttgtgactgtttagtcaatatgtcttttgtatacatctattagatcaaatatgtttattctgttcagttcttacttttttcattgaggtttttctgtttattctatattactaagataagtatgttaatttctcccactgtgattatggatttctctatgccttatggtagttct

SEQ ID NO: 8518 - DNA, 201 bp, Homo sapiens
gtaagctgaagaattttgttcttagctttgtgactgtttagtcaatatgtcttttgtatacatctattagatcaaatatgtttattctgttcagttcttacttttttcattgaggtttttctgtttattctatattactaagataagtatgttaatttctcccactgtgattatggatttctctatgccttatggtagttc

SEQ ID NO: 8519 - DNA, 201 bp, Homo sapiens
agtaagctgaagaattttgttcttagctttgtgactgtttagtcaatatgtcttttgtatacatctattagatcaaatatgtttattctgttcagttcttacttttttcattgaggtttttctgtttattctatattactaagataagtatgttaatttctcccactgtgattatggatttctctatgccttatggtagtt

SEQ ID NO: 8520 - DNA, 201 bp, Homo sapiens
aactctctaggataatttcagtttggaaaacaggcagcattgtatggaagaaagcactggttaaggagtaacaaacatctatttctgtataagttttatasttaactgtatatctgattttgttcaaatcactaaacttctctaggcttatatgattgctaagaatgcttccaattctaaggctttgtaattctgcagtcc

SEQ ID NO: 8521 - DNA, 201 bp, Homo sapiens
ctaggataatttcagtttggaaaacaggcagcattgtatggaagaaagcactggttaaggagtaacaaacatctatttctgtataagttttatagttaackgtatatctgattttgttcaaatcactaaacttctctaggcttatatgattgctaagaatgcttccaattctaaggctttgtaattctgcagtccagggct

SEQ ID NO: 8522 - DNA, 201 bp, Homo sapiens
gttctgtttattttatcatttatgagaaaggtattttaaattctgctactgtgattacttatttctctatctctttgtagttctgccaatttttgttctaygtttctaaagcttttttttatatacatacacattttaaattgttaaattttcttaagaatgctgaaactcttgtctttatgatggacattttttaaaata

SEQ ID NO: 8523 - DNA, 201 bp, Homo sapiens
attgagagtggacagagggaggatgtagaccctgggctgaaggagtaggaagctgggaagcctgcacagggctgccaagcatcaggactcattcttggtcyccagaaatttttggggaaagggtgagttaaataggtgaggagtggtcttatctcaccatgcacctccagaatcctagctgcagaagaccctattgtcctg

SEQ ID NO: 8524 - DNA, 201 bp, Homo sapiens
agttcatctaacttgcttaaggacataaagctcataagcaacagataaagggtgggtaactagatgattggactctacagacaatgagtttaacctctagyatatactccatcacaaggacaaagtccataagagccagtctcataatgctaaagaaaaatttttgacacttgataaacatggtaaggaagactttattaa

SEQ ID NO: 8525 - DNA, 201 bp, Homo sapiens
agcccgtcacttttagttcagtttgtccttaactctaaagcaagtctcttgcaaatagcatatagtggatcttgcttttctcatcctttcagcttctctgyatcttttgaatgttaactttaacctatttatatttaaaattattattgctaggtgaagacttactattgcaattatattgttttctctctgttttatagc

SEQ ID NO: 8526 - DNA, 201 bp, Homo sapiens
tcattaatgtgcccatgacacctctctgggctattgtagtttgtgaaaggtgtctatatttgtttcatagcaggagggatgaaggttgctatctcctctgmcatcttggtgctttcctaccttatttattttttaaaccactttactaaggttgatttttttgtgtatagtgtaagagtttaatttcattcttttccatgt

SEQ ID NO: 8527 - DNA, 201 bp, Homo sapiens
ccagtgtctggagcatgggcacacacagtgaacgtgtggctctgggatttggaatgcaaactaccttgctgtgacaacgattcccaatgtctgaggtgtgkgtgggttcaatgtagacacaaaacccaggtctggaatgtggttacttgcagagtggctatgttttgggtcagggcacacatggggttagaggaggtggtg

SEQ ID NO: 8528 - DNA, 201 bp, Homo sapiens
cttgctgggtgggctgctgcagttctggcactcatgagattgagagttgtgtcacctttgtgtagctctgggaactgaggttggtgatgacaaagatttcraggatcctcagcagccaatgctgtgaatgtttgcaattgtggcaaaggttattggggtcttcagtggcaatgactattaaagttcttctgatttcttttt

SEQ ID NO: 8529 - DNA, 201 bp, Homo sapiens
aaccagccttgtgtcccggggtgaagccgacttgatcatggtggataagctttttaatgtgctgctggattcagtttgccagtattttattgagaattttygcatcgatgttcatcagggatattggcctgaaattttctttgtttttttttttgttgtgtctctgccaggttttggtaccaggatgatgctgacctcata

SEQ ID NO: 8530 - DNA, 201 bp, Homo sapiens
taataaaggaataaaagggtatatggtacttgatacagaacaaagagagcactgataccgtggcatcatatggcaataggacacaaaatatcaccactggwtactcctaatcaaatacttaaaaatagcaggtttctgagtgaccatgtctttgataccttaacatacttttgccaaagtaatgagtgtaatgagattagc

SEQ ID NO: 8531 - DNA, 201 bp, Homo sapiens
cctaatcaaatacttaaaaatagcaggtttctgagtgaccatgtctttgataccttaacatacttttgccaaagtaatgagtgtaatgagattagctggtyactcttattatgttagacaaagtggggaaagaaaagtatgagcttggaattcagatttccagcccaagagccacataatgacctaaaactttctatgact

SEQ ID NO: 8532 - DNA, 201 bp, Homo sapiens
agaaaagtatgagcttggaattcagatttccagcccaagagccacataatgacctaaaactttctatgactaccctgaaagaaaccctggtctgctatagstacaaattgctgaaaactagctcagattgctgaaaaccatatccagagtctcatcctgtgagtggctgaattataatgcaagttgaattcccaattttat

SEQ ID NO: 8533 - DNA, 201 bp, Homo sapiens
gggaagccaaggcgggctgatcacaagttcaggagatcgagaccatcctggctaacacgatgaaacctcgtatctactaaaaatacaaaaaattagcggckcatggtggcacgcgcctgtagtcccggctacttgggaggctgagacaggagaattgcttgaatccgtgaagcgcaggttgcagtgagctgaatcggccac

SEQ ID NO: 8534 - DNA, 201 bp, Homo sapiens
gatcctctaatagagaaaagtcacctccatacatttcttacacttccagttaaaggaatttaatttaaaaaagagagtatcttgctttaccttttttcatrttaaaactagaaatgtgtggaagagatcagaacaaagtatttatttatataacatttattaaacctagtgaggctacaaagcgatttaccagatttaggt

SEQ ID NO: 8535 - DNA, 201 bp, Homo sapiens
caacagacaccagagaacaccctgacattccgcctggcatccaaccagcagcgggcaccctgaactggtcaactgtatgatcagctagagggagaaatttrtaaataaagtatacatttctctattattgtttaacagtaatacttttctgttttcttattcttttatattaacaaaaacttaaaatatagtgaagtgtgc

SEQ ID NO: 8536 - DNA, 201 bp, Homo sapiens
gcaccctgaactggtcaactgtatgatcagctagagggagaaatttgtaaataaagtatacatttctctattattgtttaacagtaatacttttctgtttwcttattcttttatattaacaaaaacttaaaatatagtgaagtgtgcagatgttaactgcatgatttcagaaattttaaaattttatatttctttcagtag

SEQ ID NO: 8537 - DNA, 201 bp, Homo sapiens
tgtgtaattgtgtttcattgttgttctaatgcacaatttcctaatgacatatatgttacacatctctttatatgcttacttatcatctgtatgtcttcttyggtaagatgtctgttaaggtattttgcccatctttcaaatgggatgtttgttttaatattgagttttaagagttctttgcatattttgggtaacagtctt

SEQ ID NO: 8538 - DNA, 201 bp, Homo sapiens
cagttgatcagatgccagattaaatgtagagagactaacaaaatattaccgtagcagaaaatactgttagaaattaagcaaatgaataaacattttcctgstggtgaaaaaaaaaaaaaaagaaacagccaaagtgtcttccagagtggctatgccattttgtattctcaccagcaatgaatgaagattcctgttgctaca

SEQ ID NO: 8539 - DNA, 201 bp, Homo sapiens
gaatgagatactaaatgttcaaagcctatactgtttgctaaaaagcataaatccagttgatcagatgccagattaaatgtagagagactaacaaaatattwccgtagcagaaaatactgttagaaattaagcaaatgaataaacattttcctgctggtgaaaaaaaaaaaaaaagaaacagccaaagtgtcttccagagtg

SEQ ID NO: 8540 - DNA, 201 bp, Homo sapiens
ctgcactccagcctaggcaacagagcgagactccatctccaaaaaaaaaaaaaaaaaaaaaaaaatcttctctctaaacattcctttcactttatcccccmaataaatctccctttgcataacatttttcaacaaatactcaggccaaaaactggcactttaacttacgacttagaactgttgggaataaaactccagaaa

SEQ ID NO: 8541 - DNA, 201 bp, Homo sapiens
atatcatttactatattaaaatatcaaattccaaagtatatttatatatatatacacacacatatatattacataatgcaattaaaatcagaaattttcakagctaaatacatttatatttaataaataaattctaaagattaaagatgaagtgttcaagaactaaaatgaaaagaaactgaactcctgttgtacaatata

SEQ ID NO: 8542 - DNA, 201 bp, Homo sapiens
gctgaaaaccatatccagagtctcatcctgtgagtggctgaattataatgcaagttgaattcccaattttataggatatcttctgttaaaatgagagcatygattaggatagaacaaaatcctaaaaactggaatgaggaaatatgggaagatcctaatgaagctagggatgtttacctctaaactctgctgggtcctcct

SEQ ID NO: 8543 - DNA, 201 bp, Homo sapiens
tgtgagtggctgaattataatgcaagttgaattcccaattttataggatatcttctgttaaaatgagagcatcgattaggatagaacaaaatcctaaaaaytggaatgaggaaatatgggaagatcctaatgaagctagggatgtttacctctaaactctgctgggtcctccttgcctttggaagcagaatttgtagagac

SEQ ID NO: 8544 - DNA, 201 bp, Homo sapiens
accttgaggaaggacctagtatactgccaaaaatttatacctttaatttttctcccagccttcctcaaagggacctatggcctttttgctgggttactacrcaacatataaaaggaaataataagattttttagggattaatggacagtgcctctgaactgacactaattccaaaaggccaaaaatgtcatgatggtccac

SEQ ID NO: 8545 - DNA, 201 bp, Homo sapiens
aggaaataataagattttttagggattaatggacagtgcctctgaactgacactaattccaaaaggccaaaaatgtcatgatggtccactggaaaggaaamtatggagggcaagtgatcaatgggactttagcacagatctgtctcacagtggatccagtggaagctgaactcatcctcttgtcatttccccagttcgtga

SEQ ID NO: 8546 - DNA, 201 bp, Homo sapiens
gtggattatcataaatttaaatagatggtgattctaattgtagatactgtactaaataatgatttcattgcttgagcaaattaacgtatcccctggtaacwggcatgcaaatattgatctggaagattgctttattttctgctttcctatagtgaagaagcagttttcttttagctggaaagtctagcaatgcatcttcac

SEQ ID NO: 8547 - DNA, 201 bp, Homo sapiens
aatgggtgcagcacatcaacatggcacatgtatacatatgtaacaaacctgcacattgtgcacatgtatcctagaacttaaagtataatttaaaaaaaaaraaaaaaaaaagaaaataacatggccaacaggctatatgggtactaaatctaagaacaaataatgtgaatgagatactaaatgttcaaagcctatactgtt

SEQ ID NO: 8548 - DNA, 201 bp, Homo sapiens
tggtgttttagacatgaagtccttgcccatgcctatgtcctcaacggtattgcctaggttttcttctagggtttttatggttttaggtctaagatttaagwctttagtccattgtggaagacagtgtggtgattcctcaaggatctagaactagaaataccatttgacccagccatcccattactgggtatatacccaaag

SEQ ID NO: 8549 - DNA, 201 bp, Homo sapiens
tatagagacctcctacaactcaaccacaacaacagaactcaattttaaaatgggcataggccagcctcctagagaaacactaatctgatctgatcaccctrccctctggactgaacacgcacagcaccctgcctccctggattgggaaagccctctacagcctgagttgctgaggtgccccacctccctaggagtgaagcc

SEQ ID NO: 8550 - DNA, 201 bp, Homo sapiens
aacaccctgacattccgcctggcatccaaccagcagcgggcaccctgaactggtcaactgtatgatcagctagagggagaaatttgtaaataaagtatacrtttctctattattgtttaacagtaatacttttctgttttcttattcttttatattaacaaaaacttaaaatatagtgaagtgtgcagatgttaactgcat

SEQ ID NO: 8551 - DNA, 201 bp, Homo sapiens
agccgtgacagatggtacctggaaaattgggacactcccaccctaatactgcgcttttccaatggtcttagcaaacagcacaccaggagattatatcccgygctggcttggagggtcccacacccacaaagcctcactcactgctagcacggcagtctgagattgaactgcaaggcagcagtgagactgggggaggggcat

SEQ ID NO: 8552 - DNA, 201 bp, Homo sapiens
aggtaagtttaaatatggagagaggaatgagtagattaaccctgtagtatattgaattagagttgaaaatatctgcatgaacccacaggtttatacaaacrcacacatcctttagctgttcctgctcagagaacctaaaagcaatgacacatcgataggaatgagcacacctagcacccaaatctacatttctaaatatta

SEQ ID NO: 8553 - DNA, 201 bp, Homo sapiens
cctattcaaaatattaattttttgaacaatgcataaccaacttagaaaaaggaaaagatgtaaaaaatatatgacaataacctgatatgtgttaagcataytctgtagaatttgtaatggcacaaaatacaactgctaataattttaaagatgtgattcttaccaatcaaatgttttataacactgaaatagtatttgtaa

SEQ ID NO: 8554 - DNA, 201 bp, Homo sapiens
gtattaagcctcgcatgcattagctatttttcctgatgctctccctccccccacccacaataggccccactgtgtgttgttcccctccctgtgtccatgcrttctcattgttcagctctcacttataagtgagaacctgtggtgattggttttctgttcctgcattagtttgctgagtataatgacttccagctccaacca

SEQ ID NO: 8555 - DNA, 201 bp, Homo sapiens
ccaattctgccaggctcttttcaacaaccagatcttgcaggaactaatactaatagagtaacaactcactcattactgtggagagggcaccaagccattcwtgagaaattttatcccatagccaacacacctcccactgggcacgtgtccaatattggtgatcaagtgtcaacatgagatttggaggggacacatatgcac

SEQ ID NO: 8556 - DNA, 201 bp, Homo sapiens
ctttattattttgaggtatgtttcttctatacctagttgactgaagatttttatcctgaagaaatgctgaactttatcaaatgccatttttaaatatgtcragattatcaaaagtgttttgtttttaattctctttttgtgttgaatcacatttatttatttgcatatattgaaccatccttgaatccctggaataaaccc

SEQ ID NO: 8557 - DNA, 201 bp, Homo sapiens
gctggatcaaatggtatttctggttctagatccttgaggagtcaccacactgtcttccacaatggttgaactaatttacattgtattatttttaagtctcratttcatttagttctgctcttatctttgttatttcttttcttctgctagttttgggtttggtttgttcttgtgtttctagatccttcaggagcaacgttg

SEQ ID NO: 8558 - DNA, 201 bp, Homo sapiens
atccttctatgttaggtaagtctattgaagacagcagagatttgggttgtgattttttatccattctgaatattttaagtggatcatttaggccatttacrttcaatgttaatattaagatgtgaggtactgttttcttcatcatgttaattgttacctgattttttaaattgtgtttttattttataggcctgtgagttt

SEQ ID NO: 8559 - DNA, 201 bp, Homo sapiens
atacatatgtaactaacctgcacaatgtgcacatgtaccctaaaacttaaagtataataaaaaaaaaatctagatttctagcttctttggggaatttagarcacctgagaatatctgtcatgcatttgtagtggtaagaataatggttttttttttaatagaacaggtacttctctattttaccttgctctttatgctatc

SEQ ID NO: 8560 - DNA, 201 bp, Homo sapiens
attgcaaagtaaataaggttagatgattagatgattgggaggtaaaatatctgtaattagtactatgtactatacttctgcctcaaacaaaatgttagggtttttttgttgttttttactatgtgtactttttttttactttttcagcttctatcttagaagcagctggtacacatgcagattagttacaaagtctgttgt

SEQ ID NO: 8561 - DNA, 201 bp, Homo sapiens
tcacttaacattatcttctagaaatccctccatgttagtttatagaaacctttattatttttacataatatgtatagaattatatatagtgatatgtagartatttatatcatatcataatttatagtatatatctttgtttattgagccaatatattatacttgaatatttagatgtgttgaatattttgcaattatgaa

SEQ ID NO: 8562 - DNA, 201 bp, Homo sapiens
aattttctcccattctgtaggttgtccgttcactctgataatagtttcttttgctgtgcagaagctccttagtttaattagatcccatttgtcaatttttsttttgttgcaattgcttttgacattttcatcatgaaatctttgcccatgcctatatcctgaatggtattacctagattttcttctaggatttgtatagtt

SEQ ID NO: 8563 - DNA, 201 bp, Homo sapiens
tactgcttactggcaaaggaagaatgcaccacacagatgtaagttcagaaagttgttcaaagcagaaattaaaggggttaaaagatatatagagaaaaacmccaaatagggcacggtcctgattaatggatgtggattatgagctgggttgtaaactcttatttgtatctggttacctttagagttagcatcactagtatg

SEQ ID NO: 8564 - DNA, 201 bp, Homo sapiens
agagttagcatcactagtatggagaaacaaggtttcaaataggtctggaaagaagagagaaaattttcagagagcctagggtcatgcttgtatacccttgstcaaagatttccaagattttaacttaacaggtgtcattatcatgtacagtcttacttagaagcaagaaataaagctaaggaatttatagaggtaccttcc

SEQ ID NO: 8565 - DNA, 201 bp, Homo sapiens
gcatctacacatttaaaactaaccaaactccaagtagaataaactcagagatccacaccgagacacattgtaattctgtcaaaaaattctgtcaaaatgcaaagacagccctatggaatgacatcagcaagatggcagaataagatttcctagtgcttttgcccttatagaaacatcagtttgaacagctatctacacatg

SEQ ID NO: 8566 - DNA, 201 bp, Homo sapiens
gtaaatattatgcaaaagatatccttagaagaatataatttctgccacattccttctctttgtattcccatcctttttcctgccctgttgtcttgtagatracaaactacagtgttttcttgcttattttacctgtgtctcattttgaaaaggttaatatttctctatttctgtttttttctgattggttatttctgactc

SEQ ID NO: 8567 - DNA, 201 bp, Homo sapiens
catctacacatttaaaactaaccaaactccaagtagaataaactcagagatccacaccgagacacattgtaattctgtcaaaaaattctgtcaaaatgcaaagacagccctatggaatgacatcagcaagatggcagaataagatttcctagtgcttttgcccttatagaaacatcagtttgaacagctatctacacatga

SEQ ID NO: 8568 - DNA, 201 bp, Homo sapiens
ttatgcttaaaattttaattcattgagttgatttttgtgtatgtgtcaaataagtgtccaattttattttttgcatgtggatatccaattttctcaacctmatttaaggaattatgttttcttcattgtgtattggtggcacccctgtcaaagattaattgaccatatatgcctcggtttattactgggctctctaaccta

SEQ ID NO: 8569 - DNA, 201 bp, Homo sapiens
ttctactgccttttgtttgggtatgccctgcccccagaggtggattctactgaggcaggcaggcctccttgagctgtggtgggctccacccagttcgaacwtcccagccgctttttttagctactcaagcctcagcaatggcaggcgcccttcctccagcctcactgctgccttgcagtttgatctcagactgctgtgcta

SEQ ID NO: 8570 - DNA, 201 bp, Homo sapiens
atcattatataatgtctttctttgtcttgtattactttttttgatctaaagtctgtgttatctgatttaaccatagctacttgtgttcccctttggtttcyatttgcatggaatatattttctacccctttacttttagtctatatgtgtctttataggtaaggtgagtttcttataggaagaatgtaatttgatcatatt

SEQ ID NO: 8571 - DNA, 201 bp, Homo sapiens
tatctgtaattagtactatgtactatacttctgcctcaaacaaaatgttagggtttttttgttgttttttactatgtgtactttttttttactttttcagyttctatcttagaagcagctggtacacatgcagattagttacaaagtctgttgtgtgatgctgaggtctgtggtatgactgaatgcatcacccagatagca

SEQ ID NO: 8572 - DNA, 201 bp, Homo sapiens
actttgttcttttggcttaggattgacttggcaatgcaggctcttttttggttccatatgaactttaaagtagttttttccaatcctgtgaagaaagtcaytggtagcttgatggggatggcattgaatctataaattaccttgggcagtatggccattttcacgatattgattcttcctgcccatgagtatgggatgttc

SEQ ID NO: 8573 - DNA, 201 bp, Homo sapiens
ttaaactgttataactttaagatgttatatattatttgcttggtaatcacaaagaaaatatctatggtgcatgcatgaagaaaagagaaaggaatcaaaayatgtgcctacaaaaagtcaactaaacacaaaaaagatggaattagaggaaatgaagagcaaaaaggtataacatacaaaaaacaggtatcaaaatggcag

SEQ ID NO: 8574 - DNA, 201 bp, Homo sapiens
tgattttcgttatctattgatctgtggctggacactaagtttgattccgtatcttggttattgtgagtaatgttacagtgaacatgggagtacaaatatcycttttatatactgatttcatatcctttggaggtacatccagaggtgaaattgtggataatattgtagttctatttttaattttttgaggaatccctgtag

SEQ ID NO: 8575 - DNA, 201 bp, Homo sapiens
tcttatcaaattcccataatacttatgaggttattgttgcaaaatagaaaaccctatcttaaaaatcataggaatacaagggaccacacatatccaaaacmattttgaaaaaggagaataaatttggaagtctcacacttcctgatttcaaaacttactataaagctacagtaatcaaaagagtgatatactggcataaag

SEQ ID NO: 8576 - DNA, 201 bp, Homo sapiens
gagtctcgcttttaattgcccaggctggagggcagtggcatgatctcggctcactgcaacctctgcctcccaggttcaagtgattctcctgcctcagcctycccaggagctgggattacaggcgtccaccaccatgcccggctaatttttatatttttagtagagacggggtttcgccatgttggccaggctggtctcaaa

SEQ ID NO: 8577 - DNA, 201 bp, Homo sapiens
agagcagaaggaatttgtgaagaaatgatgggtaaaaaatatcccaaatttgatgaaagacatgcatctacacatttaaaactaaccaaactccaagtagrataaactcagagatccacaccgagacacattgtaattctgtcaaaaaattctgtcaaaatgcaaagacagccctatggaatgacatcagcaagatggcag

SEQ ID NO: 8578 - DNA, 201 bp, Homo sapiens
taatcttaaggaaattcagtttactacaagagaaaacagacaactaagaaaaatcaggaaaataagcaaaatgaactcaataaagagatagaaatcatacmaaagaaccagacagaaattctagagctaaagaactcaatgattgaactggaaaattccatattgcatttcaatagcaaaatagatcaggcaaaagaaaga

SEQ ID NO: 8579 - DNA, 201 bp, Homo sapiens
aggaaaataagcaaaatgaactcaataaagagatagaaatcatacaaaagaaccagacagaaattctagagctaaagaactcaatgattgaactggaaaaytccatattgcatttcaatagcaaaatagatcaggcaaaagaaagaatcagtaaacttgaacacagatcatttgaaattacccagagaaaaaaagaaaata

SEQ ID NO: 8580 - DNA, 201 bp, Homo sapiens
actgccacaaatttctgctgcctaggccactgaggcacccacagtcatcattgacatggatcgcaggtaaggaagctgcacagagatcacaccactgtgcytacctggaaccgcagccaccacaacctacccaaaacactaccctctggtccatctgcaagtgagtctttttcaaaaaaaaaagccactctataagtttgg

SEQ ID NO: 8581 - DNA, 201 bp, Homo sapiens
taaagttgttatcagcttaaattacttgcttaaaacctagatgttggctgggcatggtggctcatgcctgtaatcctagcactttgggaggctgaggtggrcagatcacctgaggtcaggagttcaagaccaccctggccaacatggtgaaaccccatctctactaaaaatacaaaaattcgctgtgtgtggtggcatacg

SEQ ID NO: 8582 - DNA, 201 bp, Homo sapiens
ttcataaagaaagcccttagagacctacaaagagacttagactcccacacaataacaatgggagactttaacactccactgtcaacattagacagatcaaygagacagaaagttaacaaggatatccaggtcttcaactcagctctgcaccaagcggacctactggacatctacagaactttccaccacaaatcaacagaa

SEQ ID NO: 8583 - DNA, 201 bp, Homo sapiens
tgtggcattctctgtatttcctgaatttgaatgttggcctgccttgctagattggggaagttctcctgcataatatcctgcagactgttttccaacttggktccattcaccccttcactttaaggtacaccaatcagacgtagatttggtctttttacatagacccatatttcttggagtctttgttcatttctttttatt

SEQ ID NO: 8584 - DNA, 201 bp, Homo sapiens
gagtcttgctctgtcgcccaggctggagtgcagtggcatgatctcggctcactgcaagctccgcctcccgggttcacgccattctcctgcctcagcctccygagtagctgggactacaggcgcatgccgccatgcccagctaattttttatatttttagtagagatggggtttcaccgtgttagacaggatggtctcgatc

SEQ ID NO: 8585 - DNA, 201 bp, Homo sapiens
ctttaacattgttaacaagtaaagaaaatatccacaaagaacttttcaaatgaataatttttactttgtaagctaagaggtctacatattctactatttgrctaggtttaaactatattcattttatgcattaggggtatattaataaaatttaatattcattcttatcaaaaatagcgagatataaagaaaagtaaactt

SEQ ID NO: 8586 - DNA, 201 bp, Homo sapiens
cattaagatgactctcattataaaaacagaaaataaggaatgttggcaaggatgtagacaaataggaacttttgtaaattgttcatgggaatgtaaaactrtcactgctgtggaaaacagtttggttgtttatcaaaaagttaaacatggagttctcatatgatctatttacttcaaggtgtaggtgtagacccaaaagaa

SEQ ID NO: 8587 - DNA, 201 bp, Homo sapiens
taaccttgaatgtaaatggaataaattcttcaatccaggacatagattggctgagtagatttttaaaaatacaccttcttcttattagggtgtattaatcytgaatactttcacttaggtgaaatttggtgttagtcatgcaattcagggaagactttagaatacaaaggatttactgacatgattctttactacttttat

SEQ ID NO: 8588 - DNA, 201 bp, Homo sapiens
agatctcatcaccaaggtggtgagcatagtactccataggtagccttcccacccatgtccctctcccactctcctccacatcaggcagtccccagtatctrttgttcccatccttgtgtccacattgcagtatttggttttctgtccctgcattgtcttaggatagtggcctctagttgcatctatgttgctgcaaaggac

SEQ ID NO: 8589 - DNA, 201 bp, Homo sapiens
gtaactcttagtaaattataagtgtctccagcacataccttttaatttctagtatttaacccaatatttcctcagatggtctcatttttttccctgattgkgtaaggatcatttgcttgctcatttcaaatgaacccgtccttctttgatatatcagttgaagaaagaacaaaggaagctaaaatacatctgccgatgttt

SEQ ID NO: 8590 - DNA, 201 bp, Homo sapiens
gtatataaccaacagtggcattgttaggacaaatggtagttctattttgagttctctgggaaatttccacactgctttccacagtggctgaactaagttayattcccaccagcattattatagaagtgtttccttttatttttcaacattgccagcatctgttgtttttttgacttcttaaaagtagctgttctgactagt

SEQ ID NO: 8591 - DNA, 201 bp, Homo sapiens
cactgctttccacagtggctgaactaagttatattcccaccagcattattatagaagtgtttccttttatttttcaacattgccagcatctgttgtttttytgacttcttaaaagtagctgttctgactagtgtgatatgttatctcatggctttgatttgtatctctctaatattagtgataatgagcaatttttcatat

SEQ ID NO: 8592 - DNA, 201 bp, Homo sapiens
tcccaggacaaattgggaattaataacatataaaaataacctggtgaaatttactggccttttaaaattattttaaatatacagaattctaggggcatcasactttaccctctcctccaaaaattccacacaaaatttaaaagacaatctacttaagacgggggaagaaacaaggtgacctcagaattgttctaagaagtc

SEQ ID NO: 8593 - DNA, 201 bp, Homo sapiens
aaagcaacataagagactttacactgtagaggaaagagactttaggaaaatacttctatcaaatcacacacatacacaaacaccccaccaccaacaacaamaacaagcagcaaacaaacaaaaacaacaagccccacaaaaaggaagagtcaatcaacatacagatttgctataatacattacctaaattgtccatatttt

SEQ ID NO: 8594 - DNA, 201 bp, Homo sapiens
gatgcaaaggcataagaatgacacaatggactttggggactcaaaagcaaagggtagggagggagtaagggataaaaggctacaaattgggtgcagtgtayactgctcgtctgatgggcgcaccaaaatctcacaaatcaccactaaagaacttatataaccaacaccacctgttccccaatgattatggaaataaaaaca

SEQ ID NO: 8595 - DNA, 201 bp, Homo sapiens
tctatttccaaagtgggtagaacatactgtatttgtctcctcggggaaggaaaattaagcttaaaggtcttggaaaaagcattattataaccaccagttaraagatcaattggagagtaattgtaaaagtgccatgaagatatgaggcatgtaagaagcaacataaaaagggtggccaaacagcagttttaaaacaaaact

SEQ ID NO: 8596 - DNA, 201 bp, Homo sapiens
aaaggcataagaatgacacaatggactttggggactcaaaagcaaagggtagggagggagtaagggataaaaggctacaaattgggtgcagtgtatactgytcgtctgatgggcgcaccaaaatctcacaaatcaccactaaagaacttatataaccaacaccacctgttccccaatgattatggaaataaaaacatagtt

SEQ ID NO: 8597 - DNA, 201 bp, Homo sapiens
ggaccccactaaaaattggcagccttttgggtccctggataaatgggccaaaataacacaccaaaatgaggaatgtgttgcctccaaaatccaaataggcycactaggtgttgtgactccttcttggttgtaggaggggccaaatgcagcaacttatccttcacctttctaaggtgatattctaaggaatatcttgacagg

SEQ ID NO: 8598 - DNA, 201 bp, Homo sapiens
gcattagaaacttttgaagtccagaaggctgtggtgttgtatattaaaagtgctgaaagagcggtggagccaagatggccaaataggaacagctccagtcyacagctcccagtgtgagcaacgcagaagatgggtgatttctgcatttccaactgaggtaccgggttcatctcacttgggagtgttggcaggacagtgggt

SEQ ID NO: 8599 - DNA, 201 bp, Homo sapiens
gccacataccaggtatcaggagatgtgttaatttgctcaagcaatgaaactacatctgatacagcagctgcagttggagtaaaccctttgttaagcttacrataatccactatcattctccaagatccacctgtcttctacacaggccaaatgggagagttgaacagggatgtggtgggaatcaccacccctgcatctttc

SEQ ID NO: 8600 - DNA, 201 bp, Homo sapiens
gattgctgaggcttgagtaggtaaacaaagcagccaggaagctcaaactgggtggagcccaccgcagctcaaggaggcctgcctgcctctgtagactccamctctgggggcagggcattgccaaacaaaaggcagcagaaacctctgcagacttaaatgtccctgtctgacagctttgaagagagtagtggttctcctagc

SEQ ID NO: 8601 - DNA, 201 bp, Homo sapiens
cagctggagatctgagaatggacagactgcctcctcaagtgggttcctgaccctcgagtagcctaactgggaggcaacccctagtaggggcagactgacamctcacatggccaggtactcctctgagacaaaacttccagaggaacgatcaggcagcaacatttgctgttcaccaatatccgctgttctgcagcctccgct

SEQ ID NO: 8602 - DNA, 201 bp, Homo sapiens
aggtaggtaaagtgatctcagaaggttctacattttttttaaaaaaatcccttataatttaaccatgagtctcaatactttgctgggacataggctgtctrtcattgcctggtagctgtttagaagtaacagcagtcattgggtgcaaattagctctcagattctctggcaactctcagccccatctccacataattatat

SEQ ID NO: 8603 - DNA, 201 bp, Homo sapiens
cttttcattttaggggattgagaggaccaaaagataggcgactgcacatcatctccaaattcacagggaagggtggagggagtaacacttcattaatcatrgggtcttcaatgtgctgaccctagtagggcccatcaacttcactgtttagtaaccagacctagagattgtctctacaggcatcattcaggagagggcgct

SEQ ID NO: 8604 - DNA, 201 bp, Homo sapiens
ttaacgggttcctctcactggggcttgtaggacagtgggtacagcccacagagtgtgagctgaagcagggcggggcactgcctcacccaggaagtgcaagrggttagggaattccctttcctagaaaagggaagccgtgacagatggtacctggaaaattgggacactcccaccctaatactgcgcttttccaatggtctt

SEQ ID NO: 8605 - DNA, 201 bp, Homo sapiens
agtaaaagatgtatttatatgcttatattttaactagacactgatttgcttatatcattaacatatagtaattaacatatattgtgaatctggaggttcckccatagatacagttctctagtgcttttaagagccttccttcttgtagtccagaaaaagatgaggtattagatgaaaatcttttgcctgcaactagagctg

SEQ ID NO: 8606 - DNA, 201 bp, Homo sapiens
catcattcaggagagggcgcttgattgccattttattaggttggtgcaaaagcaattgcggtttttgccataaattgcttttgtaccaacctaatatatcrctttcctgctggtcagtctttttctacctcaggagctgctgcttttcccatgcctgaaaatttttcagttaagttctggattttgtcacagaacatatga

SEQ ID NO: 8607 - DNA, 201 bp, Homo sapiens
tagtaaagacagtaatcttattttgataaaaagtatatttcaaaataaaaatgtaatgttaataaatcctaaagcatcaagtaacatgaaaaacatagtawaacttttgagcaatataagagaaaatgacttgtacatctataaaacgaaagagattccattataaagctacttgaattgataaaaacagaattcaacaaa

SEQ ID NO: 8608 - DNA, 201 bp, Homo sapiens
tatttatgtccatgctttcccaaggtttaactccttcttgtaagtaagaacatgtggtatttggttttctgatcctatgttaatttgctttagtctttctytttcttgatttgtactcttataatgcactcttataaatatcaaataccaggcaagaaaaaaatcagagagaaaatatttgtgtcaggtaagctgctttat

SEQ ID NO: 8609 - DNA, 201 bp, Homo sapiens
gacacaatggactttggggactcaaaagcaaagggtagggagggagtaagggataaaaggctacaaattgggtgcagtgtatactgctcgtctgatgggcscaccaaaatctcacaaatcaccactaaagaacttatataaccaacaccacctgttccccaatgattatggaaataaaaacatagtttaaaaaataaataa

SEQ ID NO: 8610 - DNA, 201 bp, Homo sapiens
gtaagggataaaaggctacaaattgggtgcagtgtatactgctcgtctgatgggcgcaccaaaatctcacaaatcaccactaaagaacttatataaccaayaccacctgttccccaatgattatggaaataaaaacatagtttaaaaaataaataaaaaataaaacaaaagggaaaaaatttgctagtgggtcattagggg

SEQ ID NO: 8611 - DNA, 201 bp, Homo sapiens
catctcttgagcagtgaatcaggagtatcaaatgcatttattttgcataactctctaaacagttcacaccaagaactatcagtgttctccatactattagmagtagaatccttagcatttttgggtctaatcatattaagcaggcaactccagaaaccccaaaggcaactaaatactccatccttaaaattctgttcctct

SEQ ID NO: 8612 - DNA, 201 bp, Homo sapiens
agggttctcttgagggctggactaagaggatagatatatagacaaaagggagtttattaaggagtattgactcacacaatcaaaaggtgaggttcctcagyaggccatctgcaagctgaggagcaaggaatccagtcctatttccaaaacctcaaaagtagggaagctgacagtgcagcagaaggcctgagagcccctgga

SEQ ID NO: 8613 - DNA, 201 bp, Homo sapiens
ccagccacggcaaaaacatgccaaatggtaaagactgtcaaggctaggaagaaactgcatcaactaacgagcaaaataaccagctaacatcataatgacakgatcaaatccacacataacaatattaaccttaaatgtaaataggctaaatgctctaattaaaagacacagactggcaaattggataaagagtcaagaccc

SEQ ID NO: 8614 - DNA, 201 bp, Homo sapiens
tgccaatgagaagcatgtgtattctgcacttgatcttagccaaaaggcgaagtgatgagaatgtgtattcagtagttgttggaggaaatgttctgtaaatrtctgttaggtccatttgatatatagcacagtttaagtttaatgtttctttgttgattttctgtctagatgatatccagtgctgatagtgggatgctgaag

SEQ ID NO: 8615 - DNA, 201 bp, Homo sapiens
gaaaagtacccaattttactccttgtatttctgcaaatttaatcatatcctaagctacgaggtccacatggtaaagggacctaagagggcatgttttcctyaatctacaagatatcttattattttccatcgctggtgcttacttggtttaaagttaacctaaaaatcacattaaaatatttctggatgagtcaaagtatt

SEQ ID NO: 8616 - DNA, 201 bp, Homo sapiens
tcaaaaaacctttattcctcgtgaataactgagattttatactttttgacatcatctccttattacccccacctgcagcctgtgcagcccccattctgctmtctgcttctatgagttcagttgttttatcttccacatgtaagtgaaaacatgtggtatttgtctttctgtgcttggcttatttcacttagcatagtgttc

SEQ ID NO: 8617 - DNA, 201 bp, Homo sapiens
gataatccaccatgatctagtgggtttcataacaggtatgcagggatggtttaacatatgcaagtcagtaaatgtgatacaccacataaacagaattaaaracaacaatcacatgatatctcaatagatgcagaagaagcacttgacagaatccagcatcgctttatgattaaaaccctcggcaaaatcggcataaaagga

SEQ ID NO: 8618 - DNA, 201 bp, Homo sapiens
gattgctcttccttcctcaggaataccaacaatgcataagttctatagctttatgtagtcccagacatctcaaagctttgttcattctgttctattctttkatctttatttttatctgactggattatttcaaaagacctttcttcaagttctgagatttttttcttctatttagtctataattgaagcttttgaatgtat

SEQ ID NO: 8619 - DNA, 201 bp, Homo sapiens
gggacttttcgcacctcagcttcctaaagacttctatgtcttttgaataaattccttattggccattgtgttccttcatagcgggatggatttgaacaggsacccaagactatactggagatgatggttacacattcttaattggctttttcatgtcacatgttttcctttagattcagttctttctcatggacatataaa

SEQ ID NO: 8620 - DNA, 201 bp, Homo sapiens
tgaattactaataaataccaggtacggcagtaggaagaacataatatttttctaacatacacaataatcctgcaaggttggacttagtatttcttttgttktttttatactttacgttctagggtacatgtacacaacgtgcaggtttgttacatatatatacatgtgccgtgttggtgtgctgcacccattaacttgtca

SEQ ID NO: 8621 - DNA, 201 bp, Homo sapiens
gtcttgctctgttgcccaggcggtgtgcagtggtgcgatctaggctcactgcaccctccgcctcccaggctgaagcaattctcttgcctcagccacctgartagccgggactacaggcctgcgccaccatgcccagctaatttttgtatttttaagagagacggggttttgccatgtttcccaggctggtctcgaactcct

SEQ ID NO: 8622 - DNA, 201 bp, Homo sapiens
tgcttacttggtttaaagttaacctaaaaatcacattaaaatatttctggatgagtcaaagtatttctgcactataataatttcctgtgattatgaagatmattgttttcaagttgctaggtggaaaaaaagttatgtttcgtcttaccaggtatatccatgtggtatgaatgtgattcaatataaactttaaagtcatgt

SEQ ID NO: 8623 - DNA, 201 bp, Homo sapiens
taataatctctcaactatggcagaatccttcagttgtgtaaaatagttcagatattatactactgcctttggtacaagagtagcagtgttaggcaaaacaycctttgatctctggtgtgatacaaaggaaggcagacaggttaatagagaattaagtaaaagacatactcaaagagggaccctctaaaaccactgtcatcc

SEQ ID NO: 8624 - DNA, 201 bp, Homo sapiens
agctactcaagcctcagcaatggcaggcgcccttcctccagcctcactgctgccttgcagtttgatctcagactgctgtgctagcaatgagtgacgctccrtcagtcagtgtagcactctccgagccaggcgcgggatatattctcctggtgtgccatttgctaagactgttggaaaagcgcagtattaggttgggagtga

SEQ ID NO: 8625 - DNA, 201 bp, Homo sapiens
gaggtggggcatggtgggaggtgactgtataatggggcaaatttcctataaatggtttagcaccatcctcttagtactgtccttgtgatagtgagttctcrcaagatctggttatttaaaagtgtgtggcacctcccatcccctatctctcactcctactctggcatgtgatgggcctgctccatcttcaacttctgccat

SEQ ID NO: 8626 - DNA, 201 bp, Homo sapiens
attgaagttaaaaaaaaatgacaagagagggggctccaagatgactgtcttaaagatatctggcactcttctcaacacatacaaaaaaacaaatttgggarttgataatcatatttcaaatagatcgtctaatcaggaacactagaattcagcagagaattaacaggaaacacctgaggcatagaaggaaagggaaaggag

SEQ ID NO: 8627 - DNA, 201 bp, Homo sapiens
ccgtgagaaccaagcagatgcagcatagtgccttttttcctctgcctcctgggttcaagtgattcttctgtcttagcctcccaagtagctgggactacagrcatgcaccaccacgcccagctaatttttgtattttcagtagtgatggggtttttccatgttggccaggctggtgtggcccaacatccctacatcgtagag

SEQ ID NO: 8628 - DNA, 201 bp, Homo sapiens
ggctagccatatggagaaagctgaatctggatcccttccttacaacttgtacaaaaattaattcacatggattaaagacttaaatgttagacctaaaaccrtaaaaaccctagaagaaaacctaggcaatacctttcagatcataggcatggacaaaaacttcatgactagaacaccaaaagcaatggcaacgaaagccaa

SEQ ID NO: 8629 - DNA, 201 bp, Homo sapiens
gggtccctgtccccagcaaagcctcacggcagcatccactagcaactacagcctaagtcattgaagaaatgacggacatcactgacactgtttatagctgaaaaaaaaaattatacagaggccgtataccactgcatacacccagaatcaaagctaaaatgcccaacccagggtaggcatggtgactcatgcctatacccc

SEQ ID NO: 8630 - DNA, 201 bp, Homo sapiens
tagatttctggacacatatagcctaccaagattgaattaagaagaaatagaaaatctggttaatgggtactacaaacgtgctgttagataaaaagaataarttctaaagttccgtagcagaggagattgattatagttaataacaatgtattttgtatttcagaatagctagagagaggtctagaaatgttcccaacacat

SEQ ID NO: 8631 - DNA, 201 bp, Homo sapiens
caatttttattttcatttatttttttcttttttgcgacagagtctcgctgtgtcaccgggctggagtgcagtggcatgatctcagctcactgcaacctccractcctgggtttgagtgattcttctgcctcagcctcccaagtagctgggactacaggcatgcgccaccacacccagctaatttttgtatttttagtagag

SEQ ID NO: 8632 - DNA, 201 bp, Homo sapiens
gcatcgccgagacaatcctaagtcaaaagaacaaagctggaggcatcacgctacctgacttcaaactatactacaaggctacagtaaccaaaagagcatastactggtaccaaaacagagatatagaccaatggaaaagaatagagccctcagaaataataccacacatctacacccatctgatctttgacaaacctgaca

SEQ ID NO: 8633 - DNA, 201 bp, Homo sapiens
tgtaaaattagcttttcaaaagcagaagggctagatgatggatgtgataagaagatgaatataacagatagtaattttattggttaccagttgactctatrtggtaaaaatatcagtcaagtttgtaacatctcagctgcaataaagttatttagttatatttttcagagattacacaactgaatttagtcctggggttac

SEQ ID NO: 8634 - DNA, 201 bp, Homo sapiens
taattaatagcttaccaaccaaaaaaagtccaggaccagatggattcatagctgaattctcccagaggtaaaaggtggagctgttatgattccttctgaarctattccaaccaatagaaaaagagggaatcctccctaactcattttatgaggtcagcatcatcctgataccaaagcctgacagagacacaacaaaaaaaa

SEQ ID NO: 8635 - DNA, 201 bp, Homo sapiens
tgtgtagatttcagctgattttgggagattatgaattcagaaacccaatggacacctcagtcctgtgtcagtgtctttctgccgtaggctctaattggtgmacaaagaagttgctgagacctataactcaaaggcaaatgtggatcacaaggactcagggtaaagttagcagcatggcccattggaaagcctccaggcaat

SEQ ID NO: 8636 - DNA, 201 bp, Homo sapiens
aaaatatattaatagatacacaaaaaataaaagtgagtaattactacattgccaccagagaatatcaccttcactaaaaggcagaggagtctcaccagcaycaccacaggcccatggggagtgctgccagggtgttacctgtgtttatttaaggaccaagggctcttcagttagcttttggtgaatgctgccaggcctggg

SEQ ID NO: 8637 - DNA, 201 bp, Homo sapiens
gttgtgcaaccatcactaacatctatttccacaacttttcatcactcccaaaggaaactcattaagcaataactctcattccccgcattttcctccatttkgggttgctgtaacagaataccacagactggctaatataaagaaaaatttattttttacagttctgaaggctggggagtccaaggtcaagggacctgcctc

SEQ ID NO: 8638 - DNA, 201 bp, Homo sapiens
tctccttaagctgataagcaacttcagcaaagtctcaggatacaaaatcaatgtgcaaaaatcacaaacgttcctacacaccaataacagacaaacagagwgccaaatcatgagtgaactcccattcacaattgcttcaaagagaataaaacacctgggaatccaacttacaagggacgtgaaggacctcttcaaggagaa

SEQ ID NO: 8639 - DNA, 201 bp, Homo sapiens
gagtgggcaaaaactggaagcattccctttgaaaactggcacaagacagggatgccctctctcaccacgcctattcaacatactattggaagttctggccygggcaatcaggcaggagaaggaaataaaaggtattcaattaggaaaagaggaagtcaaattatccctgtttgcagatgacatgattgtatatttataaaa

SEQ ID NO: 8640 - DNA, 201 bp, Homo sapiens
cacagccaatatcatactgagtgggcaaaaactggaagcattccctttgaaaactggcacaagacagggatgccctctctcaccacgcctattcaacatastattggaagttctggcccgggcaatcaggcaggagaaggaaataaaaggtattcaattaggaaaagaggaagtcaaattatccctgtttgcagatgacat

SEQ ID NO: 8641 - DNA, 201 bp, Homo sapiens
aaattaattcaagatggattaaagacttaaatgttagacctaaaaccataaaaaccctagaagaaaacctaggcaataccattcaggacataggcatgggyaaggacttcatgtctaaaacaccaaaagcaatggcaacaaaagcctaaattgacaaatgggatataattaaactaaagagcttctgcacagcaaaggaaa

SEQ ID NO: 8642 - DNA, 201 bp, Homo sapiens
atgtggacagaagaacagcttctgttttgaggctatatgttggattttataatttaaccattgtactgccaggttaggttttctatttccaaagtgggtaraacatactgtatttgtctcctcggggaaggaaaattaagcttaaaggtcttggaaaaagcattattataaccaccagttagaagatcaattggagagtaa

SEQ ID NO: 8643 - DNA, 201 bp, Homo sapiens
gccctaggtttcaagcacaaaactgggcagctgtttgggcagacaccaagctagttgcaggagtttttttcataacccagtggcacatggaatgccagtgrgacagaaccattcgctcccctggaaagggggctgaagccagggagctgagtggtcttcctcagtggatcccaccctcacagagcccaactgagatccact

SEQ ID NO: 8644 - DNA, 201 bp, Homo sapiens
gagatagggatccagtttcattctctacatgtggctatcaaattttcccagcatcatttaatgaattggatgtcattttcccaatttatgtttttgtatgyttcatcaaagatcatttggctgaagtatttggctttatttttgggttctctattctgttccattagtctatgtatttacttttataccagtaccatgctt

SEQ ID NO: 8645 - DNA, 201 bp, Homo sapiens
tttctttatccagtctatcattgatgggcatttgggtttgttcctagtctttgctattgtgaatagtgccgcaataaacatacatgtgcatgtgtctttayagtagaatgatttataatcctttaggtatatacccagtaatgggattgctggatcaaatggtatttctggttctagatccttgaggagtcaccacactgt

SEQ ID NO: 8646 - DNA, 201 bp, Homo sapiens
ttgagaaaattcaacagttgttcatgctaaagactctcaataaattaggtactgatgggacgtatctcaaaatagtaagagctctctatgacaaacccacmgccaatatcatactgagtgggcaaaaactggaagcattccctttgaaaactggcacaagacagggatgccctctctcaccacgcctattcaacatactat

SEQ ID NO: 8647 - DNA, 201 bp, Homo sapiens
gatgcagaaaaggtctttgagaaaattcaacagttgttcatgctaaagactctcaataaattaggtactgatgggacgtatctcaaaatagtaagagctcyctatgacaaacccacagccaatatcatactgagtgggcaaaaactggaagcattccctttgaaaactggcacaagacagggatgccctctctcaccacgc

SEQ ID NO: 8648 - DNA, 201 bp, Homo sapiens
aactccttcccctagccaagggaagccgtgagggactgtgccatgagggacagtgccatctggcccagatactatgcttttcccacagtcttcgcatcacrcagaccaggagattcctttgggtgcctacaccaccagggccctaggtttcaagcacaaaactgggcagctgtttgggcagacaccaagctagttgcagga

SEQ ID NO: 8649 - DNA, 201 bp, Homo sapiens
ataaaatactagcaaacagaatccagcagggtatcataaagcttatccaccattgctaagccggcttcatccctggaatgcaaggctggttcaacatacasaaatcaataaatgtaatccatcatataaacagaaccaaagtcaagaaccacatgattgtgtcaatagatgcagaaaaggtctttgagaaaattcaacagt

SEQ ID NO: 8650 - DNA, 201 bp, Homo sapiens
attggagggagaagtgatgtaacactgtaagaaaataacactggatgataaatacagagcaagaataaaaataaccaaaaaatgtaaataagtgtgttcaygtaacaaatcctataaacatgtacttgatcttctttcttttctcagtttatttaaaaggcataaagttatacaaagaaataattataacaataattatta

SEQ ID NO: 8651 - DNA, 201 bp, Homo sapiens
gaagtgatgtaacactgtaagaaaataacactggatgataaatacagagcaagaataaaaataaccaaaaaatgtaaataagtgtgttcatgtaacaaatmctataaacatgtacttgatcttctttcttttctcagtttatttaaaaggcataaagttatacaaagaaataattataacaataattattacattgtcctt

SEQ ID NO: 8652 - DNA, 201 bp, Homo sapiens
ggtgggagagcccatcaatttccttagaacccacacttaagtaactggaatcagcgatcttgttgtgaaagtgcttgcccagatggtcctggagagagtgmgtgattaccagttttacatcactctttctgccagccagttgttgctatctgtgcagcagctactttttcaattctgataccgatttgtcatcagttaata

SEQ ID NO: 8653 - DNA, 201 bp, Homo sapiens
cattacatgctctgctaaaaccaactttgacacaaaaaacttcaggtttaataaaccaggtttaccagttctaattatctgtttttcaatatgaaattctytttagtagattttttagtttttccatcattatacctagatactagtttctaaatccaacaaaatgtataaatcacataaaactcaaatgaaaaggaatac

SEQ ID NO: 8654 - DNA, 201 bp, Homo sapiens
ctgaggcaggagaatcgcttgaatccaggaggtggaggttgcagtgagccgagatcacgccactgcactccagcatggcgaaagagcaagactccgtctcaaaaaaaaaaaaaaaaaagaaaagaaaaatagaaagcaagagtgtaaaaagtagatgactaagtataaagttgttaacttggtaactgaaagtattaaaag

SEQ ID NO: 8655 - DNA, 201 bp, Homo sapiens
agaagagctaactatcctaaatatatatgctcccaatacaggagcacccagattcataaagaacgttcttagagacttagactcccacacaataatagtgkgatactttaacatcccactgtcaatattagatcaatgagacagaaaattaacaaggatattcaggacttgaactcagctctgcaccaagtggacctaata

SEQ ID NO: 8656 - DNA, 201 bp, Homo sapiens
aaagtctccacctatgattgttgtagtatctatctgtaattgctaatgattgggcatgaaagttcacacataggattttaacctggagctggtctcctcartttgcacgtacacacagggctcctcagtttgcacatacacacagggctcctcagtttgcgcgcgtgcacgcacacacacacacacacacacattcataca

SEQ ID NO: 8657 - DNA, 201 bp, Homo sapiens
gttcgcttgatctaaagtatagttcaagtccagtgtttcgttattaatgttccatctgtatgatctgtccattgttgaaagtggagtattaaagttctccrctattattgtattacagttgtttttcccttcagacatttaatatttgctttatgtttttaggttctccggtatttacagcatatatatttacaagtgtta

SEQ ID NO: 8658 - DNA, 201 bp, Homo sapiens
gagctactctgcctgtggagcaggcctgctctgtctatggatcagctattttcttgtactctgttgctctaataaacatgcttttctttaactcaaaaaawtttttttttgtttactaaaagtataaaaccttatttgctcttaatttagaaatataagtgtaattttagggcctactctccttctataatgtctcttcca

SEQ ID NO: 8659 - DNA, 201 bp, Homo sapiens
cagttgacaaagaaaaagcgtttgacaaagttcagcattctttctttattgaaagttttaatagtataggtatagaaggaaagttcctcaacataacagargccatttatgaaaaatctacagctgatggaggaatattttccaagcaaatggaaagcaaaaaaaaaccagggattgcaatcttagtctctgataaaacag

SEQ ID NO: 8660 - DNA, 201 bp, Homo sapiens
agaaaagagaagaatcaaatagatgcaataaaaaatgataaagggaatatcaccaccgatcccacagaaatacaaactaccatcagagaatactataaacrcctctacgcaaattaactagaaaatctagaagaaatggataaattcctgtacacatacaccctcccaagactaaaccaggaagaggtcgaatccctgaat

SEQ ID NO: 8661 - DNA, 201 bp, Homo sapiens
tcaaatagatgcaataaaaaatgataaagggaatatcaccaccgatcccacagaaatacaaactaccatcagagaatactataaacgcctctacgcaaatwaactagaaaatctagaagaaatggataaattcctgtacacatacaccctcccaagactaaaccaggaagaggtcgaatccctgaataggccaataacaag

SEQ ID NO: 8662 - DNA, 201 bp, Homo sapiens
atcaacagagaacaccttaaaacttctccactaagatcagctacaaggcagggatgtccactctcaccagttctatttgttcaacacagtactagaagtamtatcaaggacaatcaaacaaatttggattgcaaccaaatcagaaagaaaaatactctgtttgaagacaacatgatcttatatataggaaaccctaaagac

SEQ ID NO: 8663 - DNA, 201 bp, Homo sapiens
taagtatctgccccaaattacctattacttataaaagtaaaaaaagtactttacagtagagaaacataatagacaccattacaatctaatgatcaaaattkccatcacaatattttgaaaaaatataacccattgagaaggacacaacattacatctgggatactcctcccgaagatgtataacctgaaagtaaccatgag

SEQ ID NO: 8664 - DNA, 201 bp, Homo sapiens
tgtagtatgtgttggaatttccttcctttatttaactgaatcatattacattgtatgtatataccacattttgcttaattattcatccatcagctgacacktgggcttcctctaccttttggctattttgacaaatgctgctataaaaacgggtgtacaaatatttgttcctgttctactcttttgggtatataaatgaaa

SEQ ID NO: 8665 - DNA, 201 bp, Homo sapiens
agcagaattgaaggagatagagacacaaaaaacccttcaaacaatcaattaatccaggaaatagttttttgaaacagtcaacagaatagatagatggctarcaagactaataaagaagaaaagagagaagaatcaaatagacgcaataaaaaatgataaaggggataccacccattatcccacagaaatacaaactaccat

SEQ ID NO: 8666 - DNA, 201 bp, Homo sapiens
agttatttgaatttcctcacttttatttttagtctatctaaaggtttgtcaagtttgtttatcttttcaaaatacagctttttgttttgttcatcttttayattttttaatctcttttttgtttatttctgctctgattttattagtttgttccttctacttattttcggattgttcttttttttttagttctttgaggag

SEQ ID NO: 8667 - DNA, 201 bp, Homo sapiens
aatggacttgctgttatttcctccatgatactaagttaattttgttgtggtttacaaattggcctctcatttaaaactgactgattttttgaagaaccatrggcatattaagtatatacattttttttgtatgccaaaatacaaaattccagtgaactggaactttttgaatgtctccattaagacttcttaaagtgtggt

SEQ ID NO: 8668 - DNA, 201 bp, Homo sapiens
gccaaaaaataataaagaaaattggatttctactcaaacaaaataaagtgaaataaaatgactgaaatagtttccatcctttataatctcccattgtaaasatattatttacattttatatagtaatgaaaaatgaacaatttatatggttagaaaaactcatgaattcagcataatgaaactgtcaagagaaaataaatg

SEQ ID NO: 8669 - DNA, 201 bp, Homo sapiens
ttttattcttgtttctttatttttgtctgagttgtttcagggagctagtcttcgagctctgagattccttcctcagcttgatatatagtgctgttaatacytgtgattaacaagacattaaactttcaactcagccttatttctgggctcaatgcaagcctagctaagtgctgaagggagactcttaggatagaattaact

SEQ ID NO: 8670 - DNA, 201 bp, Homo sapiens
agttgtttcagggagctagtcttcgagctctgagattccttcctcagcttgatatatagtgctgttaatacttgtgattaacaagacattaaactttcaastcagccttatttctgggctcaatgcaagcctagctaagtgctgaagggagactcttaggatagaattaactgcaaatactgtgaaaggtgtttgatgtgt

SEQ ID NO: 8671 - DNA, 201 bp, Homo sapiens
attattcccttttttatccccagagtgttaatactggttttggtagacattggtactacgtgccagtagtttggtaggtcatgatcttccacatatcccaygaaatacctggactgcagcaaatcccatcaggaggtgggtgtaaatgctagtgttggttcatatagaaaatgtatttaactagtaatatattcagtagta

SEQ ID NO: 8672 - DNA, 201 bp, Homo sapiens
ccagaataaaacctagaatcaacatttatactataggaaaatatgtattatattcacaagaggtaatttattaataaaaatcacacttttaaggtcactgsccttttttttttttttttttgagagagagtctcactctgttgcccagactggagtgcagtggtgagatcttggctcactgcaacctctgcctccttggtt

SEQ ID NO: 8673 - DNA, 201 bp, Homo sapiens
ataattacttcactgacactagttaagaggaacattgaaaagtattatgtgaaaaatttcttgtaaatattaaatgttaggaatccagtatcttcatattrtcttattttctcttttggccctgagactgatgaattttcattatagtcaccatcatctctaatcatatgcctctttttatgtgacaatttgtcttacttt

SEQ ID NO: 8674 - DNA, 201 bp, Homo sapiens
atatttatattagatcttattcagaatccaaaaattatcacaccatttcaaagcctgcttatattggtaggctactgcttcagtgaaaaaaaaatcagtargtatttcagtttttgtgtttaatagtttaactgtttcacatgttattagaggagctcagtatattagaggagctcagacagtagttgtggatcccacaga

SEQ ID NO: 8675 - DNA, 201 bp, Homo sapiens
aaaactgaatttactgcttactggcaaaggaagaatgcaccacacagatgtaagttcagaaagttgttcaaagcagaaattaaaggggttaaaagatatayagagaaaaacaccaaatagggcacggtcctgattaatggatgtggattatgagctgggttgtaaactcttatttgtatctggttacctttagagttagca

SEQ ID NO: 8676 - DNA, 201 bp, Homo sapiens
taacgcattagctaatgtcgcttcattctcccaccccttcccaggctcttgtagctatcattgtactctatatccccatgaaattcactttttttttttttagctcatacataagaatgagaacatgcaatattcatctttctatgcctggcttatttcacttaacataatgacctccaatttcctccatgttacaaatca

SEQ ID NO: 8677 - DNA, 201 bp, Homo sapiens
tttttaactttggagtcgattagaaggctttcaatttctaggggtctacttgaggggggagggtgggaggagggagaggggcagaaaaaataactatcggstactaagattaatacctgggtgatgaaacaaacccacatgttacctgtttacctatgtcacaaaacttcacctgtacccccaaacctaaaataaacatta

SEQ ID NO: 8678 - DNA, 201 bp, Homo sapiens
ggggcagagattacagtgagccaagatcatgctactgcattccagcctgggcaacagagtgagactccatcaaaacaaacaaacaaaaaaagaaaccaccyactatattaaatatcctcaaagagctaaaggaaaacatggacaaagaacaaaaggaaatcagaaaaactttgtaaaaaaagtgaaataaagatgataaaa

SEQ ID NO: 8679 - DNA, 201 bp, Homo sapiens
acccaaatagaacccagttgaaaaagaagggcttgggtgttcccttctcattctctgactttgcttatcctccttgagcaaaacctattctgtcatgacastctaaaggaggggttttatagtgacacagcccacaaggtaccactaagttagtttaccaagattacctcattcatcatgcaggcaaataatccatgcctc

SEQ ID NO: 8680 - DNA, 201 bp, Homo sapiens
gaatgaaggaaattctgagcaagataagcaacatgacaaattcagaaatgcaggaaaggaaattgcaagtatagaagccttttgaaaataatactgactcrtgtggatggtgcttattgaaaaacagctggaaatacagtggatcaacagggtaggcccagatcacagaaggcctgaccaggcagtggtgagtttgaaagt

SEQ ID NO: 8681 - DNA, 201 bp, Homo sapiens
taaatacaaaatagaactcacctggggcttttaaagcctaccagttttctgccttgcatccccagaccaattaaaccagattctctgtgtgattctaataygcagccagagttgagaaccatggagcttattgtttgaagaggatacaagggaaataaactaatgcccaagcccatatgcaaatggttgcagttgattttt

SEQ ID NO: 8682 - DNA, 201 bp, Homo sapiens
aagcctaccagttttctgccttgcatccccagaccaattaaaccagattctctgtgtgattctaatacgcagccagagttgagaaccatggagcttattgyttgaagaggatacaagggaaataaactaatgcccaagcccatatgcaaatggttgcagttgatttttttttttttaatccaggtcctgtagctactggca

SEQ ID NO: 8683 - DNA, 201 bp, Homo sapiens
ggaagaataatattttattcataaaatgtatggggccattcatgctgttcaggccattcaaattggcaaggggccttctagtacaccattctttacttgtcactatctctaattttttttttatttaagttctgagatacatgtgtaggatgtacaggtttgttacatagttaaacgtgtgccatcgtggtttgctgcacc

SEQ ID NO: 8684 - DNA, 201 bp, Homo sapiens
agctttctccatatggctagccagttttcctagcaccatttattaactagggaatcctttccccatttcttgtttttgtcaggtttgtcaaagatcagatrgttgtggatatgtggcattatttctgagggctctattgtgttccattggtctatatctctgttttggtaccagtactatgctcttttggttactgcagcc

SEQ ID NO: 8685 - DNA, 201 bp, Homo sapiens
attcagtagttgttggaggaaatgttctgtaaatgtctgttaggtccatttgatatatagcacagtttaagtttaatgtttctttgttgattttctgtctrgatgatatccagtgctgatagtgggatgctgaagtttccaactattattgtcttggggactctttctctccttagctctaataataattcctgtttagaa

SEQ ID NO: 8686 - DNA, 201 bp, Homo sapiens
gatatgcttgtatgaagtatgaatgtgtttaaaaattatattcttatcataaactctctaggataatttcagtttggaaaacaggcagcattgtatggaaraaagcactggttaaggagtaacaaacatctatttctgtataagttttatagttaactgtatatctgattttgttcaaatcactaaacttctctaggctta

SEQ ID NO: 8687 - DNA, 201 bp, Homo sapiens
tgctatgtcaattggtacataccaagttccttcatcctggacaacagcctctgtaactgtcacaatgtcaggttaccattggtgccaaaggtagcacttaygctttttagaacccttatcagtacagagtttaggcacctgaggtctttcacataggccagatgagtctattgaatacagaaatagtgtacagatagttgg

SEQ ID NO: 8688 - DNA, 201 bp, Homo sapiens
aactaatcctgatcatcctcttggagaggaatgctgaaaggacatttgctatgtcaattggtacataccaagttccttcatcctggacaacagcctctgtractgtcacaatgtcaggttaccattggtgccaaaggtagcacttatgctttttagaacccttatcagtacagagtttaggcacctgaggtctttcacata

SEQ ID NO: 8689 - DNA, 201 bp, Homo sapiens
actgggtatatacccaaaggaatagatatcattctcctatgaagacgtgtgcacatgtacgtgcctgtttggtgctcactgctttttgcctgagtgggtasctaaggtacaagacaaagtcctctttactttttcctctgtttttcttttttttttctttttttttaatattatactttaagttttagggtacatgtgcac

SEQ ID NO: 8690 - DNA, 201 bp, Homo sapiens
tcccgggtgaggcgatgcctcgccctgcttcgggtcccgctcagtgcgctgcgcccactgtcctgcacccactgtccgacaatgcccagtgagatgaaccyggcacctcagttggaaatgcagaaatcattcgtgttctgcattgctcatgctgggagctgtagactggagctgttcctattcggccatcttggctcccca

SEQ ID NO: 8691 - DNA, 201 bp, Homo sapiens
atcacttatgaagcttagtttggctggatatgaaattctgggttgaaaattcttttctttaagaatgttgaatattggcccccactctcttctggcttgtwgagtttctgccgagacatctgctgttagtctgatgggcttccctttgtgggtaacccgacctttctggctgcccttaacatttttttgtttttcatttca

SEQ ID NO: 8692 - DNA, 201 bp, Homo sapiens
gatataatattctagggtaaaagtctttttccttcagctctttaaatatgtcctactactctctccaggcctgtaagattttcactgaaaagtctgctgccagatgtattggagctccattgtatgttatttgtttttttccctcttgctgcttttaggattctttctttatccttgacctttgggagtttgattattaaa

SEQ ID NO: 8693 - DNA, 201 bp, Homo sapiens
cattttgttgtcttctaattgttttgtatattttttatgttatttcttagctttgtaattggtggctttttatattcgtcttttcatttgtgtgtccctcktccagtatgtttttgatatggtttggatgtttgtcgcctccaccattgaaactaccatttaattgaacactttaaatgggtaaattatatagtatgatat

SEQ ID NO: 8694 - DNA, 201 bp, Homo sapiens
cctggtgtgccatttgctaagactgttggaaaagcgcagtattaggttgggagtgactcgattttccaggtgccatctgtcacacctttccttggctaggwaagggaattccctgaccccttgcacttcccgggtgaggcgatgcctcgccctgcttcgggtcccgctcagtgcgctgcgcccactgtcctgcacccactg

SEQ ID NO: 8695 - DNA, 201 bp, Homo sapiens
ggatatattctcctggtgtgccatttgctaagactgttggaaaagcgcagtattaggttgggagtgactcgattttccaggtgccatctgtcacacctttscttggctaggaaagggaattccctgaccccttgcacttcccgggtgaggcgatgcctcgccctgcttcgggtcccgctcagtgcgctgcgcccactgtcc

SEQ ID NO: 8696 - DNA, 201 bp, Homo sapiens
gcgggatatattctcctggtgtgccatttgctaagactgttggaaaagcgcagtattaggttgggagtgactcgattttccaggtgccatctgtcacaccwttccttggctaggaaagggaattccctgaccccttgcacttcccgggtgaggcgatgcctcgccctgcttcgggtcccgctcagtgcgctgcgcccactg

SEQ ID NO: 8697 - DNA, 201 bp, Homo sapiens
gttccatctatgttgttgcacataaacaggatctcattctttttatggctgaatagtcctccattgtgtatatgtaccaaattttctttattcattcatcygttgctggacacttaggctgcttccaaatcttggctatttcattattttgaatgttctaagacttgttttgtggcctaacaaatggtctatgcttgagaa

SEQ ID NO: 8698 - DNA, 201 bp, Homo sapiens
tccagcctcactgctgccttgcagtttgatctcagactgctgtgctagcaatgagtgacgctccgtcagtcagtgtagcactctccgagccaggcgcgggwtatattctcctggtgtgccatttgctaagactgttggaaaagcgcagtattaggttgggagtgactcgattttccaggtgccatctgtcacacctttcct

SEQ ID NO: 8699 - DNA, 201 bp, Homo sapiens
cagaccagttcccacaaataacaagattcaggtctgcccctgtgggcccagtcaattggttcactccagtggaccctagctacagacctgattttgtggawatggcttacagaatcatagtggatcccagtgcaaagccagccaatgtggacccaggctctaggcccaacctggtagactcaggcaccagacccacctgcc

SEQ ID NO: 8700 - DNA, 201 bp, Homo sapiens
gtgcaaagccagccaatgtggacccaggctctaggcccaacctggtagactcaggcaccagacccacctgccttctcatccagccactaggccagcctgcytgagaactccagcagcaagactactcatgaactaagccagatgaccaacccatagtctctggttgagctgaacggtaaagggcttttttttttttttttt

SEQ ID NO: 8701 - DNA, 201 bp, Homo sapiens
tagatgggtgccatcaagtttcttgtgtggtggggaatgttaaagtgcccatggccaacaatgattgtgcttccttttcattttaggggattgagaggacsaaaagataggcgactgcacatcatctccaaattcacagggaagggtggagggagtaacacttcattaatcatagggtcttcaatgtgctgaccctagtag

SEQ ID NO: 8702 - DNA, 201 bp, Homo sapiens
gattcctgaatgtgtattttagcatatattttatggaaatcgtagactttgccctgaagtcttaagataagtagagagcaaaaatgaaaatgttaacttcrtgttggagtttctggtcataagattatttcacagccattggacatgcactcaatatctaccaaggcccaataattcgcctacagtatcttgaagagtgta

SEQ ID NO: 8703 - DNA, 201 bp, Homo sapiens
gtaatagtaagtgtagtaattatagataactttaaattattttaaaattaaacttatcagaagatctttgcctttgattcctgaatgtgtattttagcatrtattttatggaaatcgtagactttgccctgaagtcttaagataagtagagagcaaaaatgaaaatgttaacttcatgttggagtttctggtcataagatt

SEQ ID NO: 8704 - DNA, 201 bp, Homo sapiens
actaaatgtatctctttatgtggttcattttgtagtaccagataaaaattctatgtttgttcatcaagattcagtgtcaaaactccaaatgcaagaaaagraaaaaataactcctggaagggaaaggcgtaatagtaagtgtagtaattatagataactttaaattattttaaaattaaacttatcagaagatctttgcct

SEQ ID NO: 8705 - DNA, 201 bp, Homo sapiens
acctatagtaactatctgtttttagaaaaaaaccgtaatgctctagatctccaaagtgatttggtgaggaataaacctatatactatataatccaaaattrcttttccatggtcctagatcatagagagatacattggtgggtaaattatcatattttcgaaggaaatataccagtgattggcccttaaattgcacccata

SEQ ID NO: 8706 - DNA, 201 bp, Homo sapiens
aggcgcccttcctccagcctcactgctgccttgcagtttgatctcagactgctgtgctagcaatgagtgacgctccgtcagtcagtgtagcactctccgakccaggcgcgggatatattctcctggtgtgccatttgctaagactgttggaaaagcgcagtattaggttgggagtgactcgattttccaggtgccatctgt

SEQ ID NO: 8707 - DNA, 201 bp, Homo sapiens
gttttcagctccatcatgtcctttaaggacctctctgcattggttattctagttagacattcgtctaattttttttcaaggtttttaacttctttgccatrggttagaacttcctcctttagctctgagtagtttgatcatctgaagccttcttctctcaactcgtcaaagtcattctccacccagctttgttccattgct

SEQ ID NO: 8708 - DNA, 201 bp, Homo sapiens
accgcagctcaacaaggcctgcctgcctgtatagactccacctctgggggcagggcatagctgaacaaaaggcagcggaaacttctgcagacttaaacgtycctgtctgacagctttgaagacagcagtggttctccgtgcatggagtttgagatctgagaatggacagactgcttcctaaagtgggtccctgacccccca

SEQ ID NO: 8709 - DNA, 201 bp, Homo sapiens
ggaagctcgaactaggtggagcccaccgcagctcaacaaggcctgcctgcctgtatagactccacctctgggggcagggcatagctgaacaaaaggcagcrgaaacttctgcagacttaaacgtccctgtctgacagctttgaagacagcagtggttctccgtgcatggagtttgagatctgagaatggacagactgcttc

SEQ ID NO: 8710 - DNA, 201 bp, Homo sapiens
ctttgttcatttctttttattcttttttctctaaacttctcttctcacttcatttcattcatttgatcttccatcactgataccctttcttccagttgatygaatcagctactgaggcttgtgcattcgtcacgtagttctcgtgccttggttttcagctccatcatgtcctttaaggacctctctgcattggttattcta

SEQ ID NO: 8711 - DNA, 201 bp, Homo sapiens
catgcagattagttacaaagtctgttgtgtgatgctgaggtctgtggtatgactgaatgcatcacccagatagcataatacccaagaggtcattttacccyttcttcctcccccttttagtattccacagtctctatgtctgtgtttacccagtgtttatctcccacatataagggaagagatgcagtatttggttttctg

SEQ ID NO: 8712 - DNA, 201 bp, Homo sapiens
tttttatcctgaagaaatgctgaactttatcaaatgccatttttaaatatgtcgagattatcaaaagtgttttgtttttaattctctttttgtgttgaatmacatttatttatttgcatatattgaaccatccttgaatccctggaataaaccccacttaatcatggtatattatatttttgatgtgctattggatttggt

SEQ ID NO: 8713 - DNA, 201 bp, Homo sapiens
gtttactacaagagaaaacagacaactaagaaaaatcaggaaaataagcaaaatgaactcaataaagagatagaaatcatacaaaagaaccagacagaaaytctagagctaaagaactcaatgattgaactggaaaattccatattgcatttcaatagcaaaatagatcaggcaaaagaaagaatcagtaaacttgaacac

SEQ ID NO: 8714 - DNA, 201 bp, Homo sapiens
gatttttatcctgaagaaatgctgaactttatcaaatgccatttttaaatatgtcgagattatcaaaagtgttttgtttttaattctctttttgtgttgartcacatttatttatttgcatatattgaaccatccttgaatccctggaataaaccccacttaatcatggtatattatatttttgatgtgctattggatttg

SEQ ID NO: 8715 - DNA, 201 bp, Homo sapiens
caagactaggattgcaacctctgcctttgtttgttttccattttcttggtagatcttcctccatccctttactttgagcctatgtgtgtctctgcacgtgwgatgggtttcctgaatacagcacactgatgggtcttgactctttatccaatttgccagtctgtgtcttttaattggagcttttagcctatttacatttaa

SEQ ID NO: 8716 - DNA, 201 bp, Homo sapiens
gtgcttccaaaatacactggtgggacaagaatagaataggcattgccatcccaaagtgacaaaataggtaagataaaaggagataactggctccaagtaartccaaaatacaacaaggaaagcaacgttaaatcttaaaactagagaatacatttttttgacttcatgttccaccctctgagcacacttgggtgggggttg

SEQ ID NO: 8717 - DNA, 201 bp, Homo sapiens
aaatactaactaaacatatactaaaaactatatgttttaaatacaatgtccaagagaaaattagacgttggtccacttgttgctttgcaaacttataatgrttggtttcttattattgatttctttatattttaaatatgtatagtcagtattataaacatttgagaatgtataagaaaaagtattaataattatcttcaa

SEQ ID NO: 8718 - DNA, 201 bp, Homo sapiens
atcatctctggaatggagcaccatagcctttacagattacaccatagcctttacggattacacccaggaatttcacttgggttttaggtccttgtgccttktccaatgataatggcacagtacatgctgcacgtgggtgaacagagcatctggttccttttgggtagtgtccttgtctgagctcactaggatgatttcata

SEQ ID NO: 8719 - DNA, 201 bp, Homo sapiens
atctgctgctggccatttatgggcacctctgatctgttgtagtcccagtcagtaggcagaagtattgccgagatctgtaactgaagcaacaaatggaaatmagagaggtacaagggcagccagggtggccagtagaaggatttccagggtatcatgctggtcaaggccccattcaaaggtagtggtctttatggtaacctg

SEQ ID NO: 8720 - DNA, 201 bp, Homo sapiens
tcaggacactcccgccttaatacagcgcttttccaatggtcttagcaaaaggcgcaccaggagattatatcctgcgcctcgcttggcgggtcccacacccrtggagccttgctcactgctagcacagcaatccgagatcaaactgagaggtggcagcgaggatgggggaggggcatctgccattgctgaggcttgactagg

SEQ ID NO: 8721 - DNA, 201 bp, Homo sapiens
tggaggcaataattaatagcctaccaaccaaaaaaagtccaggaccagatggattcacaaccgaattctaccagaggtacaaaaaggggctgggaccattmcttctgaaactattccaatgaatagaaaaagagggaatcctccccaactcattttatgaggccagcagcatactgataccaaaacctggcagagacacaa

SEQ ID NO: 8722 - DNA, 201 bp, Homo sapiens
ttaaaatctgttttatccaagactaggattgcaacctctgcctttgtttgttttccattttcttggtagatcttcctccatccctttactttgagcctatrtgtgtctctgcacgtgagatgggtttcctgaatacagcacactgatgggtcttgactctttatccaatttgccagtctgtgtcttttaattggagctttt

SEQ ID NO: 8723 - DNA, 201 bp, Homo sapiens
tcattggtttaaaatctgttttatccaagactaggattgcaacctctgcctttgtttgttttccattttcttggtagatcttcctccatccctttactttsagcctatgtgtgtctctgcacgtgagatgggtttcctgaatacagcacactgatgggtcttgactctttatccaatttgccagtctgtgtcttttaattg

SEQ ID NO: 8724 - DNA, 201 bp, Homo sapiens
ttgatcttcattggtttaaaatctgttttatccaagactaggattgcaacctctgcctttgtttgttttccattttcttggtagatcttcctccatccctktactttgagcctatgtgtgtctctgcacgtgagatgggtttcctgaatacagcacactgatgggtcttgactctttatccaatttgccagtctgtgtctt

SEQ ID NO: 8725 - DNA, 201 bp, Homo sapiens
atgttagggtgtccattttagatttttcctgctttctcttgtgggcatttagtgctataaatttccctctacacactgctttgaatgtgtcccagagattmtggtatgttgtgcctttgttctcgttggtttcaaagaacatctttatttctgccttcatttcgttgtgtacctagtagtcattcaggagtgggttgttca

SEQ ID NO: 8726 - DNA, 201 bp, Homo sapiens
tgatccctttaccattatgtaatggccttctttgtctcttttgatcttcattggtttaaaatctgttttatccaagactaggattgcaacctctgcctttktttgttttccattttcttggtagatcttcctccatccctttactttgagcctatgtgtgtctctgcacgtgagatgggtttcctgaatacagcacactga

SEQ ID NO: 8727 - DNA, 201 bp, Homo sapiens
aactatgtggtcaattttcgaataggtgtggtgtgatgctgagaagaatgtatattctgttgatttggggtggagagttccgtagatgtctattaggtccrcttggtgcagagctgagttcaattcctggatatccttgttgactctctgtctcgttgatctgtctaatgttgacagtggggtgttaaagtctcccattat

SEQ ID NO: 8728 - DNA, 201 bp, Homo sapiens
atggccagccccactcccaaggctccactatgcctagtggtaactctgactccacggcccgctcagcattgttctattgggggctgtctgtggtggctcakcccctgtgacatgtttctgtccgggaccccagactgtccatgacattctctgaaatctaggtggaggaagacatgcccccacactcttgcattctgcatg

SEQ ID NO: 8729 - DNA, 201 bp, Homo sapiens
tcctctctcaatgcccaagttgccactgtggtctgttggctctagaactcaaattgcagctgtgcccttctccctagggcctgagcctttggaatgcattytttctccacagctgtgtcagtgcttcattctgattcacagggtcagagttgcagccatattcctgtccctgagccaagctactgaagagtgcctcagagt

SEQ ID NO: 8730 - DNA, 201 bp, Homo sapiens
tctttgtctagtaagtccaacatcttggcatcttcagggagagtttttattaactgatctatttttgttttgtgtattggctattttcttgtttctgtgcrtgtctgataattttttgtttaaattctaaataatatgatgtgaaattctgaaaattagattactcttctttcccagggtttgttattttgctgtttttgt

SEQ ID NO: 8731 - DNA, 201 bp, Homo sapiens
tgcaatctatccatctgacaaagggctaacatccagaatctaccaagaacttaaacaaatttacaagaaaaaaaaatcccatcaaaaagtaggcaaaggakatgaacagacacttctcaaaataagatgtttatgcagccaacaaacatatgaaaaaaagatcatcatcactggtcattagagaaatgcaaatcaaaacca

SEQ ID NO: 8732 - DNA, 201 bp, Homo sapiens
acttcgggcagcacagtgtggagagagatatccttaatgtgaggaaagaaaggttaaatgagcactggacttccttggaccccaacattcagcccactggrgtaaaatccaatgccagccaggcccctacagccacaaactctaggccagtatctgcagacccagcctccaagcccaccccaatgccaggccagctcctgt

SEQ ID NO: 8733 - DNA, 201 bp, Homo sapiens
caccttccctttaaattctgaccttacgatacattctcagattaccactggtaacatggggatcttggcctaactcttaattttctttattttcgagagcmtgaagtttgagcaaaagtagtggagggttctctgattgatttcaatatcactgggaggtgcaaagggaagagcacttttattagtcatggggtcatcgca

SEQ ID NO: 8734 - DNA, 201 bp, Homo sapiens
agattgtggagataaatcattggtaaactagtattcaaatgatgtgagttatgtaattctacactatgacctctttgaactctgacttggtatacatcctyaggtgccactgtggaaatagggacgttggtctaacccctaattttgttttgttttgaaagctgaaacttctgggtaaacacagaccatgttctctgattc

SEQ ID NO: 8735 - DNA, 201 bp, Homo sapiens
tgacacaaacacgtcccacctccaacaatggggattacatttcaacatgagatttggacaggaaaaacatacaaaccatatcacaggggaaagagttttcrgtaaaataatcaagccaaatcactgaagaaataaataagcaaacaataataacatacccagaaagaagaggaaaagaatcaaaattaagattgctacatt

SEQ ID NO: 8736 - DNA, 201 bp, Homo sapiens
tatagcagcatgatttataatcctttgggtatatacccagtaatgggagtgctgggtcaaatggtatttctagttctagatccctgaggaatcgccacacwgacttccacaatggttgaactagtttacagtcccaccaacagtgtaaaagctttcctatttctatacatcctctccagcacctgttgtctcctgactttt

SEQ ID NO: 8737 - DNA, 201 bp, Homo sapiens
tgaaaccacaggaacaaattaatagaaccagaaattataaataagaaggttaatataatacaaattggaaatatatattttctttcttgcctcagcttttwaaaaaagcataaaattatataaagaaataattataacaacaactataaccatgtctttattatttacaaatgtgctatgtataacaatagcacaaaaatg

SEQ ID NO: 8738 - DNA, 201 bp, Homo sapiens
ctttttttttttttttttttttttaatcagagtaatgctggccttgtagaatgtgctggaagtattccttcctcttcaagtttttgggatagtttgaataraactggcattagttcttctttaaattttggtagcagtcagcagtgaacccatcaaggttcctgggcttttctttgatggaaagcttctaattattgcttt

SEQ ID NO: 8739 - DNA, 201 bp, Homo sapiens
tcagaagctctgggttcaggtccagaaatctgttttagtaagttgtctgagcgattctgttgctagctaaagttggagaaccattatctatatttatactsctctaagttgagaatgtcacagcatcattctataaaaacaataggtaggtagatttatatactattttccattttcattgtttatattattcatacattc

SEQ ID NO: 8740 - DNA, 201 bp, Homo sapiens
taggtaggtagatttatatactattttccattttcattgtttatattattcatacattctgttttccatgatatcatatacaataaaaattatatcaactrgagtaaaattaaactttttttcaattaacacataacttttctttaaagtgttacatgctgctgcccgaaaatctgtaccacacccatacttttgagaatg

SEQ ID NO: 8741 - DNA, 201 bp, Homo sapiens
gataactcacaatcatgagaatagcatgggggtaactgcccccgtgattcagtcacctcccactgggtccctcccatgtcatgtggggattatgggagctrcaattcaagatgagatttgggtgcggcgagccaaaccatatcattccacccggcccctcccaaatctcatgtcctcacatttcaaaacacaatcatgccc

SEQ ID NO: 8742 - DNA, 201 bp, Homo sapiens
tggatggtttacatgtgtggcattatttctgaggcctgtgttctgtaccattgatctatacatctgttttggcaccagtaccatgctgttttggctactgyagccttgtagtataatttgaagtcaggtagcatgatgcctctagctctgatctttttgcttaggattgtcttggctatacaggctctttcttgtttcaca

SEQ ID NO: 8743 - DNA, 201 bp, Homo sapiens
ttacatttaaggttaatattgttatgtgtgaatttgatcctgtcattatgatgttagctggttattttgctcattagttgatgcagcttcttcctagcctygacgatctttacaatttggcatgtttttgcagtggctggttgttcctttccatgtttagtgcttccttcaggagctcttgtaaggcaggcgttgtgataa

SEQ ID NO: 8744 - DNA, 201 bp, Homo sapiens
gaaggtacattaacagattttggaatgaggaaaataccttaatacctaggtattaagcctcgcatgcattagctatttttcctgatgctctccctcccccmacccacaataggccccactgtgtgttgttcccctccctgtgtccatgcgttctcattgttcagctctcacttataagtgagaacctgtggtgattggttt

SEQ ID NO: 8745 - DNA, 201 bp, Homo sapiens
ggcgcatgccgccatgcccagctaattttttatatttttagtagagatggggtttcaccgtgttagacaggatggtctcgatctcctgaccttatgatccrcccgccttggcctcccaaagtgctgggattacaggcgtgagccaccgcgcccagccaaattttttaattattattatattttaagttctgggatacatgt

SEQ ID NO: 8746 - DNA, 201 bp, Homo sapiens
tataaatatattgaaagaactaaaggaaaccattctttaacaagaaaaggaagatattatgacaatgtttcatcaaatagaagatatctacaaagagataraaaatattttgcaaagggccacatggaaattacagtgttaaaaagtacaaaaattggaagtaaaaatttactagaggggttcaagtacatttgaactgtc

SEQ ID NO: 8747 - DNA, 201 bp, Homo sapiens
actagaacaacaactaaaaagatttcatgatttgtttacactccacctccacctctcatgtccaatagtgagggtttatgtcaaatactatattgatgagktactgcttttattttttcttcaatgatttcatttcattatttccttttaattttcaccccaccttcttttccttgttgatttaattttgtttttgaaatt

SEQ ID NO: 8748 - DNA, 201 bp, Homo sapiens
gtaattacctttatggacagtcacaatgtcaggtcatatcagtgttctaagaagtaccatagcattaagcttcccataatcaatggagtttataggcaccyaaggtgatacacacaagctaacttaattattgcatggagaaatagtctcatgaacatctttggattcatgatcatgaagagctgagcaataagggcagtg

SEQ ID NO: 8749 - DNA, 201 bp, Homo sapiens
gttggggcctgctccagggtagaggcctttttggtaactttaaaatgattgcaatcaggattccatcaagggaactgccagtagcagaataggttcacaarttgcttggcctcttgtgtatttgttgtaatagagagggaccatagtttgacagttacctcctcaggagtgagacatgtttcccctttctagtttactccc

SEQ ID NO: 8750 - DNA, 201 bp, Homo sapiens
tagacttccattcagccatcttgctccaattctgccaggctcttttcaacaaccagatcttgcaggaactaatactaatagagtaacaactcactcattaytgtggagagggcaccaagccattcatgagaaattttatcccatagccaacacacctcccactgggcacgtgtccaatattggtgatcaagtgtcaacatg

SEQ ID NO: 8751 - DNA, 201 bp, Homo sapiens
tgtccaacctgccttattttgttgttgtcattctggtctgttttgttttaggcttttagcagcccaaagccatggtttttagtttctgtctctagtgatamgcagaaaagaggaatgagaaaggggctttactggctcaaccagaagcagaaactaagaatccatgactgtattctctcccttggacacccctagaacttt

SEQ ID NO: 8752 - DNA, 201 bp, Homo sapiens
ggcagaaataaagatgttctttgaaaccaatgagaacaaagacacaacataccagaatctctgggacacattcaaagcagtgtgtagagggaaatttatascactaatacccacaagagaaaaaaggaaagatctaaaattgacaccctaacgtcacaattaaaagaactagaaaagcaagagcaaacacattgaaaagct

SEQ ID NO: 8753 - DNA, 201 bp, Homo sapiens
ttataccaagacaggaatagcctaacacaggaaattggtactgaggaatggggcgttgctacaaagatacctcaaaatgtggatgcaactttggagctgcrtaacaggcagaggttggaaaaatttggagggctccgaagaagaacaagaggatgagggagtttggaacttcgtagagactggttaaatgattgtgacgaa

SEQ ID NO: 8754 - DNA, 201 bp, Homo sapiens
caggcagaggttggaaaaatttggagggctccgaagaagaacaagaggatgagggagtttggaacttcgtagagactggttaaatgattgtgacgaaaatkctgatggtgatatggacagtgaagtccaggctgaggaggtctcaagatgcaaatgaggaacttattggaaactagagcaaagatcacccttattatgcct

SEQ ID NO: 8755 - DNA, 201 bp, Homo sapiens
gagcatgttgtttaatttctatgtatttgtagtttccaaagatcctcttgctattagtttctagttttccattgtggttttagaagatacttgatatgatyttgtattttaaaaatttgatgaggctggttttgtagcctaagatatgatctatcctggaaaatgttccgtgtcctggtgagaagatgcatattctgtagc

SEQ ID NO: 8756 - DNA, 201 bp, Homo sapiens
atgctttttctgtgcctgttgaaatgattatgtggtttttgtccttaatgtttatgtgatgtatttcatttattgatttgatacttattattggtctgtttgagagttttagttttttctggttcgatattgggtgtttgtatgtttccagaaatttatttatttcctctaggttttctagtttgtgagtgtagagttgtt

SEQ ID NO: 8757 - DNA, 201 bp, Homo sapiens
aatgctttttctgtgcctgttgaaatgattatgtggtttttgtccttaatgtttatgtgatgtatttcatttattgatttgatacttattattggtctgtttgagagttttagttttttctggttcgatattgggtgtttgtatgtttccagaaatttatttatttcctctaggttttctagtttgtgagtgtagagttgt

SEQ ID NO: 8758 - DNA, 201 bp, Homo sapiens
gaatgctttttctgtgcctgttgaaatgattatgtggtttttgtccttaatgtttatgtgatgtatttcatttattgatttgatacttattattggtctgtttgagagttttagttttttctggttcgatattgggtgtttgtatgtttccagaaatttatttatttcctctaggttttctagtttgtgagtgtagagttg

SEQ ID NO: 8759 - DNA, 201 bp, Homo sapiens
gactaatcggtatggaaaaaatagtctttacaacatatgatgctgagaaaactagatatccacatgcaaaataatgacgttgtgccctttatcttacacakacaaaaattaactcaaagtagaccgaaaacctaaaactaagagctgtactttaaaactcttagaagaaaacataggagaaaaccatatattggatttggc

SEQ ID NO: 8760 - DNA, 201 bp, Homo sapiens
accatgttttcccattattggaaaaggtaagtttaaatatggagagaggaatgagtagattaaccctgtagtatattgaattagagttgaaaatatctgcrtgaacccacaggtttatacaaacacacacatcctttagctgttcctgctcagagaacctaaaagcaatgacacatcgataggaatgagcacacctagcac

SEQ ID NO: 8761 - DNA, 201 bp, Homo sapiens
agagtgaacaggcaacctacagaatgggagaaaatttttgcaacctactcttctgacaaagggctaatatccagaatctacaatgaactcaaacaaatttrcaagaaaaaaacaaacaaccccatcaaaaagtgggcgaaggatatgaacagacacttctcaaaagaagacatttatgcagccaaaaaacacatgaaaaaa

SEQ ID NO: 8762 - DNA, 201 bp, Homo sapiens
attgtgtctatttgattcttttctcttctttattagtctggctagcagtctattttgttattcttttcaaaaaactagctcctggattcattgatttttttgaaggattttttgtgtctctatctccttcagttttgctctgatgttagtaatttcttgtcttctgctagcttttgaatttgtttgctcttgcttctctag

SEQ ID NO: 8763 - DNA, 201 bp, Homo sapiens
gggtcattcccagtaacggggttgctggatcaaatggtagttctaagttctttgagaaatttccaaactgttttccacagtggctgaacttatttacattmccatcagcaatgtataaagccttcctttttctctacaacctcaccagcatctcttatttctgactttttagtagtagccattctgactggtgtgagatgg

SEQ ID NO: 8764 - DNA, 201 bp, Homo sapiens
actgtgaaacatgtggtcctgaacgtttttggttggtaggctattaattactgcctcaatttcagaacttcttattggtctattcagggattctgttttttcctggtttagtcttgggtgggtgtatgtgtccaggaatttatccatttattctagattttctattttatttgcctagaggtgtttatagtattctctgag

SEQ ID NO: 8765 - DNA, 201 bp, Homo sapiens
ccctataaagaggttttcaacttaaggcgattagactaaaaatgttatatgcccaagagcctggttggccaaggggagaggagttgattcaagactgcgastacctcctatgcctgcagtacacaaatcttacctcaagtctcttttgtgttgggaatctctatgataattgccaggtagtgcctttgtaactgtccataa

SEQ ID NO: 8766 - DNA, 201 bp, Homo sapiens
atgatttggctctctgtttgtctattcttggtgtataggaaagcttgtgatttttgcacattgattttgtatcctgagactttgctgaagttgcttatcamcttaaggaatttttgggctgagacaatggggttttctaaatatacaatcatgtcatctgcaaacagagagaatttgacttcctctcatcctattcgaata

SEQ ID NO: 8767 - DNA, 201 bp, Homo sapiens
accttcccctataaagaggttttcaacttaaggcgattagactaaaaatgttatatgcccaagagcctggttggccaaggggagaggagttgattcaagastgcgactacctcctatgcctgcagtacacaaatcttacctcaagtctcttttgtgttgggaatctctatgataattgccaggtagtgcctttgtaactgt

SEQ ID NO: 8768 - DNA, 201 bp, Homo sapiens
atgagaacatgtggtgtttggttttctgttcctgtgttaggttgctgagaataatggtttccatcttcatccatgtaactgcaaaggacatgaactcatcmttttttatggctgcatagtattccatggtgtatatgtgccacattttctttatccagtctatcattgatgggcattttggttggttccaagtctttgcta

SEQ ID NO: 8769 - DNA, 201 bp, Homo sapiens
taatttattatactttaagttctagagtacatgtgcacaacatgcaagtttgttacatagctgtacatgtgccatgttggtttgctgctcccatcaactcrtcatttacattagctatttctcctaatgctgtccctcccccgacaggccccactatatgatgttccccaccctggggacacacatattttcttatctggg

SEQ ID NO: 8770 - DNA, 201 bp, Homo sapiens
aataatgccacatatctacaactatctgatctttgacaaacctgagaaaaacaagaaatggggaaaggattccctatttaataaatggtgctgggaaaacyggctagccatatgtagaaagctgaaactggatcccttccttacaccttatacaaaaattaattcaagatggattaaagacttacatggtagacctaatac

SEQ ID NO: 8771 - DNA, 201 bp, Homo sapiens
atcgtttccccatttcccagcaccatttattaaatagggaatcctttccccatttcttgtttttgtcaggtttgtcaaagatcagatggttgtagatatgyagcattatttctgagggctctgttctgttccattggtctatatctctgttttggtaccagtaccatgctctttgcttactgtagccttgtagtatagttg

SEQ ID NO: 8772 - DNA, 201 bp, Homo sapiens
gttccactgctgtgctgtagcctctcatttgaattccagaggtctcataaaggtaattttatccttgtctggttgttaagtcttcatttttgtggaagaawgagggctgggcctcctattccatgatcttacttacatcaatccccctattttaatttattttaagttcaacttatcagaaattttttttgattcatgaat

SEQ ID NO: 8773 - DNA, 201 bp, Homo sapiens
gaagcagagaataaaaatttggaaaatttataacctggccatatagaaaagaaaagaaaagaaaagaaaagcctgttttcagaagaatccaggcagagtawccacttgctagagagatttgcatagcaaaaagggagccaggtgctcatagccaagacaatggggaaaaggcctcgaagtcatttcagagatattcatagc

SEQ ID NO: 8774 - DNA, 201 bp, Homo sapiens
tgagttatcacctgtgcatcaacagagcatcccgtggggttgtattgccctgattcttcatgatccttgtattttcattgatgtacgtgcatttaaagaakcatctttacatgctagctttggcccttcactagacagcccagccagagtttgtgtgggtccattagcagggttcatgggcaggtcagctgtcagggtcca

SEQ ID NO: 8775 - DNA, 201 bp, Homo sapiens
aaaagcaatggcaacaaagccaaaattgacaaatgggatctaattaaactgaagagcttctgtacagcaaaagaaactaccatcagagtgaacaggcaacytacaaaatgggagaaaattttcgcaacctactcatctgacaaagggctaatatccagaatctacaatgaactcaaacaaatttacaagaaaaaaacaaac

SEQ ID NO: 8776 - DNA, 201 bp, Homo sapiens
tggatcccttccttacaccttatacaaaaattaattcacgtggattaaagacttaaatgttagacctaaaaccataaaaaccctagaagaaaacctaggcrataccattcaggacataggcatgggcacggacttcatgtctaaaacaccaaaagcaatggcaacaaagccaaaattgacaaatgggatctaattaaactg

SEQ ID NO: 8777 - DNA, 201 bp, Homo sapiens
tatagttccatttgtctatttttgttgttgttgcctgtgcttttgtgatcacggccataaaatttttggctagaccaatgtcctagagcatttctcctgcrttttcttctagtagttttatagtttcaggtcttacatttaagcctttaatgtattttgcattgatttttgagagattggggcctagtttcatttctttgc

SEQ ID NO: 8778 - DNA, 201 bp, Homo sapiens
tttttagctttttgagaaacctctataatgttttttttaataatgattgtactaatttacattcccaccagccatgtgtgatagttcttttttttttttttacatctttgacagtgtttgttattttttgtctttttgataataagcattcgatctagaataaaatgatatctcattctggtcttgatttagatttcgtta

SEQ ID NO: 8779 - DNA, 201 bp, Homo sapiens
tccacactgtggaagctttgtttttttgctcttcacaataaatcttgctgctgctcactctttgggtccgcactacctttataagctgtaacactcactgygagggtttgcggcttcattcctgaagtcagcgagaccacaaacccactggaaggaacaaacaactccagatgcgccacctttaagagctgttaacactca

SEQ ID NO: 8780 - DNA, 201 bp, Homo sapiens
gcaacctgatcgggtccccttccacactgtggaagctttgtttttttgctcttcacaataaatcttgctgctgctcactctttgggtccgcactacctttrtaagctgtaacactcactgcgagggtttgcggcttcattcctgaagtcagcgagaccacaaacccactggaaggaacaaacaactccagatgcgccacct

SEQ ID NO: 8781 - DNA, 201 bp, Homo sapiens
gctctgtaaaatggaccaatcagcactctgtgaaatggatcaatcaacaggatgtgggcggggccaaataagggaataaaagctggccacccgagccagcrgcggcaacctgatcgggtccccttccacactgtggaagctttgtttttttgctcttcacaataaatcttgctgctgctcactctttgggtccgcactacc

SEQ ID NO: 8782 - DNA, 201 bp, Homo sapiens
ccagatggattcatagctgaattctcccagaggtaaaaggtggagctgttatgattccttctgaagctattccaaccaatagaaaaagagggaatcctccstaactcattttatgaggtcagcatcatcctgataccaaagcctgacagagacacaacaaaaaaaagagaattttagaccaatatccctcatgaacatcga

SEQ ID NO: 8783 - DNA, 201 bp, Homo sapiens
tgagtagctgggactacaggcatgtgccaccacacttggctaattttgtattttcagtaagttgaggtttcaccatgttgaccaggctggtctcaaactcytgacctcaagtaaaccacctgcctcagcctcccaaagtgctgggattacaggcatgagctaccacacccggccctaagttatgtttttcttaattcagct

SEQ ID NO: 8784 - DNA, 201 bp, Homo sapiens
gtcattattatatttgttttcagtatgttttaagccatttcccctgcattttcctcctttagcatcttcattgtgtttcattgatttttttcatagtgtamcattttttattctcctctcattttcttttgtgtatgtttttagattttttgtggttaatatggggattatatttaacactttaaacttataacaacttga

SEQ ID NO: 8785 - DNA, 201 bp, Homo sapiens
tgctccgtgggctgcacccacgtgtctgggaagccccagtgagatgaacccggtacctcagttggaaatgcagaaatcacctgtcttctgcatcattcacrctgggagctgcagactggagctgttcctattcagccatcttggtgccacccctgtctcaagatattttctaatttaccttatgatttattgtgggaccca

SEQ ID NO: 8786 - DNA, 201 bp, Homo sapiens
tccccaactcattttatgaggccagcagcatactgataccaaaacctggcagagacacaacaaaaaaagagaattttagaccaatatccctgatgagcatygatgcaaaaatcctcaatgaaatactggcaatccgaatccagcagcacatcaaaaacttatccaccatgatcaagttggcttcatccctgcgatggaagg

SEQ ID NO: 8787 - DNA, 201 bp, Homo sapiens
aggggtcagggacccacttgaggaggcagtctgtccgttctcagatctcaaactccatgctgggagaaccgctactctcttcaaagctgttggacagggamgtttaagtctgcagaagtttctgctgccttttgttcagctatgccctgccctgagaggtggagtctacagaggcaggcagacctccttgggctgcagtgg

SEQ ID NO: 8788 - DNA, 201 bp, Homo sapiens
ttatacaccaatgacagacagagaggcaaatcatgagtgaactgccattcacaattgcttcaaagagaataaaatacctaggaatccaacttacaagggaygggaaggacctcttcaaggagagctacaaaccactgctcaatgaaataaaagaggatacaaacaaatggaagaacattccatgctcatgggtaggaagaa

SEQ ID NO: 8789 - DNA, 201 bp, Homo sapiens
tgtacaatatgctattatattcaccatgctgtacagtagatatcaaaaaacctttattcctcgtgaataactgagattttatactttttgacatcatctcyttattacccccacctgcagcctgtgcagcccccattctgctctctgcttctatgagttcagttgttttatcttccacatgtaagtgaaaacatgtggtat

SEQ ID NO: 8790 - DNA, 201 bp, Homo sapiens
aagccccttacttcttgggaagaagcttgtaataggggcttccttccttaatataaggtgctgttctcaatgtgaggttagtgcagggagtggggttagtrcagggagtccttttcccattgcttatttttgttagatagataaagcaaatattagagctaaagagacagacagaccccgatacaataatagctagatttc

SEQ ID NO: 8791 - DNA, 201 bp, Homo sapiens
tgatttttgctcttttcttattctttcttttatttatataaataaatatatatattctttctgcttactttaatgtcctcttctttttctagcttataagrtagaagttttgttgactgaggtctcttttctttttcagtgtaagtttgcagctgtaaaattcctctaagcatcactttagctgcatcccatagttttcat

SEQ ID NO: 8792 - DNA, 201 bp, Homo sapiens
tttgatgatgctgacgcacagatggggtttggtgtgcatgtcctttctgtttgttagttttccttctaacagtcaggaccgtcagctgccggtctcttggrgtgtgctggcggtccacgccagaccctgtttgcctgggtatccagcggaggctgcagaacagcaaatgttgctgcgtaatccttcctctggaagcttcgt

SEQ ID NO: 8793 - DNA, 201 bp, Homo sapiens
tacatttaaggttaatattgttatgtgtgaatttgatcctgtcattatgatgttagctggttattttgctcattagttgatgcagcttcttcctagcctcracgatctttacaatttggcatgtttttgcagtggctggttgttcctttccatgtttagtgcttccttcaggagctcttgtaaggcaggcgttgtgataac

SEQ ID NO: 8794 - DNA, 201 bp, Homo sapiens
gcagagctgagttcatttcctggatatccttgttaactttctgtctggtcgatctgtctaatgttgacagtggggtgttaaaatctcctattattattgcrtggtctctttttaggtctctcaggacttgctttatgaatctgggtgctcctgtattgggtgcatatatatttagaatagttagctcttcttgttgcattg

SEQ ID NO: 8795 - DNA, 201 bp, Homo sapiens
atagatagttcttattgtttcgagatatgtcccatcaatacctaatttattgagagtttttagcatgaagcgctgttgaattttgtcaaaggccttttctscatctgttgagataatcatgtggtttttgtcattggttctgtttatatgatggattacgtttattgatttgtgtatgttgaaccagccttgcatcccagg

SEQ ID NO: 8796 - DNA, 201 bp, Homo sapiens
ttcagtatgatattggctgtgggtttgtcatagatagttcttattgtttcgagatatgtcccatcaatacctaatttattgagagtttttagcatgaagcrctgttgaattttgtcaaaggccttttctgcatctgttgagataatcatgtggtttttgtcattggttctgtttatatgatggattacgtttattgatttg

SEQ ID NO: 8797 - DNA, 201 bp, Homo sapiens
atttgcatttctctgatggccagtgatgatgagcattttttctgtgttttttggctacataaatatcttcttttgagaagtgtctgttcatatcctttgcycactttttgatgggtttgtttgattttttcctgtaaatttgtttaagttctttgtagattctggatattagccctttgtcagatgggtagattataaaaa

SEQ ID NO: 8798 - DNA, 201 bp, Homo sapiens
caaaatctccttaagctgagaggcaacttcagcaaagtctccagatacaaaatcaatgtgcaaaaatcacaagcattcttatacaccaataacagacagaragccaaatcatgagtgaactcccattcacaattgcttcaaagagaataaaatacctaggaatccaacttacaagggacaggaaggacctcttcaaggagc

SEQ ID NO: 8799 - DNA, 201 bp, Homo sapiens
tttgctattgtgattagtgccacaataaacatatgtgtgcatgtgtctttatagcagcatgatttataatcctttggttatatacccagtaatgggatggstggatcaaatggtatttctagttctagatccttgaagaatcgccacactgtctttcacaatgcttgaactagtttacagtcccaccaacagtgtaaaagc

SEQ ID NO: 8800 - DNA, 201 bp, Homo sapiens
ggacatttggttggttccaagtctttgctattgtgattagtgccacaataaacatatgtgtgcatgtgtctttatagcagcatgatttataatcctttggktatatacccagtaatgggatggctggatcaaatggtatttctagttctagatccttgaagaatcgccacactgtctttcacaatgcttgaactagtttac

SEQ ID NO: 8801 - DNA, 201 bp, Homo sapiens
ggtgtatatgtgccacattttcttaatccagtctgtcattgatggacatttggttggttccaagtctttgctattgtgattagtgccacaataaacatatrtgtgcatgtgtctttatagcagcatgatttataatcctttggttatatacccagtaatgggatggctggatcaaatggtatttctagttctagatccttg

SEQ ID NO: 8802 - DNA, 201 bp, Homo sapiens
ccccaccaccaacaacaacaacaagcagcaaacaaacaaaaacaacaagccccacaaaaaggaagagtcaatcaacatacagatttgctataatacattayctaaattgtccatattttagcaaaaaaatttaggacatgcacagaaacagtactctgtaacccaaacacaaggaaaaaggcaaggaaaactgcttgtgag

SEQ ID NO: 8803 - DNA, 201 bp, Homo sapiens
tggtgtatatgtgccacattttcttaatccagtctgtcattgatggacatttggttggttccaagtctttgctattgtgattagtgccacaataaacataygtgtgcatgtgtctttatagcagcatgatttataatcctttggttatatacccagtaatgggatggctggatcaaatggtatttctagttctagatcctt

SEQ ID NO: 8804 - DNA, 201 bp, Homo sapiens
ccacccttacaggccctgaccagtggcattgctctagagagggagctcatgtgagtcacacacacacaccgtgagaaccaagcagatgcagcatagtgccktttttcctctgcctcctgggttcaagtgattcttctgtcttagcctcccaagtagctgggactacaggcatgcaccaccacgcccagctaatttttgtat

SEQ ID NO: 8805 - DNA, 201 bp, Homo sapiens
accaagcagatgcagcatagtgccttttttcctctgcctcctgggttcaagtgattcttctgtcttagcctcccaagtagctgggactacaggcatgcacyaccacgcccagctaatttttgtattttcagtagtgatggggtttttccatgttggccaggctggtgtggcccaacatccctacatcgtagagccccactg

SEQ ID NO: 8806 - DNA, 201 bp, Homo sapiens
tttatgaatgttgaatattggcccccactctcttccggcttgtagagtttctgccgagagatccgctattagtctgatgggcttccctttgtgggtaacgygacctttctttctggctgcccttaatattttttccttcatttctactttggtgaatctgacaattatgagtcttggagttgctgttctcgaggagtatct

SEQ ID NO: 8807 - DNA, 201 bp, Homo sapiens
cgcccagctaatttttgtattttcagtagtgatggggtttttccatgttggccaggctggtgtggcccaacatccctacatcgtagagccccactgacatmcccctgcatctatgcagtgggctgcagacactgccactgagagcaactcaatcctacccagcggcaggaccaccacacagttggatgcaccctgagaaca

SEQ ID NO: 8808 - DNA, 201 bp, Homo sapiens
agtcttgctagcggtctgtcaattttgttgatcatttcaaaaaaccagctcctggattcattgattttttgaagggttttttgtgtctctatttccttcarttctgctctgatcttagttgtttcttgccttctgctagcttttgaatgtgtttgctcttgcttctctcgttcttttaattgtgatgttagggtgtccatt

SEQ ID NO: 8809 - DNA, 201 bp, Homo sapiens
tatataaataattaatcataacaacaattataacaatgtcttttatatatagtagtaatacacataatagtagtgcaaaaatgttgaagaaggaataatgstatatgggagtaatatttctgtacttcactggaatttgattagtataaactcaagtagaatctaaaattgactgtggtcagagctacacaaatatgtgaa

SEQ ID NO: 8810 - DNA, 201 bp, Homo sapiens
gcatctaggttgattctgtctttgctactgtgaatagtgctgtgatgaacatgcacatgcatgtgtctttatggtaaaatgatttatattcttttggggtyattcccagtaacggggttgctggatcaaatggtagttctaagttctttgagaaatttccaaactgttttccacagtggctgaacttatttacattcccat

SEQ ID NO: 8811 - DNA, 201 bp, Homo sapiens
gggagtaatatttctgtacttcactggaatttgattagtataaactcaagtagaatctaaaattgactgtggtcagagctacacaaatatgtgaacatctwaaaaaacattgaatcgaacactttacataggcatatagcatggtatgttatttattttgtaaaaatacctcagtgaattccaggcaggatcatatttaaa

SEQ ID NO: 8812 - DNA, 201 bp, Homo sapiens
gctgcttatgttattggtgcatatgtataaaaattccatatttctggcaaactcaactttttcatttcatgaaaggaaccttctgaatctctggtaaggtyatttgccttaaatcctattgtgtcttacattgacatactatggtgatttttgttagtgtatgtgtggtgtatctcttttcatctacttgttttctgtctt

SEQ ID NO: 8813 - DNA, 201 bp, Homo sapiens
tgttatttattttgtaaaaatacctcagtgaattccaggcaggatcatatttaaaaagaattaaagcaatgagaggatactgtgagggaggaaacatgaaygttactagattgtaaattactttagcacatagattctcttcctaaatgcttaaccttatctcccctaaaatgctcttcttgttgcctctctgcttatcta

SEQ ID NO: 8814 - DNA, 201 bp, Homo sapiens
aattgttacatgggaatgttacacagtactcaggtttggagtatggatcccatcactttggtagtaagcatagtactacataggtagtttttaaacccacyaccaccttccacctctagtaggccacagtgcctattgttgtcatatttatatccacatgtgctcaatacttagctcccacttataaatgagaacatgcag

SEQ ID NO: 8815 - DNA, 201 bp, Homo sapiens
ttatcaatgggaaattagctagaaagttttaaaacctctagacaatgattttaaaaaatatgaggtttataattctctgtttaaataaatgttttctacartaatccatgttacttttatagcaatagaatttatgaaaaataaatctaataaacattggttcaattggggcaggggggatccagtagcttatacatagac

SEQ ID NO: 8816 - DNA, 201 bp, Homo sapiens
aggagcaggttgttcagtttccatgtccttgagcggttttgagtgagttccttaatcctgagttctagtttgattgcactgtggtctgagagacagtttgytataatttctgtgcttttacattagctgaggagtgctttacttccaaatatgtggtcaattttggaataggtgtggtgtggtgtggtgctggaaagattg

SEQ ID NO: 8817 - DNA, 201 bp, Homo sapiens
tttaccattatgtaatggccttctttgtctcttttgatctttgttggtttatcagagactaggattgcaacccctgcctttttttgttttccatttgcttsgtagatcttcctccatccctttattttgagcctatgtgtgtctctgcacgtgagatgggtttcctgaatacagcacactgatgggtcttgactctttatc

SEQ ID NO: 8818 - DNA, 201 bp, Homo sapiens
cagctctaaatttcatttttttgtacaactttcgctgcatcttataagttttaggtaaatttttatttttgttttcatttgtctcaagatatatattttttaattttactttaagttctagggtacatgtgcataacgtgccagtttgttacatatgtatacatgtgccatattggtgtgctgcacccgttaactcgtcat

SEQ ID NO: 8819 - DNA, 201 bp, Homo sapiens
ctcttaaatttgccattgtgatgccaataatgcttaaattttgcctttttggactttgcagctaataacacttaaattttccctaatttatagatcttgtrggcatgcttcattgttttttattcttttttctcctctgtgtattttcaaatagcccctcttgaaactctctaattttttcttctgcctgatcagttctgc

SEQ ID NO: 8820 - DNA, 201 bp, Homo sapiens
aaacctaggcaataccattcaggacataggcatgggtaaggacttcatgtctaaaacaccaaaagcaatggcaacaaaagcctaaattgacaaatgggatmtaattaaactaaagagcttctgcacagcaaaggaaactaccatcagagtgaacaggcaacctacagaatgggagaaaatttttacaatctacccatctga

SEQ ID NO: 8821 - DNA, 201 bp, Homo sapiens
gttaatattgttatgtgtgaatttgatcctgtcattatgatgttagctggttattttgctcattagttgatgcagcttcttcctagcctcgacgatctttrcaatttggcatgtttttgcagtggctggttgttcctttccatgtttagtgcttccttcaggagctcttgtaaggcaggcgttgtgataacaaaatctctc

SEQ ID NO: 8822 - DNA, 201 bp, Homo sapiens
tccttcagctctttaaatatgtcctactactctctccaggcctgtaagattttcactgaaaagtctgctgccagatgtattggagctccattgtatgttayttgtttttttccctcttgctgcttttaggattctttctttatccttgacctttgggagtttgattattaaatgccttgaggtagttttctttgggttaaa

SEQ ID NO: 8823 - DNA, 201 bp, Homo sapiens
ataccattcaggacataggcatgggtaaggacttcatgtctaaaacaccaaaagcaatggcaacaaaagcctaaattgacaaatgggatataattaaactraagagcttctgcacagcaaaggaaactaccatcagagtgaacaggcaacctacagaatgggagaaaatttttacaatctacccatctgacaaagggctaa

SEQ ID NO: 8824 - DNA, 201 bp, Homo sapiens
tttagatttgaggttaccatgaggcttgcaaatcatataacccattattttaaactgatgataacttaacactgattgcacaaataacaacaacaacaacmgcaaaaacaagcaaaaaggaaactagcaaaaactctacactttaacttcatccccctgctttttaactttttgatttttctctttatgtcttattgttaa

SEQ ID NO: 8825 - DNA, 201 bp, Homo sapiens
gccattttgttattgcttttccagttgttttgtggtcttctcttccttctttcttccctttttgtcttccttttagtgaaggtgattttctctggtggcawgtagtaattacttgctttttattttttgtgtgtccattgtatatatttttagatttgaggttaccatgaggcttgcaaatcatataacccattattttaa

SEQ ID NO: 8826 - DNA, 201 bp, Homo sapiens
cttctactctcaatgtccatccatgagttcaattgttttaatttttagctcccacaaataagtgaaaacatgcagtttgtctttctgtgcctggcttattkcacttaacataatgtcctccagttccatctatgttgttgcacataaacaggatctcattctttttatggctgaatagtcctccattgtgtatatgtacca

SEQ ID NO: 8827 - DNA, 201 bp, Homo sapiens
attatactttcttagttattttaaaatgtataattaaattattattgactatagtcaccctattgtgctatcaaatactagatcttattcattctttctgkttttgtgtactcatcctcgtttcccccactatgcttactagcctctggttaaccatccttctactctcaatgtccatccatgagttcaattgttttaatt

SEQ ID NO: 8828 - DNA, 201 bp, Homo sapiens
caatgaactcaaacaaatttacaagaaaaaacaaccccatcaaaaagtgggcgaaggatatgaacagacacttctcaaaagaagacatttatgcagccaayggacacatgaaaaaatgctcaccatcactggccaccagagaaatgcaaatcaaaaccacaatgagataccatctcacaccagttagaatggcgatcatta

SEQ ID NO: 8829 - DNA, 201 bp, Homo sapiens
tgttcagattttcttttttaaatttttagtttataatttttttctgggtacctagttggtgtatatatttatggggaatatcagatattttgatactggcrtataatgtgtaataatcacagtagggtgaatggggtatccatcatctcaagcatctatcctttatgttacaaataatccaattatactttcttagttatt

SEQ ID NO: 8830 - DNA, 201 bp, Homo sapiens
attcagctctgcaccaagtggacctaatagacatctgcagaaatctccccccgaaatcaacagaatacacattcttctcagcagcacatcacacttattcyaaaactaaccacatagttggaagcaaagcactcctcagcaaatgtaaaaaaacagaaattataacaaactgtctctcagaccacagtgcaatcaaaccag

SEQ ID NO: 8831 - DNA, 201 bp, Homo sapiens
agactttaaaccaacaaagatcaaaagagacaaagaaggctgttacataaaggtaaagggatcaattcaacaagaagagctaactatcctaaatatatatrcacccaatacaggagcacccagattcataaagcaagtccttagagacctacaaagagacttagactcccacacaataataatgggagactttaacacccc

SEQ ID NO: 8832 - DNA, 201 bp, Homo sapiens
gaggccgaatagcagccagctaagaaaagagaggttctcatatgtatgtaacactttccccctacccacttcttcatccttcttgggcaaagtggccatgraaggacattctgaataaggaggtctgcagtgacacacctcataagtgccactgtccctaattaaatctaacgagagtaactcatttaaggtaaaggtgaa

SEQ ID NO: 8833 - DNA, 201 bp, Homo sapiens
ttacactgttggtgggactgtaaactagttcaaccattgtggaagtcagtgtggcgattcttcagggatctagaactagaaataccatttgacccagccaycccattacttggtatatacccaaaggattataaaacatgctgctataaatacacatgcacgcgtatgtttattgcggcactattcacaatagcaaagact

SEQ ID NO: 8834 - DNA, 201 bp, Homo sapiens
actaacaccagtgcatgctacttgggagcctgtgggttgtttcaccactgtgacttttattgcccacatcatgtacactgtctggaggctcaaggacccayctacctgctggcaccatggccagcactcaagcaagccacctagaggcccaaggattagcctgcctggactcactaatcctgatgctcacatatatcacct

SEQ ID NO: 8835 - DNA, 201 bp, Homo sapiens
gttgccaatgggaattccaccccagagaaacacagagctgccacagacggaagtgatcaggcagaagtagggtggctgcattgagggccaaggtcggaagrccctgcttagtaaggagtagcaaggcctgggacctgcatgaaaagcagtgtggctgtttttctttatggcacgtgttgcatgttggaggcacgagatagc

SEQ ID NO: 8836 - DNA, 201 bp, Homo sapiens
gttaattttgccttcttacataatcccatatttctgggatgttttgttcatttttcttaattgttttctttatttttgtctgactgagttgattcatagamccagtcttcaaactctgagattctttcctcaacttggtctattctgctgttaatacttctgattgtattatgaaattcttgtagtgagcttttcagctca

SEQ ID NO: 8837 - DNA, 201 bp, Homo sapiens
attcagcctcagcatgtgagtcttttttccatccacatttggtgttttctgtccagagattggttcaaattatgttggtatagtcgaaactgtgagctctrtctatgagagcagcagttcctggttgcgtctagtcagttgtcttggaaaatgtaagagttaaagaaaaaggaaagaaacatgaaaaatggctcagcagtc

SEQ ID NO: 8838 - DNA, 201 bp, Homo sapiens
cttcagcactttgaatatgtcatcttacttccccctaacctgtaaaattattattattttttatatttgggacctgaagtcactttaggcagctggtgttkaaggggtataggactcaggttcctcttgctggggcagctgattcccttggggctggggtgagtctcaatgctccctatgtgagcactggcctagaatcaa

SEQ ID NO: 8839 - DNA, 201 bp, Homo sapiens
ttactgtagcaaagctggtactaagttccaatacagcccccaccccctgatactttcctctccttcaagaagaaagatttttctacacactgtgccacttsggtttgggggaggggtgtgagactgtactttctgctctcttcaatgaatattttctagttattatgctaaaaccaggtaccatgacctctcacctgattc

SEQ ID NO: 8840 - DNA, 201 bp, Homo sapiens
tttctctctcccacagatgcagagaataaacatttccacatggatcaattctctctgagagccagaaagtggttgagcgactcctacacattgggaaactkaaaaaatatccacatattgggtagggaaagcaaagactcatgcacaaactgcatcctaagcacagtgtcatacaattgggaaataatccacaactgataa

SEQ ID NO: 8841 - DNA, 201 bp, Homo sapiens
gttatagtttccctttctaattctattgatttagctttgtgtatatatatatatatatatatatgtgtgtgtgtgtgtgtgtgtgtgtgtgtgtatatatrtgtgtgtgtgtgtgtgtatatatatatgttttggaattgtgcattaacttacttcccaaagtgaaaaatatgcagaaggtatacttagagcagtttcatt

SEQ ID NO: 8842 - DNA, 201 bp, Homo sapiens
caattaggaaaagaggaagtcacattgtccgtgtttggagatgacatgattgtatatctagaaaaccccactgtctcagtccaaaatctccttaagctgakaggcaacttcagcaaagtctccagatacaaaatcaatgtgcaaaaatcacaagcattcttatacaccaataacagacagagagccaaatcatgagtgaac

SEQ ID NO: 8843 - DNA, 201 bp, Homo sapiens
atgctttgtttctttcctcagtaggttcacttatttctttgagttatagtttccctttctaattctattgatttagctttgtgtatatatatatatatatrtatatgtgtgtgtgtgtgtgtgtgtgtgtgtgtgtatatatatgtgtgtgtgtgtgtgtatatatatatgttttggaattgtgcattaacttacttccca

SEQ ID NO: 8844 - DNA, 201 bp, Homo sapiens
tgtgtgtataggtgtttcttaaatttctttataaaacatttgtaagttgagagttttacttcttccttttcaatccagatacattttatttcttttttttkgggggggggtctaatttctctggctagaaactccattgtagtgttaaacagaagtgataagacatccttatcttgtttttactttagtgggaaagcatta

SEQ ID NO: 8845 - DNA, 201 bp, Homo sapiens
tatatatgtgtgtgtgtatatatgtatatatatgcatatatatgtatgtgtatatatatatgaaacaagccccttacttcttgggaagaagcttgtaatargggcttccttccttaatataaggtgctgttctcaatgtgaggttagtgcagggagtggggttagtgcagggagtccttttcccattgcttatttttgtta

SEQ ID NO: 8846 - DNA, 201 bp, Homo sapiens
gtattaaatccttgatgaatgtatggcttgtacatgttttctcctaattcataggttgtctcttcaaattattaatagtttcctttgctgtgcagaaactyttcaattttatgtaatcacacttgtctatttttgcttttgttgcctgtgcttttggggtcaaataaaaaaaattgcctacaccaatgctgtgcagctttt

SEQ ID NO: 8847 - DNA, 201 bp, Homo sapiens
tttattactgggctctctaacctatttgtttgacctatgtgtctgttttattattattatttttattttatgtgtctgtttatataccattacaatactgkttaaatttttaaattttatttattatttattttattatacattgaaatttatagctgtatttattatggggtataaagcaatgttatgatttacgaatat

SEQ ID NO: 8848 - DNA, 201 bp, Homo sapiens
tctcactctgttgcccagactggagtgcagtggtgagatcttggctcactgcaacctctgcctccttggttcaggttcagacaattctgtctcagcctccygagtagctgggattacaggcgcccgccaccatgcccagctaatttttgtatgtttagtagagagggggtttcaccatgttggccatggtagtcttgaact

SEQ ID NO: 8849 - DNA, 201 bp, Homo sapiens
ggtgggactgtaaactagttcaaccattgtggaagtcagtgtggcgattcttcagggatctagaactagaaataccatttgacccagccatcccattactkggtatatacccaaaggattataaaacatgctgctataaatacacatgcacgcgtatgtttattgcggcactattcacaatagcaaagacttggaaccaac

SEQ ID NO: 8850 - DNA, 201 bp, Homo sapiens
taattgaccatatatgcctcggtttattactgggctctctaacctatttgtttgacctatgtgtctgttttattattattatttttattttatgtgtctgkttatataccattacaatactgtttaaatttttaaattttatttattatttattttattatacattgaaatttatagctgtatttattatggggtataaag

SEQ ID NO: 8851 - DNA, 201 bp, Homo sapiens
ttttttttttttgagagagagtctcactctgttgcccagactggagtgcagtggtgagatcttggctcactgcaacctctgcctccttggttcaggttcaracaattctgtctcagcctcctgagtagctgggattacaggcgcccgccaccatgcccagctaatttttgtatgtttagtagagagggggtttcaccatgt

SEQ ID NO: 8852 - DNA, 201 bp, Homo sapiens
tggggggataacttaagcccaggagactagaggttgcaaaaaaaccccgcagatatatatatatatagctaatatatatattagctatgtataattatatrttatatatattataatatgtattagctatatatatgcagggttttttatatataaatatataacatatttatatataaaaaaatatctttgtgtaatttc

SEQ ID NO: 8853 - DNA, 201 bp, Homo sapiens
aaagattaattgaccatatatgcctcggtttattactgggctctctaacctatttgtttgacctatgtgtctgttttattattattatttttattttatgkgtctgtttatataccattacaatactgtttaaatttttaaattttatttattatttattttattatacattgaaatttatagctgtatttattatggggt

SEQ ID NO: 8854 - DNA, 201 bp, Homo sapiens
agttaatgggtgcagcacaccaacatggcacatgtatacatatgtaacaaacctgcacgttgtgcacatgtaccctaaaacttaaagtataacaaaaaaaraaaaacaaacaaaacaataaataaaagtgctgaaaaaaaaaaatctaccaaccaataattttattgctagcaaaactgcttttcagaaaaggtgaaatat

SEQ ID NO: 8855 - DNA, 201 bp, Homo sapiens
ataatgacgagttaatgggtgcagcacaccagcatggcacatgtatacatatgtaactaacctgcacattgtgtacatgtaccctaaaacttaaagtatawaaaaaaaaaagaatctacctacacttggctgggtgtgtggtggctcatgcctataatccccatgctttggaaggctgaggcaggaggatggcttgagcct

SEQ ID NO: 8856 - DNA, 201 bp, Homo sapiens
tcattgtgtattggtggcacccctgtcaaagattaattgaccatatatgcctcggtttattactgggctctctaacctatttgtttgacctatgtgtctgktttattattattatttttattttatgtgtctgtttatataccattacaatactgtttaaatttttaaattttatttattatttattttattatacattga

SEQ ID NO: 8857 - DNA, 201 bp, Homo sapiens
aaaagttttacactttgactaaaatgtgaataccctaccataattaaagaaaaaagtgaaaaatattgatacattttggttgagagatttctggcccttakattatttcatgaccacaggacacacagtatcccccaaggctttataacaaatgtataattgtctttccaaagtagtgtgcctttcagccaactgaaagta

SEQ ID NO: 8858 - DNA, 201 bp, Homo sapiens
taaaaaatgatgagttcatgtcctttgtagggacatggatgaaattggaaatcatcattctcagtaaactatcgcaagaacaaaaaaccaaacaccgcatwttctcactcataggtgggaattgaacaatgagaacacatggacacaggaaggggaacatcacactctggggactgttgtggggtggggggacgggggagg

SEQ ID NO: 8859 - DNA, 201 bp, Homo sapiens
caactctaggaagttacaggtccaaaagcccaatttattccactgacctgttcagtaagctgtttccatttggcatcaatcagtgaacagaaagtttgccragacctgtaactcaaataaagatcagaggagctaaggggaacaatagcataggaggcctgttggatggactcgagggcattctgttggttggggcctgct

SEQ ID NO: 8860 - DNA, 201 bp, Homo sapiens
agaagtcaggaaacaacaggtgctagagaggatgtggagaaataggaacacttttacactgttggtgggactgtaaactagttcaaccattgtggaaggcmgtgtggcgattcctcagggatctagaactagaaataccatttgacccagccatcccattactgggtatatatccaaaggactataaatcatgctgctata

SEQ ID NO: 8861 - DNA, 201 bp, Homo sapiens
tattaacactatttgcttagaactatttgcgagggaaaaatcacaatattgcctgggcaccctccttgctattcagtgttcccaattgcctctcaggtccrttaattgttctgactttttaatttgatacattcaggaaataatgaaaaataaaatgtttctgcaatgacattgtagatgagagcaaaaagctagctcttt

SEQ ID NO: 8862 - DNA, 201 bp, Homo sapiens
ctatactacaaggctacagtaaccaaaacagcatggtactggtaccaaaacagagatatagatcaatggaacagaacagagtcctcagaaataatgccacrtatctacaactatctgatctttgacaaacctgagaaaaataagcaatggggaaaggattccctatttaataaatggtgctgggaatactggccagccata

SEQ ID NO: 8863 - DNA, 201 bp, Homo sapiens
gtaagaataagaatttttaaaatctacttatggtttcctatcttctctggagtttaagtatgtatctctaatgacaacagtacctatatgtaattatcacktgagaaaaagtcttcatgaatttcctcctataattagttgaactctagtattattctcaatagaaaattagctttagggctcatttatttaaaaagttat

SEQ ID NO: 8864 - DNA, 201 bp, Homo sapiens
gtccttgatgaacattgatgtaaaaatcctcaataaaatactggcaaaccgaatccagcagcacatcaaaaagcttatccaccatgatcaagttggcttcrtccctgggatgcaaggctggttcaatatatgcaaatcaataaatgtaatccagcatataaacagaaccaaagacaaaaaccacatgattatctcaataga

SEQ ID NO: 8865 - DNA, 201 bp, Homo sapiens
atgaagaatattaattatgatagtattagacacatgcacacacacatgttaatatttacattaaaaaagtgttttgaaatctgtttacttttttatagagrctgatgaacgattgcatagtacaactgagagaggtacaataaatgatgcaattaagacgcagttaaagagaaagagttaccctggtaagaataagaattt

SEQ ID NO: 8866 - DNA, 201 bp, Homo sapiens; identical to SEQ ID NO: 770

SEQ ID NO: 8867 - DNA, 201 bp, Homo sapiens
aatttttattttgcttgtataataattagagccttaaaaataacagccaggaaaaactcctgggtataaaaatagccctcaaaggtggaagaggtttcttyacaacttctgattttaactgtggaattgttaaagtatcaattatagcaatagcttacctttgctcccttcaactcagtaaaaatgagttgagaaatcatg

SEQ ID NO: 8868 - DNA, 201 bp, Homo sapiens
agaggcagtgagacctccttgagctgtggtgggctccacccagtttgagtttcccagccgctttgtttacctactcaagccttggcaatggcgggcgcccytcccccagcctggctgccgccttgcagtttgatctcagactgctgtgctagcaatgagcgaggctccgtgggcgtaggaccctccgagccaggtgcggga

SEQ ID NO: 8869 - DNA, 201 bp, Homo sapiens
tctcagcacttgcttgtttgtaaaggattttatttctccttcacttatgaagcttagtttggctggatatgaaattctgagttgaaaattcttttctttawgaatgttgaatattggcccccactctcttccggcttgtagagtttctgccgagagatccgctattagtctgatgggcttccctttgtgggtaacgcgacc

SEQ ID NO: 8870 - DNA, 201 bp, Homo sapiens
ttttcttcattgtgtattggtggcacccctgtcaaagattaattgaccatatatgcctcggtttattactgggctctctaacctatttgtttgacctatgkgtctgttttattattattatttttattttatgtgtctgtttatataccattacaatactgtttaaatttttaaattttatttattatttattttattata

SEQ ID NO: 8871 - DNA, 201 bp, Homo sapiens
atattttgtttttatattaattgcttatcaaatttatggtttctcccagtccataggttgccttttcatttcgttgacttttttctttgctttgcacaagytttttttttttttttttttttttttagttcttcactaatctgcagaggttctacttgtttatttttgcttttgttgccagtgattttggtgtcctaccca

SEQ ID NO: 8872 - DNA, 201 bp, Homo sapiens
tgtacagcaggttttagaggacagcactgggtgtgtgtgtgtgttgatgactttttcatatacttactggccatttgtatgtctacttttatgaaaaagtytattttggtcatttgcccatttttaattggattatttgggttttagtgttgaattgcttgagttcattatattttgtttttatattaattgcttatcaaa

SEQ ID NO: 8873 - DNA, 201 bp, Homo sapiens
aacactttagtaagttttaatgtcttaattttccctcttctacaacctgcttctcccttagttgccttacctcaataaatactattaagaactctgtcagrtactgctttagtccatctgtgttgacataaggaaatacttgaggctgggttatttataaggaaaagaggtcttattttgtctcatggttctgtaggcagt

SEQ ID NO: 8874 - DNA, 201 bp, Homo sapiens
tgagattctttttgactcttggctaactctcactctcatgatctcagtttcacttacagctttagataaaaggcagtgtcctttttctaacattggacccrtagagtcctatctacttgctctggctagttttagctaccctgtctggatttttttttctcaaataggtaaattcaaacaaaggaaatatgagatttaatg

SEQ ID NO: 8875 - DNA, 201 bp, Homo sapiens
ttgaacaatgagaacacttggacacaggaaggggaacatcacacactggggcctgttgtggggtgggaggatgagggagggatagcattaggagatgtacytaatgctaaatgatgaattaatgggtgcagcacaccaacatggcacatgtatacatatgtaacaaacctgcacgttgtgcacatgtaccctaaaccttaa

SEQ ID NO: 8876 - DNA, 201 bp, Homo sapiens
actatcgcaaggataaaaaaccaaacaccgcatattctcactcataggtgggaattgaacaatgagaacacttggacacaggaaggggaacatcacacacyggggcctgttgtggggtgggaggatgagggagggatagcattaggagatgtacctaatgctaaatgatgaattaatgggtgcagcacaccaacatggcac

SEQ ID NO: 8877 - DNA, 201 bp, Homo sapiens
tagaggtataattgtcttcttcctttatcacattttttttttctgttttatagttaccctcacattggattttttttttgtgggtaattcctccgtaattmtggtacttgattgccatttataattttggtatttttgtgaatgttttaatcttcctacatattttagtgaaaagtatggagagacactgctagacactgt

SEQ ID NO: 8878 - DNA, 201 bp, Homo sapiens
tttcctgcctcagcctcctgagtagctgggactacagacatgcaccaccacactcggctaatttttgtatttttagtagagatggagttttgccatgttgsccaggctggtctcgatctcctggcctcaaatgatccacccgtcttgacctcccaacgtgctgggattataggcatgagccactgtgcccagccccaatgt

SEQ ID NO: 8879 - DNA, 201 bp, Homo sapiens
tatgttgcccagcctggtctcaaactcttggtctcaagtgatcctcccacctcagtctccaaaagtgctgatattacaggcatgagccactgctcccagcycttcaatgtaccttttttttttttttttttttgagacagagtcttgccctgtcacccagactggaattcagtggcatgatcttggctcactgcaacctcc

SEQ ID NO: 8880 - DNA, 201 bp, Homo sapiens
accatatgaggaaataaagatctctggcaaagataagtccatgggcaaatataaaagccattattattataattttggtttgtaactctgctctttgtatstataatactcaaaagacaaatatataaaaataattacaaatttatgttatggacacacaatatataaagacatgatttgtgatgttaatgacagggataa

SEQ ID NO: 8881 - DNA, 201 bp, Homo sapiens
tttaaaagctcaggaactctaagcaggataagattttgtaaaatttaaagcaacaggataataatgtaagggaggaaaattgtgacttttactagttgatraatttctccagcacataactttgtattcgtagtgtttaactctaaaatgctctactcattgactccctgcttatctaaaaatcctctgatttcttagttc

SEQ ID NO: 8882 - DNA, 201 bp, Homo sapiens
cttgcatggatagtcattcaatttgatgttcctgtggatggatagggttcttcctccatcttgctctggtgattctatctcaaagcctttcttcttatagmtgagaaaatgggtgaggttttttcagccaaaggaaaaatcttacacctgaatataaattttaaactcaaaagcccatctcaaattacaaatgttgcaatt

SEQ ID NO: 8883 - DNA, 201 bp, Homo sapiens
tttcagccaaaggaaaaatcttacacctgaatataaattttaaactcaaaagcccatctcaaattacaaatgttgcaatttctagaaaacaatttcatatsacaatttgactatgatacatgtatgtgtggatttctatgagtttatttttgaatttatggaacttcttgatgtgaagattaatgctttaacaaaattttg

SEQ ID NO: 8884 - DNA, 201 bp, Homo sapiens
gattaatgctttaacaaaattttggaacttttcattcactatttattaaaaaagttttttcttctcttcctcttttcttcttctggaatgcccattatgtrtatgttggtacacttggatggtgttgtaccaatttctgaggctctgttaatttgcttcattcctttttctttatgtttctctgactaggtaatttcaact

SEQ ID NO: 8885 - DNA, 201 bp, Homo sapiens
aatttatttagaagaataaaacatatagaataacatacatatgcacacatacaggcatatatgttaaaggcaagaataatgaggagtaattagccctaccrgatcttagacaatcttatacttgaataattaaagcagtgtggtattgatgcaaaaatagacagataaatgaacaaaataaataaccttgaaattgatcct

SEQ ID NO: 8886 - DNA, 201 bp, Homo sapiens
tagcaaagacttggaaccaacccaaatgtccaacaatgatagactggattaagaaaatgtggcacatatacaccatggaatactatgcagccataaaaaakgatgagttcatgtcctttgtagggacatggatgaagctggaaaccatcattctcagcaaactatcgcaaggataaaaaaccaaacaccgcatattctcac

SEQ ID NO: 8887 - DNA, 201 bp, Homo sapiens
gggaatgccttcttgatttggtccttgactaagtcattatcagtgtgtaaaaatgcttctgatttctgtatattaattttgcatcctgaaacttttccgamttgatttatcaaatctaagaggttttttttttttggtgaagtctttagggttttctagaataagatattatcatcagtgaacagggataatttgacttcc

SEQ ID NO: 8888 - DNA, 201 bp, Homo sapiens
ttttggtttaattaagtcccatatgtctattttcatttttgttgcatttgctttgaggacttgttcataaattctctgcttaagtcaatgtccagaagagwttttcctaggtttcttctaggatatttataatgtcaggtgttagtttaggtctttaatccatcttgagttaatttttgtatatggtgagaattatgggtc

SEQ ID NO: 8889 - DNA, 201 bp, Homo sapiens
acctgttttatttttatagagactgtcttaaaacacttgaaaggtgttaatggaaaagatataataaagcatctaatcaacatacagtcaaagagtcatgsaggtaagaacaagaatttttcaagtctcctgttaatggcttatttagctctgaagttaaatatggatctttgatgacaactgtagctgtaagttattaca

SEQ ID NO: 8890 - DNA, 201 bp, Homo sapiens
tattgcctaggttttcttctagggtttttatggttttaggtcttacatttaagtctttaatccatcttgagttaatttttgtataaggtgtaaggaagggrtccagtttcagttttctgcctatggctagccacttttctcagcatcatttattaaatagggaatcctttccccattgcttgtttttgtcaggtttgtcaa

SEQ ID NO: 8891 - DNA, 201 bp, Homo sapiens
agatgacgagttagtgggtgcagcgcaccagcatggcacatgtatacatatgtaactaacctgcacaatgtgcacatgtaccctaaaacttaaagtataawaaaaaaaaaatctagatttctagcttctttggggaatttagaacacctgagaatatctgtcatgcatttgtagtggtaagaataatggttttttttttaa

SEQ ID NO: 8892 - DNA, 201 bp, Homo sapiens
gagtgcagtggcacgatctcggctcactgcaagctctgcctcccaggttcatgccattctcctgcctcagcctcccgagtagctggggctacaggcgcccrccaccacacccggctaattttttgtatttttagtagagacgggatttcaccatgttagccaggatggtctcaatctcctgacctcatgatctgcctgcct

SEQ ID NO: 8893 - DNA, 201 bp, Homo sapiens
gggctaatatggtttggatctgtgtccccaccaaaatctcatgttgaattgtaatccccagtgttggaggtggggcatggtgggaggtgactgtataatgkggcaaatttcctataaatggtttagcaccatcctcttagtactgtccttgtgatagtgagttctcgcaagatctggttatttaaaagtgtgtggcacctc

SEQ ID NO: 8894 - DNA, 201 bp, Homo sapiens
gcttttaagtggggaactcatttatattcaaggttactattgatacacaagggctaatatggtttggatctgtgtccccaccaaaatctcatgttgaattrtaatccccagtgttggaggtggggcatggtgggaggtgactgtataatggggcaaatttcctataaatggtttagcaccatcctcttagtactgtccttg

SEQ ID NO: 8895 - DNA, 201 bp, Homo sapiens
catatatatttagaattgttatatcctctggctgagttgatcctgttattattatgtaatgatcttctttgtcactttttactgttttgacttagagtctwttttatctgatatagatatagctgttcttgcttgcttttggtttttgtttgcatggaatttttaaattctatccttttactttgaatttccataggctac

SEQ ID NO: 8896 - DNA, 201 bp, Homo sapiens
ggcggtgtgcagtggtgcgatctaggctcactgcaccctccgcctcccaggctgaagcaattctcttgcctcagccacctgagtagccgggactacaggcytgcgccaccatgcccagctaatttttgtatttttaagagagacggggttttgccatgtttcccaggctggtctcgaactcctggcctcaagtgatcctcc

SEQ ID NO: 8897 - DNA, 201 bp, Homo sapiens
tagattgaagaacaactttggcatgagtttaatactattaaatttctcaaggcttgatttatggcctaacatattgcatatcttagagatttccaagtatrttttagagcaacacgtatttgtctgttgggtggagccttctatgggtatctgtagacttccagtgagctctacttaatttattgtattcttcaattctat

SEQ ID NO: 8898 - DNA, 201 bp, Homo sapiens
tattcttttttatcactgatgcctatttgaattatagttacaccacctaaaatagactattaaaatatttctggatgagtcaaggaacttctgttttattrtattttgtgagttgtgatgaccattgtgtgcagataggtcaactatgaaaaaaaattgatgttccacctcaccagatatacccctacaacatatatatgt

SEQ ID NO: 8899 - DNA, 201 bp, Homo sapiens
atgtggtcactggagggtctccagaacatcctgtctttaggcttcacctaagggtagaggtcttattggtaacctgatagatggtgtcatgaagatgcccrttaagggaatttgagagctctagtctgggctttccttttacttgttggggctaagagtgactaaagctgagagtgacctagcccttgccgggtagtgttt

SEQ ID NO: 8900 - DNA, 201 bp, Homo sapiens
tgtcaaagggtgtttgctttcagccaactgtaggagattatgagtccaagtgttcaacaggaaccttgggacatgtggcagtatccttctgtcatagactstaattggcaaacagagagattggtgagatgtgtaactcaaatgacaaaatgtatcagagaaggccaaggggaaaaacaacctatgtggtcactggagggt

SEQ ID NO: 8901 - DNA, 201 bp, Homo sapiens
aaaatcagaaatgcaagtgaaggaacaaagaactctcaaagggcaaagaattattagtaagtataaaaagtaaagataactttaaattatttaaaagtaarttcatccgaaggtatttttgctttgattcacaaaagttttacactttgactaaaatgtgaataccctaccataattaaagaaaaaagtgaaaaatattga

SEQ ID NO: 8902 - DNA, 201 bp, Homo sapiens
atgacctctttgaactctgacttggtatacatcctcaggtgccactgtggaaatagggacgttggtctaacccctaattttgttttgttttgaaagctgaracttctgggtaaacacagaccatgttctctgattcatcttaagatcactgtgatgggtagaggaaatagcacatgtgttataggtatcgtcaccattttg

SEQ ID NO: 8903 - DNA, 201 bp, Homo sapiens
tcatgatcatgaagagctgagcaataagggcagtgatttctatttctccctcaggcaatttttggagaccaatctctagacacttgtggtttagtaagttwacagtcttccacatgcttcactaaaatgaccttaaccacagtagttccccttagggcttgaggctgatgtgattggggattcacacagaagatacatcta

SEQ ID NO: 8904 - DNA, 201 bp, Homo sapiens
aatgaaggacaaaaagttaagggcagccagagagaaaggtcgcgttacccacaaagggaaggccatcagactaacagcggatctctccgcagaaattctayaagccagaagagagtgggggccaatattcaacattcttaaagaattttcaacccagaatttcatatccagccaaactaagcttcataagtgaaggagaaa

SEQ ID NO: 8905 - DNA, 201 bp, Homo sapiens
tgttatttgtttgattagtgcatttcttggactagttttgtaaagtttatatattttgttgtttgtaactactgaagtctgcttagttagcttagtgatcwgctaatgactagacagagatttccttaaatgtattgaattgatgtctcccacccttgtagaggggctccctgtgtgtctctgtgtgtcttgaggcatgct

SEQ ID NO: 8906 - DNA, 201 bp, Homo sapiens
gtgtcctttgacaaatgaatagataaaaatgtgctgtatatatacacaacgaaatattatgtggccttaaataaagaagttctgtcagttgcaacggcatygatgaacctggaggatattatgctaagtgaaataatccaggcccataaagacatatattgcagtcttggtaagttacatatttctatgaatttatacatt

SEQ ID NO: 8907 - DNA, 201 bp, Homo sapiens
acaaggcctgcctgcctgtatagactccacctctgggggcagggcatagctgaacaaaaggcagcggaaacttctgcagacttaaacgtccctgtctgacmgctttgaagacagcagtggttctccgtgcatggagtttgagatctgagaatggacagactgcttcctaaagtgggtccctgaccccccagtaggctaact

SEQ ID NO: 8908 - DNA, 201 bp, Homo sapiens
agtcagcaggtgatagatcttgccaggactgaattcttctcttgaaggtggcaagttcccttttggcccaggatgtgtctagaagtgtcatccaggaactraggcctggaacggaggcctcaaaattctgcccagtgccctatcctactgtggctgagctggtatccaagatacaagatgaaatcttttttattcatccct

SEQ ID NO: 8909 - DNA, 201 bp, Homo sapiens
gatttggaattttactggatgttttttctgcatctattgagattatcatgtggtttttgtccttcattctgttaatgtgatgtatcacatttattgctttrtgttgaaccatccttgcacccaggagataaaccacacttgatcatggtgaattcttctttgaatgtgctgtcgaatttagtttgttagtattttgttgag

SEQ ID NO: 8910 - DNA, 201 bp, Homo sapiens
gaaaaggtttcgacttttccccattcagtataatgttagctgtgggtttgtcatatgtagcatttattgtgttaaggtatgtttcttctatacacaatgtrttgagagtttttatgatgaaacaatgttaaattttatcaagttttttcagtatctattgagataatcagtggtttctgtccttgattctgtttatgtgat

SEQ ID NO: 8911 - DNA, 201 bp, Homo sapiens
agcaaacaagatctctccaaacaagattatgacacaaagctggagagttgatatatccctgaggtagtacagtaaaggtatgttgctggccttgcccactraaggcaaattgcttctggtgggccttatggacaggaatggagcaaaaggcatttgccaagtcagtggccacataccaggtatcaggagatgtgttaattt

SEQ ID NO: 8912 - DNA, 201 bp, Homo sapiens
ctatttttttgaaacatttgaggggcattagcattaattcttcttaaaacattgggtagaatttagtagtgtatccatgaggtcttagcttttctttaatrgaatagtttatattagtgatttaatcaccttactcattattagtttattcatatttctcttcttcatgatttagtcatggtaggttgcatgtgtctagga

SEQ ID NO: 8913 - DNA, 201 bp, Homo sapiens
gttgtgaaagtgggcatcgttgtcctattttaaatcttagaggaaaaggtttcgacttttccccattcagtataatgttagctgtgggtttgtcatatgtrgcatttattgtgttaaggtatgtttcttctatacacaatgtattgagagtttttatgatgaaacaatgttaaattttatcaagttttttcagtatctatt

SEQ ID NO: 8914 - DNA, 201 bp, Homo sapiens
tgctctgtaaaatggaccaatcagcactctgtgaaatggatcaatcaacaggatgtgggcggggccaaataagggaataaaagctggccacccgagccagyagcggcaacctgatcgggtccccttccacactgtggaagctttgtttttttgctcttcacaataaatcttgctgctgctcactctttgggtccgcactac

SEQ ID NO: 8915 - DNA, 201 bp, Homo sapiens
tggcctccatagtttctgatgagaaattggtagtttatcttattgaggctcgcttgtatgtgatgagtcaagactttctggaatgtagtagcatgatctcygctcactgcaacctctgcccctgaggttcaagtgattctcctgcctcagcctcctgagtagctgggactacaggcatgtgccaccacacttggctaattt

SEQ ID NO: 8916 - DNA, 201 bp, Homo sapiens
tgtatttcccgaatttgaatgttggcctgcctcactaggttggggaagttctcctggatagtatcctgaagagtgttttccaacttggttccattctcccygttactttcaggtacaccaatcagacttagatttggcttttcacatagtcccatatttcttggaggctttgttcatttcttttgactctttttttctcta

SEQ ID NO: 8917 - DNA, 201 bp, Homo sapiens
ttttttgtttttcatttcaacgttggtgaatttgacaattatgcgtcttggggttgctcttctcaaggaatatctttgtggcgttctctgtatttcccgartttgaatgttggcctgcctcactaggttggggaagttctcctggatagtatcctgaagagtgttttccaacttggttccattctccccgttactttcagg

SEQ ID NO: 8918 - DNA, 201 bp, Homo sapiens
aacttaaacaaatttacaagaaaaaatcaaacaaccccatcaaaaagtgggcgaagcatatgaacagacacttctcaaaaggagacatttatgcagccaamagacacatgaaaaaatgctcatcatcactggccgtcagagaaatgcaaatcaaaaccacaatgagataccatctcacaccacttagcatgttgatcatta

SEQ ID NO: 8919 - DNA, 201 bp, Homo sapiens
cagggatctagaactagaaataccatttgacccagccatcccattactgggtatatacccaaaggattataaaacaagctgctataaagacacatgcacaygtatgtttattgcggcactattcacaatagcaaagacttggaaccatcccaaatgtccaacaatgatagactggattaagaaaatgtggcacatatacac

SEQ ID NO: 8920 - DNA, 201 bp, Homo sapiens
gtaacccgacctttctggctgcccttaacatttttttgtttttcatttcaacgttggtgaatttgacaattatgcgtcttggggttgctcttctcaaggartatctttgtggcgttctctgtatttcccgaatttgaatgttggcctgcctcactaggttggggaagttctcctggatagtatcctgaagagtgttttcca

SEQ ID NO: 8921 - DNA, 201 bp, Homo sapiens
gggggagggatagcattaggacatatacctaatgtaaatgatgagttaatgggtgcagcacaccaacatggcgcatgtatacatatgtaacaaacttgcaygttgtgcacatgtaccttagaacttaaaatataatacaaatatgcatataaaaataataaaaataaataggttcagagaattcaaggaaaccataattaa

SEQ ID NO: 8922 - DNA, 201 bp, Homo sapiens
cacatctcaatactaacattgaatgtaaatgacctaaatgctgcacttaaaagatacagaatggcagaatagataagaatagatacagaactgcagaatasataagaaaaacctagtttctgctgtcttcaggagactcagcacataaagactcacataaacttaaggtaaaggtgtggaaaaagatgtcctgtgcaaatg

SEQ ID NO: 8923 - DNA, 201 bp, Homo sapiens
tagtctgatgggcttccctttgtgggtaacccgacctttctggctgcccttaacatttttttgtttttcatttcaacgttggtgaatttgacaattatgcrtcttggggttgctcttctcaaggaatatctttgtggcgttctctgtatttcccgaatttgaatgttggcctgcctcactaggttggggaagttctcctgg

SEQ ID NO: 8924 - DNA, 201 bp, Homo sapiens
aaagttatgttattaccacaaactatctagtgtgatttaaatttgcatatgagattgcattatatggaaaaaatagttaagaaataaggtagcataagtcygtgcctcagttttgttattacttgctatatggtcttggtcaaatcactaaatataactaagcctcaatataatgaggcttatatgattgttaattgttaa

SEQ ID NO: 8925 - DNA, 201 bp, Homo sapiens
agtggaataaaattggaaatcaactccaaaaggaaccctaaaaatcatgcaaatatatggaaattaaataacctgctccagaatgatcattgggtcaacartgaaatcaagatggaaatttaaaaattctttgaactgaacaataatagtgacacaacctatcaaaacctctgggatacagcaaaagcattgctaagagga

SEQ ID NO: 8926 - DNA, 201 bp, Homo sapiens
cttccaactatgtggtcaattttggaatacgtgtgatgtggtgctgagaagaatgtatattctgttgatttggggtggagagttctgtagatgtctattargtccacttgttgcagagctgagttcatttcctggatatccttgttaactttctgtctggtcgatctgtctaatgttgacagtggggtgttaaaatctcct

SEQ ID NO: 8927 - DNA, 201 bp, Homo sapiens
ggtcaacaatgaaatcaagatggaaatttaaaaattctttgaactgaacaataatagtgacacaacctatcaaaacctctgggatacagcaaaagcattgytaagaggaactgttcatagcattaaatgcctaaatcaaaaagtctgaaagagcacaaatagacaatctaagatcacacctcacggaactggagaaacaag

SEQ ID NO: 8928 - DNA, 201 bp, Homo sapiens
ttccgagcaccatttattaaatagggaatcctttccctattacttgttgttgtcaggtttgtcaaagatcagatggttttcaatgtgtgatattatttccragggctctattctgtccaactggtgtatctctctcttttggtacctgtaccatgctgttttggttactgtagccttgtagtatagtttgaagtcaggtag

SEQ ID NO: 8929 - DNA, 201 bp, Homo sapiens
attatagcactagatttctcattgtgggactataaacttctttttaaataaaatgatacaatgttttatatagagatgaaaactttatctaaaaatttgcwttttaattattcacattttttactgtcctgcaaaaaggctcattctctgacatttttatctatgacctttctagtcttcatttgttttcatattttttac

SEQ ID NO: 8930 - DNA, 201 bp, Homo sapiens
actttttgaatgtctccattaagacttcttaaagtgtggtctctgggctagcagcatgggcatcgcctgggaacttctaagaaatgcagtttcttaggccscaaccccagaactactgaatcagaagctctgggttcaggtccagaaatctgttttagtaagttgtctgagcgattctgttgctagctaaagttggagaac

SEQ ID NO: 8931 - DNA, 201 bp, Homo sapiens
tatccatgaggtcttagcttttctttaatagaatagtttatattagtgatttaatcaccttactcattattagtttattcatatttctcttcttcatgatwtagtcatggtaggttgcatgtgtctaggaattattcatttcttcacggttattgaaattggtgccatatagttattcatagtagtctctcatgatctttt

SEQ ID NO: 8932 - DNA, 201 bp, Homo sapiens
ggggcacgtttgtaagagggattggatacttatttctggggtcgggacatgtcctttcctgggttgtcctgggttctttcctcttagagaccctttactgycttccctctggatcattcccttttcgttaatatattctttctttataatgaagacaatgcaatttatttgattatatgttttaatagtccttgtctgttg

SEQ ID NO: 8933 - DNA, 201 bp, Homo sapiens
ctttcttctttgctcctagctatctcctggtgtctaagatatgctgacctcaccagagatcctttctacttggacattgtgctccactgtgttgctacagwttcattaatgtgcccatgacacctctctgggctattgtagtttgtgaaaggtgtctatatttgtttcatagcaggagggatgaaggttgctatctcctct

SEQ ID NO: 8934 - DNA, 201 bp, Homo sapiens
atctcctctgacatcttggtgctttcctaccttatttattttttaaaccactttactaaggttgatttttttgtgtatagtgtaagagtttaatttcattyttttccatgtggatactctgtttccccaatgctattgaggagactatgctttcccttttgtgtattcttaccacccttgcagaagataagttcacaatat

SEQ ID NO: 8935 - DNA, 201 bp, Homo sapiens
accctaataccaaaaccagggaaggacataacaaaaaaagaaaactacagaccaatatccctgatgaacatagatgaaaaaatcctcaacaaaatactacyaaaccaaatccaagagcatatcaaaaagataatccaccatgatctagtgggtttcataacaggtatgcagggatggtttaacatatgcaagtcagtaaat

SEQ ID NO: 8936 - DNA, 201 bp, Homo sapiens
taaatgcccacaagagaaaggaggaaagatctaaaattgacactctaacatcacaattaaaagaactagagaagcaagagcaaacacattcaaaagctagyagaaggccaaaaataactaagatcagagcagaactgaaggagatagagacagaaaaaacccttcaaaaaatcaatgaatccaggagctgttttatttgaa

SEQ ID NO: 8937 - DNA, 201 bp, Homo sapiens
tagtgtgtcaattttctttatcttttcaaaaaccgaactcacattttcatcaattttttctatatttttttcctattttatttatttctgttctaattttrtttttttttctgtgaactttggctttagtttcttatttttctttttccttgaagtgtaaagttaggttgttcatttgaaatattttttatagtgattatc

SEQ ID NO: 8938 - DNA, 201 bp, Homo sapiens
catgaggacaaagccctcattacctaattatgtcttaaagagcctaactctcaacattgttgcaccagggattaagtttctagtatatgaactttaggagrcacgtttaaatcaaagcacacactgatttgtattctgtgactgctgaatttatatgttaactctaatgtttttgtgtggaacctttgaaattatatgtat

SEQ ID NO: 8939 - DNA, 201 bp, Homo sapiens
cagaagaagcacttgacagaatccagcatcgctttatgattaaaaccctcggcaaaatcggcataaaaggaacataacataaggtaataaaagctatctaygacaaaccaacagccaacattacactgaacgggttttgaaagcattccccctgaaaactggaacaagacaaggatgcctactctcaccacttctattcaa

SEQ ID NO: 8940 - DNA, 201 bp, Homo sapiens
tccatttttctttcattactgatttctagtttcataccattgtgactggaaaataatcttgtaatggttttaattttcttaaatgtttaagacttgttttrtgatatagcatgtgatttatcctgtaaatatctcagtgtgtaggagaattgtgtgtattccgctgcttttggatggaatgttctttaaatggctgttagg

SEQ ID NO: 8941 - DNA, 201 bp, Homo sapiens
acatgtatcatgttagtattcaatcaatattttattgcattgacctaaacttaaattttttttttttttgagacagagtcttgctctgtcgcccaggctgkagtgcagtggcatgatctcggctcactgcaagctccgcctcccgggttcacgccattctcctgcctcagcctcccgagtagctgggactacaggcgcatg

SEQ ID NO: 8942 - DNA, 201 bp, Homo sapiens
gacaaagaacccaaaagcaaatgcaacaaaaacaaagataaatagatgggacttaattaaattaaaaagcttctgcacagcaaaagaaattatcagcagarttaacagacaaccctcagagtggcagaaaatcttcacaatctatatatccgacaaaagactaatatccagaatctacaaagaactcaaatcagcaagaaa

SEQ ID NO: 8943 - DNA, 201 bp, Homo sapiens
ttccaacatgtatcatgttagtattcaatcaatattttattgcattgacctaaacttaaattttttttttttttgagacagagtcttgctctgtcgcccakgctggagtgcagtggcatgatctcggctcactgcaagctccgcctcccgggttcacgccattctcctgcctcagcctcccgagtagctgggactacaggc

SEQ ID NO: 8944 - DNA, 201 bp, Homo sapiens
gcaacaaaaacaaagataaatagatgggacttaattaaattaaaaagcttctgcacagcaaaagaaattatcagcagagttaacagacaaccctcagagtrgcagaaaatcttcacaatctatatatccgacaaaagactaatatccagaatctacaaagaactcaaatcagcaagaaaaaaaaaatcccatcaaaaagtg

SEQ ID NO: 8945 - DNA, 201 bp, Homo sapiens
ggtacagtgtacactgctcaggtgatgggtgccccaaaatctcacaaatcaccactaaagaacttaatcatgaaaccaaacaccacctgttccccaaaaamctattgaaataaaaaaataaatttttttaaaaaatttaaaaaataaaataacactggacggtaactcaaatccaccggaacaaatgcaaaaaaatatata

SEQ ID NO: 8946 - DNA, 201 bp, Homo sapiens
agaatttcatatccagccaaactaagcttcataagtgaaggagaaataaaatcctttacagacaagcaaatgctgagagattttgtcaccaccaggcctgycttacaagagctactgaaggaagcactaaacatggaaaggaacaactggtaccagccactggaaaaacatgccaaattgtaaagaccatcgatgctagga

SEQ ID NO: 8947 - DNA, 201 bp, Homo sapiens
gagggaggaaacatgaatgttactagattgtaaattactttagcacatagattctcttcctaaatgcttaaccttatctcccctaaaatgctcttcttgtygcctctctgcttatctaagaatctttgcatactcacttgaaatgaaccattccttcttatgtgtgctagttggagtaataatcggagaggctatatgact

SEQ ID NO: 8948 - DNA, 201 bp, Homo sapiens
tgaagatgtttagaatctatacagtgtgctcaggaagaggccaaaaattcattttgtttgcatcctagactaaggacaataatgggaaatatgagatgaartaggttgtttcagcttgataggttttatagaattgcacttaatagctttaggttaattattatatattatataataatataatatattacatattatatt

SEQ ID NO: 8949 - DNA, 201 bp, Homo sapiens
ctgagattctttcctcaacttggtctattctgctgttaatacttctgattgtattatgaaattcttgtagtgagcttttcagctcaggaagttcagtttgkttcttcttaaaaagggaattttgttgttcagctctttgttttagtggattgcttggctttcttggattgattttcaactttctctgtgatctcaatgagc

SEQ ID NO: 8950 - DNA, 201 bp, Homo sapiens
aattaggaaagttgctttgtatttgcaaaagcagaattgctagcttatgaacatgataacaagatgaatataactgataatgatttcatcggttacccatkccctctcatatcgttatgttatcaggcaaattgacaatgtttcagccactttagttttgttataaagttcaaaaattatactactgcatttttagtggtg

SEQ ID NO: 8951 - DNA, 201 bp, Homo sapiens
attctatggtatctgggtcattataggtttccaactttagttatatagtctgctataaacaactttctctcacaaaatattaggttcaccagttgacccawgtcacccattctaattgtccctgttcaatatgaactctcctttcataactttcatgtatttttcctgttatatgacctagtcagtaattttcaaatctag

SEQ ID NO: 8952 - DNA, 201 bp, Homo sapiens
tcttgctctgtcgcccaggctggagtgcagtggcatgatcttggctcactgcaacctccaccttctgggttctcctgccttagcctcctgagagtttgaamcttttaaaaaatgtaaatcatttttctttgatttattctgtgctctaaaataaatatccatggcactttctatccataaaggttctaagtaaaaaatcaa

SEQ ID NO: 8953 - DNA, 201 bp, Homo sapiens
gtgactggcaccttctctctagctgcctctaaggatttttcttttgcaatccctttgatgaatctgatgattaattgccataggaatgattatcttatatygtatctggctgaagttctctgtatttcttggatttgcatgttgacctctctagcaagagtaggaaaatatttgtggactatatcctcaaatatattttac

SEQ ID NO: 8954 - DNA, 201 bp, Homo sapiens
ttcgtcctccccaagtacaaagtctacaaactcaagaagatatgaaagtcacattttcatattccacaaaatatctaattatttttctacattattgatayatacttgatttatagttacaaatcttagaaatgacatgaagtctttatgaacaaatcaaagtactttgccccacataactctctgtgactgtggagacca

SEQ ID NO: 8955 - DNA, 201 bp, Homo sapiens
tgcaaggcactgtgctgggtattatgggatataaagggcttcaaatatatggtcattgccctcaatgcattaacagtctagtagggccgactagacatgtwcaaaaataagtgaagtataatgcagacgttgcattctataaaacattaccaagaagctacatcaaagaagaggaaaagctatttctgactggattaagaa

SEQ ID NO: 8956 - DNA, 201 bp, Homo sapiens
aaatggttctcagtgtgttgtgttcttatctatgtcaatgagcactggggtggcaaataaaattaaattttaataggttgtgggcattaattataacttawaggatataggatatgaattttcaacaaaattattgagccattgggccaaggaataagtggtgttgatcactaaaattcagggaactcataacttttaact

SEQ ID NO: 8957 - DNA, 201 bp, Homo sapiens
ttcataagacttacgtgtaaattttaacaaataagcatgaagcaaaactaggataaccaccacttaggtcaagaaatagagttctactctcacataaaatyttcagtgtatctctcacaatttcctccatcctcacagtggcaatagttatattgattttaagataacagttttcttgtttcctcttattttggtcaaaac

SEQ ID NO: 8958 - DNA, 201 bp, Homo sapiens
tcatatcgttatgttatcaggcaaattgacaatgtttcagccactttagttttgttataaagttcaaaaattatactactgcatttttagtggtgaaacartgacacacttctccttaatttttcgtgttatacccatagaggcagagagcttaacagagacataaggggaagaaacagataaagagagccctgttaaaac

SEQ ID NO: 8959 - DNA, 201 bp, Homo sapiens
atatcatagtgttacattggtgaaattcttcatgaatatccttctataattagttaaacacacacgtatacacatgtatggtaatgtttaccttataaagwattttgaaatctgtttaattctatagagactgataaagaactcttaaaagatgctattggaagagatataataaagggaccaatcagtgcacaattaaag

SEQ ID NO: 8960 - DNA, 201 bp, Homo sapiens
gaacatgaggtggttaacttttgatataagttgttttaatattgaacatttagttgctgctgataaatgtgataggctctttgtacattggtaaatctcaraaaatagaaacactggcttacaaaaagcattttaaagagagtttctggtctctatgaagacatggtaaggcagtttcagttactttccatgggtgtttgg

SEQ ID NO: 8961 - DNA, 201 bp, Homo sapiens
gttacaggtaatttcataagacttacgtgtaaattttaacaaataagcatgaagcaaaactaggataaccaccacttaggtcaagaaatagagttctactytcacataaaatcttcagtgtatctctcacaatttcctccatcctcacagtggcaatagttatattgattttaagataacagttttcttgtttcctcttat

SEQ ID NO: 8962 - DNA, 201 bp, Homo sapiens
ttatgttatcaggcaaattgacaatgtttcagccactttagttttgttataaagttcaaaaattatactactgcatttttagtggtgaaacagtgacacayttctccttaatttttcgtgttatacccatagaggcagagagcttaacagagacataaggggaagaaacagataaagagagccctgttaaaacaactctca

SEQ ID NO: 8963 - DNA, 201 bp, Homo sapiens
atctctacaaaaaatacaaaaattagccaggcatggtggtgcacacctgtagtcccagctacttggagaggccaaggcgggggaccacttgagcccaggargttgaaactgcagtcagccatgttcacacctctgcactccagcctgagtgacagaacaagatcctgtctctaaaaaaaaaaaggaaaagaaaagaaaaag

SEQ ID NO: 8964 - DNA, 201 bp, Homo sapiens
tcaagtgatccacccacctcggactcccaaagtgctgggattacaggcgtgagccaccatgcccagctggtgctcttatattcatactcagattatggtaragcatggaatgctactatagttttccatgcaatcatggtgacgtatagcctttgaaaatcctacagagccagtagtttatcaccctgaagaacatgaggt

SEQ ID NO: 8965 - DNA, 201 bp, Homo sapiens
actcctgtcctcaagtgatccacccacctcggactcccaaagtgctgggattacaggcgtgagccaccatgcccagctggtgctcttatattcatactcarattatggtagagcatggaatgctactatagttttccatgcaatcatggtgacgtatagcctttgaaaatcctacagagccagtagtttatcaccctgaag

SEQ ID NO: 8966 - DNA, 201 bp, Homo sapiens
ggtgtgtctgtgagagtgttgccaaaagagattaacatttgagtcagtggctgggaaaggcagacacatccttaatctgggtgggcaccatctaatcagcygccagcatggctagaatataaagcagacagaaaaacgtgaaaagactagactggcctagcctcccagcctacatctttctcctgtgctggatgcttcctg

SEQ ID NO: 8967 - DNA, 201 bp, Homo sapiens
gaaaaatcaataggaagctttagcttcaggtattatccaccattacacttgagagatgtgcagttcaatgtctatgctcaattcttatcttgggtatctaygggttttggaaaagtaatactggtaaaactaaattaattaaaaataccaaagtaaataccttttttcccccttcttacttcctagaaagtagcacgtctg

SEQ ID NO: 8968 - DNA, 201 bp, Homo sapiens
aatggttttaattttcttaaatgtttaagacttgttttgtgatatagcatgtgatttatcctgtaaatatctcagtgtgtaggagaattgtgtgtattccrctgcttttggatggaatgttctttaaatggctgttaggtccatttggtctacagtgttgttcagatctgttgtttattgattttctgtttggatgatcta

SEQ ID NO: 8969 - DNA, 201 bp, Homo sapiens
tacctattattacttttcttatgtatttatgtgctctgacgttggacacaggtatatttatcattgttatatacatatatatatttttgagatggagtctygctctgtcgcccattttaatggtgaattgacccttttatttttgtgtggtgaccttttttttgtctcttgacatcttagttatctaagtacagccacttc

SEQ ID NO: 8970 - DNA, 201 bp, Homo sapiens
agctgtgccctatcttcctctctttctgctttactttgtgatttgattactttttataatgatatactttatttccttttcatcttttttgtgtctgatayaggtttttctttacgattaccatgaggtttgattaccataaagttaaaattacagttacgattaccataaagttaaaatggtctattttaaattgttatc

SEQ ID NO: 8971 - DNA, 201 bp, Homo sapiens
ctttcctaaagagctattaaaattaacattttcatcagcaatctttagggaaaattctcttctgtgtgtaagtatctgcaatatggattgctgggttttgktttttttttttcatttatacccatccgaaagttactaaattatatctcactcttattttaatttttattttcatatttgttagtgttttactactccata

SEQ ID NO: 8972 - DNA, 201 bp, Homo sapiens
ctgcctcccaggttcaagtgattctcctgcctcagcctccccaggagctgggattacaggcgtccaccaccatgcccggctaatttttatatttttagtaragacggggtttcgccatgttggccaggctggtctcaaactcctgtcctcaagtgatccacccacctcggactcccaaagtgctgggattacaggcgtgag

SEQ ID NO: 8973 - DNA, 201 bp, Homo sapiens
ggcttgcttctggaaaagcaaatgaatgtaagcaaagaaagtgaaatccatgttctttcccagtgagctagaagaaaaaatggttagaaattatatatgayaaaagaggaaagtttaaaataataagcaaaatcctgggcttcagtggatacaaaataaagttgacaagataggctaggactcaaaaggagggttttgttg

SEQ ID NO: 8974 - DNA, 201 bp, Homo sapiens
ttaatttttattttcatatttgttagtgttttactactccatatctaccctaaaacttaaaaaagcataaaacagtaaccacttaggtaactgatgattgycttggctgggctaacttatgcatttctggtcaaattatcaattcacccatatgtatggcggttggctggctgttgtttgagacaatggtgtagagtgggc

SEQ ID NO: 8975 - DNA, 201 bp, Homo sapiens
attatcttcaacagtaatgggaacttatgtatcatgtagaaataggaaggaataaagcaaaagcatggtgcttttttttttttttttttttttttcttcaratggagtctcgcttttaattgcccaggctggagggcagtggcatgatctcggctcactgcaacctctgcctcccaggttcaagtgattctcctgcctcag

SEQ ID NO: 8976 - DNA, 201 bp, Homo sapiens
atagttatccttaatacttttgcttttaacttttatactagagttaaaatgattcatgtaccactattacagtattacattattttctgattatcaatatrtttacttgctagtgatatttatactttcatatactttggtgttactgttgagcatcctttcatttcaactttaagaattccctttatcggacgtgaagga

SEQ ID NO: 8977 - DNA, 201 bp, Homo sapiens
ataatttaataacactgttctcatttttttagggcattcgaaagttgttaccttaagccaaaaaactattgaatttactctgcctactgtgaccaatacarttggaaaacctacctataaaggtaaaagaatcactacaatacagacatatgaaataaaactttatgctatattctcatcgtctctatttaccaacctcaa

SEQ ID NO: 8978 - DNA, 201 bp, Homo sapiens
caattttggcatcagtgccaaagaccacgatattgtgatatataatcattttcagaggcagcttctatgatatgacttcttttgattcagagatttttttygaaatgtcacttgtctctgacaacacacacacacacacacacacacacacacacacagagacatgcaatgtaacagtggtgagacagggacagaccacag

SEQ ID NO: 8979 - DNA, 201 bp, Homo sapiens
acatttgagaatgtataagaaaaagtattaataattatcttcaacagtaatgggaacttatgtatcatgtagaaataggaaggaataaagcaaaagcatgktgcttttttttttttttttttttttttcttcagatggagtctcgcttttaattgcccaggctggagggcagtggcatgatctcggctcactgcaacctct

SEQ ID NO: 8980 - DNA, 201 bp, Homo sapiens
ccgcatcccattaagtttttgtatgttacgtttttattttcttttgtctgtagatatatttaaatttccctttttaatttccttcttgacacagtagttcytcaggagcatattgtttaatgtttcaaagatttattaagtttctttttattctcctgttactgatatctagttgatatttgatgtaattttgatcttaca

SEQ ID NO: 8981 - DNA, 201 bp, Homo sapiens
gggagaaaccagagcagaagagctgaaaattctaaaaatcagactgcctcttctcctccaaaggaatgcagatcctcgcaagcagcagaacaaagctggayggagaatgactttgacgagttgagagaagaaggcttcagacgatcagtaataacaaatttctccgagtcaaaggaggatattcaaacccatcacaagaag

SEQ ID NO: 8982 - DNA, 201 bp, Homo sapiens
ggagaaattggccacaacaaagaggctacatgccccaatcaagttcaaaatccaatagggcagtcattaaattttaaagttccaaaatgatcttctttgasttcatgtctcacatccagggcacactggtgcaagaggtggacttccgtggccttaggcagctccacccttgtggctttgtggggtacagccccattccca

SEQ ID NO: 8983 - DNA, 201 bp, Homo sapiens
aaagatttattaagtttctttttattctcctgttactgatatctagttgatatttgatgtaattttgatcttacattgttaagacctcttttgtggcctawcatatgatctgttctggagaatgttctttgtgcacttgagaagaatgtgtatcctgttactgttggatagaacattgtgtaattgtctgataaatatgct

SEQ ID NO: 8984 - DNA, 201 bp, Homo sapiens
cctcaggtgatctgcctgcctcggcctcccaaagtgctgggattacaggtgtgagccaccttgcccggctggcctaaccttttggttacatacttctgtaracatatttgaacatgtattctcagtatacttattttaaaattgataaattacaaaaagtacctccacagtttattatatatagtattagcattataaaca

SEQ ID NO: 8985 - DNA, 201 bp, Homo sapiens
ttccccaacttaattttaatagcctagagaacctctgctcgagactgctcaattccctgcaccctgtatctaatgacaaaattacatctttatatattgcrtacccaataatggtgcaaaattatttcttattaatttgtcttttaaataatgcaggaagtaaaaagtgatgttacaaataaatgatacaataatattggc

SEQ ID NO: 8986 - DNA, 201 bp, Homo sapiens
tgattttttacaagagtgctaagactaatcggtatggaaaaaatagtctttacaacatatgatgctgagaaaactagatatccacatgcaaaataatgacrttgtgccctttatcttacacatacaaaaattaactcaaagtagaccgaaaacctaaaactaagagctgtactttaaaactcttagaagaaaacataggag

SEQ ID NO: 8987 - DNA, 201 bp, Homo sapiens
tattaataatccagaatatatagagacctcctacaactcaaccacaacaacagaactcaattttaaaatgggcataggccagcctcctagagaaacactartctgatctgatcaccctaccctctggactgaacacgcacagcaccctgcctccctggattgggaaagccctctacagcctgagttgctgaggtgccccac

SEQ ID NO: 8988 - DNA, 201 bp, Homo sapiens
ttcactgtgttggccaggatggtcttgatctcctgacctcgtgatctgcctgcctcggcctcccaaagtgctgggattacaggcatgagccaccgcgcccrgcctttggatttgtttttacttttgccctttaccttctgtatatgtcaactcattattatcttgaataccaaactatgacttaaatatatactgattttg

SEQ ID NO: 8989 - DNA, 201 bp, Homo sapiens
cagcctcctagagaaacactaatctgatctgatcaccctaccctctggactgaacacgcacagcaccctgcctccctggattgggaaagccctctacagcytgagttgctgaggtgccccacctccctaggagtgaagccaacattgcactgctgcacaccccccagggccaaagccacagatgtgcccccatcattcctg

SEQ ID NO: 8990 - DNA, 201 bp, Homo sapiens
atggagacagtagtatatgttgtgagaaatttgtcttttatattattatttacttcatttgtatatgttatttaaaaattcatgcctctgtttttgggttkttttttttttttttttgagatggagtcttgctctgtcgccaggctagagtgctatggtgcgatcttggctcactgcaacctccaactccctggttcaagg

SEQ ID NO: 8991 - DNA, 201 bp, Homo sapiens
ttatatttagaaaaatttaaaaaggatatatctcaaaatgttaatagtaatttttctttatgaggtgagattatttatgaattttctttttatttatataktcttttatataagtaagttaattgtatgactaaataaaaattataaaaagtgacatttttaaggagacttttattccagaagaaataaattgttttccac

SEQ ID NO: 8992 - DNA, 201 bp, Homo sapiens
tgccacacatgtagaaccatctgatttttgacgaacctgacaaaaacaagcaatggggaaaggattccctatttaataaatggtgttgggaaaactggctwgtcatatgcagaaaactgaaactggacccctcccttacaccttatataaaaattaactaaagatggattaaagacttaaacgtaagacctaaaaccataa

SEQ ID NO: 8993 - DNA, 201 bp, Homo sapiens
ttaagcccaggagactagaggttgcaaaaaaaccccgcagatatatatatatatagctaatatatatattagctatgtataattatatattatatatattrtaatatgtattagctatatatatgcagggttttttatatataaatatataacatatttatatataaaaaaatatctttgtgtaatttccctctaaccttt

SEQ ID NO: 8994 - DNA, 201 bp, Homo sapiens
ctagagcttctgcacagcaaaagaaactatcatcatagtgaacaggcaacctacagaatgggagaaaatttttgcaatctatccatctgacaaagggctamcatccagaatctaccaagaacttaaacaaatttacaagaaaaaaaaatcccatcaaaaagtaggcaaaggagatgaacagacacttctcaaaataagatg

SEQ ID NO: 8995 - DNA, 201 bp, Homo sapiens
atcatggttcatgcctgtaatcccagcactttagggggccaaggccggtggatcactttgagcccaagaatttgcgaacagcctgggcaacatagtgaaamcctgtctctattaaaaatacaaaaactgactgggtgtggtggtgtgggcctgtagtctcagctacttgggaggctgaggtggggggataacttaagccca

SEQ ID NO: 8996 - DNA, 201 bp, Homo sapiens
cctataactagactaaagtcccagcagtcccctagaagtgaggttcaaagtgtaacccacatggaagtgcactatactccaagaaaactgagttttctaayttatatgagcagaaatttgaagaacttggagtccaatatgcaagggcaggaagcatccagcacaggaaaaagatgccctccttttgagagacacctcttg

SEQ ID NO: 8997 - DNA, 201 bp, Homo sapiens
cagaaatgtctttccttatcagtaattattttaaatgcaaattgataaaactcttcacacaaaaggcagaaatttgcagaatgaattttttttaaaaaatkatcaactacatgctgcttacaaaagatgcactttagatgaacaaaaatgacaaaactttagctagattgactagagaaaaataataaagttgctaaaaat

SEQ ID NO: 8998 - DNA, 201 bp, Homo sapiens
cacttactccggatatgggtttgcctatcttgcatgcaatgcttctgccaagactaccatccgtggactcacagaatgccttatacaccatcatggcattrtctctgaccaaggcactcaatttacggctaaagaagtgcggcagtagcgtgttctcactcatagatgggagttgaacaatgagaacacatggacaccggg

SEQ ID NO: 8999 - DNA, 201 bp, Homo sapiens
atttttagtctatctaaaggtttgtcaagtttgtttatcttttcaaaatacagctttttgttttgttcatcttttatattttttaatctcttttttgtttrtttctgctctgattttattagtttgttccttctacttattttcggattgttcttttttttttagttctttgaggagtaatgttaggttgtttatttgagt

SEQ ID NO: 9000 - DNA, 201 bp, Homo sapiens
tgatagttttatgggtttatcttgtatgtgatgtcatttttttctttccattttcaaaattttctttgagttttgacaatttaatgtgtctcagtgtaaayttcttaagattcaacctatttaggatcctttgtgtttcgtgtatctggaagtccattttcctcctcagatttgaaaaaactgtattcattatttctttaa

SEQ ID NO: 9001 - DNA, 201 bp, Homo sapiens
gacattgggcaggttcgcagtcttcctgtgccctgctgaaatggttctaactgcagcaataagttaaggaataataaggaaataagccttccatgaggccktggataagtcagtggggttgcacatagataatatatctatattcataagaccttcattagttggggccataccaatgagagtttatgttggcccataggg

SEQ ID NO: 9002 - DNA, 201 bp, Homo sapiens
gtggaacttgtatatgaaaagtgggtcctctgtatatgttgggttttgcatcccacaaatactgtatttgtaatctatatttggttggaaaaaaagccacrtatgagtggacccacacagttcaaactcatgttgttcaagtatcaactgtatttcctcccaaacatgaaaaaaatgtgttagtgagattcgttaattgta

SEQ ID NO: 9003 - DNA, 201 bp, Homo sapiens
acccaaaaccagacagcattatctatttgcctgtcatcttggcgtcaagggttgtcaagatcacagtcatcttgacaccactattcaaaatgcttaaaaartgtacttctttcccatctcccaattcattacttttcttagcagaggtccttgggtaatggggacataaggacctgatctactccatatttttgttcactt

SEQ ID NO: 9004 - DNA, 201 bp, Homo sapiens
ctgatttcttttagcagtgctttgtaattctcactgtagagatctttcaccctgctggtgagtactgctgcagcagcaatggcagaggggcttgttgccarttgccaatgggaattccaccccagagaaacacagagctgccacagacggaagtgatcaggcagaagtagggtggctgcattgagggccaaggtcggaagg

SEQ ID NO: 9005 - DNA, 201 bp, Homo sapiens
agaacttggagccaccaaaacagatagtcttttcagtacatattaaaattatgcacattgctggaatcttttcaattaaaattaggagaagtttgttcttyggttcatgagtctgtatacagtcattccttggtatacatagggattagttccaggaccaccccttcatacacatatgccaaaatctgcacatagtcaagt

SEQ ID NO: 9006 - DNA, 201 bp, Homo sapiens
agactatggcagtggcaaaagctgtgggcctattgtgttacctctggaatctctgcctcagagaaatgcagagctgcagccagcccaagtgatcaggttgsggggtggggtgaggtgggttgctgtgctggggacctaggccgattggctttgcttggcaaggtgccccagaggtgaggcctccagtctgtccacatttca

SEQ ID NO: 9007 - DNA, 201 bp, Homo sapiens
acagcaaaagaaactatcatcatagtgaacaggcaacctacagaatgggagaaaatttttgcaatctatccatctgacaaagggctaacatccagaatctmccaagaacttaaacaaatttacaagaaaaaaaaatcccatcaaaaagtaggcaaaggagatgaacagacacttctcaaaataagatgtttatgcagccaa

SEQ ID NO: 9008 - DNA, 201 bp, Homo sapiens
catccaccattgctgaggcttgagtaggtaaacaaagcacctgggaagctagaaatgggtggagcccaccacagctcaaggaggcttgcctgcctctgtaractccacctctgggggcagggtagagctgaacaaaaggcagcagaaacttctgcagacttaaacgtccctgtctgacagctttgaagagagtagtgtttc

SEQ ID NO: 9009 - DNA, 201 bp, Homo sapiens
attggaaagatgtagccttttcactcaataaaagcttttaaaagtttatcctaaagaagaaaaaagtgtacagagattttgtacaagtatgtacaatgtcrtatgttttaatagcaaaaattttgaaatgatctaaatgtccattgttaaggagtttgctaagacaattatagtatattattaaatgtacttctattacct

SEQ ID NO: 9010 - DNA, 201 bp, Homo sapiens
ctatcatcatagtgaacaggcaacctacagaatgggagaaaatttttgcaatctatccatctgacaaagggctaacatccagaatctaccaagaacttaamcaaatttacaagaaaaaaaaatcccatcaaaaagtaggcaaaggagatgaacagacacttctcaaaataagatgtttatgcagccaacaaacatatgaaa

SEQ ID NO: 9011 - DNA, 201 bp, Homo sapiens
tagtagattaaaaacatctcttcttgcaacttacagaatggctttacttactgaaactcttttgttcaaagataaagttttaatcctttattaaaactcartctcaaactaagaacttggagccaccaaaacagatagtcttttcagtacatattaaaattatgcacattgctggaatcttttcaattaaaattaggagaa

SEQ ID NO: 9012 - DNA, 201 bp, Homo sapiens
atagtgaacaggcaacctacagaatgggagaaaatttttgcaatctatccatctgacaaagggctaacatccagaatctaccaagaacttaaacaaatttmcaagaaaaaaaaatcccatcaaaaagtaggcaaaggagatgaacagacacttctcaaaataagatgtttatgcagccaacaaacatatgaaaaaaagatc

SEQ ID NO: 9013 - DNA, 201 bp, Homo sapiens
cgtgacagatggtacctggaaaattgggacactcccaccctaatactgcgcttttccaatggtcttagcaaacagcacaccaggagattatatcccgtgckggcttggagggtcccacacccacaaagcctcactcactgctagcacggcagtctgagattgaactgcaaggcagcagtgagactgggggaggggcatcca

SEQ ID NO: 9014 - DNA, 201 bp, Homo sapiens
aaaatttttgcaatctatccatctgacaaagggctaacatccagaatctaccaagaacttaaacaaatttacaagaaaaaaaaatcccatcaaaaagtagrcaaaggagatgaacagacacttctcaaaataagatgtttatgcagccaacaaacatatgaaaaaaagatcatcatcactggtcattagagaaatgcaaat

SEQ ID NO: 9015 - DNA, 201 bp, Homo sapiens
gccgtgacagatggtacctggaaaattgggacactcccaccctaatactgcgcttttccaatggtcttagcaaacagcacaccaggagattatatcccgtrctggcttggagggtcccacacccacaaagcctcactcactgctagcacggcagtctgagattgaactgcaaggcagcagtgagactgggggaggggcatc

SEQ ID NO: 9016 - DNA, 201 bp, Homo sapiens
catctgacaaagggctaacatccagaatctaccaagaacttaaacaaatttacaagaaaaaaaaatcccatcaaaaagtaggcaaaggagatgaacagacwcttctcaaaataagatgtttatgcagccaacaaacatatgaaaaaaagatcatcatcactggtcattagagaaatgcaaatcaaaaccacaatgagataa

SEQ ID NO: 9017 - DNA, 201 bp, Homo sapiens
agccatcccattactgggtatatatccaaaggactataaatcatgctgctataaagacacatgcacacgtatgtttattgtggcactattcacaatagcaragacttggaaccaacccacatgtccaacaacgatagactggattaagaaaatgttgcacatatacaccatggaatactatgcagtcataaaaaatgatga

SEQ ID NO: 9018 - DNA, 201 bp, Homo sapiens
caaatacctaatgtagatgatgggttgatgggtgcagcaaaccacatgtatacctatgtaacaaacctgcacgttctgcacatgtaccccagaacttaagrtataataataaaaaaaaaacccacagctaacatcataatcaacagagaacaccttaaaacttctccactaagatcagctacaaggcagggatgtccactc

SEQ ID NO: 9019 - DNA, 201 bp, Homo sapiens
ttaagaagtcaggaaacaacaggtgctagagaggatgtggagaaataggaacacttttacactgttggtgggactgtaaactagttcaaccattgtggaargcagtgtggcgattcctcagggatctagaactagaaataccatttgacccagccatcccattactgggtatatatccaaaggactataaatcatgctgct

SEQ ID NO: 9020 - DNA, 201 bp, Homo sapiens
taaagtatacatttctctattattgtttaacagtaatacttttctgttttcttattcttttatattaacaaaaacttaaaatatagtgaagtgtgcagatrttaactgcatgatttcagaaattttaaaattttatatttctttcagtagccagcagccctctcaatgtatggctcatgtccattaacacagaaaatctgt

SEQ ID NO: 9021 - DNA, 201 bp, Homo sapiens
ttacataggtaaatgtgtgttatggtggtttgctgaacctatcaacccatcacccaggtattaagcctggcatgcattagctctttttcctaatgctgtascgcacaccccacggccctctgacagaccccagtgtgtgttgttcccctccctgtgtccatgtgttctcattggtcagctcccactcccaagtgggaatat

SEQ ID NO: 9022 - DNA, 201 bp, Homo sapiens
tgggatctaattaaactaaagagcttctgcacagcaaaagaaactaccatcagagtgaacaggcaacctacaaaatgggagaaaattttcgcaacctactyatctgacaaagggctaatatccagaatctacaaagaactccaacaaatttacaagaaaaaaacaaacaaccccatcaaaaagtgggccaaggacatgagc

SEQ ID NO: 9023 - DNA, 201 bp, Homo sapiens
tcctaatgctgtaccgcacaccccacggccctctgacagaccccagtgtgtgttgttcccctccctgtgtccatgtgttctcattggtcagctcccactcmcaagtgggaatatgcggtgtttggttttctgttcctgcgttagtttggtaaggataatggcttccagcttcatccatgtccctacaaaggacatgatctc

SEQ ID NO: 9024 - DNA, 201 bp, Homo sapiens
caaaaattaattcaagatggattaaagacttaaatgttagacctaaaaccataaaaaccctagaagaaaacctaggcattaccattcaggacataggcatkggcacggacttcatgtataaaacaccaaaagcaatggcaacaaaagccaaaattgacaaatgggatctaattaaactaaagagcttctgcacagcaaaag

SEQ ID NO: 9025 - DNA, 201 bp, Homo sapiens
caggcagcattgtatggaagaaagcactggttaaggagtaacaaacatctatttctgtataagttttatagttaactgtatatctgattttgttcaaatcrctaaacttctctaggcttatatgattgctaagaatgcttccaattctaaggctttgtaattctgcagtccagggcttttttttttttactaattcatctt

SEQ ID NO: 9026 - DNA, 201 bp, Homo sapiens
gggaaaactggatttctatatgcaaaaaatataattgaacttttatcttacaccatacacaaaaatcaactcaaaatggataggagacctacatgtaagamctgaaactataaaactcctagaagagaacataggagaaaagatctttgatgctgactttggcagggatttttttgtatattataccaaaagctcaggcta

SEQ ID NO: 9027 - DNA, 201 bp, Homo sapiens
atacaccaatgacagacagagaggcaaatcatgagtgaactgccattcacaattgcttcaaagagaataaaatacctaggaatccaacttacaagggacgkgaaggacctcttcaaggagagctacaaaccactgctcaatgaaataaaagaggatacaaacaaatggaagaacattccatgctcatgggtaggaagaatc

SEQ ID NO: 9028 - DNA, 201 bp, Homo sapiens
tgttgttcccctccctgtgtccatgtgttctcattggtcagctcccactcccaagtgggaatatgcggtgtttggttttctgttcctgcgttagtttggtraggataatggcttccagcttcatccatgtccctacaaaggacatgatctcatttctttttataagccaaagttcttttttttgagacgaagtctcgctct

SEQ ID NO: 9029 - DNA, 201 bp, Homo sapiens
aataacaggctctgaaattgtggcaataatcaatagcttaccaaccaaaaagagtccaggaccagatggattcacagccgaattctaccagaggtacaagraggaattggtgccattccttctgaaactattccaatcaatagaaaaagagggaatcctccctaactcattttatgaggccagcatcatcctgatatcaaa

SEQ ID NO: 9030 - DNA, 201 bp, Homo sapiens
tttattaagtttctttttattctcctgttactgatatctagttgatatttgatgtaattttgatcttacattgttaagacctcttttgtggcctaacataygatctgttctggagaatgttctttgtgcacttgagaagaatgtgtatcctgttactgttggatagaacattgtgtaattgtctgataaatatgctttatc

SEQ ID NO: 9031 - DNA, 201 bp, Homo sapiens
actctttccccatggtggggagccttccctggctctgtgccaatcccaggcaggttgctgtcctgtctcactcctctctgctctccatgggtcaccactayttccttgatgaatcccaaggtggcctcctggatgatccagttgaagagccacttgccacttataaatttgtaagtttacttgccactctgtcttctctcc

SEQ ID NO: 9032 - DNA, 201 bp, Homo sapiens
agtggaataaatgtattttctttatgtagctcataatgaagtaccaaatgaaaggcttgtagttgagcatcaagaatcattgtcaaaaaccaaattacaartaaagaaacaagaaacttctacagagcaaccactcaccagtaagtataaaaattacacataactttacattattttaaattagtcacagcaaaggtattt

SEQ ID NO: 9033 - DNA, 201 bp, Homo sapiens
agaccatgttctctgattcatcttaagatcactgtgatgggtagaggaaatagcacatgtgttataggtatcgtcaccattttgactctagtggggctgtmtgttggccctatgccctactgcctggccagaagatccttagtggggagtccatcaagctcttctttgagacttcattgttgagtaactagacaatgcttg

SEQ ID NO: 9034 - DNA, 201 bp, Homo sapiens
gcagtgacttggtaacaaactactttgttttctggtttatctttctgtgtttatttaataaagatagatatctccccatatttttcttatttcctcttctktcttacctaaaagatagtatactagatattctcccttttggtttttttccactaaacattatttcatagaaatatcaccaagtcagtttgtagggatctt

SEQ ID NO: 9035 - DNA, 201 bp, Homo sapiens
gaactcctgttgtacaatatatacaaaactctggattaaagagttaaggccaaaaaatacaatttaaattagaagaataattaggaaaatatgtttaaccrtaatgatagaaagaaacataggaaatcctgaagcttaaaacttaaaagaaaaacatgtcagactactcattcttatagatgtcaatgggaaaagaggtaa

SEQ ID NO: 9036 - DNA, 201 bp, Homo sapiens
gagatgtcaccccttagaaatcaatcctaggcattttatccaggtactaagtaactgtatcttgtctgaactaatggcccagttaagagccactggtgagkcattagagcatccagtccttttgggagatttccttgcttgagtccacttaaatgatataatcaatataatgaaaggctagtcctccccttgggagcaggc

SEQ ID NO: 9037 - DNA, 201 bp, Homo sapiens
atgacaccaaaggcacaatcatgaaagaaataattgataagctagacttcattaaaatgaaaaatgtctgctctgtaaaaacattaaaagagaataagccmcagagaagatctttacaaaagacatatctgataaagaactgttattcaatatatacaaagtgttcttaaaacttaattatttgagaaaatgaacaaatca

SEQ ID NO: 9038 - DNA, 201 bp, Homo sapiens
actgtagtcacttgtgtctttggtggccagggctgtaatatagcattggaccagcaaaatcaattgagtcattatgcacctgagggtgtgtacaagatctrcttagttattgaatggagaaatagtcttatagagaacttttgcttcattaagctcaacaaatgacaacagcctttctgtttcttcctaggaagctattct

SEQ ID NO: 9039 - DNA, 201 bp, Homo sapiens
tgcaaaatcatacaacttctagatgacaaatctaggtgtccttgggtgtgtcaatgactgtttagatatgacaccaaaggcacaatcatgaaagaaataawtgataagctagacttcattaaaatgaaaaatgtctgctctgtaaaaacattaaaagagaataagccacagagaagatctttacaaaagacatatctgata

SEQ ID NO: 9040 - DNA, 201 bp, Homo sapiens
tatgaattagatgataagttgagtcaatgttaaatttcctatttttggtaattgtgttgtgatgatatattatcatttcttaagaaatactaaagttttaygggtaaagagacattatgtttccaagttacccctctatagttcagaaaaaataatagtttatgtattaaatatttatcatgtttataaatatatgtacat

SEQ ID NO: 9041 - DNA, 201 bp, Homo sapiens
aaatgatttttttaacgtgttggagaaaatctcttactaatatcccaataccatgtttcatgatgaaatgaaatgttcaattaaagttaaaaataagatawaattcctattgctgctaaagtaagtattgttgtaaaatgtataaccaatgtaataaaaaagaaaacctgttattataaatattagaagaaatgatacaac

SEQ ID NO: 9042 - DNA, 201 bp, Homo sapiens
ccattttagatctttcctgctttctcttgtgggcatttagtgctataaatttccctctacacactgctttgaatatgtcccagagattctggtatgttgtrtctttgttctcattggtttcaaagaacatctttatttctgccttcatttcattatgtacccagtagtcattcaggagcaggttgttcagtttccatgtcc

SEQ ID NO: 9043 - DNA, 201 bp, Homo sapiens
caagttgccgataattgggttgtgaataaagtggattttatgtttctttctataattatttttatagttttagtgtagtatggaagactacctgcaatggrtggtgattgttagggttatctaaactagatccaatccagcttctcagtttgcccctatgaactacctggataacaatgccagctctatcttaattcccat

SEQ ID NO: 9044 - DNA, 201 bp, Homo sapiens
tgaggtttttgagttgaataaaggagagggatgacaacttgtatttagtccactgacttgttcacatgtgctaattttgttacaacttacaagagattaaytgatggttattcagctatgcaatttaatatgggaaattactagcttaataaaatgaagaagggaatatgtcatttctcaatatgttttacgtttttagag

SEQ ID NO: 9045 - DNA, 201 bp, Homo sapiens
acacacagcacggacatatgttacaatttacctttcaaagcgttttgaaaacctgttttatttttatagagactgtcttaaaacacttgaaaggtgttaayggaaaagatataataaagcatctaatcaacatacagtcaaagagtcatgcaggtaagaacaagaatttttcaagtctcctgttaatggcttatttagctc

SEQ ID NO: 9046 - DNA, 201 bp, Homo sapiens
ctctgaagttaaatatggatctttgatgacaactgtagctgtaagttattacatgcgaaaatatcttcatgaatttcctcctgtaatttgtggaactctartatttgctatcaatggaacattagttagatatgattagttttagaactcatttactggtaaagtaatccataaaaatgcaaggctgttgtgacctaaata

SEQ ID NO: 9047 - DNA, 201 bp, Homo sapiens
aaatttagtgcatggtcctagattcaatcttagtccaaaaaaatctataaaggacattattatgacaaatgcaacttgaatatgggttatgaattagatgrtaagttgagtcaatgttaaatttcctatttttggtaattgtgttgtgatgatatattatcatttcttaagaaatactaaagttttacgggtaaagagaca

SEQ ID NO: 9048 - DNA, 201 bp, Homo sapiens
cttaaacaaatttacaagaaaaaatcaaacaaccccatcaaaaagtgggcgaagcatatgaacagacacttctcaaaaggagacatttatgcagccaacaracacatgaaaaaatgctcatcatcactggccgtcagagaaatgcaaatcaaaaccacaatgagataccatctcacaccacttagcatgttgatcattaaa

SEQ ID NO: 9049 - DNA, 201 bp, Homo sapiens
gtcccattggtccatatctctgttttggtaccagcaccatgctcttttggttactgcagccttgtagtatagtttgaagtcaggtagcgtgatgcctccarctttgttcttttggcttaggattgacttggcaatgcaggctcttttttggttccatatgaactttaaagtagttttttccaatcctgtgaagaaagtcat

SEQ ID NO: 9050 - DNA, 201 bp, Homo sapiens
ttatctatttcttattacgtgttgtccactttttctatcagtggtcttaatatcttagacataattattttaaatttctggtatgataatttgaaaaattytgccatatctgagtttgatgctcatgcttaaactgtctcttcagactatgttttttttttttacttttagcatgacttgaaatttttgttgttgttgttg

SEQ ID NO: 9051 - DNA, 201 bp, Homo sapiens
cttctcaatgttattagtgggagtatataatgatttaaaatactcttaattatttaaaaatatatcaatgatattacatatctgtacccataagatttctkaagtatttcaatgtctagatttttccttaagagttagcaccttctcacttaccttggtctcagacccctgtccttaactttccatatttgttattatgta

SEQ ID NO: 9052 - DNA, 201 bp, Homo sapiens
cttcttgctattgtctttcaggtccccccttttgtgtgactacaatacagtgtcaaataatggcttaatatataaaataggacaagcagtctagtacaaawattgggaaaagatagaaataggcctgtgaaaagtttgcttctcaatgttattagtgggagtatataatgatttaaaatactcttaattatttaaaaatat

SEQ ID NO: 9053 - DNA, 201 bp, Homo sapiens
gttgttcaaaaagaaagcaagagggcccggcgcggtggctcacacatgtaatcccagcactttgggaggccgaggcaggcagatcacgaggtcaagagatmgagaccatcctggccaacatggtgaaaccctgtctctactaaaaatacaaaaattagctgggcatggtggcacgtgcctgtagtcccagctacttgggag

SEQ ID NO: 9054 - DNA, 201 bp, Homo sapiens
caaggaattgcttctctagctttctcagaggccgtctgttggatctctaatttgccccaccaggcatctttgcctgagagtctaggcctaaagaggaggascactggtgtccctcagaaccaaaaagcttatgtaaacaatccgctagcattctctgagagtgccccatggtgttggacagcactttctaagacccactga

SEQ ID NO: 9055 - DNA, 201 bp, Homo sapiens
cccaccaggcatctttgcctgagagtctaggcctaaagaggaggaccactggtgtccctcagaaccaaaaagcttatgtaaacaatccgctagcattctcygagagtgccccatggtgttggacagcactttctaagacccactgatagggctggcagagtgcaccatgggacagtcagactcttgcaaatgatccactag

SEQ ID NO: 9056 - DNA, 201 bp, Homo sapiens
tgtgtaccatatcataaaccatatatattcatccacacatagatacacataattatataccataattgatattataccattgtttctggtgtgtgtgtgtrtatatatataaatatatatatacatacacacatatacatgtatatatgcatgtgtgtatatatatacatataactgtgtgtgtgtgtatatatatatgtt

SEQ ID NO: 9057 - DNA, 201 bp, Homo sapiens
gcaattcagggaagactttagaatacaaaggatttactgacatgattctttactacttttatgtctggtagtagattacatatgtccattggaagattacrtaatcaaggctgaacaactaaaaggttattcccttcaagaataaaattttgagccatcttaactagggaagagccttaggtagccaagcagttggctgtg

SEQ ID NO: 9058 - DNA, 201 bp, Homo sapiens
cgaaaattcttagccattattatttcaaatatttctcttttcttgtttgctttttctccttctgttactctcattatgtacgtattataccttttgtaatwttcccaaagatctcggtattctgtttattttattattttttctcttttcaattttagaagtttctaatgacacgttttcaagctcacttattcttttttg

SEQ ID NO: 9059 - DNA, 201 bp, Homo sapiens
gagtcaaatggtatttcaactcttggttctttgagaaatctccaaactgctctccaagtgtttagactaatttacattcccaccaacagtgtgtacatgtccccttttctccacagacttgccatctgtttttatcttttattttttaataatagctattctgggccgggtgtggtggctcatgcctgtcatcccagcact

SEQ ID NO: 9060 - DNA, 201 bp, Homo sapiens
tctcaagattttctttttgtctttgattttctgtagtttgagtatagcatatgattaggtctagacatttttgctattgaccattttttatgttctctgarcatctaggatctgtggtttgatgtctaccattaattttcgaaaattcttagccattattatttcaaatatttctcttttcttgtttgctttttctccttc

SEQ ID NO: 9061 - DNA, 201 bp, Homo sapiens
tcctccatcttgctctggtgattctatctcaaagcctttcttcttatagctgagaaaatgggtgaggttttttcagccaaaggaaaaatcttacacctgartataaattttaaactcaaaagcccatctcaaattacaaatgttgcaatttctagaaaacaatttcatatgacaatttgactatgatacatgtatgtgtgg

SEQ ID NO: 9062 - DNA, 201 bp, Homo sapiens
aagctctgctaagggacagactgcctcctcaagtgggtccctgaccccagtgcctcctgattgggagacacctcccagcaggggtcaacagacacctcatrcaggagagctccagctggcatctggccggtgcccctctgggacaaagcttccagaggaaagagcaggcagcaatctttactgttctgcagcctccgctgg

SEQ ID NO: 9063 - DNA, 201 bp, Homo sapiens
cagcctccgctggtgatacccaggcaaacagggtatggagtggacctccagcaaattccagcagacctgcagaagaggggccggactgttagaaggaaaastaacaaacagaaagcaatagtatcaacatcaacaaaaaggaaacccacgcaaaaaccccatctgagggtcaccaacatcaaagaccaaaggtagataaat

SEQ ID NO: 9064 - DNA, 201 bp, Homo sapiens
ggctctaactagagcaattttctttggggcttgggaatgaatgcaagcaggaatatactaaaacaatataactatactgttatacattcagtagttggggrccataacaatggaggttttagtggtccagtgggacccatgcatactttgttacagcagcgatctacttcccagtggtagggctaccattacaaagtaccc

SEQ ID NO: 9065 - DNA, 201 bp, Homo sapiens
cttagtcttgtttagttttgaaagctgagacatcggttaagagttgaatgggagtctccagttcacctccagcttcactgggaggagcagaaggaatagcrctttattaatcaggatccattacttcgtagaccctagcagaccaccctgtagggccccatggctcactaccttgccatgagttccttggtgggagagccc

SEQ ID NO: 9066 - DNA, 201 bp, Homo sapiens
atatccttgcagtagaaacactttcatgatttttacatgtaacttcatagtttattttgaaaattaatttggtctttttttgaaaattaattttcaaaatwattttgaaaattaattttcaaaattattttgaaaattaattggtcttttcaattcatttaattgaattgtggtcttttacttaaatttttataaaaatga

SEQ ID NO: 9067 - DNA, 201 bp, Homo sapiens
acctccagcttcactgggaggagcagaaggaatagcgctttattaatcaggatccattacttcgtagaccctagcagaccaccctgtagggccccatggcycactaccttgccatgagttccttggtgggagagcccatcaatttccttagaacccacacttaagtaactggaatcagcgatcttgttgtgaaagtgcttg

SEQ ID NO: 9068 - DNA, 201 bp, Homo sapiens
cgatcttgttgtgaaagtgcttgcccagatggtcctggagagagtgcgtgattaccagttttacatcactctttctgccagccagttgttgctatctgtgmagcagctactttttcaattctgataccgatttgtcatcagttaatatctggattgtaccacagactgatcagcatggccttatgaggatgtttaattgag

SEQ ID NO: 9069 - DNA, 201 bp, Homo sapiens
cagcagctactttttcaattctgataccgatttgtcatcagttaatatctggattgtaccacagactgatcagcatggccttatgaggatgtttaattgarttcagtaaccagtaggagtaaaacgaatgaacctaaaaaactgagtcttgttaacagtctcatctaccaccggggtggctaacagggaagctatatacat

SEQ ID NO: 9070 - DNA, 201 bp, Homo sapiens
agggattgcttccccagctttcctagagtctctcttttggatttataatttaacccaccaagcaagctcagctagggaattggaagctaaaaggaaggatyattagttctccctgagacctgaaaagcttatatatacaatcactagcattccccaaaagcactcccagggcccacaaaatatttcctgagacacattgtc

SEQ ID NO: 9071 - DNA, 201 bp, Homo sapiens
tttctgacatgtattatattccttctctctgaagaatgtttaaaaatattttcttccaatgcaaggatactggcaacaaattatgtcattttttttctgaraatgtttttatatctctttaagttttgaaggattatttgtctggatacaggttctagttggttgtatttttcttcaacacttgaatattttaaatatttt

SEQ ID NO: 9072 - DNA, 201 bp, Homo sapiens
tatatagtgcagatatgctgaacaaagagatgtttcatgtcctgggtgagatggagtgagatagcatgatttttttttgcgtatgtgtatgtatgagtgtrtgtgtgtgtgtgtgtgtgtgtgatttgtaaactttttaaatatatttagggggtacatatgcagatttcttgtttgtttgtttattttgagacggagtct

SEQ ID NO: 9073 - DNA, 201 bp, Homo sapiens
accattcctggagttttttacttttattccttgtctaatattttttctctctttatgtagacctgtgtttctgacatgtattatattccttctctctgaaraatgtttaaaaatattttcttccaatgcaaggatactggcaacaaattatgtcattttttttctgagaatgtttttatatctctttaagttttgaaggat

SEQ ID NO: 9074 - DNA, 201 bp, Homo sapiens
atgaatcaatcaagtggaagaaaggatatccaagattgaagatcaacttaatgaaataaagcatgaagacaagattagagaaaacaggatgaaaaggaacyaagaaagcctctaagatatatgggactatgtgaaaagaccaaacttaacgattcactggtgtacctgaaagagacggggagaatgaaaccaagttggaaa

SEQ ID NO: 9075 - DNA, 201 bp, Homo sapiens
gaactcctgagctcaagcaatccatctgctttagcctcccaaaatgctgggactacaggcaagagccaccattcctggagttttttacttttattccttgkctaatattttttctctctttatgtagacctgtgtttctgacatgtattatattccttctctctgaagaatgtttaaaaatattttcttccaatgcaagga

SEQ ID NO: 9076 - DNA, 201 bp, Homo sapiens
tgatgggtcttgactctttatccaatttgccagtctgtgtcttttaattggagcttttagcctatttacatttaaggttagtattgttatgtgtgaatttkatcctgtcattatgatgttagctggttattttgctcgttagttgatgcagtttcttcctagcctctatggtctttacaatttggcctgtttttgcagtgg

SEQ ID NO: 9077 - DNA, 201 bp, Homo sapiens
cccacttatgattgagaacatgtggtgtttggttttctgttcttgtgttaagtttgtagagaatgatggtttctggcttcatccacgtccctgcaaaggaygtgaactcatcctttttatggctgcatagtattccacggtgtatatgtgccatattttctttatccagtctatcattgatgggcatttgggttggttcca

SEQ ID NO: 9078 - DNA, 201 bp, Homo sapiens
ttcactgtttagtaaccagacctagagattgtctctacaggcatcattcaggagagggcgcttgattgccattttattaggttggtgcaaaagcaattgcrgtttttgccataaattgcttttgtaccaacctaatatatcgctttcctgctggtcagtctttttctacctcaggagctgctgcttttcccatgcctgaaa

SEQ ID NO: 9079 - DNA, 201 bp, Homo sapiens
atgattcattttgaaaatgtgtcagaggttttattgtgtgacatttatttaagttgtattgtctagtgtaaagtcttataaaactgatagggctgggcacrgtgactcaagcctgtaatcccagcactttgggaagccaaggcgggctgatcacaagttcaggagatcgagaccatcctggctaacacgatgaaacctcgt

SEQ ID NO: 9080 - DNA, 201 bp, Homo sapiens
aattacagaggttttttgataaatttgtttatttaatggattaaaagcatcttttttgtagctcagaaaatggaagaggtattagatggagatttttttamttgaggataaatttgcattttcaaaaagcaaatctccagctaagatatttggagctatcaaaatggaaacactaagtagtatgataattttcaatatcat

SEQ ID NO: 9081 - DNA, 201 bp, Homo sapiens
tatttggaaaatatttatttattgtgtgcaaatttatactttttatctggtaaatggagactgtctgttaatctctgaaaatgcattttgttttatacaawtcaaaaccatagtgagataccatctcacactagtcagaatggctattatttaaaagtcaaaaacaacacatgttggtgaagttgtggagaaaagagaaca

SEQ ID NO: 9082 - DNA, 201 bp, Homo sapiens
aactattgggtattgggcttaatacctgggtgatgaaaaatctgtacaacaaacctccatgacatgagtttacctatgtaacaaacattcacagatacccscgaacctaaaatgaaagttaaaaataaataaataggctgggcgcagtggctcatgcctgtaatcctagcactttgggaggctgaggcgggcagattgcct

SEQ ID NO: 9083 - DNA, 201 bp, Homo sapiens
gctgaggcgggcagattgcctgagctcaggagttcgagaccagcctgggcaatatggtaaaaccccgtctccattaaaatagacaaaaaattagccaggtrtggtggcatgcacctgtaatcccagctacttgggagggtgaggcaggagaattgcttgaaccagggaggtgggaagttgcagtgagctgagattgtgcca

SEQ ID NO: 9084 - DNA, 201 bp, Homo sapiens
tgttaactattctgggtcttttgcctttccattcaaattagaatcagtttgttgattccattttgattcccacagaatggcttgtgggaattttgattgcrattgcattgaactgagttgaaaagaactgacaacaaacaatattgagacttcctattctttaacatggactattgctccatttagatcttagatctgttt

SEQ ID NO: 9085 - DNA, 201 bp, Homo sapiens
gctgatagtttttaaaaatcataaatgggctttagattttgccaaatgatgtttcttcatttcttattgatcatataattttttctttagtctgttgatgkggtggattacattaattgatttttgaatattgcatgaatgttgcgtacctgggataaaccccatttggttgtggcatataattctttttatacattgttg

SEQ ID NO: 9086 - DNA, 201 bp, Homo sapiens
ctaacatttcctttttttcttagtttttctagcttcctgcttacattatctatttcttattacgtgttgtccactttttctatcagtggtcttaatatctyagacataattattttaaatttctggtatgataatttgaaaaattctgccatatctgagtttgatgctcatgcttaaactgtctcttcagactatgttttt

SEQ ID NO: 9087 - DNA, 201 bp, Homo sapiens
aggtctttgccatgttgcccaggctgatcttgaactcctgagctcaagcaatccatctgctttagcctcccaaaatgctgggactacaggcaagagccacyattcctggagttttttacttttattccttgtctaatattttttctctctttatgtagacctgtgtttctgacatgtattatattccttctctctgaagaa

SEQ ID NO: 9088 - DNA, 201 bp, Homo sapiens
ttaaagtataataaaaaaaaaatctagatttctagcttctttggggaatttagaacacctgagaatatctgtcatgcatttgtagtggtaagaataatggttttttttttaatagaacaggtacttctctattttaccttgctctttatgctatccctatcatcaccaggctcattacactcatataacatactcagtctc

SEQ ID NO: 9089 - DNA, 201 bp, Homo sapiens
gggtgaggttttttcagccaaaggaaaaatcttacacctgaatataaattttaaactcaaaagcccatctcaaattacaaatgttgcaatttctagaaaamaatttcatatgacaatttgactatgatacatgtatgtgtggatttctatgagtttatttttgaatttatggaacttcttgatgtgaagattaatgcttta

SEQ ID NO: 9090 - DNA, 201 bp, Homo sapiens
ccttgtaagttgtattcctaggtattttattctctttgaagcaattgtgaatgggaattcactcatgatttggctctctgtttgtctgttattggtgtatragaatgcttgtgatttttgcacattgattttgtatcctgagactttgctgaagttgcctaacagcttaaagagattttgggctgagacgatggggttttc

SEQ ID NO: 9091 - DNA, 201 bp, Homo sapiens
attcctcaagcatctagaactagaaataccatttgacccagcactcccattactgggtatatacccaaaggattataaatcatgctactgtaaagacaacrtgcacacgtatgtttattgcagcattattcacagtagcaaagcttggaaccaacccaaatgtccctcagtgatagactggattaagaaaatgtggcacat

SEQ ID NO: 9092 - DNA, 201 bp, Homo sapiens
agaagaggtgtctgatttttagaatattcagcttttctgctctggtttctccccatctttgtgattttatctacgtttggtctttgatgatgctgacgcayagatggggtttggtgtgcatgtcctttctgtttgttagttttccttctaacagtcaggaccgtcagctgccggtctcttggagtgtgctggcggtccacg

SEQ ID NO: 9093 - DNA, 201 bp, Homo sapiens
tgcttacattatctatttcttattacgtgttgtccactttttctatcagtggtcttaatatcttagacataattattttaaatttctggtatgataatttsaaaaattctgccatatctgagtttgatgctcatgcttaaactgtctcttcagactatgttttttttttttacttttagcatgacttgaaatttttgttgt

SEQ ID NO: 9094 - DNA, 201 bp, Homo sapiens
tatcataaaccatatatattcatccacacatagatacacataattatataccataattgatattataccattgtttctggtgtgtgtgtgtgtatatatawaaatatatatatacatacacacatatacatgtatatatgcatgtgtgtatatatatacatataactgtgtgtgtgtgtatatatatatgttcattcagcc

SEQ ID NO: 9095 - DNA, 201 bp, Homo sapiens
ggagactcctatgtttttctccccaacatcccaggcccttaggtgaacaggaggtttatagggggctgaaactgggtatttcccttccccgtgttgaaggstagaaagcagctggagttggatatttcctttcccccaggtctatattgtataataaagcctgtgttagttattctctctgataaaatagtttcccttgag

SEQ ID NO: 9096 - DNA, 201 bp, Homo sapiens
tggagccaccaaaacagatagtcttttcagtacatattaaaattatgcacattgctggaatcttttcaattaaaattaggagaagtttgttctttggttcmtgagtctgtatacagtcattccttggtatacatagggattagttccaggaccaccccttcatacacatatgccaaaatctgcacatagtcaagtcctgta

SEQ ID NO: 9097 - DNA, 201 bp, Homo sapiens
ccatttttataaaatttatttttagagcagttttaggttcagttcacagcaaaattgagcagaaagtacagatttcctctgtgccttctgccattcccccmacacagactccccactgtcagcatcctgcaccagagtaaaacatctgttataaccaatgaacctacactgacaccacattatcacccaaagtccatagtt

SEQ ID NO: 9098 - DNA, 201 bp, Homo sapiens
acagcaaaattgagcagaaagtacagatttcctctgtgccttctgccattcccccaacacagactccccactgtcagcatcctgcaccagagtaaaacatytgttataaccaatgaacctacactgacaccacattatcacccaaagtccatagtttactttagggttcactgttggtgttcgtattctgggttttgacaa

SEQ ID NO: 9099 - DNA, 201 bp, Homo sapiens
cagaattgtaaaaaactactttaaatttcatttggaaccaaaaaagagcctgcatagccaagacaatcataagcaaaaaaaaaaaaaaaaaaaagaaagcygaaggcatcatgctacctgacttcaaactatactacaaggccacagtaaccaaaacagcatggtactggtaccaaaacagatatatagaccaatggaaca

SEQ ID NO: 9100 - DNA, 201 bp, Homo sapiens
tctccagttcacctccagcttcactgggaggagcagaaggaatagcgctttattaatcaggatccattacttcgtagaccctagcagaccaccctgtaggsccccatggctcactaccttgccatgagttccttggtgggagagcccatcaatttccttagaacccacacttaagtaactggaatcagcgatcttgttgtg

SEQ ID NO: 9101 - DNA, 201 bp, Homo sapiens
atatcaagtagtgcaattgctggattatatgacaagaataggtttagtttttaagaaacagccactttttgatggggttgtttgtttttttcttgtaaatwtgtttgagttatttatagattctggatattagccctttgtcagatgagtagattgcaaaaatgttctcccattctgtaggttacctgttcactctgatgg

SEQ ID NO: 9102 - DNA, 201 bp, Homo sapiens
ctttcatattttgtctataaagtcatctccatgcccaatgtcacctaggaatcttttatattatcttctagaagttgtatagttttccattttctatttakacctatgatacattttgagttagtttttgtgaagggtataaggtctgtatctagatttatattttattgcatatggatgacttgttactccagcatcatt

SEQ ID NO: 9103 - DNA, 201 bp, Homo sapiens
tgagggatgtaaaggacctcttcaaggaaagctacaaaccactgctcaaggaagtaagagaagagataaaccaatggataaacattccatgctcatggatrggaataatcaagatcgtgaaaatggccatactacccaaaataatttatagattcaatgctattcccatcaagctatcattgactttcttcacagaattgg

SEQ ID NO: 9104 - DNA, 201 bp, Homo sapiens
ttgtgtcagtcatttatcttattttaataatttaaacttttttctaaaatatgtataccataagagaatcaagtaataaattcatttgtttaataactagrtatatctatgaaatagcagattttcacgtatacactgaggagaactattgtctttatttttatgctttaagtatgtactatattttaatatgtcagtgca

SEQ ID NO: 9105 - DNA, 201 bp, Homo sapiens
agcataattcacaattgcaaaaatgtggaaccaacctaaatgcccatcaatcaacgagtggataaactgtggtatgtgtatgtatatatgtgtgtgtgtgwatatatatatgtatatatatacacacatatacacacacacatatatatgtgtatatatatgcgtatatatatgtgtgtatatatatgcgtatatatatac

SEQ ID NO: 9106 - DNA, 201 bp, Homo sapiens
gtcagtcatttatcttattttaataatttaaacttttttctaaaatatgtataccataagagaatcaagtaataaattcatttgtttaataactaggtatrtctatgaaatagcagattttcacgtatacactgaggagaactattgtctttatttttatgctttaagtatgtactatattttaatatgtcagtgcaactt

SEQ ID NO: 9107 - DNA, 201 bp, Homo sapiens
cacaattgcaaaaatgtggaaccaacctaaatgcccatcaatcaacgagtggataaactgtggtatgtgtatgtatatatgtgtgtgtgtgtatatatatrtgtatatatatacacacatatacacacacacatatatatgtgtatatatatgcgtatatatatgtgtgtatatatatgcgtatatatatacatatgtgta

SEQ ID NO: 9108 - DNA, 201 bp, Homo sapiens
ctccaggaaaactataggaaatcttagaagaatctgactatatttggctttaaagtatataatgagatagtttccttgaacctctcacgcaaactcttctktcgctcttgctatttcttttgctaccatttctctgtggctaccagaaattcttaaattactcttagaacatgcaattgtgttaccttaacaattatggta

SEQ ID NO: 9109 - DNA, 201 bp, Homo sapiens
ttgaaaaccggcacaagacaaggatgccctctctcaccactcctattcaacatagtattggaagttctggccagggcaattagggaagagaaaaaaataaragatattcaaataggatgagaggaagtcaaattgtctctgtttgcagatgacataattgcacatttagaaaaccccattgtctcagcccaaaatctcctt

SEQ ID NO: 9110 - DNA, 201 bp, Homo sapiens
gcccatcaatcaacgagtggataaactgtggtatgtgtatgtatatatgtgtgtgtgtgtatatatatatgtatatatatacacacatatacacacacacatatatatgtgtatatatatgcgtatatatatgtgtgtatatatatgcgtatatatatacatatgtgtatatatacatatataatatatatcatggaatac

SEQ ID NO: 9111 - DNA, 201 bp, Homo sapiens
cccatcaatcaacgagtggataaactgtggtatgtgtatgtatatatgtgtgtgtgtgtatatatatatgtatatatatacacacatatacacacacacatatatatgtgtatatatatgcgtatatatatgtgtgtatatatatgcgtatatatatacatatgtgtatatatacatatataatatatatcatggaatact

SEQ ID NO: 9112 - DNA, 201 bp, Homo sapiens
cataagaatgacacaatggactttggggactcaaaagcaaagggtagggagggagtaagggataaaaggctacaaattgggtgcagtgtatactgctcgtvtgatgggcgcaccaaaatctcacaaatcaccactaaagaacttatataaccaacaccacctgttccccaatgattatggaaataaaaacatagtttaaaa

SEQ ID NO: 9113 - DNA, 201 bp, Homo sapiens
gagtctactgctgcacttctttatctataaagtgaataccttggtcagaggcaatactacgtggaataccatgatggtggataaagcattccatgagtccmtggatagtagttttggcagaatcattgtatgcatcataggcaaacgcataactggagtacgtgtctattctggtgaggacaaacctctgccctttccatg

SEQ ID NO: 9114 - DNA, 201 bp, Homo sapiens
gagcagctgcgttcctttggaggaggagaggtgctctgatttttagaattttccatttttctgctttgttttttccccatctttgttatctacctttggtmtttgaggatggcgacgtacagatggggttttgatgtggatgtcctttctgtttgttagttttccttccacagtcaggaccctcagctgcaggtctgttgg

SEQ ID NO: 9115 - DNA, 201 bp, Homo sapiens
ctccacattcatccatattatcacaaaagacaaaatttacttcctttttttaagggtgattttcgttatctattgatctgtggctggacactaagtttgaytccgtatcttggttattgtgagtaatgttacagtgaacatgggagtacaaatatctcttttatatactgatttcatatcctttggaggtacatccagagg

SEQ ID NO: 9116 - DNA, 201 bp, Homo sapiens
ggtatatccatacctggtgtatggatatgcttgtatgaagtatgaatgtgtttaaaaattatattcttatcataaactctctaggataatttcagtttggraaacaggcagcattgtatggaagaaagcactggttaaggagtaacaaacatctatttctgtataagttttatagttaactgtatatctgattttgttcaa

SEQ ID NO: 9117 - DNA, 201 bp, Homo sapiens
tattctatttttgtgtcagatctagcattatggtaatttacttataactttataaaaataagagaaatgtacatattatacattcatagatttatgtttcyatttgatggactaaatgcatctcttgatatagctcgtattgtagtaccaaatgaaaatgtgatttctgttcatcaagattcaaagtcaaaactccaaatg

SEQ ID NO: 9118 - DNA, 201 bp, Homo sapiens
tatacccagtaatgggatggctgggtcaaatggtatttctagttctagatccttgaagaattgccacactgccttccacaatggttgaactagtttacagwcccaccaacagtgtaaaagcgttcctatttctccacatcctctccagcacctgttgtttcctgactttttaatgatcaccattctaactggtgtgagatg

SEQ ID NO: 9119 - DNA, 201 bp, Homo sapiens
atggggtttcaccgtgttagacaggatggtctcgatctcctgaccttatgatccgcccgccttggcctcccaaagtgctgggattacaggcgtgagccacygcgcccagccaaattttttaattattattatattttaagttctgggatacatgtgcagaacgtgcaggtttgttacataggtatacatgtgccatggtgg

SEQ ID NO: 9120 - DNA, 201 bp, Homo sapiens
tggctaacacaaatttggcaaaggaaaacaaaaacatttctatatatcccagtagtgaaaagagcacaaaaataataaaataactgataaataaacactargaaatatgtggcctcatatgatggaaacaatgaactttaatgactaaagaaatgttgactacatagggagatatttcatgctcatgagtgaaagactctt

SEQ ID NO: 9121 - DNA, 201 bp, Homo sapiens
tatatacatgtgccgtgttggtgtgctgcacccattaacttgtcatttacattaggtataacttctaatgctatcagtcccccctccccccaccccatgayaggccccagtgtgtgatgttccccttcctgtgtccaagtgttctcattgttcaattcctacctatgagtgagaacatgtagtgtttggttttttgtcctt

SEQ ID NO: 9122 - DNA, 201 bp, Homo sapiens
ttttatgaatttaatcatttggtctaatagttttttggtggagtctttagagtattctttttcttttttttttttttttcattgacaaagaagtttcaccsgtgttatttagtccttgtggtagtcctttggaataagcaatgttattccctttgatttacactgagacctaaagatgatgaagagaaggtagattacaaa

SEQ ID NO: 9123 - DNA, 201 bp, Homo sapiens
accaatggcctcatggggagttccctatgatcagtggacagaggaagagaagaataaggcctggttcccagatggttctgcatgttatgcaggcaccactsgaaagtggacagctgcagcactacagcccatttctaggacatccctgaaacacagcggtgaagggaaatcttctcagtggacagaacttcgagtggtgca

SEQ ID NO: 9124 - DNA, 201 bp, Homo sapiens
atcagcctcttataaccaacattttactctctgttcctatgaacttgactttttaaaactcctcatataggtaagataatgcagtatttgtttttagtgaytggcttactttatttaacattatgttctccacattcatccatattatcacaaaagacaaaatttacttcctttttttaagggtgattttcgttatctatt

SEQ ID NO: 9125 - DNA, 201 bp, Homo sapiens
tggtcaaaaactgtgaagatatttgtatcccatgtgagtgctcaccaatgggtgacctcagcagaggaggattttaataatcaagtggataggatgacccrttctgtggacaccactcagcctctttccccagccacgcctgtcattgcccaatgggcccatgaacaaagtggccatggtggcagggatggaggttataca

SEQ ID NO: 9126 - DNA, 201 bp, Homo sapiens
aaacttgcacatatgaattttcattgctttgcctatgaatatatattaatctaaattataaataattaagaacaagtagaggctaatataaatatttgatrccaagaaatatcaaaataatgagactacttcacctcagatcctttaaagttcttgtcactattttcatgtcagatctagaattatagtaatttacttata

SEQ ID NO: 9127 - DNA, 201 bp, Homo sapiens
tgtatcccatgtgagtgctcaccaatgggtgacctcagcagaggaggattttaataatcaagtggataggatgacccattctgtggacaccactcagcctytttccccagccacgcctgtcattgcccaatgggcccatgaacaaagtggccatggtggcagggatggaggttatacatgggctcagcaatgtggacttcc

SEQ ID NO: 9128 - DNA, 201 bp, Homo sapiens
aagaccctgaccatccaggcaaactattggctacagcccatgaatcagcatataattgcacatctggccatttctccttccatgcagagtgcacaaccagrtgcactgctcaaagttctgcccactgggaaaatttctcttcactgctgtccttcagggatgtcctagaaaggggctgtagtgctgtagctgtccactgtt

SEQ ID NO: 9129 - DNA, 201 bp, Homo sapiens
agtattttgtaattaaaagtatgctgtaatgaataaacttgcacatatgaattttcattgctttgcctatgaatatatattaatctaaattataaataatyaagaacaagtagaggctaatataaatatttgatgccaagaaatatcaaaataatgagactacttcacctcagatcctttaaagttcttgtcactattttc

SEQ ID NO: 9130 - DNA, 201 bp, Homo sapiens
gctccaccactttgggtatccaggatagcgcttttattagctacaggagacctcactatttggactgtagtggggctctgtgttgtgcccccatgactatkaaatgatgataagcatctaatggagagcccctcaatctcttccttgagaccttattgttgagcaactagagccatagatgtctttgagaagggacttaaa

SEQ ID NO: 9131 - DNA, 201 bp, Homo sapiens
accaataagaagttctgaaattgaagcagtaattaatagcctaccaaaaaaaaaaaaaaagcccagggccagacagattcacagctaaattctaccagagktataatcaggagctggtaccatttcttctgaaactattccaaacaatagagaaagagggaatcttccctactcattttatgagaccagcagcatcctgat

SEQ ID NO: 9132 - DNA, 201 bp, Homo sapiens
ttgtgacttgatgacccatagtcaaatgtttagtttctaccaaagcccagtaacaggccaagagctgactctcaaaaggagaatgattatctgcagaagayggcagggccttgctccaaaatccgagagggctccactgtgattcacctatgggggcctgccaatgtctccaaacagcatccctatctgccactgacactt

SEQ ID NO: 9133 - DNA, 201 bp, Homo sapiens
cctttgtgttaagccaggatgtgtggcagggcaaagccaggtgggaactgggtctggtgggtttgtactctgagtctccctgtgcagggcaagcagcaacmcctgtgggtgttggggaatgggagtggtctcagaccactgggttgatgttccacaggggagcattgctgcctctgctatgcagaagagtttgtgcaggga

SEQ ID NO: 9134 - DNA, 201 bp, Homo sapiens
tagtttgggaatgacccaattttccaggtgccacctggaaaagggtgccaccctttctttgactaggaaaaggaattccctgaccctttgcacttcccagrtgaggtgatgcctcaccctgcttcagcttaggctcggtgccccgcacccactgtcctgcaaccactgtctgacactccgcagtgtgatgaacccagtacc

SEQ ID NO: 9135 - DNA, 201 bp, Homo sapiens
agaacatagaatcttatgtaaacatcccttagaactctctcagagctgtttgtggcattcagtgcactttctgagacccattggcatagttgatgaccctmagactcttgcagattatctgtgtgcactacctaaaagtgccccagaggcttttcagtatctccccaaaatgctcagtagtagcttcaggaattttggttt

SEQ ID NO: 9136 - DNA, 201 bp, Homo sapiens
ctgcacatgtatcccagaacttaaactataattataatttaaaaaagacaactgggggctaagggaaggataacgattcccctaagaacatagaatcttaygtaaacatcccttagaactctctcagagctgtttgtggcattcagtgcactttctgagacccattggcatagttgatgaccctcagactcttgcagatta

SEQ ID NO: 9137 - DNA, 201 bp, Homo sapiens
tcataaaccatatatattcatccacacatagatacacataattatataccataattgatattataccattgtttctggtgtgtgtgtgtgtatatatatawatatatatatacatacacacatatacatgtatatatgcatgtgtgtatatatatacatataactgtgtgtgtgtgtatatatatatgttcattcagccag

SEQ ID NO: 9138 - DNA, 201 bp, Homo sapiens
acatagatacacataattatataccataattgatattataccattgtttctggtgtgtgtgtgtgtatatatataaatatatatatacatacacacatatmcatgtatatatgcatgtgtgtatatatatacatataactgtgtgtgtgtgtatatatatatgttcattcagccagtctcctgtgcttaaaaatctcaatg

SEQ ID NO: 9139 - DNA, 201 bp, Homo sapiens
catggagtttgagatctgagaatggacagactgcttcctaaagtgggtccctgaccccccagtaggctaactgggagacatctcccagtaggggctgactracaccacaaacagctggcagcccctttgagacaaagcttccagaggaaggatcaggcagcaacctttgctcttctgcaatattatatttgctgttctgca

SEQ ID NO: 9140 - DNA, 201 bp, Homo sapiens
ttcccaagactaaaccaggaagaagttgaatccctgaatagaccaataagaagttctgaaattgaagcagtaattaatagcctaccaaaaaaaaaaaaaaagcccagggccagacagattcacagctaaattctaccagaggtataatcaggagctggtaccatttcttctgaaactattccaaacaatagagaaagaggg

SEQ ID NO: 9141 - DNA, 201 bp, Homo sapiens
aaatgacaaaactttagctagattgactagagaaaaataataaagttgctaaaaatcaaaacagaaagtgggaacattacaaccaattttaaaagaataamaagcattgcaagagaacactgtgaacaactgtacaccaaaaaaactggataacctagaggaaatgaacaaattgttagaaatatacaatctaccagaact

SEQ ID NO: 9142 - DNA, 201 bp, Homo sapiens
tccatgtgctgatgagaagaatgtttattctgaagatcttgaatagaatttactatagatacccattaagtttatttgttctagcatgtcatttaagtccrttgtttctctgttgactttttgtctcaaagatcttttgagtgttatcagtggtctattgaagtcctactattattgttttgctatcttatgatgctagga

SEQ ID NO: 9143 - DNA, 201 bp, Homo sapiens
tgggaaggggatgttgccaccacttggagtggggaggctgtttcctccgcccaaaaagtctcatcagaatttaggagctcagtgcctccagcctcatcagsgtcctcccacatgtccccattttaagttgcatggtcccattcttttccaatcaatgtcctcactttaatagtggatacctggtgaggttgtgcatgcatc

SEQ ID NO: 9144 - DNA, 201 bp, Homo sapiens
tggagaaataggaacacttttacactgttggtgggactgtaaactagttcaaccattgtggaagtcagtgtggcgattcttcagggatctagaactagaartaccatttgacccagccatcccattacttggtatatacccaaaggattataaaacatgctgctataaatacacatgcacgcgtatgtttattgcggcact

SEQ ID NO: 9145 - DNA, 201 bp, Homo sapiens
taaaatgtatggggccattcatgctgttcaggccattcaaattggcaaggggccttctagtacaccattctttacttgtcactatctctaatttttttttwatttaagttctgagatacatgtgtaggatgtacaggtttgttacatagttaaacgtgtgccatcgtggtttgctgcacccatcaaccttatcttcatcct

SEQ ID NO: 9146 - DNA, 201 bp, Homo sapiens
ttatatgttcaatcacaaatatgatttttacatgtcatgtgtataaagaaaacatgtatgtgcgtatattcatgtatattctccattgtcgttgattaatyatatttttcatgtgttcttaacttcactgaggttctgtttattttatcatttatgagaaaggtattttaaattctgctactgtgattacttatttctcta

SEQ ID NO: 9147 - DNA, 201 bp, Homo sapiens
agtcccagctacttgcgggtgctgaaatggaggatagcttgagcccaggaggttgaggctatagtgagctgtgttcacacaactgtgctccattctggggkacaaagtgaaaccctgtctccaaaagaaaaaaaaaagatattttatactgtgaactaatatgtaaataccccaagataacttaaaaaatagcccagaatt

SEQ ID NO: 9148 - DNA, 201 bp, Homo sapiens
tgaaaggaagatatgatgagaatgtctcaccgaatagagaatattaacaaaaagattaaaagtattttgatttacgattgaacgtatttatgggatacaaygtgatgttttagtgcatgtaaaaaggaaattctagcgttgatagtacaataactgaagaaaaattcactagaggggctcaagagtagttttaacagaaga

SEQ ID NO: 9149 - DNA, 201 bp, Homo sapiens
ttctcaatatgttttacgtttttagagtagatgtattttcttttcaatgtatttcaaacatctattttgtagctctgaaggtggctcagatgataggtaaragtcttttgccaatggactcaaaatcagaagatgagcttcaaattaagaaacataaaattgcccaagtggaaacacatagtgtgtaaaatattagcaaat

SEQ ID NO: 9150 - DNA, 201 bp, Homo sapiens
tgtatatctgattttgttcaaatcactaaacttctctaggcttatatgattgctaagaatgcttccaattctaaggctttgtaattctgcagtccagggcttttttttttttactaattcatcttctttaatgactgatgctaattaagttattactattcatacatacaaatatactatcacatacacacagcacggaca

SEQ ID NO: 9151 - DNA, 201 bp, Homo sapiens
aatccattacagacaagcaaatgctgagagagaattttcaccacaggcctgccttacaagagctcctgaaggaagcactaaatatggaaaggaaaaactgktagcagccactgcaaaaacataccaaaatatgaagaccagtgacattgtgaagaaactgcatcaactaatgtgcaaaatagccagttaacatcatgatga

SEQ ID NO: 9152 - DNA, 201 bp, Homo sapiens
taaagaggtagatatcattaagaaaagaaccaaacagaaatcccataattcaattcaattaataaaacaaaaaatacattcagtgggagaaaatttttgcmatctacccatctgacaaagggctaatatccagaatctacaaagaactcaaacaaatttgcaagaaaaaaacaaacagccccatcaaaaagtgggcaaagg

SEQ ID NO: 9153 - DNA, 201 bp, Homo sapiens
accagttaagagtagtaatgaactggtcccacaggcagactaaggacctcctggttagcagagtggtgcaggcagtagtgatagctgagatcatgcagctrttttcttcttcttgggtgcagtgctattctgccaggagatactgtagtggattgtcttggctggcctccagccagatggcagtgcttccaactgtgggag

SEQ ID NO: 9154 - DNA, 201 bp, Homo sapiens
acaagaaaagaaactatcaacagagtaaagagacgacctatagaatgggagagaatatgcacaaactatgcatccaacaaaggtctagtatccagcatctwtatggaactcaaatcaataagcaaaaaacaaccccattaaaaaatgagcaaaagacatgaacagacacttctcaaaagaacacatacatgcggccaacaa

SEQ ID NO: 9155 - DNA, 201 bp, Homo sapiens
ctggatcaaatggtatttctggttctagatccttgaggagtcaccacactgtcttccacaatggttgaactaatttacattgtattatttttaagtctcgdtttcatttagttctgctcttatctttgttatttcttttcttctgctagttttgggtttggtttgttcttgtgtttctagatccttcaggagcaacgttgg

SEQ ID NO: 9156 - DNA, 201 bp, Homo sapiens
acagtcatggcctctcaatcaattcccagacttgatcaagtttacagacccaggaccccttgaaggaagggtaccttgaggaaggacctagtatactgccmaaaatttatacctttaatttttctcccagccttcctcaaagggacctatggcctttttgctgggttactacgcaacatataaaaggaaataataagattt

SEQ ID NO: 9157 - DNA, 201 bp, Homo sapiens
tcatatccttcatccactttttgatggggttgtttttttcttgtaaatttgtttgagttcattgtatgttggttgtctgtttactctgttagacttggcaragactacaaagcagttattataaataggttcagatatttaacaaatggtgctgggaaaactggctagccatatgtagaaagctgaaactggatcccttcc

SEQ ID NO: 9158 - DNA, 201 bp, Homo sapiens
gacaaaaacaagcaacggagaaaggattccctatttaataaatggtgttgggaaaagtggctagccatatgtagaaaactgaaactggaccccttccttamatcttatacaaacattaactcaagatggattaaagacttaaacctaagacctaaaaccataaaaaccctagaagaaaacctaggcaataccattcaggac

SEQ ID NO: 9159 - DNA, 201 bp, Homo sapiens
aggggttcaagtacatttgaactgtccaaagaaagaattaaaaaacttaaagtattaggaacactaaaaagaaaacagagagagaaaggagcagaaaaaayatggatgaaaactttttgaagaatatttaatgataaatgagtctacacatccaagctcaattaattctaagtagaataaacacaagggaatctataatca

SEQ ID NO: 9160 - DNA, 201 bp, Homo sapiens
gggttttgttggttggaactcctagctttttatagcttctcaagctgggttagtcattgttcattatattttagataaatgtaattgatttggggttcacwtgttacttcatatcacctacaacactgcttttcattaatgtagctcctggtttttcctataatttgggtttttttttctaagcccaagacttttatttga

SEQ ID NO: 9161 - DNA, 201 bp, Homo sapiens
gacaagctgacagaagtaggcttcaggaggtgggtaataacaaactcctctgagctaaaggagcatgttctaacccaatgcaaggaagctaagaaccttgrtaaaatgtcacaggaactgctaactagaataaccagtttagagaagaacataaatgacccgatggagctgaaaaacacagcacgagaactttgtgaagca

SEQ ID NO: 9162 - DNA, 201 bp, Homo sapiens
tggtctaatagttttttggtggagtctttagagtattctttttcttttttttttttttttcattgacaaagaagtttcaccggtgttatttagtccttgtrgtagtcctttggaataagcaatgttattccctttgatttacactgagacctaaagatgatgaagagaaggtagattacaaagataataatataaatagct

SEQ ID NO: 9163 - DNA, 201 bp, Homo sapiens
ttacatatgtatacatgtgccatgtttgtgtgctgcacccattaactcctcatttaacattaggtatatttgctaatgctatccctccccctacccccacmccacaacagtctccattgtgtgatgttccccttcctgtgtccatgtgttctcactgttcaattcccacctatgagtgagaacatgcggtgtttggttttt

SEQ ID NO: 9164 - DNA, 201 bp, Homo sapiens
aagtgggaaagacctaaaatccgtaccctaacatcacaattaaaagaactagagaaggatgagcaaattcaaaagcttgcagaaggcaagaaataactaaratcagagcagaactgaaggagagagagacacgaaaaacccttcaaaaataaatgaattcaggagctgtttttttgaaaaatttaacaaaatagatagacc

SEQ ID NO: 9165 - DNA, 201 bp, Homo sapiens
caaagcagaaattaaaggggttaaaagatatatagagaaaaacaccaaatagggcacggtcctgattaatggatgtggattatgagctgggttgtaaactyttatttgtatctggttacctttagagttagcatcactagtatggagaaacaaggtttcaaataggtctggaaagaagagagaaaattttcagagagccta

SEQ ID NO: 9166 - DNA, 201 bp, Homo sapiens
gcagccaaaagacacatgaaaaaatgctcatcatcactggccatcagagaaatgcaaatcaaaaccacaatgagataccatctcacaccagttagaatggygatcattaaaaagtcaggaaacaacaggtactggagaggatgtggagaaataggaacacttttacactgctggtgggaccgtaaactagttcaaccattg

SEQ ID NO: 9167 - DNA, 201 bp, Homo sapiens
acatgcattgtagacactcagtgctaggaacatgcttagatttaacaatggtcattggatgcaattttgcatgtagggtctatgcaaattttggtcaccarctactttgttttctggtttatctttcctgtgtttcaatttctaaaagtaagtatctctttacatttatttcctaatggatagcatacttgatatctttct

SEQ ID NO: 9168 - DNA, 201 bp, Homo sapiens
tattaaatagggaatcctttccccattgcttgtttttgtcaggtttgtcaaagattggatggtttacatgtgtggcattatttctgaggcctgtgttctgyaccattgatctatacatctgttttggcaccagtaccatgctgttttggctactgtagccttgtagtataatttgaagtcaggtagcatgatgcctctagc

SEQ ID NO: 9169 - DNA, 201 bp, Homo sapiens
acatagaatataagaattgagcttgtgactaagttgttgtaactatttccttgggcaaatgttacctcagaaaagcatgtgtaaagagttctgttggccargtgtggtggctcacgcctgtaatcccagcattttggggaggctgaggcaggcagatcacgaggtcaagagttcaagaccagcctggccaatatggtgaaa

SEQ ID NO: 9170 - DNA, 201 bp, Homo sapiens
acataagaatcataaaaaagcaaggaaagacaccaccactaaaggaacacagtaactgacaccaaagaaacagaaatttcctgaaaaggaattcaaaatartgattttaaggtaactcactaagatataagaaaatacaaatagacagttcactgagatcaagaaaataattcatcatctgaatgataaagtcaataaagc

SEQ ID NO: 9171 - DNA, 201 bp, Homo sapiens
tcagatttttttattcacctactctgacagcctctgtctttgaattgatatatttagaccattcacatttaaagtgattattgacatatttgcttcaatakcaaccgtatttgtagctattttctctttattgtcctagttctttgtttctttttcaccttccacacctttcctgccttctctggctttaattacatattt

SEQ ID NO: 9172 - DNA, 201 bp, Homo sapiens
atcttggagttgaactcagtgaatgaaataaaaactgcaattgagagctttgacagcagactagatcaagcagaagaaaaaaaatctgtgacctttcagayaggtcttttgaaatgactctatcagagaagaaaaaaagaatgaaaaagaatgaagaacactaaaggacttatgagacatcattaggttagcaaacattga

SEQ ID NO: 9173 - DNA, 201 bp, Homo sapiens
taggtctagacatttttgctattgaccattttttatgttctctgagcatctaggatctgtggtttgatgtctaccattaattttcgaaaattcttagccaktattatttcaaatatttctcttttcttgtttgctttttctccttctgttactctcattatgtacgtattataccttttgtaattttcccaaagatctcgg

SEQ ID NO: 9174 - DNA, 201 bp, Homo sapiens
tgtgccatgttggtgttctgcacccattaactcatcatttaacattaggtatatctcttaatgctagccctcccccctccccccaccccacaacaggcctkgtgtgtgatgttccccttcctgtgtccatgtgttctcattgttcaattcccacctatgagtgagaacatgtggtgtttggttttttgtccttgccatagt

SEQ ID NO: 9175 - DNA, 201 bp, Homo sapiens
aatcaaactgtcaaagtcaaaagaatttttaaaacagcaggagaaaagcatcaagtgacatcgaggacatttccatcagatttctttgtagaaatcttgcrggccagcagagaattgaatgatatgttcaaagtgctaaaagaaaaaaaaaattagtcaagaatactatacccatcaaagatgttctgagaaataaaggaa

SEQ ID NO: 9176 - DNA, 201 bp, Homo sapiens
atctgacaggaggcagagctcaggcagtaatgtgaatgatggggagcagttgaaaatacagatgaatcttcgctcactcacccactgctcacctactgctktgtgacccggtttctaacaggccagagaccagtactggtcatggcctcggtgctggggaccccaatctagattatttcactgaccaatttgcctgacctt

SEQ ID NO: 9177 - DNA, 201 bp, Homo sapiens
ctatcacaaggacaaagtaccaaacaccgcatgttctcactcataggtgggaattgaacaatgagaacacatggacacaggaaggggaacatcacacaccrgggcttgttgtggggtcgggggaggggggagggatagcattaggacatatacctaatgtaaatgatgagttaatgggtgcagcacaccaacatggcgcat

SEQ ID NO: 9178 - DNA, 201 bp, Homo sapiens
gatctgacaggaggcagagctcaggcagtaatgtgaatgatggggagcagttgaaaatacagatgaatcttcgctcactcacccactgctcacctactgcygtgtgacccggtttctaacaggccagagaccagtactggtcatggcctcggtgctggggaccccaatctagattatttcactgaccaatttgcctgacct

SEQ ID NO: 9179 - DNA, 201 bp, Homo sapiens
accggggcttgttgtggggtcgggggaggggggagggatagcattaggacatatacctaatgtaaatgatgagttaatgggtgcagcacaccaacatggcrcatgtatacatatgtaacaaacttgcacgttgtgcacatgtaccttagaacttaaaatataatacaaatatgcatataaaaataataaaaataaataggt

SEQ ID NO: 9180 - DNA, 201 bp, Homo sapiens
cctaaatgctgcacttaaaagatacagaatggcagaatagataagaatagatacagaactgcagaatagataagaaaaacctagtttctgctgtcttcagkagactcagcacataaagactcacataaacttaaggtaaaggtgtggaaaaagatgtcctgtgcaaatggacatcaaaagcaagcagaagtagctgttctt

SEQ ID NO: 9181 - DNA, 201 bp, Homo sapiens
aggtcaggagttcaagaccaccctggccaacatggtgaaaccccatctctactaaaaatacaaaaattcgctgtgtgtggtggcatacgcttgtaactcarctgctcgggaggctgaggcaggagaatcacttgaacccaggaggcagaggtggcagtgagccgagatcacgccattgcactccagcctgggtgatggagc

SEQ ID NO: 9182 - DNA, 201 bp, Homo sapiens
atgcacatgtaccctagaacttaaagtataataaaaaaataaataaataagaaaactaaccataaaaataaaacctagatctttcagatgtgcagtttacwatagggtttgtgttcctatggaaatctaatgccactggtgatctgacaggaggcagagctcaggcagtaatgtgaatgatggggagcagttgaaaataca

SEQ ID NO: 9183 - DNA, 201 bp, Homo sapiens
ctaaaagtagatctaccctttgatccagcaatcccacttctaggtatctacccagaggaaaggaaatcattatacaaaaatatacttgcacacatatgttyatagcagtactatttgccattgcaaaaatatggaatcagcccaaatgcccatcaatcaatgaatggataaagaaaatgtggtgtgtatatactatggaat

SEQ ID NO: 9184 - DNA, 201 bp, Homo sapiens
caaatgcaaaaaaatatataaataagaaggttagtatagtaaacactaaaaatatgtacttgctcttctttcttagcttaattaaaaggcacagtattatataaataattaatcataacaacaattataacaatgtcttttatatatagtagtaatacacataatagtagtgcaaaaatgttgaagaaggaataatgctat

SEQ ID NO: 9185 - DNA, 201 bp, Homo sapiens
tattaaatcacaaaggtaggcagcaaaagagaaggaaaagggcaaaagatctacaaaataaccaggaaacaaataacaaaatgataatagtaagttcttayctataaataaccttgaatgtaaatggaataaattcttcaatccaggacatagattggctgagtagatttttaaaaatacaccttcttcttattagggtgt

SEQ ID NO: 9186 - DNA, 201 bp, Homo sapiens
aaatgcaaaaaaatatataaataagaaggttagtatagtaaacactaaaaatatgtacttgctcttctttcttagcttaattaaaaggcacagtattatataaataattaatcataacaacaattataacaatgtcttttatatatagtagtaatacacataatagtagtgcaaaaatgttgaagaaggaataatgctata

SEQ ID NO: 9187 - DNA, 201 bp, Homo sapiens
aatgcaaaaaaatatataaataagaaggttagtatagtaaacactaaaaatatgtacttgctcttctttcttagcttaattaaaaggcacagtattatataaataattaatcataacaacaattataacaatgtcttttatatatagtagtaatacacataatagtagtgcaaaaatgttgaagaaggaataatgctatat

SEQ ID NO: 9188 - DNA, 201 bp, Homo sapiens
acacttagaactgttagaagaaaaagactcagcagtaaatgtaatgatgaatattattaaattattttaaattaaagttaactttgaataaattaagcagratttggtttatggatgtgtatcacgttaggactgtagaaacattcattaaattgtgctatttaaagtagtatttattttttgatttcctttaattttttg

SEQ ID NO: 9189 - DNA, 201 bp, Homo sapiens
atgcaaaaaaatatataaataagaaggttagtatagtaaacactaaaaatatgtacttgctcttctttcttagcttaattaaaaggcacagtattatataaataattaatcataacaacaattataacaatgtcttttatatatagtagtaatacacataatagtagtgcaaaaatgttgaagaaggaataatgctatatg

SEQ ID NO: 9190 - DNA, 201 bp, Homo sapiens
ctatagagactaataaggaactcttagcagatgctattggaagaggtataataaaggggtcaattaaaacacaatttaaatgtcaccaaggtaaaaaaaawttttttcaagactaatatttatggtttattcatattcccggagttaaattaagtatgaacctttaatgacaatagtaccaatatgttagtattatatagg

SEQ ID NO: 9191 - DNA, 201 bp, Homo sapiens
cctgaaactaggtggtcccatctgggggtgatgggagacagtgatagattatcaggcattagattctcataaggagcacacaacctagatccctctcatgygcagttcacaatagggtttgtgctcctatgagaatctaatgctgccactgatctgacaggaggcagagctcaagtggtaatgccagcaatgaggaacagc

SEQ ID NO: 9192 - DNA, 201 bp, Homo sapiens
tatgtcctgaatggtattgcctaggttttcttctagggtttttatggttttaggtctaacatttaagtctttaatcgatcttgaattaatttttgtataargtgtaaggaagggatccagattcagctttctccatatggctagccagttttcctagcaccatttattaactagggaatcctttccccatttcttgttttt

SEQ ID NO: 9193 - DNA, 201 bp, Homo sapiens
gtatctgttcatatcctatgcccacttgttgatagggttgtttgtttttttcttgtaaatttgtttgagttcatcgtagattctggatattagccctttgwcagatgagtagattgcaaaaattttctcccattctgtaggttgcctgttcactctgatggtagtttcttttgctgtgcagaagctcttcagtttaattag

SEQ ID NO: 9194 - DNA, 201 bp, Homo sapiens
ggaagactttagaatacaaaggatttactgacatgattctttactacttttatgtctggtagtagattacatatgtccattggaagattacgtaatcaagrctgaacaactaaaaggttattcccttcaagaataaaattttgagccatcttaactagggaagagccttaggtagccaagcagttggctgtgggaaaggga

SEQ ID NO: 9195 - DNA, 201 bp, Homo sapiens
gaagaaaacctaggcaatacctttcagatcataggcatggacaaaaacttcatgactagaacaccaaaagcaatggcaacgaaagccaaaatagacaaatkggatctaattaaactgaagagcttctgcacagcaaaagaaactaccatcagagtgaacaggcaacctacagaatgggagaaaatttttgcaatctaccca

SEQ ID NO: 9196 - DNA, 201 bp, Homo sapiens
cagcttctatgatatgacttcttttgattcagagattttttttgaaatgtcacttgtctctgacaacacacacacacacacacacacacacacacacacasagacatgcaatgtaacagtggtgagacagggacagaccacagaagacactcccattaacaaacagcagggagaaacgaaggcaaatatggcagtcaataa

SEQ ID NO: 9197 - DNA, 201 bp, Homo sapiens
gattacatatgtccattggaagattacgtaatcaaggctgaacaactaaaaggttattcccttcaagaataaaattttgagccatcttaactagggaagasccttaggtagccaagcagttggctgtgggaaagggaggacatggaattattggtggaaagaagtgaaaaatataaattgaagccttgtaatggattataa

SEQ ID NO: 9198 - DNA, 201 bp, Homo sapiens
aaatttatccatttcctctaggtttttctctttgtgagcatatagttattcatgtactctgataatctttttaaatttctgtggtatcagttcttatgtcycctttttcatatctgattatgtttacttggatttttttttggttagtctagatagtgatttatcaatttttaaaaatcttttcagggaactgagttttca

SEQ ID NO: 9199 - DNA, 201 bp, Homo sapiens
acagtgtaaaagctttcctatttctatacatcctctccagcacctgttgtctcctgactttttaatgatcgtcattctaactggtgtgagatggtatctcmttgtggttttgatttgcatttctctgatggccagtgatgatgagcattttttcatctgtctgttgactgcataaatgtcttcttttgagaagtatctgtt

SEQ ID NO: 9200 - DNA, 201 bp, Homo sapiens
ctgggtaaataacgaaatgaaggcagagataaagatgttctttgaaaccaatgagaacaaagacagagcatatcagaacctctgggacacatttaaagcastgtgtagaaggaaatttatagcactaaatgcccacaagagaaggcagagaagatctaaaatcgacacactaacatcacaattaaaagaactagagaagca

SEQ ID NO: 9201 - DNA, 201 bp, Homo sapiens
agaaagaaataaagcgtattcacttaggaaaagaggaagtcaaattgtctctgtttgcagatgacatgattgtatatttagaaaaccccatcatctaggcyccaaatctccttaagctgataagcaacttcagcaaagtctcaggataaaaaagcaatgtgcaaaaatcacaagcattcctatacaccaataacaaacaga

SEQ ID NO: 9202 - DNA, 201 bp, Homo sapiens
atatagccaggaatgggattgccgagtcaaatggtatttcaactcttggttctttgagaaatctccaaactgctctccaagtgtttagactaatttacatycccaccaacagtgtgtacatgtccccttttctccacagacttgccatctgtttttatcttttattttttaataatagctattctgggccgggtgtggtgg

SEQ ID NO: 9203 - DNA, 201 bp, Homo sapiens
actttcttcacagaattgtaaaaaactactttaaatttcatttggaaccaaaaaagagcctgcatagccaagacaatcataagcaaaaaaaaaaaaaaaaraaagaaagctgaaggcatcatgctacctgacttcaaactatactacaaggccacagtaaccaaaacagcatggtactggtaccaaaacagatatatagac

SEQ ID NO: 9204 - DNA, 201 bp, Homo sapiens
agaagaaatggttaaattcctggacacatacagctttcccaagactaaaccaggaagaagttgaatccctgaatagaccaataagaagttctgaaattgargcagtaattaatagcctaccaaaaaaaaaaaaaaagcccagggccagacagattcacagctaaattctaccagaggtataatcaggagctggtaccattt

SEQ ID NO: 9205 - DNA, 201 bp, Homo sapiens
gtaaccaaaacagcatggtactggtaccaaaacagatatatagaccaatggaacagaacaaaggcctcagaaataatgccacacatgtagaaccatctgawttttgacgaacctgacaaaaacaagcaatggggaaaggattccctatttaataaatggtgttgggaaaactggctagtcatatgcagaaaactgaaactg

SEQ ID NO: 9206 - DNA, 201 bp, Homo sapiens
caaatcctttttcaaaaccgtaaaaattataaaatatttagaaagaaatataacaagaagggacaatgcctttttcaaaaaaaattgtaattataattgtyggctacttataacaagacctgaaaaaagtattgagacacagcaatatcatttactatattaaaatatcaaattccaaagtatatttatatatatatacac

SEQ ID NO: 9207 - DNA, 201 bp, Homo sapiens
ggagattaaagagattagccatcgaagtaattaatagtaccaatggattataaatagttgaacaaaataaaatctatgagctctgctcatatgaaattaaragaaggaagaaaaggaggtggtggtgaggaaaggagagaaaaagggagaaggaagcagagggaggaaaaaggaaaagctatttctttcaatagaatggca

SEQ ID NO: 9208 - DNA, 201 bp, Homo sapiens
aagccccccacccctcaacaggccccagtgtgtgatgttcccctcccagtgtccatgttttctcattgttcaactcccacttatgagtgagaacatgcagygtttggttttctgctcctgtgttagtttgctgagaatggtggtttccagctttatccatgtccctgcaaaagacatgaactcatcctttttatgtctgca

SEQ ID NO: 9209 - DNA, 201 bp, Homo sapiens
accatgctctttgcttactgtagccttgtagtatagttggaagtcaggtagcgtgatgcctccagctttgttcttttggcttaggattgacttggcaatghgggctcttttttggtgccatatgaactttaaagtagttttttccaattctgtgaagaaagtcattggtagcttaatggggatggcattgaatctgtaaat

SEQ ID NO: 9210 - DNA, 201 bp, Homo sapiens
taggtattttattctctttgaagcaattgtgaatgggagttcactcatgatttggctctgtttgtctgttattggtgtataagaatgcttatgatttttgyacattgattttgtatcctgagactttactgaagttgcctatcagcttaaggagattttgggctgagatgatggggttttctagatatacaatcatgtcat

SEQ ID NO: 9211 - DNA, 201 bp, Homo sapiens
gtcatagatagctctgattattttgagatacatcccatcaatacctaatttattgagtttttagcatgacgagttgttgaattttgtcaaaggctttttcygcatctattgagattatcatatggtttttgtcttttgttctgtttatatgctggattacatttactgatttgcgtatgttgaaccagccttgcatcccag

SEQ ID NO: 9212 - DNA, 201 bp, Homo sapiens
tttgtgagcatatagttattcatgtactctgataatctttttaaatttctgtggtatcagttcttatgtctcctttttcatatctgattatgtttacttgkatttttttttggttagtctagatagtgatttatcaatttttaaaaatcttttcagggaactgagttttcatttggttgatccattgtattattattatta

SEQ ID NO: 9213 - DNA, 201 bp, Homo sapiens
gcacaagacagggatgccctctctcaccacgcctattcaacatactattggaagttctggcccgggcaatcaggcaggagaaggaaataaaaggtattcarttaggaaaagaggaagtcaaattatccctgtttgcagatgacatgattgtatatttataaaaccccatcgtctcagcccaaaatctccttaagctgataa

SEQ ID NO: 9214 - DNA, 201 bp, Homo sapiens
tatgctggattacatttactgatttgcgtatgttgaaccagccttgcatcccagggatgaagcccacttgatcatggtggataagctttttgatgtgctgytggattcggtttgccagtattttattgaggatttttgcatgaatgttcatcagggatattggtctaaaattctctttttttgttttgttgtgtctctgcc

SEQ ID NO: 9215 - DNA, 201 bp, Homo sapiens
atcacaattaaaagaactagagaagcaagagcgaacaaatccaaaagctagcagaagacaagaaataactaagatcagagcagaactgaaggagagacacraaaaacccttcaaaaaatcagtgaatccagagttggttttcttgaaaagatcaacaaaataaataggccactagccagactaataaaaaagaaaagagaa

SEQ ID NO: 9216 - DNA, 201 bp, Homo sapiens
gtgggcatttagtgctataaatttccctctacacactgctttgaatatgtcccagagattctggtatgttgtgtctttgttctcattggtttcaaagaacatctttatttctgccttcatttcattatgtacccagtagtcattcaggagcaggttgttcagtttccatgtccttgagcggttttgagtgagttccttaat

SEQ ID NO: 9217 - DNA, 201 bp, Homo sapiens
ccagttgatcgaattggctactgaggcttgtgcattcatcacatagttctcgtgccatggttttcagctccatcaggtcctttaaggacttctctgcattrgttattctagttagccattcatctaattttttttcaaggtttttaacttctttgccgtgggttcgaacttcctcctttagcttgcagtagtttgatcgtc

SEQ ID NO: 9218 - DNA, 201 bp, Homo sapiens
agtttctgccgagagatccgctattagtctgatgggcttccctttgtgggtaacgcgacctttctttctggctgcccttaatattttttccttcatttctmctttggtgaatctgacaattatgagtcttggagttgctgttctcgaggagtatctttgtggcattctctgtatttcctgaatttgaatgttggcctgcct

SEQ ID NO: 9219 - DNA, 201 bp, Homo sapiens
ctgagcctccagtgtccattataccactctgtatgcctttgtgtgcacatagcttagctgccacttataagtgagaacatgtggtatttggtttccgattygaattacttcacttagaataatggcctccagttccatccaagttgctgcaaaagacattatttcattactttttatggctgagtagtattccatgcatgt

SEQ ID NO: 9220 - DNA, 201 bp, Homo sapiens
ttgtagactactgagtttccttaaaacttctattttgaatttttggtcggaaaactctcatcatctcattagcatcagtcattgtttttttgcttttccarttgaagaagtcatggttccttgtttgctgttatttattggggatgtattcctgtatctttgcatttaaggattaattatttatttgtcttctttgtctgg

SEQ ID NO: 9221 - DNA, 201 bp, Homo sapiens
catgtgtaccatatcataaaccatatatattcatccacacatagatacacataattatataccataattgatattataccattgtttctggtgtgtgtgtrtgtatatatataaatatatatatacatacacacatatacatgtatatatgcatgtgtgtatatatatacatataactgtgtgtgtgtgtatatatatatg

SEQ ID NO: 9222 - DNA, 201 bp, Homo sapiens
gtatgtatatatatatatacatacacacacacacatacacacatatgtatgtgcatatataaataaaacttttatatatatacacacacaccaacatatcwacacacacacacacacacacacacacacacacatatatacacacatatatatactcaccacattttctttatccactcatcattgcttttggggtcttag

SEQ ID NO: 9223 - DNA, 201 bp, Homo sapiens
ggaaaactaaaaagttaggattataagttcatagcaagaaggtagaaaaagaagatgataaaatctgaaaactaaaagtagaaaaaagattaaaataagaraattatttttttaaagtagaggacatagaaataatatcagtggaataaaaagttgatagtttacaaagacttatgcatggaaatataatatatttagcaa

SEQ ID NO: 9224 - DNA, 201 bp, Homo sapiens
aagtgtcaacatgagatttggaggggacacatatgcacaccatattacttttccattaaatttttgtttggccactgttctggggattgtaagagatatgwtatattcatactacgttttgccttttacctaatttttatacactggtcatgttaaatgtgattctttgtccaaatgagatatatttcagggagccaagtg

SEQ ID NO: 9225 - DNA, 201 bp, Homo sapiens
attgagctagtaaaggctatgaaatgaaactagacatctaaatctggttaaatcttgtcattactgtcctcactccatcagtgatcttagagacagcggartggctcaagggccattacagcctctgcagatgaaggcccaaacatgttttccagtagcagggaacacaactgtcctcactccatcagtgaccttagagac

SEQ ID NO: 9226 - DNA, 201 bp, Homo sapiens
gatgtggtgggaatcaccacccctgcatctttcaagaccttgatggtggcagtaatctctgcaatttttgtaaggatgcgatattattttgatgtatgatwtttctaggtagaggcagttctaatggcttccatttggcctttcccaccataacagccctcactttaccagtcagggagccaatgtggaggttctgccagc

SEQ ID NO: 9227 - DNA, 201 bp, Homo sapiens
atgaacatcgatgcaaaaatcctcaataaaatactagcaaacagaatccagcagggtatcataaagcttatccaccattgctaagccggcttcatccctgkaatgcaaggctggttcaacatacacaaatcaataaatgtaatccatcatataaacagaaccaaagtcaagaaccacatgattgtgtcaatagatgcagaa

SEQ ID NO: 9228 - DNA, 201 bp, Homo sapiens
tgtattcttctcagcaccacatcgcacttattccaaaattgactacatagttggaagtaaagcactcctcagcaaatgtaaaagcaaagaaattataacaractgtctctcagaccacagtgcaatcaaattagaactcaggattgagaaactctttcaaaactgctcaactatagggaaactgaacaacctgctcctgaa

SEQ ID NO: 9229 - DNA, 201 bp, Homo sapiens
aataaaatgtacaatatattataaggcataattgaagaattaattttacaataatggatgacccaaatttataagtcgaaaagacatcccaggacaaattrggaattaataacatataaaaataacctggtgaaatttactggccttttaaaattattttaaatatacagaattctaggggcatcagactttaccctctcc

SEQ ID NO: 9230 - DNA, 201 bp, Homo sapiens
tcagatttaccaaggttgaaatgaaggaaaaaatgttaagggcagccagagagaaaggtcaggttacccacaaagggaagcccatcagactaacagcagayctctctgcagaagccctacaaaccagaagggagtgggggccaatattcaacattcttaaagaattttcaacccagaatttcatatccagccaaactaagc

SEQ ID NO: 9231 - DNA, 201 bp, Homo sapiens
ccccatagatgaatgaatgtcatcaaggatcccacatagggaaaatgagagtgtatttatcgaaacagttccagtaactgctgggcttgtgttttttttttgagacacggtctcactttcttgcccagactggagtgcagtggcccgatcttggctcactgcaacctccgcctcccgggctcaagtgattttcctgcctca

SEQ ID NO: 9232 - DNA, 201 bp, Homo sapiens
tatttgtgttacataattcagagattacattactggctttcatcttggtgtaagggtgttatgtagttatacaattttctttatctctggtgtgatacaaraagaggcagacagcttaacagagaaataaggtaaagagacacattcgaagccggccctctaaaaccaatgttatccaaggtactggatgcatgttcaagg

SEQ ID NO: 9233 - DNA, 201 bp, Homo sapiens
caattatagaaatgaacatttggtcaaagtaaaataaagctgggataaaggttgaaattaaggaagatactgtcacagaatgcagaacaaagacaagaaakagaaaatgatgagagactacacagaaatttaagtaataaacaagtggccatttaataaaatgtgggaagaaaaattaccaaggcagaaataaagacaaat

SEQ ID NO: 9234 - DNA, 201 bp, Homo sapiens
gggaagaaaaattaccaaggcagaaataaagacaaatacgtggagatgggattagtgtgtgaatagtcaagagtattcatgcactttttcttttaaaattktattttagatgtgaacttatttaaaaacaaagatatgtccgtacaacgtcaagaaggtatctttactaggagcattacaccaagtaaattcccaacaaaa

SEQ ID NO: 9235 - DNA, 201 bp, Homo sapiens
tacgtggagatgggattagtgtgtgaatagtcaagagtattcatgcactttttcttttaaaattttattttagatgtgaacttatttaaaaacaaagataygtccgtacaacgtcaagaaggtatctttactaggagcattacaccaagtaaattcccaacaaaagtgatcaatttatcaccctttgaaaataaaggtaaa

SEQ ID NO: 9236 - DNA, 201 bp, Homo sapiens
tttcttccagttggtatttgcttgatacgtttttttcatcatattatgtttaacttctttgtttctttgtgattttgctatgtctatcgtaagaaacttayaattgtatatactctttttaaaatcagcttgaattttaagttctggggtacatgtccagggtgtgcaggtttgttacataggtaaatgtgtgccattgtg

SEQ ID NO: 9237 - DNA, 201 bp, Homo sapiens
atataaaaattaacagaacagcttttatatgcacaagtaaaagatgtatttatatgcttatattttaactagacactgatttgcttatatcattaacatayagtaattaacatatattgtgaatctggaggttccaccatagatacagttctctagtgcttttaagagccttccttcttgtagtccagaaaaagatgaggt

SEQ ID NO: 9238 - DNA, 201 bp, Homo sapiens
aatacttgcagaaaagtgagacttcaaagtaattataatcattaagaatattgtgtaatgactttaaagttctctccttagtttatatgttcaatcacaartatgatttttacatgtcatgtgtataaagaaaacatgtatgtgcgtatattcatgtatattctccattgtcgttgattaattatatttttcatgtgttct

SEQ ID NO: 9239 - DNA, 201 bp, Homo sapiens
gtaattgctaatgattgggcatgaaagttcacacataggattttaacctggagctggtctcctcaatttgcacgtacacacagggctcctcagtttgcacrtacacacagggctcctcagtttgcgcgcgtgcacgcacacacacacacacacacacattcatacacacatgttcttatgtacacaaacatgcatatacat

SEQ ID NO: 9240 - DNA, 201 bp, Homo sapiens
gttaatgtgttgttgaatttggtttgatagtattttgttgagtatctttgcatctatgttcatcaaggatattggtcagtaatttttttttcttgtaatgyccttatctggttttggtattagggtagtagtggtctagtaaaccaaaattggaagtattccctcattttcaattttttagaacagtttaagaaagattgg

SEQ ID NO: 9241 - DNA, 201 bp, Homo sapiens
tggtctcctcaatttgcacgtacacacagggctcctcagtttgcacatacacacagggctcctcagtttgcgcgcgtgcacgcacacacacacacacacacacattcatacacacatgttcttatgtacacaaacatgcatatacatgcaaataaacatatttagaaatgaggaattctcatggacatcttcaattccagt

SEQ ID NO: 9242 - DNA, 201 bp, Homo sapiens
gaattggccctggagtgtaactgccagagaagcagtttgtcttctaaaaaaattactactgggagtcagtgaaattaaaagacaggcttatttcagacttygacaaactgaacataggtgtctctttggacccgcacagtaaaagggcaagtgccagagaggcagccgggatggagggcctggaagctaaggtgctatgaa

SEQ ID NO: 9243 - DNA, 201 bp, Homo sapiens
ataatgattcaggaaaagatgtagcccagtgcctgggggacaccgagcacaggctgagccttcagccacctgggaaggggaaagggaaacacgggtggccmcctggggctgatggaggaacaagggacccgctgggaggatcctgggtaaactcacctctgggcatctgccctgaacttgggctggcgtcacaaggaagtt

SEQ ID NO: 9244 - DNA, 201 bp, Homo sapiens
tccgtatcaactctcagaggcaaagagaagtggccccggcttggtggaggttggtggtgtggctcccacgggcattggcttacgttgtctggtttctctcrggcagatctgtgcatgggactgcagggcttcctcatcttccacagctttgggggcggcactggctctgggttcgtgtctctgctcatgaagcggctctcg

SEQ ID NO: 9245 - DNA, 201 bp, Homo sapiens; identical to SEQ ID NO: 792

SEQ ID NO: 9246 - DNA, 201 bp, Homo sapiens
aaaaaaaaaaagaggaaaaagaagggtaaaatctacaacagttacaccaacctggaatgttcattacatgttacataggaggattacagaccttagttgtwagatgttacaggtaggaggtgaaaccctccattctgtgtctaattattaagcctctcaacttgagtagaggaatttttctttcaattagtgttacatttg

SEQ ID NO: 9247 - DNA, 201 bp, Homo sapiens
agcagggcggggagggtgttgaggaaagcttccggaagaagtgacctctaagctgacccttgcagatttctgaagttcgacaagcagacaaagatggggawggaggttcctggtgcagggagcagcgtatgcaaagaccagagcatgcaagataactaagaggcacagagtgagagggtgacctggctctgcgaagttccc

SEQ ID NO: 9248 - DNA, 201 bp, Homo sapiens
tctggaggattatgaagatgtgggcatggattccgtggaagctgaggctgaagaaggcgaagaatagtgaggggagggtgcggcaggcaaccatccctctrtattccccaccataacgctaggagagctaattacctattaaaatttccgtattgcaaattagccgggcgtggtggcgggcgcttgtagtcccagctactg

SEQ ID NO: 9249 - DNA, 201 bp, Homo sapiens
tccttgaactctgcactctggtgagcctcctgcctcagcctcctgagtcgctgagactacagggggctaccacatctggctaatttaaataattttttatstcgctatgttgcccaggttgtccagctttcttttgacagctgtatgactttaaggaaaagatttgcgttgccttagcctcgatgttcttatctgtcatat

SEQ ID NO: 9250 - DNA, 201 bp, Homo sapiens
gtggtccctgtgggagacctggccaaagtgcagcgggcggtgtgcatgctgagcaacaccacggccatcacggaggcctgggcctgcctggaccataagtkcggccaagtgcgccttagtgcactggtacgtgggggagggcatggcagtgggggaattctccgaggcccgcgaggatctggcagctctggaggattatga

SEQ ID NO: 9251 - DNA, 201 bp, Homo sapiens
agggtgaggcagccgaatggcgtgaacccgggaggcggagtttgcagtgagccgagatcgcgccactgcactccagcctgggcgacagagcgagactccgktctcaggaaaataataataaaataaaaaataaaatttctgtattgcgatactgtctttctcctgtgttgtactttgagagattcctcctccagataaccc

SEQ ID NO: 9252 - DNA, 201 bp, Homo sapiens
aactctgcactctggtgagcctcctgcctcagcctcctgagtcgctgagactacagggggctaccacatctggctaatttaaataattttttatctcgctrtgttgcccaggttgtccagctttcttttgacagctgtatgactttaaggaaaagatttgcgttgccttagcctcgatgttcttatctgtcatatgcgggc

SEQ ID NO: 9253 - DNA, 201 bp, Homo sapiens
cagcaggctggctgagcgctctggttagtccatccgtttttcttctgtgtatttcttcaaaccagccttcctagacctctgcaacgtcttactgtgaagtrtgcgtggtgatttgtgcatagatctgtattgtctgcttttctctgcttcaaagtgtgatgcgtgttcattatggatggtctgaatccgtatcaactctca

SEQ ID NO: 9254 - DNA, 201 bp, Homo sapiens
cctccggggttcatgccattctcctgcttcagcctcccgagtagctgggactacaggtgcccgccatcgcgcctggctaacgttttttttttttttttttwaattttttagtagagccggggtttcaccgtgttagccaggatggtcttgatctcctgacctagtgatccgcccgcctcggcctcccaaagtgctgggatt

SEQ ID NO: 9255 - DNA, 201 bp, Homo sapiens
cagctttcttttgacagctgtatgactttaaggaaaagatttgcgttgccttagcctcgatgttcttatctgtcatatgcgggcagtggtcctaaggagcrtaggaagcagtgcttctagaggcaaaaaataggccaggtagtgatgcagggcaggggaggaggcaggtggctatagccatgcaggggttcacattcatcc

SEQ ID NO: 9256 - DNA, 201 bp, Homo sapiens
ttgcagtgagccaagatcaccactgtactccaacctgggcaacagagcgtgactgtctcaaaaaaaaaaaaaaaaaaaaaaaaagaggaaaaagaagggtwaaatctacaacagttacaccaacctggaatgttcattacatgttacataggaggattacagaccttagttgtaagatgttacaggtaggaggtgaaaccc

SEQ ID NO: 9257 - DNA, 201 bp, Homo sapiens
gtcaccacctcagcaggcgtttgtcctcctccggcatgatgctaccctagctgcccaaggttctagcctgtgtatgttattacatggatttttttacacayaaatacatagacttcaactcacttttctttttacaaagtatacaatataccttggatgtatttatatcccaagacagggttctcattctttttcatgtgt

SEQ ID NO: 9258 - DNA, 201 bp, Homo sapiens
agtcgatggacgccacactcgattggtcagcgcagccgcagactccgcccacatccccgggtcgcgctctaagtgaggcgccaagcggtctccgcctcagkgtctgaggctgcgaaaggggcgtaacgatgagcggttcctgccagaggtctggggaggataaaaagcaggaggaagaggcgacggcggcctgtggacgtc

SEQ ID NO: 9259 - DNA, 201 bp, Homo sapiens
ccctggagcatgagccaggatagtggccagtgtgtttgctctgtctgtcccagggcgccggtctctggcttcctcattgagctccaatccatatgtcaagyggctgaacttttgggacagtgggctctatggggcaggtacagaggccctggcaggtgccctgagcaaaagcagcagcatctgcggtaggtgctgggtctg

SEQ ID NO: 9260 - DNA, 201 bp, Homo sapiens; identical to SEQ ID NO: 777

SEQ ID NO: 9261 - DNA, 201 bp, Homo sapiens
atgatatgagaaagtcacaggtatgtgtcttctttttcccatgtggaatggccataacttgcctctgaacgcacacaacttcttgaatctgtctggccctytctcagccactttacaacaccttgacacagatcatctctctttttcatctcacgttgatgcaaaccatctttaagttgacagatttaaagtgattcatag

SEQ ID NO: 9262 - DNA, 201 bp, Homo sapiens
gagcccaggccctctgtgccgccctcacagtgaaccaggccatgcggaagatgcagctgtcagggaatggcctggaggagcaggcggcccagcaccttgcygaactcctgctggcccacacagacctgaagtccctggacctgagctacaaccagctgaatgaccaagcaggtaacgcctgcgcagggcaccatggccatg

SEQ ID NO: 9263 - DNA, 201 bp, Homo sapiens
tgccaagggagtgccccagagctgaacctgctgcacggtggcctggggccccaggtaccactggaaggacactgggtccaggcttacagggagaggccccrggagacaacagccatgggagtgcccctgagtctgtcccctgtactccccagcttctgcctgtgccaggcatgccctaccctcgacatctgagagacagat

SEQ ID NO: 9264 - DNA, 201 bp, Homo sapiens
aaaaaaaaaaaaaaaaaaaaaaaaacttgatatgggccgggcgcggtggctcacacctgtaatcccaatactttgggaggctgatgcaggcggatcacttmaagtgggaaaatcgcttgaacccaggaggcagaggttgcagtgagccaagatcacaccactgcactcaaggctgggtgacagagtgagaccctgtctcaa

SEQ ID NO: 9265 - DNA, 201 bp, Homo sapiens
ttgagctccaatccatatgtcaagtggctgaacttttgggacagtgggctctatggggcaggtacagaggccctggcaggtgccctgagcaaaagcagcarcatctgcggtaggtgctgggtctggggcaggtgggcaggcgtgagtcctccctttcctcagggatgtgcctccacccctgaaagctgggccatgtcacct

SEQ ID NO: 9266 - DNA, 201 bp, Homo sapiens
ctcatctctaccaaaaatacaaaaaattagccgggcatgatgccacgcacttatagctacttggaaggctgaggtgggaggatcacttgagcctaggaggyggaggttgcagtgagccaagattgcaccactgcactccaggctgggtgaccaagtgagaccctctctcaccaaaaaaaaaaaaaaaagcttgagtccagg

SEQ ID NO: 9267 - DNA, 201 bp, Homo sapiens
cagttgctgttaaagggacacttccactaaagcaggatccagatccagcctccaacacccagccctcaacccctaatcccagctgccctgcacctcccacyctccctacattccctttgctgggccctggcacacagagaacagcagcagctctgtccctgccctctggcctcacttcctggggtgggagtggaggtggtg

SEQ ID NO: 9268 - DNA, 201 bp, Homo sapiens
ccatgtcacctgggtcctgctggtgttgctggtggatagaggaggggcctcatcacaggagggggtatgtggggtggagttagaccctctgctgtgcagchgatgctggatacaagtcccttcctcatccaccctaccccaccactctccttccttgttggctggcacccattctcctgccctgccctgcacatgggagac

SEQ ID NO: 9269 - DNA, 201 bp, Homo sapiens
ggtgggagttcattgaagctgaatccaaatgctgtctctgccactgagaaaacggggtgacctatgaaagcagctcagtttccaatctgtgaaatggcccycacaagacctcataggcttggggctgtggtgagcatgaagtgaaatgcactcctgaagtgatcagcagagtgtgtgacccatgtaagtgctccatgcaca

SEQ ID NO: 9270 - DNA, 201 bp, Homo sapiens
gagggcttctgaagtgggtggtgatatcactgccagacataatcatcgatggggtggctgccccccaccacagcagtctctacagtaccaggaggtaggcrgttttaaccgcttgacacagaagctggtgggcacacagggagggggaggtcaggggcagaggggacccagccattgggagccagagccaccatgcaaccc

SEQ ID NO: 9271 - DNA, 201 bp, Homo sapiens
gttaacctgtaagtccttttcctctgcctcagacctggaggtttgggggatggcagaagaggggggaggggggtggtacctggctttgcatcccactggcygaggagtggctccgtcccccagatgtggacctgttggagaaccagctgggagtggcaggagcccaggccctctgtgccgccctcacagtgaaccaggcca

SEQ ID NO: 9272 - DNA, 201 bp, Homo sapiens
cactgagcctcagtcttctcctctgaaatggggatcacaggacttcctaccaggcaggggatatgtgaagactgaacataatgattcaggaaaagatgtascccagtgcctgggggacaccgagcacaggctgagccttcagccacctgggaaggggaaagggaaacacgggtggccacctggggctgatggaggaacaag

SEQ ID NO: 9273 - DNA, 201 bp, Homo sapiens
cttttcctctgcctcagacctggaggtttgggggatggcagaagaggggggaggggggtggtacctggctttgcatcccactggctgaggagtggctccgwcccccagatgtggacctgttggagaaccagctgggagtggcaggagcccaggccctctgtgccgccctcacagtgaaccaggccatgcggaagatgcagc

SEQ ID NO: 9274 - DNA, 201 bp, Homo sapiens
tgaaatggggatcacaggacttcctaccaggcaggggatatgtgaagactgaacataatgattcaggaaaagatgtagcccagtgcctgggggacaccgarcacaggctgagccttcagccacctgggaaggggaaagggaaacacgggtggccacctggggctgatggaggaacaagggacccgctgggaggatcctggg

SEQ ID NO: 9275 - DNA, 201 bp, Homo sapiens
tggaggtttgggggatggcagaagaggggggaggggggtggtacctggctttgcatcccactggctgaggagtggctccgtcccccagatgtggacctgtyggagaaccagctgggagtggcaggagcccaggccctctgtgccgccctcacagtgaaccaggccatgcggaagatgcagctgtcagggaatggcctggag

SEQ ID NO: 9276 - DNA, 201 bp, Homo sapiens
acttcctaccaggcaggggatatgtgaagactgaacataatgattcaggaaaagatgtagcccagtgcctgggggacaccgagcacaggctgagccttcasccacctgggaaggggaaagggaaacacgggtggccacctggggctgatggaggaacaagggacccgctgggaggatcctgggtaaactcacctctgggca

SEQ ID NO: 9277 - DNA, 201 bp, Homo sapiens
ggagcccaggccctctgtgccgccctcacagtgaaccaggccatgcggaagatgcagctgtcagggaatggcctggaggagcaggcggcccagcaccttgmcgaactcctgctggcccacacagacctgaagtccctggacctgagctacaaccagctgaatgaccaagcaggtaacgcctgcgcagggcaccatggccat

SEQ ID NO: 9278 - DNA, 201 bp, Homo sapiens
atccaccttgaacaaaaccaagttcctgacctcaagggacaatgttaacaacatcattctgagtaattattggcactgcaaaagaaacaaatagtttatgmttctagagaagaatggggaccccctgctttaaagaggtggctggggaggcctctgtgaggtgacatttaagctgaaatgtgcagggtgggaaggagtcag

SEQ ID NO: 9279 - DNA, 201 bp, Homo sapiens
ccccagcacctcacaccactctcaagctcaagccattagtcctggacactcccttcttttctgttggcagtctttggaaatgcagtttctctggcctggctttttttttttttttttgagacagagtctcgctttgccacccaggctggagtgcagtggtgcaatctcggctcactgcaagctccacctcccgggttcatg

SEQ ID NO: 9280 - DNA, 201 bp, Homo sapiens
cccagcacctcacaccactctcaagctcaagccattagtcctggacactcccttcttttctgttggcagtctttggaaatgcagtttctctggcctggctttttttttttttttttgagacagagtctcgctttgccacccaggctggagtgcagtggtgcaatctcggctcactgcaagctccacctcccgggttcatgc

SEQ ID NO: 9281 - DNA, 201 bp, Homo sapiens
gggctctatggggcaggtacagaggccctggcaggtgccctgagcaaaagcagcagcatctgcggtaggtgctgggtctggggcaggtgggcaggcgtgastcctccctttcctcagggatgtgcctccacccctgaaagctgggccatgtcacctgggtcctgctggtgttgctggtggatagaggaggggcctcatcac

SEQ ID NO: 9282 - DNA, 201 bp, Homo sapiens; identical to SEQ ID NO: 778

SEQ ID NO: 9283 - DNA, 201 bp, Homo sapiens
ggcccaacatcgaaggccccacctcctctctggccccacttcccactccagaccccctgaatgagacagaagctccagccatgcatcagagagccaatgcyctcagacaatcaccttcactagccagcacccacccccagcctgactagatccagcttcccccttacagactctcctgacccgagatacagctggtggtct

SEQ ID NO: 9284 - DNA, 201 bp, Homo sapiens
aaacctggcccacccagggcggaaaaccgcttaaaggcgttcttaaaccacaaacaatagcatgagcgatctgtgatttaaggacatgctcctgctgcagmtaaccaaccagagcccatccctttgtttcccataaggaatacttttagttaatctataatctatagaaacaatgcttatcactggcttgctgtcaataaa

SEQ ID NO: 9285 - DNA, 201 bp, Homo sapiens
cataaggaatacttttagttaatctataatctatagaaacaatgcttatcactggcttgctgtcaataaatatgtgggtaaatctgttcgaggctgtcagytctgaaggctgtgatacccctgatttcccactccacacctctatatttatgtgtgtttgtctttaattcctttagcaccgctgggttcaggtctccccga

SEQ ID NO: 9286 - DNA, 201 bp, Homo sapiens
agatttctgaagttcgacaagcagacaaagatggggatggaggttcctggtgcagggagcagcgtatgcaaagaccagagcatgcaagataactaagaggyacagagtgagagggtgacctggctctgcgaagttccccaggccctcctgaaaagctgcccccgccaccttccccagtgcagtgaggacaacacaagtcct

SEQ ID NO: 9287 - DNA, 201 bp, Homo sapiens
aaaccaagttcctgacctcaagggacaatgttaacaacatcattctgagtaattattggcactgcaaaagaaacaaatagtttatgcttctagagaagaayggggaccccctgctttaaagaggtggctggggaggcctctgtgaggtgacatttaagctgaaatgtgcagggtgggaaggagtcagccatggcaagatca

SEQ ID NO: 9288 - DNA, 201 bp, Homo sapiens
aaccaagttcctgacctcaagggacaatgttaacaacatcattctgagtaattattggcactgcaaaagaaacaaatagtttatgcttctagagaagaatrgggaccccctgctttaaagaggtggctggggaggcctctgtgaggtgacatttaagctgaaatgtgcagggtgggaaggagtcagccatggcaagatcag

SEQ ID NO: 9289 - DNA, 201 bp, Homo sapiens
tgacctcaagggacaatgttaacaacatcattctgagtaattattggcactgcaaaagaaacaaatagtttatgcttctagagaagaatggggaccccctrctttaaagaggtggctggggaggcctctgtgaggtgacatttaagctgaaatgtgcagggtgggaaggagtcagccatggcaagatcagagggagagcat

SEQ ID NO: 9290 - DNA, 201 bp, Homo sapiens
aattattggcactgcaaaagaaacaaatagtttatgcttctagagaagaatggggaccccctgctttaaagaggtggctggggaggcctctgtgaggtgayatttaagctgaaatgtgcagggtgggaaggagtcagccatggcaagatcagagggagagcatttcaagcagaggaacagtgagcatgcgggcctgtttcc

SEQ ID NO: 9291 - DNA, 201 bp, Homo sapiens
cccctgctttaaagaggtggctggggaggcctctgtgaggtgacatttaagctgaaatgtgcagggtgggaaggagtcagccatggcaagatcagagggasagcatttcaagcagaggaacagtgagcatgcgggcctgtttcccagactggcagacagcagtgtgcctaggctagggagccagggaagcgtggccaggct

SEQ ID NO: 9292 - DNA, 201 bp, Homo sapiens
cacctcttcccttgcccctccagcctggccaaaagctcttctctcttaccctaccacatagaccacgatcccaaactgcagcagcctctgcagggcgcccmcccgccagttcctggtcatcacatacttctccgtcttataatccagaagcccccagcctgtcgtagcccctggggagcccatgctgccagctcctgctag

SEQ ID NO: 9293 - DNA, 201 bp, Homo sapiens
gcacttctacctgcctctcctcaaatggtccaataatagtaacaatcacctgtgaccctgggtgaggcatgcagatgttgaccctggacctgctgaaccawactcttaggggaatgccggtgaatctgcattttaatggatgccccaggagagctcttttctgcagcatttcagaagctctcatctggctcaagcagctta

SEQ ID NO: 9294 - DNA, 201 bp, Homo sapiens
tcttcccttgcccctccagcctggccaaaagctcttctctcttaccctaccacatagaccacgatcccaaactgcagcagcctctgcagggcgcccacccrccagttcctggtcatcacatacttctccgtcttataatccagaagcccccagcctgtcgtagcccctggggagcccatgctgccagctcctgctagctgc

SEQ ID NO: 9295 - DNA, 201 bp, Homo sapiens
cctcaaatggtccaataatagtaacaatcacctgtgaccctgggtgaggcatgcagatgttgaccctggacctgctgaaccaaactcttaggggaatgccrgtgaatctgcattttaatggatgccccaggagagctcttttctgcagcatttcagaagctctcatctggctcaagcagcttagagggagtggggtggcac

SEQ ID NO: 9296 - DNA, 201 bp, Homo sapiens
ctcttctctcttaccctaccacatagaccacgatcccaaactgcagcagcctctgcagggcgcccacccgccagttcctggtcatcacatacttctccgtyttataatccagaagcccccagcctgtcgtagcccctggggagcccatgctgccagctcctgctagctgcgggcacatgagtcagcatggcagctgcagcc

SEQ ID NO: 9297 - DNA, 201 bp, Homo sapiens
tggtctgaatccgtatcaactctcagaggcaaagagaagtggccccggcttggtggaggttggtggtgtggctcccacgggcattggcttacgttgtctgrtttctctcaggcagatctgtgcatgggactgcagggcttcctcatcttccacagctttgggggcggcactggctctgggttcgtgtctctgctcatgaag

SEQ ID NO: 9298 - DNA, 201 bp, Homo sapiens; identical to SEQ ID NO: 793

SEQ ID NO: 9299 - DNA, 201 bp, Homo sapiens
gatatgagaaagtcacaggtatgtgtcttctttttcccatgtggaatggccataacttgcctctgaacgcacacaacttcttgaatctgtctggccctctytcagccactttacaacaccttgacacagatcatctctctttttcatctcacgttgatgcaaaccatctttaagttgacagatttaaagtgattcatagaa

SEQ ID NO: 9300 - DNA, 201 bp, Homo sapiens
gatccatggcaatggtagcacctaccgcataggatggctgcaagggtcacacagaacaagtattggcagttgcaggggtgtgtggaagaaagaatcttccygcccttgagctgttcagcaaaaacagggcctccccacaaagtgggggattactgtctgaccctgccagccctagaagtgtctgagtaaagaggaaagcac

SEQ ID NO: 9301 - DNA, 201 bp, Homo sapiens
ttgttggctggcacccattctcctgccctgccctgcacatgggagactccccagtgcctgaatgcagagtggaaagtcctgcaacacagagagttgggggyggggaagttcaagaaaggggtgggcaaggtgggagttcattgaagctgaatccaaatgctgtctctgccactgagaaaacggggtgacctatgaaagcag

SEQ ID NO: 9302 - DNA, 201 bp, Homo sapiens
tgcactcctgaagtgatcagcagagtgtgtgacccatgtaagtgctccatgcacagtcacctgggctattattgccaatcctggcaatggggcagtgaggrcttctgaagtgggtggtgatatcactgccagacataatcatcgatggggtggctgccccccaccacagcagtctctacagtaccaggaggtaggcggttt

SEQ ID NO: 9303 - DNA, 201 bp, Homo sapiens
tagctgggcacagtggcgggcacctgtaatcccagctactcagggggtgagcaggagaactgcttgaacccaggaggcggaggttgcagtgagccgagatygtgccattgaactccagccttggggacaagagcaagactccatctcaaaaaaacaaacaaacaaaaagagtaagcaatcctttgtgcatatttccaacta

SEQ ID NO: 9304 - DNA, 201 bp, Homo sapiens; identical to SEQ ID NO: 785

SEQ ID NO: 9305 - DNA, 201 bp, Homo sapiens; identical to SEQ ID NO: 786

SEQ ID NO: 9306 - DNA, 201 bp, Homo sapiens; identical to SEQ ID NO: 787

SEQ ID NO: 9307 - DNA, 201 bp, Homo sapiens; identical to SEQ ID NO: 788

SEQ ID NO: 9308 - DNA, 201 bp, Homo sapiens
gaggctgaggcaggaggatggcgtgaacccgggaggcagagcttgcagtgagtcgagattgcaccactgcactccagcctgggcaacagagcgagactacmtctcaaaaaaaaaaaaaagaaagaaaaagaaaaaagaaaagaaaacaaaggctgagatagctttaggtgtctggagcctcacaggcagcaagtgatgcag

SEQ ID NO: 9309 - DNA, 201 bp, Homo sapiens
gtgagtcgagattgcaccactgcactccagcctgggcaacagagcgagactacatctcaaaaaaaaaaaaaagaaagaaaaagaaaaaagaaaagaaaacmaaggctgagatagctttaggtgtctggagcctcacaggcagcaagtgatgcagagagaaatcagagattatctgactgcaggtcctggtctgtcctccac

SEQ ID NO: 9310 - DNA, 201 bp, Homo sapiens
gatttcccactccacacctctatatttatgtgtgtttgtctttaattcctttagcaccgctgggttcaggtctccccgaccaagctctcggcaggctcacrcctgtaatcccagcactttgagaggccgaggctggtgggtcacctgaggccaggagttcgagaccagcctggccaacatggtgaaaccccgtctctactt

SEQ ID NO: 9311 - DNA, 201 bp, Homo sapiens
ttgccacccaggctggagtgcagtggtgcaatctcggctcactgcaagctccacctcccgggttcatgccattctcctgccccagcctcccgagtagctgsgactacaggcgcccaccaccatgcccggctaattttttgtatttttaatagagatggggtttcaccgtgttagccaggatactctcaatctcgtgatcca

SEQ ID NO: 9312 - DNA, 201 bp, Homo sapiens
ggctcagtgacacatgcctgtaatcccagcactttgagaagcccaggtgagaagattgcttgaacccaggagttcaagaccagcctgggcaacatagtgcraccctgtctctacaaaagatataaaaattatccaggtatggttgtgcatgcctgcagtcatagctaatggggaggtggaggtgggaggatcgcttgagac

SEQ ID NO: 9313 - DNA, 201 bp, Homo sapiens
tatcgcctagctctccccaaccccgtcccaatctgcccccttccactccagcccctaaacagcccaaccctcaacttcaacccagcaggaccaagccccaycccccacctcttcccttgcccctccagcctggccaaaagctcttctctcttaccctaccacatagaccacgatcccaaactgcagcagcctctgcagggc

SEQ ID NO: 9314 - DNA, 201 bp, Homo sapiens; identical to SEQ ID NO: 794

SEQ ID NO: 9315 - DNA, 201 bp, Homo sapiens
gtgatgtgatctcggctcactgcagcctctgcctccccggttcaagcaattctcctgactcagcctcctgagtagctgggattacaggcgcccgccaccaygcctggctatttttttttttttttttgagacagagtcttgctctgtcgcccaggctggagtgcagtggcacgatctcagctcactgcaagctccgcctcc

SEQ ID NO: 9316 - DNA, 201 bp, Homo sapiens
ctcggctcactgcagcctctgcctccccggttcaagcaattctcctgactcagcctcctgagtagctgggattacaggcgcccgccaccatgcctggctatttttttttttttttttgagacagagtcttgctctgtcgcccaggctggagtgcagtggcacgatctcagctcactgcaagctccgcctccggggttcatg

SEQ ID NO: 9317 - DNA, 201 bp, Homo sapiens
tagctgggattacaggcgcccgccaccatgcctggctatttttttttttttttttgagacagagtcttgctctgtcgcccaggctggagtgcagtggcacratctcagctcactgcaagctccgcctccggggttcatgccattctcctgcttcagcctcccgagtagctgggactacaggtgcccgccatcgcgcctggc

SEQ ID NO: 9318 - DNA, 201 bp, Homo sapiens
tgatttggtgctcctttagctatgcttacagtcagttgtctaccaaaagaaaagtaccatgtatttggaagccaaataacagaatgtcaggctcgaagatmtgttgtgatgactaggctaaatgcctcaccacacctgtgttggtcaactttgtgccctatggttagttaagagcccctgtctacagtggtttcccacatt

SEQ ID NO: 9319 - DNA, 201 bp, Homo sapiens
cattttttgtgttataaatagtggtttttacactttacatcatcttggtcacctgttgtcactgaattttgggcaacactaatatttctgtaaagattttwaaatatattgtgcagtgtttactgtgaagaccaaaggcaggtctttgccctttctccaaaccaagcagagacctctgcctcacacacaatcagactgatg

SEQ ID NO: 9320 - DNA, 201 bp, Homo sapiens
ggtttccaagctccttgatctgagtgacggaaacccctttgagtttggtgatgatggaaaactggggttccaggtcccgctcctggtagccttttttggcsaggagagcccacctggggaggagaagtcgggcagtgtggtgtgtccccagcgtgtagtgacaggggcggagctgagccctacatgctcagttctcccccc

SEQ ID NO: 9321 - DNA, 201 bp, Homo sapiens
atcattttttgtgttataaatagtggtttttacactttacatcatcttggtcacctgttgtcactgaattttgggcaacactaatatttctgtaaagattwttaaatatattgtgcagtgtttactgtgaagaccaaaggcaggtctttgccctttctccaaaccaagcagagacctctgcctcacacacaatcagactga

SEQ ID NO: 9322 - DNA, 201 bp, Homo sapiens
aagaccaaaggcaggtctttgccctttctccaaaccaagcagagacctctgcctcacacacaatcagactgatgatttggtgctcctttagctatgcttayagtcagttgtctaccaaaagaaaagtaccatgtatttggaagccaaataacagaatgtcaggctcgaagatctgttgtgatgactaggctaaatgcctca

SEQ ID NO: 9323 - DNA, 201 bp, Homo sapiens
caccaaaggctgtcccgccctgaaatgcaatcagagctgggttttcccaatccacaggtaaaactaatataatggatgtatagaatttagaactacttccrgttttttccctggggaaaatattcacaaaacatttgtggtctgcaatcaggttaaaagacatagtgtgccatttgtcatcagacaggtagaggcctgact

SEQ ID NO: 9324 - DNA, 201 bp, Homo sapiens
aagctccgcctccggggttcatgccattctcctgcttcagcctcccgagtagctgggactacaggtgcccgccatcgcgcctggctaacgttttttttttwttttttttaattttttagtagagccggggtttcaccgtgttagccaggatggtcttgatctcctgacctagtgatccgcccgcctcggcctcccaaagtg

SEQ ID NO: 9325 - DNA, 201 bp, Homo sapiens
ccggggttcatgccattctcctgcttcagcctcccgagtagctgggactacaggtgcccgccatcgcgcctggctaacgtttttttttttttttttttaawtttttagtagagccggggtttcaccgtgttagccaggatggtcttgatctcctgacctagtgatccgcccgcctcggcctcccaaagtgctgggattaca

SEQ ID NO: 9326 - DNA, 201 bp, Homo sapiens
agggttgggggaattcctgagggtagaagcaggcgctgcaggctctcatgatgcctggtgtgaaagttcagcttggctgctgcgtggtgtgcaccgagcaktaagggaggaggcgagaggggcatctagggaccctctaggaggccatagtctcatgcatggcatggcatgggtagtggtgaaaaatcttggaagggacag

SEQ ID NO: 9327 - DNA, 201 bp, Homo sapiens
tagagccggggtttcaccgtgttagccaggatggtcttgatctcctgacctagtgatccgcccgcctcggcctcccaaagtgctgggattacaggcatgarccaccacgcctgaccaattttttgtatttttagtagagatgaggtttcaccgtgttgggcaggctggtcttgaactcctgacctcaggtgatccacccgc

SEQ ID NO: 9328 - DNA, 201 bp, Homo sapiens
gtggctcatgcctgtaatcccaacactttgggaggctgaggtcggtggatcacctgagcttaggagttcgagaccagcctaggcaacatggtgaaacctcwtctctaccaaaaatacaaaaaattagccgggcatgatgccacgcacttatagctacttggaaggctgaggtgggaggatcacttgagcctaggaggcgga

SEQ ID NO: 9329 - DNA, 201 bp, Homo sapiens
atttccaactacggacatgggatgtctccagcaactgtgctaggaccagccaccagggctcaggggacagctgtctgcacaacgaccctccagcccaggargcacgtaaatgttggacttgcctaaagatgtcactgtggaggtaaactttcaggactatgtcctgagtcccaatagttcaaacaaaattcacagctggag

SEQ ID NO: 9330 - DNA, 201 bp, Homo sapiens
gggtgagcaggagaactgcttgaacccaggaggcggaggttgcagtgagccgagatcgtgccattgaactccagccttggggacaagagcaagactccatstcaaaaaaacaaacaaacaaaaagagtaagcaatcctttgtgcatatttccaactacggacatgggatgtctccagcaactgtgctaggaccagccacca

SEQ ID NO: 9331 - DNA, 201 bp, Homo sapiens
caagctccttgatctgagtgacggaaacccctttgagtttggtgatgatggaaaactggggttccaggtcccgctcctggtagccttttttggcgaggagmgcccacctggggaggagaagtcgggcagtgtggtgtgtccccagcgtgtagtgacaggggcggagctgagccctacatgctcagttctccccccacaccc

SEQ ID NO: 9332 - DNA, 201 bp, Homo sapiens
ccattgtacttcactctaacctgggcgacagagcaaaacccatctcaaaaaaaaaaaaaaaaaaaaagctgggtgcggtcagtggctcacgcctataatcycagcattctgggaggccaaggtaggcggatcaccggaggtcaggagttcaagaccagcctggccaacatggtgaaaccctatctctactaaaaatacaaa

SEQ ID NO: 9333 - DNA, 201 bp, Homo sapiens
ttctcctctgaaatggggatcacaggacttcctaccaggcaggggatatgtgaagactgaacataatgattcaggaaaagatgtagcccagtgcctggggsacaccgagcacaggctgagccttcagccacctgggaaggggaaagggaaacacgggtggccacctggggctgatggaggaacaagggacccgctgggagg

SEQ ID NO: 9334 - DNA, 201 bp, Homo sapiens
acagagcaaaacccatctcaaaaaaaaaaaaaaaaaaaaagctgggtgcggtcagtggctcacgcctataatcccagcattctgggaggccaaggtaggcrgatcaccggaggtcaggagttcaagaccagcctggccaacatggtgaaaccctatctctactaaaaatacaaaaattagtcaggcatggtggcggttgcc

SEQ ID NO: 9335 - DNA, 201 bp, Homo sapiens
ggcgcccaccaccatgcccggctaattttttgtatttttaatagagatggggtttcaccgtgttagccaggatactctcaatctcgtgatccacctgcctyggcctcccaaagtgctgggattacaggcgtgagccagcacgtccaaccctggcctggcttcttgagtggcccctttttccaccccaaaacctcctacaca

SEQ ID NO: 9336 - DNA, 201 bp, Homo sapiens
ataatcccagcattctgggaggccaaggtaggcggatcaccggaggtcaggagttcaagaccagcctggccaacatggtgaaaccctatctctactaaaamtacaaaaattagtcaggcatggtggcggttgcctgtaattccagctactctggaggctgaggcaggagaattgcttgaacccaggaggtggaggttgcag

SEQ ID NO: 9337 - DNA, 201 bp, Homo sapiens
cctagctctccccaaccccgtcccaatctgcccccttccactccagcccctaaacagcccaaccctcaacttcaacccagcaggaccaagccccacccccsacctcttcccttgcccctccagcctggccaaaagctcttctctcttaccctaccacatagaccacgatcccaaactgcagcagcctctgcagggcgccca

SEQ ID NO: 9338 - DNA, 201 bp, Homo sapiens
catacttctccgtcttataatccagaagcccccagcctgtcgtagcccctggggagcccatgctgccagctcctgctagctgcgggcacatgagtcagcayggcagctgcagccgcagctgaacaggaggcaaagcagggcccgagccaggccaggccagttgctgttaaagggacacttccactaaagcaggatccagat

SEQ ID NO: 9339 - DNA, 201 bp, Homo sapiens
ccctttcctcagggatgtgcctccacccctgaaagctgggccatgtcacctgggtcctgctggtgttgctggtggatagaggaggggcctcatcacaggasggggtatgtggggtggagttagaccctctgctgtgcagctgatgctggatacaagtcccttcctcatccaccctaccccaccactctccttccttgttgg

SEQ ID NO: 9340 - DNA, 201 bp, Homo sapiens
tgctccatgcacagtcacctgggctattattgccaatcctggcaatggggcagtgagggcttctgaagtgggtggtgatatcactgccagacataatcatygatggggtggctgccccccaccacagcagtctctacagtaccaggaggtaggcggttttaaccgcttgacacagaagctggtgggcacacagggaggggg

SEQ ID NO: 9341 - DNA, 201 bp, Homo sapiens
ctccggggttcatgccattctcctgcttcagcctcccgagtagctgggactacaggtgcccgccatcgcgcctggctaacgtttttttttttttttttttwattttttagtagagccggggtttcaccgtgttagccaggatggtcttgatctcctgacctagtgatccgcccgcctcggcctcccaaagtgctgggatta

SEQ ID NO: 9342 - DNA, 201 bp, Homo sapiens
ttacaggcatgagccaccacgcctgaccaattttttgtatttttagtagagatgaggtttcaccgtgttgggcaggctggtcttgaactcctgacctcagktgatccacccgccttggcctcccaaaatgctgggattacaggtgtgagccaccgcacccagccaaccatacattctttaacaaccatttgcttttttttt

SEQ ID NO: 9343 - DNA, 201 bp, Homo sapiens
acctgaggtcttgctggatccatagcattgtgcccatcttctgctttctgtgccaagggagtgccccagagctgaacctgctgcacggtggcctggggccscaggtaccactggaaggacactgggtccaggcttacagggagaggccccgggagacaacagccatgggagtgcccctgagtctgtcccctgtactcccca

SEQ ID NO: 9344 - DNA, 201 bp, Homo sapiens
atgagccaccacgcctgaccaattttttgtatttttagtagagatgaggtttcaccgtgttgggcaggctggtcttgaactcctgacctcaggtgatccayccgccttggcctcccaaaatgctgggattacaggtgtgagccaccgcacccagccaaccatacattctttaacaaccatttgctttttttttgtttgttt

SEQ ID NO: 9345 - DNA, 201 bp, Homo sapiens
accgtgttgggcaggctggtcttgaactcctgacctcaggtgatccacccgccttggcctcccaaaatgctgggattacaggtgtgagccaccgcacccasccaaccatacattctttaacaaccatttgctttttttttgtttgtttgtttgagatggagtctcgccctgtcacccaggctggagtacaatggaacacac

SEQ ID NO: 9346 - DNA, 201 bp, Homo sapiens
gctggaattacaggcatgcgccaccaagcctggctaatttttgtatttttggtagacacagggtttcaccatgttggctaagctggtctcgagctcctgamctcaagtgatccaaccgccttggcctcccgaagtgctggaatcacaggcgtgagtcactgcacccagcttcggatatgctattttcgaagagtcttttcc

SEQ ID NO: 9347 - DNA, 201 bp, Homo sapiens
ccgagatcgcgccactgcactccagcctgggcgacagagcgagactccggtctcaggaaaataataataaaataaaaaataaaatttctgtattgcgatactgtctttctcctgtgttgtactttgagagattcctcctccagataaccctccctgaagtccacctccccagtacgagagtgagtgcgggctctggttttt

SEQ ID NO: 9348 - DNA, 201 bp, Homo sapiens
cgagatcgcgccactgcactccagcctgggcgacagagcgagactccggtctcaggaaaataataataaaataaaaaataaaatttctgtattgcgatactgtctttctcctgtgttgtactttgagagattcctcctccagataaccctccctgaagtccacctccccagtacgagagtgagtgcgggctctggtttttg

SEQ ID NO: 9349 - DNA, 201 bp, Homo sapiens
agatcgcgccactgcactccagcctgggcgacagagcgagactccggtctcaggaaaataataataaaataaaaaataaaatttctgtattgcgatactgtctttctcctgtgttgtactttgagagattcctcctccagataaccctccctgaagtccacctccccagtacgagagtgagtgcgggctctggtttttgtc

SEQ ID NO: 9350 - DNA, 201 bp, Homo sapiens
atggcaatggtagcacctaccgcataggatggctgcaagggtcacacagaacaagtattggcagttgcaggggtgtgtggaagaaagaatcttcctgcccytgagctgttcagcaaaaacagggcctccccacaaagtgggggattactgtctgaccctgccagccctagaagtgtctgagtaaagaggaaagcacatgta

SEQ ID NO: 9351 - DNA, 201 bp, Homo sapiens
cacaaacagacacatgtacatgagggaggtgggtggggactggaaatcgacaggcccagcaaggccatttttttcctccaagagatctgtgggagggcccmactcccttgagaggtgaaggagcttggatctgtgcgtccccacttgatccatggcaatggtagcacctaccgcataggatggctgcaagggtcacacaga

SEQ ID NO: 9352 - DNA, 201 bp, Homo sapiens
tgggaggaaagtgtggacaccgtcatgggcagggttgggggaattcctgagggtagaagcaggcgctgcaggctctcatgatgcctggtgtgaaagttcascttggctgctgcgtggtgtgcaccgagcagtaagggaggaggcgagaggggcatctagggaccctctaggaggccatagtctcatgcatggcatggcatg

SEQ ID NO: 9353 - DNA, 201 bp, Homo sapiens
atggtggcggttgcctgtaattccagctactctggaggctgaggcaggagaattgcttgaacccaggaggtggaggttgcagtgagccgagattgtgccaytgcactccagcctgaatgacagagcaagactccatctcaaaaaaaaaaaaaaaaaaaaaaaaaaaaaaaaaacttgatatgggccgggcgcggtggctca

SEQ ID NO: 9354 - DNA, 201 bp, Homo sapiens
gagggctggccagatggtgctgggagtggcagccattaggattgggaggaaagtgtggacaccgtcatgggcagggttgggggaattcctgagggtagaascaggcgctgcaggctctcatgatgcctggtgtgaaagttcagcttggctgctgcgtggtgtgcaccgagcagtaagggaggaggcgagaggggcatctag

SEQ ID NO: 9355 - DNA, 201 bp, Homo sapiens
ggcggttgcctgtaattccagctactctggaggctgaggcaggagaattgcttgaacccaggaggtggaggttgcagtgagccgagattgtgccactgcaytccagcctgaatgacagagcaagactccatctcaaaaaaaaaaaaaaaaaaaaaaaaaaaaaaaaaacttgatatgggccgggcgcggtggctcacacct

SEQ ID NO: 9356 - DNA, 201 bp, Homo sapiens
tgttgactggaaaggccggaagccggcagcctggtttatgagggaagggatgttggccccatcaagtcattaaccctgtccccctgtaaggcagactgaascagagatgggaggctggcagtggttctggccatttttgagaccaggaagccttgtgcccatgtccatctcttgagacaagtctcttgtctcaaccaaaat

SEQ ID NO: 9357 - DNA, 201 bp, Homo sapiens
gaggctgaggcaggagaattgcttgaacccaggaggtggaggttgcagtgagccgagattgtgccactgcactccagcctgaatgacagagcaagactccwtctcaaaaaaaaaaaaaaaaaaaaaaaaaaaaaaaaaacttgatatgggccgggcgcggtggctcacacctgtaatcccaatactttgggaggctgatgc

SEQ ID NO: 9358 - DNA, 201 bp, Homo sapiens
gggagttcattgaagctgaatccaaatgctgtctctgccactgagaaaacggggtgacctatgaaagcagctcagtttccaatctgtgaaatggcccccamaagacctcataggcttggggctgtggtgagcatgaagtgaaatgcactcctgaagtgatcagcagagtgtgtgacccatgtaagtgctccatgcacagtc

SEQ ID NO: 9359 - DNA, 201 bp, Homo sapiens
ggcctggctgggctcgtgttgactggaaaggccggaagccggcagcctggtttatgagggaagggatgttggccccatcaagtcattaaccctgtcccccygtaaggcagactgaagcagagatgggaggctggcagtggttctggccatttttgagaccaggaagccttgtgcccatgtccatctcttgagacaagtctc

SEQ ID NO: 9360 - DNA, 201 bp, Homo sapiens
cctgggggacaccgagcacaggctgagccttcagccacctgggaaggggaaagggaaacacgggtggccacctggggctgatggaggaacaagggacccgytgggaggatcctgggtaaactcacctctgggcatctgccctgaacttgggctggcgtcacaaggaagttggtcaccaagaagaacacgttctctccctag

SEQ ID NO: 9361 - DNA, 201 bp, Homo sapiens
ggctgaggcaggagaattgcttgaacccaggaggtggaggttgcagtgagccgagattgtgccactgcactccagcctgaatgacagagcaagactccatytcaaaaaaaaaaaaaaaaaaaaaaaaaaaaaaaaaacttgatatgggccgggcgcggtggctcacacctgtaatcccaatactttgggaggctgatgcag

SEQ ID NO: 9362 - DNA, 201 bp, Homo sapiens
tctcattgcgcgctgctgtatgtgctgggcactgacttagccaccagggatccaccttgaacaaaaccaagttcctgacctcaagggacaatgttaacaayatcattctgagtaattattggcactgcaaaagaaacaaatagtttatgcttctagagaagaatggggaccccctgctttaaagaggtggctggggaggcc

SEQ ID NO: 9363 - DNA, 201 bp, Homo sapiens
aggttggcctggctgggctcgtgttgactggaaaggccggaagccggcagcctggtttatgagggaagggatgttggccccatcaagtcattaaccctgtmcccctgtaaggcagactgaagcagagatgggaggctggcagtggttctggccatttttgagaccaggaagccttgtgcccatgtccatctcttgagacaa

SEQ ID NO: 9364 - DNA, 201 bp, Homo sapiens
gggagacaaaggttgcagtgagccgagattgcaccactgcactccagcctgggcaacagagctagaccctgtctcaacaacaacaacaaagaaggaggagraggaggaagaaggagaagaaaagaaaaaaaaaagtcgtcaaaggatattaattgtcgatagataacagataatgccaaaaaatatagaagcaattcttaa

SEQ ID NO: 9365 - DNA, 201 bp, Homo sapiens
tgcagtgagccgagattgcaccactgcactccagcctgggcaacagagctagaccctgtctcaacaacaacaacaaagaaggaggagaaggaggaagaagragaagaaaagaaaaaaaaaagtcgtcaaaggatattaattgtcgatagataacagataatgccaaaaaatatagaagcaattcttaaaacacagtgttgg

SEQ ID NO: 9366 - DNA, 201 bp, Homo sapiens
ggcctgggcctgcctggaccataagttcggccaagtgcgccttagtgcactggtacgtgggggagggcatggcagtgggggaattctccgaggcccgcgargatctggcagctctggaggattatgaagatgtgggcatggattccgtggaagctgaggctgaagaaggcgaagaatagtgaggggagggtgcggcaggca

SEQ ID NO: 9367 - DNA, 201 bp, Homo sapiens
  misc_feature (1)...(201): n = A,T,C or G, or insertion/deletion polymorphism (see Tables 1-2)
acaagagtgtctgtagccacgggtgccagtccagcaggctggctgagcgctctggttagtccatccgtttttcttctgtgtatttcttcaaaccagccttnctagacctctgcaacgtcttactgtgaagtgtgcgtggtgatttgtgcatagatctgtattgtctgcttttctctgcttcaaagtgtgatgcgtgttcat

SEQ ID NO: 9368 - DNA, 201 bp, Homo sapiens
aatgtgcagggtgggaaggagtcagccatggcaagatcagagggagagcatttcaagcagaggaacagtgagcatgcgggcctgtttcccagactggcagrcagcagtgtgcctaggctagggagccagggaagcgtggccaggctgtggggtggagagggcagagggctgcagggctgtaggccgtggcaaaaagggtat

SEQ ID NO: 9369 - DNA, 201 bp, Homo sapiens; identical to SEQ ID NO: 780

SEQ ID NO: 9370 - DNA, 201 bp, Homo sapiens; identical to SEQ ID NO: 781

SEQ ID NO: 9371 - DNA, 201 bp, Homo sapiens; identical to SEQ ID NO: 782

SEQ ID NO: 9372 - DNA, 201 bp, Homo sapiens
agttaagagcccctgtctacagtggtttcccacattaggcaaagctatagatcccacatttataagtctcaatgagttctgaaggtgtttgaggagttgcmagttccaggatcattccagattgaaatgatatgagaaagtcacaggtatgtgtcttctttttcccatgtggaatggccataacttgcctctgaacgcaca

SEQ ID NO: 9373 - DNA, 201 bp, Homo sapiens; identical to SEQ ID NO: 783

SEQ ID NO: 9374 - DNA, 201 bp, Homo sapiens; identical to SEQ ID NO: 784

SEQ ID NO: 9375 - DNA, 201 bp, Homo sapiens
aaaaaaaaaaaaaaagaggaaaaagaagggtaaaatctacaacagttacaccaacctggaatgttcattacatgttacataggaggattacagaccttagwtgtaagatgttacaggtaggaggtgaaaccctccattctgtgtctaattattaagcctctcaacttgagtagaggaatttttctttcaattagtgttaca

SEQ ID NO: 9376 - DNA, 201 bp, Homo sapiens
cgagattgcaccactgcactccagcctgggcaacagagcgagactacatctcaaaaaaaaaaaaaagaaagaaaaagaaaaaagaaaagaaaacaaaggckgagatagctttaggtgtctggagcctcacaggcagcaagtgatgcagagagaaatcagagattatctgactgcaggtcctggtctgtcctccacattact

SEQ ID NO: 9377 - DNA, 201 bp, Homo sapiens
aaaataggccaggtagtgatgcagggcaggggaggaggcaggtggctatagccatgcaggggttcacattcatccccctgtctcctaccaggcacccatgsacttggagaactggtcggggacaccctgtacctgaggtcttgctggatccatagcattgtgcccatcttctgctttctgtgccaagggagtgccccagag

SEQ ID NO: 9378 - DNA, 201 bp, Homo sapiens
agctctgaaggctgtgatacccctgatttcccactccacacctctatatttatgtgtgtttgtctttaattcctttagcaccgctgggttcaggtctcccygaccaagctctcggcaggctcacgcctgtaatcccagcactttgagaggccgaggctggtgggtcacctgaggccaggagttcgagaccagcctggccaa

SEQ ID NO: 9379 - DNA, 201 bp, Homo sapiens
gagatcgcgccactgcactccagcctgggcgacagagcgagactccggtctcaggaaaataataataaaataaaaaataaaatttctgtattgcgatactktctttctcctgtgttgtactttgagagattcctcctccagataaccctccctgaagtccacctccccagtacgagagtgagtgcgggctctggtttttgt

SEQ ID NO: 9380 - DNA, 201 bp, Homo sapiens
gagcgatctgtgatttaaggacatgctcctgctgcagataaccaaccagagcccatccctttgtttcccataaggaatacttttagttaatctataatctrtagaaacaatgcttatcactggcttgctgtcaataaatatgtgggtaaatctgttcgaggctgtcagctctgaaggctgtgatacccctgatttcccact

SEQ ID NO: 9381 - DNA, 201 bp, Homo sapiens
aaaaaaaaaaaaagaggaaaaagaagggtaaaatctacaacagttacaccaacctggaatgttcattacatgttacataggaggattacagaccttagttrtaagatgttacaggtaggaggtgaaaccctccattctgtgtctaattattaagcctctcaacttgagtagaggaatttttctttcaattagtgttacatt

SEQ ID NO: 9382 - DNA, 201 bp, Homo sapiens
tctttcaattagtgttacatttggaaggtgaagacatccttagctggcaggcactgtgggagatgctatgctgtgcagaggtttcctattgtaactaagtmttgtgagacagtagggaggctagtctgtggggagataaagtcacagcctctcctccccccagaagatagtccagccttagatggaccttgttgaattaat

SEQ ID NO: 9383 - DNA, 201 bp, Homo sapiens
ccaggagttcaggatccattgggggaacatggtgaaaccccatctctacacaaaatacaaaaaattagccgggtgtgatggcacacacctatagttccagytacttgggaggctgaggtaggaggatcacctgagactgggaggcagatgttgcagtgagccatgactgcgccactgcactccagcctgggtgacagaaca

SEQ ID NO: 9384 - DNA, 201 bp, Homo sapiens
gttgcagtgagccaagatcacaccactgcactcaaggctgggtgacagagtgagaccctgtctcaaaaacaaaacaaaacctgatatgtggcaaaatactraaagaatgcagaagactgaaaagctgaagtcctcttcttccccagagctgcttctgtcctttgaaaaacattctgtacatattcaaggcatattaatctc

SEQ ID NO: 9385 - DNA, 201 bp, Homo sapiens
ttgcaagttccaggatcattccagattgaaatgatatgagaaagtcacaggtatgtgtcttctttttcccatgtggaatggccataacttgcctctgaacrcacacaacttcttgaatctgtctggccctctctcagccactttacaacaccttgacacagatcatctctctttttcatctcacgttgatgcaaaccatct

SEQ ID NO: 9386 - DNA, 201 bp, Homo sapiens
aagggacaggaaggggtccagggtgagtcacgggtctggctgaggcactagtggatgtcacagccaccatgactagtgggcgtcacagaggccatgccagkagaggaaaataattgatctttggacatgtgggtgtgcacctagaagacagctgtgctctgggcaggtgatcactgggaatacaccctgggcatcagagga

SEQ ID NO: 9387 - DNA, 201 bp, Homo sapiens
cacttggaagggctgataggcttggccttagagttgtgggaggacactccctgatcagggtacgaacccttctctctgccccttccaactcctgtggagtrtgtctgtatctagttggtgctaactgctacgtgcttggcagggcaaggcagggtcaccacctcagcaggcgtttgtcctcctccggcatgatgctaccct

SEQ ID NO: 9388 - DNA, 201 bp, Homo sapiens
tctgtggggagataaagtcacagcctctcctccccccagaagatagtccagccttagatggaccttgttgaattaattctctttgctcttaagttcctttytgtcagtcttagtgtgatttaccatacattcttgtttgtttgtttgttttgagacggagtttcactcttgtcactcaggctggagtgcagtgatgtgatc

SEQ ID NO: 9389 - DNA, 201 bp, Homo sapiens
gtctttctcctgtgttgtactttgagagattcctcctccagataaccctccctgaagtccacctccccagtacgagagtgagtgcgggctctggtttttgkcgggttctttcgtgcaagcgtcccaggccccgttttatttcttccgtcagaggtcattccgaggcgagctgccgcccctgcggctttcgaggctcccagg

SEQ ID NO: 9390 - DNA, 201 bp, Homo sapiens
agattcctcctccagataaccctccctgaagtccacctccccagtacgagagtgagtgcgggctctggtttttgtcgggttctttcgtgcaagcgtcccakgccccgttttatttcttccgtcagaggtcattccgaggcgagctgccgcccctgcggctttcgaggctcccaggacactgccgctttccgctcccgggcc

SEQ ID NO: 9391 - DNA, 201 bp, Homo sapiens
ctccctgaagtccacctccccagtacgagagtgagtgcgggctctggtttttgtcgggttctttcgtgcaagcgtcccaggccccgttttatttcttccgwcagaggtcattccgaggcgagctgccgcccctgcggctttcgaggctcccaggacactgccgctttccgctcccgggccgctcccgaacgctggggccgc

SEQ ID NO: 9392 - DNA, 201 bp, Homo sapiens
tagaccctgtctcaacaacaacaacaaagaaggaggagaaggaggaagaaggagaagaaaagaaaaaaaaaagtcgtcaaaggatattaattgtcgatagrtaacagataatgccaaaaaatatagaagcaattcttaaaacacagtgttggaactggtccacagctctgatttttaatgagctcccatttctgaggccaa

SEQ ID NO: 9393 - DNA, 201 bp, Homo sapiens
agagtgagtgcgggctctggtttttgtcgggttctttcgtgcaagcgtcccaggccccgttttatttcttccgtcagaggtcattccgaggcgagctgccscccctgcggctttcgaggctcccaggacactgccgctttccgctcccgggccgctcccgaacgctggggccgctccatcgtgccggggtgtttacggaga

SEQ ID NO: 9394 - DNA, 201 bp, Homo sapiens
gtggaagctgaggctgaagaaggcgaagaatagtgaggggagggtgcggcaggcaaccatccctctgtattccccaccataacgctaggagagctaattayctattaaaatttccgtattgcaaattagccgggcgtggtggcgggcgcttgtagtcccagctactgtggagggtgaggcagccgaatggcgtgaacccgg

SEQ ID NO: 9395 - DNA, 201 bp, Homo sapiens
agcatgagccaggatagtggccagtgtgtttgctctgtctgtcccagggcgccggtctctggcttcctcattgagctccaatccatatgtcaagtggctgracttttgggacagtgggctctatggggcaggtacagaggccctggcaggtgccctgagcaaaagcagcagcatctgcggtaggtgctgggtctggggcag

SEQ ID NO: 9396 - DNA, 201 bp, Homo sapiens
ccgtattgcaaattagccgggcgtggtggcgggcgcttgtagtcccagctactgtggagggtgaggcagccgaatggcgtgaacccgggaggcggagtttrcagtgagccgagatcgcgccactgcactccagcctgggcgacagagcgagactccggtctcaggaaaataataataaaataaaaaataaaatttctgtat

SEQ ID NO: 9397 - DNA, 201 bp, Homo sapiens
aacccgggaggcggagtttgcagtgagccgagatcgcgccactgcactccagcctgggcgacagagcgagactccggtctcaggaaaataataataaaatwaaaaataaaatttctgtattgcgatactgtctttctcctgtgttgtactttgagagattcctcctccagataaccctccctgaagtccacctccccagta

SEQ ID NO: 9398 - DNA, 201 bp, Homo sapiens
aaaaataaaatttctgtattgcgatactgtctttctcctgtgttgtactttgagagattcctcctccagataaccctccctgaagtccacctccccagtaygagagtgagtgcgggctctggtttttgtcgggttctttcgtgcaagcgtcccaggccccgttttatttcttccgtcagaggtcattccgaggcgagctgc

SEQ ID NO: 9399 - DNA, 201 bp, Homo sapiens
gtcctcctccggcatgatgctaccctagctgcccaaggttctagcctgtgtatgttattacatggatttttttacacataaatacatagacttcaactcayttttctttttacaaagtatacaatataccttggatgtatttatatcccaagacagggttctcattctttttcatgtgttttactgtatgggtaatatggg

SEQ ID NO: 9400 - DNA, 201 bp, Homo sapiens
tgtgatgcgtgttcattatggatggtctgaatccgtatcaactctcagaggcaaagagaagtggccccggcttggtggaggttggtggtgtggctcccacrggcattggcttacgttgtctggtttctctcaggcagatctgtgcatgggactgcagggcttcctcatcttccacagctttgggggcggcactggctctgg

SEQ ID NO: 9401 - DNA, 201 bp, Homo sapiens
gttttatttcattatgaattcttattttatgttgttgttagataatgatgcacacaattaaatttgagtgacaaacatatgtagagtaaattttgtatatrtataccaaaaacagtactaaagaatactagatttataccagtatgtgaatagcttagaaaaaaaattcgtttgtataataggaatgaagaaacataatca

SEQ ID NO: 9402 - DNA, 201 bp, Homo sapiens
agagggtatagaaactatggatcataactgaatgaaacattctgcaaatattacaaattatctgtctaatcaatatattgatgataggaaacgtattaatratatgttttattgggggtgggcagtgagctgaggatcctcaggcatctctatttttattttgtttctctacgtagtttctccagcatttggctctaggtg

SEQ ID NO: 9403 - DNA, 201 bp, Homo sapiens
atctctatttttattttgtttctctacgtagtttctccagcatttggctctaggtgccaagggcacatgtgacaagaaggtgccagctttataaaccttgkaacttcttctgtgtcagttctgagacatacaatttactaaaacacatcatgaaggcctgttttgaagagaaggggaataagactgcatctgttcatatga

SEQ ID NO: 9404 - DNA, 201 bp, Homo sapiens
ttctccagcatttggctctaggtgccaagggcacatgtgacaagaaggtgccagctttataaaccttgtaacttcttctgtgtcagttctgagacatacartttactaaaacacatcatgaaggcctgttttgaagagaaggggaataagactgcatctgttcatatgaggtatgtcgaagcacttggatatgttttcaaa

SEQ ID NO: 9405 - DNA, 201 bp, Homo sapiens
ttagattccatttgtacattttgtcttttgttgcaattgcttttggtgtttcagtcatgaagtctttgctcatgcctatgtcctgaatggtattgcctagsttttcttctagggtttttatggttttggatattacatttaagtttttaatccaccctgaattaatttttgtataatgtgtaaggaaggggtccagtttca

SEQ ID NO: 9406 - DNA, 201 bp, Homo sapiens
ttaggcaaagatactcttttcttgaaaacccaaactacattccattacctttcataacagtcatattccttgtccattcttgtttctaccatggttctaastcctacttttattcattacattaatcaaagtaattctctttcaaagaggaaactggaagttatgtaattgaggactattaaaaataagtattttggcaga

SEQ ID NO: 9407 - DNA, 201 bp, Homo sapiens; identical to SEQ ID NO: 980

SEQ ID NO: 9408 - DNA, 201 bp, Homo sapiens
atatctgctcagctgtcttctgtcttctatttcccactggccagggtttccctgaggcagaactaccatctctgctgttctgctttccatcatccaatccmttgatggaggttatgaaagtcagacctcatgcccacaatgtggtgatccattcaagtcccaaatggaagggtgatgtgggtcaggcaaggtgctgaccag

SEQ ID NO: 9409 - DNA, 201 bp, Homo sapiens
cactccagcctaggcgacagagcaacatcctttctcaaaacaaaaaaggaaaagtggaagttttcactggtatcttttaagtatcaagtaacacagaatcraaagaataactaataatcctcggttcctgcctgcactgaacatgtaaaattgaaagcagttatacatatactatactagcacctcataaggactacccag

SEQ ID NO: 9410 - DNA, 201 bp, Homo sapiens
aggtgagcatgtgcagtgtgtttactggagttgtacacatgcttgcatgaggcattcttcccttttttggtggaatgcccccagaaggttgttttctaccsttttctctcttaacacgtatgcctcagcctactcgccctattcctgagctgctgactagcaattttaagcatctttacttattgtgaaattgcctctccc

SEQ ID NO: 9411 - DNA, 201 bp, Homo sapiens
gatctgccctcctcagcctcctccacacctggcctggatttcatttttctaagctgggtttgatggatggctctggtgatttgagatgggccaaattcggsatcttggagatagagtttggccaatttagtctggatcaggtgggggcaatctgactacattactttctcattctccttctgggaacagtgtacttgcgag

SEQ ID NO: 9412 - DNA, 201 bp, Homo sapiens
tatcagtgataaaatagataaataaattatggcatacctatataatagtatagtactatacagtaatcaaaatgaaccaactagagagacatgtttacaaraaatgtatataacaaagaaaataaacaaatttgagctgattagataatactcacaagtgtaagaggatctatccatagtgaaaaacattcattttaattc

SEQ ID NO: 9413 - DNA, 201 bp, Homo sapiens
atcttaagactcagtacaggtactcttaccagaaaatgtatacacacacatgaatatcactgtgttttcatagctaaagttgagaagtttctcaaatgtcyatcagtgataaaatagataaataaattatggcatacctatataatagtatagtactatacagtaatcaaaatgaaccaactagagagacatgtttacaag

SEQ ID NO: 9414 - DNA, 201 bp, Homo sapiens
atataaatataaaagtgtgaaaattattctgatattactcattttgaaaagaacaagaagtaatgagaattttcaaacactgctcctagaagtataaattratataattctttggcttagtatggcattatctgatgaagatgaaggagcacatcttaagactcagtacaggtactcttaccagaaaatgtatacacacac

SEQ ID NO: 9415 - DNA, 201 bp, Homo sapiens
aacttgagctgttctgagaataacatattttccataaagacagcattgaactcatctataagcatgtgctggtgctttactgcttgacattggtcacacarctgaatttaaaagcatcaaaaatattagtgcacattcagaattcaggtacacatagagtttaaggtcaggaccttaagggggatcatgcccagtgatatt

SEQ ID NO: 9416 - DNA, 201 bp, Homo sapiens
tcttcatttgcatgcttgcaagtgaaaaatcagcttttacttcaacgtcattatgaaaaattttattcaaattttttcaaaagaaaaaatagaaagaacastgtatgaatagtagttaacttgagctgttctgagaataacatattttccataaagacagcattgaactcatctataagcatgtgctggtgctttactgct

SEQ ID NO: 9417 - DNA, 201 bp, Homo sapiens
ggcagagaagattaggttttctaaatatacaatggcaaattctattttcttaccaaggtatggtaacatcaattttaaccttataattttttatcttactstttattagttgttattactctgtatctgtatgttttgctccacaataaaaaatgttaaaaaagcagaaacctaaagtacatttctaagtgtaaaattagg

SEQ ID NO: 9418 - DNA, 201 bp, Homo sapiens
caactgatgttgctgaacaaaaattatggagaagttaaagagggaaaaaattgcaaaacaatgaaagagaatatgtcttcatttgcatgcttgcaagtgaraaatcagcttttacttcaacgtcattatgaaaaattttattcaaattttttcaaaagaaaaaatagaaagaacagtgtatgaatagtagttaacttgagc

SEQ ID NO: 9419 - DNA, 201 bp, Homo sapiens
gccccagagtgtgatgttccccaccctgtatccaagtgttctcgttgttcagttcccacctatgagtgagaacacgtggagtttggttttctgtccttgcratagtttgctcagaatgatggtttctagcttcatccacgtccctacaagggacgtgaactcatcattttttatggctgcatagtattccatggtgtatat

SEQ ID NO: 9420 - DNA, 201 bp, Homo sapiens
ctaacaactgatgttgctgaacaaaaattatggagaagttaaagagggaaaaaattgcaaaacaatgaaagagaatatgtcttcatttgcatgcttgcaartgaaaaatcagcttttacttcaacgtcattatgaaaaattttattcaaattttttcaaaagaaaaaatagaaagaacagtgtatgaatagtagttaactt

SEQ ID NO: 9421 - DNA, 201 bp, Homo sapiens
aaatcactcagcttttgttggtctggaaaagtctttatttctctttcacgtttgaaggatattttctccagttacactattctaggctgaaagttttcttycttcagcacttttaatatgtcataccactctctgcacttttaatatgtcataccactctctcctggcctttttccactgaaaagtctgctgccacatgta

SEQ ID NO: 9422 - DNA, 201 bp, Homo sapiens
taaaaatacaaaaaattagccaggcgtggtggcgggctcctgtagtcccagctactccggaggctgaggcaggagaatggcgtgaacccgggggacagagyttgcagtgagccgagatcgcgccactgcactccagcctgggagacagcgacactccgtctcaaaaaacaaaacaaaacaaagcaaaaacagcgtaaaatt

SEQ ID NO: 9423 - DNA, 201 bp, Homo sapiens
tgtgtatatgtaccacattctctctccctcttttttttttttttttttttgagatggagtctcgctctgtctccaggctggagtgcagtggcgcaatctcrgctcactgcaacttcagcctcccaggttcaagtggttctcctgcctcagcctcctgagtcgctgggactacaggcgccagccaccacgcccagctaattt

SEQ ID NO: 9424 - DNA, 201 bp, Homo sapiens
aaactcatcacaaaatctgcagttgcttgaattttctagtttcaggttgaggttataggcttatcaaagaagaagcatttctcagagcaaaagtttgactrttccaaaattctaggggaaatatcactgtaatatagctttgctgtagctatatcaggtgtgtgaagtagagacaaggtggaacgtcaaaattagatggca

SEQ ID NO: 9425 - DNA, 201 bp, Homo sapiens
tccaaatcttggctattgtgaacagtgctacaacaaacatgggagtgtggatacctgtttgatacacttacttcctttcttttgggtatatacccaccagygagattgctggatcatatggtaactctaattttagtcttttgagaaacctttaaactgttttccatagtggttttactaatttatattcccacctgcggt

SEQ ID NO: 9426 - DNA, 201 bp, Homo sapiens
tgtattctgcaaatttactgagtttgtttatcaattctaatagtttttggtacagtcttcaggttttacaaatataagatcatattgtttacaaacaagcrtaatttgacttgttcctttcctatgtggatgctctttatttttcttgagtgattgctctagccagagcttctactattatgttgaataatagtagtgaat

SEQ ID NO: 9427 - DNA, 201 bp, Homo sapiens
ttagacttaaacttttccaaatagggtaaacgcacattttgcaaaaagaaagaggggtgggaggtaggattcatttacaacatttacaacttatggctggraagttgagtctttaaagaggaatttagttgtcctaacggaaccagctagagtgacatgtttacaaagaatataaataaaaagaaaaatgaagaaatttga

SEQ ID NO: 9428 - DNA, 201 bp, Homo sapiens
caggttttacaaatataagatcatattgtttacaaacaagcataatttgacttgttcctttcctatgtggatgctctttatttttcttgagtgattgctcyagccagagcttctactattatgttgaataatagtagtgaatgtgagcattcttgtcatgttccagatcttagaggaaagccttttagtttttcccaattt

SEQ ID NO: 9429 - DNA, 201 bp, Homo sapiens
ataatgcttcattatagcagaatacacatttgtcattaaaagagatatagagcagaatttctcagagttcagcagaatattcatagttgttacaaaaaaawgttcttaatttttaaatattttaggcaatgctggcttaagcgactttaacctttttgtttgtttttaaatcataagctttctgtatactctgttagtatg

SEQ ID NO: 9430 - DNA, 201 bp, Homo sapiens
tataatgcttcattatagcagaatacacatttgtcattaaaagagatatagagcagaatttctcagagttcagcagaatattcatagttgttacaaaaaaatgttcttaatttttaaatattttaggcaatgctggcttaagcgactttaacctttttgtttgtttttaaatcataagctttctgtatactctgttagtat

SEQ ID NO: 9431 - DNA, 201 bp, Homo sapiens
ttggagagtttagtccatttacattcaatgttagtattggtagttaggacttacttttgtcattttgttatttgttttctggttatgttgtggtctgctcktctttctttcctaccttcctatttttctttagtgaaggttattttctctggtgatataatatagttttttgctttttatgtttgtgtatccattctatgc

SEQ ID NO: 9432 - DNA, 201 bp, Homo sapiens
tgcgtgcctgtagttccaactacccaggaagttctggcagggggatcagtttagcccaggaatttgagtctgcagtaagctatgattgtgccatttcactmcagcctgggctgcactctagcctgggcaaccaaacaagactctgtctctaaaaacaaaaaaaaacgaacaaccgaaaacaaagcctcccactccattctg

SEQ ID NO: 9433 - DNA, 201 bp, Homo sapiens
aaaatctcttagcatttgcttgtctgtaaggattttatttctccttcaactatgaagctttttggcttgctatgaaattctgggttgaaaatccttttctygaagaatgtccccactctcttctggcttgtagggtttctgccaggagatctgctgttagtctgatgggcttctctttttggtgactcagcctttctgtct

SEQ ID NO: 9434 - DNA, 201 bp, Homo sapiens
ctgtaaggattttatttctccttcaactatgaagctttttggcttgctatgaaattctgggttgaaaatccttttctcgaagaatgtccccactctcttcyggcttgtagggtttctgccaggagatctgctgttagtctgatgggcttctctttttggtgactcagcctttctgtctggctgttcttaacattttttcct

SEQ ID NO: 9435 - DNA, 201 bp, Homo sapiens
tactattacccgtacgttttatagcttcaagtgattacttattgcccattaatgtccttttctttctgactgaagtaatccgtttgaaatttttctaggasagatctggtgctgatgaaatcactcagcttttgttggtctggaaaagtctttatttctctttcacgtttgaaggatattttctccagttacactattcta

SEQ ID NO: 9436 - DNA, 201 bp, Homo sapiens
tagcaacacttggtttctgcctgtatcagacaggtgaaattgcaagcagttatacaagtagtgtactaacttctcataaagcctactcaaggagggtattrttattgtgtgcgttttacagatggctatcctaaggctgatagtagttgtaaaatatagtctaagttcatatctatatgaaacagagtatctgggtttctg

SEQ ID NO: 9437 - DNA, 201 bp, Homo sapiens
atgtttctttgttgattttctgtctggaggatctgtctgatgctgaaagtggagtgttgaagtctccatctattattgtattgaggctttctctttgctttggtctaatagtatttgctttatatatctgggtgctccagtgttgagtgcatatatatttacaattgcaatatcattttgatgaattgacccctttatcat

SEQ ID NO: 9438 - DNA, 201 bp, Homo sapiens
gggttattttcagaaagatggggactgcaacatatcctgtaatagggacagtgtgaaagcagccttaatgttcagtgacaaggattggttaagtaaattayggaaaaaccaaacaatagcatcatatataattgtaaaaaaaaaaactaaccaataaacactgaagagatctaaataaactcatgtgaaagctaagaaata

SEQ ID NO: 9439 - DNA, 201 bp, Homo sapiens
tgctcatagtagtcactaataattctttgaatttcagtggtatcagttgtaatatctctgctttcatgtctgattttattaattttgatctttttttcttrgtcggcctgaacgtttgtcaatgttgtttaacttttcaagaaaacaggtttttgtttcattgatcttttgtattgttttcttcatttcaatttcatttat

SEQ ID NO: 9440 - DNA, 201 bp, Homo sapiens
gatatttgtatagatatatgggcctagtttcattcttctgcatatggatattcagttgtcccagcaccatttattgaagagactgtctttttccagtgtaygttcttggcatctttttcaaaaatgagttcactgtaggtgtgtgggtttgtttccgagttgtctgttctgttccatcgttctatgtgtcagttttaatgc

SEQ ID NO: 9441 - DNA, 201 bp, Homo sapiens
acttacttcctttcttttgggtatatacccaccagtgagattgctggatcatatggtaactctaattttagtcttttgagaaacctttaaactgttttccatagtggttttactaatttatattcccacctgcggtgtacagtggttcccgtttctccacatcctcaccagcatttgttactacctgtcttttgtatataa

SEQ ID NO: 9442 - DNA, 201 bp, Homo sapiens
gagggagttccccgaccccttgcacttcccgggtgaggcaacaccacaccctcctttggctcgtcctccgtgggcttcacccgctgtctaaccagtcccartgagatgagccatgtaactcagttggaaatgcagaaatcacccaccttttgtgttgatcttgctgggatttgcagactggagctgttcctattaggacat

SEQ ID NO: 9443 - DNA, 201 bp, Homo sapiens
taaaaattgttattcagatattcttgtatagagtatcaagaccctgtgaccctgtgttttacagaagctcttgaaggcaattctgattttgagaatcactrtcttcaaattacatgtcttaagtagggttgacaatgaggacatagaaccatgttccccctttggctctctctattttctttcctcaaactcagactccca

SEQ ID NO: 9444 - DNA, 201 bp, Homo sapiens
aacagaggactgagtttagggtaacatgagccgcaggaggtcaggagaaaatctgagaaaggagaagtccagaaaaggggagccccagcttctgactataractatccaaagctttgtctggtccctacaccacacatgtataggcagacttcatgaagcccagctaaaataataaaattgatttcagttatcatcaagca

SEQ ID NO: 9445 - DNA, 201 bp, Homo sapiens
ttacaaattatctgtctaatcaatatattgatgataggaaacgtattaatgatatgttttattgggggtgggcagtgagctgaggatcctcaggcatctcyatttttattttgtttctctacgtagtttctccagcatttggctctaggtgccaagggcacatgtgacaagaaggtgccagctttataaaccttgtaactt

SEQ ID NO: 9446 - DNA, 201 bp, Homo sapiens
catggaatacaatgacatagctgtggttgatgaactatattttatctattgcaatgatattttgaaatgcagtgctactcattgagtttccttgtgaggasattgtgtggcgaggacccagcaagacaagctactatcccaaaaaagctacttatatgaacttcatttccggtttctttcaaattgaaggtaaattccaag

SEQ ID NO: 9447 - DNA, 201 bp, Homo sapiens
ataggtttttcttctaggtttaattatctacttcatatgacaaaactttgacattctccatctatttttcccttggatccagaattcctaacacaacaagkgtggtcatgttacccacactcttagtttagcagaatacctatatcagttatgtttttctgcaagagaaaatcctccaaaactgctttagatatttgtgtc

SEQ ID NO: 9448 - DNA, 201 bp, Homo sapiens
tcaccacgacagagctcctgctcatttctctcatcagacagggcaattggtgagagttctgatagaaaaccattaggcatccacattacaccctaatttakatcctttggatgctttttgttttgtaatctcgtaacatctgtaaagactatttattattcttcagttaatgtaaaaaggacacaccaatagctggtatgt

SEQ ID NO: 9449 - DNA, 201 bp, Homo sapiens
tcttagtttagcagaatacctatatcagttatgtttttctgcaagagaaaatcctccaaaactgctttagatatttgtgtctcataagtctttggatttcrtttttctaagcttggtttggcagatggctctggtgattggagatgggccacatactgcatcttgcagctagtttggctgatttaggctggatcaggtagt

SEQ ID NO: 9450 - DNA, 201 bp, Homo sapiens
agaatattttgagaaagccagaactctagtagagaaatgcctgggggagcttcagcagagtccttcaccacgacagagctcctgctcatttctctcatcaracagggcaattggtgagagttctgatagaaaaccattaggcatccacattacaccctaatttagatcctttggatgctttttgttttgtaatctcgtaac

SEQ ID NO: 9451 - DNA, 201 bp, Homo sapiens
aaaggaaaagagcaggaaactccaacatggaagctgtcttaaatatctgtgtaaagtctactaacttcctgttgactgaagcaaattagaggagtgaattyagagtccaagttcaaggtagtcaccctgcctgtggtgggaggatactgcaggattatatgacaaaatgtagggtacttagaaacatttacaaaattgctg

SEQ ID NO: 9452 - DNA, 201 bp, Homo sapiens
aagagtttattgggaagctcaaggcattttgcttattgactttctgaagggccagagaaggacaatatatgcttattctgagaatattttgagaaagccaraactctagtagagaaatgcctgggggagcttcagcagagtccttcaccacgacagagctcctgctcatttctctcatcagacagggcaattggtgagagt

SEQ ID NO: 9453 - DNA, 201 bp, Homo sapiens
aatgagtcagagcaatattttcaaacgtggaatatgttggctccaaaatctcaataggtccccaaaacattgtatctcttttgtagtgataggaagtacayagagagagcaacatgccatttactttaaaaaagattgttttgacatgtgccctagggacactgcacaccttaaaacatcacctatgctgtaggtccctga

SEQ ID NO: 9454 - DNA, 201 bp, Homo sapiens
cccgtaaaaagtatcaaaagctctgctctgctcagtgaagatagcacatcctggaaagcatttgtgagtgttgattgaagtttatggtagtctgcattcastataacctgtctgtctttggtagaggccagataggttaagtgaatcgggttatagaaaggactaccatcccctgtaactttcaagtgttttgtcatgaca

SEQ ID NO: 9455 - DNA, 201 bp, Homo sapiens
gaattacaggcctgagccaccgtgcccagcctattatctgctttttataggtaattatactgaggcaggcagtagttgtaaaatggagtctcacatatctrtatgaaacagggaatctggtttcctgtctttgtagtctgactcgaagatcccctcttagaaaccattatagtgtaaaaactgaaaagatataaaatccaa

SEQ ID NO: 9456 - DNA, 201 bp, Homo sapiens
tgggattcactctccataaatccggcgttgaaaaaatgaatcaacagtggtcatgattctagttttgaccaagctacatataacagtgtaggcatctgatktatgatctatgtattaggttggaaaatttcccttacaactgacattgctgaatacaaattatatagaggttaaacaaggaaaaaaattacaaaatgatga

SEQ ID NO: 9457 - DNA, 201 bp, Homo sapiens
aggttggaaaatttcccttacaactgacattgctgaatacaaattatatagaggttaaacaaggaaaaaaattacaaaatgatgaataagaatatgacttratttgcatgctagcaaatgagaattcagctttcacatcaacatcagtatgaaaatttttatcttataacaaggacatagtatttgaataggagttaattt

SEQ ID NO: 9458 - DNA, 201 bp, Homo sapiens
aatttttatatttttagtggagacagggtttcaccatgttggccatgctggatttgcactcctgacctcaggtgatccacctgccttggcctcccaaagtrctgggattacagccatgagccactgcgcccgctttttataggtgattatactgaggcaggagtagttggaaaatggagtctcagagcatagctataccaa

SEQ ID NO: 9459 - DNA, 201 bp, Homo sapiens
cttaaagggaatcttgcccattgatattagtcctgccctaaaaaaagtcggacatggtatgtttactactaatcattttttttccataacgttaatggtaktttgtattttcccatgggcacctacattacacttatagactattttgatatttcaacctattattttctttgaatccttttaaggagttgttaaacaatg

SEQ ID NO: 9460 - DNA, 201 bp, Homo sapiens
tcggattataggtgcgtgccaccaccacctggctaatttttatatttttagtggagacagggtttcaccatgttggccatgctggatttgcactcctgacytcaggtgatccacctgccttggcctcccaaagtgctgggattacagccatgagccactgcgcccgctttttataggtgattatactgaggcaggagtagt

SEQ ID NO: 9461 - DNA, 201 bp, Homo sapiens
aaatcagagcaattactttgtctgactatggcattatctgattaagttgatggatcacatttgaacacccagtatttgcactgttatcagaatatatgtgsacacacatgcatatcactgagttttaatagctaaagttgagaagtctctcaaatatccatcagtgataaaatggataagtaaattatggcatacttgtac

SEQ ID NO: 9462 - DNA, 201 bp, Homo sapiens
aactacaaactgattagatccaccttgggatggacatgagccgaagctctaggtagcatctgaccttcaaaactcccactgcgggctggatgtgatggctyatgcctgtagtcctagtactttgggaggccaaggtgtgaagatcctttgagagcaggagttccctgtgcatcatatggaaactccgtctctacaaaaaat

SEQ ID NO: 9463 - DNA, 201 bp, Homo sapiens
tctgaaaagttcatgtggataatggctgaagaaatcagcagttcacaagtagatatgttatttcaagaagggatgaaatggtgctgaacctcaagtctacrgtgacagagtattcatatcaaatgtatcttgttgataccatgatagaagaggaatgaagattaagagtacaaacaatagccaacccttcatgttttttaa

SEQ ID NO: 9464 - DNA, 201 bp, Homo sapiens
cttacatggaaatgtgatctaaacctagagtctagcttgctttataatgtgtgattattaagagttggagtatgttagccactaattgtcttcttgcactsagccctgaaaatgttaaatttgggcttttggataatcattgggccctttcgatatggagaattaacctttagttctgggaaatgtattgtttcattgatg

SEQ ID NO: 9465 - DNA, 201 bp, Homo sapiens
ttgcagagtagtattgcattgtgtatatatcacgatttctttacctacaaacccattagtatccattgatggttacttaggttgatgccatatctttgctrttgtgtatggtgtttcaataaacatagaagtgcagatttatttttcatatactgatttcatttcctctgcatagatacagtagtaagattgctagattga

SEQ ID NO: 9466 - DNA, 201 bp, Homo sapiens
taaagttgccttcaattatatttatttatttatttatttatttatttatttatttatttatttattttgagatggagtctcattctgtcacccaggctggyctgcagtggcaagatatcggctcactgcaacctccgcctcccaggttcaagcgattctcctgcctcagcctcctgagtagctgggattacaagcatgcac

SEQ ID NO: 9467 - DNA, 201 bp, Homo sapiens
gaaatgcaggctctttcttcctcctcctcctcctcttccttcttttttatttctcctactccatctccctctttttcttttttgaaaaaatatgtttaaakttgccttcaattatatttatttatttatttatttatttatttatttatttatttatttattttgagatggagtctcattctgtcacccaggctggtctgc

SEQ ID NO: 9468 - DNA, 201 bp, Homo sapiens
caattagaaatgcaggctctttcttcctcctcctcctcctcttccttcttttttatttctcctactccatctccctctttttcttttttgaaaaaatatgyttaaagttgccttcaattatatttatttatttatttatttatttatttatttatttatttatttattttgagatggagtctcattctgtcacccaggctg

SEQ ID NO: 9469 - DNA, 201 bp, Homo sapiens
atttgccaaaagtaaactgtataattaaaatggtttttcatataatttataaaaattatatttcagtaaagctgatttacaaaaagaagcattttttttttgagaagcctcagaccacattaggtagaaaacaagacattttagatgttctgagttagaagaagtttaatcagggagttagacactatacaaacattagaa

SEQ ID NO: 9470 - DNA, 201 bp, Homo sapiens
cagatcacatacatgaaaaactagtggatatagtcatgtctgcttcacaataatgattttaggaaagaacagcagacatgaaattgtgaggaattaaatgytcccgagttaaaaatcttaagatttctttgtccaaaaaatctaagtagaatagtctctgatattgtttttttctaggctttcaaacaaaataggaacaca

SEQ ID NO: 9471 - DNA, 201 bp, Homo sapiens
atgaaagagggcagaagaatccccaaatatgtcattgaaatactcagagcagtttaactaaataagcgctaagggtttacaggcaaatgctatagaggagraaagtggagggaagagaggaggatgagaaaacagatgggactgcagaattttcatgctgaggatcagaagacctattgtatcttcattcctcatcaaggc

SEQ ID NO: 9472 - DNA, 201 bp, Homo sapiens
gataagcgccttcttagaaagtggtggatagcagagtgatactcatggctaatgaacaatttgctatattttctaaattgaaaacaacatcgacaacatcyggttaaactggaattacaaagagaagagaaaatcaacttaatttttcctcatttactacagtgaccttagccatgtgacttaatttctttagatataatt

SEQ ID NO: 9473 - DNA, 201 bp, Homo sapiens
acttgagatgggccaaattctgcatcttggaggtcgttagagtttggccaatttagtctggatcaggtggggggcaatctgccttcattagtttctgattmtccttctgggaacagtgtactagccaggtgatattctcatagtaaatggaaagaggaagaacacccagtatggaagccatctcaaatttctatgcaaagt

SEQ ID NO: 9474 - DNA, 201 bp, Homo sapiens
agtcaaaactctaggtagcatctgaccttcaaaactccctctgcaggctgggtatgatggctcatgcccgcagtccccgcacttttggaggcggaggtggraatatctcttgaggcccagagttgcagaccaccttgggctacacagtgacagcctgtctgtacaaaaactaaaaaacagaaaaaacaacaacaaaaaatt

SEQ ID NO: 9475 - DNA, 201 bp, Homo sapiens
ttttaattaaaatttaaacaaaaaacagacttgaatgtaaatttaccaaagacctaagcataagaaacatgtttgataaacattattcattgtctgacaaygctgaataggaaaatagtactaattctacctggatgacctcctggaaactcgttttccatttggtgagtaataagaaaataattccttccatcccctaat

SEQ ID NO: 9476 - DNA, 201 bp, Homo sapiens
aatactatacagcaatcaaaatgaactgttggagacatgtgctcggagtagccaaaagaaatccccacttggacaatttctcagcaaggcacctttacgtyagcagaagggtgctgcttgcacctgttacaatcccaagagaagagcatacctaacaaaggagggaaggagtttttaatcctaacacagttcctgtttctg

SEQ ID NO: 9477 - DNA, 201 bp, Homo sapiens
aaataaatcacatgtacatgcaactatgggattaaatttctgatacagaatgttgatttcaggaagccatgaataagaacatatagaattgcacctatacmcagttcaaagaaggccaaaccaagctattgagtttagggtcgcatacctagttggtaaagtataaagaaaattttaaaaagatcaacataaattatggat

SEQ ID NO: 9478 - DNA, 201 bp, Homo sapiens
atactatacagcaatcaaaatgaactgttggagacatgtgctcggagtagccaaaagaaatccccacttggacaatttctcagcaaggcacctttacgtcrgcagaagggtgctgcttgcacctgttacaatcccaagagaagagcatacctaacaaaggagggaaggagtttttaatcctaacacagttcctgtttctgt

SEQ ID NO: 9479 - DNA, 201 bp, Homo sapiens
tcataatagctaaaaaataagctgcccaaatatatatcaaataaagatggataaataattacagtaaaatcataaaatggaaaaatatggagaaatgaaawgaaataaatcacatgtacatgcaactatgggattaaatttctgatacagaatgttgatttcaggaagccatgaataagaacatatagaattgcacctata

SEQ ID NO: 9480 - DNA, 201 bp, Homo sapiens
gagaagagcatacctaacaaaggagggaaggagtttttaatcctaacacagttcctgtttctgtgtccttcccttattggctggggttggattgcacaatmtaagctgatcctgaatggcttagacttaaacttttccaaatagggtaaacgcacattttgcaaaaagaaagaggggtgggaggtaggattcatttacaac

SEQ ID NO: 9481 - DNA, 201 bp, Homo sapiens
ttcatctactcatggccttacttattttctgtgtgctgatgatgccaacatttaatctttcagctgagatctcaacgctggtctccggaatcctttctctratagactatttgacatcttcatttggatgcctaacaggaacttgaactaacatgtccaaatcaaaatactgctcttcccccaattgtcagatttgtttct

SEQ ID NO: 9482 - DNA, 201 bp, Homo sapiens
aaaagaattgtagtaaatgatgtaggtcattgaagcattattcataatagctaaaaaataagctgcccaaatatatatcaaataaagatggataaataatyacagtaaaatcataaaatggaaaaatatggagaaatgaaatgaaataaatcacatgtacatgcaactatgggattaaatttctgatacagaatgttgatt

SEQ ID NO: 9483 - DNA, 201 bp, Homo sapiens
acacatgtgtaaggaaaaatattttgatactgcaaatttttttaatattagagaaaaattagtagaaagataattttattaaggcataaaacatatttagwgtagttactttgactgctataataaaaacacccagattttgtgacagtagctgagaatgtaaataagcagtcaagagaatttaacttggtaatgatgcta

SEQ ID NO: 9484 - DNA, 201 bp, Homo sapiens
ttaatattagagaaaaattagtagaaagataattttattaaggcataaaacatatttagtgtagttactttgactgctataataaaaacacccagattttstgacagtagctgagaatgtaaataagcagtcaagagaatttaacttggtaatgatgctattaaaagatgaaatgaagcttattcagtctataattgcaca

SEQ ID NO: 9485 - DNA, 201 bp, Homo sapiens
tcacccttaactccagtactttgaaaagaagacccaaatcacagttatttggtaacattctcccttttagttgacatcatcatcattattatcatcatctmtatttacatctgttttatgaaatgatttatttttgaaatatttacatacataatttcgtaacatctatgtaatttctaagagatatcattgtgggaaagt

SEQ ID NO: 9486 - DNA, 201 bp, Homo sapiens
taaaaaagattttgattttagtataaataaaattccttaataagaaaaataaaccatttcatgatcaagctctgatttacaaagagaggattttagggctraataaatcaaagagaagtaagccttcccccacatcttctctatttcatttaggtaatgatggggttcagaggcacagagccccatttctacaacataagc

SEQ ID NO: 9487 - DNA, 201 bp, Homo sapiens
aaattttaacaatgttgttcagaccttaagataaatcatccccacacctgattcatgtattttttagaatcatgtatcttcctcagtacaatgtaagaacyataaaagaagagatcgtgtctgtcaggctttctgttgactcccaggacctagaacccagcacaaggaatagatggtcaaaaatgatattttaatgaacaa

SEQ ID NO: 9488 - DNA, 201 bp, Homo sapiens
ggcattgtgtgtcttctagcagaaaacaaactggtggtgtatgaaacattttatatttcttactgggttttctgtaatatatgtatatgaataatttccamatgtatacctagaaaagtcttttacctaaagttagtctagaaaagtatatatatatagatgtgtgtgtgtgtgtgtgttgtgtgtatgaaaaactgaaga

SEQ ID NO: 9489 - DNA, 201 bp, Homo sapiens
atttaaatctggcatttaaaaaagtccgtattggtgatgatcttagttatgatcaagctccctttaagattttagacatttactatacgatctacatatcrggttataaaacttcccaagcaactgaagtcgctaaagacaaatgatggagaggttacacaaggaaaaattgcaaacactggaagtgaacatgtccttgtt

SEQ ID NO: 9490 - DNA, 201 bp, Homo sapiens
ctttctgaaccttctgtattctgctcaaaaatggaagttctcagctaggtgcagttcacgcctgtatccaagcattttgggagaccaaggtgggaagatcrtatgagcccatgttttcaagaccatactgggcaacatagggagaccccatttctacaaaaaaactgaaaaattagctggctgtgttggtgcacgcccata

SEQ ID NO: 9491 - DNA, 201 bp, Homo sapiens
tcctcgcctcagagactgggttctgctttgcttacttcaggtcaagtgtatccctcatttcttctgggactctagcctagcaggaagggttggggaggatrttgtttgtggctaatttctaaaaggtacaactatgacttggacaaatgttttgacggaactgtgtccaagcaatcagcacagtgtcaggattgaacttta

SEQ ID NO: 9492 - DNA, 201 bp, Homo sapiens
tgtctctttcttctgatattttatttctatttaatgtttaagtattttactataattaggtaactttccatttcctggttattgtaccaattaccgtaacrttattaatatattaaattaacatgatgttttccaaaatgtaaattaaactgagagcagaagtgacaaagccctgacataaaacagtgaagcagtgctctt

SEQ ID NO: 9493 - DNA, 201 bp, Homo sapiens
ttgtcctgtgtcacattttgtatcttgtcatttggggcctgctgggaattgagtgttatcatatatttaaacataagaggaggcagggatatatatagagkggtatcagcattcctctgtaagccaaacagctcaaggtaactcattacaggtttttaaggcaagggaaggaagactaaccttctcagcgaggggaggaag

SEQ ID NO: 9494 - DNA, 201 bp, Homo sapiens
catttttaaaaattgagtttgtaaccagtcacctttcttacacattatttgtatatttttttagtatcctttctaaatgaatgttttaattgccatgttayaaacgcatggaaaagtgatgcaactgaatgtatatcttagcttttggtgtctaaaactagagccaatgtctgagtttacagtgatgacatttatttggga

SEQ ID NO: 9495 - DNA, 201 bp, Homo sapiens
agattattaagatctattgtattcttcattacaaggccagatttcataggtgcataaaaaatcacctatacatgaatctattttttaattgagacatttgtaaaccatgcatgtggaagaatatgatatagcatgcatttatgcatgcattttgaaaaccagcttgagaattttacttccttttagttagcagtagaccaa

SEQ ID NO: 9496 - DNA, 201 bp, Homo sapiens
attttggtatatttgcacagggtcagggtcacctgtgagtgccagctgctcggggctagcagaccccatgacaagaatgttagggaacttcccagcagctkccaaacacacttttgtttttagggaacgtctctttctccttcagtatgacttatgctgccttcaatgctttgctgatacaaaagaagtaaactcaaaaga

SEQ ID NO: 9497 - DNA, 201 bp, Homo sapiens
gaagaatgtgagtcctgccggctgccatacatatctatttcaattatactttcaggaagaggtagtaactacaaactgattagctccaccttggaatggasatgagccgaagctctaggtagtatctgaccttcaaaaactccccctgcaggctggatgtgatggctcatgcctgcagtcctagcactttgggaggcgaag

SEQ ID NO: 9498 - DNA, 201 bp, Homo sapiens
aaaatacaaaaattgacgggtggggtggtgggcacctgtaatcataggtacttgggaggctgaggcaggagaattgattgaatcagggaggcagaggtttytgcaagccgagattgtgccattgcactccagcctgggtgacaagggagaaacttcatctgagaaaaaaaaaaaaattgtaaatccatgaggaagaataag

SEQ ID NO: 9499 - DNA, 201 bp, Homo sapiens
aacacccagattttgtgacagtagctgagaatgtaaataagcagtcaagagaatttaacttggtaatgatgctattaaaagatgaaatgaagcttattcartctataattgcacagagtatttgtgtaagttcatatgaaactggaccaaaactaaacagccaaaaaaagagtattatttgctttaggtcacttttgccat

SEQ ID NO: 9500 - DNA, 201 bp, Homo sapiens
tactgaaaatacaaagttgaacacgcaaggagcattacaaattaatgacaatccatgctggctaacacggtgaaaccccgtctctactaaaaataaaaaawaattagcctggcgtggtggcgggcacctgcagtcccagctactccggaggctgaggcaggagaatggctaaacccggaaggcggagctttcagtgagcag

SEQ ID NO: 9501 - DNA, 201 bp, Homo sapiens
cagattggaaagtggcattgaggtaaacctaggctcttagcaattttccatgtcttgccctacatgatgattacatgagtatttatgacacattgctatgyttcccagttttgttttggctcatttctaagtgtgcactctagttacaatacaaaaattgttaatgaggagaaatgttccatgaaattattattactctgc

SEQ ID NO: 9502 - DNA, 201 bp, Homo sapiens
tagcaattttccatgtcttgccctacatgatgattacatgagtatttatgacacattgctatgcttcccagttttgttttggctcatttctaagtgtgcastctagttacaatacaaaaattgttaatgaggagaaatgttccatgaaattattattactctgctcattatatactgaagggaaaaatccactatttgtat

SEQ ID NO: 9503 - DNA, 201 bp, Homo sapiens
aacattttaattaaataataaatatttaaatattagacttgagagaaactttaccaaaggcctaagaattagagatatgtttgataaataaacattattcrtgggctgaaaaccttgagtgggaaaataggactaatttcacctggacaacctcctggaaactgattttttattttggaaattatgagaaaataattcgtt

SEQ ID NO: 9504 - DNA, 201 bp, Homo sapiens
ttgttgttgttcaaacatatgtgttctgctcatcattttatcaattctggtagtgtttgcatttgttcttggaaatgttgccaatggcttcatagctctarttaatgtcaatgactgggttaagacacaaaagatctcctcaactgaccaaattgtcactgctctggcattctccagaattggtttactttgatcatatta

SEQ ID NO: 9505 - DNA, 201 bp, Homo sapiens
ctgccttcattagtttctgattctccttctgggaacagtgtactagccaggtgatattctcatagtaaatggaaagaggaagaacacccagtatggaagcyatctcaaatttctatgcaaagtgtattaattttttgttcatcaaagtaagttaaatgattgaacttcaagttcaggggaaaggtagtcagtcttcgtgtg

SEQ ID NO: 9506 - DNA, 201 bp, Homo sapiens
aacatgaggaaatttgagatgattttatttgccaccccagatttttccaaaggatttcttctagccttaattatccacctcacatgaacaaatctttgccrttccccatctattttttcttttggctcctgaattcctgacacaacaaggttgtacacatttcccacactcttggtttagcagagttcttttatcagttat

SEQ ID NO: 9507 - DNA, 201 bp, Homo sapiens
tattataaagcaaatagaatggttgttagctaatgatgcacacaataaaatttgagtgacaaacatacatacataagtagagtaaattttgtatgtgtatrccaaaaactgttctaaaggatactggatttaatagtagtatgtgaatagattagaaaaaaatcatttctataataggaatgaagatacatgatcatgata

SEQ ID NO: 9508 - DNA, 201 bp, Homo sapiens
acaatcagagcatctaacatacttctggatttctggaagattaaaagggataaaatagggcagaatcaatgttgtggagattttcccaaaagtgataaaakgtattaatccatatatttttagtaaccatcaaaggtcagacaagataactaaaaacaaattaacataaaatgtcacaagacatcaaagaccagtagaaaa

SEQ ID NO: 9509 - DNA, 201 bp, Homo sapiens
tatttcccataaaggcagcattgaactcattcattagtttaagctggtgcttttctgttgacattgttcacagaatttaaaagtataaagaatgttattgracattcaggaatcaagtgcatatttaatttaaagtcttgaatatcagaggagtcaccatcagtgacattaggcctgaattttttacttgcttttttgttt

SEQ ID NO: 9510 - DNA, 201 bp, Homo sapiens
tatatggagagtgtctggattgctggtgaaatctactttatgaccatgatgtggaatcatgactcttaatgctataatttttttctttactgtacattagrcctcattactttatatactttatatatatatgttatgtttcacaatattaaatatttcacaataatgaaaatatttaaaaagtagaaacatacactaaat

SEQ ID NO: 9511 - DNA, 201 bp, Homo sapiens; identical to SEQ ID NO: 4296

SEQ ID NO: 9512 - DNA, 201 bp, Homo sapiens
gcatagagtatttgtctattttcatattgaaaactgcacaaaaaaacccaaaatagaatcctaattgttggagatcacttttgctatgaatttttaaagtrtaataaaataaaaaaagcaaataaatcattgaaaatacattggttttacattattcttgatgaaataccacgtgagggtatttgcctaggcctgatgctg

SEQ ID NO: 9513 - DNA, 201 bp, Homo sapiens
ctgcattttgggttaaatattttgttactatatattttttggttctgcattagagaagaaaaatcataggcaaatttgttaaggtgtaaaacatatttagyatgatctttgagtatgtttgtgcatatataatgctactttgactgctatagtaagataacagatttagtcaccatagctaagaatgtgaaaaagcattta

SEQ ID NO: 9514 - DNA, 201 bp, Homo sapiens
tacatattactggcattgaaaaaaaataaatctactttggtgatgatcctagctatcctcaagctccattcaccaggctatacaaccaatgtgtcatataygtattgggttgtaaaatatctctaacaactgaagttgctgaaaacaaattatggagaggtgaaacaaggaaaaaattgcagaacaattaaaaaactcttc

SEQ ID NO: 9515 - DNA, 201 bp, Homo sapiens
caatctatcattgatggacatttgggttggatcccagtcttcactattgtgaatagtgccgcaatgaacatacgtgtgcatgtgtctttatagtagcatgstatttaatcctttgtgtagatagccagtattggaatcactgggtcaaatggtatttctagctctagatccttgaggaatcaccacactgtctttcataat

SEQ ID NO: 9516 - DNA, 201 bp, Homo sapiens
ctgagcactctcgcgagactgtggggctcgccattggctgctccgccgcgccgcaacggaccctgggagtcggccatcatgctggccccggaggccgttakcttagtcatggctctaaatatgtacctgcaatcggatgttgaggatcaccgagcccgcgacgtagaagtacgggaagttcatgcgcagctgccaggccag

SEQ ID NO: 9517 - DNA, 201 bp, Homo sapiens; identical to SEQ ID NO: 973

SEQ ID NO: 9518 - DNA, 201 bp, Homo sapiens
atggttcccaagaaaattttcgatgactttgattaaaaagtttggattttgtctatttaaatctagcataaaaattggtcatggtgatgatcctagttatractaatctccctttaagatttaggcatttactgtgtgaaatatgtggcacattttccataacaaacagctaaagttactgaacacaaattatggaaaggt

SEQ ID NO: 9519 - DNA, 201 bp, Homo sapiens
acaaaatcattgctcttttccactgttatttgtaccatacgtatgtaccatagtgtgcttaaacgtgattatttgaacgtctagttttttggatggtatgmgcattctaatctaaatcaataatgaagttttatctttggggtagtttttgttgcataatgaattctaattttatgtttaatttaaagcaaacaattattg

SEQ ID NO: 9520 - DNA, 201 bp, Homo sapiens
tcataacaaaagagtatttaaatctttaagaaaaaatattagaaaagctaataatatgaataaataaatatatgaagtatataattcattattaatatatktgcatgaaatcatggtcatagaatttaaaagtaataatttttgaattaaggatacattctgaactataatagaaaaaggcttcaaaaatgttaggtttat

SEQ ID NO: 9521 - DNA, 201 bp, Homo sapiens
ttcataacaaaagagtatttaaatctttaagaaaaaatattagaaaagctaataatatgaataaataaatatatgaagtatataattcattattaatataygtgcatgaaatcatggtcatagaatttaaaagtaataatttttgaattaaggatacattctgaactataatagaaaaaggcttcaaaaatgttaggttta

SEQ ID NO: 9522 - DNA, 201 bp, Homo sapiens
cttgaacccgggaggtggaggttgcagtgagctgagatcgcgccactgcactcctgcctgggtgatagagcgagactctgtctcaaaaaaaaagaaaatcraggaaatgatcattctaaattatggctattgctctcctcagggtatgtgaagaaaggtgtaggggcttggagagtggcatggaggtggacctaggctatt

SEQ ID NO: 9523 - DNA, 201 bp, Homo sapiens
gtcttggcagtctgactccaaaatcctctcttagaaacaattatactgtaaaaatgaaaaataaataaaatccaagattggagactgattttaacatctaytcatcttaaaccattaagtaatcaaaaataaattaagcagaggaaaacaaaaccaaatattcatatagaaagaagtctagactcttcaatggaaaacgtg

SEQ ID NO: 9524 - DNA, 201 bp, Homo sapiens
ctttattttagctgcaacatatggaaatttcagatgatgctacctgcagcacacaaatcctttcaaacatttttttattacctttaattatctacctcacrtgacaaaactttgccactccccatctatttttcttttggctcctgaattcctgacaaaacaggggcaaatatatttccccacactcttggtgtagcatag

SEQ ID NO: 9525 - DNA, 201 bp, Homo sapiens
tatttgtttcttttcttttgctgctttagaatcctttctttatccttgaccttagggaaattgattattaaattccttgaggtagtcttcttcaattttayctggcattgtttgttgagaaaaacgattaattcctttcgaattgcaatagtacctttttttgaaagcaattgaccatgaatgttggtgttagtttctgga

SEQ ID NO: 9526 - DNA, 201 bp, Homo sapiens
aaacaaatgaagactctacaccttaacaccatcttctcagtttttaactttttgtgtcactatttatatatcattgtgctgtctatatcttcaaaggttgygggaactattttttttttgtcagttcatgatttaatttttgtactttagcgaggtttacacaccacatttacagtgttatactagtctgtgtttttctgt

SEQ ID NO: 9527 - DNA, 201 bp, Homo sapiens
tgctctaatcatatttgacttatatacctgggagctccagtgttgagtgcatatatatttacaattgttatatcctttccatatgttgaccttctttgtcrcttcatagtttttgtcttgaaatctattttgtctaatattagtatagctattcctctttttttggcttccattgccatggagtgtctttttccatccctt

SEQ ID NO: 9528 - DNA, 201 bp, Homo sapiens
gcaagactcagcagaggcagccataatcctcctaggtacccaactccagtgacctgggaatctcatccccatcccccacagcagccacagcaagacccacrggagagtctgagctcagacatacctagccctgcccccacctgatggtccttccctatccaccctggtagtggaagacaaagggtatataattctgggaga

SEQ ID NO: 9529 - DNA, 201 bp, Homo sapiens
taaaaaatatattaaatattatcaaagacaacgttggcatcttttgagatggtcatatttttttttcctctgctgacttcattatccaaaacaaataatgracattccttaacattcctagaatcaagtctgcttggtcatttaactcatatatcactttaatttgttttaaattatttaaagtgagatttatagttatta

SEQ ID NO: 9530 - DNA, 201 bp, Homo sapiens
aaaggaacaggaacattactgcacaaccagaaatcaggtgcacatagaaattaaggtcaggaccttaaagggaatcttgcccattgatattagtcctgccytaaaaaaagtcggacatggtatgtttactactaatcattttttttccataacgttaatggtattttgtattttcccatgggcacctacattacacttata

SEQ ID NO: 9531 - DNA, 201 bp, Homo sapiens
tgtgcttaaacgtgattatttgaacgtctagttttttggatggtatgcgcattctaatctaaatcaataatgaagttttatctttggggtagtttttgttkcataatgaattctaattttatgtttaatttaaagcaaacaattattgttagaaaactatgcacaaaataaaattcaaggatgaaaaatatatttggaata

SEQ ID NO: 9532 - DNA, 201 bp, Homo sapiens
gtatgtgtttaaaaggagtctgtgaaatttctgtctctatccaagggaagaaataaaaagaatgtatatattggctctcatctttcattggtcagagtttycagggtgtcccctctgtgtatttctcaactatattttctagcctctctaaccagcccctggtgtagcaagatcccgagagagcagcaacagcacttatgg

SEQ ID NO: 9533 - DNA, 201 bp, Homo sapiens
cttatctgattaagaaaatttctttccagaagaaatgcaatttttaaaagactccttgtctaggaatctcatcaaatgaccaggataagatactggatcarataaccactggataagatacttggagttgtcaacatgcctagacagacttttcagttgttcttttgaaggcagctccaagagattccctgggtgacttta

SEQ ID NO: 9534 - DNA, 201 bp, Homo sapiens; identical to SEQ ID NO: 961

SEQ ID NO: 9535 - DNA, 201 bp, Homo sapiens
aaaccatctgatttttctttattttctttatttttattgtaaattgacatattttacttgcatacatttatgaggtatcaggtgttgttatgatttatgamtactatgtggaataattaaatgaaactaattaacgtattcaaatgataataaatataacagataacaggtaacaaatatttttttatggtgagaatattt

SEQ ID NO: 9536 - DNA, 201 bp, Homo sapiens
agtggaggagaatttcgcaggcttcgccttggtcctgctctaatagtgtcccttactctacaggtcaggaagaaagtgagagtcctgccagctgccatgtrtgtccatttcaattacacattcaggaagaggtaataacagcaaactgatcagattcactttgggatggacatgagtcaaaactctaggtagcatctaacc

SEQ ID NO: 9537 - DNA, 201 bp, Homo sapiens
aatctggatggttgctggtttaacattccctttttaaagggaatatattattgaattttcaagaatcagatatacatagcattttagatgaatgcattaaraagtcttcagcagtgatattagacattggggcatgctcttacaggcaatgggtggtgtcataaagagcatatttacattcgttttaattgtggaatttat

SEQ ID NO: 9538 - DNA, 201 bp, Homo sapiens
aacacgcatgcctcagcctactcaccctattcctgagctgctgactaccaattttaagcgtttttatttattgtgaaatgcctctccctggcacctatgaycaattattatttttagagaggcagggtgtcaactgccaggccatcagctgatggccacttgacattccttgtgggtggtgggagccttcttctgccctac

SEQ ID NO: 9539 - DNA, 201 bp, Homo sapiens
taataagttgtcatctccatctattacagtatttgctctaatcatatttgacttatatacctgggagctccagtgttgagtgcatatatatttacaattgytatatcctttccatatgttgaccttctttgtcacttcatagtttttgtcttgaaatctattttgtctaatattagtatagctattcctctttttttggct

SEQ ID NO: 9540 - DNA, 201 bp, Homo sapiens
aataagttgtcatctccatctattacagtatttgctctaatcatatttgacttatatacctgggagctccagtgttgagtgcatatatatttacaattgtwatatcctttccatatgttgaccttctttgtcacttcatagtttttgtcttgaaatctattttgtctaatattagtatagctattcctctttttttggctt

SEQ ID NO: 9541 - DNA, 201 bp, Homo sapiens
ttgtcatctccatctattacagtatttgctctaatcatatttgacttatatacctgggagctccagtgttgagtgcatatatatttacaattgttatatcmtttccatatgttgaccttctttgtcacttcatagtttttgtcttgaaatctattttgtctaatattagtatagctattcctctttttttggcttccattg

SEQ ID NO: 9542 - DNA, 201 bp, Homo sapiens
tttctcctatttgcatgtaatcaaagttgaatccagcccttcaatcaaaattacagatcgagtgttactgcctgggattggcagaactgtttgataggaaygaaaatgtttttatgttaatataaaatttgtgcccacatgtatgaaggatttttctattaaaactctacaattaagcggaagatgtgacacactgcaaga

SEQ ID NO: 9543 - DNA, 201 bp, Homo sapiens
tgatgatggacttgtaagacacaaagccccatgtctaacagtgtaaggagagtaaaaggactacttaaatattaagccatgttataagatggtgttgctgwgattgatgtattatcttttatttatggtaatggcattttgagatcaagttctgctccttgaattttcatgtaataagagtctgtggtgaagatgcagcaa

SEQ ID NO: 9544 - DNA, 201 bp, Homo sapiens
cttctatccatgagtgagtgagtatgtgtgtatgggtttgagtgtgtttgtattaatgagcttcttaagaataagttattcaaaagtattagtagcaaccrggttttaagaattattggcctttctgagattcccaagaaaaacttgaatccttttgctaggaaaagtttggattcactctacatattactcacgttgaaa

SEQ ID NO: 9545 - DNA, 201 bp, Homo sapiens
ctttgtcacattctgaaattcgtcaggtgttttaggatgcacactttcttagatcttttcgagggtcttaactgcagttctgtttccggaatggcgtattytctttctaggaattgtaggctcccggccgccccctgaggagctccgctagcagctaagagggcagccacgaagagcgcctgagcactctcgcgagactgt

SEQ ID NO: 9546 - DNA, 201 bp, Homo sapiens
tgatcgtaactgctgtctttgcaaatggagtgttttctagtgttttaacaataaacgtaatactgactctagctttgagataaattcttttaaaaatattmttcagggagaatatttgtttcctatcttcctgtgtatagtattgtaataaaatctctgttaaaaactatcaaattttttgctgtttattaagatgatcat

SEQ ID NO: 9547 - DNA, 201 bp, Homo sapiens
gaaacagggtgttgctctgtctccccgttggagtgcagtggtgtgatctcgaccaattacaacctccgtctcctgggttcaaatgattctcctgccgcagscaaccaagtacctaggatcataggcatgcacaaccacaactggcaaatttttgtatttttagtggagacagggtttcaccatgttggccatgctgttttc

SEQ ID NO: 9548 - DNA, 201 bp, Homo sapiens
gcatatatccttctggagataaaaaaactatgttgtaggatcatttgaaacaattcctcttttagttaaatcatccatcagacaggttcatttgtttttawttttatttttcaggattaatattcctttattttaatttttagtgattatttaataaatgttcatggtaccaggggtaaaacttcaaaacaaaatgtattc

SEQ ID NO: 9549 - DNA, 201 bp, Homo sapiens
atatgaggtgagtcaaagcacttagacgtgttttcaaaccactaatcttgatgattcagaaatgtgctcccttttccaatttcatcctgatacaaatgtawcatctccggatgatgccaatattctccccaattccatcatgagctgttctctataattcagaatctgtagactaagttgtaaaactaatgactgtcaatg

SEQ ID NO: 9550 - DNA, 201 bp, Homo sapiens
catagttcctggtattaaaaactcaatatattttaaaaatgatgctgatggtaatgatatgctatttgtcaagtaatcacacatatttttacccagaattwaaaaaaaaaaacaacttttcccctatcccttaggttacatatgttgctatgttcactgttttccttttatagttaaaataagctgtaacgcatcgtttcc

SEQ ID NO: 9551 - DNA, 201 bp, Homo sapiens
acattatgtttcaaggcatttgaaacactgtcatcttcttattcacttcctgaaaaagacaaggaagattataggcaagacttgacatggcaggaaatgtstaatacctcattggtttactgcggtgaggaagatgcaaaaccatccttttgccctctatcccttctacagcccccctccttaatatcattttctttgttc

SEQ ID NO: 9552 - DNA, 201 bp, Homo sapiens
tcgacatttttttttttttttttttgccaattgctttcccctaaagtaagtttatagtcttgatgtcatgagagtttttgagtttcccgcccctgcccccmcccccccaacccagtttggtcacacagttgatttatagaagagttgccaataacctgaataacctgtttctaatgccaaaaacggctgatgcctgagccc

SEQ ID NO: 9553 - DNA, 201 bp, Homo sapiens
agtaaaaagggatcaaatcaataattaacaatctttggttcctgcctatagcaaacaggtaaaatggaaagtagttatacaaagggtatattatattaacycctaacaaaattaaacaaagccagttttttttcatctcctttcattttttttttttttgaaacagggtgttgctctgtctccccgttggagtgcagtggt

SEQ ID NO: 9554 - DNA, 201 bp, Homo sapiens
acaatttagacatttactgtatgatatatgtattgggttttaaaatttccctatgtaacaactgaagatgctggatacaaattatggagaggttaaacaagaaaaaaattgcaaaacaatgaaaaagaatatggctttatttgcatactaacacacgagaattcacttttgacttcaacatcagtataaaacatttcagca

SEQ ID NO: 9555 - DNA, 201 bp, Homo sapiens
ccgtcttggctagacagtatgtcatcctttatctacattggtccctgtagtgaggatcatggagtagatgttgctgggagagtgagtatatgtgaaaaaaatgtgaaggtatttggtgctgatgaagcaatatgccctactgggcaggggagaggcacagaataagaattcttgccatgtggatgaactcattcaaacaca

SEQ ID NO: 9556 - DNA, 201 bp, Homo sapiens
aataagctctggtctcccgtagcactcccaggcttattaggatgaggaaattcctgcctaataaattttggtcaaaccggttgtctgctctcaaaccctgyctcctgataagatgttatccatgacaattcatgcccgaaacttcattagcaattttaattttgccccggtcttgtggtcctgtgatctcgccctgcctcc

SEQ ID NO: 9557 - DNA, 201 bp, Homo sapiens
tcagtaatttctttcagggaatttgtccattttatctaatttaattcactgaaataattttataaatattattcctcaatttcttggtctgtttgtgttgstataaaggaatacctgaagctgagtaatttataaataaaagaggtttatttagttcatggttccgcaggctgtacaagaagcatggcattagcatctgct

SEQ ID NO: 9558 - DNA, 201 bp, Homo sapiens
cacaatgatgtgagagagacagcatggtggttatcagatgcatgcacttggctcccaggactttttcagaagggctgcgagaggacaacacagccagcatyagcccatggaagcaacagaggacggagaatatatctgctcagctgtcttctgtcttctatttcccactggccagggtttccctgaggcagaactaccatc

SEQ ID NO: 9559 - DNA, 201 bp, Homo sapiens
tttgtttattctgtttagctcctgtaacattgcatacaaattatttatattaatagttttaggacttgggtgaaattcttgaactatgaataattttaggracttatttctataaatcatattgcatcaacaaaaatgcttggtatgtagaaggatgttactgaatgagagacaaataattactgaaataaatgttatttc

SEQ ID NO: 9560 - DNA, 201 bp, Homo sapiens; identical to SEQ ID NO: 964

SEQ ID NO: 9561 - DNA, 201 bp, Homo sapiens
ttcaaactgaatgtccctaacctcagagaactatagtcaattcttcactgaagcatttgtatcttcctcgtctttaattctggtatattttgtttattctktttagctcctgtaacattgcatacaaattatttatattaatagttttaggacttgggtgaaattcttgaactatgaataattttaggaacttatttctat

SEQ ID NO: 9562 - DNA, 201 bp, Homo sapiens
atgaaaaataatatgcctttctttgcatactaacacatgagaattcattttccacttcaacctcagtataaaaaagtacagcatatagcaaggagagaatstatatgaagaggagtgaatttgagctgttttgagaataatgaccttttctatttctataaagacagttttgaattcatctattagcatatgctggtgctt

SEQ ID NO: 9563 - DNA, 201 bp, Homo sapiens
ggttacatgagtgtttatgacacattgctatgttttccatttttgttttggttcatttctaagtgtgcagtctagctatatgataaaaattattaattagsagaaatggtccatgaaaattattattactctgctcattatatactgaagggaaaaatccactatttgtatacattcatgtgtaactctaagagattttaa

SEQ ID NO: 9564 - DNA, 201 bp, Homo sapiens
gggagactatgtctcaaaaaaaaaaaaaaaaattaatgacaatgaaaactaagtgtgtaattctaaataaatgttgactatataaaacaatagtgtcttcktggattgaatgtataattgataagatatatgcaaatagcaataaagaggctggagataaaggtaacaggaataaatttagtcaaactgtgttttgggctt

SEQ ID NO: 9565 - DNA, 201 bp, Homo sapiens
ctctactaaaaataaaaaaaaattagcctggcgtggtggcgggcacctgcagtcccagctactccggaggctgaggcaggagaatggctaaacccggaagrcggagctttcagtgagcagagatcgtgccactgcactccagcctgggtgacagggagactatgtctcaaaaaaaaaaaaaaaaattaatgacaatgaaaa

SEQ ID NO: 9566 - DNA, 201 bp, Homo sapiens
tactctgtcaccatttcaggattaagactagacagtcttttgtgttacaaattgggacatcagtgctctgggaaacagtgatgtccacgattctaaatccyttggtattactatttcattgattaaactacacttctgatattttagactaaaatgttttggcttatcgcagtctaggaaacctgtcttgggtatataaaa

SEQ ID NO: 9567 - DNA, 201 bp, Homo sapiens
tgcttagtgaagacagcacatcctggaaagcatttgtgagtgttgatttaagtttctggtagtctgcattcattctataacccgtctggttttgatagagkccagataggtttagtgaatcggcttatagaaaggactaccatcccctgtaactttcaagtgttttgtcacggcactgaccagttccattccttagggaat

SEQ ID NO: 9568 - DNA, 201 bp, Homo sapiens
atgtaaattaaacagaagtgacatagccgtgatataaaacagtgacacagtgttattattatgatacaaggcaaattgttttgatttttcctcataatggktgtagattaagaaccattcagcaaatcacaagcccagtaaaaagtaccagaagctctgctctgcttagtgaagacagcacatcctggaaagcatttgtga

SEQ ID NO: 9569 - DNA, 201 bp, Homo sapiens
tgagacagggtctcattctgtccctgaggctggagttcagtggcaggatcacagctcattacagcctcaaccttctgggctcaagtaattctcccacctcygcattgctagcagctgggactgcaggggcacaacatcacgcctggctaatttttgtattttctgtagggctaggatttcacagtgttacccaggctggtc

SEQ ID NO: 9570 - DNA, 201 bp, Homo sapiens
ctattattttgagacagggtctcattctgtccctgaggctggagttcagtggcaggatcacagctcattacagcctcaaccttctgggctcaagtaattcycccacctccgcattgctagcagctgggactgcaggggcacaacatcacgcctggctaatttttgtattttctgtagggctaggatttcacagtgttaccc

SEQ ID NO: 9571 - DNA, 201 bp, Homo sapiens
tattgctattattttgagacagggtctcattctgtccctgaggctggagttcagtggcaggatcacagctcattacagcctcaaccttctgggctcaagtrattctcccacctccgcattgctagcagctgggactgcaggggcacaacatcacgcctggctaatttttgtattttctgtagggctaggatttcacagtgt

SEQ ID NO: 9572 - DNA, 201 bp, Homo sapiens
acagtgaccttagccatgtgacttaatttctttagatataattttttttttgtatttttagtagagatgggaaaaaattagtcagtcatggtggcgagggrcctgtaatcccagctacttgggaggctgaggcaggagaattgcttgaacccgggaggtggaagttgcagtgagctgagatcatgccactgcaccccaacc

SEQ ID NO: 9573 - DNA, 201 bp, Homo sapiens
cctctgcgctttgtcacattctgaaattcgtcaggtgttttaggatgcacactttcttagatcttttcgagggtcttaactgcagttctgtttccggaatrgcgtattttctttctaggaattgtaggctcccggccgccccctgaggagctccgctagcagctaagagggcagccacgaagagcgcctgagcactctcgc

SEQ ID NO: 9574 - DNA, 201 bp, Homo sapiens
tcctctgcgctttgtcacattctgaaattcgtcaggtgttttaggatgcacactttcttagatcttttcgagggtcttaactgcagttctgtttccggaayggcgtattttctttctaggaattgtaggctcccggccgccccctgaggagctccgctagcagctaagagggcagccacgaagagcgcctgagcactctcg

SEQ ID NO: 9575 - DNA, 201 bp, Homo sapiens
taggagaatgtgcccaaatggagtttggctggagacaaagaataaagactagaaagaacaattaccctaggccagacatggtgttggacggggcaagatgyttactacttaaagccatagaacactgtttgctggacacaatgagtggaatatagaacaatgcaactattttaacactttacccctcttagtggtttatta

SEQ ID NO: 9576 - DNA, 201 bp, Homo sapiens
cggatactcctccactgaagagggaatagttctgcagtaattccctaggggtttgctttctcctctcctacgggcttgatggagacaggcacagagtcctrtgatgcccacgttgcatgcctctagcagctttgaattctgctggatcatctggcacaatgggccgagcaggttgggccagaccctgtatctgctgtagag

SEQ ID NO: 9577 - DNA, 201 bp, Homo sapiens
gttaattagactttacatgaagtgagcaactaagcttttctgttacaagacttcatgcccacagatacattcaagtcccaggtggaaggatgatctggatyaggcaaggtgctgaccatgggaacaggagacagtcaagggaatctgaggaagcacatgtttgtgtccaatatagtcccctccttgtgccactcagatgtg

SEQ ID NO: 9578 - DNA, 201 bp, Homo sapiens
tttgggaaagtcacactaaccaatacccccatttttctaagagatagtttttttttaatttattttttctcttttcctctcccctttccctatgtttcccygctttctacttaactttttagacatgcacatagaactgtttactttccccccaccagacagtcccttcgggcgagttcatctaactatgtgctccacgag

SEQ ID NO: 9579 - DNA, 201 bp, Homo sapiens
aaacgcatggaaaagtgatgcaactgaatgtatatcttagcttttggtgtctaaaactagagccaatgtctgagtttacagtgatgacatttatttgggarggcaagtccagggcagcaatgaggggtaaatgtggaaactgaggcaaaagaagatgtaaaaccatgtgtcgtgatgttgatatgattttgctggtggcca

SEQ ID NO: 9580 - DNA, 201 bp, Homo sapiens
tatttgtatatttttttagtatcctttctaaatgaatgttttaattgccatgttataaacgcatggaaaagtgatgcaactgaatgtatatcttagctttkggtgtctaaaactagagccaatgtctgagtttacagtgatgacatttatttgggaaggcaagtccagggcagcaatgaggggtaaatgtggaaactgagg

SEQ ID NO: 9581 - DNA, 201 bp, Homo sapiens
gtacagaagctctttagtttaattagattccatttgtacattttgtcttttgttgcaattgcttttggtgtttcagtcatgaagtctttgctcatgcctaygtcctgaatggtattgcctagcttttcttctagggtttttatggttttggatattacatttaagtttttaatccaccctgaattaatttttgtataatgt

SEQ ID NO: 9582 - DNA, 201 bp, Homo sapiens
tccacccactttttgatggggttgtttgtttaatagattgcaaaaattttctcccattctgtaggttgcctgtcactctgatgatagtttcttttgctgtrcagaagctctttagtttaattagattccatttgtacattttgtcttttgttgcaattgcttttggtgtttcagtcatgaagtctttgctcatgcctatgt

SEQ ID NO: 9583 - DNA, 201 bp, Homo sapiens
tgaagcctcttcaactattggcttatgaactcattccaatgaagctgctactgtcatcgtttcattgattctgacatttgcaagatcaccagagtctgtgttgctgaggttagtcttcatgttgcatgctctattagccacattgaacatagtttatttgcatttcaggatgctgtcctctcctgattttatctttgttca

SEQ ID NO: 9584 - DNA, 201 bp, Homo sapiens
cccactgagctactaacacttaagacgtctgcagatagcagagctaaaagagcactgtaacaccctccccctcgaggtttcaggggtgcgggcaccccccyagatgctgctgcggggcctgcacagaatttgttcctgctggcatccaaaagtgctcctgcacctgttcacctgtgtgctccctcccatgagggctgggcg

SEQ ID NO: 9585 - DNA, 201 bp, Homo sapiens
atgaagcctcttcaactattggcttatgaactcattccaatgaagctgctactgtcatcgtttcattgattctgacatttgcaagatcaccagagtctgtgttgctgaggttagtcttcatgttgcatgctctattagccacattgaacatagtttatttgcatttcaggatgctgtcctctcctgattttatctttgttc

SEQ ID NO: 9586 - DNA, 201 bp, Homo sapiens
aacttttcccctatcccttaggttacatatgttgctatgttcactgttttccttttatagttaaaataagctgtaacgcatcgtttcccatttttttttttgccagctacatttcttatctctattgataataactataccacctatgtctctgctttttcatgcttgagggatctctggatcaatcaacgtgcatgatgg

SEQ ID NO: 9587 - DNA, 201 bp, Homo sapiens
aaactgaaaagaaatacaatccaaggttggagtcttattttagcatctattaatcttaagccattaagtaatcaaaaataaattaaaaagaaaaaaatatmttcaaatatcacatgtagagaagtctagtttcttcagtggaaaacacatgttttttaagtgctcaaggaatatttacaaaattgcttaatatttttaatt

SEQ ID NO: 9588 - DNA, 201 bp, Homo sapiens
agatgcagtagaagagagaattagtgaattggaagatagctaaacagaatgaagcatagagagaaacagatggaaatataccaagctagagggtatcacaytgatgctacagtcagaacacctaacatacttctggagttctgtaagattagaggagagaaaatcaagcaagagaaatgttgcaaggatttttccaaaagt

SEQ ID NO: 9589 - DNA, 201 bp, Homo sapiens
ctggcacagtggccagagcagcttggagcagagtctatatcttctgtagagccctcatttgttctggattccacttgagaccagcagcctgggaaacttcrttaatgagtcagagcaatattctcaaatgtggaatatgttgtctccaaaatcccaataggcccccaaaacattgtgtctcttttgtagtgataggaaatt

SEQ ID NO: 9590 - DNA, 201 bp, Homo sapiens
gctctcccctctccaacaggcttgtcagagacatgcacagagtcctataatgaccactatgtatgttctagcatctttgaatcctgctggatcatctggcwcagtggccagagcagcttggagcagagtctatatcttctgtagagccctcatttgttctggattccacttgagaccagcagcctgggaaacttcattaat

SEQ ID NO: 9591 - DNA, 201 bp, Homo sapiens
gatactttaatgaacaaataaatgggtggctaaaatggataagttgatgtggtaaaccagtgaaaaggaaactcacacaaaatctgcagttgcatgaattmccctgttccagtctcaggttaagattacaggcttatccaagcagaatccttctcctaaggaaaagtttggctattccacaattttaggggaaatatgaca

SEQ ID NO: 9592 - DNA, 201 bp, Homo sapiens
ttttatatttcttactggtttttctatactgtatgtgtatgaataatttcccaacgtatacctagaaaagcctttgacctaatattagtctagaaaaaaawatatatatatgtgtgtgtgtgtttatgtgtgtatgaaaacttaagaacattgacaataacatgctcttttctgtttttttcatacaaactgccaaattat

SEQ ID NO: 9593 - DNA, 201 bp, Homo sapiens
cctgggatctgtgtgtccttatgattctggtagattcccactttccttcttgaaataaagctcacagagttaacctttatgagactttgttgaaaaatttrtgtaggttggtatttttttcttcttaaatatgtgatgaaaataaacattcaggtcatcccttgctttgtgtgaaagttttaaattaagaattcaattttt

SEQ ID NO: 9594 - DNA, 201 bp, Homo sapiens; identical to SEQ ID NO: 1005

SEQ ID NO: 9595 - DNA, 201 bp, Homo sapiens; identical to SEQ ID NO: 1006

SEQ ID NO: 9596 - DNA, 201 bp, Homo sapiens
ctctgataggacaaaaaaaggaaaatgggaggggacaaataagggaataaaagctcatggcttcagccagcagcagcaacctgcctgggtcgccttcctcycggtggaagctttgtcctttctctcttctcaataaaccttgctgttgctcactctttgggtccatgccatctttaagagcagcaacactcaccgtgaagg

SEQ ID NO: 9597 - DNA, 201 bp, Homo sapiens
gcttctatagccttatgcacttacagattgcaggttttatattagactgtgcggttcaacctacaagccagtagatggcacttataggtaagagccagttktggacaatgtgatggttatatatttgatccttgtttactggaagaaactctctgttgctgcagataatggtctgactcatggagtacacagtggtgtgaa

SEQ ID NO: 9598 - DNA, 201 bp, Homo sapiens
tttttctaagctgggtttggtggatggctgtggtgatttgagatgggccaaattctacatcttggaggacgttagagttttgccaatttaatctggatcakgtggcagcaatctcacgtcattagtttctcattcttcttctgggaacagtgtactagataggccatactcttatggtaaatggaaagaagaagaatcccc

SEQ ID NO: 9599 - DNA, 201 bp, Homo sapiens; identical to SEQ ID NO: 4293

SEQ ID NO: 9600 - DNA, 201 bp, Homo sapiens
taatctgccttcctcaacctcgcctgcgctgggcctggattttatttttctaagctgggtttggtggatggctgtggtgatttgagatgggccaaattctrcatcttggaggacgttagagttttgccaatttaatctggatcaggtggcagcaatctcacgtcattagtttctcattcttcttctgggaacagtgtacta

SEQ ID NO: 9601 - DNA, 201 bp, Homo sapiens
gaaataaccattataaattatggatattgcttatatcaggagatgcgaagaagggtttagggacttggaaagtggaatggaggtggacctaggctgttttmggtgttccttgtcttgccctgcatcatggttacttgagtgtttatgatacactgtggtatttcccatttttgtattggttcatttctaagtgcgcattat

SEQ ID NO: 9602 - DNA, 201 bp, Homo sapiens
taaataagcgctaagggtttacaggcaaatgctatagaggaggaaagtggagggaagagaggaggatgagaaaacagatgggactgcagaattttcatgcygaggatcagaagacctattgtatcttcattcctcatcaaggcttggggaatcaaaagaggacaaacaggggcccttctatgttgagttcctggttgacgc

SEQ ID NO: 9603 - DNA, 201 bp, Homo sapiens
ggtggtacataaaacaatgacatgtcttctagtctatgcattctagatttaataaaatacaatatacatattcatacacacgcacgcacacacacacacasagagagagagagagagagagagagaaataaaattgcaaccttagaggcaaatgggaattcagaaagcagctgcaaggtagtgagaggtaatctccaaaag

SEQ ID NO: 9604 - DNA, 201 bp, Homo sapiens
agtaggggtaaggggaggtttacttatattttgaaaagatctcatgacttgacctggtggtaatcctgctgagcaaatcctattaagtctaatttgttcakgctgctataaaaaataccataaaatgggtgcttatgaacaacagaaatttatttcttatagttctagaagctgggaagtccaagatccaggcattcacaa

SEQ ID NO: 9605 - DNA, 201 bp, Homo sapiens
ctttatctacattggtccctgtagtgaggatcatggagtagatgttgctgggagagtgagtatatgtgaaaaaaatgtgaaggtatttggtgctgatgaarcaatatgccctactgggcaggggagaggcacagaataagaattcttgccatgtggatgaactcattcaaacacaatgactgctttatgagacaatagata

SEQ ID NO: 9606 - DNA, 201 bp, Homo sapiens
aacttcaggcatgataactaaaaccaaattaacataaaataatacaggacgcaaaagaccaatagaaaatctgaaaagtagctagaggtagaagatagagyatgttgaaaagaactgtattctaaatacaacctgattttaacagaaaacatggaagcaggaattcaatggattaatgggaatcatgtcttcaatgtgttt

SEQ ID NO: 9607 - DNA, 201 bp, Homo sapiens
aaagctcaaaaaataagctgtccaaatatatatcaaataaggatggataaataattacagtaaaatcaaaaaatgaaaaaaatatagagaagtgaaaagawatggatcacatgtacatgcaatgatggggttaaattttggatacaaaatgttgattccaggaagccatgaataagaacatataggattgcacctatacat

SEQ ID NO: 9608 - DNA, 201 bp, Homo sapiens
taaaggtaacaggaataaatttagtcaaactgtgttttgggcttttctatgtctgtgagaagaatttgaacatcataatcaaggaccctgtaattctacamccagatatatatacacagaggaattgtagcaaatgatatgtgaaagaatgttcattgtagcattattcataaaagctcaaaaaataagctgtccaaatat

SEQ ID NO: 9609 - DNA, 201 bp, Homo sapiens
ctgttagatgcagtagaagagagaattagtgaattggaagatagctaaacagaatgaagcatagagagaaacagatggaaatataccaagctagagggtawcacattgatgctacagtcagaacacctaacatacttctggagttctgtaagattagaggagagaaaatcaagcaagagaaatgttgcaaggatttttcca

SEQ ID NO: 9610 - DNA, 201 bp, Homo sapiens
aaaaaccccaaaatctaaaacacttttaaaaataacatggtgttaagagtagtttgttcagtttccctatagaaaatgatttatggaaggagaataaaagwttattctgaacactaaaacaataagaccaaaaaaatgaattatcaatattgagaatccaatagacagaattagcctgttagatgcagtagaagagagaat

SEQ ID NO: 9611 - DNA, 201 bp, Homo sapiens
tgtttcattgtgggtgggcagtgagctgaggctcctcaagcatctctttctatttttattttgtttcttgacataggttctccagcatttggctcaaggcyccaagggcacatgtgacaagaaggcgccggctttttaaacattggaagttcttctgtgtcagttctgtgacagaacatttacttaacacatcatgaaggc

SEQ ID NO: 9612 - DNA, 201 bp, Homo sapiens
ttttctatttctataaagacagctttgaattcatccattagcatatgatggtgctttcctgttgaaattagtcatgaatttaaaggcagaaaatgttactrcacatttaaaagtcaagtgtttatcgacattaaggtctggatattaagggaatcacaaccagtgttattaaggctgcattttttctttcttttcatttgt

SEQ ID NO: 9613 - DNA, 201 bp, Homo sapiens
cccagcaccatttattaaatagggaatcctttccccattgcttgtttttctcaggtttgtcaaagttcagatagttgtagatatgcagcattatttctgasggctctgttctgttccattgatctatatctctgttttggtaccagtaccatgctgttttggttactgtagccttgtagtatagtttgaagtcaggtagtg

SEQ ID NO: 9614 - DNA, 201 bp, Homo sapiens
gtatctttgcatacaatttttcagttgtgaatgatatatttgtattgtgatatttccagctggttagtgtataaacaaaaatggcatttcattaaaaaaaactgagttagttaccaactaccttactaaaacgtgacttttatagaatattttaaaaccctttctaaatgaacatttaaattgccatattaaaaacccaca

SEQ ID NO: 9615 - DNA, 201 bp, Homo sapiens
ctcaacatgcagttagaaaagtcatttcttccagtttttgagttaaagaaaaccttttttgaagttgagatctgatgtcaagtatttcaggttttttttttctaaaccacctcagagtccctgaattgccaatgatctcctctatcttccatacttgaaattctttttaaacttcacataaaagaacttgagtcttcccta

SEQ ID NO: 9616 - DNA, 201 bp, Homo sapiens; identical to SEQ ID NO: 986

SEQ ID NO: 9617 - DNA, 201 bp, Homo sapiens
tcagaaacgtaaaggtgagtccaagaagccatgaacaggaacatacaggactacacctacatatggcttaaaggtttaaagtaggcaaaaccgtatcataragtttagggttgcatacctagttgttaatgtataaagaaaatcaaggccaggcgcggtggctcacgcctgtaatcccagcactttgggaggccgaggcgg

SEQ ID NO: 9618 - DNA, 201 bp, Homo sapiens
cgattcttctcttagggtcttgtgttcctttttccatgattcagccccttagggtgggctgctcacatgcatggtagcttgctaacactttagaggtgagyatgcgcagtgtgtttactggaattgtacacatgcttgcctgaggcattcttcccttttttggtggaatgcccacagaaggtcatattccaccattttctc

SEQ ID NO: 9619 - DNA, 201 bp, Homo sapiens
gtatgtgagtaaatttcagaaacgtaaaggtgagtccaagaagccatgaacaggaacatacaggactacacctacatatggcttaaaggtttaaagtaggyaaaaccgtatcataaagtttagggttgcatacctagttgttaatgtataaagaaaatcaaggccaggcgcggtggctcacgcctgtaatcccagcacttt

SEQ ID NO: 9620 - DNA, 201 bp, Homo sapiens
ataggtgtggatttgtttccacattctctattctatttcgctgctctatgtgtctgtttttatgccagtaccatgctgttttggttactatagctctgtartatactttgaagtcaggtgatgtgattcctccagttttgttctttttgctcaggataactttggctattctgagacatccgtatattttcagaagccatt

SEQ ID NO: 9621 - DNA, 201 bp, Homo sapiens
aaattgaggaaataaccattataaattatggatattgcttatatcaggagatgcgaagaagggtttagggacttggaaagtggaatggaggtggacctagsctgttttcggtgttccttgtcttgccctgcatcatggttacttgagtgtttatgatacactgtggtatttcccatttttgtattggttcatttctaagtg

SEQ ID NO: 9622 - DNA, 201 bp, Homo sapiens
tgcacaggctggtcttgaactcctgggtgctcctgccccagccttacaaaatgttgggattatgggtgtgagctaccctgcctggccaataaagggtcttwttgaaaatattaagttgaatatgcaagaaggaatacaaattaatgaaagtggtaaatatgtgcataattctaaatgaatgtttagaaaataataatgtct

SEQ ID NO: 9623 - DNA, 201 bp, Homo sapiens; identical to SEQ ID NO: 602

SEQ ID NO: 9624 - DNA, 201 bp, Homo sapiens
catgtgtctttatagtagcatgctatttaatcctttgtgtagatagccagtattggaatcactgggtcaaatggtatttctagctctagatccttgaggartcaccacactgtctttcataatggttgaagtaatttacactcccaccaacagtgtaaagcgttcctatttctccacatcctctccagcatctgttgtttc

SEQ ID NO: 9625 - DNA, 201 bp, Homo sapiens; identical to SEQ ID NO: 4317

SEQ ID NO: 9626 - DNA, 201 bp, Homo sapiens
attgaatttaataagaacgtctcctcttaaaaatgtaatgagaaagcatgtaaaaatagcaggttaaataaaagaacacaatcgcaagtttaaggtaacartaataaatatttaaaatgaaataattggaagcagattttgaagaacaattacgttctctctaagaaaaaaaagaacatattgcaagcaaataatataatt

SEQ ID NO: 9627 - DNA, 201 bp, Homo sapiens
tagccactccataaaatataagaataaaagttatatttatttattatataactttgattggtgaccacatttcagtattccaacttaactagaaattatcygaagattttcatcaactcactgaatttaatattagtctaaggtcttaaattgcaccaggaatcttggaaattaaatttaagctgataggctagagaaaat

SEQ ID NO: 9628 - DNA, 201 bp, Homo sapiens
aacaaacctatctttaaataatagccaaatgaagttctctaaacataaaggaaagaatagaagagaaatttgtggaacatcaagaatgaagtaaaaataasagaaagggggaaagtgggcaaacacaatatatcttcctttttcacttgagttttcttcatatgttttaaccagccattgctagcattgaagatggaagag

SEQ ID NO: 9629 - DNA, 201 bp, Homo sapiens
acaacaaagaaaatgaacaaatttgagctacatagataataatactcacagatgtgagaggaattatcaagatggaaaaatacatttactgtaatctcatygacgtaaagtttgaaaaactttatttttaatacattgtcattcattacattggtgataaaaccctacagtgaaacatatgagtgatcatcatatgagtga

SEQ ID NO: 9630 - DNA, 201 bp, Homo sapiens
ggccccagagtgtgatgttccccaccctgtatccaagtgttctcgttgttcagttcccacctatgagtgagaacacgtggagtttggttttctgtccttgygatagtttgctcagaatgatggtttctagcttcatccacgtccctacaagggacgtgaactcatcattttttatggctgcatagtattccatggtgtata

SEQ ID NO: 9631 - DNA, 201 bp, Homo sapiens
ctctgtctccatttttccctgaaaaattgatgagttctccagtgtcttcttatcaccattttcttgtcaggaattggctaataccaatgccccaaagatayaaacagttttctcccaaccttgattctggggaccatgagtaaagaaattcgatttttcatcacccttatgtggattaagaggagttctaattaggaagcc

SEQ ID NO: 9632 - DNA, 201 bp, Homo sapiens
aatttcttagaattttgaagccatgtatatttcattcatgtattttatatttcatttgtagaatttatgatgtctatttataattattaagaagtaacagyttatcccaggataaatattgctcttttctattgttatttgaaccacaggaatacaccacattgtgcttagaattcattgcttgaacctcgaatttattgg

SEQ ID NO: 9633 - DNA, 201 bp, Homo sapiens
caaaaatttcttagaattttgaagccatgtatatttcattcatgtattttatatttcatttgtagaatttatgatgtctatttataattattaagaagtarcagcttatcccaggataaatattgctcttttctattgttatttgaaccacaggaatacaccacattgtgcttagaattcattgcttgaacctcgaattta

SEQ ID NO: 9634 - DNA, 201 bp, Homo sapiens
tgaaataaaaaacaatttatttccttccaagatacagttgttgtacaggcattggatagacattctcattccaaaagggagaaatcagccacaagagaggrgcagtaggcaccacgcaagtacaaaacacagcagggcaggcgttaaatattaacgttctaaaataatctcttttgactgtatgtgctgccttctgggcac

SEQ ID NO: 9635 - DNA, 201 bp, Homo sapiens
gttctctataggtgtggatttgtttccacattctctattctatttcgctgctctatgtgtctgtttttatgccagtaccatgctgttttggttactatagytctgtaatatactttgaagtcaggtgatgtgattcctccagttttgttctttttgctcaggataactttggctattctgagacatccgtatattttcaga

SEQ ID NO: 9636 - DNA, 201 bp, Homo sapiens
tgataaataggcatctagtttcatttttctgcaaatggatatccaattttcccagcaccatttagtgaagagactgtcctttccccagagtatgttcttgscacctttgtcatgagttctctataggtgtggatttgtttccacattctctattctatttcgctgctctatgtgtctgtttttatgccagtaccatgctgt

SEQ ID NO: 9637 - DNA, 201 bp, Homo sapiens
gcaactgtttgactttccacatagctgcagaatatttgaccactggtattatattccttctcaacccacatcactatttatgtcagcagaaaaacagaaakttaatctgcctaatcaactagaaaattcaatgttacctgtagcaattcttatattattgaaaggccttcctgtaatgtagtaggtctttaaaaagttcat

SEQ ID NO: 9638 - DNA, 201 bp, Homo sapiens
gttctgggaaatgtattgtttcattgatgtgtttctcaatatattctggtttcttggtctgaaattaatgattgttgatattaaagagaacaggttatagraggtggaaatcaagattctacttggtacacggtatgtttacattcattttaaatgacaggtggattgctgaggtccttgactcctgtacagatgcctaag

SEQ ID NO: 9639 - DNA, 201 bp, Homo sapiens
tgtctgtaatcttccttgtttgcttgtctttttcaggaagtgaataagaagataacagtgtttcaaatgccgtgaaacatggcatcatgctctaacttcartataccaataaaacaatcagcttgcaatttctgctggtggtgtctctttctgagtgtttgggactctagaatctgagacccatgttcacattgtaagaat

SEQ ID NO: 9640 - DNA, 201 bp, Homo sapiens
cttgtttgcttgtctttttcaggaagtgaataagaagataacagtgtttcaaatgccgtgaaacatggcatcatgctctaacttcagtataccaataaaayaatcagcttgcaatttctgctggtggtgtctctttctgagtgtttgggactctagaatctgagacccatgttcacattgtaagaatatccaggacccctt

SEQ ID NO: 9641 - DNA, 201 bp, Homo sapiens
ggcctttctgaggttcccaagaaaaccttaaatgcttttggtaggaaaagacgggattcattctacatattactggcgttgaaaatataaatctactttgktgatgatcctagttatgcccaagctccctttaccaggtaataaaaccaatgtgtcatctgtgtattgggttgttaaattgctgaacacaaattatggaga

SEQ ID NO: 9642 - DNA, 201 bp, Homo sapiens; identical to SEQ ID NO: 1007

SEQ ID NO: 9643 - DNA, 201 bp, Homo sapiens
ctttgcagaaatacgttataaaagtggccaagtgggtatgttttccatatgccctcctgttggatgaaagcccttgggtaattcctagagtggagaagagyctggaatttccaggtccactttctggaggtaaaaattctgtggcgggtgtgctttggtctgcaaattgactgtcagttctcaggagaatctgtcttggag

SEQ ID NO: 9644 - DNA, 201 bp, Homo sapiens
agtaagaaaaataaataaaccatttcatgatcaagctcttatttctaaagagaggattttagggctaaataaatcaaacagaagtaagctctcccccacawcttgtctatatcatttggataatgatgtaattcaaaggcacagagcaccttttcaacaacataagcaaagtgaaaattatgtcatggaatacaatgatgt

SEQ ID NO: 9645 - DNA, 201 bp, Homo sapiens
atataaatgctacaggaaaccaaagaccaatagaaaatttgaaaagtagcctgagaaaaaagatagattatgttgaaaggatcaactgtttgaatgacaastgattttcagcagaaagcatggaagctagaattcaatgtaatatattttcagtgtgtttcaaaggagtagcagacatttcataaacagaaattcaaaagg

SEQ ID NO: 9646 - DNA, 201 bp, Homo sapiens
aagactacctccacattcctaatgttattcttactttgaaacatcagattttgagcacttatattttactggacacatttttttcttatttccaatttaawtatttatgataacatttcaaagtggcagaaattagtgaatttccaataaattatagtagtatagatattaaatgtataggacaatttttctaaatttatc

SEQ ID NO: 9647 - DNA, 201 bp, Homo sapiens
tagaaaaaggaagagataagcaggaagactacctccacattcctaatgttattcttactttgaaacatcagattttgagcacttatattttactggacacmtttttttcttatttccaatttaattatttatgataacatttcaaagtggcagaaattagtgaatttccaataaattatagtagtatagatattaaatgta

SEQ ID NO: 9648 - DNA, 201 bp, Homo sapiens
taaattaattagaaaaaggaagagataagcaggaagactacctccacattcctaatgttattcttactttgaaacatcagattttgagcacttatattttrctggacacatttttttcttatttccaatttaattatttatgataacatttcaaagtggcagaaattagtgaatttccaataaattatagtagtatagata

SEQ ID NO: 9649 - DNA, 201 bp, Homo sapiens
gctaaaatggataagttgatgtggtaaatcaatgaaaaggaaactcatcacaaaatctgcagttgcatgaattcccctgttctggtctcaggttgaggttkcaggcttatccaagcagaatccttcctcagaggaaaagtttggctattccacaattttaggggaaatatcacactagtgatatatatagtgatatatagt

SEQ ID NO: 9650 - DNA, 201 bp, Homo sapiens
ccacttgacattccttgtgggtggtgggagccttcttctgccctactcatgcctgactaactacgtactgtaagagccctatacctaaaagtctcagatgrtatggatgtgtgtccttccctctgagtactattatctgggaaatggctacaggtctttgagaaagcatcatatgaatacattctgaatattctgtggtga

SEQ ID NO: 9651 - DNA, 201 bp, Homo sapiens
aggaacattactgcacaaccagaaatcaggtgcacatagaaattaaggtcaggaccttaaagggaatcttgcccattgatattagtcctgccctaaaaaaagtcggacatggtatgtttactactaatcattttttttccataacgttaatggtattttgtattttcccatgggcacctacattacacttatagactattt

SEQ ID NO: 9652 - DNA, 201 bp, Homo sapiens
ttaccattttcatgtcaggagggtggcatggagatggacttagcctattttcggtgttccatctcttgccctttataagggttagttgactgtttatgatrcattccggtatttcccatttttgttttggttcatttctaagtgtgcattataattttaatattaaagtttttgattaggagaaatgtctcatagaaatta

SEQ ID NO: 9653 - DNA, 201 bp, Homo sapiens
aaagaggctatcaaaacagtcagagatattgaccatcttcactgttagctgtaggatcagtgtccaccccccgacacacccacacaaactcacatacacasaaatgaaaagcacagtgaaaagcagaatagcagtctttccaaacagattgaaaaccaaaagatgtctaaagttcaatcctgacactgtgccgactgcttg

SEQ ID NO: 9654 - DNA, 201 bp, Homo sapiens
gtgcagagctgctgtgggctccacccagtttgaacttcctggtggctttgtttacaccgtaaggggaaaattgcctactcaagccccagtaatggcggacrtccttcccttgactaagctcaagcatcccaggttgacttcagactgctaaactagcagtgagaatgtcaaaccagtggatcttagcttgctgggctccaa

SEQ ID NO: 9655 - DNA, 201 bp, Homo sapiens
caaggagaaacctgtcttgcaccaggcctgcagcttcctcagtcccccacatcatcaggcaatatctgcctggcactcctctttgttccttttctctgacmttcctttttgacatgatggttgacctgaagtcaccgaggcaggactgctcatctccaggtcctatgggaaacagtacctggtgaaaccagagacaataat

SEQ ID NO: 9656 - DNA, 201 bp, Homo sapiens
gttggtgcaattaatagaataattctgccaattcataacactgccagaccacagcgacccaatgaaactcactgactctcagagaagtttattccctctgycaatgttcatctttcctggcaaaccatctttagtgttccaggcaaactagagcatggtgaagtcgaagaagattctactttctgttccattcagagagct

SEQ ID NO: 9657 - DNA, 201 bp, Homo sapiens
attttctaaattgaaaacaacatcgacaacatccggttaaactggaattacaaagagaagagaaaatcaacttaatttttcctcatttactacagtgaccytagccatgtgacttaatttctttagatataattttttttttgtatttttagtagagatgggaaaaaattagtcagtcatggtggcgaggggcctgtaatc

SEQ ID NO: 9658 - DNA, 201 bp, Homo sapiens
aacacagcaaagagcataaacctacagattcaagaagctgagcaaatcccaaccagaatacaaccaatgaaatccattccaggaaaattcattgtccaatwtctgaaaattaaagacaaaatattgaaagcagaaagaaggaaatgacatcatagttatagggaaaatgcaatataaataatagtggttattatcaccaga

SEQ ID NO: 9659 - DNA, 201 bp, Homo sapiens
aaagttacttctgatggatttagttctgtccaggaagaaaatagatgatatattcagaatactctacaatctttggcaactgtgtaaccttgatcttgggratggatgttgggaaaaaaattctccatgaatgtattgcacttctgcatggtctagctcttatcttgtgagcaaacagtatgtttgatgagcaaacagaag

SEQ ID NO: 9660 - DNA, 201 bp, Homo sapiens; identical to SEQ ID NO: 4318

SEQ ID NO: 9661 - DNA, 201 bp, Homo sapiens; identical to SEQ ID NO: 4319

SEQ ID NO: 9662 - DNA, 201 bp, Homo sapiens; identical to SEQ ID NO: 4320

SEQ ID NO: 9663 - DNA, 201 bp, Homo sapiens; identical to SEQ ID NO: 4321

SEQ ID NO: 9664 - DNA, 201 bp, Homo sapiens
aactatttgttttttaaatgtttacatgcacgatttggagaatgtctaggtaatttcctaaagattattattgtgggtaagttgcattattaaagagcaargcttatgtgaaacttaatacatttagagttagaagttgagtgtatttttacttaaaatgcattgcttgaacaaatgatttataaataatcttaaactcat

SEQ ID NO: 9665 - DNA, 201 bp, Homo sapiens
ccactaacattcttgagcatttattgtgtgcttagaaatttgtgtatgaattcatttaatatagtcctatggcttaacacgagattttgttcatttttttwatattttatttatttatttatttttattttactttaagttctagggtacatgtgcacaatgtgcaggtttgttacatatggatacatgtgcttgttggtg

SEQ ID NO: 9666 - DNA, 201 bp, Homo sapiens
aatagtgttccatgtatcccttctctctgcaattattgattgactcaggctaaagaagtcttcgcaaatattaacacatttttccatggttgcccaggggktattcttcattacaagtgtgcatgtgtatttatgtgtgtgtttggggtgaggctgtatttgttggggacatagagttttcacacatcacttctcaagctc

SEQ ID NO: 9667 - DNA, 201 bp, Homo sapiens
aatattacatattgaagcacctcacaatgacttaacaccaattttatttgaggaatttctttagtgttaaaatacagtaaacagccacagtaacagtaatrccactaacattcttgagcatttattgtgtgcttagaaatttgtgtatgaattcatttaatatagtcctatggcttaacacgagattttgttcattttttt

SEQ ID NO: 9668 - DNA, 201 bp, Homo sapiens
ggggcagttgctagagaagaacaaagagctcccattgccccaccatgaacttttctctgattaacaagcaatgccactatactgggagagggacacaagtrtagaaagagccttctctatagtgcatgtgtggactcttgaagctgagcacaaacactgagaatccctttggcactccagtcttccccaaaacacaagtta

SEQ ID NO: 9669 - DNA, 201 bp, Homo sapiens
tacgcagttagaaacgtcatttcttccagcttttgaattaaagaaaagctgtttttgaagttgagatctgatgtaaattattttagtatttttttctaagrcacttctaagcccctgaattgctaattatatcctcatcttccatttacaaaattccttctaaacttcagataagagaactcaaatcttctcttttctaaa

SEQ ID NO: 9670 - DNA, 201 bp, Homo sapiens
aggaaagtttatgtctgctgatgctgctcccacagctgccccttctcccaggtgctctgtcccagggagatgagagttttatctataagcccctgactggrgctgctgcctttctttcagagatgccctgaccagagaggaagagtctagagaggcagtttggctacagtggttgtgcagagctgctgtgggctccaccca

SEQ ID NO: 9671 - DNA, 201 bp, Homo sapiens
ggctgccttcagccaaactatctgaagctatgcaaaaacttttggtcttccaagaaggtttttgttttgttttatacttttccctaccattctgactgaayccctacactaccagatagttgaattggtgccttcctttgcagaaatacgttataaaagtggccaagtgggtatgttttccatatgccctcctgttggatg

SEQ ID NO: 9672 - DNA, 201 bp, Homo sapiens
gtatgtgaatagcttagaaaaaaatctctttgataataaagggaggaaatatgatcatggtcttgattgctattatcggtttccatacgcagttagaaacrtcatttcttccagcttttgaattaaagaaaagctgtttttgaagttgagatctgatgtaaattattttagtatttttttctaagacacttctaagcccct

SEQ ID NO: 9673 - DNA, 201 bp, Homo sapiens; identical to SEQ ID NO: 4294

SEQ ID NO: 9674 - DNA, 201 bp, Homo sapiens
gaagaactgattttaatgtaattaacaacaaattaacaatgagcaatggaattaatggacatagcaagagagaagtactgaaacaataaatattaaatattaatcccttaattattgtattaatcccttagttgaaaataaaaaaaattataaaattaggaatttttctctctgaagagaagccaggtatagaggaggaca

SEQ ID NO: 9675 - DNA, 201 bp, Homo sapiens
ggaggcagaggtggcactgagccaagatcacaccattgaactccagcctgggcaacaagagcaaaactctgtctcaaaaaaaaaaaaaagggccgggcgcrgtggctcacgcctgtaatcccagcactttgggaggccgaggcgggtggatcatgaggtcaggagatcgagaccatcctggctaacaaggtgaaaccccgt

SEQ ID NO: 9676 - DNA, 201 bp, Homo sapiens
gaaaacaaactgacggtatctggaacattttatatttccattcgtttttccttagtgtatatatttgaataatttcaaaacagatacctagaaaagtcatctatctatctatctatctatctatctatctatctatcacacacacacacacatatatgtgtgtgggtatatgtgtgcatgtgtgtgaataacaacattgac

SEQ ID NO: 9677 - DNA, 201 bp, Homo sapiens
ctgaaaacaaactgacggtatctggaacattttatatttccattcgtttttccttagtgtatatatttgaataatttcaaaacagatacctagaaaagtcatctatctatctatctatctatctatctatctatctatcacacacacacacacatatatgtgtgtgggtatatgtgtgcatgtgtgtgaataacaacattg

SEQ ID NO: 9678 - DNA, 201 bp, Homo sapiens; identical to SEQ ID NO: 994

SEQ ID NO: 9679 - DNA, 201 bp, Homo sapiens; identical to SEQ ID NO: 995

SEQ ID NO: 9680 - DNA, 201 bp, Homo sapiens; identical to SEQ ID NO: 996

SEQ ID NO: 9681 - DNA, 201 bp, Homo sapiens; identical to SEQ ID NO: 997

SEQ ID NO: 9682 - DNA, 201 bp, Homo sapiens
tatcctagttatgaccaagctccttaaacaatttaaacctgtactgtatgatatgtgtattgggttttaaaatttccctatgtaacaactgacgatgctgracacaaattatggagaggttagcaaggacaacaattgcaaaacaattaaaaaaatgcctttatttgcatactaacacatgagaatttacttttcacttca

SEQ ID NO: 9683 - DNA, 201 bp, Homo sapiens
gcactacccattagcttatctaatttcttccaccttcaaaatacatctcaaatgtgtccacttgcatgatctttactagaagcttgttgttcggcccacartgctctctcctggaggtctttaacagcctcgacctggtcctggtaacattcttcccccagtacatcccatatcagttccctcacgacaatcagagtgatc

SEQ ID NO: 9684 - DNA, 201 bp, Homo sapiens
agtggaatatgactaattccacctagatgacctcctggggaaactcgttttccaattggggatttataagaaaataattcattgcatctgctaagtgtgtsagtgcatgtgtgtctatgtattgaggagcttattaacaatgatgtcatataaatgtattggttatcagaaaccagattttaaggtgtattggcctcccag

SEQ ID NO: 9685 - DNA, 201 bp, Homo sapiens
atttaatcttctaagcaatggtgtatggtactcctcactatctttattttcatttttgtctctacaattggacaataaactattaagtttctgaaaaatcyttccagggtcctggattggtactcctcttctcagctgctgattgctctgtgatacctagaaattccctgttcctcaattcataaaatatactactcggta

SEQ ID NO: 9686 - DNA, 201 bp, Homo sapiens
atctggccataaactggccccagtaaactggccataaataaaatctctgcagcactgtgacatgttcgtgatggccatgacacccatgctgaaggttgtgrgtttaccagaatgagagcaaggaacacctggcccacccagggcaggaaaccacttaagggtattcctgagccacaaacaatagcatgagcgatctgcacc

SEQ ID NO: 9687 - DNA, 201 bp, Homo sapiens
taaaccccaatcagagtcacaatatcttcccccaattcggcttaccttcatctaagtcctgagctgagctgaaggccagcagggccactgacagcagaatyagaagcatcttgcagaaggctctggtgtcactcccaactttatgctgggagaaacgtgtcagctccctttataaagacaagcaggacaatggcgcatttg

SEQ ID NO: 9688 - DNA, 201 bp, Homo sapiens
acagtgtactcaccagatgatgttctcatggtgaatggaaaagagcaagaaactccaatatggaaaccgtcttaaatctctgtgtaaagtctactaatttsctgttcactgaagcaaattacatgagtgaattcagagtccaagttccaggtagtcaccctgcctgtggtgggaggatactgcaggattatatgacaaagt

SEQ ID NO: 9689 - DNA, 201 bp, Homo sapiens
ctccatctgtgtgagttgaaacaagaagagctgagctcatgctggaaaaccctcctgtcttcatatctctctgtcttcaccacacggccggcccctctctscctgacctgcctctcaactcccaacctccccccttcccaaggcttcctaattagaactcctcttaatccacattagggtggtgaaaaatcaaatttcttt

SEQ ID NO: 9690 - DNA, 201 bp, Homo sapiens
ctgacgctcctcatctatgaactgctcagagtctcctccatctgtgtgagttgaaacaagaagagctgagctcatgctggaaaaccctcctgtcttcatayctctctgtcttcaccacacggccggcccctctctccctgacctgcctctcaactcccaacctccccccttcccaaggcttcctaattagaactcctctta

SEQ ID NO: 9691 - DNA, 201 bp, Homo sapiens; identical to SEQ ID NO: 956

SEQ ID NO: 9692 - DNA, 201 bp, Homo sapiens; identical to SEQ ID NO: 958

SEQ ID NO: 9693 - DNA, 201 bp, Homo sapiens
gtctttatagtagcatgctatttaatcctttgtgtagatagccagtattggaatcactgggtcaaatggtatttctagctctagatccttgaggaatcacyacactgtctttcataatggttgaagtaatttacactcccaccaacagtgtaaagcgttcctatttctccacatcctctccagcatctgttgtttcctggc

SEQ ID NO: 9694 - DNA, 201 bp, Homo sapiens
attattagaaaactctgctactttgtaggaggagctttggataactatgaataagtccctttacagacttaactttaaaaaaccatctgatttttctttaytttctttatttttattgtaaattgacatattttacttgcatacatttatgaggtatcaggtgttgttatgatttatgactactatgtggaataattaaat

SEQ ID NO: 9695 - DNA, 201 bp, Homo sapiens
aatcagaaaggcaccagagaaaagtgaagcccaatgcaaggaaatccaaaaatatgatacaagaagtgaagggagaaatattcaaataaattttaataatataataataaattttaataataaataaataataaattttaataataaataaattcaaacatttgatacagttagtacataaattttgatgcataaaaaagt

SEQ ID NO: 9696 - DNA, 201 bp, Homo sapiens
ttacgaagaccatggggaaagtgtagtatctgggccagaatacatcgtccctcactgcatggtcccttacagcttcccttggctaggagagggagttcccygaccccttgcacttcccgggtgaggcaacaccacaccctcctttggctcgtcctccgtgggcttcacccgctgtctaaccagtcccaatgagatgagcca

SEQ ID NO: 9697 - DNA, 201 bp, Homo sapiens
gctgtggccggagaatggcgtgaacgtgggtggcagagcttgcagtgagccgagaccgcgccactgcattccagcctgggcgacagacaaaaaaaaaaaaagaaaagaaaaaattaggtggcacctatgacaatactttaaaaagcatataaaagactttggtctatttgcataagtatttttttattgtgaattatatat

SEQ ID NO: 9698 - DNA, 201 bp, Homo sapiens
ccagctactcggaaggctgtggccggagaatggcgtgaacgtgggtggcagagcttgcagtgagccgagaccgcgccactgcattccagcctgggcgacaracaaaaaaaaaaaaagaaaagaaaaaattaggtggcacctatgacaatactttaaaaagcatataaaagactttggtctatttgcataagtattttttta

SEQ ID NO: 9699 - DNA, 201 bp, Homo sapiens
tactttggctgatttaggctggataaagcagtggcattctgactccattagtttctcattcttcttctgggaacagtgtactcaccagatgatgttctcayggtgaatggaaaagagcaagaaactccaatatggaaaccgtcttaaatctctgtgtaaagtctactaatttcctgttcactgaagcaaattacatgagtg

SEQ ID NO: 9700 - DNA, 201 bp, Homo sapiens
ggctactatggtgaaaccccgtctccactaaaaatacaaaaaaattagctgggagtggtggtgggcacctgtattcccagctactcggaaggctgtggccrgagaatggcgtgaacgtgggtggcagagcttgcagtgagccgagaccgcgccactgcattccagcctgggcgacagacaaaaaaaaaaaaagaaaagaaa

SEQ ID NO: 9701 - DNA, 201 bp, Homo sapiens
gaatgctcattgtagaattattctaacagctcagaaaagaagctgcccatatgtacatcaaataaggatgaataaataattacaataaaatcataaaatgraaaaacatagagaagtgaaaagaaatgaatcacatgtacatgcagttatgtgattacatttcagatccataatgttgagcacaggaagccatgaatacga

SEQ ID NO: 9702 - DNA, 201 bp, Homo sapiens
gaataaatttagtcaaactgtgttttgggcttttctatgtctgtgaggagaatttgaatgtcataatcaaggacgctgtaattctacacccagctatatawatgcaaaggaattgtagcaaatgatatgtgaaagaatgctcattgtagaattattctaacagctcagaaaagaagctgcccatatgtacatcaaataagg

SEQ ID NO: 9703 - DNA, 201 bp, Homo sapiens
atccttcctcagaggaaaagtttggctattccacaattttaggggaaatatcacactagtgatatatatagtgatatatagtcacactatatatatatatwgtgatatatagtcttgatgcagctgtgtcaggtgtctgaattggagacaaggtaaaacatcaaaattagatggcaccttggaaggctgaggcgggcggat

SEQ ID NO: 9704 - DNA, 201 bp, Homo sapiens
atgaaatatcagtactgagaatccaatagaaagagtcaaccagttagagcactagaagagataattagtgaattagaagatagctacacagaatgaagcayagagagaaagaaatggaaaatgcaaggctagagggtaacacactgatgctatcatcaaaacacctaacatacttgtagagttctgtaagattagaggaga

SEQ ID NO: 9705 - DNA, 201 bp, Homo sapiens
ataagactaaaaaaatgaaatatcagtactgagaatccaatagaaagagtcaaccagttagagcactagaagagataattagtgaattagaagatagctamacagaatgaagcatagagagaaagaaatggaaaatgcaaggctagagggtaacacactgatgctatcatcaaaacacctaacatacttgtagagttctgt

SEQ ID NO: 9706 - DNA, 201 bp, Homo sapiens
agaaagagaataaaagattattctgaacactaaaacaataagactaaaaaaatgaaatatcagtactgagaatccaatagaaagagtcaaccagttagagyactagaagagataattagtgaattagaagatagctacacagaatgaagcatagagagaaagaaatggaaaatgcaaggctagagggtaacacactgatgc

SEQ ID NO: 9707 - DNA, 201 bp, Homo sapiens
aaattctaacacaaagcttttattctattctctgactaaagtgttgggaaaagaagaaaattgttaccgttttcatttctaacatactaaaacaaaaaacaaaaaatcaaaaaaatcagaaacatttttaaaaagaacagagtgttaagagtagtttgttcagttttcctatagaaaataatgttcagaaagagaataaaa

SEQ ID NO: 9708 - DNA, 201 bp, Homo sapiens
taatcagaaaggcaccagagaaaagtgaagcccaatgcaaggaaatccaaaaatatgatacaagaagtgaagggagaaatattcaaataaattttaataawataataataaattttaataataaataaataataaattttaataataaataaattcaaacatttgatacagttagtacataaattttgatgcataaaaaag

SEQ ID NO: 9709 - DNA, 201 bp, Homo sapiens
taaattctaacacaaagcttttattctattctctgactaaagtgttgggaaaagaagaaaattgttaccgttttcatttctaacatactaaaacaaaaaacaaaaaatcaaaaaaatcagaaacatttttaaaaagaacagagtgttaagagtagtttgttcagttttcctatagaaaataatgttcagaaagagaataaa

SEQ ID NO: 9710 - DNA, 201 bp, Homo sapiens
cataggaaaaaagggagaatactacatcaaagaaacaccctctggaacaaaaaagtctaaacaacagccttcagccctagatcttttctctgatagagccyacccaaatgaggaggagccagaaaaccaactctggtaatatgacaaaacaaggctctttaacactccccaaacatcacactagctcaccagcaatggatc

SEQ ID NO: 9711 - DNA, 201 bp, Homo sapiens
agtgggaaagggagatcctctgcccccaaacacaacctcccctgggaaaactgaaggtctattttatgggaaaagattacaaccttacctggagctgagtyaatttagagagctgagcaaaatacaggaatagagggagcagtagaaaaggccctgtgagctcgctgggtcctcaagcaggctattcctgtgtggcatcac

SEQ ID NO: 9712 - DNA, 201 bp, Homo sapiens
attcatgcccgaaacttcattagcaattttaattttgccccggtcttgtggtcctgtgatctcgccctgcctccatttgccttttgatattttattacctwgtgaagcatgtgatctctgtgacccacaccctatttgtacactccctccccttttgaaaatcactaataagaacttgctggttttatggcttagggggca

SEQ ID NO: 9713 - DNA, 201 bp, Homo sapiens
taatctcttaatcccatcatcttcataagctgaggaggatgtatgttgcctcaggaccctgtgatgattgcattaactgcacaaattgtagagcctgtgtgtttgaacaatatgaaatctgggcaccttgaaaaaagaacaggataacagcaatgtttagggaaaaagggagataaccttaacctctgactgctggttagc

SEQ ID NO: 9714 - DNA, 201 bp, Homo sapiens
atttattcttaagaaatgtatatgaaatcagagtcgtagaatgaaaaaagagtaatatgtaatttttaaactacagttacatttcaaatgtgaatttaaaytgtaaaatgttaagtttaataatattttatataaatataaaagtgcaaaaattattctttgatgtttctaattttgaaaagggcatgaggcactgacaat

SEQ ID NO: 9715 - DNA, 201 bp, Homo sapiens
ggaggattgtttgtatttcagtggggtcagtggtaatatccactttgtcatttttgattgggtttatttggatcttctctcttttttttctttattagtckggttaggggtctatcatattaattttttaaaaacatcaaatcctggattcactgaccttttgtatgttttttttaatcacaatttccttcagttcagctc

SEQ ID NO: 9716 - DNA, 201 bp, Homo sapiens
cttttcaatttttgtttctgttgcaattgattttggtgtctttgccatgaaatctttgccaggtcctatgcaggaatggtgtttactaggttatttttccrttttttaaaaaaatagttttaggttttacattttattatttaacccagcttgcattgagttttgtgtatgtataagaaaggtgtccagtttccatcttct

SEQ ID NO: 9717 - DNA, 201 bp, Homo sapiens
tctgccatactagtctaaactgctgcatatcttgccaggatatttgccatgagtttctaattattctttctagttctgcacatccttttatcctgatgtaytctcaaggtggcagccagagagaacctgtaaaaacgcaaatttgatcatgccattcttctcctccagatttttcagtggctttcatctaattcagagtaa

SEQ ID NO: 9718 - DNA, 201 bp, Homo sapiens
tcagatgcttagactaaaaaaaaatggagtcaatattttctctctttcagaacctatctttaaggcatcagcaaattttgttgactctaccctcaaaaacmtacagaatccaatcccttgtcatcactctgccatactagtctaaactgctgcatatcttgccaggatatttgccatgagtttctaattattctttctagt

SEQ ID NO: 9719 - DNA, 201 bp, Homo sapiens
catcactgttgtagacctttggggagacctaaaattcaaatgtttattcaattggttttgagcaatgtctgcactgcttgaatttgaaattaaatgtgtcytgtttacttgcatgaagacactttatacatatctcccttatcacttctattcctctactctgatctcagttcctttaaggatttgagctgggcctgagat

SEQ ID NO: 9720 - DNA, 201 bp, Homo sapiens
gtgtataagagctctcctttctccacatccatcccaacatctgttttgtttgtttgtttgttttaatcatagccattctgaatagggtaaggtgatagtgwggttttgatttttatttctctgatgattagtgatatagagtatttttcacatactgttgattatttgtatgtcttatttgaaaagatgtccatttctatc

SEQ ID NO: 9721 - DNA, 201 bp, Homo sapiens
cagatttatttttcatatactgatttcatttcctctgcatagatacagtagtaagattgctagattgaatagtaatcgagttttagttctttgagaaatcrtactgttttccatagagtttatactatttactttccaatcagggtgtataagagctctcctttctccacatccatcccaacatctgttttgtttgtttgt

SEQ ID NO: 9722 - DNA, 201 bp, Homo sapiens
tgagttctccagtgtcttcttatcaccattttcttgtcaggaattggctaataccaatgccccaaagatataaacagttttctcccaaccttgattctggrgaccatgagtaaagaaattcgatttttcatcacccttatgtggattaagaggagttctaattaggaagccttgggaaggggggaggttgggagttgagag

SEQ ID NO: 9723 - DNA, 201 bp, Homo sapiens
gagtgatgaaaggttagctttaggactacctgagtaaacaagctctttagataaactactatacattcctttgtatctgtgccccaagtgcccaggctccrgcaaagagactggctgccttcagccaaactatctgaagctatgcaaaaacttttggtcttccaagaaggtttttgttttgttttatacttttccctacca

SEQ ID NO: 9724 - DNA, 201 bp, Homo sapiens
gtgcagaacaattaaaaaactcttcattggcatgctagtagatgagaaatcacttttcacttcaacaccaatatggaaaattttatcttacagcaaggacrttgtgtttgaataggagttaatttgagctgttttggaaatcatcatgttttccataaagacagcattgatttcatccactggcatattgagatgctttcc

SEQ ID NO: 9725 - DNA, 201 bp, Homo sapiens
gactcccagaacttttccagaagggctacaaagggaaacgacagctggcattagtccatggaagagagagagaggagggagaatgtatctgctcagctgtygttagtcttctgtttccccttggccagggtttccctgagttagaactaccatctctgttgttctgtcttacatcatccagtcccttggtggtggtcatga

SEQ ID NO: 9726 - DNA, 201 bp, Homo sapiens
tttccaatttcattatttatgataacatttcaaagaggcagaaattagtgaatttccaataaattatagtaatatagatattaaatacacaggacaatttytataaatttatctctaaatgaaataattatgcccatttttaccattcaaagattataccatgcatgtgtacacatatgtgaggaaaaatattttgatagt

SEQ ID NO: 9727 - DNA, 201 bp, Homo sapiens
gtgatattacaccagcattttaaaaatttctttttgtctgttcagacatgataacttttctgcccatcattttttccattctaatagtggttatatttgtkattggaaattttgctaatggcttcatagcattggtaaattccattgagtgggtcaagagacaaaagatctcctttgttgaccaaattctcactgctctgg

SEQ ID NO: 9728 - DNA, 201 bp, Homo sapiens
gaggcagagcttgcagtgagccgagatctcgccactgcactccagcctgggtgacagagcaagactccgtctcaaaaaaaaaaaaaaaaaaaaaaaagaamcatcagattctgagcatctgtattacactagacacctttttttcttatttccaatttcattatttatgataacatttcaaagaggcagaaattagtgaat

SEQ ID NO: 9729 - DNA, 201 bp, Homo sapiens
gataattagagttttgctgaataaagaagaatagagcattatgatagtaagaaatccaagataaaattttaaacttttctttaaatattttaaaaagtaasagataagcaggaagtctacctccacattcttaatgttagttttactatgaaacatcagattctggccgggtgcggtggctcatgcctgcaatcccagcac

SEQ ID NO: 9730 - DNA, 201 bp, Homo sapiens
tgctgcagccatctgagtacctgggattacagacgggcaccaccacacctggctaatttttgcatttctagtggatatagagtttcaccatgttggccatrctggtcttgaagtcctaacctcaggtgatccacctgcctcagcctgccaaattgctgggagccacgggcctggccaatcatctgctttttataggtgata

SEQ ID NO: 9731 - DNA, 201 bp, Homo sapiens
cttgagagcaggagttccctttgcaacatatggaaactccatgtctacaaaaaattgaaaaattagctggcgtggtgctgcatgcctatagttccaaatasttgggaaactgaggcaggaggattgcttgagcccagggtttcaaggctgtagtgggctatgatcctgccactgtactccagcttgggtaacagagggaga

SEQ ID NO: 9732 - DNA, 201 bp, Homo sapiens
gtgagtgttgattgaagtttatggtaatctgcactcattctataatccatctggttttggtagaggccagataggttaagtgaatccggttatagaaaggwctaccatcccctgtaacttgcaagtgttttgtcacggcagtgaccagttccattccttagggaatgcggttattatattttatacattgggttgccagca

SEQ ID NO: 9733 - DNA, 201 bp, Homo sapiens
ctagaaagcatttgtgagtgttgattgaagtttatggtaatctgcactcattctataatccatctggttttggtagaggccagataggttaagtgaatccrgttatagaaaggactaccatcccctgtaacttgcaagtgttttgtcacggcagtgaccagttccattccttagggaatgcggttattatattttatacat

SEQ ID NO: 9734 - DNA, 201 bp, Homo sapiens
taaggttacaggcttatccaagcagaatccttccgcagaggaaaagtttggctattccacaattttaggggaaatatgacaataatatagtcttgatgcarctgtatcaggtgtctgaattggagacaaggtagaacatcaaaattagatggcgcctattacaatatttttagaaagcgtataaacaaccttggtctattt

SEQ ID NO: 9735 - DNA, 201 bp, Homo sapiens
cattccttatctatttttcttttggctcctctattcctgacacaacaagggtggacatatttcccacacgcttggttttgcagagtacctatatcagttaggtttttctgccagagaaacctctccaacactacattacatattgatatctcacatgtctttggattcagtttttctaagctgggtttgctggatggctct

SEQ ID NO: 9736 - DNA, 201 bp, Homo sapiens
ccattccttatctatttttcttttggctcctctattcctgacacaacaagggtggacatatttcccacacgcttggttttgcagagtacctatatcagttaggtttttctgccagagaaacctctccaacactacattacatattgatatctcacatgtctttggattcagtttttctaagctgggtttgctggatggctc

SEQ ID NO: 9737 - DNA, 201 bp, Homo sapiens
gccattccttatctatttttcttttggctcctctattcctgacacaacaagggtggacatatttcccacacgcttggttttgcagagtacctatatcagttaggtttttctgccagagaaacctctccaacactacattacatattgatatctcacatgtctttggattcagtttttctaagctgggtttgctggatggct

SEQ ID NO: 9738 - DNA, 201 bp, Homo sapiens
tgccattccttatctatttttcttttggctcctctattcctgacacaacaagggtggacatatttcccacacgcttggttttgcagagtacctatatcagttaggtttttctgccagagaaacctctccaacactacattacatattgatatctcacatgtctttggattcagtttttctaagctgggtttgctggatggc

SEQ ID NO: 9739 - DNA, 201 bp, Homo sapiens
agtcttgctctgtcgcccaggctggagtgcggtggcgccatctccgctcactgcaagctccgcctccggggttcacaccattctcctgcctcagcctcccragtagctgggactacaggtgcccgccaccacgcctggctaattttttgtattttttgtagagacggggtttcaccgtgttagccaggatggtctcgatcc

SEQ ID NO: 9740 - DNA, 201 bp, Homo sapiens
cttgcctgtgttgtatagcaccaaggcttgcctgagtgtagtgagattcacagaagtttggacaattcttgtagcctgagcaggctgccagcccccttctytcatatatgtgtgcctgggagtgtgctgtcctcacacatctcacagataagcaagaccatctctgttacatgaaaaatttagctaaatgtgaaaatatcc

SEQ ID NO: 9741 - DNA, 201 bp, Homo sapiens
tttagcttgcctgtgttgtatagcaccaaggcttgcctgagtgtagtgagattcacagaagtttggacaattcttgtagcctgagcaggctgccagccccyttctttcatatatgtgtgcctgggagtgtgctgtcctcacacatctcacagataagcaagaccatctctgttacatgaaaaatttagctaaatgtgaaaa

SEQ ID NO: 9742 - DNA, 201 bp, Homo sapiens
tattttagcttgcctgtgttgtatagcaccaaggcttgcctgagtgtagtgagattcacagaagtttggacaattcttgtagcctgagcaggctgccagcmcccttctttcatatatgtgtgcctgggagtgtgctgtcctcacacatctcacagataagcaagaccatctctgttacatgaaaaatttagctaaatgtga

SEQ ID NO: 9743 - DNA, 201 bp, Homo sapiens
tgaacatctatagtagaaggcaagtgtggtgctgagggctgccacccacctctaggtacccaagctcctgcagcagtcctgcgtctccctttcacccaccytcactcacagacagtgtccctttcagctcttccattacctctgtttttgatgtgtctagtgagagcatagctgatatttatgctttcctgatacactagt

SEQ ID NO: 9744 - DNA, 201 bp, Homo sapiens
ccaggttatacaaccagtgtgtcatctctgtattaggttgtaaaatttctctaacaactgaagttgctgaacacaaattgtggagaggttaaacaaagaartaagtgcagaacaattaaaaaactcttcattggcatgctagtagatgagaaatcacttttcacttcaacaccaatatggaaaattttatcttacagcaag

SEQ ID NO: 9745 - DNA, 201 bp, Homo sapiens
ttatttccttccaagatacagttgttgtacaggcattggatagacattctcattccaaaagggagaaatcagccacaagagaggagcagtaggcaccacgmaagtacaaaacacagcagggcaggcgttaaatattaacgttctaaaataatctcttttgactgtatgtgctgccttctgggcacatgcctcttctttctg

SEQ ID NO: 9746 - DNA, 201 bp, Homo sapiens
gagcttcttaagaataagttattcaaaagtattagtagcaaccgggttttaagaattattggcctttctgagattcccaagaaaaacttgaatccttttgstaggaaaagtttggattcactctacatattactcacgttgaaaaattaaatttactttggtgatgatcctagttatgtccaagctccctttaccaggtta

SEQ ID NO: 9747 - DNA, 201 bp, Homo sapiens
aacaatttcttctatccatgagtgagtgagtatgtgtgtatgggtttgagtgtgtttgtattaatgagcttcttaagaataagttattcaaaagtattagkagcaaccgggttttaagaattattggcctttctgagattcccaagaaaaacttgaatccttttgctaggaaaagtttggattcactctacatattactca

SEQ ID NO: 9748 - DNA, 201 bp, Homo sapiens
aaaggggcatcctggctttataacaattcactctcatgaaaaacaactcattcccctagaacaaattcagtcttgtgagagtgagaactcactcactacaytgaaaatggtaccaaggcattcatgagggaaccaaccctatgactcaaacacttctcactaagctcaacctcccaacaccactactttggggatcaaatc

SEQ ID NO: 9749 - DNA, 201 bp, Homo sapiens
aaaaatgatattttaatgaacaaataaatgggtggataaaatgggtaagctgatgtggtaaaccaatgaaagggaaactcatcacaaaatctgcagttgcrtgaattcccctgttctgttctcaggttaaggttacaggcttatccaagcagaatccttccgcagaggaaaagtttggctattccacaattttaggggaaa

SEQ ID NO: 9750 - DNA, 201 bp, Homo sapiens
cccattcatcctgatttggggaaacaagaagctaaagcagacttttctttcagttttgtggcatgtgaggtactgggtgaaaggagagaagccttcatctycatagattcacaagagcagcattgtgtatcttctagcagaaaacaaacgtgttatatgaagcattttatatttcttactgtgttttctgtaatgtatgta

SEQ ID NO: 9751 - DNA, 201 bp, Homo sapiens
caagatcccagcatgaaggtccacataaaagctatgcaaactgtgacctccttcctcttgttatgtgccatttactttctgtccataatcatgtcagtttrgagttttgagagtctggaaaacaaacctgtcttcatgttctgcgaagctattgcattcagctatccttcaacccacccattcatcctgatttggggaaac

SEQ ID NO: 9752 - DNA, 201 bp, Homo sapiens
aaagagagagttttaggaccagattgtcaaacagaggtaagacctcagatcttctgtcacacttgagtgagtgatgatggagtttgaaggttatagttctrtaaccaaaactatattcacggatagggattaaatggtggaattccttagaagcaccagattcagttttgtttccatgggaataaaagttcttcaatgttt

SEQ ID NO: 9753 - DNA, 201 bp, Homo sapiens; identical to SEQ ID NO: 991

SEQ ID NO: 9754 - DNA, 201 bp, Homo sapiens
taatttgagttgttttgaaaataagaatattttccataaagagagcgttgaacttacccattagcatgccatggtgatttctggcttgacattggtaacarcaattaaaagtaaaaagaatgtcacagcacatacacaaatcaggtgcatatagaatttaaggtcaggatattcaagcaatcacaaccagtgatattacac

SEQ ID NO: 9755 - DNA, 201 bp, Homo sapiens
tgaatgggttaatttgagttgttttgaaaataagaatattttccataaagagagcgttgaacttacccattagcatgccatggtgatttctggcttgacaytggtaacaacaattaaaagtaaaaagaatgtcacagcacatacacaaatcaggtgcatatagaatttaaggtcaggatattcaagcaatcacaaccagtg

SEQ ID NO: 9756 - DNA, 201 bp, Homo sapiens
aaatgttttgtatagtaataaatatttaaacattagtcttgagagaaactttaccaaaggcctaagaattagagatatgtttgataaataaatattattcrtgagctgaaagccctgagtgggaaaataggactaacttcacctagacaacctcctggaaactcctttttttattttggaactgatgagaaaataatttgt

SEQ ID NO: 9757 - DNA, 201 bp, Homo sapiens
caagttccttatagattctgaataggactttgtcagatgcatagttagcaaaatattttctcccattctgcaggttgtctgtttactctgttgataatttmttttcttgtgcagaaactctttagtttaattaagtttcatttatcaatttctgtttttgttgcaattgcttttggcatctttgtcatgaactctttgcca

SEQ ID NO: 9758 - DNA, 201 bp, Homo sapiens
tatggaagccatctgaaatctctatgcaaagtgtagtaattttctgtttatcaaagcaagttaaatggttgtactccaagttcaggggcaaggtagtcagycttctcagtgatggcaggatactgcaagactatatatcaaagggttgggtactcaggaattcttatacaattgctaaatgttttgtatagtaataaatat

SEQ ID NO: 9759 - DNA, 201 bp, Homo sapiens
cctttagtgagtcagagaaatatccttaaatgtggtatatgttgaattcaaaaccccaataagcccccataaaactgtatttcccttttagtgataggaartatatatatatagggcaacatgccatttactgtaaaaaggatgttttgacaaaaggaccagaagcattggacccctataaacttcatctatgttataggt

SEQ ID NO: 9760 - DNA, 201 bp, Homo sapiens
aatgctctagtagaattattcgtaactgttcaaaaaagaagctggccaaatatatattaaggatagatcaatcattacagtaaatccacacaatggaacartatagagaagtgaaaaaaaatcacatgtacttgcaactatgtgactaaatttcagaaacacaatgttgagtccaagaagccacaaacaagaagaacatgt

SEQ ID NO: 9761 - DNA, 201 bp, Homo sapiens
gtaagctatgattgtgccatttcactccagcctgggctgcactctagcctgggcaaccaaacaagactctgtctctaaaaacaaaaaaaaacgaacaaccraaaacaaagcctcccactccattctgtgaaacacagtgtctttttttagttctcaaatattattagtgttagttcaggccccatgtttaaaattctgaga

SEQ ID NO: 9762 - DNA, 201 bp, Homo sapiens
acaaattaatgaagtggtaaatatgtgcataattctaaatgaatgtttactgcataaaataataatgtcttgttggggtaattatataattgataagatayatgcaaatggcaaaaaatagaatggaggtaaagctgacaggagtacatttagttaaattatcttttaaacttttctatgtctatgaggatattttgcaca

SEQ ID NO: 9763 - DNA, 201 bp, Homo sapiens
tgagtctgcagtaagctatgattgtgccatttcactccagcctgggctgcactctagcctgggcaaccaaacaagactctgtctctaaaaacaaaaaaaaacgaacaaccgaaaacaaagcctcccactccattctgtgaaacacagtgtctttttttagttctcaaatattattagtgttagttcaggccccatgtttaa

SEQ ID NO: 9764 - DNA, 201 bp, Homo sapiens
acctgtaatccaaacaatttgggaggctgaggtgggaggagcacttgaggccaggagttccagatcagcctgggcaagacagcaagaccctgtttgttaawgaaaataaactgattgtagtactgcgtgcctgtagttccaactacccaggaagttctggcagggggatcagtttagcccaggaatttgagtctgcagtaa

SEQ ID NO: 9765 - DNA, 201 bp, Homo sapiens
aatgataaatatgtgcataattctaaatgaatgttgactgaataaaataatagcgtcttgctgagttaaatatattattgataagatatatgcaaatagcrataaagagactggaggtaaaggtgacaggaacaaatttagataaattattttttgcacttttctatgtctgtgaggataatttgaacaccacatttaatg

SEQ ID NO: 9766 - DNA, 201 bp, Homo sapiens; identical to SEQ ID NO: 959

SEQ ID NO: 9767 - DNA, 201 bp, Homo sapiens
ggatgtgtagaccaagcttttattctattttgtgaccaaagtcttgggaaaagaagaaaattgttagcattttcatgtcaagcatacgaaaaacaaaaaaacaaagccaaccaactgaacaaagaacccaactttttttaaaaaacttggtggtaagagtgctttgttctgcttctccatagataatgatttatagaagga

SEQ ID NO: 9768 - DNA, 201 bp, Homo sapiens
tattggaatggcatcttgagatccagcacagctcattgaatttccctgtggggagagtttgtggtgaagactcatcaacagacaagctgctatccccaccyaaaaaaaaaaactactaacatcacatcaatttccaggttcttccaacttgcggaaggatgtgtagaccaagcttttattctattttgtgaccaaagtctt

SEQ ID NO: 9769 - DNA, 201 bp, Homo sapiens
agttttcactggcaccttctaaatatctagtaacacaggatcaaatcagtaactaaccatctttgttttttcctgtcccagacaggtaaaatggaaagcagttatacaaatgctatactaactcctcacaaagactacccaaagataatattatcatctgtgttttttggtgatcatactgaggcagagagcagttgtgaa

SEQ ID NO: 9770 - DNA, 201 bp, Homo sapiens
gacgttgccaatattcccctccattccatcatgagccgttctctgtaattcagaatctgtggactaagctgtaaaactaatgactgtcaatctattctacrtgaaatagtgggccaaagaaaaaggaaaacatgataagcagtaaaaatatatacacaacattttttgcttacactaatgatcaaataacacccataggac

SEQ ID NO: 9771 - DNA, 201 bp, Homo sapiens
gaacatgggaggggacaaataagggaataaaagctggccattccagcccacggggcagcccacggggcaacccactcaggcccccttccaccctgtggaasctttgtccttttgctcttaacaataaaccttgctaccactcagtctttgggtccacaccgtctttaagagctgaaaccttgctactgctcagccctgggg

SEQ ID NO: 9772 - DNA, 201 bp, Homo sapiens
tcatgaaggcctgttttgaagagaaggggaataagactgcatctgttcatatgaggtatgtcgaagcacttggatatgttttcaaaccaccaatcttgatsatttagaaatgtgctcccttttccaatttcatcctgataaaaatgtatgatctctggacgttgccaatattcccctccattccatcatgagccgttctct

SEQ ID NO: 9773 - DNA, 201 bp, Homo sapiens; identical to SEQ ID NO: 4303

SEQ ID NO: 9774 - DNA, 201 bp, Homo sapiens
aagtgattctcccatcttagcctccagagtagctaggacaacaggcgtgcaccactacgccctgctaattttttctatttttttgtagagacatggttttkccatgttgcccaggcaggtcttgaactcctgtgcttaggcaatccacctgcctcagcctcccaaatgatgggattacaggtgtgagccaccacacctggc

SEQ ID NO: 9775 - DNA, 201 bp, Homo sapiens; identical to SEQ ID NO: 4306

SEQ ID NO: 9776 - DNA, 201 bp, Homo sapiens
ataaataaataaatgaataaataaacagattttttgacatgtggactaggagtatgggacccctaaaaacaatatctgtgttgcaggtctctaaatattaycaggtgtatctctttctgctggtattttatttctatttaatgttcaagtattttactatatttaggaaactttccatttcctggttattgcaccaattac

SEQ ID NO: 9777 - DNA, 201 bp, Homo sapiens; identical to SEQ ID NO: 4309
  misc_feature (1)...(201): n = A,T,C or G, or insertion/deletion polymorphism (see Tables 1-2)

SEQ ID NO: 9778 - DNA, 201 bp, Homo sapiens
gagaatgtatctttggggtaggttttatttcattatgaattcttattttatgttgttgttagataatgatgcacacaattaaatttgagtgacaaacataygtagagtaaattttgtatatatataccaaaaacagtactaaagaatactagatttataccagtatgtgaatagcttagaaaaaaaattcgtttgtataat

SEQ ID NO: 9779 - DNA, 201 bp, Homo sapiens
agatatgcaaaaattaattttcaaagacattgattattctcaaattaattcacatattcaatataattctaaccagaatcttaaagaaatttattttcaarttgacaaaacagtcctaaattacacatgaattaagtattcaaaaataattcagacaattcttgaaaaagaaaattaaggtaggggtatccagtagatagc

SEQ ID NO: 9780 - DNA, 201 bp, Homo sapiens
catgatgttatatattgtgaaattacataactataatactttagtgaaggatttgaactatatagatatgcaaaaattaattttcaaagacattgattatkctcaaattaattcacatattcaatataattctaaccagaatcttaaagaaatttattttcaaattgacaaaacagtcctaaattacacatgaattaagta

SEQ ID NO: 9781 - DNA, 201 bp, Homo sapiens
tagagtttggatgatttaggctagatcaggcagtggcattctgactccattagtttctcattcttcttctgggaacagtgtaatagccagatgatgtcctyatggtaaatggaaaagagcaagaaactccaatgtggaagccatcttaaatctctgtgtaaagtctactaatttcctgttcattgaagcaagttacaggag

SEQ ID NO: 9782 - DNA, 201 bp, Homo sapiens
aagaggggtgccagacagatattgcctgatgatgtgggtaacggagaaagctgcaagcctggtgaaagacagatttctccttggcagcagagtacaggaaragaacaggaaatgctcctaaaggtcgctcagctcaggtcccttccatgaccttctccaatgtcaacaatcagcaaaagagactagcatatcaagaaagta

SEQ ID NO: 9783 - DNA, 201 bp, Homo sapiens
tggccctgtggaaactggatcagttttagctgggcttgatgggttgtatcttaggcacagggtaggtgcttaagccaagcagctcccaatgggttactggrattattttctttggtttcaccagatactgttttccattagacctggagatgagcagtcctgccttggtgatttcaggtcaaccatcatgtcaaaaaggaa

SEQ ID NO: 9784 - DNA, 201 bp, Homo sapiens
agtgagactctgcctcaaaaaaaaaaaaaaaaaaaaaaaagaatgagcctggaagtagtccctctttctctattttttcagaagagtttgagtaggattgrcatcagttctttaaatgtttggtagaattcagatctaaagccgtctgctcccaggcttttttttttttttttttttaaactgggagacattttattgcag

SEQ ID NO: 9785 - DNA, 201 bp, Homo sapiens
ggagaatgcgtagaccataattttaatctcttctgtgacctaagtattacaaaaagaagaaaatcactacaattttcatgtcaggtgtgctaaaaatttayaaaaactattttttaagaacttggtgttataaatactttgtttagtttctccattaaaaatgatttatagcaagagaataaaagttcatttctaccccta

SEQ ID NO: 9786 - DNA, 201 bp, Homo sapiens
caaatcaatttccagtttcttccaagttgcaggagaatgcgtagaccataattttaatctcttctgtgacctaagtattacaaaaagaagaaaatcactamaattttcatgtcaggtgtgctaaaaatttataaaaactattttttaagaacttggtgttataaatactttgtttagtttctccattaaaaatgatttata

SEQ ID NO: 9787 - DNA, 201 bp, Homo sapiens
agtcttgatttctgctaataaaaacagagtaaaatttaaatcatggaatagaaaggtggagctgtggttgagatattatattttattaattgtaatgacaktttgagatccagtgctgctcactgaatttccctgtgaggagagtttgtggtgatgacccagcaacagacaagctactatccaaaaaaagctactcacatc

SEQ ID NO: 9788 - DNA, 201 bp, Homo sapiens
ctctttgatcttttaaagattgttataaatgaagaagtcttgatttctgctaataaaaacagagtaaaatttaaatcatggaatagaaaggtggagctgtrgttgagatattatattttattaattgtaatgacattttgagatccagtgctgctcactgaatttccctgtgaggagagtttgtggtgatgacccagcaac

SEQ ID NO: 9789 - DNA, 201 bp, Homo sapiens
tttttatctgttcaaacatgatgtgttttctgctcatcatttcatcaattctggtagtgtttgcatttgttcttggaaatgttgccaatggcttcatagcyctagtaaatgtcattgactgggttaacacacgaaagatctcctcagctgagcaaattctcactgctctggtggtctccagaattggtttactctgggtca

SEQ ID NO: 9790 - DNA, 201 bp, Homo sapiens
aagataattgccatcaactcctaattattctttctagttctgcacatcattttctcctgatgtactctcaagatagcagccaaagagagcctatgaagatkcaaatttgatcatgccattcttcagctttagatttttcagtggcttctcatctcattagagtaaggccaaaatccttacaaagtcctataatcatttgaa

SEQ ID NO: 9791 - DNA, 201 bp, Homo sapiens
ctcatctaaactgctgccatacctagccaagataattgccatcaactcctaattattctttctagttctgcacatcattttctcctgatgtactctcaagrtagcagccaaagagagcctatgaagatgcaaatttgatcatgccattcttcagctttagatttttcagtggcttctcatctcattagagtaaggccaaaa

SEQ ID NO: 9792 - DNA, 201 bp, Homo sapiens
tttctctaagaagtcatttgacatcttcatttggatgtcgtaacaagaacttgaactaacatgtccaaatcaaaatagtgatcttccctctagtctccagmgttgtttcttctatagcctttccctcttctgttaatgaccacttcagtctttcagatgcttagaccaaaaacacggagttaacattttctctctttcaga

SEQ ID NO: 9793 - DNA, 201 bp, Homo sapiens
ttggtacagttaatgtcttagtatctcagtaatctgtttttatatttttctctatgatcaattaattatgagttaatttttatatatggtatgaaataatrgtctacactcatgtttttatcattctgtttttactcccacttcttaggtaagttcatctagtcataaccttagttactttctgtgtgctgttgatgccaa

SEQ ID NO: 9794 - DNA, 201 bp, Homo sapiens
tcaccactccattaaatctgacatttgcaagatcaccgataagtctgtgttgccaatggttagttttcatgttgcatgctctatgagcagcactgaacctrgtttatttgcatttcaggatgctgccctctcctgattttatccttgttcactggcacaatttcttagtctcctttgctagttcttcctcttgtctgtaaa

SEQ ID NO: 9795 - DNA, 201 bp, Homo sapiens
tgtcaccactccattaaatctgacatttgcaagatcaccgataagtctgtgttgccaatggttagttttcatgttgcatgctctatgagcagcactgaacstggtttatttgcatttcaggatgctgccctctcctgattttatccttgttcactggcacaatttcttagtctcctttgctagttcttcctcttgtctgta

SEQ ID NO: 9796 - DNA, 201 bp, Homo sapiens
tttctaagctgggtttgatggatggctgtggtgattggagatgggccacgtactgcatcttgaagatagagtttggatgatttaggctagatcaggcagtrgcattctgactccattagtttctcattcttcttctgggaacagtgtaatagccagatgatgtccttatggtaaatggaaaagagcaagaaactccaatgt

SEQ ID NO: 9797 - DNA, 201 bp, Homo sapiens
caatgtcaaaggctgacctcaggagtcagcttttgcaactcttgtcccctcttggtttataattatttagcaaagtatgaggcctcttcaactatcggtcyatcaacccatttaaatgaggctgttactgtcaccactccattaaatctgacatttgcaagatcaccgataagtctgtgttgccaatggttagttttcatg

SEQ ID NO: 9798 - DNA, 201 bp, Homo sapiens
taattctaaataaatgttgcctgtagaaaacaatagtgtcttgttggattaattgtataattgataagatatatgcaaatagcaataaggagactggagayaaagtgacaggaataaatttagtcaaactgttttgggcttttctatgtctgtgagtagaatttgaatatcataatccaggaccgtataaatctacaccca

SEQ ID NO: 9799 - DNA, 201 bp, Homo sapiens
ttatatgatttatttttgaaatatttacatacataatttggacaccgtttacataagttctaagagatatcattgtgggaaatttacgttagtaaacagcaaagttcaagtcaagttgaatacatttagatttagaaagttaagtgtagtgcagtttaaaatacattgctgaagaaaacaattatagatgatattaaacta

SEQ ID NO: 9800 - DNA, 201 bp, Homo sapiens
attatatgatttatttttgaaatatttacatacataatttggacaccgtttacataagttctaagagatatcattgtgggaaatttacgttagtaaacagcaaagttcaagtcaagttgaatacatttagatttagaaagttaagtgtagtgcagtttaaaatacattgctgaagaaaacaattatagatgatattaaact

SEQ ID NO: 9801 - DNA, 201 bp, Homo sapiens
tattatatgatttatttttgaaatatttacatacataatttggacaccgtttacataagttctaagagatatcattgtgggaaatttacgttagtaaacagcaaagttcaagtcaagttgaatacatttagatttagaaagttaagtgtagtgcagtttaaaatacattgctgaagaaaacaattatagatgatattaaac

SEQ ID NO: 9802 - DNA, 201 bp, Homo sapiens
ataattttggccttttatttctcttatcttaattgtagcagaaggtatcatgcttttctgaaccttgtgcattctgcccaaaaatggaagttctcagccaygtgtggttgttcacacctgtatccaagcactttgggaggccaagatgaggggaccacttgagaacaggagttgaagaccagactgggcaacatagggaga

SEQ ID NO: 9803 - DNA, 201 bp, Homo sapiens
aaaataaaagttaattcatggaatacaatggtgtatttgtaattgaggtactatattttatttattggaatggcattttgagatccagtgctgttcattgmatttccctgtaaggagagtttgtggtttggactcatcaagctgctatgccaaaaacaaaacaaaacaaaacaaaacaaaaagctaatcacatgaaatcaa

SEQ ID NO: 9804 - DNA, 201 bp, Homo sapiens
gaagtctacctccacactcttaatgttattcttattttgaaacatcagattttgcacatctgtattttgctagacacctttttttcttatttccaatttaratatttatgatcacaacatttcaaagtggcagaaattagtgaatttccaatatatagtaatatagatattaaatatacaggacaattttctaaatttatc

SEQ ID NO: 9805 - DNA, 201 bp, Homo sapiens
tattaaataaaattattcactttctaattatccacaacattgacaagctttttctttgtgcctttttattagataatttttcagggtgttgcagatacacrtaaggttagcagctactttgaggtacaccattttaatcatggtcagaaggctaatcaaaaaagtattttacaagaattgttttttaaaaaatatattaaa

SEQ ID NO: 9806 - DNA, 201 bp, Homo sapiens
acaaggtggaacgtcaaaattagatggcacttattctaatgctttttgaaaagcatattaaagattttggtatatttgcacagggtcagggtcagcagtgwgtgccagctgctcggggctagctgaccccatgacaagaatgttagggaacttcccagtagctgctaaacacacttttgtttttagggaatgtctctttct

SEQ ID NO: 9807 - DNA, 201 bp, Homo sapiens
aatatagctttgctgtagctatatcaggtgtgtgaagtagagacaaggtggaacgtcaaaattagatggcacttattctaatgctttttgaaaagcatatwaaagattttggtatatttgcacagggtcagggtcagcagtgtgtgccagctgctcggggctagctgaccccatgacaagaatgttagggaacttcccagt

SEQ ID NO: 9808 - DNA, 201 bp, Homo sapiens
tgatgagtatcacatggtgagacactcatgaaattgtacactttatatctgtacaacttattgcatgtcaagtatacctcaagtggcatattagaaacaaytcaggaggaaaactgcacataagtatgcattcttagaaagcttctctttgcaactttggaagaatcaaatattattatttcctattcttattttttgatc

SEQ ID NO: 9809 - DNA, 201 bp, Homo sapiens
ttggtgctgatgaagcaatatgccctactgggcaggggagaggcacagaataagaattcttgccatgtggatgaactcattcaaacacaatgactgctttrtgagacaatagatagatttctacctcttctcacatgtacagagaaaatatttccaaagtctccggaatatttacatgtattactatttaatataaacttg

SEQ ID NO: 9810 - DNA, 201 bp, Homo sapiens
tacccactgccggtgcctcttcatactatcacagctgatgctctctagaaagaactacctcctggtaggaggccaaccacacaaaaatagagcattaaacycccaaagctaagaaccctcacagagtccatttcacccccctgccacctccaccagaacaggtgctggtatccacagttgagagaccaacagatggtttac

SEQ ID NO: 9811 - DNA, 201 bp, Homo sapiens
taaaaatcttaagatttctttgtccaaaaaatctaagtagaatagtctctgatattgtttttttctaggctttcaaacaaaataggaacacattgagtatycatatttttttttagcattttctttcttatcagacccgtaaaattctaattaggttttttttaaaaaaaatagtatctgcttatggaaatttaattatga

SEQ ID NO: 9812 - DNA, 201 bp, Homo sapiens
gcactgaaaagcccaagtaagaaaattattttttcattttagaaattataggacaataatatttcccaactatgaggtgtgtgtatgtgtgtgtgtgaacrtgtttgtgttaatgagcttgttaacaataagttatacaaaattattagttggcagcaacgagatttttaggaatattggccttcctgggcttcccaagaa

SEQ ID NO: 9813 - DNA, 201 bp, Homo sapiens
ttctttccctttccattccccctccctccttaggaggtatgactttagagaattctgggtaggtcttttgcccagcttctatagccttatgcacttacagrttgcaggttttatattagactgtgcggttcaacctacaagccagtagatggcacttataggtaagagccagttgtggacaatgtgatggttatatatttg

SEQ ID NO: 9814 - DNA, 201 bp, Homo sapiens; identical to SEQ ID NO: 4295

SEQ ID NO: 9815 - DNA, 201 bp, Homo sapiens; identical to SEQ ID NO: 4297

SEQ ID NO: 9816 - DNA, 201 bp, Homo sapiens; identical to SEQ ID NO: 4298

SEQ ID NO: 9817 - DNA, 201 bp, Homo sapiens
agtttaaaaatgtcataatttttaccttctccaaactacttcagtgaacctaaatgttttattctcatttattttaagaagttaaaaaattattctcaaartgagtaaaaacagtagaggacagcaaataatgagaaggtaggcaattagatacaggcacaaaactgctaaaaaaaagtgtaaaagtaaattagtctcata

SEQ ID NO: 9818 - DNA, 201 bp, Homo sapiens
atatcagttccctcacgacaatcagagtgatcatttaaaagtagaaattagatcatatcacccttgtgcttcaaaccccttgtttttccttctggacttayaataaggtccaaatttcatgactcagctctttcacacccacatgactaaatcttttttgaagacccggaagctctctgaatggaatataaagtaggatct

SEQ ID NO: 9819 - DNA, 201 bp, Homo sapiens
ccctccaggcactacccattagcttatctaatttcttccaccttcaaaatacatctcaaatgtgtccacttgcatgatctttactagaagcttgttgttcrgcccacaatgctctctcctggaggtctttaacagcctcgacctggtcctggtaacattcttcccccagtacatcccatatcagttccctcacgacaatca

SEQ ID NO: 9820 - DNA, 201 bp, Homo sapiens
catggatatttgtatatttagctaaatttttcatgtaatagagatgctttctgcttatccgtgagttgtgtgaggacagcacactgctgggtacacatagrtgacagaaggctgccccgcagcctcctcatgctacaggaaatttccaaactctgtgaatctcactacactcaggcaagcgttggtgctgtacaatacagg

SEQ ID NO: 9821 - DNA, 201 bp, Homo sapiens
attttcaatgtcaaaggctgacctcaggagtcagcttttgcaactcttgtcccctcttggtttataattatttagcaaagtatgaggcctcttcaactatyggtccatcaacccatttaaatgaggctgttactgtcaccactccattaaatctgacatttgcaagatcaccgataagtctgtgttgccaatggttagttt

SEQ ID NO: 9822 - DNA, 201 bp, Homo sapiens
tttaaaaataaatccgtagtgattttgatcctagatttcaccaggctcttttaacaatatattttttgtgtcatctatgtactgggtattaaaatttcccyaacaactgaagggctgaacacaaattatggaaaggtgaaacaaggaaaaaattgcaaagcaatgaaagaggatatgtctttatttgaatgctagcaaatg

SEQ ID NO: 9823 - DNA, 201 bp, Homo sapiens
aaggagtattggctttcctgtggtttccaagaaaatcttgggtgattttgataaaaagtttagattttgtgtatttaaatctggctttaaaaataaatccrtagtgattttgatcctagatttcaccaggctcttttaacaatatattttttgtgtcatctatgtactgggtattaaaatttccctaacaactgaagggct

SEQ ID NO: 9824 - DNA, 201 bp, Homo sapiens
atatagaagtattggttaacagcaaccaaattataaggagtattggctttcctgtggtttccaagaaaatcttgggtgattttgataaaaagtttagattytgtgtatttaaatctggctttaaaaataaatccgtagtgattttgatcctagatttcaccaggctcttttaacaatatattttttgtgtcatctatgtac

SEQ ID NO: 9825 - DNA, 201 bp, Homo sapiens
gtttatgagcttgttaatagtgatgccatatagaagtattggttaacagcaaccaaattataaggagtattggctttcctgtggtttccaagaaaatcttrggtgattttgataaaaagtttagattttgtgtatttaaatctggctttaaaaataaatccgtagtgattttgatcctagatttcaccaggctcttttaac

SEQ ID NO: 9826 - DNA, 201 bp, Homo sapiens
attaattttaaaaaggaagagataaacaggaagtctacctccacactcttaatgttattcttattttgaaacatcagattttgcacatctgtattttgctrgacacctttttttcttatttccaatttagatatttatgatcacaacatttcaaagtggcagaaattagtgaatttccaatatatagtaatatagatatta

SEQ ID NO: 9827 - DNA, 201 bp, Homo sapiens
agctggggtttggtggatggctctggtgatttgagatggtccaagttttgcctcttggatctagttagagtttggccgatttaaggctggatcaggcaggrgccatatgattccatgagttactcattcttattctgggaacagtgtgttagtgtggacatgttctcattataaaccggaaaggaacaagaaagcctaatg

SEQ ID NO: 9828 - DNA, 201 bp, Homo sapiens
aagttttcttctagttttagatattcacctcatattacaaaaactttgatatttccaacctatttttcctttggctcctgaatttctgacacaacaagggygcacatatttctcaaactcttggattagcagagtacctatatcacttagctttttctgcaaaagaaacttctccaaaaccacattagatatttatatctc

SEQ ID NO: 9829 - DNA, 201 bp, Homo sapiens
tagttttggcagaggctaggtaggttaactgaacagggatttaaaaaggactttattaacacgttggagcaatatcctctattgtggtatttgtggactcygaaaccccaagaggctcaataaacactgtgcttcctttttagtgataagaagtatatatagggcaacatgccatttaccttaaaaaggatgtttctgctg

SEQ ID NO: 9830 - DNA, 201 bp, Homo sapiens
ttgttagcattttcatgtcaagcatacgaaaaacaaaaaaacaaagccaaccaactgaacaaagaacccaactttttttaaaaaacttggtggtaagagtrctttgttctgcttctccatagataatgatttatagaaggagaacaaaatataatttctgctactaaaacaataatagcaaaaaataaataatcaatattg

SEQ ID NO: 9831 - DNA, 201 bp, Homo sapiens
acataaattgtgaagatttcatggacacttatcacttccccaatcaatacctttgtgatttcctatgcctgtctttacgttaatctcttaatcccatcatyttcataagctgaggaggatgtatgttgcctcaggaccctgtgatgattgcattaactgcacaaattgtagagcctgtgtgtttgaacaatatgaaatctg

SEQ ID NO: 9832 - DNA, 201 bp, Homo sapiens
ggatctaaaagccagcacaaagaatagttggtcaaaagaatatattaatgaacacataagtgattggataaatggataatttgttgtggtaaaccaatgamaatgaaactcatcacaaaatctgcagttgcttgaattttctagtttcaggttgaggttataggcttatcaaagaagaagcatttctcagagcaaaagttt

SEQ ID NO: 9833 - DNA, 201 bp, Homo sapiens
ccataaaggcagcattgaactcatccattagtatgccctagcgctttcctatttgacattggtcccagaattgaatttagaagaaccaagaattttactgmacattcagaaatcaggatcgcagagagtttaagatcaagaccttaaaggggatcatgaccagtgatactgggcttgcccttttttaatgtgtgtttgttc

SEQ ID NO: 9834 - DNA, 201 bp, Homo sapiens
gagtaatatacactgacacatatattttgcttgtcagtccagctgagcatcctggccacttacagactctaaggaagagtgctgtcagctgccgccccaamttgctggccttcttggcatttatttagaacacattaaatgacaaacgctttgagtcaacaccattagagggtaatcaacctggtcaccttcccccaggag

SEQ ID NO: 9835 - DNA, 201 bp, Homo sapiens
ctttctcttgactcacaggatctaaaagccagcacaaagaatagttggtcaaaagaatatattaatgaacacataagtgattggataaatggataatttgwtgtggtaaaccaatgacaatgaaactcatcacaaaatctgcagttgcttgaattttctagtttcaggttgaggttataggcttatcaaagaagaagcatt

SEQ ID NO: 9836 - DNA, 201 bp, Homo sapiens
cccacgatgcatgcctctagcagctttgaattctgctggatcatctgacgcaatgggcagagcaggtttggccacagcctatatctgctgtagagatatcwtatgttctggattccacttgaaaccactagtctttgcattcattctgcaacccatctagttttggcagaggctaggtaggttaactgaacagggatttaa

SEQ ID NO: 9837 - DNA, 201 bp, Homo sapiens
gaagtgtaaattcttctatggaaaacatgtttttttagtgcccaaggaatagttatacaattgttgaggtttttctttttctttttcttttttttttttttttttttgagactgagtctcgctctgtcgcccaggctagagtgcagtggcgccatctcggctcactgcaagctccgcctcctgggttcacaccattctctg

SEQ ID NO: 9838 - DNA, 201 bp, Homo sapiens
ctcactgcatggtcccttacagcttcccttggctaggagagggagttccccgaccccttgcacttcccgggtgaggcaacaccacaccctcctttggctcrtcctccgtgggcttcacccgctgtctaaccagtcccaatgagatgagccatgtaactcagttggaaatgcagaaatcacccaccttttgtgttgatcttg

SEQ ID NO: 9839 - DNA, 201 bp, Homo sapiens
tgcctcagcaatagctctgacatgtgtttatctccttcatggatactcatccactgtccagcaaggccaccatcatccctgtctactgggatcagtatagkatcttcacagctgcacttccctgaatctgtcttgcattctccatatccttcccagcagtcccatgtctctataaatgcaaatctcactctctcactcccc

SEQ ID NO: 9840 - DNA, 201 bp, Homo sapiens
cactctggtgattctctaactctatgtagacagaggcaagtgtttacccaattctctgcctcagcaatagctctgacatgtgtttatctccttcatggatrctcatccactgtccagcaaggccaccatcatccctgtctactgggatcagtataggatcttcacagctgcacttccctgaatctgtcttgcattctccat

SEQ ID NO: 9841 - DNA, 201 bp, Homo sapiens
  misc_feature (1)...(201): n = A,T,C or G, or insertion/deletion polymorphism (see Tables 1-2)
aaaatactacatgcaggagagaaaaaaatgacaatatttcactctggtgattctctaactctatgtagacagaggcaagtgtttacccaattctctgcctnagcaatagctctgacatgtgtttatctccttcatggatactcatccactgtccagcaaggccaccatcatccctgtctactgggatcagtataggatctt

SEQ ID NO: 9842 - DNA, 201 bp, Homo sapiens
tatcaaagacaacgttggcatcttttgagatggtcatatttttttttcctctgctgacttcattatccaaaacaaataatgaacattccttaacattcctrgaatcaagtctgcttggtcatttaactcatatatcactttaatttgttttaaattatttaaagtgagatttatagttattactgttagagtagtcatatc

SEQ ID NO: 9843 - DNA, 201 bp, Homo sapiens
aggaactcaatggaaacatgtcttcagtgcatttccaaagagtagtagaacttcataaacagaaattgaaaatatttttcagagaaaataaaaatgactgmaaatgcaaagttgaacatgcaaggagcaataaaaattattgacaatgaaaaataagtgtaattctaaataaatgttgactgtataaaaattattgtcttg

SEQ ID NO: 9844 - DNA, 201 bp, Homo sapiens
tgtaaacacctctgtgcagacaaactagaaaacctagaagagatagataaattcctggacacatacaccctccctgctgctggaagtcagagaccccaaayggagggaccagctgaagccatggcagaagaacataaattgtgaagatttcatggacatttattagttccccaaattaatacttttataatttcttatgcc

SEQ ID NO: 9845 - DNA, 201 bp, Homo sapiens
gccaagaatttcatatccaaccaaattaagctttttaagtgaaggagaaggaagatttttttcaggtaagcaaatgttgagggaatttattatcaccagawctgccttacaagagatcttgaaagcggcacttagtatagaaaagaacaccactaccagctaataaaaaaaaccctgaaacacagagaccagtgtcactgt

SEQ ID NO: 9846 - DNA, 201 bp, Homo sapiens
tgaacacaaattatgactacacgaggaaaatattgcaaaacagtgaaagagaatatgtcttcatttgcatgcttgcaaatgagaaatcagcttttacttcmaaattattatgaaaaaagcctatagcaagaagagacgttgtttaaatagtaggtaatttgagccgttttgaaaattacattttttccataaaggcagcat

SEQ ID NO: 9847 - DNA, 201 bp, Homo sapiens
catcttgagatccagcacagctcattgaatttccctgtggggagagtttgtggtgaagactcatcaacagacaagctgctatccccacccaaaaaaaaaarctactaacatcacatcaatttccaggttcttccaacttgcggaaggatgtgtagaccaagcttttattctattttgtgaccaaagtcttgggaaaagaag

SEQ ID NO: 9848 - DNA, 201 bp, Homo sapiens
atttattggaatggcatcttgagatccagcacagctcattgaatttccctgtggggagagtttgtggtgaagactcatcaacagacaagctgctatccccmcccaaaaaaaaaaactactaacatcacatcaatttccaggttcttccaacttgcggaaggatgtgtagaccaagcttttattctattttgtgaccaaagt

SEQ ID NO: 9849 - DNA, 201 bp, Homo sapiens
tcagcttaatttccctaggtgctccattaacctgatggcagaaattaaatcttaagcaactctgggttctcccacaagcacactttgcttcagagttgtgytgaagttttgaggaggatgggaggaggcaaggaggtgtccagtcctttgtgcatctatcccctggcattctcccatcctgccccaagtcatcagcccaca

SEQ ID NO: 9850 - DNA, 201 bp, Homo sapiens
aggtaaagtaaagcctaatcgcagttcagaaactcacatgtacaacaaatttaactttctggatatttttaaaactcagcttaatttccctaggtgctccrttaacctgatggcagaaattaaatcttaagcaactctgggttctcccacaagcacactttgcttcagagttgtgctgaagttttgaggaggatgggagga

SEQ ID NO: 9851 - DNA, 201 bp, Homo sapiens
ttaacttattcttaatgaaatactgtctgaggatctttgtctgtgcctgatgctgagaataatataagaaacaagttcatgagcccatcaccctgaaacgyagcacttagaaaacatgattgaagtcacatttatagaagagcatggccccttttaactgacattatcatcatcaccaatcatcatctatatctatctcat

SEQ ID NO: 9852 - DNA, 201 bp, Homo sapiens
aaagaaaaaaaaatagccagtaaatcattggaaatacattggttttaacttattcttaatgaaatactgtctgaggatctttgtctgtgcctgatgctgaraataatataagaaacaagttcatgagcccatcaccctgaaacgcagcacttagaaaacatgattgaagtcacatttatagaagagcatggccccttttaa

SEQ ID NO: 9853 - DNA, 201 bp, Homo sapiens
cttgagacccatggccctggtggcataaacactggaggaaatctcctggtttgtgggttacgaagaccatggggaaagtgtagtatctgggccagaatacrtcgtccctcactgcatggtcccttacagcttcccttggctaggagagggagttccccgaccccttgcacttcccgggtgaggcaacaccacaccctcctt

SEQ ID NO: 9854 - DNA, 201 bp, Homo sapiens
cactgcgcccgctttttataggtgattatactgaggcaggagtagttggaaaatggagtctcagagcatagctataccaagcagggaatatgatttcctgwcctggcagtctgactccaagatcccctcttagaaacagttatgctataaaaactgaaaagaaacaaaatccaggattggagactgattttaacatctatt

SEQ ID NO: 9855 - DNA, 201 bp, Homo sapiens
gagcaagggtagagggtcctcctgcaagcttggtgccttttctaccatgcgggggtctgtcctgcagaccctgactcaatgacagaggagtaatatacacygacacatatattttgcttgtcagtccagctgagcatcctggccacttacagactctaaggaagagtgctgtcagctgccgccccaaattgctggccttct

SEQ ID NO: 9856 - DNA, 201 bp, Homo sapiens
gcagacacttttataagataaggggggttattgagcaagggtagagggtcctcctgcaagcttggtgccttttctaccatgcgggggtctgtcctgcagaycctgactcaatgacagaggagtaatatacactgacacatatattttgcttgtcagtccagctgagcatcctggccacttacagactctaaggaagagtgc

SEQ ID NO: 9857 - DNA, 201 bp, Homo sapiens
gtatcaccagtggaggctgcaaaacagcagatattgctgcctgttccttcctctggaagcttcatcccagagggttacccgccagatgtcaggcagagctytcctgtatgaggtttctgtccaccattgctgggagatgtctcccagtcaggaggcacagaggtcagggacccacttaaggaggcactctgtcctttagca

SEQ ID NO: 9858 - DNA, 201 bp, Homo sapiens
acaaagagtcctgcctttaagtgtaccacttcacctttggagcagaaagcagacacttttataagataaggggggttattgagcaagggtagagggtcctyctgcaagcttggtgccttttctaccatgcgggggtctgtcctgcagaccctgactcaatgacagaggagtaatatacactgacacatatattttgcttgt

SEQ ID NO: 9859 - DNA, 201 bp, Homo sapiens
aagagaagaggcttccggtttttggaattttcagccttttttgccctggtttttcctcatcatcatggatttttctacctttggtctttgatgttggtgaycttcagatggggtctctgtgtgtacatcctttttgttgatgttgatgctattcctttttgtttgttgattttccttctaacagtcagggtcctctgctgc

SEQ ID NO: 9860 - DNA, 201 bp, Homo sapiens
tctaagctgggtttgctggatggctctggtgatatgagatgggccaagttctgcatcttggaattagttagagtttggacaaagtaggctggatcaggcarggacaaactgactccattattttctcattctccttctgggaacagagtagtagccaggcaatgttctcataataaacagaaaaggaaaagaaactccaat

SEQ ID NO: 9861 - DNA, 201 bp, Homo sapiens
atctatcccattaaataatttactttttgaaatatgtacattcataaattggataatgcctacgtaatttaaataaagaatatcattatgggcaagttacrttagtaaacggtaaagttcaagtcaagctaaatacatttagatttagaaattaagtttagtttagtttaaaatacattgcttaagaaaatagttatttat

SEQ ID NO: 9862 - DNA, 201 bp, Homo sapiens
ctatcatcatcatctctatctacatctatcccattaaataatttactttttgaaatatgtacattcataaattggataatgcctacgtaatttaaataaasaatatcattatgggcaagttacattagtaaacggtaaagttcaagtcaagctaaatacatttagatttagaaattaagtttagtttagtttaaaatacat

SEQ ID NO: 9863 - DNA, 201 bp, Homo sapiens
gtagctatcatcatcatctctatctacatctatcccattaaataatttactttttgaaatatgtacattcataaattggataatgcctacgtaatttaaawaaagaatatcattatgggcaagttacattagtaaacggtaaagttcaagtcaagctaaatacatttagatttagaaattaagtttagtttagtttaaaat

SEQ ID NO: 9864 - DNA, 201 bp, Homo sapiens
aaatgaatggtcacatttattagctagcagtctaccttgtagctatcatcatcatctctatctacatctatcccattaaataatttactttttgaaatatrtacattcataaattggataatgcctacgtaatttaaataaagaatatcattatgggcaagttacattagtaaacggtaaagttcaagtcaagctaaatac

SEQ ID NO: 9865 - DNA, 201 bp, Homo sapiens
gaataatatgagaatcataaagccaggagaaagaataattgtgttatcccattaccctgaattgtagcacttagaaaaatgaatggtcacatttattagcyagcagtctaccttgtagctatcatcatcatctctatctacatctatcccattaaataatttactttttgaaatatgtacattcataaattggataatgcc

SEQ ID NO: 9866 - DNA, 201 bp, Homo sapiens
tttccagatacattttaggagtagttttttatggtctaccaaaaaagcccgccagaatttgatagagattgcattaaatatataagttgactcttcacctmtaaagactctccttgtgctggattttagtttagctggccctccttgtttgcacagctctccgatgaattgaaaatataattttggccttttatttatctt

SEQ ID NO: 9867 - DNA, 201 bp, Homo sapiens
attgtgtttcattattcttgtctatagtattaaaaatgccagtgtcctgatgattagtccagcttttagcaaactttgaaatgagaaactgtaatcccccyactttgttctttttaaattatttctctaggtgctcttgtcacttggcatttccagatacattttaggagtagttttttatggtctaccaaaaaagcccgc

SEQ ID NO: 9868 - DNA, 201 bp, Homo sapiens
aaggatggtgccagcctaagcactttgttgggcagtggcattgtggctcatccttgttcacacatgccagcagcatcagtagtgtggcagagtacacactygtagactggggtggggtgcaggtggatccaaggctgctagcctctatatggacattggcagtagcctaaattcatctttatgcatgagaatattcatttt

SEQ ID NO: 9869 - DNA, 201 bp, Homo sapiens
aagaaaatcaaggaaatgatcattctaaattatggctattgctctcctcagggtatgtgaagaaaggtgtaggggcttggagagtggcatggaggtggacmtaggctatttgcaatgtgacatgttttgccctgcttgatggttgcatgagtgtttatgacacattgctatgtttaccatcttagttttcacccatttcta

SEQ ID NO: 9870 - DNA, 201 bp, Homo sapiens
aattcttataattgcttataaaagaaattataaattcttataactccttaccaaagaaattataacattttataaaagaaattataacttctcataaaagraattttattttaagtttttataattcttataatttgaaataaattcttataatttattacattggtggcaaaactgtaaagcgaaacatataagtgatta

SEQ ID NO: 9871 - DNA, 201 bp, Homo sapiens
atattttatataaatatgaaagtgcaaaaattactctactaattttggagagcatatgaagcagtgggaattttcatacactgctcctaggattataaatyagtgcaattactttgtctgagtgtgacattatttgaataagatgaaggatcacatcctaagacccaggatttgcactcatatcagaatacatatacaagt

SEQ ID NO: 9872 - DNA, 201 bp, Homo sapiens
gcatgaaattatagtcatagaattaagagtgatgtaatttttcaactaaagatgcattctgaattataatagaaaaaggtttgtaaaatgttaagtttaayaatattttatttatttttgagacagtctcacttcgtggtctaggttggagtgcagtggtgtgatctcagctcaccgcaacctccgcctccgggttcactc

SEQ ID NO: 9873 - DNA, 201 bp, Homo sapiens
tacatatggcttaaaggtttaaagtaggcaaaaccgtatcataaagtttagggttgcatacctagttgttaatgtataaagaaaatcaaggccaggcgcgrtggctcacgcctgtaatcccagcactttgggaggccgaggcgggtggatcacctgaggtcaggagttcaagaccaacctggccaacatggcaaaaccctg

SEQ ID NO: 9874 - DNA, 201 bp, Homo sapiens
aaattagcaggcttggtggtgcatgcctgtagttccagttacttggcaagctgaggcaggaaggcaagagtatcacttgtgtccaggagttcaagactacrgcgaggtatgattgtgccactgcactccagcttgggtgagagagcaagagcctgtctcagaaaaaaaaaaaaaaaaaaagaaaaggagaaaagaaatgga

SEQ ID NO: 9875 - DNA, 201 bp, Homo sapiens
agacatgttaaaatttctacttatcattttgtcaactctgtgtgtttgcattcgttcttggaaatttgtctccacaaaaatgttaaaattagcaggcttgstggtgcatgcctgtagttccagttacttggcaagctgaggcaggaaggcaagagtatcacttgtgtccaggagttcaagactacggcgaggtatgattgt

SEQ ID NO: 9876 - DNA, 201 bp, Homo sapiens
caatgaaagttttattatcatctcctttttgttgttattttgagacggagtctcgctctgtctctcaggctagagtgcagtggcgtgatctcgactaactrtaacctctgccttctgggttcaaatgattctcctgctgcagtcaccgagtggctcggattataggtgcgtgccaccaccacctggctaatttttatattt

SEQ ID NO: 9877 - DNA, 201 bp, Homo sapiens
atgattttgataaaaggtttgggttctgtatatttaaatctagcattaaaaaataaatccatatttatacgatcctaggtatgaccaagctcttttaacartttagacatttactgtatgacatatgtattgggttttaaaatttccctatgaaacaactgaaaatgctgaatacaaattatggagaggttaaacaaggaa

SEQ ID NO: 9878 - DNA, 201 bp, Homo sapiens
acaggtaaaattgaaagtagttacagaaatagtatattaactcctaacaaaactaaccaatgaaagttttattatcatctcctttttgttgttattttgakacggagtctcgctctgtctctcaggctagagtgcagtggcgtgatctcgactaactgtaacctctgccttctgggttcaaatgattctcctgctgcagtc

SEQ ID NO: 9879 - DNA, 201 bp, Homo sapiens
ttaaaaagaaacttctccaaaactacattagatatttatatctcacatgtctttagattccattttcctaagctgggtttgggtggatcactctggtaatwtgagatgggccatgttctgcatcttgaagttagagtttggccaatttaggctacatctggagggggtgatctcattctcattctgcttctgggaatggtg

SEQ ID NO: 9880 - DNA, 201 bp, Homo sapiens
ccagcttgggtaacagagggagatgctgtctcagaacaaaaaaaaaggtggaagttctcactggtgtcaaatatcaagaaaaacatgatcaaatcaataaktaacaatctttggttcctgcttatagcaaacaggtaaaattgaaagtagttacagaaatagtatattaactcctaacaaaactaaccaatgaaagtttta

SEQ ID NO: 9881 - DNA, 201 bp, Homo sapiens
ttgtgccactgtactccagcttgggtaacagagggagatgctgtctcagaacaaaaaaaaaggtggaagttctcactggtgtcaaatatcaagaaaaacakgatcaaatcaataagtaacaatctttggttcctgcttatagcaaacaggtaaaattgaaagtagttacagaaatagtatattaactcctaacaaaactaa

SEQ ID NO: 9882 - DNA, 201 bp, Homo sapiens
ctatgattgtgccactgtactccagcttgggtaacagagggagatgctgtctcagaacaaaaaaaaaggtggaagttctcactggtgtcaaatatcaagaraaacatgatcaaatcaataagtaacaatctttggttcctgcttatagcaaacaggtaaaattgaaagtagttacagaaatagtatattaactcctaacaa

SEQ ID NO: 9883 - DNA, 201 bp, Homo sapiens
ctttcccttggtcctgctataataatgttccttactctacagttcacgaagaatgtgagagtcctgccagctgccatacgtatccatttcaattcaggaasaggtaataactacaaactgattagatccaccttgggatggacatgagccgaagctctaggtagcatctgaccttcaaaactcccactgcgggctggatgt

SEQ ID NO: 9884 - DNA, 201 bp, Homo sapiens
aagaaacaactgtctaaatgacaatcttattttcaacagacaaaattgaagctagaattcaatggaatcatgtcttcagtgtgtttcaaaaccaaagcggrctttaacaaatagaaattcaaaagaatattttttagataaaaggaaaattactaaaaatataaagctgaacatgcatgaaggaataataaataatagaag

SEQ ID NO: 9885 - DNA, 201 bp, Homo sapiens
agggctctgttctgttccattgatctatatctctgttttggtaccagtaccatgctgttttggttactgtagccttgtagtatagtttgaagtcaggtagygtgatgcctccagctttgttcttttggcttaggattgacttggcgaaagcaagagcaaacacattcaaaagctagcagaaggcaagaaataactaaaatc

SEQ ID NO: 9886 - DNA, 201 bp, Homo sapiens
tcacttcctgcttatgggtaacagttaatgcaatattattaatatattgagttagcatgatgttttgcaaaatgccaattaaactgaaaacagaagtgacrtagccatgacataaaacagtgaagcagtgcttttgttcttacctcaccaaaacaaatcattttgattttctctcccaatcgatgtagattaaaaagcatt

SEQ ID NO: 9887 - DNA, 201 bp, Homo sapiens; identical to SEQ ID NO: 969

SEQ ID NO: 9888 - DNA, 201 bp, Homo sapiens
gtatatgaaagaatgctcatagtagcattattcataatagttcataaaagaagctgtccaagtatatatcaactaaggatagataattatagtaaattcayaaaattaaacaatatagagaaatgaaaagaaataaatcacatgtacatgcatctgtctgattaaatttcagattcataatgttaagtccaggaagccatg

SEQ ID NO: 9889 - DNA, 201 bp, Homo sapiens
tctatacctaggcatatatgcaaaggaattgtagcaaatgtatatgaaagaatgctcatagtagcattattcataatagttcataaaagaagctgtccaartatatatcaactaaggatagataattatagtaaattcataaaattaaacaatatagagaaatgaaaagaaataaatcacatgtacatgcatctgtctgat

SEQ ID NO: 9890 - DNA, 201 bp, Homo sapiens
acgttttatatttctgtcagtttgttgtagtgtatgtatgtgagtaatttcaaaacagattcctaggatagtcttttatatatatataatatatataaaaytcatatatatataaaatacgtatgggtgtatatgtgtgcatgtgtgtgaataataacattgaccataaattatgaagcctagtatatttcatatatataa

SEQ ID NO: 9891 - DNA, 201 bp, Homo sapiens
cttgtttttaaatattgcactgataaacatccatataaatgccagtatcaatggatacagaagaaacaagacttgcagttctgattcaagtaactttacaygattttccagtcttattgtattaaccagcactgtgttcattttcataccctttactttgtccctggcaatgtttcttctcctcatcttctccatgtggaa

SEQ ID NO: 9892 - DNA, 201 bp, Homo sapiens
tatatgtatctctgttatgtgcttgtttatctaatattaaataaaattattcactttctaattatccacaacattgacaagctttttctttgtgccttttyattagataatttttcagggtgttgcagatacacataaggttagcagctactttgaggtacaccattttaatcatggtcagaaggctaatcaaaaaagtat

SEQ ID NO: 9893 - DNA, 201 bp, Homo sapiens
aattctatacctaggcatatatgcaaaggaattgtagcaaatgtatatgaaagaatgctcatagtagcattattcataatagttcataaaagaagctgtcyaagtatatatcaactaaggatagataattatagtaaattcataaaattaaacaatatagagaaatgaaaagaaataaatcacatgtacatgcatctgtct

SEQ ID NO: 9894 - DNA, 201 bp, Homo sapiens
taaaagtgaaaatttacatacagagaagtgtaggctcttcaatggaatacacatgttttttaagtgcccaaggaatatttacaaaattgctaaatattttrattaaacaattcatatttaaatattaactagactcaagaaaatgacttactcaaaagcctaagcatgagacacaagtttataaatattgaaaatgggctg

SEQ ID NO: 9895 - DNA, 201 bp, Homo sapiens
tatactataacaactggaaagaaataatatccaatattgaagaccgatttttaacatctattcatcttaaaccattaaataataaaaaatacattagagaraaataaaagtgaaaatttacatacagagaagtgtaggctcttcaatggaatacacatgttttttaagtgcccaaggaatatttacaaaattgctaaatat

SEQ ID NO: 9896 - DNA, 201 bp, Homo sapiens
aacagatggaaatataccaagctagagggtatcacattgatgctacagtcagaacacctaacatacttctggagttctgtaagattagaggagagaaaatsaagcaagagaaatgttgcaaggatttttccaaaagtgataaaatgtattcctccatatatttttagtaatctcaaacttcaagcatgataaattaaacca

SEQ ID NO: 9897 - DNA, 201 bp, Homo sapiens
aaactgaaaaattagctggctgtgttggtgcacgcccatagtcacagctactccagaagctgaggtgggaggatctcttgagcccaggagtacaaagctgwagtgaactaccactgcactccagcctaggcgacagagcaacatcctttctcaaaacaaaaaaggaaaagtggaagttttcactggtatcttttaagtatc

SEQ ID NO: 9898 - DNA, 201 bp, Homo sapiens
agttgacccttcacctgcaaagactctccttgtgctggatttcagttcagctggccctccttgcttgtacaactctgtgatgaattgaatatataattttkgccttttattactcttatcctagttgttgcagaaggatatcttgcctttctgaaccttctgtattctgctcaaaaatggaagttctcagctaggtgcagt

SEQ ID NO: 9899 - DNA, 201 bp, Homo sapiens
tttatatgcattcttatacaactctagagagttgaagtagaaactttcttattttagttacaacttgtagaaatttgacatcatgtcacctgccaaccccrtatttttccgtagctttatttcagtttttttctttcagctttaattatgcacctcacatgacaaaactttgatattcctcatctatttttcccttggctt

SEQ ID NO: 9900 - DNA, 201 bp, Homo sapiens
atgtatgcattataattttaatataaaaattttgaattaggagaaatgtctcatagaaattattaatcttctcattacgtactaaggggaaaagaaactayttatatgcattcttatacaactctagagagttgaagtagaaactttcttattttagttacaacttgtagaaatttgacatcatgtcacctgccaaccccg

SEQ ID NO: 9901 - DNA, 201 bp, Homo sapiens
tcattaaatgatttatttttcattgtacatgattttgataatgtctaagacatttttaaaagattatcattttgggaaatttgcattagtaaaagtaaagytcaagtcaagctgaatacatttagatttagaaattaagtgaagtttagtttaaaatgcattgcttaagcaagtaattgtagatgaccttaaactaatcca

SEQ ID NO: 9902 - DNA, 201 bp, Homo sapiens
ctatctcattaaatgatttatttttcattgtacatgattttgataatgtctaagacatttttaaaagattatcattttgggaaatttgcattagtaaaagyaaagttcaagtcaagctgaatacatttagatttagaaattaagtgaagtttagtttaaaatgcattgcttaagcaagtaattgtagatgaccttaaacta

SEQ ID NO: 9903 - DNA, 201 bp, Homo sapiens
ttgatgaaatattacctgagggtgtttgtctaggcctgatactgagaataatataagaattataaggccatgaagaaaagttaaaatagtgttctcccatygccctgaattccagcacttaggaaacatgattgaagtcacatttacagaataaaatagtcccttttagctgacatcaacatcatcatcaatcatctacac

SEQ ID NO: 9904 - DNA, 201 bp, Homo sapiens
tatgttggttttaagttattcttgatgaaatattacctgagggtgtttgtctaggcctgatactgagaataatataagaattataaggccatgaagaaaarttaaaatagtgttctcccatcgccctgaattccagcacttaggaaacatgattgaagtcacatttacagaataaaatagtcccttttagctgacatcaac

SEQ ID NO: 9905 - DNA, 201 bp, Homo sapiens
tttagaatgtggtaaaatgaaacaatatcaagtaaatcattgggaatatgttggttttaagttattcttgatgaaatattacctgagggtgtttgtctagrcctgatactgagaataatataagaattataaggccatgaagaaaagttaaaatagtgttctcccatcgccctgaattccagcacttaggaaacatgattg

SEQ ID NO: 9906 - DNA, 201 bp, Homo sapiens
ggctgaatatggcattacctgattaaggcgaagtattttttattgtaccacactttagaatgtggtaaaatgaaacaatatcaagtaaatcattgggaatrtgttggttttaagttattcttgatgaaatattacctgagggtgtttgtctaggcctgatactgagaataatataagaattataaggccatgaagaaaagt

SEQ ID NO: 9907 - DNA, 201 bp, Homo sapiens
ctcttaggattataaagtacaattactttggctgaatatggcattacctgattaaggcgaagtattttttattgtaccacactttagaatgtggtaaaatraaacaatatcaagtaaatcattgggaatatgttggttttaagttattcttgatgaaatattacctgagggtgtttgtctaggcctgatactgagaataat

SEQ ID NO: 9908 - DNA, 201 bp, Homo sapiens
agaatgtaaaaggaaaaagaacattactgcacattcagaaatcaggtgcacatagaatttaaggtcaggaccttacagagaatcttgtccagtgataatasgcctgccttaaaaaaattcagacatggtaggtttattaccaatctttttttgtgctagtaatggtagaatttattttttcctgtggacacctacgttaaa

SEQ ID NO: 9909 - DNA, 201 bp, Homo sapiens
aaggcaaattgttttgattttccctcataatgggtgtagattaagaaccattcaccaaatcactagccccacaaaaagtaccagaagctctgctctgctcrgtgaagatagcacatcctggaaagcatttgtgagtgttgatttaagtttatggtagtctgcattcattcgataacccatctggttttggtagaggccaga

SEQ ID NO: 9910 - DNA, 201 bp, Homo sapiens
attttggtattttttgtagggctgggatgtcaccgtgttacccaggctggtctcaaactcctgggctcaagtgatctgcctgtgtcggcctcctaaagtgytgggattacagtcatatgccacagggcccggtctgtaatattatcaatacattaaactggcaggatgttttaaaaaatgtaaattaaactgagaacagaa

SEQ ID NO: 9911 - DNA, 201 bp, Homo sapiens
tctcgaagaatgtccccactctcttctggcttgtagggtttctgccaggagatctgctgttagtctgatgggcttctctttttggtgactcagcctttctktctggctgttcttaacattttttccttcatttcaaccttggtgaatctgactattatgtgtttttgggtgctcttctcaaggagtatctttgtggtgttc

SEQ ID NO: 9912 - DNA, 201 bp, Homo sapiens
aagtggttgaaaattgagtaccactggtagaactgaaacagacttccaaatgacacttttagatttagctgtcttctccagataacattaggtagacagaytaaagatctcccaaagttgttacaggcctttggtggaaaggtgaaaagattaaggatctcccaaagttgttacattcagatgcttattcagttaaccacc

SEQ ID NO: 9913 - DNA, 201 bp, Homo sapiens
aagttgaacacgcaaggagcattacaaattaatgacaatccatgctggctaacacggtgaaaccccgtctctactaaaaataaaaaaaaattagcctggcstggtggcgggcacctgcagtcccagctactccggaggctgaggcaggagaatggctaaacccggaaggcggagctttcagtgagcagagatcgtgccact

SEQ ID NO: 9914 - DNA, 201 bp, Homo sapiens
catttagctctataatcaattaaatatgagttattttttgtgtatggtgtgaaataagaatagaaatttatctttatgcatgtggatattcaatgttctcrgtatcatttgttgaaaaaatgattaattcctattgaactgcagtggtaccatttttgaaatcaattaccatcaatgtcagtgttaatttctggactctca

SEQ ID NO: 9915 - DNA, 201 bp, Homo sapiens
tcgtccctcactgcatggtcccttacagcttcccttggctaggagagggagttccccgaccccttgcacttcccgggtgaggcaacaccacaccctccttyggctcgtcctccgtgggcttcacccgctgtctaaccagtcccaatgagatgagccatgtaactcagttggaaatgcagaaatcacccaccttttgtgttg

SEQ ID NO: 9916 - DNA, 201 bp, Homo sapiens
tgatgctgtcatcagttcattgattctgacatttgcaagatcaccagagagtctatgttcccaaggttagtcatcatgttgcatgctctattagctgcatygaacttagtttatttagatttcaggatgctgccctctcctgattttatccttatccactgggcactacttctcaatctcctttgctagttctcttttgtc

SEQ ID NO: 9917 - DNA, 201 bp, Homo sapiens
tacaaattatggagaggttaaacaaggaaaaaaattgcaaaacaatgaaaaataatatgcctttctttgcatactaacacatgagaattcattttccactkcaacctcagtataaaaaagtacagcatatagcaaggagagaatctatatgaagaggagtgaatttgagctgttttgagaataatgaccttttctatttct

SEQ ID NO: 9918 - DNA, 201 bp, Homo sapiens
cagcttcccttggctaggagagggagttccccgaccccttgcacttcccgggtgaggcaacaccacaccctcctttggctcgtcctccgtgggcttcaccygctgtctaaccagtcccaatgagatgagccatgtaactcagttggaaatgcagaaatcacccaccttttgtgttgatcttgctgggatttgcagactgga

SEQ ID NO: 9919 - DNA, 201 bp, Homo sapiens
aatttgagttgtttgaaaataagaatgttttccataaagagatcattgaactcatcagttaacatgccatggttatttctggcttgacactggtcacaacrattaaaagtaaaaagaatgtcacagcacattcacaaatcaggtgcatatagaatttaaggccaggatattcaagcaatcacacccagttatattacattg

SEQ ID NO: 9920 - DNA, 201 bp, Homo sapiens
agacgaatagatagaaaatataaggctagagggtcagagacagtgaagctacaatcagaacaactaacatacttctgcagttcccgaaaattagaagagarcaaatggggcagaagcaatgtggagatttttccaaaagtgataaagtatatcagttcatatatttttagaaactatcagacttcagacacgataactaaa

SEQ ID NO: 9921 - DNA, 201 bp, Homo sapiens
aaaaagcatttgcaagaatttggcttgctaatgatgctattaaaagataaactaaagttgatatactgtattattgcatagactatttgtccatgtttgtrttcaaaaatgccaaaaaaaatcccaaaatagaatcctaattgttggaggtcgtgtttcttatcgaattttaaaatgtagtaaaagaaaaaaaagcaaata

SEQ ID NO: 9922 - DNA, 201 bp, Homo sapiens
cttttgctgctttcagaatcctttctttatccttgagcttagggaaattgattattaaattctttgaggtagtcttcttcaattttacccagcattgtttkttgagaaaaaccattaattcctatcaaattgcagtagtcccttttttgaaatcaattgaccatgaatgttggtgttaatttctggactctcagttgtgtt

SEQ ID NO: 9923 - DNA, 201 bp, Homo sapiens
gggaaaaagcatttgcaagaatttggcttgctaatgatgctattaaaagataaactaaagttgatatactgtattattgcatagactatttgtccatgttwgtattcaaaaatgccaaaaaaaatcccaaaatagaatcctaattgttggaggtcgtgtttcttatcgaattttaaaatgtagtaaaagaaaaaaaagcaa

SEQ ID NO: 9924 - DNA, 201 bp, Homo sapiens
gtacacctgtaagttgggttaaatattttgttactataaattttttggctctacattagagaaaaataccatagaaaggcaaattttttaaggtataaaayatatttagcatgatctttgagtatgtttgtgcatatataattctactttgactgctatagtaaaatgatccagatttagtcaccatagctaagaagggga

SEQ ID NO: 9925 - DNA, 201 bp, Homo sapiens
aaattattaatcagaagaaatgttccatgaaaattattattactctgctcattatataccaaagggaaaaatacactgtatacattcatgtacagctctamaagattttaattagaaaatttttgattttagttgtgactactgaaaatttgacaagatgtttcctgccaaccccagatttttcagtagatatttcttcta

SEQ ID NO: 9926 - DNA, 201 bp, Homo sapiens; identical to SEQ ID NO: 4308
  misc_feature (1)...(201): n = A,T,C or G, or insertion/deletion polymorphism (see Tables 1-2)

SEQ ID NO: 9927 - DNA, 201 bp, Homo sapiens
atgatattttaatgaacaaataaatgggtggataaaatgggtaagctgatgtggtaaaccaatgaaagggaaactcatcacaaaatctgcagttgcatgarttcccctgttctgttctcaggttaaggttacaggcttatccaagcagaatccttccgcagaggaaaagtttggctattccacaattttaggggaaatatg

SEQ ID NO: 9928 - DNA, 201 bp, Homo sapiens
cttttgtagtgataggaaatatatagagagagcaaaatgccgtttactgtaaaaaagattgtctcagcatgtggactagggacactaaaaaccttaaaacrtcacctatgttgtcggtccctgaatcttctctgatttatctattttcttctggtattttacttctgctcaatgttataatattttactatactgaagaaa

SEQ ID NO: 9929 - DNA, 201 bp, Homo sapiens
caaaacatagtgtctcttttgtagtgataggaaatatatagagagagcaaaatgccgtttactgtaaaaaagattgtctcagcatgtggactagggacacyaaaaaccttaaaacatcacctatgttgtcggtccctgaatcttctctgatttatctattttcttctggtattttacttctgctcaatgttataatatttt

SEQ ID NO: 9930 - DNA, 201 bp, Homo sapiens
gctacttaagtctcagagcctaagtttcctcttctaaatttttgaataatcaaaatggctcccctaaaggatgaagactaagcagatcacatacatgaaamactagtggatatagtcatgtctgcttcacaataatgattttaggaaagaacagcagacatgaaattgtgaggaattaaatgctcccgagttaaaaatctt

SEQ ID NO: 9931 - DNA, 201 bp, Homo sapiens
cagtgtttactggttagtttgtttttacaattgtatactattctattgtttggttgttccgtaatctatttaaccaatccctgtcactggatattaaggckggattcacattctcactattatatgatatgttgcagtgcccatctttgtaaaaatagcccttacataaccaacagcagcaaagcatgaacacataacaat

SEQ ID NO: 9932 - DNA, 201 bp, Homo sapiens
tggcagccacttcacagtgaggtgagagagacagcatggtggtcatcagatgcatgcacttgactcccagaacttttccagaagggctacaaagggaaacsacagctggcattagtccatggaagagagagagaggagggagaatgtatctgctcagctgttgttagtcttctgtttccccttggccagggtttccctgag

SEQ ID NO: 9933 - DNA, 201 bp, Homo sapiens
ttataccatactgtatattcagatttgtgtcttactcactggaaaaatttattgtttagaaaactttctcctgagttcatttagatctcttcagtgtttaytggttagtttgtttttacaattgtatactattctattgtttggttgttccgtaatctatttaaccaatccctgtcactggatattaaggcgggattcaca

SEQ ID NO: 9934 - DNA, 201 bp, Homo sapiens
tttatatggaaggccaattcaagacaaaaatggcagggacatgtggaaattgagacaagaacggatgtgaaacaatgtgtggtgatgtctggtatgactctgctggcagccacttcacagtgaggtgagagagacagcatggtggtcatcagatgcatgcacttgactcccagaacttttccagaagggctacaaagggaa

SEQ ID NO: 9935 - DNA, 201 bp, Homo sapiens
aaatatatataatgcttttattacaagcacttataccatactgtatattcagatttgtgtcttactcactggaaaaatttattgtttagaaaactttctcmtgagttcatttagatctcttcagtgtttactggttagtttgtttttacaattgtatactattctattgtttggttgttccgtaatctatttaaccaatcc

SEQ ID NO: 9936 - DNA, 201 bp, Homo sapiens
agcttagggaaattgattattaaattctttgaggtagtcttcttcaattttacccagcattgtttgttgagaaaaaccattaattcctatcaaattgcagkagtcccttttttgaaatcaattgaccatgaatgttggtgttaatttctggactctcagttgtgtttcattgttctttttgtctaccctaatgcgagtacc

SEQ ID NO: 9937 - DNA, 201 bp, Homo sapiens
ttgaggtagtcttcttcaattttacccagcattgtttgttgagaaaaaccattaattcctatcaaattgcagtagtcccttttttgaaatcaattgaccaygaatgttggtgttaatttctggactctcagttgtgtttcattgttctttttgtctaccctaatgcgagtaccatagaatcctgattcgtgcagctttgaa

SEQ ID NO: 9938 - DNA, 201 bp, Homo sapiens
ttatcttaattgtagcagaaggtatcatgcttttctgaaccttgtgcattctgcccaaaaatggaagttctcagccacgtgtggttgttcacacctgtatscaagcactttgggaggccaagatgaggggaccacttgagaacaggagttgaagaccagactgggcaacatagggagactctgtctcaacaaaaaaattaa

SEQ ID NO: 9939 - DNA, 201 bp, Homo sapiens
aaaatagtatctatgaaatctatgtattaattatgggatttgtcctagtgtaattttgttgtcaatgattaaatggaattgtcttgacatattcattaatrggaagttctattataagaaggaaatgtacagtcttgtttacagctaaattctacatgactgtattaattcttggtgttatgaaattttaacaatgttgtt

SEQ ID NO: 9940 - DNA, 201 bp, Homo sapiens
atcatgatcttgattgctattatcagcttccatatgcagttagaaaagtcatttcttccagcttttcaattaaagaaaaactttttttgaaattgagctcwgatgtaaattattttagtattttttctaaagcacttctaagcccctgaattgctaattatatccttatcttccatttttaaaattctttctaaacttcag

SEQ ID NO: 9941 - DNA, 201 bp, Homo sapiens
ttccatttattttgcttagcaacctctgagcctctgaatttccaatattcttctttgtctcccattcctgatattcctcaaaaaaactcaaatattccctktctttaaaaaaaaaagcccaacataaacagggtgtagaaactatagatgataatcgaatgaaactttcttcaaatgttaaaaattgcctgtgaaatctat

SEQ ID NO: 9942 - DNA, 201 bp, Homo sapiens
gctgtcttaaatatctgtgtaaagtctactaacttcctgttgactgaagcaaattagaggagtgaatttagagtccaagttcaaggtagtcaccctgcctrtggtgggaggatactgcaggattatatgacaaaatgtagggtacttagaaacatttacaaaattgctgaatattttaattaaaatttaaacaaaaaacag

SEQ ID NO: 9943 - DNA, 201 bp, Homo sapiens
atttatatggaaggccaattcaagacaaaaatggcagggacatgtggaaattgagacaagaacggatgtgaaacaatgtgtggtgatgtctggtatgactctgctggcagccacttcacagtgaggtgagagagacagcatggtggtcatcagatgcatgcacttgactcccagaacttttccagaagggctacaaaggga

SEQ ID NO: 9944 - DNA, 201 bp, Homo sapiens
tagtaaccagctactttactaaaatgtttttaacgtaatacctgatattaaagtgatgacatttatatggaaggccaattcaagacaaaaatggcagggayatgtggaaattgagacaagaacggatgtgaaacaatgtgtggtgatgtctggtatgactctgctggcagccacttcacagtgaggtgagagagacagcat

SEQ ID NO: 9945 - DNA, 201 bp, Homo sapiens
tataaaaatggcatttcatttcaaaaaattgagttagtaaccagctactttactaaaatgtttttaacgtaatacctgatattaaagtgatgacatttatmtggaaggccaattcaagacaaaaatggcagggacatgtggaaattgagacaagaacggatgtgaaacaatgtgtggtgatgtctggtatgactctgctgg

SEQ ID NO: 9946 - DNA, 201 bp, Homo sapiens
agaatccttcctcagaggaaaagtttggctattccacaattttaggggaaatatcacaataatatagtcttgatgcagctgtatcaggtgtctgaattggmgacaaggtagaacatcaaaattagatgccactattacaatattttaaaaaagcatataaaagactttggtctatttgcgtatgtatttttttctattgtg

SEQ ID NO: 9947 - DNA, 201 bp, Homo sapiens
tacaaaacaatgaacacaataaaatttgagtgacaagtatatgtagagtaaatttcatgtatgtgtaccataaacagtactgaggaatattagatttaatrcaagtatgtgaatagcttagaaaaaaatctctgctataagagggatgaaaaatcatgatcatgatcttgattgctattatcagcttccatatgcagttag

SEQ ID NO: 9948 - DNA, 201 bp, Homo sapiens; identical to SEQ ID NO: 850

SEQ ID NO: 9949 - DNA, 201 bp, Homo sapiens
ttggcaggcttcttattactgattcaattttggaactcatcatcggtttatttagggatgcaatttcttcttagttcagtcttggaggttgtatatgcccrggaatttatgcatttcttctaggttttctagcttgtatgcatagaggtgttgatagtagtttgtgaaggttgtttgcatttcagtggggtcagtggtaat

SEQ ID NO: 9950 - DNA, 201 bp, Homo sapiens; identical to SEQ ID NO: 845

SEQ ID NO: 9951 - DNA, 201 bp, Homo sapiens
aataagagtctgtggtgaagatgcagcaacagagaagctgctacttgcatcaaatttatttttagttcttttcaacttggttaagaatgattagactcacrcttttattctattcttgaccaaagtgtgggtaatcccagcactttgggaggctgcggcaggcagatcacgaggtcaggagatcgagaccatcctggctaa

SEQ ID NO: 9952 - DNA, 201 bp, Homo sapiens
aaaatcacatgtacttgcaactatgtgactaaatttcagaaacacaatgttgagtccaagaagccacaaacaagaagaacatgtaggattgcacctacacrcagtgcaaagcaggccagaccaagcgatggagtttagggttgcatacctagttggtaaagtgtaaagaaaattaaggaaataatcaccataaattttgga

SEQ ID NO: 9953 - DNA, 201 bp, Homo sapiens
ttgggaggctgcggcaggcagatcacgaggtcaggagatcgagaccatcctggctaacatggtgaaaccccatctctactaaaaatacaaaaaaattagcygggcatggtggcaggtgcctatagacccagctactcgggaggctgaggcaggagactggtgtgaacccgggaggcagagcttgcagtgagccaagatcgc

SEQ ID NO: 9954 - DNA, 201 bp, Homo sapiens
gaaacacaatgttgagtccaagaagccacaaacaagaagaacatgtaggattgcacctacacgcagtgcaaagcaggccagaccaagcgatggagtttagsgttgcatacctagttggtaaagtgtaaagaaaattaaggaaataatcaccataaattttggatattgcttatctcaggaggtatgaagaaatgtttaggg

SEQ ID NO: 9955 - DNA, 201 bp, Homo sapiens
tgcaaagcaggccagaccaagcgatggagtttagggttgcatacctagttggtaaagtgtaaagaaaattaaggaaataatcaccataaattttggatatygcttatctcaggaggtatgaagaaatgtttagggacttggaaagtggcatggaggtggacctaggttgtgtttggtgttccttgtcttgcctgcatcatg

SEQ ID NO: 9956 - DNA, 201 bp, Homo sapiens
agtatgtgaatagcttagaaaaaaatctctgctataagagggatgaaaaatcatgatcatgatcttgattgctattatcagcttccatatgcagttagaamagtcatttcttccagcttttcaattaaagaaaaactttttttgaaattgagctctgatgtaaattattttagtattttttctaaagcacttctaagcccc

SEQ ID NO: 9957 - DNA, 201 bp, Homo sapiens
tacaaacgtattagcagcaaccagattctgaggttctccagaaaatcttagatatttttgataaaagcagtttggattctgtgtatttaaatctgtcattwaaaaaagtccatataggtgatgaacttaattatgaccaagctccttttaagaatttagacatttactatatgatctctgtattgggttataaaacttccc

SEQ ID NO: 9958 - DNA, 201 bp, Homo sapiens; identical to SEQ ID NO: 990

SEQ ID NO: 9959 - DNA, 201 bp, Homo sapiens
gacatttatttagaaatcaagttcaagacaaaaatggcaaggatatgtggaaattgagacaggaacaaatgtgaaacaatgtgtggtgatgtctggtatgrctctgctggcagccacttcacagtgaggtgagagagacagcatgacggtcatcagatgcgtacacttggctcccagcacttttccagaagggctacaagg

SEQ ID NO: 9960 - DNA, 201 bp, Homo sapiens
ctcccagcacttttccagaagggctacaaggggaaaccacagccggcattagtccagggatgagagagaggagggagaatggagaatgtatctgctcagtkgtcttctgtatttgatttcccattggccattgtttccctgaggcagaactaccatctctgctgttctgccttccatcatccagtccctaggtggaggttg

SEQ ID NO: 9961 - DNA, 201 bp, Homo sapiens
atcatgtgccacagggcccgggctgtaatattattaatatattaaattagcatgatgtttttaaaaaaatgtaaattaaacagagaacagaagtgacataktcctgacataaaacagtgaagcagtgctattattcttacaatacaaggcaaattgtcttgattttccctcataaagggtgtagattaacaaatattcacc

SEQ ID NO: 9962 - DNA, 201 bp, Homo sapiens
gtgatgatgtcactgcttaaatgaacactcctaaagaatcaacaggtactattagcataagaaaagataacaaggttcttcatataacatcgatttaccaraaaacagtgtatctattgccaacagtaaattacaatatgtaaatttaaaaaattctttggccaggtgtcatggctcatgtctgtaatcccagcatgttgg

SEQ ID NO: 9963 - DNA, 201 bp, Homo sapiens
ttccaagttgcaggagaatgcgtagaccataattttaatctcttctgtgacctaagtattacaaaaagaagaaaatcactacaattttcatgtcaggtgtrctaaaaatttataaaaactattttttaagaacttggtgttataaatactttgtttagtttctccattaaaaatgatttatagcaagagaataaaagttca

SEQ ID NO: 9964 - DNA, 201 bp, Homo sapiens
gggttttattccattatgaattcctattttatgtttagtaaaaagcaatcagaattattgttacaaaacaatgaacacaataaaatttgagtgacaagtayatgtagagtaaatttcatgtatgtgtaccataaacagtactgaggaatattagatttaatacaagtatgtgaatagcttagaaaaaaatctctgctataa

SEQ ID NO: 9965 - DNA, 201 bp, Homo sapiens
tctcaatagatgcagaaaaggcctttgacaaaattcaacaaccttcacgctaaaaactctcaataaattaggtattgatgggacgtatctcaaaataatargagctatctatgacaaacccacagccaatatcatactgaatgggcaaaaactggaagcattccctttgaaaactggcacaagacagggatgccctctctc

SEQ ID NO: 9966 - DNA, 201 bp, Homo sapiens
tcttcagggttttattccattatgaattcctattttatgtttagtaaaaagcaatcagaattattgttacaaaacaatgaacacaataaaatttgagtgasaagtatatgtagagtaaatttcatgtatgtgtaccataaacagtactgaggaatattagatttaatacaagtatgtgaatagcttagaaaaaaatctctg

SEQ ID NO: 9967 - DNA, 201 bp, Homo sapiens
tatgaataatttccaaatgtatacctagaaaagtcttttacctaaagttagtctagaaaagtatatatatatagatgtgtgtgtgtgtgtgtgttgtgtgtatgaaaaactgaagaacattgacaataacatgctttttattgttttttcacaaaaactgccaaattatagaaaatatgacaaaaattcctcaattatgaa

SEQ ID NO: 9968 - DNA, 201 bp, Homo sapiens
atatgaataatttccaaatgtatacctagaaaagtcttttacctaaagttagtctagaaaagtatatatatatagatgtgtgtgtgtgtgtgtgttgtgtgtatgaaaaactgaagaacattgacaataacatgctttttattgttttttcacaaaaactgccaaattatagaaaatatgacaaaaattcctcaattatga

SEQ ID NO: 9969 - DNA, 201 bp, Homo sapiens
tatgtatatgaataatttccaaatgtatacctagaaaagtcttttacctaaagttagtctagaaaagtatatatatatagatgtgtgtgtgtgtgtgtgttgtgtgtatgaaaaactgaagaacattgacaataacatgctttttattgttttttcacaaaaactgccaaattatagaaaatatgacaaaaattcctcaat

SEQ ID NO: 9970 - DNA, 201 bp, Homo sapiens
ttttatatttcttactgggttttctgtaatatatgtatatgaataatttccaaatgtatacctagaaaagtcttttacctaaagttagtctagaaaagtayatatatatagatgtgtgtgtgtgtgtgtgttgtgtgtatgaaaaactgaagaacattgacaataacatgctttttattgttttttcacaaaaactgccaa

SEQ ID NO: 9971 - DNA, 201 bp, Homo sapiens
tcagtttgtaatttggggaggctggaaaagcaacctgtcttcatgttctgccaagctattatattcagctatccttcaacccacccattcatcctgatttkgggaaacaagaagctaaagcagatttttctttcagttttgcggcatgtgaggtactgggtgaaagacagaagccttcgtctccatagattcacaagaggg

SEQ ID NO: 9972 - DNA, 201 bp, Homo sapiens
atcaagaaattacaaccttgaaattacttagatattaaaatgaccaaagactttacaggagctgttgtacccatccttcatgaggtcaaggtagacactcwaaatgaatggaaaggaaaaacttgtcagcagaaaaataggaattataaattataaattaagaaaacagatattttagaaatgaaaaatataatgtcttaa

SEQ ID NO: 9973 - DNA, 201 bp, Homo sapiens
aacacacacacacacacaccaaagttaggaagactttgtggatagggccctttggacccattcgatgcactgctttttattgtctttatatctgtatgtakggtgtgatattaaatacttaaaatattatctcataagtgccagagagattgacccagggaaaaccaccaaaaatgttagtgggacaaactccctggccat

SEQ ID NO: 9974 - DNA, 201 bp, Homo sapiens
agtttgttaacattaagataaaagccttaacattttttatgcttaaaaacattataatgcttcattatagcagaatacacatttgtcattaaaagagatayagagcagaatttctcagagttcagcagaatattcatagttgttacaaaaaaatgttcttaatttttaaatattttaggcaatgctggcttaagcgacttt

SEQ ID NO: 9975 - DNA, 201 bp, Homo sapiens
aatagaagatagcagggccttctggctactgtgacagcctctaacaagcaggtttagaaagaaaaaggaaaaagaagtgcctgagttcaactgatgaggaytgaacaaacagtgcacacacacacacacaaacacacacacacacacaccaaagttaggaagactttgtggatagggccctttggacccattcgatgcact

SEQ ID NO: 9976 - DNA, 201 bp, Homo sapiens
aaaaaaatgttcttaatttttaaatattttaggcaatgctggcttaagcgactttaacctttttgtttgtttttaaatcataagctttctgtatactctgytagtatgtaaaaggaagtgctctatgtggagtttcccaaatttccttttctgtgaaatccttttctgttttagaaaataccttttaattctaacattttc

SEQ ID NO: 9977 - DNA, 201 bp, Homo sapiens
tctattatgttgctcattaatgaggaggattgggaagtggttgaaaattgagtaccactggtagaactgaaacagacttccaaatgacacttttagatttwgctgtcttctccagataacattaggtagacagattaaagatctcccaaagttgttacaggcctttggtggaaaggtgaaaagattaaggatctcccaaag

SEQ ID NO: 9978 - DNA, 201 bp, Homo sapiens
ccatgcatggtgttatgtatctgtaatcccagacactcaggaggctgaggcagggagaatcacttgaacctgagaggcagaggttgcagtgacccgagatygcgccactgtattccaacctgggcaatggggcgagactccgtttcaaagaaaaccaaaaacaaaaaacaaaacaaaaaaagtataggcacatgtgtaggt

SEQ ID NO: 9979 - DNA, 201 bp, Homo sapiens
tcatccctgatgtcacagttctcctgtcccccttacctctggactcatctcttaatctaaaataaaaacaaattgtatgcaaaagaaagaaacattttttwaaaaagttacttctgatggatttagttctgtccaggaagaaaatagatgatatattcagaatactctacaatctttggcaactgtgtaaccttgatcttg

SEQ ID NO: 9980 - DNA, 201 bp, Homo sapiens
cgccactgtattccaacctgggcaatggggcgagactccgtttcaaagaaaaccaaaaacaaaaaacaaaacaaaaaaagtataggcacatgtgtaggttyggatggaacaataaacactgcagagattcaggggattgtggcagatggatgtgaggcaggactagattgcagctctagacagaccagcatgtggatgctt

SEQ ID NO: 9981 - DNA, 201 bp, Homo sapiens
gatttcacacacaccagctgccttccttatctctgaaatgtccagcttaccatacttaggctctgatttctgcacatacatccccagttcacacttgcttmcaagcaggccttactttgagacaggaatgatttgggctgctttagtccttcaccaattgctgattaatgagctgtgatggcttccagttaaaataatttg

SEQ ID NO: 9982 - DNA, 201 bp, Homo sapiens
ggcaatggggcgagactccgtttcaaagaaaaccaaaaacaaaaaacaaaacaaaaaaagtataggcacatgtgtaggtttggatggaacaataaacactrcagagattcaggggattgtggcagatggatgtgaggcaggactagattgcagctctagacagaccagcatgtggatgcttgtattgtgaattttagctac

SEQ ID NO: 9983 - DNA, 201 bp, Homo sapiens
aaagtcctgccagctgccatacgtatccagttcaattacacgttcaggaagaggtagtaactacaaactgattagatccaccttgggatggacatgagacraagctctaggtagcatctgaccttcaaaacctccccctgcaggctggatgtgatggctcatgcctgtagtcttagtagtttgggaggccaaggtgggaga

SEQ ID NO: 9984 - DNA, 201 bp, Homo sapiens
cgtattaaaaaatcagtaagattttaagtaagcaaaattggaggactgctgctggcatctagtgtagagttaccaggtttagtaaataaaaatatagaagrccaagacgatagtaacaaatacaggatctcatttgatgaaagtcactgtgtaaagaaagaaaaataaataaagttttgaaaagaaaaacaaatcagggat

SEQ ID NO: 9985 - DNA, 201 bp, Homo sapiens
ggggcgagactccgtttcaaagaaaaccaaaaacaaaaaacaaaacaaaaaaagtataggcacatgtgtaggtttggatggaacaataaacactgcagagwttcaggggattgtggcagatggatgtgaggcaggactagattgcagctctagacagaccagcatgtggatgcttgtattgtgaattttagctacaaatcc

SEQ ID NO: 9986 - DNA, 201 bp, Homo sapiens
gtcctgccagctgccatacgtatccagttcaattacacgttcaggaagaggtagtaactacaaactgattagatccaccttgggatggacatgagacgaarctctaggtagcatctgaccttcaaaacctccccctgcaggctggatgtgatggctcatgcctgtagtcttagtagtttgggaggccaaggtgggagaatc

SEQ ID NO: 9987 - DNA, 201 bp, Homo sapiens
gattatgtatttagtagtaaaattctaatatattgaaaatgcatttttcattaggcactgtgatcaatataatagattactctatctttaaattttattawtatgttgcataagcattagaatagaatagaaatacatcaagaattataatatctatgtatgtgtatagagtgtatataaaatcagatttatatgtacaaa

SEQ ID NO: 9988 - DNA, 201 bp, Homo sapiens
cgagactccgtttcaaagaaaaccaaaaacaaaaaacaaaacaaaaaaagtataggcacatgtgtaggtttggatggaacaataaacactgcagagattcrggggattgtggcagatggatgtgaggcaggactagattgcagctctagacagaccagcatgtggatgcttgtattgtgaattttagctacaaatccactg

SEQ ID NO: 9989 - DNA, 201 bp, Homo sapiens
catatggaaactccatgtctacaaaaaattgaaaaattagctggcgtggtgctgcatgcctatagttccaaatacttgggaaactgaggcaggaggattgyttgagcccagggtttcaaggctgtagtgggctatgatcctgccactgtactccagcttgggtaacagagggagactctgtctaagaagaaaaaaaaaaaa

SEQ ID NO: 9990 - DNA, 201 bp, Homo sapiens
ttctatgatatattgagcattattgaaaatacttgctgatttaaattaagcagaacagattgctaccttgtttgcaccatatatggagattatgtatttartagtaaaattctaatatattgaaaatgcatttttcattaggcactgtgatcaatataatagattactctatctttaaattttattaatatgttgcataag

SEQ ID NO: 9991 - DNA, 201 bp, Homo sapiens
gcctggaaatagaatcggtgctgtcggctgggaggggcatggtgggagtgagaccagcccttcagtttgcatggttgctgggtgagacctgtgactgttgsctttcccccactttcctgacaacctgcaagactcagcagaggcagccataatcctcctaggtacccaactccagtgacctgggaatctcatccccatccc

SEQ ID NO: 9992 - DNA, 201 bp, Homo sapiens
aaattcagacatggtatgtttactactcatcattattatccataacagtaatggtagaatttgtattttcccataggcaccttcattacacttatatactkatttgatatttcaacatattattttctttgggtccttttaagtagttgttaaacaatgctgaaagttgccttacagtatgctgttaactaatcatatttt

SEQ ID NO: 9993 - DNA, 201 bp, Homo sapiens
tgtcaagcatttgggagacactgtttataagaattcttgtagtgtaattcataatggggactgtgggaaattgattcattgtattggttaatatcattgaytgaatcaggaactgaaaggtctccctgattgattttattctcaactgcttggccatctccaggatatgtttcctgtagataacaattttagctacctctt

SEQ ID NO: 9994 - DNA, 201 bp, Homo sapiens
ctttcaggtgacatcatcatcattattatcatcatctacatttacatctgtcttattaaatgatttatttctgaaatatttacatacataatttgggtaaygtctatgtaatttccaagagatatcattgtgggaaagttacattagtaaacagcaaagttcatgtcaggctgaatacattgagatttagaaagttaagtg

SEQ ID NO: 9995 - DNA, 201 bp, Homo sapiens
ataatcctcctaggtacccaactccagtgacctgggaatctcatccccatcccccacagcagccacagcaagacccacaggagagtctgagctcagacatrcctagccctgcccccacctgatggtccttccctatccaccctggtagtggaagacaaagggtatataattctgggagatctagggccacacccactgcca

SEQ ID NO: 9996 - DNA, 201 bp, Homo sapiens
ttgcaatgatattttgaaatccagtgctgctctttgagttccctttgagcagagtttgtggtggggacccagcaacagacaagctaatatccaaaaaaagstactcacatcaacttaatttccagtttctttcaaattgaaggtaaattctaacacaaagcttttattctattctctgactaaagtgttgggaaaagaaga

SEQ ID NO: 9997 - DNA, 201 bp, Homo sapiens
tgagaagtgtctgctcatatcctccacccactttttgatggggttgtttgtttaatagattgcaaaaattttctcccattctgtaggttgcctgtcactcygatgatagtttcttttgctgtacagaagctctttagtttaattagattccatttgtacattttgtcttttgttgcaattgcttttggtgtttcagtcatg

SEQ ID NO: 9998 - DNA, 201 bp, Homo sapiens
taactaaaatcaagttaacaaaaaataatacaggacaccaaagaccagtagaaaatctgaaaagtagctagaggtagaagatagagtatgttgataagaaytgcattctaaatacaacctgattttaacagaaaatatggaaggaggaattcaatggaatcatgtcttcagtgtgtttccaaagagtagtagaccttcata

SEQ ID NO: 9999 - DNA, 201 bp, Homo sapiens
atctgaaaagtagctagaggtagaagatagagtatgttgataagaactgcattctaaatacaacctgattttaacagaaaatatggaaggaggaattcaawggaatcatgtcttcagtgtgtttccaaagagtagtagaccttcataaacagaaattgaaaatgatatttttcagatataataaaaattactgaaaataca

SEQ ID NO: 10000 - DNA, 201 bp, Homo sapiens
ggctctctattccatttccttggtctatgtgcctgtttttgtaccattgccatgctgctttggttactgttgccttgcagtgtggttcaaagttaggtaakgtgcctccagcttgttctttttccttgggattgccatggctatttgggctctttcttttttttttttttttattccatatgaactttaaaatagtttttt

SEQ ID NO: 10001 - DNA, 201 bp, Homo sapiens
gcccacgatgcatgcctctagcagctttgaattctgctggatcatctgacgcaatgggcagagcaggtttggccacagcctatatctgctgtagagatatyttatgttctggattccacttgaaaccactagtctttgcattcattctgcaacccatctagttttggcagaggctaggtaggttaactgaacagggattta

SEQ ID NO: 10002 - DNA, 201 bp, Homo sapiens
gtgggtggcattatttctgggctctctattccatttccttggtctatgtgcctgtttttgtaccattgccatgctgctttggttactgttgccttgcagtrtggttcaaagttaggtaatgtgcctccagcttgttctttttccttgggattgccatggctatttgggctctttcttttttttttttttttattccatatg

SEQ ID NO: 10003 - DNA, 201 bp, Homo sapiens
atgcaatttttaaaagactccttgtctaggaatctcatcaaatgaccaggataagatactggatcagataaccactggataagatacttggagttgtcaayatgcctagacagacttttcagttgttcttttgaaggcagctccaagagattccctgggtgactttatctgcataataagacaacctttgttcacagtgaa

SEQ ID NO: 10004 - DNA, 201 bp, Homo sapiens
atggtgaatgagtcagttaatttgaattgttttgaaaataagaatgttttccataaagagagcattgaacttatccattagcatgccatggtgatttctgrcttgacactggtcacagcaattaaaagtaaaaagaatgtcacagcacatacacaaatcaggtgcatatagaatttaaggtcaggatattcaagcaatcac

SEQ ID NO: 10005 - DNA, 201 bp, Homo sapiens
gtctgacaacgctgaataggaaaatagtactaattctacctggatgacctcctggaaactcgttttccatttggtgagtaataagaaaataattccttccrtcccctaatggtgtgagtgcatgtgtgtctatgtgtttaggagcttattaacaataatgtcatataaatgtattggttatcagaaaccagattttcaggt

SEQ ID NO: 10006 - DNA, 201 bp, Homo sapiens
ccagacagtcccttcgggcaagttcatctaactgtgtgctccacgagggatctctccttgagacttgacagttgatttgcagacaaaagtatgccctcatsgaactgtcacctccagggtttagcttagacctcacatccattaggaggggatgtggagacgatgcccaggtggccacttctacaatggctgtcctgctca

SEQ ID NO: 10007 - DNA, 201 bp, Homo sapiens
ggttgcatacctagttggtaaagtatgaagaaaattaaggaaataatcaatataaattatggatattgcttatctcaggagatgtgaagaagggtttaggsggttggaaagtggcatggaggtggacctaggctgttttcagtgttccttgtcttgctccacataatggttacttgaatgtttatgatacactgcggtatt

SEQ ID NO: 10008 - DNA, 201 bp, Homo sapiens
taaactctaaatatatactgcatttttctatatgggggcttagaatttctagcccagggtggtagatgaatcaaagggatacatcatacaaatgaataacytttaagcaaaagatggcattgtaaaactataaaggagaatctacttcaattttgcatgttaacaaatgagggttcaaatttgaatgcagaactttccatg

SEQ ID NO: 10009 - DNA, 201 bp, Homo sapiens
agggtttcaccatgttggccaggctggtctcgaactcctgacctcaggtgatccacctgccttggccttccaaagtgctgggattacaggcgtgagccacygtgcctggccaaaaacttccatactctctaaaagatttggtattatatcagagagcagttttctccattttcttaaactttgcatattttataaataatc

SEQ ID NO: 10010 - DNA, 201 bp, Homo sapiens
gacaggtcaaatatcgctttcttggctcataggtttagtacctggggtaaaaggacgtaaaagctgggctcacgtgggataatgagccagagggcctgcayatggcctctgcatgtgggtttggacattgtgacctcagagtagttggactacttacatgtggcttaggactccaagagtaaatattgcagtgattaagaa

SEQ ID NO: 10011 - DNA, 201 bp, Homo sapiens
acaagatttggttgtttgaaagtgtaaggcacctcccccatctttctcttcctcctgctccaaccatgtgaagatgtatctgatttccccattgccttccrccatctttatacatttcctgaggcctccccagaaacagatgccgccatgcttcctgtacagcctgtgaagccatgagccaattaaacctcttacagaaac

SEQ ID NO: 10012 - DNA, 201 bp, Homo sapiens
agaaaatttatacaagttccccttacactgaggaaaataaagatgctatggatacctttatttgggatagaagagaaaaacagacatggaaattagaaatracaaaatattgataccattcatatgctaaataattctattctgatgctctattgctgcataataaaatcacccagaaacttcatggtgtaaaataacagc

SEQ ID NO: 10013 - DNA, 201 bp, Homo sapiens
gaaactttcttcaaatgttaaaaattgcctgtgaaatctatatattgatgataggaaatatattaatgactattataatgatgtaaatggtgaaatgatasaaagtgtgctgatgtatccattgataccaagttctattataagaaggtaatctacagccttgtggaacagctaaattctgtgtgactatattcattcttg

SEQ ID NO: 10014 - DNA, 201 bp, Homo sapiens
aatatgtgatgaaaataaacattcaggtcatcccttgctttgtgtgaaagttttaaattaagaattcaatttttaaaaatagacactaagattttctattyctttgtgtgcctgattcagtaatttctttcagggaatttgtccattttatctaatttaattcactgaaataattttataaatattattcctcaatttctt

SEQ ID NO: 10015 - DNA, 201 bp, Homo sapiens
agcctctgaatttccaatattcttctttgtctcccattcctgatattcctcaaaaaaactcaaatattccctttctttaaaaaaaaaagcccaacataaasagggtgtagaaactatagatgataatcgaatgaaactttcttcaaatgttaaaaattgcctgtgaaatctatatattgatgataggaaatatattaatga

SEQ ID NO: 10016 - DNA, 201 bp, Homo sapiens
ttgaacatgcaaggagcaataaaaattaatgacgaaaaataagtgtgtaattctaaataaatgttgactgtataaaacaatattgtcttgttggattaaaygtataattgataagatatatgcaaatagcaataaagagactggagataaaggtgacaggaataaatttagtcaaactgtgttttgggcttttctatgtct

SEQ ID NO: 10017 - DNA, 201 bp, Homo sapiens
tttttccccacaattctggccatggaggtccccaccctgctctaaagcaggtgctccaatatctggcccaagactaaaatgcctgcacagctacgctgctkagttaccaaagaatgattgactttgtggcatctgaattaaaaatggtatcctgctctcagtcctgggtctgagaaaaggcctgaaccttttcccagtgtc

SEQ ID NO: 10018 - DNA, 201 bp, Homo sapiens
gagcaataaaaattaatgacgaaaaataagtgtgtaattctaaataaatgttgactgtataaaacaatattgtcttgttggattaaatgtataattgatamgatatatgcaaatagcaataaagagactggagataaaggtgacaggaataaatttagtcaaactgtgttttgggcttttctatgtctgtgaggagaattt

SEQ ID NO: 10019 - DNA, 201 bp, Homo sapiens
gagggcctccctattctaggatctctgcacaagaagggtggagcagatgaagctgctgaaccaggtgaatgagtgatccaaatgcccagatttctgcctaraggtagagtggaggagagtctgctgcaccacaatcacaggggaacagggtggggtacccagcaatgacacacacagactagttccaagtagctaagctgc

SEQ ID NO: 10020 - DNA, 201 bp, Homo sapiens
atcagtgacaaacatgtagagtatatgtatttgcctttgggaaggcaaattttgtatatgtataacaaaactgtactaaagaatactagatttaataccartatgtgaatagcttagaaaaaaatcatttctataataggaatgaagaaacaaaaccatgatcatttcagtgctattataattttttaagtgtagttagaa

SEQ ID NO: 10021 - DNA, 201 bp, Homo sapiens
aaagagactggagataaaggtgacaggaataaatttagtcaaactgtgttttgggcttttctatgtctgtgaggagaatttgaatgtcataatcaaggacsctgtaattctacacccagctatatatatgcaaaggaattgtagcaaatgatatgtgaaagaatgctcattgtagaattattctaacagctcagaaaagaa

SEQ ID NO: 10022 - DNA, 201 bp, Homo sapiens
tgcacagggtaaatggggtgactcaggcttcttaactaggcaggcaggtgctcttaatgcttggatatttgcctgggcataaaacagagaggatcagcccwgtacatggatctgtgaacgggaagggtgaggcagcacaggttgccagtctgtgtgagcaggtgctttgaatgctagggtatgcagcagagaggacctccc

SEQ ID NO: 10023 - DNA, 201 bp, Homo sapiens
ccacttcccctagggccagagactcattaaacatggccttcttctaagttattgcatataatgtttttaaaaagtttgcttatacaccacatgtgccatcrtgttgccagtctccaagatctgttccttcactgtccaaatcctctaaacaaattctcccactttcagttccaatttctgtgttagactgggtagacaaac

SEQ ID NO: 10024 - DNA, 201 bp, Homo sapiens
ttgacattttccatctatttttcccttggatcctgaattcctgacacaacaggggtggacatgtttcccacacgcttggcttagcagaatacctatatcayttaagtttttctgcaagagaaaatcctccaaaactgcattagatatttgtgtctcatgtgtctttggatttcatttttgtcagctaggtttggtggatgg

SEQ ID NO: 10025 - DNA, 201 bp, Homo sapiens
gcctgcttgtggagcagaacccacccccaccaaccaagatttctgcacagggtaaatggggtgactcaggcttcttaactaggcaggcaggtgctcttaawgcttggatatttgcctgggcataaaacagagaggatcagcccagtacatggatctgtgaacgggaagggtgaggcagcacaggttgccagtctgtgtgag

SEQ ID NO: 10026 - DNA, 201 bp, Homo sapiens
tttgtggagagtaggggtaaggggaggtttacttatattttgaaaagatctcatgacttgacctggtggtaatcctgctgagcaaatcctattaagtctartttgttcaggctgctataaaaaataccataaaatgggtgcttatgaacaacagaaatttatttcttatagttctagaagctgggaagtccaagatccagg

SEQ ID NO: 10027 - DNA, 201 bp, Homo sapiens
aggcattcgaaacaatggtctctatgtttaattgaaaagtcttaatgggcctcttaatttttttttcagtctcacttattgctgtttgataccccaaacckgtgagattttatacccctctgaaaccttagatttctgaactctctcttgctcttaattcttatttgcaaaccagtcaattcttttcctttctcatcttct

SEQ ID NO: 10028 - DNA, 201 bp, Homo sapiens
acatgtttcccacacgcttggcttagcagaatacctatatcacttaagtttttctgcaagagaaaatcctccaaaactgcattagatatttgtgtctcatrtgtctttggatttcatttttgtcagctaggtttggtggatggctgtggtgattggagatgggccacattctgcatcttgaagctactttggctgatttag

SEQ ID NO: 10029 - DNA, 201 bp, Homo sapiens
atatatatatcttcacttcaaagtataaagtggatgattaggggcaggctgactggcaacaataaactcctcccatttagaaagaaaacaggaggaatacmatggtagattggccatagcagtgacaaaccttccttgataggctatgtggagtcgcctgccctggatttacagggaagttcctgattagtccctgtgtct

SEQ ID NO: 10030 - DNA, 201 bp, Homo sapiens
tattattttccttttagacttcagtttgagatactttcacagttttcaaaaaccaattaaaaagtgaaaatgatctcttgaacaacagttctttttttaarcatctcgtatttttggctttttgtttttttgagacagggtcttgctctgcagccctggctggagtgcagtggcatgatcacagctgttttcttttttttt

SEQ ID NO: 10031 - DNA, 201 bp, Homo sapiens; identical to SEQ ID NO: 999

SEQ ID NO: 10032 - DNA, 201 bp, Homo sapiens
gccatttactttctgtgtctaatcacatcaacttggaatcctaggactcagcagagcaaacttgtattcctgctttaccaaactcttggattcatgtatcytttgttccactcattcatcctgactatgggaagtaggaagccaaaacagacctttctttcagctttgtgacaggtgaaatgctgagtgaaaggacagaaa

SEQ ID NO: 10033 - DNA, 201 bp, Homo sapiens
tcattgtttgaacctctcattttctggatggtaaagacattcaattctaaatcaatgatgagactgtatctttgtagtaggttttatttcattatgaattsttactttacttttagtataaagcaaatagaatttttgttagataatgatgtacacaataaaattagtgtacatattaaataaaatcagtgacaaacatgt

SEQ ID NO: 10034 - DNA, 201 bp, Homo sapiens; identical to SEQ ID NO: 984

SEQ ID NO: 10035 - DNA, 201 bp, Homo sapiens
tattccattatgaattcctattttatgtttagtaaaaagcaatcagaattattgttacaaaacaatgaacacaataaaatttgagtgacaagtatatgtakagtaaatttcatgtatgtgtaccataaacagtactgaggaatattagatttaatacaagtatgtgaatagcttagaaaaaaatctctgctataagaggga

SEQ ID NO: 10036 - DNA, 201 bp, Homo sapiens; identical to SEQ ID NO: 4322

SEQ ID NO: 10037 - DNA, 201 bp, Homo sapiens; identical to SEQ ID NO: 4323

SEQ ID NO: 10038 - DNA, 201 bp, Homo sapiens
tttcctggggatgcattaaagtcttatgttatatcagcttaaagttcagggcttctgagtgatagacagttctgtttaccacttccaaatgtagtccctcrtggtctgggaataaatgaaaacaaaaaacacaagatatatatatcttcacttcaaagtataaagtggatgattaggggcaggctgactggcaacaataaa

SEQ ID NO: 10039 - DNA, 201 bp, Homo sapiens; identical to SEQ ID NO: 4324

SEQ ID NO: 10040 - DNA, 201 bp, Homo sapiens
tctgtaattgttccaactttagtatatgtgctgctgaagtgaacactatacgtaaccattttttaaagtcagcttttgacaataccattcttaaacaatayagaacatactacacacattgttctgcatttttccttttaaaataatttaataattaggtatcacttcatagtactatatagcaatctttctcatttcttt

SEQ ID NO: 10041 - DNA, 201 bp, Homo sapiens; identical to SEQ ID NO: 4325

SEQ ID NO: 10042 - DNA, 201 bp, Homo sapiens
ggaggctgagaagtcccatgatacaaccagtggtgtagtcttgaggccaaaggcctgagaatcaggggctctgatgtccaagggcaggaggagatggatgwctccactcaagaagagagtatatttgcccttcctccagctttttgttctattagggccctcatcagattggttgatgcctacctacattggtgagggcag

SEQ ID NO: 10043 - DNA, 201 bp, Homo sapiens; identical to SEQ ID NO: 4287

SEQ ID NO: 10044 - DNA, 201 bp, Homo sapiens; identical to SEQ ID NO: 4288

SEQ ID NO: 10045 - DNA, 201 bp, Homo sapiens
aagacaaagtggaaaataaaaagatggcatttattacaatactttttactaagcatataaaagatttttgtataagtgcacatatcttttctattgcgaaygatatatttatattgtggtatttctagctggttattatataaacaaaaatgacatttcatttaaaaaatttagttaccaactatcttactaaaatataat

SEQ ID NO: 10046 - DNA, 201 bp, Homo sapiens
ggaatgtcaaggatgtttttgggggtgatggaaatgttctatatcttgattgtggtagttaatctgtataatttgccaaaagtaaactgtataattaaaayggtttttcatataatttataaaaattatatttcagtaaagctgatttacaaaaagaagcattttttttttgagaagcctcagaccacattaggtagaaaa

SEQ ID NO: 10047 - DNA, 201 bp, Homo sapiens; identical to SEQ ID NO: 4289

SEQ ID NO: 10048 - DNA, 201 bp, Homo sapiens
aggattatccaagaagaagaagaatttctcagagcaaaagtttggctattccacaattctaggggaaatatcactataatatagcagtgatgcagctataycagatgtgtgacacaaagacaaagtggaaaataaaaagatggcatttattacaatactttttactaagcatataaaagatttttgtataagtgcacatat

SEQ ID NO: 10049 - DNA, 201 bp, Homo sapiens
catgaaacccagcaattcttaagagaaatgagaacatacccgtaaaattgaatactactcagcaacaaaaaagaataaatcacttttacatgcaacaacaratgactctaaacattctaccaagtgaaagaaaggttcaaacatgataccattttctcttctacaaagagaaaaatatagtgacagaaaacagatcagtga

SEQ ID NO: 10050 - DNA, 201 bp, Homo sapiens; identical to SEQ ID NO: 4290

SEQ ID NO: 10051 - DNA, 201 bp, Homo sapiens
gtgaaccaatgaaaatgtaacacatcacaaaatctacagttgggtgcacatttctgttctggtttcagattgaagttacaggattatccaagaagaagaaraatttctcagagcaaaagtttggctattccacaattctaggggaaatatcactataatatagcagtgatgcagctatatcagatgtgtgacacaaagaca

SEQ ID NO: 10052 - DNA, 201 bp, Homo sapiens; identical to SEQ ID NO: 4291

SEQ ID NO: 10053 - DNA, 201 bp, Homo sapiens
atccatgcagatagttccactttaaaatgaaaaaatctaagcgagatgtaacttgccgtagggcacaaaatttgtaagggccaaagctagattaaaacttyagtttgtctgctgtgttatgtgggatgttaggaatcttacccttttgatttcataatattaatattagggcaagatgattcctacgccaataaaagcaca

SEQ ID NO: 10054 - DNA, 201 bp, Homo sapiens; identical to SEQ ID NO: 4292

SEQ ID NO: 10055 - DNA, 201 bp, Homo sapiens
ccctgtaagtaataaaaatgtctttccccactcaacaacagacagtacctttcaagtttccactttataaggacataacccccattccatttacttccccygccctccttcaacattcccacttgtattttccggctgtatttttaaaacatggtaaataacatttgcactccactttgtaaccataattaagtatgccct

SEQ ID NO: 10056 - DNA, 201 bp, Homo sapiens
ggctcctcaagcatctctttctatttttattttgtttcttgacataggttctccagcatttggctcaaggccccaagggcacatgtgacaagaaggcgccrgctttttaaacattggaagttcttctgtgtcagttctgtgacagaacatttacttaacacatcatgaaggctagtttggatgtggaggggaatagactcc

SEQ ID NO: 10057 - DNA, 201 bp, Homo sapiens
caaatacaccaggtactctatcaattttcattttttaaactattctacctgagctctccatctttagccatttcctgttgacttcatactgttctcccctwccactctccctctttaatatattaccgttttagaaactttatggctaccctgtaagtaataaaaatgtctttccccactcaacaacagacagtacctttc

SEQ ID NO: 10058 - DNA, 201 bp, Homo sapiens
atataaaattcatatatatataaaatacgtatgggtgtatatgtgtgcatgtgtgtgaataataacattgaccataaattatgaagcctagtatatttcayatatataagtatgtgtattttatgatagctaattgtatgatatttcatttgaagaatttatctctctttgtaattaagaaattacagcatttatcagaaa

SEQ ID NO: 10059 - DNA, 201 bp, Homo sapiens
attctgagtttcagaaaagcagaagaggttgatgttgaaaaaggactcagagaaataatgatcaaaaattttccaaacacagcaaagagcataaacctacrgattcaagaagctgagcaaatcccaaccagaatacaaccaatgaaatccattccaggaaaattcattgtccaatttctgaaaattaaagacaaaatattg

SEQ ID NO: 10060 - DNA, 201 bp, Homo sapiens
tcctcaaaaagctcaaattttccttactttaaaaagaagctcaatctaaagagggtatagaaactatggcatctatgaaatctatatattaatgataggaratgtcttaaagatatgttttattataatcttggtgtaaataatgaaatgagagaaagtgtgttgacatattcactaatagcaagttctattacaagaaga

SEQ ID NO: 10061 - DNA, 201 bp, Homo sapiens; identical to SEQ ID NO: 4299

SEQ ID NO: 10062 - DNA, 201 bp, Homo sapiens; identical to SEQ ID NO: 4300

SEQ ID NO: 10063 - DNA, 201 bp, Homo sapiens
tattactatttcattgattaaactacacttctgatattttagactaaaatgttttggcttatcgcagtctaggaaacctgtcttgggtatataaaacagayagttgatgcacgattagggaaaaataaggcaacctatgaaaatggccttatggattaaaagaagtgagctcctatatggtcagtggaatccaggaaaaat

SEQ ID NO: 10064 - DNA, 201 bp, Homo sapiens; identical to SEQ ID NO: 4301

SEQ ID NO: 10065 - DNA, 201 bp, Homo sapiens; identical to SEQ ID NO: 4304

SEQ ID NO: 10066 - DNA, 201 bp, Homo sapiens
aaatacatttttctaaaattaaagtgaaaacaaagagaaaatttatggttaagcttgcatgaaagaaggtgaaaccactgatgctttctgaaaagttcatrtggataatggctgaagaaatcagcagttcacaagtagatatgttatttcaagaagggatgaaatggtgctgaacctcaagtctacagtgacagagtattc

SEQ ID NO: 10067 - DNA, 201 bp, Homo sapiens
ttccctcacagagctgccaattatgttggaggatgtaataaatacaaagtctgtttcttcatcttcggtttaacaaatgactgatgtgaggaaaaaagttrtaggaatatgttcacatagtcacccaaatggagcatcctactctgtcaccatttcaggattaagactagacagtcttttgtgttacaaattgggacatca

SEQ ID NO: 10068 - DNA, 201 bp, Homo sapiens
ttttttgaagttgacatctgatgtcaagtatttccatttattttgcttagcaacctctgagcctctgaatttccaatattcttctttgtctcccattcctratattcctcaaaaaaactcaaatattccctttctttaaaaaaaaaagcccaacataaacagggtgtagaaactatagatgataatcgaatgaaactttct

SEQ ID NO: 10069 - DNA, 201 bp, Homo sapiens; identical to SEQ ID NO: 4305

SEQ ID NO: 10070 - DNA, 201 bp, Homo sapiens
aggagtttcaaaacatcccctataagagcaaaatacatttttctaaaattaaagtgaaaacaaagagaaaatttatggttaagcttgcatgaaagaaggtraaaccactgatgctttctgaaaagttcatgtggataatggctgaagaaatcagcagttcacaagtagatatgttatttcaagaagggatgaaatggtgct

SEQ ID NO: 10071 - DNA, 201 bp, Homo sapiens; identical to SEQ ID NO: 985

SEQ ID NO: 10072 - DNA, 201 bp, Homo sapiens; identical to SEQ ID NO: 4307

SEQ ID NO: 10073 - DNA, 201 bp, Homo sapiens; identical to SEQ ID NO: 4310

SEQ ID NO: 10074 - DNA, 201 bp, Homo sapiens; identical to SEQ ID NO: 4312

SEQ ID NO: 10075 - DNA, 201 bp, Homo sapiens
attatttgtgttctactaattttgggtttgggttacttttgtttttctagttctttaagatacacaattaggttgtttatttgaatttttcttcttttctsatgtaggcttttatagctgtaaatttccttcttagtattgtttttgctgtatttcatagattttggtatgttttgtttccactatcatttgtttctagca

SEQ ID NO: 10076 - DNA, 201 bp, Homo sapiens; identical to SEQ ID NO: 4313

SEQ ID NO: 10077 - DNA, 201 bp, Homo sapiens
caaattttagccttctgttttgttttgaaataatgcatcctctgcgctttgtcacattctgaaattcgtcaggtgttttaggatgcacactttcttagatsttttcgagggtcttaactgcagttctgtttccggaatggcgtattttctttctaggaattgtaggctcccggccgccccctgaggagctccgctagcagc

SEQ ID NO: 10078 - DNA, 201 bp, Homo sapiens; identical to SEQ ID NO: 4314

SEQ ID NO: 10079 - DNA, 201 bp, Homo sapiens
tttatgtcctcatagtttttgtcttgaaaactattttgtctaatattagtataggtactctacttttttgttttgttttttttttttttttttggtttgcmttgacatggaatatctttttccatccctttattttctctctgtgcatgtctttataggcaaagtgtgtttcttagaggcaacagattggagttttttttt

SEQ ID NO: 10080 - DNA, 201 bp, Homo sapiens
atagattcacaaggggagcatggtgtgtcttttagcagaaaagaaactgatggtgtctagaacgttttatatttctgtcagtttgttgtagtgtatgtatktgagtaatttcaaaacagattcctaggatagtcttttatatatatataatatatataaaattcatatatatataaaatacgtatgggtgtatatgtgtgc

SEQ ID NO: 10081 - DNA, 201 bp, Homo sapiens
ttttggtttgccttgacatggaatatctttttccatccctttattttctctctgtgcatgtctttataggcaaagtgtgtttcttagaggcaacagattgragttttttttttgttttgtttttccatttagccaaactatgtcttttgattggagagtttagtccattttcattcaacgttattactggtagtaaggtct

SEQ ID NO: 10082 - DNA, 201 bp, Homo sapiens
taaataaatattattcatgggctgaaaactcttgagtgggaaaatagggctaatttcatctggacaacttcttggaaactcattttttattttggaaattwtgagaaaataatttgttccattcataagtggtgtgcacatgcgtgtatttgtgttcatatttatgagcttgtgaataatgaagttatacaaaagtattag

SEQ ID NO: 10083 - DNA, 201 bp, Homo sapiens
tgaagaaacatgctgatgatcatttcagtgctgttataatttttttatctgtagttagaaaagtcattgcttccactttttgaattaaaggaaaccttttktgaagttgacatctgatgtcaagtatttccatttgtttttcttagccaccttgagcccctgaatttccaattttctcctttgtctcccattcctaatatt

SEQ ID NO: 10084 - DNA, 201 bp, Homo sapiens
ttgatgaaataccacgtgagggtatttgcctaggcctgatgctgagaataatataagaatcatgaggccatgaagaagaataatattgttctctcattacyttgaagtctagtacttaaaaaacaagactgaaatcacatttatcaaatagcattctcccttttacctgccatcatcattatcattatctatatccacatc

SEQ ID NO: 10085 - DNA, 201 bp, Homo sapiens
atgtatataaatagtttttcatagttcctggtattaaaaactcaatatattttaaaaatgatgctgatggtaatgatatgctatttgtcaagtaatcacayatatttttacccagaatttaaaaaaaaaaacaacttttcccctatcccttaggttacatatgttgctatgttcactgttttccttttatagttaaaataa

SEQ ID NO: 10086 - DNA, 201 bp, Homo sapiens
agataaccttggatgattttgacaaaaggtttagaatctggtatttaaatctggcataaaaataaatccatattgatatgatcctatttatgaccaagctyctttaacaatttagacatttactgtatgatatatgtattgggttttaaaatttccctatgtaacaactgaagatgctggatacaaattatggagaggtta

SEQ ID NO: 10087 - DNA, 201 bp, Homo sapiens
tgtatataaatagtttttcatagttcctggtattaaaaactcaatatattttaaaaatgatgctgatggtaatgatatgctatttgtcaagtaatcacacrtatttttacccagaatttaaaaaaaaaaacaacttttcccctatcccttaggttacatatgttgctatgttcactgttttccttttatagttaaaataag

SEQ ID NO: 10088 - DNA, 201 bp, Homo sapiens
agagaaatgttgcaaggatttttccaaaagtgataaaatgtattcctccatatatttttagtaatctcaaacttcaagcatgataaattaaaccaaattarcataaaataatacaggacaccaaagaccaatagaaaatctgaaaagtagcgagaggtggaagatagagtatgtcgtgtgttgaaaagaactgcattctaa

SEQ ID NO: 10089 - DNA, 201 bp, Homo sapiens
gtagctgtggtagatgaactatattttatctattgccatgatattttgagatccagtgctgctcattgagttcccctgtgggcagagtttgtggtgaggasccagcaacagacaagctaatatccaaaaacatctactcacatcaacttaatttccagtttctttcaaattgaaggtaagttccaagacaaactttttatt

SEQ ID NO: 10090 - DNA, 201 bp, Homo sapiens
gctcactgcagcctgggccttccgggctcaagcaatccttccatctcagccttctaagtagctgggactacagatgtgcaccaccatgcccagctattttwtttattttattttattttattttattttatcttattttatagagaggtggtctttttatgttgttcaggctggtctcaaactcctgggctcaagatatct

SEQ ID NO: 10091 - DNA, 201 bp, Homo sapiens
atgtgatctcattgttcacctcccaattataagcgagaacacgtggtgtttggttttctgttcctgcattagtttgctgaggataatggcttccagcttcrtccatgtccctgcaaaggacatgatcttgttcctttttaaggctgcataatattgaagctggacaatctataaagacctaatgtttctgcaggctgggaa

SEQ ID NO: 10092 - DNA, 201 bp, Homo sapiens
gattgaatcagggaggcagaggtttctgcaagccgagattgtgccattgcactccagcctgggtgacaagggagaaacttcatctgagaaaaaaaaaaaaattgtaaatccatgaggaagaataagagtgttctcccatcacccttaactccagtactttgaaaagaagacccaaatcacagttatttggtaacattctcc

SEQ ID NO: 10093 - DNA, 201 bp, Homo sapiens
acatgtttaaacatgatattaaaggcagagtacatttaaaatgaatgcatttaatagcatgactggaagaatttctgaatgcctcaagaaaataaatataraaaggtaaataatagattaaaaactttaaagtctatttgcaatataaacagtagaaaaaaatttaatacttttactgttttataaaaaagataaaaataa

SEQ ID NO: 10094 - DNA, 201 bp, Homo sapiens
aaatattttatataataataaatatttaaacattagacttgagagaaactttaccaaaggcctaagaattagagatatgtttgataaataaatattattcwtgggctgaaaactcttgagtgggaaaatagggctaatttcatctggacaacttcttggaaactcattttttattttggaaattatgagaaaataatttgt

SEQ ID NO: 10095 - DNA, 201 bp, Homo sapiens
gtgtagtaattttctgtttatcaaagtaagttaaatgattgaactccaagttcaggggaaaggtagtcagtcttcctgtgataggaggatactgcaagatkatataccaaagggtcgggtactcaggaattcttataaaatggctaaatattttatataataataaatatttaaacattagacttgagagaaactttacca

SEQ ID NO: 10096 - DNA, 201 bp, Homo sapiens
tgtcattaaggaaaagactgatgagttcacatttgctgataaaaataatataatctgtccatcctaagttaggtgtccaacaaatagttacatgtctatcytctcacctttcatgtcctccaacacttctctttaaagagtggcatagaataacatcatgaaagaatgaggaaactccagtgcaacaaaaaaattatagag

SEQ ID NO: 10097 - DNA, 201 bp, Homo sapiens
gatattctcatggtaaatggaaagaggaagaatccccagtatggaagccatctcaaatctctatgcaaagtgtagtaattttctgtttatcaaagtaagtkaaatgattgaactccaagttcaggggaaaggtagtcagtcttcctgtgataggaggatactgcaagattatataccaaagggtcgggtactcaggaattc

SEQ ID NO: 10098 - DNA, 201 bp, Homo sapiens
gtttgatggatggctctggtgatttgagatgggccaaattcggcatcttggagatagagtttggccaatttagtctggatcaggtgggggcaatctgactwcattactttctcattctccttctgggaacagtgtacttgcgaggcgatattctcatggtaaatggaaagaggaagaatccccagtatggaagccatctca

SEQ ID NO: 10099 - DNA, 201 bp, Homo sapiens
tgtatataataagtaataggtcagcagatcaaactaaagacaggtctggtgagaccagattgtttattcttatcacataggaacctccgtacgtgatagayttggcattagaaatcaacaaaaaaaaaacgtagactgttcaactaatgatattgagacctctgtcatttaatattgggacaaaattgtatttctaactca

SEQ ID NO: 10100 - DNA, 201 bp, Homo sapiens
atttgatcttttaaagattgttaaaaactaagaagtgttgatttctgctaataaaaacagcttaaaatttatatcatggaatagaatggtggagctgtggyggagatactttgtcttattaattgaaatgacattttgagatccagtgctgctcactgaatttccctgtgaggagagtttgtggtgatgaccccacaacag

SEQ ID NO: 10101 - DNA, 201 bp, Homo sapiens
tttgataaagttttaagtactgttttactatttgatcttttaaagattgttaaaaactaagaagtgttgatttctgctaataaaaacagcttaaaatttawatcatggaatagaatggtggagctgtggcggagatactttgtcttattaattgaaatgacattttgagatccagtgctgctcactgaatttccctgtgag

SEQ ID NO: 10102 - DNA, 201 bp, Homo sapiens
tatgtttcctttattgactgctgactatgtagagcataccaacaaaattgccattcatctatccattcaacaatatttattagctattccgcactgggcartgctctaggcttggggatagaacagtgaacaaacaaaatccttagcctaatggatattacctggaagtgtgccaggaagaataaactcacttgtgaatta

SEQ ID NO: 10103 - DNA, 201 bp, Homo sapiens
gccaccatgcccggctaattttttgtattttttggtagagatggggtttcaccgtgttagccaggatggtctcgatctcctgacctcgtgatctgcccgcstcagcctcccaaagtgctgggattacaggcgtgagccacagcgcccggcctgtacttccaaactcttaataccattagagtaacagcacagtgaatctct

SEQ ID NO: 10104 - DNA, 201 bp, Homo sapiens
gtgagccacagcgcccggcctgtacttccaaactcttaataccattagagtaacagcacagtgaatctctaatagccacaatacttttgttatttaaatgrtgcacatttcattaccttcacttatctcccattttaactagaaagcactgtattttttaatcgcacacaccgtcttcattcatggattattcaaatgtgt

SEQ ID NO: 10105 - DNA, 201 bp, Homo sapiens
gttggctttgcgttattcctgatgaaatactatatgagggtatttgtctaggcctgattctgagaataatataagaatggtgccaagcacagtggctcatkcctgtaatcccagcactctaggaggccaaggcagtggattccctgaggtcaggagttccagaccagcctggccaacatagtgaaaccctgtctctactaa

SEQ ID NO: 10106 - DNA, 201 bp, Homo sapiens
caaagctccaaatcctactccttaatgctctagagctgaagaaagatttccttctttccacctgagagtgggataggagcaataatttaggtggttgtagwttttatctgccccttgatgtttagatttgaatgcctaatccacactgcttttgctgcgggtgatattaggagaattcatgattagagtattcatgattgg

SEQ ID NO: 10107 - DNA, 201 bp, Homo sapiens
ttccttctttccacctgagagtgggataggagcaataatttaggtggttgtagattttatctgccccttgatgtttagatttgaatgcctaatccacactkcttttgctgcgggtgatattaggagaattcatgattagagtattcatgattggaaatggcttgattgtacaaattagaaaattcatgattggaaatggct

SEQ ID NO: 10108 - DNA, 201 bp, Homo sapiens
ccacctgagagtgggataggagcaataatttaggtggttgtagattttatctgccccttgatgtttagatttgaatgcctaatccacactgcttttgctgmgggtgatattaggagaattcatgattagagtattcatgattggaaatggcttgattgtacaaattagaaaattcatgattggaaatggcttgattttaca

SEQ ID NO: 10109 - DNA, 201 bp, Homo sapiens
gctgcgggtgatattaggagaattcatgattagagtattcatgattggaaatggcttgattgtacaaattagaaaattcatgattggaaatggcttgattktacagattaactgcattgactggcttgggcattggaagcttcctttaactgacttttcatcaggttagccagctccagaatttaacagctgtgtttaata

SEQ ID NO: 10110 - DNA, 201 bp, Homo sapiens
atttaattatttatgataacatttcaaagtggcagaaattagtgaatttccaataaattatagtagtatagatattaaatgtataggacaatttttctaartttatctttaaatgaaataattatacacatatttttaccattcaaagattataataccatgcatgtgtacacatgtgtaaggaaaaatattttgatactg

SEQ ID NO: 10111 - DNA, 201 bp, Homo sapiens
caatagctaatttttctcagccatttttcctttggataaagtgtagaattaattatgtgaatattatgattctgatggagtccttggtttattaacattcmattgggaaataaatgattttggagtcgtaatctttcttattttctttttatcatgtactgtttttcagcttttatagcagatttgattcactttatggta

SEQ ID NO: 10112 - DNA, 201 bp, Homo sapiens
ttggagtcgtaatctttcttattttctttttatcatgtactgtttttcagcttttatagcagatttgattcactttatggtaaacagcctgctgggcatgrtgcttttgcagatagtaggagccttctgcctttctgatcactctgattctgattcttgggaagagcaagctgagtcagacctcactgataatgctgtgga

SEQ ID NO: 10113 - DNA, 201 bp, Homo sapiens
agcccaggaggtcaaggctgaagtgagccttaattgagccactccagcctgggctacagagcaagactctgtcaggaaaaaaaaaaaaaagattaaaaaawtttttttaatattttttgagacagagcaagaccgtgtctcaaaaaaattattaaaaaaatcaaaacaatgaaggttgtgacacagaaataaaatgtatat

SEQ ID NO: 10114 - DNA, 201 bp, Homo sapiens
ttcaagacccacttgagcaacacagtgagaccttgtctctaaaagcatcaaaaaagtagctgggtatagtggcaactgtagtcttagctacacagagaatsaaacaggaggattgtttgagcccaggaggtcaaggctgaagtgagccttaattgagccactccagcctgggctacagagcaagactctgtcaggaaaaaa

SEQ ID NO: 10115 - DNA, 201 bp, Homo sapiens
aaatgtttagaactcagcaacgaaaaagcttttcacaatcaaaatgaaaaaaccggctaaagctaagaatccatatccattagtacatgttttataaaaamgttttccagatgaatgaggcacatattcaccttcagttaagaaaaatgaacaacagaaaaatttaaagaagggtgaataagttaagaaggagctaatatg

SEQ ID NO: 10116 - DNA, 201 bp, Homo sapiens
acataaaagataaatgtttagaactcagcaacgaaaaagcttttcacaatcaaaatgaaaaaaccggctaaagctaagaatccatatccattagtacatgytttataaaaaagttttccagatgaatgaggcacatattcaccttcagttaagaaaaatgaacaacagaaaaatttaaagaagggtgaataagttaagaag

SEQ ID NO: 10117 - DNA, 201 bp, Homo sapiens
aaaaagatgaacatttctacataaaagataaatgtttagaactcagcaacgaaaaagcttttcacaatcaaaatgaaaaaaccggctaaagctaagaatcsatatccattagtacatgttttataaaaaagttttccagatgaatgaggcacatattcaccttcagttaagaaaaatgaacaacagaaaaatttaaagaag

SEQ ID NO: 10118 - DNA, 201 bp, Homo sapiens
gatagttctgccagctgccatacgtatccatttcaattacacattcaggaagaggtaataactacaaactggttagatccaccttgggatagacatgagcygaagctctgggcagcatctgaccttcaagaactcccactgcaggctggatgtgatggcgcatgcctgtagtcctagtactttgggaggccaaggtgggag

SEQ ID NO: 10119 - DNA, 201 bp, Homo sapiens
tattctctataactgagaaaaagatgaacatttctacataaaagataaatgtttagaactcagcaacgaaaaagcttttcacaatcaaaatgaaaaaaccrgctaaagctaagaatccatatccattagtacatgttttataaaaaagttttccagatgaatgaggcacatattcaccttcagttaagaaaaatgaacaac

SEQ ID NO: 10120 - DNA, 201 bp, Homo sapiens
ttttttgttactataaattttttggctgtccattagagaaaaaaatcatagaaaggcaaattttttaaggtataaaaaataatttagcctgatctttgagyatgtttgtgcacatataatgctactttgactgctgtagtaaaataatccagatttagtcaccatagctaagaatgagaaaaagcatttgtgatagtttgc

SEQ ID NO: 10121 - DNA, 201 bp, Homo sapiens
gcgtgaacccgggaagcggagcttgcagtgagccgagattgcgccactgcagtccgcagtccggcctgggcgacagagcgagactccgtctcaaaaaaaaraaaaagaaaaaattcatggaaaagatgcaataatcatgaatttggacatacctaacaatgcattacgtaaatagataaagcagaagcctcacaaacagaa

SEQ ID NO: 10122 - DNA, 201 bp, Homo sapiens
gccgggcgcggtggcgggcgcctgtagtcccagctactcgggaggctgaggcaggagaatggcgtgaacccgggaagcggagcttgcagtgagccgagatygcgccactgcagtccgcagtccggcctgggcgacagagcgagactccgtctcaaaaaaaagaaaaagaaaaaattcatggaaaagatgcaataatcatga

SEQ ID NO: 10123 - DNA, 201 bp, Homo sapiens
taatttagtgaactgtagaaagaaaatattacatattgaagcacctcacaatgacttaacaccaattttatttgaggaatttctttagtgttaaaatacartaaacagccacagtaacagtaataccactaacattcttgagcatttattgtgtgcttagaaatttgtgtatgaattcatttaatatagtcctatggctta

SEQ ID NO: 10124 - DNA, 201 bp, Homo sapiens
tgcgaagtatctttgactgtgttggtcaccgttgaatcaaatatctaaataaagtgaatctggaacatcctagtgtccacatcaaaagcactcaataaagytggatgggggagtggtagtggtggtacagcaacagggtagcctagttaggttgcacaagcccatctaaacacgtgtgattatctgattagaaccaggaaa

SEQ ID NO: 10125 - DNA, 201 bp, Homo sapiens
ctgatgatgtgggtaacggagaaagctgcaagcctggtgaaagacagatttctccttggcagcagagtacaggaaaagaacaggaaatgctcctaaaggtygctcagctcaggtcccttccatgaccttctccaatgtcaacaatcagcaaaagagactagcatatcaagaaagtataaataccagctatgctctcaccag

SEQ ID NO: 10126 - DNA, 201 bp, Homo sapiens
aaatccatgtgttgaagcccacactctcaatgtgactgtatttggatataaggcttttaagtaggtagttaaggttaaattaggccatacagtgaggccgyagtacaataggactggtgtctttataaaaagaggaagaaacaggcatctgtgggcacagagaaaacacaatgatgtatgattccatttatataccattct

SEQ ID NO: 10127 - DNA, 201 bp, Homo sapiens
tctgtgcgaagtatctttgactgtgttggtcaccgttgaatcaaatatctaaataaagtgaatctggaacatcctagtgtccacatcaaaagcactcaatraagttggatgggggagtggtagtggtggtacagcaacagggtagcctagttaggttgcacaagcccatctaaacacgtgtgattatctgattagaaccag

SEQ ID NO: 10128 - DNA, 201 bp, Homo sapiens
tccctatattcctcaactttcatcctacccctttatgcttctgcatgtaactttattttcttcttgacgctatcaaaagctattgatgtcctgccagaaasatctcccattaaaagcaaactgcaagattttctaacacaatttagttagggatcctcaggacaggaacagacatggcttcaaaatttaacattgtctgat

SEQ ID NO: 10129 - DNA, 201 bp, Homo sapiens
atatcactgagtttcaatagctaaagttgagaagtcctccaaatgtctcagtcctccaaatggataaagaaattgtggcatacttatacagtggaatactrtacagtgatcaaaattaacaaacaagactgacatgtttacaacagaataatacaacaaagaaaatgaacaaatttgagctacatagataataatactcac

SEQ ID NO: 10130 - DNA, 201 bp, Homo sapiens
ttctgcatgtaactttattttcttcttgacgctatcaaaagctattgatgtcctgccagaaacatctcccattaaaagcaaactgcaagattttctaacamaatttagttagggatcctcaggacaggaacagacatggcttcaaaatttaacattgtctgatctctactctgggtagcacaggaaagtgtttcccttcca

SEQ ID NO: 10131 - DNA, 201 bp, Homo sapiens
gtatggcattatctcattaaggtgaaggatcatatcctaagatcaagtatttacactcttatcagaatacatatacatacacatgcatatcactgagtttyaatagctaaagttgagaagtcctccaaatgtctcagtcctccaaatggataaagaaattgtggcatacttatacagtggaatactgtacagtgatcaaaa

SEQ ID NO: 10132 - DNA, 201 bp, Homo sapiens
cttggaatttgattctgtcatgatcaacagtctcattctgagtctcaggcagaaggggcagctgtacttgaagtgtagctgtggctattctcatggtgatyatcaaaatacaagaaggcccagacaaactgataatgcatttttaagatctctgctcatatacattgtgctaatattctaaagcaattcacagacaagtac

SEQ ID NO: 10133 - DNA, 201 bp, Homo sapiens
cctcttcaactattggcctatcaacccatttcaataaggctgttgtcaccacttcattgaatctgacatttggaagatcaccagggagtctgtgttgccartggtcggtcttcatgttgcatgctctgtgagcagtactgaatatagtttatttgcattccaggatgctgccctctcctgattttttccttatttactggg

SEQ ID NO: 10134 - DNA, 201 bp, Homo sapiens
cttgaagtgtagctgtggctattctcatggtgatcatcaaaatacaagaaggcccagacaaactgataatgcatttttaagatctctgctcatatacattstgctaatattctaaagcaattcacagacaagtacaacattaatgggcatggaaattatactttgcccacagtgggagagcacagcaaagttacatgcaaa

SEQ ID NO: 10135 - DNA, 201 bp, Homo sapiens
tcagaagcctccccttggtcctgcttacaataatgtcccttggtatacaggtcaggaagaaatgtaagagtcctgacagctgttgaacctgtcaacttcamttacactttcaggaaggggtaactacgatgaactcattagaacccctttgggttggacatgggccaaagctctatgtaccatctgatcttcaaaaactca

SEQ ID NO: 10136 - DNA, 201 bp, Homo sapiens
gtaatctttcttattttctttttatcatgtactgtttttcagcttttatagcagatttgattcactttatggtaaacagcctgctgggcatggtgcttttscagatagtaggagccttctgcctttctgatcactctgattctgattcttgggaagagcaagctgagtcagacctcactgataatgctgtggaagattaga

SEQ ID NO: 10137 - DNA, 201 bp, Homo sapiens
cagattattaagatctattgtattcttcattacaaggccagatttcataggtgcataaaaaatcacctatacatgaatctattttttaattgagacatttktaaaccatgcatgtggaagaatatgatatagcatgcatttatgcatgcattttgaaaaccagcttgagaattttacttccttttagttagcagtagacca

SEQ ID NO: 10138 - DNA, 201 bp, Homo sapiens
agactccatatcaaaaaaaaaaaaaaaaattacaagcctttccaaataggagacatgaatttatttcatctgtggcagaactccagaagagttctctggcrtttcagtaggtaacaagaaaatggctgaaattttaacaaattcttacaaaggttgagtgtagtttaatgtgacagtttagaatacctgggagccccagac

SEQ ID NO: 10139 - DNA, 201 bp, Homo sapiens
gtaaactagtaaaactgtttactattctttgggcattaattaatcagttaagtatctagtttgccacctgcctaagcattttctacttgcttaagatagcsaatttctcccacttatttttttgcctggctgaagtggagaatgaacagagtggttcttgtgcttttcctgcggtctttgttcttatcgtttgtttacctt

SEQ ID NO: 10140 - DNA, 201 bp, Homo sapiens
aaaatggtgatagccttcctcctcctttttattattaactttatttccactttaataggagattggatcttccttgaggtagagaattatcaggtcatgaygtttattatgatgattttacttgcctttccctcaggccactcatttattataattttgggaaacaacaagctaagacagagctccttgagactactgtgg

SEQ ID NO: 10141 - DNA, 201 bp, Homo sapiens
gcaattcttctctggccctgtggaaactggatcagttttagctgggcttgatgggttgtatcttaggcacagggtaggtgcttaagccaagcagctcccartgggttactggaattattttctttggtttcaccagatactgttttccattagacctggagatgagcagtcctgccttggtgatttcaggtcaaccatcat

SEQ ID NO: 10142 - DNA, 201 bp, Homo sapiens
aaacagatctgcatgtggtggtaattttactccttccatttgaatatatgtatctctgttatgtgcttgtttatctaatattaaataaaattattcacttyctaattatccacaacattgacaagctttttctttgtgcctttttattagataatttttcagggtgttgcagatacacataaggttagcagctactttgag

SEQ ID NO: 10143 - DNA, 201 bp, Homo sapiens
ctttttacgttttgtgccctaggagtctcgttcactttgcccaagaccaggtcatggcaaagagccttgggatttagaaatagggtatccctcttggtcaraaggcagatttgtttaaagataaagactcttctcttcttcttcttctctccagagatatttgcttacattccagtgtaaagcttcttcttcagaaggcaa

SEQ ID NO: 10144 - DNA, 201 bp, Homo sapiens
agacgtgagctctgctctcttttcaaagtatccatgaagtctcaacagaacccaccacacaaccccccacccaccatggtagtttgtctttctctttgtcytctttcccaacctcatctttattgcctggatatagcgaggccagggtaaccttcttgtctctatgtggatagtacgtttgtacttctagccttgggattt

SEQ ID NO: 10145 - DNA, 201 bp, Homo sapiens
atcagaaaggcaccagagaaaagtgaagcccaatgcaaggaaatccaaaaatatgatacaagaagtgaagggagaaatattcaaataaattttaataatawaataataaattttaataataaataaataataaattttaataataaataaattcaaacatttgatacagttagtacataaattttgatgcataaaaaagtt

SEQ ID NO: 10146 - DNA, 201 bp, Homo sapiens
tttaggacctaaacttagcattggaccaaatggatctggtagacctttacagaagtgtccatccccaaataagagaatatacattcttttcatagccacayggcacatactctataatcaaccacataattggatataaaacaatcctcaacaaatgtaaaataaccaaaatcataccaaacacactctcaggccacagtg

SEQ ID NO: 10147 - DNA, 201 bp, Homo sapiens
tgcttgcaagctctttgatgaatacaaacataattttggcccctttatttatcttatgctagttgttgcagaaggacatcttgctttcttgaacctattasatctattcaaaagtggaagttttcacaggtaacctctctgtatcaagtaacacaagatcaaataaaacacgagcaatccttgtttcgtgcctgaaccaga

SEQ ID NO: 10148 - DNA, 201 bp, Homo sapiens
tccactgatttttaccacacatatgtaccacagtgtgcttaaacatctaaattttttgatagtaagcacactcaattctaaatcaataatgaggtttcatytttggggtagtttttatttcatcatgaattctaattttatgtttagtttatagccagcataattattttcagaaaaagatgcacagaataatattcaagg

SEQ ID NO: 10149 - DNA, 201 bp, Homo sapiens
tccatttcttctaggttttctagcttgtgggcatagaggtgttgacagtagtttgggaggattgtttgtatttcagtggggtcagtggtaatatccacttkgtcatttttgattgggtttatttggatcttctctcttttttttctttattagtctggttaggggtctatcatattaattttttaaaaacatcaaatcctg

SEQ ID NO: 10150 - DNA, 201 bp, Homo sapiens; identical to SEQ ID NO: 988

SEQ ID NO: 10151 - DNA, 201 bp, Homo sapiens
gtgtgaacccgggaggcagagcttgcagtgagccaagatcgcgccactgcactccagcctgggtgacagagcaagcctgcgtctaaaaaaaaaaaaaaaaattggtgttttctttgaccaaagtgtgggtaaaagaagagaattattggtattttcttgtcaagtttactaaaagtttttaaaaaatctttaagaatttgg

SEQ ID NO: 10152 - DNA, 201 bp, Homo sapiens
gtaagtaaaggtatcaaaaagtgaatttagttaatttaaatttggaattttctatgtctgtgaagagaatttgaaagctatatttgatgaccctgtaattmtctttctatgtatatatccaaaggaaatgaatcaaatgatatatgaaagaatggtcatactagaattattcataactcttcaaaaaagaaaccccccaaa

SEQ ID NO: 10153 - DNA, 201 bp, Homo sapiens
tggtgtctttttgggttaagtatttaataagatatatagaaatagccatatatagtctgtaagtaaaggtatcaaaaagtgaatttagttaatttaaattyggaattttctatgtctgtgaagagaatttgaaagctatatttgatgaccctgtaattatctttctatgtatatatccaaaggaaatgaatcaaatgatat

SEQ ID NO: 10154 - DNA, 201 bp, Homo sapiens
aattttgactgtataaagtggtggtgtctttttgggttaagtatttaataagatatatagaaatagccatatatagtctgtaagtaaaggtatcaaaaagwgaatttagttaatttaaatttggaattttctatgtctgtgaagagaatttgaaagctatatttgatgaccctgtaattatctttctatgtatatatccaa

SEQ ID NO: 10155 - DNA, 201 bp, Homo sapiens
attactaaaaatataaagctgaacatgcatgaaggaataataaataatagaagtggtaaatatgtgcataagtctaaataaattttgactgtataaagtgrtggtgtctttttgggttaagtatttaataagatatatagaaatagccatatatagtctgtaagtaaaggtatcaaaaagtgaatttagttaatttaaatt

SEQ ID NO: 10156 - DNA, 201 bp, Homo sapiens
ggcaccatgaaactaactacaactgtatactattggggctcagaaaatgatactgaaaatatatcgctctttgacatgctggactaaacaggaagcctcarattctctgtctgaagttttcccttctgtctgtgtctctgatcctctttcctgaagcaccagagggaattctctctggaatttccttatctgattaagaaa

SEQ ID NO: 10157 - DNA, 201 bp, Homo sapiens
aagactccttgtctaggaatctcatcaaatgaccaggataagatactggatcagataaccactggataagatacttggagttgtcaacatgcctagacagacttttcagttgttcttttgaaggcagctccaagagattccctgggtgactttatctgcataataagacaacctttgttcacagtgaagttctggccctaa

SEQ ID NO: 10158 - DNA, 201 bp, Homo sapiens
tcaggtagtggcattctgactccattagtttctcattcttcttctgggaacagtgtactagccagatgatgtcctcatggtaaaaggaaaagagcaggaawctccaacatggaagctgtcttaaatatctgtgtaaagtctactaacttcctgttgactgaagcaaattagaggagtgaatttagagtccaagttcaaggt

SEQ ID NO: 10159 - DNA, 201 bp, Homo sapiens
tgaaggcagctccaagagattccctgggtgactttatctgcataataagacaacctttgttcacagtgaagttctggccctaaccttccctccacctcccstagagctcagaggaaatttgtcctaggccattgctctttagattatgcatttcctctggaaatcatttattcttacatcccttgctttcctctccccaat

SEQ ID NO: 10160 - DNA, 201 bp, Homo sapiens
ttcttacaatacttgattctcttttaatgtatttcagttgaattggagtatatgctactgatgggagaattaaaagaattattgataaaaaacattttggmattgtttgattgtatccgtaaactgccaaagttggctgatgtatcataagatttatttgagtgactttattctaacaaatttgtctccagtattgagtat

SEQ ID NO: 10161 - DNA, 201 bp, Homo sapiens
attcataagatccatttctactcatatatctcaggtgtgtgttggtataaaattcacaaaatcttacaagtcttttggtctgaattttactttgtcctgtrtcacattttgtatcttgtcatttggggcctgctgggaattgagtgttatcatatatttaaacataagaggaggcagggatatatatagaggggtatcagc

SEQ ID NO: 10162 - DNA, 201 bp, Homo sapiens
ggggaggaagagtgcatctcctggcaacggtgcaccagcagaatttaggggttcaagatcctccagattctttgggatctgccattacaggcccaccccartttttaagttcctatttcttttttagcaaatttcctgactttaacacaggaagttgtgaagttgtaaatacaattttcaagatgatttatttattgcaga

SEQ ID NO: 10163 - DNA, 201 bp, Homo sapiens
atgatttatttattgcagaaattgatttgagtttgcttttcagaaattttagtacttctgctataggagataaggacttttttgaagacagtcgtaggaaygttatgttagtttacataatccgaagctagtaattcagagccttaagttcataatttttctttctccaagttttctagcacacttataagtcagcaacga

SEQ ID NO: 10164 - DNA, 201 bp, Homo sapiens
ttctttctccaagttttctagcacacttataagtcagcaacgaaccctattctacttatgttcactaaaatgttctatggcagcctcactcaatgtcttgycttctataggaacttgattataagttattttgtaagtgatcatctatggacaataatttaaataactgttgtgtcaccgcatgccagggattgccagtgt

SEQ ID NO: 10165 - DNA, 201 bp, Homo sapiens
gctggcattttgtggagtgttttttttaaatctatgtttattgaggttgttttcttttattgttgtgtctctgcctggttttggtatcagggtgatattarccttgtagaatgagttagcgtggagtttcttttcctcagttttttagagtaggtttagtgtgaatagtaccagttctttatacacatggtggaattctgc

SEQ ID NO: 10166 - DNA, 201 bp, Homo sapiens
cagagagaacctgtaaaaacgcaaatttgatcatgccattcttctcctccagatttttcagtggctttcatctaattcagagtaaaggccaaatccttacraagtcttataatcatttgaatgatctgattttgtctgcctgtgtgccctaaaacacctggctcatcccatgctaacaacactggcctttgtgtcacttct

SEQ ID NO: 10167 - DNA, 201 bp, Homo sapiens
tggatcaggcaaggtgctggcctagagaataagtgacagttaagggaatctgaggaagcacatgtttaagtccaatactgtctactccttgtaccactcaratttgctcatgtcttccaatcatggctggctttatgggcatatgatttccactgttgcacagggtcttgtgcttagaggcgctcatgcttagaggggcaa

SEQ ID NO: 10168 - DNA, 201 bp, Homo sapiens
tgggatgtattgtaacaatgtgttgtgtgtatgtgactctgttgtggcaacttcattataaggtgagagagacagcatggtggtcatcagatgcatgcacytggaccccagtacttttccggaaaggctacaaggggaataccacagccagcattagtccatggaagcgagagaggagggagaatgtatctgttcagctgt

SEQ ID NO: 10169 - DNA, 201 bp, Homo sapiens
acataaaaaatagatagccaaaaatattttgaagaacaaatgagttagtgaatagagtaataaattacatgtcttggggtggtgaaccagtgaaaatgaarcatcacaaaatctacagttgcatgaatttgcctattctggtttctggttgagatgacagaattatctaagaagaagcatttttcagagtaaaagtgtggt

SEQ ID NO: 10170 - DNA, 201 bp, Homo sapiens
gcagggcgtggtggcgggagcctgtagtcccagctactcgggaggctgaggcaggagaatggcatgaacccaggaggcggagcttgcagtgagccgagatsgcgccactgcactccagcctgggcgacagagcgagactccgtctcaaaaaacaacaacaacaaaaaacagagatcctgcagaccttgcttattgttgact

SEQ ID NO: 10171 - DNA, 201 bp, Homo sapiens
gtacggtaccctagagtacctctgtttctatatagtctactgattatatgactggtagaaataacgtgccactgagaaatttgtaaaaattaattttgtgytcccagctagtattcttttgctactttgctgctccagtaccactccagcgaggtagcacttagaggaattacttatgacaacttctaaaatactggtata

SEQ ID NO: 10172 - DNA, 201 bp, Homo sapiens
tttttaagactggagtttcctaattttgagatttctcttttgatagacaccactacttgcacatgtaacatcagtttctcatcttatccctgtgaggggaytgaagcttgaagaaatagtacgatgatattcctctgactactgctagtacttcagtgaataataaaccatcttttgccttctgcaagtacaagtgacaag

SEQ ID NO: 10173 - DNA, 201 bp, Homo sapiens
cgttggaaacagggtcatgaatacccttaaatctaattatatgagacaactaataccagacaactcctacctagacttggaatttgattctgtcatgatcmacagtctcattctgagtctcaggcagaaggggcagctgtacttgaagtgtagctgtggctattctcatggtgatcatcaaaatacaagaaggcccagaca

SEQ ID NO: 10174 - DNA, 201 bp, Homo sapiens
atgtatcatgttcatagataaactgagtattataaaatataatttctttctagattaatatagtcaatgcaagttgtggcaaagtcttattaaagttttgyggaaattgtgaaaaatgacttgaaaaatacatatagaaaattaacagttcggagataggcaagaaaacttggaaaaagaagaaggtaagttctttactgg

SEQ ID NO: 10175 - DNA, 201 bp, Homo sapiens
gtatcatgttcatagataaactgagtattataaaatataatttctttctagattaatatagtcaatgcaagttgtggcaaagtcttattaaagttttgcgraaattgtgaaaaatgacttgaaaaatacatatagaaaattaacagttcggagataggcaagaaaacttggaaaaagaagaaggtaagttctttactgggt

SEQ ID NO: 10176 - DNA, 201 bp, Homo sapiens
aaattagcagggcgtggtggcgggagcctgtagtcccagctactcgggaggctgaggcaggagaatggcatgaacccaggaggcggagcttgcagtgagcsgagatcgcgccactgcactccagcctgggcgacagagcgagactccgtctcaaaaaacaacaacaacaaaaaacagagatcctgcagaccttgcttattg

SEQ ID NO: 10177 - DNA, 201 bp, Homo sapiens
caaaaaaattagcagggcgtggtggcgggagcctgtagtcccagctactcgggaggctgaggcaggagaatggcatgaacccaggaggcggagcttgcagkgagccgagatcgcgccactgcactccagcctgggcgacagagcgagactccgtctcaaaaaacaacaacaacaaaaaacagagatcctgcagaccttgct

SEQ ID NO: 10178 - DNA, 201 bp, Homo sapiens
gaggccgaggtgggcggatcacgaggtcaggagatcaagaccgtcctggctaacgctgtgaaacccggtctctgctaaaaatacaaaaaaattagcagggygtggtggcgggagcctgtagtcccagctactcgggaggctgaggcaggagaatggcatgaacccaggaggcggagcttgcagtgagccgagatcgcgcca

SEQ ID NO: 10179 - DNA, 201 bp, Homo sapiens
gatcggataccaaatatttccgtttctttcctaaactgcttcagagcccctaaattgccgattctctccactatcttccacatttaaaaatctttttaaamatcacataaatgaactcaaatctttattacttgaaaaaatactccatgtaaaaatagtatagaaattatgaaaatcatttgaattatactttctgcaaat

SEQ ID NO: 10180 - DNA, 201 bp, Homo sapiens
tactgaggaatattagattttatacaaatatgtgaacaactgagaaaaaagtcatatctgtaatagggatgaagaaagaaacacaatgctgacctcttaastgctgtcataagtctccatatacaggtagaaaagtcatttcttccagtttttgaggtaaagaaaaccttttttgaaattgagatcggataccaaatattt

SEQ ID NO: 10181 - DNA, 201 bp, Homo sapiens
aaatttatgatctctatttataattgttaagaacttacagcttatttcacaaaatcattgctcttttccactgttatttgtaccatacgtatgtaccatastgtgcttaaacgtgattatttgaacgtctagttttttggatggtatgcgcattctaatctaaatcaataatgaagttttatctttggggtagtttttgtt

SEQ ID NO: 10182 - DNA, 201 bp, Homo sapiens; identical to SEQ ID NO: 981

SEQ ID NO: 10183 - DNA, 201 bp, Homo sapiens; identical to SEQ ID NO: 982

SEQ ID NO: 10184 - DNA, 201 bp, Homo sapiens; identical to SEQ ID NO: 976

SEQ ID NO: 10185 - DNA, 201 bp, Homo sapiens; identical to SEQ ID NO: 977

SEQ ID NO: 10186 - DNA, 201 bp, Homo sapiens
tgtctagcagctattcagagcacaagtacggtaccctagagtacctctgtttctatatagtctactgattatatgactggtagaaataacgtgccactgakaaatttgtaaaaattaattttgtgctcccagctagtattcttttgctactttgctgctccagtaccactccagcgaggtagcacttagaggaattactta

SEQ ID NO: 10187 - DNA, 201 bp, Homo sapiens
agtcttattaaagttttgcggaaattgtgaaaaatgacttgaaaaatacatatagaaaattaacagttcggagataggcaagaaaacttggaaaaagaagraggtaagttctttactgggtatcaagatttattatagtgtaattatgaaaattgaaagaattttggcacagaaggatgcaatagacaacaaaagggaata

SEQ ID NO: 10188 - DNA, 201 bp, Homo sapiens
tgacttgaaaaatacatatagaaaattaacagttcggagataggcaagaaaacttggaaaaagaagaaggtaagttctttactgggtatcaagatttattrtagtgtaattatgaaaattgaaagaattttggcacagaaggatgcaatagacaacaaaagggaatagtaaggcagaatatatttaggtaatttacttttt

SEQ ID NO: 10189 - DNA, 201 bp, Homo sapiens
aagaattttggcacagaaggatgcaatagacaacaaaagggaatagtaaggcagaatatatttaggtaatttactttttgtgcacatgtaatttgtcttayaataagattatcattagaaattagtagataagatgtgttttttgcagtaaattgtttggataatggacttttcataaggaggaaaatcaatgtgtaactt

SEQ ID NO: 10190 - DNA, 201 bp, Homo sapiens
atttgtcttacaataagattatcattagaaattagtagataagatgtgttttttgcagtaaattgtttggataatggacttttcataaggaggaaaatcartgtgtaacttgtatcacaaaaaatagtccaaaaggactaagatctaaacattaagaacaaaatttaaagctaagaaaaatgtaaattattttataaattc

SEQ ID NO: 10191 - DNA, 201 bp, Homo sapiens
ataaattcagggtaggtgaggattttatctgaaagatacaaaaaccacaaaacataaaggaaaagtttgataagttttaaattccttggaaagatctgttmattaatccagctaagttagctgtctgactctagtctaattatacatctaggcatttgataatgaatacagaaagagtattaaaactaggaatatatggat

SEQ ID NO: 10192 - DNA, 201 bp, Homo sapiens
ccacaaaacataaaggaaaagtttgataagttttaaattccttggaaagatctgttaattaatccagctaagttagctgtctgactctagtctaattatayatctaggcatttgataatgaatacagaaagagtattaaaactaggaatatatggatgaaattaaaaatactcattttacctaataaaaaaatcatgttct

SEQ ID NO: 10193 - DNA, 201 bp, Homo sapiens
gaaggaagcagagtgctcctgcaggacccaggagacacccaaatacagtgacttccccaactgcaggagtaggaaagggagaccctcctcttctgaacacwcaccaccactggagaactgaaggtctgtttgcaggagaagtttctggctttaccttgagctgagttaagttagagagctgagtgaaatgcaggggtagag

SEQ ID NO: 10194 - DNA, 201 bp, Homo sapiens; identical to SEQ ID NO: 978

SEQ ID NO: 10195 - DNA, 201 bp, Homo sapiens
tcagacatgataacttttctacccatcattttttccattctagtagtggttacatttgttcttgggaattttgctaatggcttcatagtgttggtaaattscattgagtgggtcaagagacaaaagatctcctttgctgaccaaattctcactgctctggcagtctccagagttggtttgctctgggtaatattattacat

SEQ ID NO: 10196 - DNA, 201 bp, Homo sapiens
ttgaaagtaaaaagaatgttactgcacattcagaaatcaggtccacataaaatttaaggtcaggatattaaaggatcacagccagtgctgttaggccttcrtttattctatctttttgtctgttcagacatgataacttttctacccatcattttttccattctagtagtggttacatttgttcttgggaattttgctaat

SEQ ID NO: 10197 - DNA, 201 bp, Homo sapiens
tattgaactatcaattagcataaactgctactttcttgtttgacactggtcacagtatttgaaagtaaaaagaatgttactgcacattcagaaatcaggtscacataaaatttaaggtcaggatattaaaggatcacagccagtgctgttaggccttcatttattctatctttttgtctgttcagacatgataacttttct

SEQ ID NO: 10198 - DNA, 201 bp, Homo sapiens
tctgcccacctcagcctcccaaagtgctgggattacaggcgtgagccaccgcgcccagcctctacctttaattatctaccttgcatgacaaaactttgccrttccttatctatttttcttttggctcctctattcctgacacaacaagggtggacatatttcccacacgcttggttttgcagagtacctatatcagttagg

SEQ ID NO: 10199 - DNA, 201 bp, Homo sapiens
gtggcgccatctccgctcactgcaagctccgcctccggggttcacaccattctcctgcctcagcctcccaagtagctgggactacaggtgcccgccaccasgcctggctaattttttgtattttttgtagagacggggtttcaccgtgttagccaggatggtctcgatcccctgatctcttgatctgcccacctcagcctc

SEQ ID NO: 10200 - DNA, 201 bp, Homo sapiens
acaaaacaaaacaaaaagctaatcacatgaaatcaatttcctgtttcttccaacttgcaggataaggcctagacgaagcttttattgtattgtgtgacccmagtgttgggaaaagtagaaaattgttaccagatgtgaagaaacatttaggggcttgaaaagcagcatggaggtggacctaggctctttgcaatgttccac

SEQ ID NO: 10201 - DNA, 201 bp, Homo sapiens
tagatttagaaattaagtttagtttagtttaaaatacattgcttaagaaaatagttatttatggatgaccttaaactaatccaaggaacactataataaasatttagtttttaacgtaaatacaattcttcaatcagagagataaaccatttcatgatcaatctattatttttgtttattatttttattatttatttattt

SEQ ID NO: 10202 - DNA, 201 bp, Homo sapiens
aggggtaagggaaatgtcctccatcaaaggtattatttcagtctaagccctgatgctgagaataatatgagaatcataaagccaggagaaagaataattgkgttatcccattaccctgaattgtagcacttagaaaaatgaatggtcacatttattagctagcagtctaccttgtagctatcatcatcatctctatctaca

SEQ ID NO: 10203 - DNA, 201 bp, Homo sapiens
ggtcctcagctaaagccccactctcaagccaaatagactgagactgtggcccaaagggagtacttctatccctgttttcccactcaaatgttgcctttttkggcctgccccacccctcatcctatgcccataaaaccccaggctccaccggtagtgagaagtggctgaagatcgagaggagaagcagctcaatgttgtaga

SEQ ID NO: 10204 - DNA, 201 bp, Homo sapiens
cgtactgtataattgcacagagtatttgtacatgttcatatgaaaatgcaaaaaaacaaaaaaacagaaaaaccaaagagcaggtgctatttgctggaagwcatgtttgctatgatttttagaatttaataaaagaaaaaaaatagctagcaaacttttggaaatatgttggtttaaagttgtcattgatgaaatactatg

SEQ ID NO: 10205 - DNA, 201 bp, Homo sapiens
ttggccttcttgggcttccgaagaaaaccttggacgcttttggtaggaaaagttgggattcactctccataaatccggcgttgaaaaaatgaatcaacagkggtcatgattctagttttgaccaagctacatataacagtgtaggcatctgatgtatgatctatgtattaggttggaaaatttcccttacaactgacattg

SEQ ID NO: 10206 - DNA, 201 bp, Homo sapiens
ctaatgatgctattgatacatatgataaattttacgtactgtataattgcacagagtatttgtacatgttcatatgaaaatgcaaaaaaacaaaaaaacaraaaaaccaaagagcaggtgctatttgctggaagacatgtttgctatgatttttagaatttaataaaagaaaaaaaatagctagcaaacttttggaaatat

SEQ ID NO: 10207 - DNA, 201 bp, Homo sapiens
ttgctaatgatgctattgatacatatgataaattttacgtactgtataattgcacagagtatttgtacatgttcatatgaaaatgcaaaaaaacaaaaaamcagaaaaaccaaagagcaggtgctatttgctggaagacatgtttgctatgatttttagaatttaataaaagaaaaaaaatagctagcaaacttttggaaa

SEQ ID NO: 10208 - DNA, 201 bp, Homo sapiens
taaaatactccatatttcatcacagtagctgagaatgcaaataaccatttgaaagaatttggcttgctaatgatgctattgatacatatgataaattttaygtactgtataattgcacagagtatttgtacatgttcatatgaaaatgcaaaaaaacaaaaaaacagaaaaaccaaagagcaggtgctatttgctggaaga

SEQ ID NO: 10209 - DNA, 201 bp, Homo sapiens
gattgtaccatggcactctagcctgagcaacagagtgagactccatctcaaaataaaataaaataaaatactccatatttcatcacagtagctgagaatgyaaataaccatttgaaagaatttggcttgctaatgatgctattgatacatatgataaattttacgtactgtataattgcacagagtatttgtacatgttca

SEQ ID NO: 10210 - DNA, 201 bp, Homo sapiens
ttaatcccagctactcaggaggctgatgcaaggagaattgcttgaacctgggagtcagaggttgcagtgagccgagattgtaccatggcactctagcctgrgcaacagagtgagactccatctcaaaataaaataaaataaaatactccatatttcatcacagtagctgagaatgcaaataaccatttgaaagaatttggc

SEQ ID NO: 10211 - DNA, 201 bp, Homo sapiens
gtctgtaatcccaacactttgggaggccgatacaggcagatcacctgaggtcaggagttcaagactagcctggccaacatggcaaaaccccatctctgctwaaaaatacaaaaattagccgggtgtggtggtggatgcctttaatcccagctactcaggaggctgatgcaaggagaattgcttgaacctgggagtcagagg

SEQ ID NO: 10212 - DNA, 201 bp, Homo sapiens
taaaacttacttagtataatctttgggtatgtttttgtatgtgtagtgctgcattgcttgctataataaaatactccaagggaccaggtgcagtggctcaygtctgtaatcccaacactttgggaggccgatacaggcagatcacctgaggtcaggagttcaagactagcctggccaacatggcaaaaccccatctctgct

SEQ ID NO: 10213 - DNA, 201 bp, Homo sapiens
attaaattatacggatgattatccctaaatttatccttaaataaaataatttcagtcatattgttaccattcaaaaatcatagtatgtgcacacatatatsttggaaaaaatattttgttgctataattttttggctctctattagagaaaaaaccagaaagttaaatgtgttaaagtgtaaaacttacttagtataatct

SEQ ID NO: 10214 - DNA, 201 bp, Homo sapiens
atattaaattatacggatgattatccctaaatttatccttaaataaaataatttcagtcatattgttaccattcaaaaatcatagtatgtgcacacatatrtgttggaaaaaatattttgttgctataattttttggctctctattagagaaaaaaccagaaagttaaatgtgttaaagtgtaaaacttacttagtataat

SEQ ID NO: 10215 - DNA, 201 bp, Homo sapiens
ctctaggtagcatctgaccttcaaaactcccactgcgggctggatgtgatggcttatgcctgtagtcctagtactttgggaggccaaggtgtgaagatccyttgagagcaggagttccctgtgcatcatatggaaactccgtctctacaaaaaattttaaaaattacctggcatggtggtacatgcctatagttccaaata

SEQ ID NO: 10216 - DNA, 201 bp, Homo sapiens
ttgagagcaggagttccctgtgcatcatatggaaactccgtctctacaaaaaattttaaaaattacctggcatggtggtacatgcctatagttccaaatasttgagaagctgaggcaggaggattgcttgagcccaggagttccaggctgcagtgggctatgattgtgccactgtactccagcttgggtaacagagggaga

SEQ ID NO: 10217 - DNA, 201 bp, Homo sapiens
taaattatggtactgtagatattaaattatacggatgattatccctaaatttatccttaaataaaataatttcagtcatattgttaccattcaaaaatcayagtatgtgcacacatatatgttggaaaaaatattttgttgctataattttttggctctctattagagaaaaaaccagaaagttaaatgtgttaaagtgta

SEQ ID NO: 10218 - DNA, 201 bp, Homo sapiens
gacaccttttgttcttatttccaatttatttacaatgcacaaagtgacagaaattactgaattttcaataaattatggtactgtagatattaaattatacrgatgattatccctaaatttatccttaaataaaataatttcagtcatattgttaccattcaaaaatcatagtatgtgcacacatatatgttggaaaaaata

SEQ ID NO: 10219 - DNA, 201 bp, Homo sapiens
aggagaatcgcttcaacctgggaggcggaggttgtagtgggctgagattgtgccattgcactccagcctgggcaacaagaatgaaactccatctcaaaaaygaaaaaaaaaaacaaaaaaacttttctttaattttaaaaataatatataagcaagaactataaattcaaattcttaatgctaatcttaatttgaaacatc

SEQ ID NO: 10220 - DNA, 201 bp, Homo sapiens
ggctgagcgggtggatcacctgaggtcaggtgttcaagaccagcctggccaacatggtgaaagcccgtatctactagaaaatacaaaaaattagctgattrtggtggcgggctcctgtaatcccaactactagggaggctgaggcaggagaatcgcttcaacctgggaggcggaggttgtagtgggctgagattgtgccat

SEQ ID NO: 10221 - DNA, 201 bp, Homo sapiens
ggtggctgagcgggtggatcacctgaggtcaggtgttcaagaccagcctggccaacatggtgaaagcccgtatctactagaaaatacaaaaaattagctgrttgtggtggcgggctcctgtaatcccaactactagggaggctgaggcaggagaatcgcttcaacctgggaggcggaggttgtagtgggctgagattgtgc

SEQ ID NO: 10222 - DNA, 201 bp, Homo sapiens
cgctttttataggtgattatactgaggcaggagtagttggaaaatggagtctcagagcatagctataccaagcagggaatatgatttcctgtcctggcagyctgactccaagatcccctcttagaaacagttatgctataaaaactgaaaagaaacaaaatccaggattggagactgattttaacatctattcatcataaa

SEQ ID NO: 10223 - DNA, 201 bp, Homo sapiens
atcccagcactttgggtggctgagcgggtggatcacctgaggtcaggtgttcaagaccagcctggccaacatggtgaaagcccgtatctactagaaaatayaaaaaattagctgattgtggtggcgggctcctgtaatcccaactactagggaggctgaggcaggagaatcgcttcaacctgggaggcggaggttgtagtg

SEQ ID NO: 10224 - DNA, 201 bp, Homo sapiens
tataaaattacactgaaactacatattctcatagatagaactgtaattattagagtttttgctgaataaagtcaaatagactattatagtagttataaacrcaagttaaaattttagggccgggcaaagtggctcacgcctgtaatcccagcactttgggtggctgagcgggtggatcacctgaggtcaggtgttcaagac

SEQ ID NO: 10225 - DNA, 201 bp, Homo sapiens
tgtatgctatgttccacaataataaaaatatttaaaaggcaaaaaaagtaaaataatgaatataaaattacactgaaactacatattctcatagatagaaytgtaattattagagtttttgctgaataaagtcaaatagactattatagtagttataaacacaagttaaaattttagggccgggcaaagtggctcacgcct

SEQ ID NO: 10226 - DNA, 201 bp, Homo sapiens
aattctattttttgaccaagatgtggtaaacacggggagtaaagttataactttttctcttactgtgcttttaggttttgttgctttctgtctgtatgctrtgttccacaataataaaaatatttaaaaggcaaaaaaagtaaaataatgaatataaaattacactgaaactacatattctcatagatagaactgtaatta

SEQ ID NO: 10227 - DNA, 201 bp, Homo sapiens
ctgattttaggcagtttttcttgttgtgggagtggtaggagcattaaaaaagtcccacgtctgaggcaaaggtacgtagacaggggcagttgctagagaakaacaaagagctcccattgccccaccatgaacttttctctgattaacaagcaatgccactatactgggagagggacacaagtgtagaaagagccttctcta

SEQ ID NO: 10228 - DNA, 201 bp, Homo sapiens
agtggggtaagaaacctgcctgcactcctaggtctgtattaatacatattagaagtctgttgtcacaggggaagtccaggaaactcacttgctctgggctrcatgctggctaaacagaaaggatctgccagtgaaggaaggcagaaaacccaccaatcctggactctgcatgaacaccaggaaaaacccatttgctgcagg

SEQ ID NO: 10229 - DNA, 201 bp, Homo sapiens
agaatgggatcaacagaaggcatatatggggagtgtctggatggctggaaaattctattttttgaccaagatgtggtaaacacggggagtaaagttataaytttttctcttactgtgcttttaggttttgttgctttctgtctgtatgctatgttccacaataataaaaatatttaaaaggcaaaaaaagtaaaataatga

SEQ ID NO: 10230 - DNA, 201 bp, Homo sapiens
ttttttcaccgaaaatttctgattattattgttttctcttgtgggatgaaatatgtaccttctatatcacagccttaataccttcagcttcttattcattsaaatcttgcttacaatccagtccgaggattcccggtttactgattttctttttcctgcaaattttagccttctgttttgttttgaaataatgcatcctct

SEQ ID NO: 10231 - DNA, 201 bp, Homo sapiens
gaaactggaagttatgtaattgaggactattaaaaataagtattttggcagatgtgcaaaattctcaagcacatatattacaactttctatagtcatatayatcctttttacacttgcttgaattggcatacaaaactcccatgtttgttaatgtaatccaaacaaatagccagtccataaaatataaaagttacatttag

SEQ ID NO: 10232 - DNA, 201 bp, Homo sapiens
ttacattaatcaaagtaattctctttcaaagaggaaactggaagttatgtaattgaggactattaaaaataagtattttggcagatgtgcaaaattctcargcacatatattacaactttctatagtcatatacatcctttttacacttgcttgaattggcatacaaaactcccatgtttgttaatgtaatccaaacaaat

SEQ ID NO: 10233 - DNA, 201 bp, Homo sapiens
  misc_feature (1)...(201): n = A,T,C or G, or insertion/deletion polymorphism (see Tables 1-2)
ggtcatcagatgcgtggacttgactcccagtacttttccagaagggctgcaaggggaaaccacagccggcattagtccacggaagagaaagagaagagaanatgtatctgctcagctgtcttctgtcttctatttcccattggccagggtttccctgaggcagaactaccatctctgctgttctgcgttccatcatccagt

SEQ ID NO: 10234 - DNA, 201 bp, Homo sapiens
attcattagtttaagctggtgcttttctgttgacattgttcacagaatttaaaagtataaagaatgttattgaacattcaggaatcaagtgcatatttaayttaaagtcttgaatatcagaggagtcaccatcagtgacattaggcctgaattttttacttgcttttttgtttagacatgatgagttttctacacattgtt

SEQ ID NO: 10235 - DNA, 201 bp, Homo sapiens
cagtgctactcattgagtttccttgtgaggagattgtgtggcgaggacccagcaagacaagctactatcccaaaaaagctacttatatgaacttcatttcyggtttctttcaaattgaaggtaaattccaagatgaagcttttattctattctctgaccaaagtgttgggaaaagaaggaatttgttaccattttcatttc

SEQ ID NO: 10236 - DNA, 201 bp, Homo sapiens
atatacctagataaatctttaacctagtctaaaaaatgtatgtatgtgtgtgtgtatgtgtgtgtgaaaaacttaagaacattgacaataacatactcttytttgtttttttcatatgaactgccagattatacaaaatatgacaaaaattcctcagaattatgaagccatgtgtatttcattcatgtattttatctttca

SEQ ID NO: 10237 - DNA, 201 bp, Homo sapiens
ggcctgtcctcttctagacttcgttgcggcaaggacttttagtagtgtgctggtatttttccatccatctggccattcatttcttctaattttacgggacwgcaaactgaagcaagcttctctctgtgtcctgaagaagatgaagtatgccaaaaaggacataatctctcatttttataaacatgcctgatatgagtgatg

SEQ ID NO: 10238 - DNA, 201 bp, Homo sapiens
gactattacaacaatatggatagtagggaggaggaaaacaagaggagaatgggatcaacagaaggcatatatggggagtgtctggatggctggaaaattcyattttttgaccaagatgtggtaaacacggggagtaaagttataactttttctcttactgtgcttttaggttttgttgctttctgtctgtatgctatgttc

SEQ ID NO: 10239 - DNA, 201 bp, Homo sapiens
aaccaactagagagacatgtttacaagaaatgtatataacaaagaaaataaacaaatttgagctgattagataatactcacaagtgtaagaggatctatcmatagtgaaaaacattcattttaattccatttatataaagttttcaaaaatatatctttaatacattgcaatttattacattggtgacaaaactctaaagt

SEQ ID NO: 10240 - DNA, 201 bp, Homo sapiens
ttcccatgacacctatattaaatgtataaacatttttatatttcaacactttgtatgagtcctttcagggcctgttaaacactccaaatttcccttgcaayatgccaataactaatcatattttctcaaaatgatctgacataatgtttgactgaaggcatatctctggtataattctatttgctgatatcaaatgagaat

SEQ ID NO: 10241 - DNA, 201 bp, Homo sapiens
tgaaatagtcatagaatgaaaaagattaatgtaattcattgaagtaaacatacattctgaataagaatagaaaaggacttggaaaatattgtttaataatrttttatataaatacaaaaatgtatatattagcccaacattatttattttggaaaggatatgacacaatgggaattttcatacactactcctagaattata

SEQ ID NO: 10242 - DNA, 201 bp, Homo sapiens
tttccatactagtaatggtggaatttgtattttcccatgacacctatattaaatgtataaacatttttatatttcaacactttgtatgagtcctttcaggrcctgttaaacactccaaatttcccttgcaacatgccaataactaatcatattttctcaaaatgatctgacataatgtttgactgaaggcatatctctggt

SEQ ID NO: 10243 - DNA, 201 bp, Homo sapiens
acttgcctttttttaaggtgtgtttgttcagttcatgggaagtttactaccaatcatttttttccatactagtaatggtggaatttgtattttcccatgayacctatattaaatgtataaacatttttatatttcaacactttgtatgagtcctttcagggcctgttaaacactccaaatttcccttgcaacatgccaata

SEQ ID NO: 10244 - DNA, 201 bp, Homo sapiens
gatcatgcccagtgatattagacttgcctttttttaaggtgtgtttgttcagttcatgggaagtttactaccaatcatttttttccatactagtaatggtrgaatttgtattttcccatgacacctatattaaatgtataaacatttttatatttcaacactttgtatgagtcctttcagggcctgttaaacactccaaat

SEQ ID NO: 10245 - DNA, 201 bp, Homo sapiens
gttattcactgaacagccaagctttgtgctactatgggatttcgttttctgcggttccaagtcttgatccacgtcctgccacaggatcactgaagtagagyccattttcttacactctcgccattagttcaaaagcttgcagcattttatgtctggtacttggaggatgattttcctgtacagttttgcgtttttttcacc

SEQ ID NO: 10246 - DNA, 201 bp, Homo sapiens
ctcataaagcctactcaaggagggtattgttattgtgtgcgttttacagatggctatcctaaggctgatagtagttgtaaaatatagtctaagttcatatytatatgaaacagagtatctgggtttctgtcctggccatcagacttgaagatcatttcttagaaacaattatattatcaaaactgaaaagaaatacaatcc

SEQ ID NO: 10247 - DNA, 201 bp, Homo sapiens
atgtgcccaaatggagtttggctggagacaaagaataaagactagaaagaacaattaccctaggccagacatggtgttggacggggcaagatgtttactayttaaagccatagaacactgtttgctggacacaatgagtggaatatagaacaatgcaactattttaacactttacccctcttagtggtttattagttaatt

SEQ ID NO: 10248 - DNA, 201 bp, Homo sapiens; identical to SEQ ID NO: 846

SEQ ID NO: 10249 - DNA, 201 bp, Homo sapiens
cacaccctgtgcatcccctttgagatctcatcagccactctctgatgctaccggaagtggaagaagatgtaagggaaagcaggattgttactacactgagygtcaaccaggaactcaacatagaagggcccctgtttgtcctctcatgattccttaagccttagtgcttatttagttaaagggctcttgagtatttcaatg

SEQ ID NO: 10250 - DNA, 201 bp, Homo sapiens
gattgtgtggttcattttagattacatgccatgtacagatgagaagaatgtgtgttctgttcttttggggtgaactgttctgtggtggtctattaggttcrtttggtcaagtgtttagttcagattctgagtacctttgtcagttttctgtcttgatcatctgtctaatgctgtctgtggggtgttgaattctcccactag

SEQ ID NO: 10251 - DNA, 201 bp, Homo sapiens
cagggatgtcctgcaattaagctactaagacttccatagtttcttcatttgtagtaggcttttgggaaggtccttgggccttttagttgtcccaagagcaytgctgaaatttgtatttgtggagagtaggggtaaggggaggtttacttatattttgaaaagatctcatgacttgacctggtggtaatcctgctgagcaaa

SEQ ID NO: 10252 - DNA, 201 bp, Homo sapiens
gtacccaaaattcattcaggagagggttgtttaatttccatgtaattatatggttttaagctattgtcttagtatttacttacatttttatagggctgtgrtccaagaacgtgactggtatattttttgttgttttgtatttgctaggaattgttttatgttagattgtgtggttcattttagattacatgccatgtacag

SEQ ID NO: 10253 - DNA, 201 bp, Homo sapiens
gcattccctttcatcacaaccttgacagagtctgtttttgtttgtttgtttgtttgtttgttttgtaataggcattctgaggggtgtgagaggttatctcrttgtggttttgatttgcatttctttaatgattcattcatattgagcattttttcatatgcttgttggctgtgtgtatgtcttcacttgaaaattgtctat

SEQ ID NO: 10254 - DNA, 201 bp, Homo sapiens
atagtgatatatagtcttgatgcagctgtgtcaggtgtctgaattggagacaaggtaaaacatcaaaattagatggcaccttggaaggctgaggcgggcgratcacgaggtcaggatatcgagaccatcccggctactatggtgaaaccccgtctccactaaaaatacaaaaaaattagctgggagtggtggtgggcacct

SEQ ID NO: 10255 - DNA, 201 bp, Homo sapiens
tagaaactggcagggatgtcctgcaattaagctactaagacttccatagtttcttcatttgtagtaggcttttgggaaggtccttgggccttttagttgtyccaagagcattgctgaaatttgtatttgtggagagtaggggtaaggggaggtttacttatattttgaaaagatctcatgacttgacctggtggtaatcct

SEQ ID NO: 10256 - DNA, 201 bp, Homo sapiens
tttttttaatctgctgaacataatctctaattctctgccaatgatcttagttacagtatttcattatttggtggtgtgatttttttctccctctttttggytgatgaaaagttgtacccaacttccctcactaataatatgaatgatctccatttctctttattgttcattgatgcatgccactattttacagtggctaag

SEQ ID NO: 10257 - DNA, 201 bp, Homo sapiens
ttcttacagtgttttctgtaatgtatgtgtatgaataatttccaaacatatacctagataaatctttaacctagtctaaaaaatgtatgtatgtgtgtgtrtatgtgtgtgtgaaaaacttaagaacattgacaataacatactcttttttgtttttttcatatgaactgccagattatacaaaatatgacaaaaattcct

SEQ ID NO: 10258 - DNA, 201 bp, Homo sapiens
aggagagaagccttcatctccatagattcagaagaggggcattgtgtgtcttctagcagaaaacaaactggtggtgtatgaaacattttatatttcttacwgtgttttctgtaatgtatgtgtatgaataatttccaaacatatacctagataaatctttaacctagtctaaaaaatgtatgtatgtgtgtgtgtatgtgt

SEQ ID NO: 10259 - DNA, 201 bp, Homo sapiens
agtctcctttgctagttcttcctcttgtctgtaaactgaaaatatcagattgcccaaggtctaaattcttcaatctctaatcaattatgtctggtttttttggtgatctcatgcagtctccttacagataatgtagccacatggttcaatagagaggaataaggctgattattcatatatgttatttatttatatacatat

SEQ ID NO: 10260 - DNA, 201 bp, Homo sapiens
ctcacttctctctgcagttttaaattttttttagattttattttaggttcagaggtatatgtgcaggtttgttatataagtaaattgcatggcatgggaayttgctgtatagattatttcatcactggggtgataagcagagtacctgataggtaactttttgatcctcacccccctcctgccctccgtcttcaagtgggc

SEQ ID NO: 10261 - DNA, 201 bp, Homo sapiens
atccagaagtaaaaatttgccaccgtatcccatggaccactgtgtcttttggggtacccagatattagtgttagttcaggctccaaacttaaaagtctcarataatatggacgtgtgttctgttctctgaggactgttttctggggaatagctacaggtctttgagaaagcaacatatgatacatcctgagtgttcttgca

SEQ ID NO: 10262 - DNA, 201 bp, Homo sapiens
agatcttgtctctaaaaagaaacaaacaaaaacaacaaacaaaagcccaaaaagggcctggtgcggtggctcatgcctgtaatcccagcactttgggtggstgagtggttggatcacttgaggtcaggagttcgagatcagcctggccaacatggtgaaaccccacctctactaaaaatacaaaaattagccaggtgtggt

SEQ ID NO: 10263 - DNA, 201 bp, Homo sapiens
gatgttaaggtcaagaccttaaaggaaatcttgaccagtgatatcaggcttgcctttaaaaaaattcagacatgataaatttactaccaatcattttttcwtcaacaataatatatttatattttcccatggacacctacattaaacttatagactctttttatttttcaactttttttctttgagtccttttaagagttg

SEQ ID NO: 10264 - DNA, 201 bp, Homo sapiens
gcagctcatacctgtaatcctaataatttaggaggccgaagtgggaggatcactttaggctgagagtttcagatcagccttggcaacatagtaagaatctrtaaaaaaaaaaaaaaaaattagttgtttgtggtagtgtgtgcctgtagttacagctacccagaagactcaggcaggaggattgctttagcccaggaattc

SEQ ID NO: 10265 - DNA, 201 bp, Homo sapiens
agtcctattgaggcagctcatacctgtaatcctaataatttaggaggccgaagtgggaggatcactttaggctgagagtttcagatcagccttggcaacayagtaagaatctgtaaaaaaaaaaaaaaaaattagttgtttgtggtagtgtgtgcctgtagttacagctacccagaagactcaggcaggaggattgcttta

SEQ ID NO: 10266 - DNA, 201 bp, Homo sapiens
gcaaataatacaatgagacagtgtgttgatatattcagtaatagcaagttctattataggaagaaaatgtataacatcattaaacaattaaattctataarctgtattaattcttggagttatgaaattttaacaatattatctaaaccttgggacaaatcatctctacatctgatttagttatttgtttgtttatcatat

SEQ ID NO: 10267 - DNA, 201 bp, Homo sapiens; identical to SEQ ID NO: 601

SEQ ID NO: 10268 - DNA, 201 bp, Homo sapiens
caatgatctcctctatcttccatacttgaaattctttttaaacttcacataaaagaacttgagtcttccctaccttagaaaaatactctatgtaaaaatastatagaaattataaaaatcatttgaattaaactttttgcaaatgttaaaatggcatctatgaaatctatgtattaatgatagaaaacatctaaaatatat

SEQ ID NO: 10269 - DNA, 201 bp, Homo sapiens
tctaccataaacagtactgaggaataatagacttaatacaaatatgtgaacatttgagaaaaaagtcatttctataataaggatgaagaaagaaacaccgygatgacttatgttgtcataagtctcaacatgcagttagaaaagtcatttcttccagtttttgagttaaagaaaaccttttttgaagttgagatctgatgt

SEQ ID NO: 10270 - DNA, 201 bp, Homo sapiens
tgagacagggtcttgctctgcagccctggctggagtgcagtggcatgatcacagctgttttctttttttttttaatctgctgaacataatctctaattctmtgccaatgatcttagttacagtatttcattatttggtggtgtgatttttttctccctctttttggttgatgaaaagttgtacccaacttccctcactaat

SEQ ID NO: 10271 - DNA, 201 bp, Homo sapiens; identical to SEQ ID NO: 987

SEQ ID NO: 10272 - DNA, 201 bp, Homo sapiens
catacttccagtgcactcatctgttacattgcttaatgctgtgtacaagacctaggccctgagctagattattgccaagaataaatcttcatttagaaaaytgatcagatggttggcttgataaattcagaaaaatgttaggcaatatttttttgggaaggttatttgtagaagaaatcccaggtgacagataaactattt

SEQ ID NO: 10273 - DNA, 201 bp, Homo sapiens
atttcatgatcaagctcttatttctaaagagaggattttagggctaaacaaatcaaataagtaagccctcccccacatcttctctatttcatgtaggtaakgatggagttcaaaggcacagagccccatttctacaacataagcaaagtgaaaattaattcatggaatacaatgacatagctgtggttgatgaactatatt

SEQ ID NO: 10274 - DNA, 201 bp, Homo sapiens
gttaaggcataaaacatatgtagtataactacttggactgctataataaaatcacccagattttgtgacagtagctgagaatgtaaataagcagtagagakaatttaacttgttaatgatgctattaaaagatgaaatgaagcttattcactctataattgcaaagagtatttgtgtaagttcataggaaagtggaacaaa

SEQ ID NO: 10275 - DNA, 201 bp, Homo sapiens
aactgaaaacagaagtgacatagccatgacataaaacagtgaagcagtgcttttgttcttacctcaccaaaacaaatcattttgattttctctcccaatcgatgtagattaaaaagcattcaccaaatcaaacgcctcatacaaagaaccagaaaccatgttttctcagtgaaggtaccacatcctagagagcatctgcaa

SEQ ID NO: 10276 - DNA, 201 bp, Homo sapiens
taaactgaaaacagaagtgacatagccatgacataaaacagtgaagcagtgcttttgttcttacctcaccaaaacaaatcattttgattttctctcccaaycgatgtagattaaaaagcattcaccaaatcaaacgcctcatacaaagaaccagaaaccatgttttctcagtgaaggtaccacatcctagagagcatctgc

SEQ ID NO: 10277 - DNA, 201 bp, Homo sapiens
tgtataagtgcacatatcttttctattgcgaatgatatatttatattgtggtatttctagctggttattatataaacaaaaatgacatttcatttaaaaaatttagttaccaactatcttactaaaatataatctttatttagtatttttaatatcctttctaaatgaccactttaatcaccatattataaactgatggaa

SEQ ID NO: 10278 - DNA, 201 bp, Homo sapiens
ttggattcagctgttcttcagcccacccgttcatcctgatttggggaaacaagaagctaaagcagacttatctttcagttttgtggcaaatgaggtactgrgtgaaaggagagaagccttcatctccatagattcagaagaggggcattgtgtgtcttctagcagaaaacaaactggtggtgtatgaaacattttatattt

SEQ ID NO: 10279 - DNA, 201 bp, Homo sapiens
tccccacacctgatttatgtaattttttaatcatatatcttcctcagtacaatgtaagaactgtaaagaaagagatcatgtctgtcttgctttctgttgaytcccaggacctagaacccagcaccaagaatagatggccaaaaatgatactttaatgaacaaataaatgggtggctaaaatggataagttgatgtggtaaa

SEQ ID NO: 10280 - DNA, 201 bp, Homo sapiens
caagctattggattcagctgttcttcagcccacccgttcatcctgatttggggaaacaagaagctaaagcagacttatctttcagttttgtggcaaatgasgtactgagtgaaaggagagaagccttcatctccatagattcagaagaggggcattgtgtgtcttctagcagaaaacaaactggtggtgtatgaaacattt

SEQ ID NO: 10281 - DNA, 201 bp, Homo sapiens; identical to SEQ ID NO: 972

SEQ ID NO: 10282 - DNA, 201 bp, Homo sapiens
accttaagataaatcatccccacacctgatttatgtaattttttaatcatatatcttcctcagtacaatgtaagaactgtaaagaaagagatcatgtctgwcttgctttctgttgattcccaggacctagaacccagcaccaagaatagatggccaaaaatgatactttaatgaacaaataaatgggtggctaaaatggat

SEQ ID NO: 10283 - DNA, 201 bp, Homo sapiens
gttgtcagtgatgaaagtgttttgacatattcattaacaggaagttctattataagaaagaaatgtacagtcttgttcacagctaaattctatatgactayattaattcttggtgttatgaagttttaacaatgttatttaatgttatttaaaccttaagataaatcatccccacacctgatttatgtaattttttaatca

SEQ ID NO: 10284 - DNA, 201 bp, Homo sapiens
atttgagctgttttgaaaataagaatgttttccataaagatgacatcaaactcatccattagcataagctggtactttcttgtttgacactggtcacagtrtttaaaagtaaaaagaatgttactgcacattcagaaatcagatgcacataaaatttaaggtcagagtattaaagaaatcacaaccagtgatattaggctt

SEQ ID NO: 10285 - DNA, 201 bp, Homo sapiens
tttcacttcaacttcattatgaataattcaagcccatcacaagaacggacattgaatgaatgagttaatttgagctgttttgaaaataagaatgttttccrtaaagatgacatcaaactcatccattagcataagctggtactttcttgtttgacactggtcacagtatttaaaagtaaaaagaatgttactgcacattca

SEQ ID NO: 10286 - DNA, 201 bp, Homo sapiens
attttctgttcatcaaagaaagttgtgtgagtgagctccgagtccaggggacagataatcaccctgcttatggtgggaggatactgcaaaattatgtgtcrtagggtgtggtactcaggaatatttacaaaattgttgaacattttaattaaataataaatacttaaacattaaatagacttgagagtaagtttaccaaat

SEQ ID NO: 10287 - DNA, 201 bp, Homo sapiens
atatggaagccatctcaaacctcggtgtgaaatctaccaattttctgttcatcaaagaaagttgtgtgagtgagctccgagtccaggggacagataatcamcctgcttatggtgggaggatactgcaaaattatgtgtcgtagggtgtggtactcaggaatatttacaaaattgttgaacattttaattaaataataaata

SEQ ID NO: 10288 - DNA, 201 bp, Homo sapiens
gctcagatccccagtggaaaggtgagtcacagagggaggctctctgcctctctcacctactggagcttcattcacttttttaactgggtgccatcatgggkgctgtttgcccatgttcccctccctgggatctgtgtgtccttatgattctggtagattcccactttccttcttgaaataaagctcacagagttaaccttt

SEQ ID NO: 10289 - DNA, 201 bp, Homo sapiens
gaatcatgtcttcagtgtgtttcaaaaccaaagcggactttaacaaatagaaattcaaaagaatattttttagataaaaggaaaattactaaaaatataamgctgaacatgcatgaaggaataataaataatagaagtggtaaatatgtgcataagtctaaataaattttgactgtataaagtggtggtgtctttttgggt

SEQ ID NO: 10290 - DNA, 201 bp, Homo sapiens
tgtaaaaagaaacaactgtctaaatgacaatcttattttcaacagacaaaattgaagctagaattcaatggaatcatgtcttcagtgtgtttcaaaaccawagcggactttaacaaatagaaattcaaaagaatattttttagataaaaggaaaattactaaaaatataaagctgaacatgcatgaaggaataataaataa

SEQ ID NO: 10291 - DNA, 201 bp, Homo sapiens
agccattaaaatttagatgagataactaaaaccaattaaaaacaaatgccacaggatatcaaagaccaatcgaaaatctgaaaagtaggtagaggaaaaastttatgtaaaaagaaacaactgtctaaatgacaatcttattttcaacagacaaaattgaagctagaattcaatggaatcatgtcttcagtgtgtttcaaa

SEQ ID NO: 10292 - DNA, 201 bp, Homo sapiens
cacattctctattctatttcgctgctctatgtgtctgtttttatgccagtaccatgctgttttggttactatagctctgtaatatactttgaagtcaggtratgtgattcctccagttttgttctttttgctcaggataactttggctattctgagacatccgtatattttcagaagccattaaaatttagatgagataac

SEQ ID NO: 10293 - DNA, 201 bp, Homo sapiens
caccatttagtgaagagactgtcctttccccagagtatgttcttggcacctttgtcatgagttctctataggtgtggatttgtttccacattctctattcyatttcgctgctctatgtgtctgtttttatgccagtaccatgctgttttggttactatagctctgtaatatactttgaagtcaggtgatgtgattcctcca

SEQ ID NO: 10294 - DNA, 201 bp, Homo sapiens
ttttgctagacacctttttttcttatttccaatttagatatttatgatcacaacatttcaaagtggcagaaattagtgaatttccaatatatagtaatatmgatattaaatatacaggacaattttctaaatttatccctaaatgaaataataatacacatatttttaccattcaaagattataataccatgcatgtgtac

SEQ ID NO: 10295 - DNA, 201 bp, Homo sapiens
gtgctgttgatgccaatatttaattcttcagctcagaagtcaatcctggtctctagaatcctttctctaagaagtcatttgacatcttcatttggatgtcktaacaagaacttgaactaacatgtccaaatcaaaatagtgatcttccctctagtctccagcgttgtttcttctatagcctttccctcttctgttaatgac

SEQ ID NO: 10296 - DNA, 201 bp, Homo sapiens
gttaaaatagtatctatgaaatctatgtattaattatgggatgtgccttaccattgtaattttgttgtcagtgatgaaagtgttttgacatattcattaayaggaagttctattataagaaagaaatgtacagtcttgttcacagctaaattctatatgactacattaattcttggtgttatgaagttttaacaatgttat

SEQ ID NO: 10297 - DNA, 201 bp, Homo sapiens; identical to SEQ ID NO: 970

SEQ ID NO: 10298 - DNA, 201 bp, Homo sapiens
ttaagctggtgcttttctgttgacattgttcacagaatttaaaagtataaagaatgttattgaacattcaggaatcaagtgcatatttaatttaaagtcttgaatatcagaggagtcaccatcagtgacattaggcctgaattttttacttgcttttttgtttagacatgatgagttttctacacattgttttttccattc

SEQ ID NO: 10299 - DNA, 201 bp, Homo sapiens
aaagcctaagcatgagagatatgtttcatgaatattattcattggctgaaaatctggcatgggaaaaataggactaattccaccaggacgagctcctggawactcattttccatgtcataagttacaagaaagcaattcctttcatccttgaagagtgaaagtgtgtgtgtgtctgtgtgtgtgtttatgagcttgttaat

SEQ ID NO: 10300 - DNA, 201 bp, Homo sapiens
tttttactcccacttcttaggtaagttcatctagtcataaccttagttactttctgtgtgctgttgatgccaatatttaattcttcagctcagaagtcaaycctggtctctagaatcctttctctaagaagtcatttgacatcttcatttggatgtcgtaacaagaacttgaactaacatgtccaaatcaaaatagtgatc

SEQ ID NO: 10301 - DNA, 201 bp, Homo sapiens
atgatataagtaaggaaatatacagatagaataatgattgattaacccattttgacttattgtacttggtacagttaatgtcttagtatctcagtaatctstttttatatttttctctatgatcaattaattatgagttaatttttatatatggtatgaaataatggtctacactcatgtttttatcattctgtttttact

SEQ ID NO: 10302 - DNA, 201 bp, Homo sapiens
ttatatacatatagttacatatatcaaattatgtaaccctttttttcaaatgtcaaagttacatttaaaagtcacaatactaaaaatctatggagaaggtyggagcatcaataatgtttttacttgaatttctgctaaatcagagtgatggtgaccagatagctaattaagttttatttaaaatagccatgtagattgata

SEQ ID NO: 10303 - DNA, 201 bp, Homo sapiens
aaccatgcacaaaaagtgaaaaattacacaagacctactcaaggtctgaaatggaaagtgcagctggtgattctgagtagtatattttatgaattgatgarcagggaatttctaggtatcacagagcaatcagcagctgaggagagagcgacaaaaccaggactctgacagggctttttggaaacttaatttttggagcaa

SEQ ID NO: 10304 - DNA, 201 bp, Homo sapiens
atgttatttatttatatacatatagttacatatatcaaattatgtaaccctttttttcaaatgtcaaagttacatttaaaagtcacaatactaaaaatctrtggagaaggtcggagcatcaataatgtttttacttgaatttctgctaaatcagagtgatggtgaccagatagctaattaagttttatttaaaatagccat

SEQ ID NO: 10305 - DNA, 201 bp, Homo sapiens
aggctgattattcatatatgttatttatttatatacatatagttacatatatcaaattatgtaaccctttttttcaaatgtcaaagttacatttaaaagtmacaatactaaaaatctatggagaaggtcggagcatcaataatgtttttacttgaatttctgctaaatcagagtgatggtgaccagatagctaattaagtt

SEQ ID NO: 10306 - DNA, 201 bp, Homo sapiens
ttacagataatgtagccacatggttcaatagagaggaataaggctgattattcatatatgttatttatttatatacatatagttacatatatcaaattatrtaaccctttttttcaaatgtcaaagttacatttaaaagtcacaatactaaaaatctatggagaaggtcggagcatcaataatgtttttacttgaatttct

SEQ ID NO: 10307 - DNA, 201 bp, Homo sapiens
ctttcaaaaactcatactccaggactggtgaggtggctcacacctgtaatccaaacaatttgggaggctgaggtgggaggagcacttgaggccaggagttscagatcagcctgggcaagacagcaagaccctgtttgttaaagaaaataaactgattgtagtactgcgtgcctgtagttccaactacccaggaagttctgg

SEQ ID NO: 10308 - DNA, 201 bp, Homo sapiens
ctggaagagataataaatataaacccattacatccaccttaggttgaacatgagccaaagctttatgcagcatctgactttcaaaaactcatactccaggmctggtgaggtggctcacacctgtaatccaaacaatttgggaggctgaggtgggaggagcacttgaggccaggagttccagatcagcctgggcaagacagc

SEQ ID NO: 10309 - DNA, 201 bp, Homo sapiens
gcggttagtatgttttactcattttcttgccagaagaggagaattaccgaggactctttttggtcctacttacagtaatgtcccttaatatacaggtctgraagcaatgtgagagttctgctagctgttgaaactgttaatttcatttaacattctggaagagataataaatataaacccattacatccaccttaggttga

SEQ ID NO: 10310 - DNA, 201 bp, Homo sapiens
gttttattccattatgaattcctattttatgtttagtaaaaagcaatcagaattattgttacaaaacaatgaacacaataaaatttgagtgacaagtataygtagagtaaatttcatgtatgtgtaccataaacagtactgaggaatattagatttaatacaagtatgtgaatagcttagaaaaaaatctctgctataaga

SEQ ID NO: 10311 - DNA, 201 bp, Homo sapiens
ctggaacttttgagttttttgtcatgtcggtgaccaattctattccttggacaatgcggttagtatgttttactcattttcttgccagaagaggagaattwccgaggactctttttggtcctacttacagtaatgtcccttaatatacaggtctggaagcaatgtgagagttctgctagctgttgaaactgttaatttcat

SEQ ID NO: 10312 - DNA, 201 bp, Homo sapiens
atttctatgcaaagtgtattaattttttgttcatcaaagtaagttaaatgattgaacttcaagttcaggggaaaggtagtcagtcttcgtgtgatgggagkatactgcaagattatatatcaaagggtctggtactcaggaatacttataaaattgctgaacattttaattaaataataaatatttaaatattagacttga

SEQ ID NO: 10313 - DNA, 201 bp, Homo sapiens
tggtattatgagtattttatttatccatagaaataacttacagaaatagagtgaaagtttctttctaccaccaaaataatgactgaaaaaattaatattamgaattcaatatttaacaatcaattagatttaacaatcagttagaaatggtagaataaagaattagtgaattggaagataactacacagagtgaagcataa

SEQ ID NO: 10314 - DNA, 201 bp, Homo sapiens
taatgccaaactagaaaaaaagtacgtttccttttggacactgatcagtactcaaccctttggtttgctatctgcctgataatttttggaggtgggggtgsttcacaatagctaatttttctcagccatttttcctttggataaagtgtagaattaattatgtgaatattatgattctgatggagtccttggtttattaac

SEQ ID NO: 10315 - DNA, 201 bp, Homo sapiens
gaagaaaattgttagcattttcatgtcaagcatacgaaaaacaaaaaaacaaagccaaccaactgaacaaagaacccaactttttttaaaaaacttggtgrtaagagtgctttgttctgcttctccatagataatgatttatagaaggagaacaaaatataatttctgctactaaaacaataatagcaaaaaataaataat

SEQ ID NO: 10316 - DNA, 201 bp, Homo sapiens
aaacaagaagctaaagcagacttatctttcagttttgtggcaaatgaggtactgagtgaaaggagagaagccttcatctccatagattcagaagaggggcrttgtgtgtcttctagcagaaaacaaactggtggtgtatgaaacattttatatttcttacagtgttttctgtaatgtatgtgtatgaataatttccaaaca

SEQ ID NO: 10317 - DNA, 201 bp, Homo sapiens; identical to SEQ ID NO: 847

SEQ ID NO: 10318 - DNA, 201 bp, Homo sapiens
aagttttcactggcaccttctaaatatctagtaacacaggatcaaatcagtaactaaccatctttgttttttcctgtcccagacaggtaaaatggaaagcagttatacaaatgctatactaactcctcacaaagactacccaaagataatattatcatctgtgttttttggtgatcatactgaggcagagagcagttgtga

SEQ ID NO: 10319 - DNA, 201 bp, Homo sapiens
gaagttttcactggcaccttctaaatatctagtaacacaggatcaaatcagtaactaaccatctttgttttttcctgtcccagacaggtaaaatggaaagcagttatacaaatgctatactaactcctcacaaagactacccaaagataatattatcatctgtgttttttggtgatcatactgaggcagagagcagttgtg

SEQ ID NO: 10320 - DNA, 201 bp, Homo sapiens
tgtccaggagttcaagactacggcgaggtatgattgtgccactgcactccagcttgggtgagagagcaagagcctgtctcagaaaaaaaaaaaaaaaaaaagaaaaggagaaaagaaatggaagttttcactggcaccttctaaatatctagtaacacaggatcaaatcagtaactaaccatctttgttttttcctgtccc

SEQ ID NO: 10321 - DNA, 201 bp, Homo sapiens
gtgtccaggagttcaagactacggcgaggtatgattgtgccactgcactccagcttgggtgagagagcaagagcctgtctcagaaaaaaaaaaaaaaaaaaagaaaaggagaaaagaaatggaagttttcactggcaccttctaaatatctagtaacacaggatcaaatcagtaactaaccatctttgttttttcctgtcc

SEQ ID NO: 10322 - DNA, 201 bp, Homo sapiens
ttgagcccaattattggagaccaacctgggaaacatggtgaaacccagtctctagtaaaaatacaacaattagccaggtatagtggtgtccacctgtagtyctagctacttgggaggccaaggtgggaaacagattgaggctgggagctatagattgcagttagccaatctcaaaccactgcactccagtttaggctccag

SEQ ID NO: 10323 - DNA, 201 bp, Homo sapiens
atatttttccttcaaatgtcaaatgtacattttgaagtaacagtaccagggtggatgctgtggcttaagcctgtaattgagcaccttgggaggcttaggcrggcagatttcttgagcccaattattggagaccaacctgggaaacatggtgaaacccagtctctagtaaaaatacaacaattagccaggtatagtggtgtc

SEQ ID NO: 10324 - DNA, 201 bp, Homo sapiens
aaactgaaaacagaagtgacatagccatgacataaaacagtgaagcagtgcttttgttcttacctcaccaaaacaaatcattttgattttctctcccaatsgatgtagattaaaaagcattcaccaaatcaaacgcctcatacaaagaaccagaaaccatgttttctcagtgaaggtaccacatcctagagagcatctgca

SEQ ID NO: 10325 - DNA, 201 bp, Homo sapiens
gtaaatatttttccttcaaatgtcaaatgtacattttgaagtaacagtaccagggtggatgctgtggcttaagcctgtaattgagcaccttgggaggcttrggcaggcagatttcttgagcccaattattggagaccaacctgggaaacatggtgaaacccagtctctagtaaaaatacaacaattagccaggtatagtgg

SEQ ID NO: 10326 - DNA, 201 bp, Homo sapiens
tcttcccttagggtcttgtgttccttttcccatgattcagccccttagggtgggctgctcacatgtgtggtggcctgctaacactttggaggtgagcatgygcagtgtgtttactggagttgtacacatgcttgcatgaggcattcttcccttttttggtggaatgcccccagaaggttgttttctaccgttttctctctt

SEQ ID NO: 10327 - DNA, 201 bp, Homo sapiens
gtgccattcagatgtgctcatgccctccaatcatggctgactatgagcatataatttccactgttgcacagggtcttgtgcttagagacgcacacgcttaraagggctttatacatgggttaattttctgcacctgctgttttgtttttgagacagagggcactcctctgctaaagagggaatggtcttgcactaattggc

SEQ ID NO: 10328 - DNA, 201 bp, Homo sapiens
tacaggtcaggaagaaagtgagagtcctgccagctgccatgtgtgtccattacacattcaagaagaggcaataacggcaaactgattagatccaccttggkatggacatgagtcaaaactctaggtagcatctgaccttcaaaactccctctgcaggctgggtatgatggctcatgcccgcagtccccgcacttttggagg

SEQ ID NO: 10329 - DNA, 201 bp, Homo sapiens
ttaaaaattgagtttgtaaccagtcacctttcttacacattatttgtatatttttttagtatcctttctaaatgaatgttttaattgccatgttataaacrcatggaaaagtgatgcaactgaatgtatatcttagcttttggtgtctaaaactagagccaatgtctgagtttacagtgatgacatttatttgggaaggca

SEQ ID NO: 10330 - DNA, 201 bp, Homo sapiens
catttctgttctggtttcagattgaagttacaggattatccaagaagaagaagaatttctcagagcaaaagtttggctattccacaattctaggggaaatrtcactataatatagcagtgatgcagctatatcagatgtgtgacacaaagacaaagtggaaaataaaaagatggcatttattacaatactttttactaagc

SEQ ID NO: 10331 - DNA, 201 bp, Homo sapiens
ctccacatctgatttgtttgtttatcatatatcttacctggtacaatgtaaataccataaaagtagagatcatatagatcttgcttactgtagactcccargacataaagatagcacatagaataggtattgaaaaatgatactttgatgaacaagttaattggtgaatgaatgaatatgaactatattggggtggtgaac

SEQ ID NO: 10332 - DNA, 201 bp, Homo sapiens
aaattttccttactttaaaaagaagctcaatctaaagagggtatagaaactatggcatctatgaaatctatatattaatgataggaaatgtcttaaagatrtgttttattataatcttggtgtaaataatgaaatgagagaaagtgtgttgacatattcactaatagcaagttctattacaagaagaaaatgtataaccta

SEQ ID NO: 10333 - DNA, 201 bp, Homo sapiens; identical to SEQ ID NO: 967

SEQ ID NO: 10334 - DNA, 201 bp, Homo sapiens
ccagccttacaaaatgttgggattatgggtgtgagccaccctgcctggccaataaagagacttattgaaaatattaagttgaatatgcaagaaggaatacraattaatgaaagtggtaaatatgtgcataattgtaaatgaatgtttactgtataaaataataatgtcttgagggtgattatataattgataagacatatg

SEQ ID NO: 10335 - DNA, 201 bp, Homo sapiens; identical to SEQ ID NO: 968

SEQ ID NO: 10336 - DNA, 201 bp, Homo sapiens
tggctgaaaatctggcatgggaaaaataggactaattccaccaggacgagctcctggaaactcattttccatgtcataagttacaagaaagcaattccttycatccttgaagagtgaaagtgtgtgtgtgtctgtgtgtgtgtttatgagcttgttaatagtgatgccatatagaagtattggttaacagcaaccaaatta

SEQ ID NO: 10337 - DNA, 201 bp, Homo sapiens
atgccagtaacatgctgttttggttactacagcctctgtagtataatatgaagtcaggtaacatgattcctccacttttgttcttttttcttaggatactyttggctattctgggtcagttgtggctccatataaattttaggattgttttctctatgtctgtgaagaatgtttttagtattttgataggaattacattga

SEQ ID NO: 10338 - DNA, 201 bp, Homo sapiens
atgccaaaatgtgtctctaaatgaaatatgtatattcatattgttagcattctaatttcacaatactattcatgtgtacacctgcattttgggttaaataytttgttactatatattttttggttctgcattagagaagaaaaatcataggcaaatttgttaaggtgtaaaacatatttagtatgatctttgagtatgttt

SEQ ID NO: 10339 - DNA, 201 bp, Homo sapiens
gtcattttaaaatgtacaactgaattatcattgattatagtcaccctgctgtgctatcaaatagtaggtcttattaattctttctatttttttttttttttggtaaccattaaccagccactccttccctttagcctccactacctttcccagcctttgtttagcatccatgtactctctatgtccatgccttctgtgcaa

SEQ ID NO: 10340 - DNA, 201 bp, Homo sapiens
ttggtattttaacattatgtggacatattaatttaccttatcagtaaacagatataggaagtttaggaatttctttttttaaaatgtatttttaagtttcrtggatacatactaggtgcatacatttattgggtacatgagatgtgttgatacaggcatgcaatgtcacataatgaagaatggggtagccatcccctcaaa

SEQ ID NO: 10341 - DNA, 201 bp, Homo sapiens
cactaatcaaagtaattctctttcaaggagaaaactggaagttatgtaattgaggactattaaaaataactattttggcagatgtgcaaaattctcaagcrcatatattacaactttctatagtcatatacatcctttttacacttgcttgaattggtctacaaaacccccatgtttcatagtgtaatccaaacaaatagc

SEQ ID NO: 10342 - DNA, 201 bp, Homo sapiens
tccattctggtttctaccttggttctaactcctacttttattaattacactaatcaaagtaattctctttcaaggagaaaactggaagttatgtaattgargactattaaaaataactattttggcagatgtgcaaaattctcaagcacatatattacaactttctatagtcatatacatcctttttacacttgcttgaat

SEQ ID NO: 10343 - DNA, 201 bp, Homo sapiens
aatatacatacaacatttttttcttacactaaagatcaaataaaacccataggaccaagcctcccacagatactttttataaattctggataaaatatttwaaaaaacagccattcattggcaatggagaatgaacaaaataggcagatactagagagaggtcagcacttggaagaagggaatagcaaggagtgagtttcc

SEQ ID NO: 10344 - DNA, 201 bp, Homo sapiens
tgtaaaatgcaccaatcagtgctctgtaaaaggcaccaatcagcactctttaggtagcatggggattataaaatgcaccaatcagcactctttaggtagcrtgggaattataaaatgcaccagtcaacactctgtaaaaatgcaccaatcagcactctagctagccagaggattgtaaaatgcaccaatcagctctctgta

SEQ ID NO: 10345 - DNA, 201 bp, Homo sapiens
tgtagctagggttgaggtgctataatttatttattggaatggcatcttgagatccagcacagctcattgaatttccctgtggggagagtttgtggtgaagrctcatcaacagacaagctgctatccccacccaaaaaaaaaaactactaacatcacatcaatttccaggttcttccaacttgcggaaggatgtgtagacca

SEQ ID NO: 10346 - DNA, 201 bp, Homo sapiens
actgtgttgcacaggctggtcttgaactcctgggtgctcctgccccagccttacaaaatgttgggattatgggtgtgagctaccctgcctggccaataaakggtcttattgaaaatattaagttgaatatgcaagaaggaatacaaattaatgaaagtggtaaatatgtgcataattctaaatgaatgtttagaaaataat

SEQ ID NO: 10347 - DNA, 201 bp, Homo sapiens
tattatgtagaacttaaaataagttaactccacatcatatatatatctatgtatctatatctatatctatagacatatatatatatatatatatatctctygcttatcatacgtcctccctagtacaatgtaatcaccataaaaagagaggtcatatctgtctcgctttctcttgactcacaggacctaaaagccagcaca

SEQ ID NO: 10348 - DNA, 201 bp, Homo sapiens
aacattattatgtagaacttaaaataagttaactccacatcatatatatatctatgtatctatatctatatctatagacatatatatatatatatatatawctcttgcttatcatacgtcctccctagtacaatgtaatcaccataaaaagagaggtcatatctgtctcgctttctcttgactcacaggacctaaaagcca

SEQ ID NO: 10349 - DNA, 201 bp, Homo sapiens
ataatttttttatctgtagttagaaaagtcattgcttccactttttgaattaaaggaaaccttttgtgaagttgacatctgatgtcaagtatttccatttrtttttcttagccaccttgagcccctgaatttccaattttctcctttgtctcccattcctaatattcctcaaaaaaactcaaatattctctatcttaaaaa

SEQ ID NO: 10350 - DNA, 201 bp, Homo sapiens
tcattatgaattcttattttatgcttagtagaaagcaaatagaattgttgttagttaatgatgcacacaataaaattggagtgaaaaacatatgtagagtaaattttgtatatgtataccaaaacagtactaaagaatactagatttaataccagtatgtgaatagcctagaataaaaatcatttctataataggaatgaa

SEQ ID NO: 10351 - DNA, 201 bp, Homo sapiens
ttcattatgaattcttattttatgcttagtagaaagcaaatagaattgttgttagttaatgatgcacacaataaaattggagtgaaaaacatatgtagagtaaattttgtatatgtataccaaaacagtactaaagaatactagatttaataccagtatgtgaatagcctagaataaaaatcatttctataataggaatga

SEQ ID NO: 10352 - DNA, 201 bp, Homo sapiens
tttcattatgaattcttattttatgcttagtagaaagcaaatagaattgttgttagttaatgatgcacacaataaaattggagtgaaaaacatatgtagagtaaattttgtatatgtataccaaaacagtactaaagaatactagatttaataccagtatgtgaatagcctagaataaaaatcatttctataataggaatg

SEQ ID NO: 10353 - DNA, 201 bp, Homo sapiens
tataattttatttaaaaaattacaaattgggagaaatgtcacgtaaaaattattaattgctctgctcattatatacctagggggaaaatccaccatttacrtacattcttatacaactcaagagagctaaagtgaattcttattttagttgcaaaatggagaaatttgagatgctgttacctacagcctccagatctttcc

SEQ ID NO: 10354 - DNA, 201 bp, Homo sapiens
atttcattatgaattcttattttatgcttagtagaaagcaaatagaattgttgttagttaatgatgcacacaataaaattggagtgaaaaacatatgtagagtaaattttgtatatgtataccaaaacagtactaaagaatactagatttaataccagtatgtgaatagcctagaataaaaatcatttctataataggaat

SEQ ID NO: 10355 - DNA, 201 bp, Homo sapiens
attgcttatctcaggagatgtgaataaaggtttaggggcttggaaagtggcctggaagtggacctagtctgtttgcagtgttccatgtcttatcctgcatratggttacataagtgtttatgatacattgctcttacctatttttgttttggcccatttctaagtgtgcattataattttatttaaaaaattacaaattgg

SEQ ID NO: 10356 - DNA, 201 bp, Homo sapiens
tatttcattatgaattcttattttatgcttagtagaaagcaaatagaattgttgttagttaatgatgcacacaataaaattggagtgaaaaacatatgtagagtaaattttgtatatgtataccaaaacagtactaaagaatactagatttaataccagtatgtgaatagcctagaataaaaatcatttctataataggaa

SEQ ID NO: 10357 - DNA, 201 bp, Homo sapiens; identical to SEQ ID NO: 962

SEQ ID NO: 10358 - DNA, 201 bp, Homo sapiens
agtgcaagaagccatgaacaagaagaacacacaggactgcacctatacacagttcaaagcaggacagaccaagctgtggagtttagggttgtgaacctagytggtaaagtataaagaaattcaagcaaatgatcatcatagattatgaatattgcttatctcaggagatgtgaataaaggtttaggggcttggaaagtggc

SEQ ID NO: 10359 - DNA, 201 bp, Homo sapiens
tccaggggactgaatggttctgtcttgctggcattccaggcaccactggggtatgacaaaaaacttctgcagctagcttggtgtctgcccaaatgatcgcycagttttatgcttgagacccatggccctggtggcataaacactggaggaaatctcctggtttgtgggttacgaagaccatggggaaagtgtagtatctgg

SEQ ID NO: 10360 - DNA, 201 bp, Homo sapiens
gccatatactgtaaaaaagattgtttcaacgtgtggtctagggacactgaatgctttaaaacatcacctatgctgtaggtccctgaatcttctcaggttgrtttcttttcttctggtattttacttccattcatcgttagagtattttactatagttaagaaacttgccacttcctgattattgtaccaagtaatatatta

SEQ ID NO: 10361 - DNA, 201 bp, Homo sapiens
atgggaggaggcaaggaggtgtccagtcctttgtgcatctatcccctggcattctcccatcctgccccaagtcatcagcccacacaggttgctggcacatytaaagtgagaattttaggactaaataaatcaaatagaagtaagccctcacatcttctatatctcacctgatagtgaagaagtttgaaggtacagagctcc

SEQ ID NO: 10362 - DNA, 201 bp, Homo sapiens
cattggtggcaaaactgtaaagcgaaacatataagtgattatcataactgggatacttgggagggaggaaacaaaagggaaatcatatcaacaagaaagcmtatatggggaatgtcttcattgctggcaaattctactttttgacgaaagtgtggaatatgagtgttaatgttacattcttttttccttttactgtgcatt

SEQ ID NO: 10363 - DNA, 201 bp, Homo sapiens
atacactgctcctaggattataaatcagtgcaattactttgtctgagtgtgacattatttgaataagatgaaggatcacatcctaagacccaggatttgcwctcatatcagaatacatatacaagtatatatcgctgagttttaatagctaaagttgagaagtctcccaaatgaccatcagtaataaaatggataaataaa

SEQ ID NO: 10364 - DNA, 201 bp, Homo sapiens
gcttaagcacgagagataagtttataaatattgaaaattgactgaaaagggtgagagggaaaatagggctatttcaacctggacgacttgcctgaaattgrttttccattttggaaattacagcacaataattcctcccatccatgaggggcgtgtatgcatgtgtgtgtttgtgttaatgagcttgttaacaatagactt

SEQ ID NO: 10365 - DNA, 201 bp, Homo sapiens
cccaaggaatattttaaaaattgctgaatattttaattaaacaattcatatttaaatattagctagattcgagagaataacttattcaaaagcttaagcaygagagataagtttataaatattgaaaattgactgaaaagggtgagagggaaaatagggctatttcaacctggacgacttgcctgaaattggttttccatt

SEQ ID NO: 10366 - DNA, 201 bp, Homo sapiens; identical to SEQ ID NO: 998

SEQ ID NO: 10367 - DNA, 201 bp, Homo sapiens
ctcctcacaaagactacccaaagataatattatcatctgtgttttttggtgatcatactgaggcagagagcagttgtgaaatggagtctcagaatcgtcgstatatgaagcagaaaaactggtttcctctcttggcagtctgactccaagatctcttagaaacaattatactgtaaaaacctgaaaaagaagtaaaaaaca

SEQ ID NO: 10368 - DNA, 201 bp, Homo sapiens
aaatttgatcatgccattcttcagctttagatttttcagtggcttctcatctcattagagtaaggccaaaatccttacaaagtcctataatcatttgaatratcggattttgtctgcctgtctgtcctaaaatgcctggctatcccatgctagcaacactggactttgtgtaatttcttgaatgtaccaagaattgcctca

SEQ ID NO: 10369 - DNA, 201 bp, Homo sapiens
aaatgctgaatacaaattatggagaggttaaacaaggaaaaacattgcaaaacaatgaaaaagaatatgtctttttttgcatactagcaaacgggaattcrcctttcacttcaacatcagttttaaaaatttcagcgtatagcaagaacagacagtggaataggattcaatttcagctattttgggaataagaaaattttc

SEQ ID NO: 10370 - DNA, 201 bp, Homo sapiens
tgatatgtgtattgggttttaaaatttccctatgtaacaactgacgatgctggacacaaattatggagaggttagcaaggacaacaattgcaaaacaattwaaaaaatgcctttatttgcatactaacacatgagaatttacttttcacttcatcctcaatataaaatatttcagcatatagtaagacagacagtgtatga

SEQ ID NO: 10371 - DNA, 201 bp, Homo sapiens
aatattagagaagaattagtagaaagataattttgttgaggcataaagcatatttagtgtaactactttgactgctgtaataaaatcacccagattttgtsacagtagctgagattaaaaataaacagtagagagaatttcacttgttaataatgctattaaaagatgaagcttatacactttataattgcacagagtatt

SEQ ID NO: 10372 - DNA, 201 bp, Homo sapiens; identical to SEQ ID NO: 960

SEQ ID NO: 10373 - DNA, 201 bp, Homo sapiens
ataaattatagtaatatagatattaaatacacaggacaatttttataaatttatctctaaatgaaataattatgcccatttttaccattcaaagattataycatgcatgtgtacacatatgtgaggaaaaatattttgatagtacaaagtttttgaatattagagaagaattagtagaaagataattttgttgaggcataa

SEQ ID NO: 10374 - DNA, 201 bp, Homo sapiens
gttcataataaaagagcacttaaaactttaaaaaatattagaaaaacgaataaaggaaaatgaatacatatataaaatatataattcattattaataaatrtgcataaaatcacactcatagaatttaaaaagagtaacaatttttgaattaaggatacattctaaattataatagaaaaaggcttataaaatgttagttt

SEQ ID NO: 10375 - DNA, 201 bp, Homo sapiens
gccttacagtatgctgttaactaatcatattttctcaaagtcatttggcataatatttggttaaaagaagtatgtctagtataattacatgtgttcataayaaaagagcacttaaaactttaaaaaatattagaaaaacgaataaaggaaaatgaatacatatataaaatatataattcattattaataaatgtgcataaa

SEQ ID NO: 10376 - DNA, 201 bp, Homo sapiens
tgtgttaatgagcttgttaacaataagttatacaaaattattagttggcagcaacgagatttttaggaatattggccttcctgggcttcccaagaaaacgytggatgcttttggtaggaaaagttaggactcactaaatctggcacagaaaaggtgaatcaacagtggtcgtgattctagttttgaccgagctgcatataa

SEQ ID NO: 10377 - DNA, 201 bp, Homo sapiens
ataacttctcataaaagaaattttattttaagtttttataattcttataatttgaaataaattcttataatttattacattggtggcaaaactgtaaagcraaacatataagtgattatcataactgggatacttgggagggaggaaacaaaagggaaatcatatcaacaagaaagcatatatggggaatgtcttcattgc

SEQ ID NO: 10378 - DNA, 201 bp, Homo sapiens
ggcttgtcagagacatgcacagagtcctataatgcccactatgcatgcctctagcagctttgaattccgctggatcatctggcacagtggccagagcagcytggaccagagcctatatcttctgtagagccctctttagttctgggctccatttgagaccagtagcctttagaaacatcgttcgtgagtcagagcaatatt

SEQ ID NO: 10379 - DNA, 201 bp, Homo sapiens
aataattctagcctgtaacaagaacaaacagtgaatgaatgagttaatttgagttgtttgaaaataagaatgttttccataaagagatcattgaactcatyagttaacacgccatggtgatttctggcttgacactggtcacaacgtttaaaagtaaaaagaatgacccagcagatttacaaattaggtgcatatagaatt

SEQ ID NO: 10380 - DNA, 201 bp, Homo sapiens
tggagaggttaaacaaggaaaaacattgcaaaacaatgaaaaagaatatgtctttttttgcatactagcaaacgggaattcacctttcacttcaacatcasttttaaaaatttcagcgtatagcaagaacagacagtggaataggattcaatttcagctattttgggaataagaaaattttccataaatgcagcattgaac

SEQ ID NO: 10381 - DNA, 201 bp, Homo sapiens
acacaaagaaaaattgcaaactctgaaagagagtacattcttatttgtgtactagcaaatgaggattcaggtttccagtcaatttcagtatgaataattcyagcctgtaacaagaacaaacagtgaatgaatgagttaatttgagttgtttgaaaataagaatgttttccataaagagatcattgaactcatcagttaaca

SEQ ID NO: 10382 - DNA, 201 bp, Homo sapiens
tatgtattgggttataaaacttcccaaacaactgaagttgctaaacacaaatgatggagaggttacacaaagaaaaattgcaaactctgaaagagagtacrttcttatttgtgtactagcaaatgaggattcaggtttccagtcaatttcagtatgaataattctagcctgtaacaagaacaaacagtgaatgaatgagtt

SEQ ID NO: 10383 - DNA, 201 bp, Homo sapiens
agagagcaacatgccatatactgtaaaaaagattgtttcaacgtgtggtctagggacactgaatgctttaaaacatcacctatgctgtaggtccctgaatsttctcaggttgatttcttttcttctggtattttacttccattcatcgttagagtattttactatagttaagaaacttgccacttcctgattattgtacca

SEQ ID NO: 10384 - DNA, 201 bp, Homo sapiens
gctgaagagagaatggtcttacactaattccatagggatttgctctcccctctccaacaggcttgtcagagacatgcacagagtcctataatgaccactaygtatgttctagcatctttgaatcctgctggatcatctggcacagtggccagagcagcttggagcagagtctatatcttctgtagagccctcatttgttct

SEQ ID NO: 10385 - DNA, 201 bp, Homo sapiens
attaatattctgcacttgctattttgtttgtcagacagaggatacttgtctgctgaagagagaatggtcttacactaattccatagggatttgctctcccstctccaacaggcttgtcagagacatgcacagagtcctataatgaccactatgtatgttctagcatctttgaatcctgctggatcatctggcacagtggcc

SEQ ID NO: 10386 - DNA, 201 bp, Homo sapiens
gattaatattctgcacttgctattttgtttgtcagacagaggatacttgtctgctgaagagagaatggtcttacactaattccatagggatttgctctccyctctccaacaggcttgtcagagacatgcacagagtcctataatgaccactatgtatgttctagcatctttgaatcctgctggatcatctggcacagtggc

SEQ ID NO: 10387 - DNA, 201 bp, Homo sapiens
acttgtgcttagagggactctatgcttggattaatattctgcacttgctattttgtttgtcagacagaggatacttgtctgctgaagagagaatggtcttrcactaattccatagggatttgctctcccctctccaacaggcttgtcagagacatgcacagagtcctataatgaccactatgtatgttctagcatctttga

SEQ ID NO: 10388 - DNA, 201 bp, Homo sapiens
aagagaataaaagattattctgaacactaaaacaataagactaaaaaaatgaaatatcagtactgagaatccaatagaaagagtcaaccagttagagcackagaagagataattagtgaattagaagatagctacacagaatgaagcatagagagaaagaaatggaaaatgcaaggctagagggtaacacactgatgctat

SEQ ID NO: 10389 - DNA, 201 bp, Homo sapiens
tagggacttgtgcttagagggactctatgcttggattaatattctgcacttgctattttgtttgtcagacagaggatacttgtctgctgaagagagaatgktcttacactaattccatagggatttgctctcccctctccaacaggcttgtcagagacatgcacagagtcctataatgaccactatgtatgttctagcatc

SEQ ID NO: 10390 - DNA, 201 bp, Homo sapiens
ctaagctgggtttgggtggatcactctggtaatatgagatgggccatgttctgcatcttgaagttagagtttggccaatttaggctacatctggagggggkgatctcattctcattctgcttctgggaatggtgtactagtgtggggatgtgcttgtggtaaatggagaagagcaagaaactccaatgtggaagccatctc

SEQ ID NO: 10391 - DNA, 201 bp, Homo sapiens
tgacgtccacagttgcatagggttttgtgcttatagggacttgtgcttagagggactctatgcttggattaatattctgcacttgctattttgtttgtcasacagaggatacttgtctgctgaagagagaatggtcttacactaattccatagggatttgctctcccctctccaacaggcttgtcagagacatgcacagag

SEQ ID NO: 10392 - DNA, 201 bp, Homo sapiens
ccaaaaatgatgaaatgtatatatttccatctctatatatttaggagccatcaaattttggacaagataactaaaaaatttaaaataaaatgacacaggayatcaaagaccaatagaaaatctgaaaagtagctagaggtgaaaggtagattatgttaaaaagagccacattctaaataacaaactgattttcaacagaaa

SEQ ID NO: 10393 - DNA, 201 bp, Homo sapiens
catatgacgtccacagttgcatagggttttgtgcttatagggacttgtgcttagagggactctatgcttggattaatattctgcacttgctattttgtttktcagacagaggatacttgtctgctgaagagagaatggtcttacactaattccatagggatttgctctcccctctccaacaggcttgtcagagacatgcac

SEQ ID NO: 10394 - DNA, 201 bp, Homo sapiens; identical to SEQ ID NO: 954

SEQ ID NO: 10395 - DNA, 201 bp, Homo sapiens
ctttatgagcatatgacgtccacagttgcatagggttttgtgcttatagggacttgtgcttagagggactctatgcttggattaatattctgcacttgctrttttgtttgtcagacagaggatacttgtctgctgaagagagaatggtcttacactaattccatagggatttgctctcccctctccaacaggcttgtcaga

SEQ ID NO: 10396 - DNA, 201 bp, Homo sapiens
ccagagttgggaatagaagaaaattgttactattttcatggctagagtactaacaactccagaaaaatacaaggctggagggtaagagacactgacgctayggtcagaatatctaacatacttctggagttctggaggattagagatgagaaatggggcaaaagcaatgtttgggaaatttttccaaaaatgatgaaatgt

SEQ ID NO: 10397 - DNA, 201 bp, Homo sapiens
ccagtcatggctggctttatgagcatatgacgtccacagttgcatagggttttgtgcttatagggacttgtgcttagagggactctatgcttggattaatrttctgcacttgctattttgtttgtcagacagaggatacttgtctgctgaagagagaatggtcttacactaattccatagggatttgctctcccctctcca

SEQ ID NO: 10398 - DNA, 201 bp, Homo sapiens
attatctgaccagagttgggaatagaagaaaattgttactattttcatggctagagtactaacaactccagaaaaatacaaggctggagggtaagagacaytgacgctatggtcagaatatctaacatacttctggagttctggaggattagagatgagaaatggggcaaaagcaatgtttgggaaatttttccaaaaatg

SEQ ID NO: 10399 - DNA, 201 bp, Homo sapiens
tttattctattatctgaccagagttgggaatagaagaaaattgttactattttcatggctagagtactaacaactccagaaaaatacaaggctggagggtragagacactgacgctatggtcagaatatctaacatacttctggagttctggaggattagagatgagaaatggggcaaaagcaatgtttgggaaatttttc

SEQ ID NO: 10400 - DNA, 201 bp, Homo sapiens
aagctgcttattgaatttccatatgaggagagtttgtgtgaggacccagcaacagacaagctgttttccagaaaaagctactcacatcaaattaatatccrgtttctttaaaattgcaggaacatggctagaccaagcttttattctattatctgaccagagttgggaatagaagaaaattgttactattttcatggctag

SEQ ID NO: 10401 - DNA, 201 bp, Homo sapiens
atcttctctgtctcgcttgggtaatgatggagttcaaagtcacagagccccatttctacaacataaacaaagtaaaaattagttcataaaatagaatgatktagttgtggtttagggactattttttatttattggaattgcattttgagatccaaagctgcttattgaatttccatatgaggagagtttgtgtgaggacc

SEQ ID NO: 10402 - DNA, 201 bp, Homo sapiens
tagaaaggcaattaaactgtttcatgatcaagctcttattcctaaagagaggattttagattaaataaatcaaacagaagtaagccctcacatcttctctrtctcgcttgggtaatgatggagttcaaagtcacagagccccatttctacaacataaacaaagtaaaaattagttcataaaatagaatgatttagttgtgg

SEQ ID NO: 10403 - DNA, 201 bp, Homo sapiens
tcaagctgaatacatttagatttagaaattaagtgaagtttagtttaaaatgcattgcttaagcaagtaattgtagatgaccttaaactaatccattgaakgctataagaaagagtttgattttagtgtaaataaaattccttaattagaaaggcaattaaactgtttcatgatcaagctcttattcctaaagagaggatt

SEQ ID NO: 10404 - DNA, 201 bp, Homo sapiens
ttgtgttaatgagcttgttaacaataagttatacaaaattattagttggcagcaacgagatttttaggaatattggccttcctgggcttcccaagaaaacsttggatgcttttggtaggaaaagttaggactcactaaatctggcacagaaaaggtgaatcaacagtggtcgtgattctagttttgaccgagctgcatata

SEQ ID NO: 10405 - DNA, 201 bp, Homo sapiens
aagaaataatatccaatattgaagaccgatttttaacatctattcatcttaaaccattaaataataaaaaatacattagagaaaaataaaagtgaaaattyacatacagagaagtgtaggctcttcaatggaatacacatgttttttaagtgcccaaggaatatttacaaaattgctaaatattttaattaaacaattcat

SEQ ID NO: 10406 - DNA, 201 bp, Homo sapiens
ctcagatcatagctataccaagcagggaatctggtttcctgtcctggcagtctgactccaagatcccctcttagaaaccatcatactgtaaaaactgaaargaaataaaaatccaagattggagactgattttaacatctattcatctaaaccattaagtaatcaaaaatgaattaaatagaggaaaatacaactgactat

SEQ ID NO: 10407 - DNA, 201 bp, Homo sapiens
gtgcagtggtgtgatctcgactaactacaacctccacctcctgggttcaaatgattcttttgctgcagccatctgagtacctgggattacagacgggcacyaccacacctggctaatttttgcatttctagtggatatagagtttcaccatgttggccatgctggtcttgaagtcctaacctcaggtgatccacctgcctc

SEQ ID NO: 10408 - DNA, 201 bp, Homo sapiens
ggtgtgcagtggtgtgatctcgactaactacaacctccacctcctgggttcaaatgattcttttgctgcagccatctgagtacctgggattacagacgggyaccaccacacctggctaatttttgcatttctagtggatatagagtttcaccatgttggccatgctggtcttgaagtcctaacctcaggtgatccacctgc

SEQ ID NO: 10409 - DNA, 201 bp, Homo sapiens
tatacatgagccatgctggtgtgctgcacccattaactcgtcatttagcattaggtatatctcctaatgctatcccttccccttcccccgaccccacaacwgtccccagaatgtgatgttccccttcctgtgtccatgtgttctcattgttcaattcccacctatgagtgagaacatgcagtgtttggttttttgtccttg

SEQ ID NO: 10410 - DNA, 201 bp, Homo sapiens
agttacatatgtatacatgagccatgctggtgtgctgcacccattaactcgtcatttagcattaggtatatctcctaatgctatcccttccccttcccccraccccacaacagtccccagaatgtgatgttccccttcctgtgtccatgtgttctcattgttcaattcccacctatgagtgagaacatgcagtgtttggtt

SEQ ID NO: 10411 - DNA, 201 bp, Homo sapiens
tgttacaaacccaggagttcaaggctgtagtgagtaatgatcatgccactgtactagatacagcctgggtgacagattgaggctgtgtctctaaaaaaaayctaaggcaaataacacaaaaaacaaaagaacattaaaaagaaaatctcccattccatctcatggaacacgttgtctttggggtacctagatattagtgtt

SEQ ID NO: 10412 - DNA, 201 bp, Homo sapiens
atctattttttctttcggctcctcaattcctgacacaacaaagttgtacatatttcccacactcttggtttagcagagttcttttatcagttatgtttttmtgcaagagaagaccctctaaaacattagacatatatatctcacatgtctttggatttcatttgtgtgtgtgtgtgttttctgttttttgagatggagtct

SEQ ID NO: 10413 - DNA, 201 bp, Homo sapiens
ttgtgccactgaggcgtgctcataccctccagtcatggctggctttatgagcatatgacgtccacagttgcatagggttttgtgcttatagggacttgtgyttagagggactctatgcttggattaatattctgcacttgctattttgtttgtcagacagaggatacttgtctgctgaagagagaatggtcttacactaat

SEQ ID NO: 10414 - DNA, 201 bp, Homo sapiens
tatggatgaccttcaatgaatcctcctttcactatgatcatgatagaaacaatttagattttcgtgtaaataaaattccttaataagaaagataaagcgartaacacattttttgagcacgcttttatttctaaagagcggattttaggaccaaactgtcaaacagaggtaagaccccagatcttctgtcacacttgagtg

SEQ ID NO: 10415 - DNA, 201 bp, Homo sapiens
tgaacaaataaatgggtggctaaaatggataagttgatgtggtaaaccagtgaaaaggaaactcacacaaaatctgcagttgcatgaattcccctgttccrgtctcaggttaagattacaggcttatccaagcagaatccttctcctaaggaaaagtttggctattccacaattttaggggaaatatgacaataatatagt

SEQ ID NO: 10416 - DNA, 201 bp, Homo sapiens
gctttctgttgactcccaggaactcgaaaccagcaccaagaatagatggtcaaaaatgatactttaatgaacaaataaatgggtggctaaaatggataagytgatgtggtaaaccagtgaaaaggaaactcacacaaaatctgcagttgcatgaattcccctgttccagtctcaggttaagattacaggcttatccaagca

SEQ ID NO: 10417 - DNA, 201 bp, Homo sapiens
gtcttgctttctgttgactcccaggaactcgaaaccagcaccaagaatagatggtcaaaaatgatactttaatgaacaaataaatgggtggctaaaatggrtaagttgatgtggtaaaccagtgaaaaggaaactcacacaaaatctgcagttgcatgaattcccctgttccagtctcaggttaagattacaggcttatcc

SEQ ID NO: 10418 - DNA, 201 bp, Homo sapiens
agtacaatgtaaggactgtaaaaaaagagataatgtctgtcttgctttctgttgactcccaggaactcgaaaccagcaccaagaatagatggtcaaaaatratactttaatgaacaaataaatgggtggctaaaatggataagttgatgtggtaaaccagtgaaaaggaaactcacacaaaatctgcagttgcatgaattc

SEQ ID NO: 10419 - DNA, 201 bp, Homo sapiens
cttcctcagtacaatgtaaggactgtaaaaaaagagataatgtctgtcttgctttctgttgactcccaggaactcgaaaccagcaccaagaatagatggtsaaaaatgatactttaatgaacaaataaatgggtggctaaaatggataagttgatgtggtaaaccagtgaaaaggaaactcacacaaaatctgcagttgca

SEQ ID NO: 10420 - DNA, 201 bp, Homo sapiens
aattttggccttttattactcttatcctagttgttgcagaaggatatcttgcctttctgaaccttctgtattctgctcaaaaatggaagttctcagctagrtgcagttcacgcctgtatccaagcattttgggagaccaaggtgggaagatcgtatgagcccatgttttcaagaccatactgggcaacatagggagacccc

SEQ ID NO: 10421 - DNA, 201 bp, Homo sapiens
tcttcctcagtacaatgtaaggactgtaaaaaaagagataatgtctgtcttgctttctgttgactcccaggaactcgaaaccagcaccaagaatagatggycaaaaatgatactttaatgaacaaataaatgggtggctaaaatggataagttgatgtggtaaaccagtgaaaaggaaactcacacaaaatctgcagttgc

SEQ ID NO: 10422 - DNA, 201 bp, Homo sapiens
atcttcctcagtacaatgtaaggactgtaaaaaaagagataatgtctgtcttgctttctgttgactcccaggaactcgaaaccagcaccaagaatagatgrtcaaaaatgatactttaatgaacaaataaatgggtggctaaaatggataagttgatgtggtaaaccagtgaaaaggaaactcacacaaaatctgcagttg

SEQ ID NO: 10423 - DNA, 201 bp, Homo sapiens
tcaattcttcaatctctacaatgatgcctgttgtgttggtgatctcatgtaatctctttactgacaatgtagccaagtgattcaacagacaggaataaggmtgattatccatttatattatttatttattcacgcatgttggcatatagcacattatgtaaatatttttccttcaaatgtcaaatgtacattttgaagtaa

SEQ ID NO: 10424 - DNA, 201 bp, Homo sapiens
tatcttcctcagtacaatgtaaggactgtaaaaaaagagataatgtctgtcttgctttctgttgactcccaggaactcgaaaccagcaccaagaatagatkgtcaaaaatgatactttaatgaacaaataaatgggtggctaaaatggataagttgatgtggtaaaccagtgaaaaggaaactcacacaaaatctgcagtt

SEQ ID NO: 10425 - DNA, 201 bp, Homo sapiens
cactgcattccggcctgggcaacagagcgagactctatctcaaatataaattaattaattaattaattgatttttcaacatgtggaccaggaatatgggayccctgaaaacaatatctgcgttggtgttctctaaatattttcaggcatgtctctttcttctgatattttatttctatttaatgtttaagtattttactat

SEQ ID NO: 10426 - DNA, 201 bp, Homo sapiens
agagaactcaaatcctctctttttgaaaaataaaatcaatgtaaatataatatataaattgtggaaaatatttcagtcaaactttttgtaaatgttaaaawagtatctatgaaatctgtgtattaattatgagatgagccttaacgttgtaattttgtcatcaatgatgaaatgaaagggtgttgacatattctttaatag

SEQ ID NO: 10427 - DNA, 201 bp, Homo sapiens
gggagaccaacgcaggcagatcactggaggccaggagtttgagactagcctgagcaacatggtgaaaccccatctctacttaaaaaaaaatacaaaaaaakttagccaggcatggtggccaatgcccgtaaacccagctactcaggaggctgaaggatttgaattgattgaacccaggaggcgaagtttgcagtgagccgg

SEQ ID NO: 10428 - DNA, 201 bp, Homo sapiens
agcagatgccttgtgtagttgcacggggtcttgtgcttgaggggctttttgcttggattaatgttctgcacttgcatttttatttttcagacagcggatamtcctccactgaagagggaatagttctgcagtaattccctaggggtttgctttctcctctcctacgggcttgatggagacaggcacagagtcctatgatgc

SEQ ID NO: 10429 - DNA, 201 bp, Homo sapiens
tcttgttaattagactttacatgaagtgagcaactaagcttttctgttacaagacttcatgcccacagatacattcaagtcccaggtggaaggatgatctrgatcaggcaaggtgctgaccatgggaacaggagacagtcaagggaatctgaggaagcacatgtttgtgtccaatatagtcccctccttgtgccactcaga

SEQ ID NO: 10430 - DNA, 201 bp, Homo sapiens
taaaaccatgtgtcgtgatgttgatatgattttgctggtggccacttcacaattagtgagacagacagcatggtggtcatcagatgcatgcacttggctcyccatacttttccagaagggttacaaggggaagccacaacaaatattagtccgtggaagagagaaaagggagaatgtatcctagctgtcttctgtcttcta

SEQ ID NO: 10431 - DNA, 201 bp, Homo sapiens
attattatgtagaacttaaaataagttaactccacatcatatatatatctatgtatctatatctatatctatagacatatatatatatatatatatatctmttgcttatcatacgtcctccctagtacaatgtaatcaccataaaaagagaggtcatatctgtctcgctttctcttgactcacaggacctaaaagccagca

SEQ ID NO: 10432 - DNA, 201 bp, Homo sapiens
ttcagaaattttagtacttctgctataggagataaggacttttttgaagacagtcgtaggaatgttatgttagtttacataatccgaagctagtaattcaragccttaagttcataatttttctttctccaagttttctagcacacttataagtcagcaacgaaccctattctacttatgttcactaaaatgttctatggc

SEQ ID NO: 10433 - DNA, 201 bp, Homo sapiens
tgttatgaaattttaacattattatgtagaacttaaaataagttaactccacatcatatatatatctatgtatctatatctatatctatagacatatatayatatatatatatatctcttgcttatcatacgtcctccctagtacaatgtaatcaccataaaaagagaggtcatatctgtctcgctttctcttgactcaca

SEQ ID NO: 10434 - DNA, 201 bp, Homo sapiens
ttttcaagatgatttatttattgcagaaattgatttgagtttgcttttcagaaattttagtacttctgctataggagataaggacttttttgaagacagtygtaggaatgttatgttagtttacataatccgaagctagtaattcagagccttaagttcataatttttctttctccaagttttctagcacacttataagtc

SEQ ID NO: 10435 - DNA, 201 bp, Homo sapiens; identical to SEQ ID NO: 992

SEQ ID NO: 10436 - DNA, 201 bp, Homo sapiens; identical to SEQ ID NO: 965

SEQ ID NO: 10437 - DNA, 201 bp, Homo sapiens
agataaccactggataagatacttggagttgtcaacatgcctagacagacttttcagttgttcttttgaaggcagctccaagagattccctgggtgacttyatctgcataataagacaacctttgttcacagtgaagttctggccctaaccttccctccacctcccgtagagctcagaggaaatttgtcctaggccattgc

SEQ ID NO: 10438 - DNA, 201 bp, Homo sapiens
tttagggacttggaaagtggcatggaggtggacctaggttgtgtttggtgttccttgtcttgcctgcatcatggttacttgaatgtttatgatacactgcrgtatttcccatttttgttttggttcatttctaagtgtgcattataattttaatgtaaaatgtttaattaggagatatgtctcatagaaattattattatt

SEQ ID NO: 10439 - DNA, 201 bp, Homo sapiens
ttccattatccccatctctttcaggtacaccagtgaatcataggtttggtcttttcacatagtccaatatttcttgaggctttgtttgttccttttcattsttttttctctaatctcatcttcatgcattatttcattaaattgatcttcaatgtctgatatcctttcttccgcttgattggttcacctattgatatttgt

SEQ ID NO: 10440 - DNA, 201 bp, Homo sapiens
tggcagaactgtttgataggaacgaaaatgtttttatgttaatataaaatttgtgcccacatgtatgaaggatttttctattaaaactctacaattaagcrgaagatgtgacacactgcaagaaatatggcaccatgaaactaactacaactgtatactattggggctcagaaaatgatactgaaaatatatcgctctttg

SEQ ID NO: 10441 - DNA, 201 bp, Homo sapiens
gttggccagtcttgctaagttgggtaagttctcctggataatatcctgaagagtgttttccaactttgttccattatccccatctctttcaggtacaccastgaatcataggtttggtcttttcacatagtccaatatttcttgaggctttgtttgttccttttcattgttttttctctaatctcatcttcatgcattatt

SEQ ID NO: 10442 - DNA, 201 bp, Homo sapiens
ctagctatatatccaagagaagtgcattaaatgacatgtaaaataatgcccatggtagtattatttgtaattgttctaaaaagaaacagctcaaatacctrtaaattaaggaaggattaataattatagcaaattcatataatggaacaatatagagaaattgaaagcaatgaaccacatgtacatgcaacaaagtggata

SEQ ID NO: 10443 - DNA, 201 bp, Homo sapiens
gcttgaacaaatgatttataaataatcttaaactcatcagaggctaactaccagaaatatttagtttttagtgtaaatagcatttgtataataagagagakaaagtcaataaaccattttataattaaactcttatttcaaaagagaggctttaaaagtcaatgaaccaaacagaaataagccctcacatcttcaatatca

SEQ ID NO: 10444 - DNA, 201 bp, Homo sapiens
tagtctgatgggcttctctttttggtgactcagcctttctgtctggctgttcttaacattttttccttcatttcaaccttggtgaatctgactattatgtrtttttgggtgctcttctcaaggagtatctttgtggtgttctctgtattccctgaatttgaatgttggccagtcttgctaagttgggtaagttctcctgga

SEQ ID NO: 10445 - DNA, 201 bp, Homo sapiens
  misc_feature (1)...(201): n = A,T,C or G, or insertion/deletion polymorphism (see Tables 1-2)
ccagcactgttgtttgaggtaacttttaccataattttaaaaatggaataaagggaaaaaatagctggtaaatcatgggaagtatgttggttttatattantcttcatgaagtagtaggtgaaaatattcttccaggttaagccctgatgcagagaatggtgtaagaatgataaggccatagggaagaattgttgttttct

SEQ ID NO: 10446 - DNA, 201 bp, Homo sapiens
catttaaggttaatattgttatgtgtgatttttttcctataattatgatgctagctggttattttgcttcattagttgatgtagtttcttcatagtgccartggtctttacaatttggtgtttttctgaagtggctggtactggtttttcctttccacatttagtgcttgcttcagaagctcttgtgaggcaggcctggtg

SEQ ID NO: 10447 - DNA, 201 bp, Homo sapiens
caccaagaatttgcagctcaactctctgggctcaagggactccagcacagaggcccataaaagggccatgaaaatggtgatagccttcctcctcctttttwttattaactttatttccactttaataggagattggatcttccttgaggtagagaattatcaggtcatgatgtttattatgatgattttacttgcctttcc

SEQ ID NO: 10448 - DNA, 201 bp, Homo sapiens
ttccaagattgccttggggtcaccttattccaggcagccaggagcagaaaaggtgcatggaggaggatgcatggcaaatttttatgggacgggcctggaartagtgcacataatttccactcacattacattgttcagcttttagtcacattgcatctgtaagagaggcttggaaatatagtctatatgcttagaaaaaag

SEQ ID NO: 10449 - DNA, 201 bp, Homo sapiens
acagggtctcaattcttcaatctctacaatgatgcctgttgtgttggtgatctcatgtattctccttactgacaatgtagtcaaatcagtcaacagacagkcataagggtgattatccatttatattgtttatttattcacatatcttggtatatagcacattatgtaaatatttttccttcaaatgtcaaatttacattt

SEQ ID NO: 10450 - DNA, 201 bp, Homo sapiens
aacagtaccagggtggatgctgtggcttaagcctgtaattgagcaccttgggaggcttaggcaggcagatttcttgagcccaattattggagaccaacctrggaaacatggtgaaacccagtctctagtaaaaatacaacaattagccaggtatagtggtgtccacctgtagttctagctacttgggaggccaaggtggga

SEQ ID NO: 10451 - DNA, 201 bp, Homo sapiens
gactctattcaatttgctggtctgtgccttttaattggggtatttttcccatttacatttaaggttaatattgttatgtgtgatttttttcctataattaygatgctagctggttattttgcttcattagttgatgtagtttcttcatagtgccagtggtctttacaatttggtgtttttctgaagtggctggtactggtt

SEQ ID NO: 10452 - DNA, 201 bp, Homo sapiens
tcagcttggtccagagctgagttcaagtcctaatatccttgttaattttctgtctcattgatctgtctaatattgactgtggggtgttaaagtctctcackattattgtgtgggagtctaagtctctttgtaggtctctaagaacttgctttatgcatctgggtgcccctgtattgggtgcacatatatttaggatagtta

SEQ ID NO: 10453 - DNA, 201 bp, Homo sapiens
ttagtcaccatagctaagaatgagaaaaagcatttgtgatagtttgctgagaatgccgtcattttttgataaagttttaagtactgttttactatttgatsttttaaagattgttaaaaactaagaagtgttgatttctgctaataaaaacagcttaaaatttatatcatggaatagaatggtggagctgtggcggagata

SEQ ID NO: 10454 - DNA, 201 bp, Homo sapiens
tttgagatgatgttatcctccaaccccagaactttccaatggatttcttctagccttaattatcgacctcacaagaacaaacctttgcaatttcccatctrtttttgcttttggctcctgaattcctgacacaacaaggttgtacatatttcccacactcttggtttagcagagttgatttatcagttatgtttttctgca

SEQ ID NO: 10455 - DNA, 201 bp, Homo sapiens
tatatccttaccttccatttatgaaattccttctaaacttcagataagagaactcaaatcctctctttttgaaaaataaaatcaatgtaaatataatatakaaattgtggaaaatatttcagtcaaactttttgtaaatgttaaaaaagtatctatgaaatctgtgtattaattatgagatgagccttaacgttgtaattt

SEQ ID NO: 10456 - DNA, 201 bp, Homo sapiens
ctaattatatccttaccttccatttatgaaattccttctaaacttcagataagagaactcaaatcctctctttttgaaaaataaaatcaatgtaaatatartatataaattgtggaaaatatttcagtcaaactttttgtaaatgttaaaaaagtatctatgaaatctgtgtattaattatgagatgagccttaacgttgt

SEQ ID NO: 10457 - DNA, 201 bp, Homo sapiens
catgctcttttctgtttttttcatacaaactgccaaattatacaaaatatgacaaaaatttcttagaattttgaagccatgtatatttcattcatgtattttatatttcatttgtagaatttatgatgtctatttataattattaagaagtaacagcttatcccaggataaatattgctcttttctattgttatttgaacc

SEQ ID NO: 10458 - DNA, 201 bp, Homo sapiens
acatgctcttttctgtttttttcatacaaactgccaaattatacaaaatatgacaaaaatttcttagaattttgaagccatgtatatttcattcatgtattttatatttcatttgtagaatttatgatgtctatttataattattaagaagtaacagcttatcccaggataaatattgctcttttctattgttatttgaac

SEQ ID NO: 10459 - DNA, 201 bp, Homo sapiens
aacatgctcttttctgtttttttcatacaaactgccaaattatacaaaatatgacaaaaatttcttagaattttgaagccatgtatatttcattcatgtattttatatttcatttgtagaatttatgatgtctatttataattattaagaagtaacagcttatcccaggataaatattgctcttttctattgttatttgaa

SEQ ID NO: 10460 - DNA, 201 bp, Homo sapiens
taacatgctcttttctgtttttttcatacaaactgccaaattatacaaaatatgacaaaaatttcttagaattttgaagccatgtatatttcattcatgtattttatatttcatttgtagaatttatgatgtctatttataattattaagaagtaacagcttatcccaggataaatattgctcttttctattgttatttga

SEQ ID NO: 10461 - DNA, 201 bp, Homo sapiens
tccacccattcatcctgatttggggaaacaagaagctaaagcagacttttctttcagttttgcggcaagtgaggtactgggtgaaaggagagaagccttcrtctccatagattcatgagaggggcattgtgtgtcttctagcagaaaacaaactggtggtgtatgaaacattttatatttcttactggtttttctatactg

SEQ ID NO: 10462 - DNA, 201 bp, Homo sapiens
aaagagataatgtctgtcttgctttctgttgactcccaggaactcgaaaccagcaccaagaatagatggtcaaaaatgatactttaatgaacaaataaatrggtggctaaaatggataagttgatgtggtaaaccagtgaaaaggaaactcacacaaaatctgcagttgcatgaattcccctgttccagtctcaggttaag

SEQ ID NO: 10463 - DNA, 201 bp, Homo sapiens; identical to SEQ ID NO: 1001

SEQ ID NO: 10464 - DNA, 201 bp, Homo sapiens; identical to SEQ ID NO: 1003

SEQ ID NO: 10465 - DNA, 201 bp, Homo sapiens; identical to SEQ ID NO: 1004

SEQ ID NO: 10466 - DNA, 201 bp, Homo sapiens
caaatcctctaaacaaattctcccactttcagttccaatttctgtgttagactgggtagacaaactgcatcacaaatagctccaaaatgtaaaacgtttcraacaatatgatttaattttgttcttttaatggtactgatatgtctgagtaaccttccctatgtagttattcactaaaataggctgatcacttggtgacct

SEQ ID NO: 10467 - DNA, 201 bp, Homo sapiens
gcagaagacgccgtacgaggtgggtgtcgcggcggggcttgaggctctgacggccaaggaggacggagccgccgcgggggccatgagccaggtgtcgccgsccgcccagcgtctgtagcgagggttgccgcagggcccgcggacctcctagcgacggctgggaccggcaggacggtaagcaaagcggctcccgggctcaca

SEQ ID NO: 10468 - DNA, 201 bp, Homo sapiens
tgcgcagctgccaggccagctcgaagaaggcgagcagggtgcgggagagccccttgcagaagacgccgtacgaggtgggtgtcgcggcggggcttgaggcyctgacggccaaggaggacggagccgccgcgggggccatgagccaggtgtcgccggccgcccagcgtctgtagcgagggttgccgcagggcccgcggacct

SEQ ID NO: 10469 - DNA, 201 bp, Homo sapiens
aaactatggatcacaattgaatgaaacattctgcaaatattgaaaattatctgtctaatctatatattgatgataggaaatgtattaatcatatgtttcaytgtgggtgggcagtgagctgaggctcctcaagcatctctttctatttttattttgtttcttgacataggttctccagcatttggctcaaggccccaaggg

SEQ ID NO: 10470 - DNA, 201 bp, Homo sapiens
aagaaaaaacaacaacaaaaaattagtttggcatggtggtgctcacctgtagtcccagttatccaggaggctgaggcaggatactcccttgaacctaaaarcaatatgtgagtcagttgctggccacatccagagtactgttaacaagagtgatgcctggtagaaaagtaatgaatttattccaaacctagcttggggaag

SEQ ID NO: 10471 - DNA, 201 bp, Homo sapiens
aatgagttaaggagtagtccctctttttccagtgttttgaatagtttcagaaagaatggtaccatctcctctttgtacctctggtagaatttggttgtgartatgtctgttcctggactttttttggttgctaggctattaattactgtctcagtttcagaacttgttattggtctattcagggatttgacttcttcctgg

SEQ ID NO: 10472 - DNA, 201 bp, Homo sapiens
tcccagggttgaagacgacttgatcttggtggataagcctttttatatgctgctggatttggcttgccagtattttattgaggattttcgcatcgatgttyatcaaggatattggcctaaaattttctctttttgctgtgtctctatcaggttttggaatcaggatgatgctggcctcataaaatgagttaaggagtagtc

SEQ ID NO: 10473 - DNA, 201 bp, Homo sapiens
tgttctgtcttacatcatccagtcccttggtggtggtcatgaaagtcagacctcatgcccacagtgtggtgatgcattcaagtcccaaatagaaggatgayctggatcaggcaaggtgctggccaggggaattggacatagtgaagagaatctgagaaagcacatgtttgtgtccagtaccgccactccttgtgccactga

SEQ ID NO: 10474 - DNA, 201 bp, Homo sapiens
ccaggtccactttctggaggtaaaaattctgtggcgggtgtgctttggtctgcaaattgactgtcagttctcaggagaatctgtcttggagcactaagttwgaaaatgtgccctgtagggaatgtctagtgagtgggagtgaaaggttatatttgcatttatgaagggctaagcaggatacagggaacaaagagaaagggg

SEQ ID NO: 10475 - DNA, 201 bp, Homo sapiens
ggaatttccaggtccactttctggaggtaaaaattctgtggcgggtgtgctttggtctgcaaattgactgtcagttctcaggagaatctgtcttggagcastaagtttgaaaatgtgccctgtagggaatgtctagtgagtgggagtgaaaggttatatttgcatttatgaagggctaagcaggatacagggaacaaagag

SEQ ID NO: 10476 - DNA, 201 bp, Homo sapiens
ttttaatctcttctgtgacctaagtattacaaaaagaagaaaatcactacaattttcatgtcaggtgtgctaaaaatttataaaaactattttttaagaasttggtgttataaatactttgtttagtttctccattaaaaatgatttatagcaagagaataaaagttcatttctacccctaaaacaataagataaaaaaga

SEQ ID NO: 10477 - DNA, 201 bp, Homo sapiens
acatgccatggttatttctggcttgacactggtcacaacaattaaaagtaaaaagaatgtcacagcacattcacaaatcaggtgcatatagaatttaaggycaggatattcaagcaatcacacccagttatattacattgagagatgaagcgagctatactttctgaatcgagtggggacttggagaacgtttctgtagct

SEQ ID NO: 10478 - DNA, 201 bp, Homo sapiens
tcattttttattttggaaattacaagaaaataatttgttccattcataagtggtgtgcacatgtgtatatttgtgtgcatatttatgagtttgtgaataaygaagttatacgaaagtgttagcagcaaccagatcttatggagtagtggcctgcctgtggttctcaagaaaatctgagatgcctttgataaaagcagttag

SEQ ID NO: 10479 - DNA, 201 bp, Homo sapiens
aattgctaaatattttttataataatatttaaacattagacttgagagaaactttaccaagtcctaagaattagagataatgtttttgataaataaatatkattcatgggctgaaaaccctgagtgggaaaataggactaatttcatctgcacagcctcttggaaactcattttttattttggaaattacaagaaaataat

SEQ ID NO: 10480 - DNA, 201 bp, Homo sapiens
tggatggctgtggtgatttgagatgggccaaattctacatcttggaggacgttagagttttgccaatttaatctggatcaggtggcagcaatctcacgtcwttagtttctcattcttcttctgggaacagtgtactagataggccatactcttatggtaaatggaaagaagaagaatccccagtatggaagccatctcaaa

SEQ ID NO: 10481 - DNA, 201 bp, Homo sapiens
acctccgcctcccgggttcatgccattctcctgcctcagcctcccgagtagctgggaatacaggtgcacaccaccatgccctgctaatttttgtatttttrgtagagatggggtttcaccatgttggccaggatggtctccatctcttgacctcgtaatctgccttcctcaacctcgcctgcgctgggcctggattttatt

SEQ ID NO: 10482 - DNA, 201 bp, Homo sapiens
attgagctgttttgggaattattgtgttctccataaagacagcctcaaactcatccattagcacaccctggtgctttcctgtttgacactggtcagagaaygtaaaaggaaaaagaacattactgcacattcagaaatcaggtgcacatagaatttaaggtcaggaccttacagagaatcttgtccagtgataatacgcct

SEQ ID NO: 10483 - DNA, 201 bp, Homo sapiens
ttgttttgttttgttttgttttgttttttgacagagtcttgctgtgtcgcccaggctggagtgcagtggcataatctcagttcactgcaacctccgcctcycgggttcatgccattctcctgcctcagcctcccgagtagctgggaatacaggtgcacaccaccatgccctgctaatttttgtatttttagtagagatggg

SEQ ID NO: 10484 - DNA, 201 bp, Homo sapiens
agcatgaaaaatttcatcttatagccaggacatagtgtttgaatagaaatttaattgagctgttttgggaattattgtgttctccataaagacagcctcaractcatccattagcacaccctggtgctttcctgtttgacactggtcagagaatgtaaaaggaaaaagaacattactgcacattcagaaatcaggtgcaca

SEQ ID NO: 10485 - DNA, 201 bp, Homo sapiens
ccaaagtattacaaaaagaaaaatatggttaccattttcatgtcaggtatactaaaagtttaaaaaaactctttttttaataacttggttttaggaatacytggtttagtttctccgttagaaaaatgatttatataaggagaacaaaagttcatttctacttctaaaacaataagacaaaaacaaaaagagtaatcaatt

SEQ ID NO: 10486 - DNA, 201 bp, Homo sapiens
aattacgtgttgggttttaaaatttccataacaactgacattgctgaacacaaattatggagaggttaaacaaggaaaaatattgcaaaacaatgaaggaraatatgtctgtatttgcatgctagcaaatgagaattcacctttcacttcaacaacagcatgaaaaatttcatcttatagccaggacatagtgtttgaata

SEQ ID NO: 10487 - DNA, 201 bp, Homo sapiens
cattcgactgtatttaatactatttgattcatttataatggtattgtcccctcatctatataccatccgtaaactagtaaaactgtttactattctttggkcattaattaatcagttaagtatctagtttgccacctgcctaagcattttctacttgcttaagatagccaatttctcccacttatttttttgcctggctga

SEQ ID NO: 10488 - DNA, 201 bp, Homo sapiens
ttgaccaaagtattacaaaaagaaaaatatggttaccattttcatgtcaggtatactaaaagtttaaaaaaactctttttttaataacttggttttaggamtacttggtttagtttctccgttagaaaaatgatttatataaggagaacaaaagttcatttctacttctaaaacaataagacaaaaacaaaaagagtaatc

SEQ ID NO: 10489 - DNA, 201 bp, Homo sapiens
tacataaatctgacattgaaaaaataaattcacagtggtcatgattctggttatgaccaagttccatatgacagtttagacatccaatgtaggaattacgwgttgggttttaaaatttccataacaactgacattgctgaacacaaattatggagaggttaaacaaggaaaaatattgcaaaacaatgaaggaaaatatgt

SEQ ID NO: 10490 - DNA, 201 bp, Homo sapiens
ggtgggtggatcacgaggtcaggagatggagaccatcctggcgaacacagtaaaaccctgtctctactaaaaatacaaaaaattagccaggcgtggtggcrggctcctgtagtcccagctactccggaggctgaggcaggagaatggcgtgaacccgggggacagagcttgcagtgagccgagatcgcgccactgcactcc

SEQ ID NO: 10491 - DNA, 201 bp, Homo sapiens
tctacataaatctgacattgaaaaaataaattcacagtggtcatgattctggttatgaccaagttccatatgacagtttagacatccaatgtaggaattaygtgttgggttttaaaatttccataacaactgacattgctgaacacaaattatggagaggttaaacaaggaaaaatattgcaaaacaatgaaggaaaatat

SEQ ID NO: 10492 - DNA, 201 bp, Homo sapiens
ggccgaggtgggtggatcacgaggtcaggagatggagaccatcctggcgaacacagtaaaaccctgtctctactaaaaatacaaaaaattagccaggcgtkgtggcgggctcctgtagtcccagctactccggaggctgaggcaggagaatggcgtgaacccgggggacagagcttgcagtgagccgagatcgcgccactg

SEQ ID NO: 10493 - DNA, 201 bp, Homo sapiens
ttaatgagcttgttaagaataaagttatacaaaagtattagttagcagcaaccagattttaaggaatgttggccttcctgggcttcccaagaaaaccttgragtcttttaataagaaaactttggattctgtctacataaatctgacattgaaaaaataaattcacagtggtcatgattctggttatgaccaagttccata

SEQ ID NO: 10494 - DNA, 201 bp, Homo sapiens
aatattgaaaatgggctgaaaacatgattgggaaattagggctatttcaacttggatgacctgcctgaaattcattttccattttggaaattacaggacamtaattcctcccatccatgaggagcatgtatgtgtgtgggcacataagtttgtgttaatgagcttgttaagaataaagttatacaaaagtattagttagca

SEQ ID NO: 10495 - DNA, 201 bp, Homo sapiens
acttactcaaaagcctaagcatgagacacaagtttataaatattgaaaatgggctgaaaacatgattgggaaattagggctatttcaacttggatgacctrcctgaaattcattttccattttggaaattacaggacaataattcctcccatccatgaggagcatgtatgtgtgtgggcacataagtttgtgttaatgagc

SEQ ID NO: 10496 - DNA, 201 bp, Homo sapiens
tcaagaaaatgacttactcaaaagcctaagcatgagacacaagtttataaatattgaaaatgggctgaaaacatgattgggaaattagggctatttcaacktggatgacctgcctgaaattcattttccattttggaaattacaggacaataattcctcccatccatgaggagcatgtatgtgtgtgggcacataagtttg

SEQ ID NO: 10497 - DNA, 201 bp, Homo sapiens
aagatcgtatgagcccatgttttcaagaccatactgggcaacatagggagaccccatttctacaaaaaaactgaaaaattagctggctgtgttggtgcacrcccatagtcacagctactccagaagctgaggtgggaggatctcttgagcccaggagtacaaagctgaagtgaactaccactgcactccagcctaggcgac

SEQ ID NO: 10498 - DNA, 201 bp, Homo sapiens
tgttcttttggcttaggattgtcttggcaatgcaggctcttttttggttccatatgaactttaaagtagtttttttccaattctgtgaagaaagtcattgktagcttgatggggatggcattgaatctataaattaccttgggaagtatggccattttcatgatattgattcttcctatccatgagcatggaatgttcttc

SEQ ID NO: 10499 - DNA, 201 bp, Homo sapiens
tttcttgttttggtcaggtttgccaaagatcagatggttgtagatgtgtcatattatttgtgagggctctgttctgttccattggtctatatctctgtttwggtaccagcaccatgctgttttggttactatagccttgtagtatagtttgaagtcaggtagcgtgatgcctccacctttgttcttttggcttaggattgt

SEQ ID NO: 10500 - DNA, 201 bp, Homo sapiens
aggtgtaaggaatggatccagtttcagctttctacatatggctagccagttttccagcaccatttattaaatagggaatcctttccccatttcttgttttkgtcaggtttgccaaagatcagatggttgtagatgtgtcatattatttgtgagggctctgttctgttccattggtctatatctctgttttggtaccagcac

SEQ ID NO: 10501 - DNA, 201 bp, Homo sapiens
ctccagtacttagaaacaagcctgaaatcacactgatcaaatagcattctccctttcacctgccatcatcattatcatcatcgtctatatcttcatctatmtcatgaagtggtttgtttttgaaatatttaaatacataatttggaaaataagtaattttaaaaagatcatcattgtgggaaagttacaatagtaaacagc

SEQ ID NO: 10502 - DNA, 201 bp, Homo sapiens
gttggttttacattattcttgatgaaataccatgtgagggtacttgtctaggcctaatgctgagaatcatagaagaatcatgaggccatgaggaagaatartagtgttctctcatcacgctgagctccagtacttagaaacaagcctgaaatcacactgatcaaatagcattctccctttcacctgccatcatcattatca

SEQ ID NO: 10503 - DNA, 201 bp, Homo sapiens
caaataaatcgttgaaaatatgttggttttacattattcttgatgaaataccatgtgagggtacttgtctaggcctaatgctgagaatcatagaagaatcrtgaggccatgaggaagaatagtagtgttctctcatcacgctgagctccagtacttagaaacaagcctgaaatcacactgatcaaatagcattctcccttt

SEQ ID NO: 10504 - DNA, 201 bp, Homo sapiens
tcattacagcctcaaccttctgggctcaagtgattctcccacttccgcatttctagcagctgggactgcaggggtacaacaccttgcctggctaattttgktatttcctgtagggctaggatttcaccatgttacccaggctggtctcaaactcctgggctgaagtgatctgtctgtgtcggcctccaaaagtgctgggat

SEQ ID NO: 10505 - DNA, 201 bp, Homo sapiens
ggcttgctaatgatgctattaaaagataaactaaagttgatatactgtattattgcatagactatttgtccatgtttgtattcaaaaatgccaaaaaaaawcccaaaatagaatcctaattgttggaggtcgtgtttcttatcgaattttaaaatgtagtaaaagaaaaaaaagcaaataaatcgttgaaaatatgttggt

SEQ ID NO: 10506 - DNA, 201 bp, Homo sapiens
aaaacatatttagcatgatctttgagtatgtttgtgcatatataattctactttgactgctatagtaaaatgatccagatttagtcaccatagctaagaakgggaaaaagcatttgcaagaatttggcttgctaatgatgctattaaaagataaactaaagttgatatactgtattattgcatagactatttgtccatgtt

SEQ ID NO: 10507 - DNA, 201 bp, Homo sapiens
gtgatctggtcactgggtattttcagatatattttaggactggtttttcactttttgcaaaacaggcttgttgggatttgatagggattgcactgagtatrtaagttgacccttcacctgcaaagactctccttgtgctggatttcagttcagctggccctccttgcttgtacaactctgtgatgaattgaatatataatt

SEQ ID NO: 10508 - DNA, 201 bp, Homo sapiens
tattcacatgtacacctgtaagttgggttaaatattttgttactataaattttttggctctacattagagaaaaataccatagaaaggcaaattttttaasgtataaaacatatttagcatgatctttgagtatgtttgtgcatatataattctactttgactgctatagtaaaatgatccagatttagtcaccatagcta

SEQ ID NO: 10509 - DNA, 201 bp, Homo sapiens
catttttgaaatcaattaccatcaatgtcagtgttaatttctggactctcagttgtgtttcattgttcttttgtctactgtaatgccagtaccacagaatyctgattagtgcagctttgtagttagctttgaaaccagaaagtgtaatcctccaaatgtgttattttatcaagatttattttggtgatctggtcactgggt

SEQ ID NO: 10510 - DNA, 201 bp, Homo sapiens
tgtttctgttgtgttattactctctatgtgtatgttatgctccacaataaaaaatgttaaaaaagcagaaacataaagtatatttctaagtataaaattarggtgatacagcatattctcatagataccattgtaattagagtttttgctgaataaaggagaatagagcattatggtactaagaaatccaaattaaaattt

SEQ ID NO: 10511 - DNA, 201 bp, Homo sapiens
atggtgtgaaataagaatagaaatttatctttatgcatgtggatattcaatgttctcagtatcatttgttgaaaaaatgattaattcctattgaactgcartggtaccatttttgaaatcaattaccatcaatgtcagtgttaatttctggactctcagttgtgtttcattgttcttttgtctactgtaatgccagtacca

SEQ ID NO: 10512 - DNA, 201 bp, Homo sapiens
gttgagaagtcctccaaatgtctatcagtcctccaaatgaataaacaaattgtggcatacttatacaatggaatactatacagtgatcaaaattaacaaasaagactgacatgtttacaacagaataatacaacagagaaaatgaacaaatttgagctacataaataataatacagatatgagaagaattatcaagatgga

SEQ ID NO: 10513 - DNA, 201 bp, Homo sapiens
actttttacatttagctctataatcaattaaatatgagttattttttgtgtatggtgtgaaataagaatagaaatttatctttatgcatgtggatattcartgttctcagtatcatttgttgaaaaaatgattaattcctattgaactgcagtggtaccatttttgaaatcaattaccatcaatgtcagtgttaatttctg

SEQ ID NO: 10514 - DNA, 201 bp, Homo sapiens
ttatactcttatcagaatacatatacattcacatgcatatcactgagtttcaatagctaaagttgagaagtcctccaaatgtctatcagtcctccaaatgrataaacaaattgtggcatacttatacaatggaatactatacagtgatcaaaattaacaaacaagactgacatgtttacaacagaataatacaacagagaa

SEQ ID NO: 10515 - DNA, 201 bp, Homo sapiens
gtatggcattatctgattaagatgaaggatcacatcctaagacccagcatttatactcttatcagaatacatatacattcacatgcatatcactgagtttyaatagctaaagttgagaagtcctccaaatgtctatcagtcctccaaatgaataaacaaattgtggcatacttatacaatggaatactatacagtgatcaa

SEQ ID NO: 10516 - DNA, 201 bp, Homo sapiens
caattcttaacacgttgctgcatcaattcaaatgtctgaagtccaaagtctcatttgagactggaagtcaagttccttccagctatgagcctgtgaaatamaaaacaatttatttccttccaagatacagttgttgtacaggcattggatagacattctcattccaaaagggagaaatcagccacaagagaggagcagtag

SEQ ID NO: 10517 - DNA, 201 bp, Homo sapiens
gtcctgaatattcttgtggtgaattttcagcatccttttcaaggggacttacactttccttcaattattgaattcttgttctcggaattggctcagtcctkacaacaggttgaggttctttgattttccacttcaaaggctgacctcaggaatcagtttttcagcctttgaagtgaaaaggcttgctcttggtttataagt

SEQ ID NO: 10518 - DNA, 201 bp, Homo sapiens
atcccaatatgagttctgatggggacaaacaaaccgtgtacaaaccatagcattctgacttggtcccctgaaaactcgtgtccttctcacataaaaaaaaatgtaatctttccatcccaacaatagtcccccaattcttaacacgttgctgcatcaattcaaatgtctgaagtccaaagtctcatttgagactggaagtca

SEQ ID NO: 10519 - DNA, 201 bp, Homo sapiens
gcttgcatgaggcattcttcccttttttggtggaatgcccccagaaggttgttttctaccgttttctctcttaacacgtatgcctcagcctactcgccctmttcctgagctgctgactagcaattttaagcatctttacttattgtgaaattgcctctccctggtgcctgtgagcaattatcatttttagagaggcagtgt

SEQ ID NO: 10520 - DNA, 201 bp, Homo sapiens; identical to SEQ ID NO: 4302

SEQ ID NO: 10521 - DNA, 201 bp, Homo sapiens; identical to SEQ ID NO: 4311

SEQ ID NO: 10522 - DNA, 201 bp, Homo sapiens
ccagtaccatgctgttttggttactgtagacttgtagtatactttgaagccaggtagtgtgatgcctcctgctttgttctttttgcttaggattgtcttgrctacacgggctcttttttggttccatgtgaatttctaagtagtgttttccaattctttgaagaaagtcaatggtatgaaatgtttttccatgtgtttgtg

SEQ ID NO: 10523 - DNA, 201 bp, Homo sapiens
ttagccctttgtcagatgggtagattgtaaaaattttctccttctgtaggttgcctgttcactgtgacggtagtttcttttgctgtgcagaagctctttaktttaattagatcccatttgtcaattttggcttttgttgccattgcttttggtgttttagccatgaagtccttgcccatgcctgtgtcctgaatggtattg

SEQ ID NO: 10524 - DNA, 201 bp, Homo sapiens
aatttgtttaagttctttgtagattctggatattagccctttgtcagatgggtagattgtaaaaattttctccttctgtaggttgcctgttcactgtgacrgtagtttcttttgctgtgcagaagctctttattttaattagatcccatttgtcaattttggcttttgttgccattgcttttggtgttttagccatgaagt

SEQ ID NO: 10525 - DNA, 201 bp, Homo sapiens
ttcccttttatatagatataacctggcccctgaactttgaagcttctattattttccttttagacttcagtttgagatactttcacagttttcaaaaaccwattaaaaagtgaaaatgatctcttgaacaacagttctttttttaaacatctcgtatttttggctttttgtttttttgagacagggtcttgctctgcagcc

SEQ ID NO: 10526 - DNA, 201 bp, Homo sapiens
agcttcccttttatatagatataacctggcccctgaactttgaagcttctattattttccttttagacttcagtttgagatactttcacagttttcaaaamccaattaaaaagtgaaaatgatctcttgaacaacagttctttttttaaacatctcgtatttttggctttttgtttttttgagacagggtcttgctctgca

SEQ ID NO: 10527 - DNA, 201 bp, Homo sapiens
agattcactttgggatggacatgagtcaaaactctaggtagcatctaaccttcaaaaactcccagtgcaggctgggtatgacggctcatgcttgcagtctycacactttggtaggcacagttgggaatatctattgaggccaggagttccagaccaccctgggcttcatggtgagagcctgtctgtacaaaaactaaaaaa

SEQ ID NO: 10528 - DNA, 201 bp, Homo sapiens
gtacaacaccttgcctggctaattttggtatttcctgtagggctaggatttcaccatgttacccaggctggtctcaaactcctgggctgaagtgatctgtytgtgtcggcctccaaaagtgctgggattacagtcatgtgccacagggcccggtttgtaatattactaatatattaaattagcacgatgttttaaaaaatg

SEQ ID NO: 10529 - DNA, 201 bp, Homo sapiens
ttgacataatgattgattaaaggaagtatctccagtataagtacacttgcttataacaaaagagtatttgaaattgacattacttattttggaaaggataygacacaatgggaattttcatacaccactcctagaattataaatctgtgacatcatttcggccgagtatggcattatctgattaagatgaaggatcacatc

SEQ ID NO: 10530 - DNA, 201 bp, Homo sapiens
ttttaagagttgttcaacaatcctgaaatatcccttacagtatgctgttaactaattatattttttcaaagtcatttgacataatgattgattaaaggaartatctccagtataagtacacttgcttataacaaaagagtatttgaaattgacattacttattttggaaaggatatgacacaatgggaattttcatacacc

SEQ ID NO: 10531 - DNA, 201 bp, Homo sapiens
gactacattaattcttggtgttatgaagttttaacaatgttatttaatgttatttaaaccttaagataaatcatccccacacctgatttatgtaatttttkaatcatatatcttcctcagtacaatgtaagaactgtaaagaaagagatcatgtctgtcttgctttctgttgattcccaggacctagaacccagcaccaag

SEQ ID NO: 10532 - DNA, 201 bp, Homo sapiens
caataagttatacaaaagtattagtagccaccaggatttaaggattattggcctttctgaggttcccaagaaaaccttaaatgcttttggtaggaaaagaygggattcattctacatattactggcgttgaaaatataaatctactttggtgatgatcctagttatgcccaagctccctttaccaggtaataaaaccaatg

SEQ ID NO: 10533 - DNA, 201 bp, Homo sapiens
gttatgttgtagtctgctattctttctttccttccttcctatttttcattagtgaaggttattttctctggtgatatgatatagtttcttgctttttattkttttgtgtatccattctatgctgttaggtttgagattaccatgaggcttgcaaatgctatcttctaacccatcatttcaagctaataaccacttagtact

SEQ ID NO: 10534 - DNA, 201 bp, Homo sapiens
tgaccttctttatgtcctcatagtttttgtcttgaaaactattttgtctaatattagtataggtactctacttttttgttttgttttttttttttttttttggtttgccttgacatggaatatctttttccatccctttattttctctctgtgcatgtctttataggcaaagtgtgtttcttagaggcaacagattggagt

SEQ ID NO: 10535 - DNA, 201 bp, Homo sapiens
tgattgaacccaggaggcgaagtttgcagtgagccgggattgcaacactgcattccggcctgggcaacagagcgagactctatctcaaatataaattaatwaattaattaattgatttttcaacatgtggaccaggaatatgggacccctgaaaacaatatctgcgttggtgttctctaaatattttcaggcatgtctctt

SEQ ID NO: 10536 - DNA, 201 bp, Homo sapiens
gtgaccttctttatgtcctcatagtttttgtcttgaaaactattttgtctaatattagtataggtactctacttttttgttttgttttttttttttttttttggtttgccttgacatggaatatctttttccatccctttattttctctctgtgcatgtctttataggcaaagtgtgtttcttagaggcaacagattggag

SEQ ID NO: 10537 - DNA, 201 bp, Homo sapiens
gaattgattgaacccaggaggcgaagtttgcagtgagccgggattgcaacactgcattccggcctgggcaacagagcgagactctatctcaaatataaatwaattaattaattaattgatttttcaacatgtggaccaggaatatgggacccctgaaaacaatatctgcgttggtgttctctaaatattttcaggcatgtc

SEQ ID NO: 10538 - DNA, 201 bp, Homo sapiens
atagattttggtatgttttgtttccactatcatttgtttctagcaattttccatttccttttaaatttatttgttgacctactggtcattcaggagcataytgtttcatttccatgtgtttatatagtttccaaaattattcttgttattgatttctagttttatcccattgtggccagagttgatgcttggcaatatttc

SEQ ID NO: 10539 - DNA, 201 bp, Homo sapiens
atttagccaggcatggtggccaatgcccgtaaacccagctactcaggaggctgaaggatttgaattgattgaacccaggaggcgaagtttgcagtgagccrggattgcaacactgcattccggcctgggcaacagagcgagactctatctcaaatataaattaattaattaattaattgatttttcaacatgtggaccagg

SEQ ID NO: 10540 - DNA, 201 bp, Homo sapiens
tttttattatttgtgttctactaattttgggtttgggttacttttgtttttctagttctttaagatacacaattaggttgtttatttgaatttttcttcttttctgatgtaggcttttatagctgtaaatttccttcttagtattgtttttgctgtatttcatagattttggtatgttttgtttccactatcatttgtttc

SEQ ID NO: 10541 - DNA, 201 bp, Homo sapiens
atttttattatttgtgttctactaattttgggtttgggttacttttgtttttctagttctttaagatacacaattaggttgtttatttgaatttttcttcttttctgatgtaggcttttatagctgtaaatttccttcttagtattgtttttgctgtatttcatagattttggtatgttttgtttccactatcatttgttt

SEQ ID NO: 10542 - DNA, 201 bp, Homo sapiens
aatttttattatttgtgttctactaattttgggtttgggttacttttgtttttctagttctttaagatacacaattaggttgtttatttgaatttttcttcttttctgatgtaggcttttatagctgtaaatttccttcttagtattgtttttgctgtatttcatagattttggtatgttttgtttccactatcatttgtt

SEQ ID NO: 10543 - DNA, 201 bp, Homo sapiens
aactgttgcaatcatgtatccttcattccactcattcatcctgattatgggaagtaggaagctaaaacagacctttctttcagttttgtggcagatgacaygctgagtgaaagaagagaaaccctcaactccatagattcacaaggggagcatcgtgggtcttctagcagaaaacaaactgatggtgtctggaacatttta

SEQ ID NO: 10544 - DNA, 201 bp, Homo sapiens
taagtgtgcagtctagctatatgataaaaattattaattaggagaaatggtccatgaaaattattattactctgctcattatatactgaagggaaaaatcmactatttgtatacattcatgtgtaactctaagagattttaagtagaaactttctgattttagttgcaactttaggaaacttgacatgatgttacctgcca

SEQ ID NO: 10545 - DNA, 201 bp, Homo sapiens
tgggcatattagtttaccttatcagtaaacaggtatgggaagtttaggaatttcttttttttaaatgtatttttaagttttgtggatatatagtaggtctrtattgagtacacgggatgtgttgatacaggcatgcaaagagtaataatcacataagaatggggtagccatcccctcaaacatttactcttttttgttaca

SEQ ID NO: 10546 - DNA, 201 bp, Homo sapiens
ctaatgccaaactagaaaaaaagtacgtttccttttggacactgatcagtactcaaccctttggtttgctatctgcctgataatttttggaggtgggggtrgttcacaatagctaatttttctcagccatttttcctttggataaagtgtagaattaattatgtgaatattatgattctgatggagtccttggtttattaa

SEQ ID NO: 10547 - DNA, 201 bp, Homo sapiens
tctgaaattcgtcaggtgttttaggatgcacactttcttagatcttttcgagggtcttaactgcagttctgtttccggaatggcgtattttctttctaggrattgtaggctcccggccgccccctgaggagctccgctagcagctaagagggcagccacgaagagcgcctgagcactctcgcgagactgtggggctcgcca

SEQ ID NO: 10548 - DNA, 201 bp, Homo sapiens
cttggtttagcagagttcttttatcagttatgtttttctgcaagagaagaccctctaaaacattagacatatatatctcacatgtctttggatttcatttktgtgtgtgtgtgttttctgttttttgagatggagtctcactctgttgcccaggctggagtgcagtggcactatcttggctcactgcaacctccacctcca

SEQ ID NO: 10549 - DNA, 201 bp, Homo sapiens
ggttttattctcttctttgaccaaagtattacaaaaggaagaaaatcattaccattttcatgtcaggagggtggcatggagatggacttagcctattttcrgtgttccatctcttgccctttataagggttagttgactgtttatgatacattccggtatttcccatttttgttttggttcatttctaagtgtgcattata

SEQ ID NO: 10550 - DNA, 201 bp, Homo sapiens
gttaatccactttcttagtgctaatatgaatttgaaacatcaaaatttgaatatccatgattgatagacaccttttttcttatttccaatttaattatttwtgatacacatttgaaagtgtaagaaattcaggaatttacaataaattatagtacgatggatattaaatatattaaattaaatgtattaaaaatgtgtctc

SEQ ID NO: 10551 - DNA, 201 bp, Homo sapiens
gtacaatagaacactatacagcaatcaaaatgaaccaactagagagacaagtttacaaagaatataaataaaaaggaaaatgaacgtatttggacaacatygatatgagaggaattattaaaattgaaaaaagattcagtataattccatttatataaagtttacaaaaaatatttttaataaattacaatttattacatt

SEQ ID NO: 10552 - DNA, 201 bp, Homo sapiens
tgttcatactagtcactaatatttctttgaatttctgttgtatcagttgtaatatctccattttcatctctgattttattaatttggatctttttttcttrgtctgcctaaacgtttgtcaatgttgtttaacttttcaagaaaacaagtttttgtttcattgatcttttgtattgttttcttcatttcaatttcatttat

SEQ ID NO: 10553 - DNA, 201 bp, Homo sapiens
aggcaggagaatggcgtgaacccgggaggtggcgcttgcagtgagtggagagcatgccactgaactccagcctgggtgacagagtgagactctgcctcaaaaaaaaaaaaaaaaaaaaaaaagaatgagcctggaagtagtccctctttctctattttttcagaagagtttgagtaggattggcatcagttctttaaatgt

SEQ ID NO: 10554 - DNA, 201 bp, Homo sapiens
caagactgacatgtttacaacagaataatacaacaaagaaaatgaacaaatttgagctacatagataataatactcacagatgtgagaggaattatcaagrtggaaaaatacatttactgtaatctcatcgacgtaaagtttgaaaaactttatttttaatacattgtcattcattacattggtgataaaaccctacagtg

SEQ ID NO: 10555 - DNA, 201 bp, Homo sapiens
gaggcaggagaatggcgtgaacccgggaggtggcgcttgcagtgagtggagagcatgccactgaactccagcctgggtgacagagtgagactctgcctcaaaaaaaaaaaaaaaaaaaaaaaagaatgagcctggaagtagtccctctttctctattttttcagaagagtttgagtaggattggcatcagttctttaaatg

SEQ ID NO: 10556 - DNA, 201 bp, Homo sapiens
tgaggcaggagaatggcgtgaacccgggaggtggcgcttgcagtgagtggagagcatgccactgaactccagcctgggtgacagagtgagactctgcctcaaaaaaaaaaaaaaaaaaaaaaaagaatgagcctggaagtagtccctctttctctattttttcagaagagtttgagtaggattggcatcagttctttaaat

SEQ ID NO: 10557 - DNA, 201 bp, Homo sapiens
ctgaggcaggagaatggcgtgaacccgggaggtggcgcttgcagtgagtggagagcatgccactgaactccagcctgggtgacagagtgagactctgcctcaaaaaaaaaaaaaaaaaaaaaaaagaatgagcctggaagtagtccctctttctctattttttcagaagagtttgagtaggattggcatcagttctttaaa

SEQ ID NO: 10558 - DNA, 201 bp, Homo sapiens
gtgccactgcactccagcctgggtgacagggagactatgtctcaaaaaaaaaaaaaaaaattaatgacaatgaaaactaagtgtgtaattctaaataaatkttgactatataaaacaatagtgtcttcttggattgaatgtataattgataagatatatgcaaatagcaataaagaggctggagataaaggtaacaggaat

SEQ ID NO: 10559 - DNA, 201 bp, Homo sapiens
ccccgtctctactaaaaatacaaaaatttagccgggcgtggtggtgggcgcctgtagtcccagctactcgggaggctgaggcaggagaatggcgtgaaccygggaggtggcgcttgcagtgagtggagagcatgccactgaactccagcctgggtgacagagtgagactctgcctcaaaaaaaaaaaaaaaaaaaaaaaag

SEQ ID NO: 10560 - DNA, 201 bp, Homo sapiens
acaagcccagtaaaaagtaccagaagctctgctctgcttagtgaagacagcacatcctggaaagcatttgtgagtgttgatttaagtttctggtagtctgyattcattctataacccgtctggttttgatagaggccagataggtttagtgaatcggcttatagaaaggactaccatcccctgtaactttcaagtgttttg

SEQ ID NO: 10561 - DNA, 201 bp, Homo sapiens
cccacttggccatgaggaattatctttttaatgtattatttaatttgattcgctagtatattgttgagactttagcatcaatgttcatcagggatatttayttgtagttttcctttttcaatgtgtctttgtctggttttggtatcagggtaataagattttcaagaataagcctgggccgggcctggtggctcacgcctg

SEQ ID NO: 10562 - DNA, 201 bp, Homo sapiens
tcctatgtggatgctctttatttatttttcttgcatgattgctctagctagagcttctactattatgttgaatagcagcagtgattgtgagcatttttggmatgttccagatcttagaggaaagtcttttagtttttcccaattcagtatgatactagttgtgggtctttctatatgatttttattatgtttagattttcc

SEQ ID NO: 10563 - DNA, 201 bp, Homo sapiens
tccccaccttgtgccactcagatgtcctcatgccctccaattgtggctggttttataagcacatgactagtgtagttgcacgcggtcttgtgcttttgggmtttttgcttggattaatgttctgcacttgcatttttatttttcagacagcggatactcctccgctgaagagggaatagttctgcagtaattccctagggg

SEQ ID NO: 10564 - DNA, 201 bp, Homo sapiens
gtatactgcaaatttattgagtttgtttatcaattctaatagttttttggtacagtcttcaggttttataaatataagatcatattgtttgaaaacagggrtaatttggcttattcttttcctatgtggatgctctttatttatttttcttgcatgattgctctagctagagcttctactattatgttgaatagcagcagt

SEQ ID NO: 10565 - DNA, 201 bp, Homo sapiens
acgttgccaatattcccctccattccatcatgagccgttctctgtaattcagaatctgtggactaagctgtaaaactaatgactgtcaatctattctacawgaaatagtgggccaaagaaaaaggaaaacatgataagcagtaaaaatatatacacaacattttttgcttacactaatgatcaaataacacccataggacc

SEQ ID NO: 10566 - DNA, 201 bp, Homo sapiens
gattagacatttcctgccatgtcaagtgttgtctgtaatcttccttgtttgcttgtctttttcaggaagtgaataagaagataacagtgtttcaaatgccktgaaacatggcatcatgctctaacttcagtataccaataaaacaatcagcttgcaatttctgctggtggtgtctctttctgagtgtttgggactctagaa

SEQ ID NO: 10567 - DNA, 201 bp, Homo sapiens
caagcaatcagcacagtgtcaggattgaactttagacatcatttgtttttcaatctgtttggaaagactgctattctgctttccactgtgcttttcatttstgtgtatgtgagtttgtgtgggtgtgtcagggggttgggcagcaatcctacagctaacagtgaagacggtcaatatgtctgactcttttgatagcctatt

SEQ ID NO: 10568 - DNA, 201 bp, Homo sapiens
aggggaacaggagacacagtcaagggaatctgaggaagtgcatgtttttgcccagtacagtccccaccttgtgccactcagatgtcctcatgccctccaaytgtggctggttttataagcacatgactagtgtagttgcacgcggtcttgtgcttttgggatttttgcttggattaatgttctgcacttgcatttttattt

SEQ ID NO: 10569 - DNA, 201 bp, Homo sapiens
cgcccgtaaaccccaatcagagtcacaatatcttcccccaattcggcttaccttcatctaagtcctgagctgagctgaaggccagcagggccactgacagsagaatcagaagcatcttgcagaaggctctggtgtcactcccaactttatgctgggagaaacgtgtcagctccctttataaagacaagcaggacaatggcg

SEQ ID NO: 10570 - DNA, 201 bp, Homo sapiens
tgacaatatttcactctggtgattctctaactctatgtagacagaggcaagtgtttacccaattctctgcctcagcaatagctctgacatgtgtttatctmcttcatggatactcatccactgtccagcaaggccaccatcatccctgtctactgggatcagtataggatcttcacagctgcacttccctgaatctgtctt

SEQ ID NO: 10571 - DNA, 201 bp, Homo sapiens
aatagcaataaggagactggagacaaagtgacaggaataaatttagtcaaactgttttgggcttttctatgtctgtgagtagaatttgaatatcataatcmaggaccgtataaatctacacccagatatatatacacaaaggaattgtagcaaatgatatgtgaaagaatgttcattgtagcattattaataatagctcaa

SEQ ID NO: 10572 - DNA, 201 bp, Homo sapiens
ggccaaggtgggcagatcacttgagaccatgagtttgagaccagcctggataacatggtgaaaccctgtctctacttaaaaaaaaaaaaaaatgccagtcmtggtggcacatgcctgtaaacactgctactcaggaggctgaaagatttgaactgattgaacccaggagacaaagcttgcagtaagccgagattgcactag

SEQ ID NO: 10573 - DNA, 201 bp, Homo sapiens
agacttgacagttgatttgcagacaaaagtatgccctcatggaactgtcacctccagggtttagcttagacctcacatccattaggaggggatgtggagasgatgcccaggtggccacttctacaatggctgtcctgctcatttccttcccaactttaaaaaaaaatccactttctgctccaaaggtgaagtgtcacatta

SEQ ID NO: 10574 - DNA, 201 bp, Homo sapiens
gaggccaaggtgggcagatcacttgagaccatgagtttgagaccagcctggataacatggtgaaaccctgtctctacttaaaaaaaaaaaaaaatgccagkcctggtggcacatgcctgtaaacactgctactcaggaggctgaaagatttgaactgattgaacccaggagacaaagcttgcagtaagccgagattgcact

SEQ ID NO: 10575 - DNA, 201 bp, Homo sapiens
tcttctgcatagggatattcagttgtcccagcaccatttattgaagagactgtctttttccagtgtacgttcttggcatctttttcaaaaatgagttcacygtaggtgtgtggatttgtttccaagttgtctattctattccgttggtctatgtgtctgtcttaatgccagtaacatgctgttttggttactacagcctct

SEQ ID NO: 10576 - DNA, 201 bp, Homo sapiens
aagctccttttatattctggttattaatcccttgtgagatgagtagtttgcaaatattttctcccattctgtgggttgtctctttactttgttgattgtamcctttgctgtgcagaagtattttttaacttgatgtcatcccaattgtgcatttttgacttggttccctgtgcttgtggggtattactactcaagaaattt

SEQ ID NO: 10577 - DNA, 201 bp, Homo sapiens
ccattaaccagccactccttccctttagcctccactacctttcccagcctttgtttagcatccatgtactctctatgtccatgccttctgtgcaaacattgcagttgtttctgatgtattcaacttaacataataatctccaattctatccatatattgctgcaaatgacaggatctcattttttaatggctcaattgtac

SEQ ID NO: 10578 - DNA, 201 bp, Homo sapiens
ttctctattaaatttcatcatattttacttagatattaactactataatgagtttaatatatttttaaggtcattttgtatataagtcactccatattgtrtatctgtaaaaactgtgttcagtttttcatgtttgcttttcagaatgtaggaaaaactcatcttttaaaacacttgtttaagctttacctgattactctg

SEQ ID NO: 10579 - DNA, 201 bp, Homo sapiens
accattaaccagccactccttccctttagcctccactacctttcccagcctttgtttagcatccatgtactctctatgtccatgccttctgtgcaaacattgcagttgtttctgatgtattcaacttaacataataatctccaattctatccatatattgctgcaaatgacaggatctcattttttaatggctcaattgta

SEQ ID NO: 10580 - DNA, 201 bp, Homo sapiens
tacaactgaattatcattgattatagtcaccctgctgtgctatcaaatagtaggtcttattaattctttctatttttttttttttttggtaaccattaacmagccactccttccctttagcctccactacctttcccagcctttgtttagcatccatgtactctctatgtccatgccttctgtgcaaacattgcagttgtt

SEQ ID NO: 10581 - DNA, 201 bp, Homo sapiens
gtgtgcaccaggcagaggactaaaacgtcagaagaaaactgtagacttactgggttgaagtaacagaggactgagtttggcataacacgagcagcaggagrtcaggagaaaatctgagaaaggagaaggccagaaaaggggagccccaacttctgaatataaactatccaaagctttgtctggtccctataccatgcatgt

SEQ ID NO: 10582 - DNA, 201 bp, Homo sapiens
tgtatatatttgaataatttcaaaacagatacctagaaaagtcatctatctatctatctatctatctatctatctatctatcacacacacacacacatatrtgtgtgtgggtatatgtgtgcatgtgtgtgaataacaacattgaccacaaattatgaagccgagtatatttcacatatatatgtaggtatattttatgat

SEQ ID NO: 10583 - DNA, 201 bp, Homo sapiens
cattcgtttttccttagtgtatatatttgaataatttcaaaacagatacctagaaaagtcatctatctatctatctatctatctatctatctatctatcayacacacacacacatatatgtgtgtgggtatatgtgtgcatgtgtgtgaataacaacattgaccacaaattatgaagccgagtatatttcacatatatatg

SEQ ID NO: 10584 - DNA, 201 bp, Homo sapiens
tccattcgtttttccttagtgtatatatttgaataatttcaaaacagatacctagaaaagtcatctatctatctatctatctatctatctatctatctatyacacacacacacacatatatgtgtgtgggtatatgtgtgcatgtgtgtgaataacaacattgaccacaaattatgaagccgagtatatttcacatatata

SEQ ID NO: 10585 - DNA, 201 bp, Homo sapiens
aaaacaaactgacggtatctggaacattttatatttccattcgtttttccttagtgtatatatttgaataatttcaaaacagatacctagaaaagtcatctatctatctatctatctatctatctatctatctatcacacacacacacacatatatgtgtgtgggtatatgtgtgcatgtgtgtgaataacaacattgacc

SEQ ID NO: 10586 - DNA, 201 bp, Homo sapiens
ccctgtaattttacccaaaggtatatatacagaggaattgcatcaaatgatatatgaaagaattctctagtagaattattcataacttcaaaaaagaagcwgaccaaatgtacattaaggatgggtgaatcattacattaattccatgcaacggaacaatatagagaagtgaaaaaaaaccacatgtacttgcaactatgt

SEQ ID NO: 10587 - DNA, 201 bp, Homo sapiens
aatattttaaaaccctttctaaatgaacatttaaattgccatattaaaaacccacagaaaaatgcataaataacaattataacactaaacgagtatcttasccttgggtgtctagaactagagccaatgtctgatgttaaagtgataacatttatttggaagataagtccagggcagcaatggccaggacatgtggaaatt

SEQ ID NO: 10588 - DNA, 201 bp, Homo sapiens
gcatagggttttgtgcttatagggacttgtgcttagagggactctatgcttggattaatattctgcacttgctattttgtttgtcagacagaggatacttstctgctgaagagagaatggtcttacactaattccatagggatttgctctcccctctccaacaggcttgtcagagacatgcacagagtcctataatgacca

SEQ ID NO: 10589 - DNA, 201 bp, Homo sapiens
ttcttcaatgtttgataaacttgtaagtactgttttactctttgatcttttaaagattgttataaatgaagaagccttgatttctgcttataaaaacagagtaaaatttaaatcgtggaatagattggtggagctgtggttgagatactatattttattaattgtaatgacattttgagatctagtgctgctcactgaatt

SEQ ID NO: 10590 - DNA, 201 bp, Homo sapiens
gtcccaaatagaaggatgacctggatcaggcaaggtgctggccaggggaattggacatagtgaagagaatctgagaaagcacatgtttgtgtccagtaccrccactccttgtgccactgaggcgtgctcataccctccagtcatggctggctttatgagcatatgacgtccacagttgcatagggttttgtgcttataggg

SEQ ID NO: 10591 - DNA, 201 bp, Homo sapiens
gttcttcaatgtttgataaacttgtaagtactgttttactctttgatcttttaaagattgttataaatgaagaagccttgatttctgcttataaaaacagagtaaaatttaaatcgtggaatagattggtggagctgtggttgagatactatattttattaattgtaatgacattttgagatctagtgctgctcactgaat

SEQ ID NO: 10592 - DNA, 201 bp, Homo sapiens
caagtcccagatggaaagatgatctggatcaggcaagatgctgaccaggggaacaggagacacagtcaagggaatctgaggaagtgcatgtttttgcccartacagtccccaccttgtgccactcagatgtcctcatgccctccaattgtggctggttttataagcacatgactagtgtagttgcacgcggtcttgtgctt

SEQ ID NO: 10593 - DNA, 201 bp, Homo sapiens
catgcccacagtgtggtgatgcattcaagtcccaaatagaaggatgacctggatcaggcaaggtgctggccaggggaattggacatagtgaagagaatctragaaagcacatgtttgtgtccagtaccgccactccttgtgccactgaggcgtgctcataccctccagtcatggctggctttatgagcatatgacgtccac

SEQ ID NO: 10594 - DNA, 201 bp, Homo sapiens
tcattatcattatctatatccacatctatctcattaaatgatttatttttgaaatatttaaacacataatttggaaaataagtaattttaaaaagatcatmattattggaaagttacaggagtaaacagcaaagtttaagtcaagctcaatacacttagatttagaaattaagtgtagtttattttacaatacattgctta

SEQ ID NO: 10595 - DNA, 201 bp, Homo sapiens
gtggtcatgaaagtcagacctcatgcccacagtgtggtgatgcattcaagtcccaaatagaaggatgacctggatcaggcaaggtgctggccaggggaatwggacatagtgaagagaatctgagaaagcacatgtttgtgtccagtaccgccactccttgtgccactgaggcgtgctcataccctccagtcatggctggct

SEQ ID NO: 10596 - DNA, 201 bp, Homo sapiens
agtcccttggtggtggtcatgaaagtcagacctcatgcccacagtgtggtgatgcattcaagtcccaaatagaaggatgacctggatcaggcaaggtgctrgccaggggaattggacatagtgaagagaatctgagaaagcacatgtttgtgtccagtaccgccactccttgtgccactgaggcgtgctcataccctccag

SEQ ID NO: 10597 - DNA, 201 bp, Homo sapiens
cgtacttttccagaagggttacaaggggaagccacaacaaatattagtccatggaggagagaaaagggagaatgtatcctagctgtcttctgtcttctatyttcctttggccaaagattgtttgaggcagaactaccatctttgcttttcttccttacattatccaaccccttggtggctgtttgggaaagtcacactaac

SEQ ID NO: 10598 - DNA, 201 bp, Homo sapiens
tccagtcccttggtggtggtcatgaaagtcagacctcatgcccacagtgtggtgatgcattcaagtcccaaatagaaggatgacctggatcaggcaaggtrctggccaggggaattggacatagtgaagagaatctgagaaagcacatgtttgtgtccagtaccgccactccttgtgccactgaggcgtgctcataccctc

SEQ ID NO: 10599 - DNA, 201 bp, Homo sapiens
ttgtaatttgttacattggtgatgaaactctacagtgaaatatatgaatgatcatcataacaattgggataatcaggagggaggaaataaaagggaaataycaacaagaagacgtatattgggagtatctggattgctggcaaattctattttctgaccaaggtttggtaacatcaatgttaatgttataattttttctta

SEQ ID NO: 10600 - DNA, 201 bp, Homo sapiens
atgagccttaacgttgtaattttgtcatcaatgatgaaatgaaagggtgttgacatattctttaataggaagttctattataagaaagaaatgtacagtcytgttcacagctaaattctacttgactgtattaattcttggtgttatgaaatttaaacaatgtgatttaaaccttaagatgaatcatccccccacctgatt

SEQ ID NO: 10601 - DNA, 201 bp, Homo sapiens
acaacaggataatacaacaaaggaaatgaacaaatttgagctacatagataataatactcacagatgtgaaaggaattatcaagatggaaaaatacatttrgaatgatcttttacataaagtttggaaaaaaaatttttaatacattgtaatttgttacattggtgatgaaactctacagtgaaatatatgaatgatcatc

SEQ ID NO: 10602 - DNA, 201 bp, Homo sapiens
tcaccattctgtcatgagatggtatctcattgtggttttgatttgcatttctctaatgagcagtgatgatgagcttctttctttcccatattttcttgggmacataaatgtcttcttttgagaagtgtctgctcatatcctccacccactttttgatggggttgtttgtttaatagattgcaaaaattttctcccattctg

SEQ ID NO: 10603 - DNA, 201 bp, Homo sapiens
tacaaaacttccctaacaactgaagtcactaaagataaatgatggagaggttacacaaggaaaaattgcaaacactgaaagtgaatatgtccctatttgcrtactagcaaatgaggattcaggtttcacgtcaatttcagtgtgaataattccagcctataacaagaacagacagtgaatgaatgagttaatttgagttgt

SEQ ID NO: 10604 - DNA, 201 bp, Homo sapiens
gtcagtcctccaaatggataaacaaattatggcatacttatacaatggaatactatacagtgatcaaaattaacaaagaagactgacatgtttacaacagkataatacaacaaaggaaatgaacaaatttgagctacatagataataatactcacagatgtgaaaggaattatcaagatggaaaaatacatttagaatgat

SEQ ID NO: 10605 - DNA, 201 bp, Homo sapiens
gtaaaatggaaagtagttatacaaagggtatattatattaactcctaacaaaattaaacaaagccagttttttttcatctcctttcattttttttttttttgaaacagggtgttgctctgtctccccgttggagtgcagtggtgtgatctcgaccaattacaacctccgtctcctgggttcaaatgattctcctgccgcag

SEQ ID NO: 10606 - DNA, 201 bp, Homo sapiens
tgggaaacaagaagctaaagcagatttttctttcagttttgcggcatgtgaggtactgggtgaaagacagaagccttcgtctccatagattcacaagaggrgcattgtgtgtcttctagcagaaaacaaactggtggtgtatgaaacattttatatttcttactgggttttctgtaatatatgtatatgaataatttccaa

SEQ ID NO: 10607 - DNA, 201 bp, Homo sapiens
acccacccattcatcctgattttgggaaacaagaagctaaagcagatttttctttcagttttgcggcatgtgaggtactgggtgaaagacagaagccttcrtctccatagattcacaagaggggcattgtgtgtcttctagcagaaaacaaactggtggtgtatgaaacattttatatttcttactgggttttctgtaata

SEQ ID NO: 10608 - DNA, 201 bp, Homo sapiens
aaaacatatttagtatgatctttgagtatgtttgtgcatatataatgctactttgactgctatagtaagataacagatttagtcaccatagctaagaatgkgaaaaagcatttacaagaatttggcttgctaatgatgctattaaaagatgaaataaaattgatatgctgtatattgcatagagtatttgtctattttcat

SEQ ID NO: 10609 - DNA, 201 bp, Homo sapiens
gattgctagacacctttattcttatttccaatttaattattcataattcacatttcagtgtcagaaagtcatgaatttccaataaactatagtaagatggrtattacatatatagacctattatgccaaaatgtgtctctaaatgaaatatgtatattcatattgttagcattctaatttcacaatactattcatgtgtac

SEQ ID NO: 10610 - DNA, 201 bp, Homo sapiens
gtatatgaaataactatcatagaatgaaatttattgaagtaaaaatacattctaaattagaataggaaagaacttggaaactattgtttaataatatgttwtataaatacaaaactgtaaatattactcttacgttacttattttggaaaggatatgaaacaatgggaattttcatattctactcctaggatgataaatct

SEQ ID NO: 10611 - DNA, 201 bp, Homo sapiens
gcccacaggtatattcaagtcccagatggaaagatgatctggatcaggcaagatgctgaccaggggaacaggagacacagtcaagggaatctgaggaagtrcatgtttttgcccagtacagtccccaccttgtgccactcagatgtcctcatgccctccaattgtggctggttttataagcacatgactagtgtagttgca

SEQ ID NO: 10612 - DNA, 201 bp, Homo sapiens
ctacattagagaaaaataccatagaaaggcaaattttttaaggtataaaacatatttagcatgatctttgagtatgtttgtgcatatataattctactttsactgctatagtaaaatgatccagatttagtcaccatagctaagaaggggaaaaagcatttgcaagaatttggcttgctaatgatgctattaaaagataaa

SEQ ID NO: 10613 - DNA, 201 bp, Homo sapiens
tagtaaccagctactttactaaaatgttttttatgtattacctgttattaaggtgatgacatttatttagaaatcaagttcaagacaaaaatggcaaggayatgtggaaattgagacaggaacaaatgtgaaacaatgtgtggtgatgtctggtatgactctgctggcagccacttcacagtgaggtgagagagacagcat

SEQ ID NO: 10614 - DNA, 201 bp, Homo sapiens
tctttgtgtccatatgtatttaatgtttagctcccacttgtaagtgagaacatgtggtacttgctttgctgtttctgttttacattcccaccagcagtatraaagcattccctttcatcacaaccttgacagagtctgtttttgtttgtttgtttgtttgtttgttttgtaataggcattctgaggggtgtgagaggttat

SEQ ID NO: 10615 - DNA, 201 bp, Homo sapiens
ccaagttgcaggagaatgcctagaccatgattttaatctcttctgtgacctttgtattacaaaaagaagaaaattgtgaccattttcatgtcaggtatackaaaaatttataaaaactcctttttaaagaacttgtgagtagcttcactatgcctggctaacattttcatttattgtagagggagtttcggtgtattgcac

SEQ ID NO: 10616 - DNA, 201 bp, Homo sapiens
tgtgtttgaataggagttaatttgagctgttttggaaattatcatgttttccataaagacagcattgatttcatccattagcatattgagatgatttcctstttgacgttggtcacagaatttaaaaggaacaagaacattactgcacattcaggaatcagttacacatagaagttaaggtcaggaccttaaagggaatct

SEQ ID NO: 10617 - DNA, 201 bp, Homo sapiens
caaaaagaagaaaattgtgaccattttcatgtcaggtatacgaaaaatttataaaaactcctttttaaagaacttgtgagtagcttcactatgcctggctmacattttcatttattgtagagggagtttcggtgtattgcacaggctggtcttgaactcctgggtgctcctgccccagccttacaaaatgttgggattatg

SEQ ID NO: 10618 - DNA, 201 bp, Homo sapiens
ttctgctccaaaggtgaagtgtcacattagaaggcaggatgctttgtgctccttcccgcaagctaacttccaaatacattctctatttttatatcagactyttttattactttttattattttttatattagactttacatgaagtgagccgttaaccttttttgttacaagacttcatgcccacaggtatattcaagtcc

SEQ ID NO: 10619 - DNA, 201 bp, Homo sapiens
tatagacaaagtgtgtttcttagaggcaacagattggtgttttgtttgtttgtttgtttttccatttagccagactatgtcttttgattggagagtttagyccatttacattcaatgttagtattggtagttaggacttacttttgtcattttgttatttgttttctggttatgttgtggtctgctcgtctttctttccta

SEQ ID NO: 10620 - DNA, 201 bp, Homo sapiens
ccagtgttgagtgcatatatatttacaattgcaatatcattttgatgaattgacccctttatcattatatggtgacctttatctcctcatagtttttgtcytgaactctattttgtctaatacttgtataggtactccactttttttggcttccattgccatgaattatctttttccatcccgttgttttctttctgtgca

SEQ ID NO: 10621 - DNA, 201 bp, Homo sapiens
ggacaatggcgcatttgagctccctaccaggtgggcctcctcgcctcagagactgggttctgctttgcttacttcaggtcaagtgtatccctcatttcttytgggactctagcctagcaggaagggttggggaggatgttgtttgtggctaatttctaaaaggtacaactatgacttggacaaatgttttgacggaactgt

SEQ ID NO: 10622 - DNA, 201 bp, Homo sapiens
cagctactcgggaggctgaggcagaaggatcgcttgaacctgggaggcggaggttgcagtgagctgagattgtgccactgcagtacagcctgtgtgatggrgtctcactctgtctcaaacaaacaaacaaacaaacaaacaaaaattccagttcaaactgaatgtccctaacctcagagaactatagtcaattcttcactg

SEQ ID NO: 10623 - DNA, 201 bp, Homo sapiens
aaacagatagttgatgcacgattagggaaaaataaggcaacctatgaaaatggccttatggattaaaagaagtgagctcctatatggtcagtggaatccasgaaaaatttaatggaaaaagcgccacctaagcttagctttaaaacacagagtatcttcaggtagaaaaggctataggagaatgtgcccaaatggagtttg

SEQ ID NO: 10624 - DNA, 201 bp, Homo sapiens
taccgggtgtaaaattgaataggatatagtgtcttccctcacagagctgccaattatgttggaggatgtaataaatacaaagtctgtttcttcatcttcgrtttaacaaatgactgatgtgaggaaaaaagttgtaggaatatgttcacatagtcacccaaatggagcatcctactctgtcaccatttcaggattaagact

SEQ ID NO: 10625 - DNA, 201 bp, Homo sapiens
tggtcttgaactcctgggtgctcctgccccagccttacaaaatgttgggattatgggtgtgagccaccctgcctggccaataaagagacttattgaaaatrttaagttgaatatgcaagaaggaatacaaattaatgaaagtggtaaatatgtgcataattgtaaatgaatgtttactgtataaaataataatgtcttgag

SEQ ID NO: 10626 - DNA, 201 bp, Homo sapiens
gttgggattatgggtgtgagccaccctgcctggccaataaagagacttattgaaaatattaagttgaatatgcaagaaggaatacaaattaatgaaagtgrtaaatatgtgcataattgtaaatgaatgtttactgtataaaataataatgtcttgagggtgattatataattgataagacatatgcaaatggcaaaaaat

SEQ ID NO: 10627 - DNA, 201 bp, Homo sapiens
gccaataaagagacttattgaaaatattaagttgaatatgcaagaaggaatacaaattaatgaaagtggtaaatatgtgcataattgtaaatgaatgtttrctgtataaaataataatgtcttgagggtgattatataattgataagacatatgcaaatggcaaaaaatagactggaggtaaaggtgacaggagtaaattt

SEQ ID NO: 10628 - DNA, 201 bp, Homo sapiens
ataattgtaaatgaatgtttactgtataaaataataatgtcttgagggtgattatataattgataagacatatgcaaatggcaaaaaatagactggaggtraaggtgacaggagtaaatttacttgaagtagtttttgaacttttctatgtctatgaggagattttgaacaatgaccctgtaattttacccaaaggtatat

SEQ ID NO: 10629 - DNA, 201 bp, Homo sapiens
gactaaatttcagaaacataatgttgagtccaagaagccacaaacaacaagaacatgtaggaatgcacctacacagagttcaaagcaggccagaccaagckatggagtttagggttgcatacctagttggtaaagtatgaagaaaattaaggaaataatcaatataaattatggatattgcttatctcaggagatgtgaag

SEQ ID NO: 10630 - DNA, 201 bp, Homo sapiens
gccacaaacaacaagaacatgtaggaatgcacctacacagagttcaaagcaggccagaccaagctatggagtttagggttgcatacctagttggtaaagtrtgaagaaaattaaggaaataatcaatataaattatggatattgcttatctcaggagatgtgaagaagggtttagggggttggaaagtggcatggaggtgg

SEQ ID NO: 10631 - DNA, 201 bp, Homo sapiens
ccagcaccaaggtccacataaaagctttgcaaactgtgacctcctttcttctgttatgtgccatttactttctgtccatgatcatatcagtttgtaatttkgggaggctggaaaagcaacctgtcttcatgttctgccaagctattatattcagctatccttcaacccacccattcatcctgattttgggaaacaagaagc

SEQ ID NO: 10632 - DNA, 201 bp, Homo sapiens
ctcaccttacttacaaattatttgtatattattttgtttagtatcctttctaaatgaatgttttaattgccacgttataaacacatggaaaagtgattcaratgaatgtatatcttagctttgggtgtctagaactagagccaatgtctgattttacagtgatgacatttatttgggaaggcaagtccagggcagcaatga

SEQ ID NO: 10633 - DNA, 201 bp, Homo sapiens
taagtgtagtttattttacaatacattgcttatgcaaataattatttatggatgaccttcaatgaatcctcctttcactatgatcatgatagaaacaattyagattttcgtgtaaataaaattccttaataagaaagataaagcgaataacacattttttgagcacgcttttatttctaaagagcggattttaggaccaaa

SEQ ID NO: 10634 - DNA, 201 bp, Homo sapiens
aaattgagttagtaaccactcaccttacttacaaattatttgtatattattttgtttagtatcctttctaaatgaatgttttaattgccacgttataaacrcatggaaaagtgattcagatgaatgtatatcttagctttgggtgtctagaactagagccaatgtctgattttacagtgatgacatttatttgggaaggca

SEQ ID NO: 10635 - DNA, 201 bp, Homo sapiens
ttggctctacattagagaaaaataccatagaaaggcaaattttttaaggtataaaacatatttagcatgatctttgagtatgtttgtgcatatataattcwactttgactgctatagtaaaatgatccagatttagtcaccatagctaagaaggggaaaaagcatttgcaagaatttggcttgctaatgatgctattaaaa

SEQ ID NO: 10636 - DNA, 201 bp, Homo sapiens
tcatcactgacttaattggcaaggaacaggatatctgcttcaatgacctcattctcaccagcttatctcatacgtacaaatatatacatatctgtatataygagtctcacccatgtatacatatatttaaatgtatacatatatatgagtctcactgtcacccaggctgactggcagtggcataagcatggctcactgcag

SEQ ID NO: 10637 - DNA, 201 bp, Homo sapiens
ctttaattctggtatattttgtttattctgtttagctcctgtaacattgcatacaaattatttatattaatagttttaggacttgggtgaaattcttgaaytatgaataattttaggaacttatttctataaatcatattgcatcaacaaaaatgcttggtatgtagaaggatgttactgaatgagagacaaataattact

SEQ ID NO: 10638 - DNA, 201 bp, Homo sapiens
cgtgagtcagagcaatattctcaaatgtggaatatgttgtctccaaaatcccagtaggcccccaaaacatagtgtctcttttgtagtgataggaaatatayagagagagcaaaatgccgtttactgtaaaaaagattgtctcagcatgtggactagggacactaaaaaccttaaaacatcacctatgttgtcggtccctga

SEQ ID NO: 10639 - DNA, 201 bp, Homo sapiens
aagctccttttatattctggttattaatcccttgccagatgagtagtttgcaaatattttctcctattctgtggattgtctcttcactttgttgatcatamctttgctgtgcagaagtattttttaacttgatgtgatcccaattgtgcattttttacttggttgcctgtacttgtagggtattactacttaagaaatttt

SEQ ID NO: 10640 - DNA, 201 bp, Homo sapiens
ctagaacccagcacaaggaatagatggtcaaaaatgatattttaatgaacaaataaatgggtggataaaatgggtaagctgatgtggtaaaccaatgaaarggaaactcatcacaaaatctgcagttgcatgagttcccctgttctggtctcaggttaagattacaggcttatccaagcagaatccttcctcagaggaaaa

SEQ ID NO: 10641 - DNA, 201 bp, Homo sapiens
gatatatttgtattgtgatattttttagctggttattagatacacaaaaaaggtatttcatttttaaaaattgagttagtaaccactcaccttacttacamattatttgtatattattttgtttagtatcctttctaaatgaatgttttaattgccacgttataaacacatggaaaagtgattcagatgaatgtatatctt

SEQ ID NO: 10642 - DNA, 201 bp, Homo sapiens
atgtttttaacgtaatacctgatattaaagtgatgacatttatatggaaggccaattcaagacaaaaatggcagggacatgtggaaattgagacaagaacsgatgtgaaacaatgtgtggtgatgtctggtatgactctgctggcagccacttcacagtgaggtgagagagacagcatggtggtcatcagatgcatgcact

SEQ ID NO: 10643 - DNA, 201 bp, Homo sapiens
aagtgatgacatttatatggaaggccaattcaagacaaaaatggcagggacatgtggaaattgagacaagaacggatgtgaaacaatgtgtggtgatgtcyggtatgactctgctggcagccacttcacagtgaggtgagagagacagcatggtggtcatcagatgcatgcacttgactcccagaacttttccagaagggc

SEQ ID NO: 10644 - DNA, 201 bp, Homo sapiens
ttttccaaaaggtataaaatgtatccctgaatatatttttagtaatctcaaacttcaggcatgataactaaaaccaaattaacataaaataatacaggacrcaaaagaccaatagaaaatctgaaaagtagctagaggtagaagatagagtatgttgaaaagaactgtattctaaatacaacctgattttaacagaaaaca

SEQ ID NO: 10645 - DNA, 201 bp, Homo sapiens
aagtaagttaaatgattgaacttcaagttcaggggaaaggtagtcagtcttcgtgtgatgggaggatactgcaagattatatatcaaagggtctggtactsaggaatacttataaaattgctgaacattttaattaaataataaatatttaaatattagacttgagagaaactttaccaaaggcctaagaattagagatat

SEQ ID NO: 10646 - DNA, 201 bp, Homo sapiens
tgcttgcctttctgcacaaacattgcagttattttttacttattcaacttaacataataatctccaattccatccgtattgctgcaaatgacaggatctcrttttttaaatggctgaatagtactccactgtgtatatgtaccacattctctctccctcttttttttttttttttttttgagatggagtctcgctctgtct

SEQ ID NO: 10647 - DNA, 201 bp, Homo sapiens
aaacataattttacattttttggtattttaacattatgtgggcatattagtttaccttatcagtaaacaggtatgggaagtttaggaatttcttttttttwaatgtatttttaagttttgtggatatatagtaggtctatattgagtacacgggatgtgttgatacaggcatgcaaagagtaataatcacataagaatggg

SEQ ID NO: 10648 - DNA, 201 bp, Homo sapiens
cttcccagtagctgctaaacacacttttgtttttagggaatgtctctttctccttcattatgacttatgctgccttcaatgctttgctgatacaaaagaastgaactcaaaagaagtaaaaataaaagctagcaaactttgcaactggttaagctggttgtaaacgtacctaatcactttctactgtgaatgatatatttg

SEQ ID NO: 10649 - DNA, 201 bp, Homo sapiens
aagcccagctaaaataataaaattgatttcagttatcatcaagcacagtgaggacagaaatagcaacaaaacacattactttaggcaaagatactcttttyttgaaaacccaaactacattccattacctttcataacagtcatattccttgtccattcttgtttctaccatggttctaactcctacttttattcattaca

SEQ ID NO: 10650 - DNA, 201 bp, Homo sapiens
tgtgcaccaggcagaggactaaaacgtcagtaaaaaagctgtagagttactgggttgaagtaacagaggactgagtttagggtaacatgagccgcaggagrtcaggagaaaatctgagaaaggagaagtccagaaaaggggagccccagcttctgactataaactatccaaagctttgtctggtccctacaccacacatgt

SEQ ID NO: 10651 - DNA, 201 bp, Homo sapiens
cggaaatattaacagcttttcaatagattcactggcacaatgaagttggagaactgtagcagttggagcctttgatggataataaactggaatcatacctrtcattgaatcctagattactgaggagactgcccctgtggaggtccttgtgggcggcccccttggggaggtggtccctggggctttccaggaggaggtggg

SEQ ID NO: 10652 - DNA, 201 bp, Homo sapiens; identical to SEQ ID NO: 953

SEQ ID NO: 10653 - DNA, 201 bp, Homo sapiens
tatatctgctcagctgtcttctgtcttctatttcccactggccagggtttccctgaggcagaactaccatctctgctgttctgctttccatcatccaatcycttgatggaggttatgaaagtcagacctcatgcccacaatgtggtgatccattcaagtcccaaatggaagggtgatgtgggtcaggcaaggtgctgacca

SEQ ID NO: 10654 - DNA, 201 bp, Homo sapiens
tgctttctacttaactttttagacatgcacatagaactgtttactttcccctcaccagacagtcccttcgggcaagttcatctaactgtgtgctccacgarggatctctccttgagacttgacagttgatttgcagacaaaagtatgccctcatggaactgtcacctccagggtttagcttagacctcacatccattagga

SEQ ID NO: 10655 - DNA, 201 bp, Homo sapiens
tcctgctttctacttaactttttagacatgcacatagaactgtttactttcccctcaccagacagtcccttcgggcaagttcatctaactgtgtgctccamgagggatctctccttgagacttgacagttgatttgcagacaaaagtatgccctcatggaactgtcacctccagggtttagcttagacctcacatccatta

SEQ ID NO: 10656 - DNA, 201 bp, Homo sapiens
gctgctcggggctagctgaccccatgacaagaatgttagggaacttcccagtagctgctaaacacacttttgtttttagggaatgtctctttctccttcawtatgacttatgctgccttcaatgctttgctgatacaaaagaagtgaactcaaaagaagtaaaaataaaagctagcaaactttgcaactggttaagctggt

SEQ ID NO: 10657 - DNA, 201 bp, Homo sapiens
tacatgtaagatgttaaggcaaatattgccattttttttctcatttagagtagtttattatgctaagggcctgggaaacactttagattcagtaaaaaaaactacctagaagaataaagcagaatgaatactagaaaaagactgaaagaaaaaaaatgtgtaaagacgcacagaatgaggaacatctgttggtaaaatata

SEQ ID NO: 10658 - DNA, 201 bp, Homo sapiens
cctcttcaaggagaactacaaaccactgctcaatgaaataaaagaggatacaaacaaatggaagaacattccatgctcatgggtaggaagaatcaatatcrtgaaaatggccatactgcccaaggtaatttatagattcaatgccatccccatcaagctaacaatgactttcttcacagaattggaaaactactttaaagt

SEQ ID NO: 10659 - DNA, 201 bp, Homo sapiens
gcccaaagtctccttaagctgataagcaacttcagcaaagtctcaggatacaaaatcaatgtacaaaaatcacaagcattcttatacaccaataacagacwaacagagagccaaatcatgagtgaactcccattcacaattgcttcaaagagaataaaatacctaggaatccaacttacaagggatgtgaaggacctcttc

SEQ ID NO: 10660 - DNA, 201 bp, Homo sapiens
aaacggtattcagttaggaaaagaggaagtcaaattgtccctgtttgcagacgacatgattgtatatctagaaaatcccattgtctcagcccaaagtctcsttaagctgataagcaacttcagcaaagtctcaggatacaaaatcaatgtacaaaaatcacaagcattcttatacaccaataacagactaacagagagcca

SEQ ID NO: 10661 - DNA, 201 bp, Homo sapiens
ttgctaccactcagtctttgggtccacaccgtctttaagagctgaaaccttgctactgctcagccctggggccatgccatctttaagagctgtaacatcaytgcaaaggtccgtgcctccattcttgaagtcagcgagaccacgaacccacctgcaggaaccaactccggatacaacaccagcattttaaaaatttctttt

SEQ ID NO: 10662 - DNA, 201 bp, Homo sapiens
ttacattatccaaccccttggtggctgtttgggaaagtcacactaaccaatacccccatttttctaagagatagtttttttttaatttattttttctcttytcctctcccctttccctatgtttcctgctttctacttaactttttagacatgcacatagaactgtttactttcccctcaccagacagtcccttcgggcaa

SEQ ID NO: 10663 - DNA, 201 bp, Homo sapiens
gaaataaacggtattcagttaggaaaagaggaagtcaaattgtccctgtttgcagacgacatgattgtatatctagaaaatcccattgtctcagcccaaartctccttaagctgataagcaacttcagcaaagtctcaggatacaaaatcaatgtacaaaaatcacaagcattcttatacaccaataacagactaacagag

SEQ ID NO: 10664 - DNA, 201 bp, Homo sapiens
gcacaagacagggatgccctctctcaccactcctattcaacatagtgttggaagttgtgaccagggcaatgaggcaggagaaggaaataaacggtattcarttaggaaaagaggaagtcaaattgtccctgtttgcagacgacatgattgtatatctagaaaatcccattgtctcagcccaaagtctccttaagctgataa

SEQ ID NO: 10665 - DNA, 201 bp, Homo sapiens
tgaaaactggcacaagacagggatgccctctctcaccactcctattcaacatagtgttggaagttgtgaccagggcaatgaggcaggagaaggaaataaasggtattcagttaggaaaagaggaagtcaaattgtccctgtttgcagacgacatgattgtatatctagaaaatcccattgtctcagcccaaagtctcctta

SEQ ID NO: 10666 - DNA, 201 bp, Homo sapiens
atagaaaaagagggaatcctccctaactcattttatgaggccagcatcatcctgataccaaagctgggcagagacgcaaccaaaaaagagaattttagacyaatatccttgatgaacattgatgcaaaaatcctcaataaaatactggcaaaccgaatccagcagcacatcaaaaagcttatccaccatgatcaagtgggc

SEQ ID NO: 10667 - DNA, 201 bp, Homo sapiens
aactattccaatcaatagaaaaagagggaatcctccctaactcattttatgaggccagcatcatcctgataccaaagctgggcagagacgcaaccaaaaaagagaattttagaccaatatccttgatgaacattgatgcaaaaatcctcaataaaatactggcaaaccgaatccagcagcacatcaaaaagcttatccacc

SEQ ID NO: 10668 - DNA, 201 bp, Homo sapiens
cctttgtccttttgctcttaacaataaaccttgctaccactcagtctttgggtccacaccgtctttaagagctgaaaccttgctactgctcagccctgggkccatgccatctttaagagctgtaacatcactgcaaaggtccgtgcctccattcttgaagtcagcgagaccacgaacccacctgcaggaaccaactccgga

SEQ ID NO: 10669 - DNA, 201 bp, Homo sapiens
attccttctgaaactattccaatcaatagaaaaagagggaatcctccctaactcattttatgaggccagcatcatcctgataccaaagctgggcagagacrcaaccaaaaaagagaattttagaccaatatccttgatgaacattgatgcaaaaatcctcaataaaatactggcaaaccgaatccagcagcacatcaaaaa

SEQ ID NO: 10670 - DNA, 201 bp, Homo sapiens
ccacggggcaacccactcaggcccccttccaccctgtggaacctttgtccttttgctcttaacaataaaccttgctaccactcagtctttgggtccacacmgtctttaagagctgaaaccttgctactgctcagccctggggccatgccatctttaagagctgtaacatcactgcaaaggtccgtgcctccattcttgaag

SEQ ID NO: 10671 - DNA, 201 bp, Homo sapiens
actagaaaatctagaagaaatggataaattccttgacacatacactctcccaagactaaaccaggaagaagttgagtctctgaatagaccaataacaggakctgaaattgtggcaataatcaatagcttaccaaccaaaaagagtccaggaccagatggattcacagccgaattctaccagaggtacaaggaggaactggt

SEQ ID NO: 10672 - DNA, 201 bp, Homo sapiens
cctatttctccacatcctctccagcacctgttgtttcctgactttttagtgattgccattctaactggtgtgagatggtatctcactgtggttttgatttkcatttctctgatggccagtgatgatgagcattttttcttgtgttttttggatgcataaatgtcttcttttgagaagtgtctgttcatatccttcacccac

SEQ ID NO: 10673 - DNA, 201 bp, Homo sapiens
tcattgttggacatttggattggttccaagtctttgctattgtgaatagtgctgcaataaacatacgtgtgcatgtgtctttatagcagcatgatttatartcctttgggtttatacccagtaatgggatggctgggtcaaatggtatttctagctctagatccctgaggaatcgccacactgacttccacaatggttgaa

SEQ ID NO: 10674 - DNA, 201 bp, Homo sapiens
gaaaagttgtttcttccactttttgaattaaagaaaaccttttttttttgaaattgacatctgatgtcaagtatttccatttattttgcttagccacctcygagcccttgaatttccaattttccctttgtctcccattcttaatatttctcaaaaaaattcaattattccctctcttaaaataaactcaatgtaaacagg

SEQ ID NO: 10675 - DNA, 201 bp, Homo sapiens
gtttggttttttgtccttgccatagtttactgagaatgatgatttccaatttcatccatgtccctacagaggacatgaactcatcattttttatggctgcwtagtattccatggtgtatatgtgccacattttcttaatccagtctatcattgttggacatttggattggttccaagtctttgctattgtgaatagtgctg

SEQ ID NO: 10676 - DNA, 201 bp, Homo sapiens
aacagtcagggtcctctgctgcaagtctgctgtagtttgctggaggtccactccagaccttgtttgcctgggtatcaccagtggaggctgcaaaacagcaratattgctgcctgttccttcctctggaagcttcatcccagagggttacccgccagatgtcaggcagagctctcctgtatgaggtttctgtccaccattgc

SEQ ID NO: 10677 - DNA, 201 bp, Homo sapiens
tttgagatgatgttatctgccaagcgcagatctctccaaaggatttcttctagccttaattatccacctcacaggacaaacctttgccattccccatctaytttttctttcggctcctcaattcctgacacaacaaagttgtacatatttcccacactcttggtttagcagagttcttttatcagttatgtttttctgcaa

SEQ ID NO: 10678 - DNA, 201 bp, Homo sapiens
tcctctggaagcttcatcccagagggttacccgccagatgtcaggcagagctctcctgtatgaggtttctgtccaccattgctgggagatgtctcccagtmaggaggcacagaggtcagggacccacttaaggaggcactctgtcctttagcagagctcaagtgctgtgctgggagatctgctgctcttttcagagtgtca

SEQ ID NO: 10679 - DNA, 201 bp, Homo sapiens
ccctttataagggttagttgactgtttatgatacattccggtatttcccatttttgttttggttcatttctaagtgtgcattataattttaatattaaagkttttgattaggagaaatgtctcatagaaattattattactcatctgattatatactgaagggaaaaatcaattagttgtatatacattcttatacaactc

SEQ ID NO: 10680 - DNA, 201 bp, Homo sapiens
accacatcctagagagcatctgcaagtgtgatttaagtttatgctaatgtgcattcatctgataatccatctggctttggcagaagccagataggttaacwgaatagggatcaaaaatggacaaccacctcctggaacttttgagttttttgtcatgtcggtgaccaattctattccttggacaatgcggttagtatgttt

SEQ ID NO: 10681 - DNA, 201 bp, Homo sapiens
atcacttcctgcttatgggtaacagttaatgcaatattattaatatattgagttagcatgatgttttgcaaaatgccaattaaactgaaaacagaagtgasatagccatgacataaaacagtgaagcagtgcttttgttcttacctcaccaaaacaaatcattttgattttctctcccaatcgatgtagattaaaaagcat

SEQ ID NO: 10682 - DNA, 201 bp, Homo sapiens
tatatttgagaaactcatcacttcctgcttatgggtaacagttaatgcaatattattaatatattgagttagcatgatgttttgcaaaatgccaattaaaytgaaaacagaagtgacatagccatgacataaaacagtgaagcagtgcttttgttcttacctcaccaaaacaaatcattttgattttctctcccaatcgat

SEQ ID NO: 10683 - DNA, 201 bp, Homo sapiens
gggtgatgtgggtcaggcaaggtgctgaccaggggaataggagacagtcaagtaaatctgaggaagcacatgtttgtgtcccatgcagtccactccttgtkccattcagatgtgctcatgccctccaatcatggctgactatgagcatataatttccactgttgcacagggtcttgtgcttagagacgcacacgcttagaa

SEQ ID NO: 10684 - DNA, 201 bp, Homo sapiens
taggggaaatatgacaataatatagtcttgatgcagctgtatcaggtgtctgagttggagacaaggtagaacaccaaaattagatggcacctattataatrgtttgaaaaatcatataaacaactttggtctatttgaatatgtatttttttctattgtcaattatttgtattatgatattttctagttgattatttaaac

SEQ ID NO: 10685 - DNA, 201 bp, Homo sapiens
ccattaaaaatgatttatagcaagagaataaaagttcatttctacccctaaaacaataagataaaaaagagtaatgaatattgagaatccaatagacagakttgagaaccagttaaacataagaaagaattagtgaattggaagataactgcccagaatgaagcataaagagaccaagaggtagaaaatataaggctagag

SEQ ID NO: 10686 - DNA, 201 bp, Homo sapiens
gactcccaggaactcgaaaccagcaccaagaatagatggtcaaaaatgatactttaatgaacaaataaatgggtggctaaaatggataagttgatgtggtwaaccagtgaaaaggaaactcacacaaaatctgcagttgcatgaattcccctgttccagtctcaggttaagattacaggcttatccaagcagaatccttct

SEQ ID NO: 10687 - DNA, 201 bp, Homo sapiens
aagctacatataacagtgtaggcatccaatgtatgatttatgtattaggttggaaaatttccctaacaactcacattgctgaacgcaaattatggagacaytaaacaaggaaaaaattgcaaaatgatgattaagtgtatgacttgatttgcatgctagcaaatgagaattcagctttcacatcaacatcagtatgaaaaa

SEQ ID NO: 10688 - DNA, 201 bp, Homo sapiens
aaagggaaacttgtccattggtattaggcctgccttaaaaaatgcggacatggtatgtttactactcatcattattttccataacagtaatggtagaattygtattttcccatgggcaccttcattaggcttatagactattttgatatttcaacatattattttctttgagtccttttaatgagttgttaaacaatgcta

SEQ ID NO: 10689 - DNA, 201 bp, Homo sapiens
aattcgtattttcccatgggcaccttcattaggcttatagactattttgatatttcaacatattattttctttgagtccttttaatgagttgttaaacaaygctaaaatttgccttacagtatactgttaactaatcatattttcccaaagtcatttgacataatgtttggttaaaggaaatatgtctagtacagttacac

SEQ ID NO: 10690 - DNA, 201 bp, Homo sapiens
atagactattttgatatttcaacatattattttctttgagtccttttaatgagttgttaaacaatgctaaaatttgccttacagtatactgttaactaatsatattttcccaaagtcatttgacataatgtttggttaaaggaaatatgtctagtacagttacactctaggattgtaatcctagaattgtaaatcagtgca

SEQ ID NO: 10691 - DNA, 201 bp, Homo sapiens
tttaattacaatggttttccttcctttccttttttacctgagtagaatctcttgttattttctggacagaaaaacagatctgcatgtggtggtaattttastccttccatttgaatatatgtatctctgttatgtgcttgtttatctaatattaaataaaattattcactttctaattatccacaacattgacaagctttt

SEQ ID NO: 10692 - DNA, 201 bp, Homo sapiens
tgatggatcacatctgaagacccactattgcactcttatcagaatacatatacacacacatgcatatcactgagttttaattgctaaagttgacaagtctstcaaatgtccatgggtgataaaatggataaataaattattgcatagtcatacaatagaatactatacagcaatcaaaatgaaccaactagagagacgttt

SEQ ID NO: 10693 - DNA, 201 bp, Homo sapiens
catatacacacacatgcatatcactgagttttaattgctaaagttgacaagtctctcaaatgtccatgggtgataaaatggataaataaattattgcatastcatacaatagaatactatacagcaatcaaaatgaaccaactagagagacgtttataaagaatgttaataaaaaggaaaatgaacaaatttgcactacat

SEQ ID NO: 10694 - DNA, 201 bp, Homo sapiens
aacaaatttgcactacatagatacgagagatattaagatggaaacatgattccgtataattacatttatataaagtttacaaaactatatttttaatgaaytgcaatttattacattgttgtcgaaattctaaagtgagacccaagagtgattattgtaacaactggcacagtagggacggaggaaacaaaagggaaatga

SEQ ID NO: 10695 - DNA, 201 bp, Homo sapiens
gtggtaacatgacccttaatgctataatttttttctatactgtaccttcaggctttattaatttatatatatgttatgtttcatagtaatgaaaatatttwaaaagcagaatcatataataaatgaatgaatataaaataggctgaaaaaacattcttgtagacaccatggtaattagaatttttgctgaataaagaagaa

SEQ ID NO: 10696 - DNA, 201 bp, Homo sapiens
tcttctgtgtcagttctgtgacagaacatttacttaacacatcatgaaggctagtttggatgtggaggggaatagactccatctatccatatgaggtgagycaaagcacttagacgtgttttcaaaccactaatcttgatgattcagaaatgtgctcccttttccaatttcatcctgatacaaatgtatcatctccggatg

SEQ ID NO: 10697 - DNA, 201 bp, Homo sapiens
atcctgaattctttgctaaaaatttgttctggggtttgaattaaataataacattcccctctccccttaaaaaaagatgagggctgtttactaaacatacstccttactgaaaatgctaataaccaatctgcttcagaaagactgttatggactgacttgtttgtctccaaaatccatgtgttgaagcccacactctcaat

SEQ ID NO: 10698 - DNA, 201 bp, Homo sapiens
taagttatttaaaaatctaaacacccgactgtaaaaataatacctatgtattattgctatattataaaattttagatctggctaccatcatgaaaaaaaaatatgacataccaaagaaatgctgattccagaaatgtgaagatggtttaacccatggtaatatattatgataatcaactcactaatagatttaagagggaa

SEQ ID NO: 10699 - DNA, 201 bp, Homo sapiens
atttcccaactatgaggtgtgtgtatgtgtgtgtgtgaacgtgtttgtgttaatgagcttgttaacaataagttatacaaaattattagttggcagcaacsagatttttaggaatattggccttcctgggcttcccaagaaaacgttggatgcttttggtaggaaaagttaggactcactaaatctggcacagaaaaggtg

SEQ ID NO: 10700 - DNA, 201 bp, Homo sapiens
ccatctctactaaaaatacaaaaaaattagccgggcatggtggcaggtgcctatagacccagctactcgggaggctgaggcaggagactggtgtgaacccrggaggcagagcttgcagtgagccaagatcgcgccactgcactccagcctgggtgacagagcaagcctgcgtctaaaaaaaaaaaaaaaaattggtgtttt

SEQ ID NO: 10701 - DNA, 201 bp, Homo sapiens
atcatgtgtcatgatgttgatatgactttgccagttgtcgcttcacaatgaggtgagacagacagcatggtggtcatcagatacatgcacttggctccccrtacttttccagaagggttacaaggggaagccacaacaaatattagtccatggaggagagaaaagggagaatgtatcctagctgtcttctgtcttctatct

SEQ ID NO: 10702 - DNA, 201 bp, Homo sapiens
gcaggcagatcacgaggtcaggagatcgagaccatcctggctaacatggtgaaaccccatctctactaaaaatacaaaaaaattagccgggcatggtggcrggtgcctatagacccagctactcgggaggctgaggcaggagactggtgtgaacccgggaggcagagcttgcagtgagccaagatcgcgccactgcactcc

SEQ ID NO: 10703 - DNA, 201 bp, Homo sapiens
agttaggactcactaaatctggcacagaaaaggtgaatcaacagtggtcgtgattctagttttgaccgagctgcatataacagtgtaggcatctgatgtasgatctatgtattaggttagaaaatttcccttacaactgccattgctcagcacaaattatagagaggttaaacaaggaataaatggcaaaatgatgaataa

SEQ ID NO: 10704 - DNA, 201 bp, Homo sapiens
aggcagaaggatcgcttgaacctgggaggcggaggttgcagtgagctgagattgtgccactgcagtacagcctgtgtgatggagtctcactctgtctcaaacaaacaaacaaacaaacaaacaaaaattccagttcaaactgaatgtccctaacctcagagaactatagtcaattcttcactgaagcatttgtatcttcct

SEQ ID NO: 10705 - DNA, 201 bp, Homo sapiens
ggagtgcagtggcgcgatctcggctcactgcaagctccgcctcccgggttcacgccattctcctgcctcagcctcccgagtagctgggactacaggcgccygccaccatgcccggctaattttttgtattttttggtagagatggggtttcaccgtgttagccaggatggtctcgatctcctgacctcgtgatctgcccgc

SEQ ID NO: 10706 - DNA, 201 bp, Homo sapiens
ctatatcatttggataatgatgtaattcaaaggcacagagcaccttttcaacaacataagcaaagtgaaaattatgtcatggaatacaatgatgtatctgyggttaatgaactatattttatctattgcaatgatattttgaaatccagtgctgctctttgagttccctttgagcagagtttgtggtggggacccagcaac

SEQ ID NO: 10707 - DNA, 201 bp, Homo sapiens
gagtctcgctctgtcgcccaggctggagtgcagtggcgcgatctcggctcactgcaagctccgcctcccgggttcacgccattctcctgcctcagcctccygagtagctgggactacaggcgcccgccaccatgcccggctaattttttgtattttttggtagagatggggtttcaccgtgttagccaggatggtctcgat

SEQ ID NO: 10708 - DNA, 201 bp, Homo sapiens
ctttattagttgttattactctgtatctgtatgttttgctccacaataaaaaatgttaaaaaagcagaaacctaaagtacatttctaagtgtaaaattagrgtgatgcagcatattcttatagatatcattgtaattagagtttttgctgaataaagaatagaggattatggtactaagaaatccaagttaaaatttaaaa

SEQ ID NO: 10709 - DNA, 201 bp, Homo sapiens
atgagaggctaagtttgataaagattgaaaatgcactgaaaagcccaagtaagaaaattattttttcattttagaaattataggacaataatatttcccarctatgaggtgtgtgtatgtgtgtgtgtgaacgtgtttgtgttaatgagcttgttaacaataagttatacaaaattattagttggcagcaacgagattttt

SEQ ID NO: 10710 - DNA, 201 bp, Homo sapiens
agggacaaactgactccattattttctcattctccttctgggaacagagtagtagccaggcaatgttctcataataaacagaaaaggaaaagaaactccartgtggaaaccatctcaaacctctgtgtgaagtctaccaattttctgttaatcaaagcaagctatgtgagtgtactcagagtccaggggcaaggtagtcac

SEQ ID NO: 10711 - DNA, 201 bp, Homo sapiens
atacaatggcaaattctattttcttaccaaggtatggtaacatcaattttaaccttataattttttatcttactctttattagttgttattactctgtatmtgtatgttttgctccacaataaaaaatgttaaaaaagcagaaacctaaagtacatttctaagtgtaaaattagggtgatgcagcatattcttatagatat

SEQ ID NO: 10712 - DNA, 201 bp, Homo sapiens
taataaagaaaaaaagagagaagaatcaaatagacacaataaaaaataataaaggggatatcaccaccgatcccacagaaatacaaactaccatcagagartactacaaacacctctacgcaaataaactagaaaatctagaagaaatggataaattccttgacacatacactctcccaagactaaaccaggaagaagttg

SEQ ID NO: 10713 - DNA, 201 bp, Homo sapiens
gtctttggattcagtttttctaagctgggtttgctggatggctctggtgatatgagatgggccaagttctgcatcttggaattagttagagtttggacaawgtaggctggatcaggcagggacaaactgactccattattttctcattctccttctgggaacagagtagtagccaggcaatgttctcataataaacagaaa

SEQ ID NO: 10714 - DNA, 201 bp, Homo sapiens
accttgcatgacaaaactttgccattccttatctatttttcttttggctcctctattcctgacacaacaagggtggacatatttcccacacgcttggtttwgcagagtacctatatcagttaggtttttctgccagagaaacctctccaacactacattacatattgatatctcacatgtctttggattcagtttttctaa

SEQ ID NO: 10715 - DNA, 201 bp, Homo sapiens; identical to SEQ ID NO: 971

SEQ ID NO: 10716 - DNA, 201 bp, Homo sapiens; identical to SEQ ID NO: 974

SEQ ID NO: 10717 - DNA, 201 bp, Homo sapiens; identical to SEQ ID NO: 975

SEQ ID NO: 10718 - DNA, 201 bp, Homo sapiens
ttgggaggctgaggcaggataatcaattgaaccagggaggcagaggctgcagtgagccaatattgcgccattgcactgcagcctgggtgacaagagtgaarctccatgtcaaaaaaaaaaatcgtaaatccatgagaaagaataatagtgttctcccactacccttaactctagtacattgaaaagaagacccaaatcaca

SEQ ID NO: 10719 - DNA, 201 bp, Homo sapiens
tgaaaagaagacccaaatcacatttatcaaataacattctcccttttagctgacattatcatcattattataatcatctacatttacatctatcttattawatgatttatttttgaaatatttacatacataatttggacaccgtttacataagttctaagagatatcattgtgggaaatttacgttagtaaacagcaaag

SEQ ID NO: 10720 - DNA, 201 bp, Homo sapiens
gcagaaaacaaactggtggtgtatgaaacattttatatttcttactggtttttctatactgtatgtgtatgaataatttcccaacgtatacctagaaaagyctttgacctaatattagtctagaaaaaaatatatatatatgtgtgtgtgtgtttatgtgtgtatgaaaacttaagaacattgacaataacatgctctttt

SEQ ID NO: 10721 - DNA, 201 bp, Homo sapiens
ccttttagctgacattatcatcattattataatcatctacatttacatctatcttattatatgatttatttttgaaatatttacatacataatttggacamcgtttacataagttctaagagatatcattgtgggaaatttacgttagtaaacagcaaagttcaagtcaagttgaatacatttagatttagaaagttaagt

SEQ ID NO: 10722 - DNA, 201 bp, Homo sapiens; identical to SEQ ID NO: 1002

SEQ ID NO: 10723 - DNA, 201 bp, Homo sapiens
ccaaaaaagctacttatatgaacttcatttccggtttctttcaaattgaaggtaaattccaagatgaagcttttattctattctctgaccaaagtgttggraaaagaaggaatttgttaccattttcatttctaacatactaaaacagaaaacaaaaaaccccaaaatcaaaaacacttttaaaaagaacatgccgttaag

SEQ ID NO: 10724 - DNA, 201 bp, Homo sapiens
gtgttgggaaaagaaggaatttgttaccattttcatttctaacatactaaaacagaaaacaaaaaaccccaaaatcaaaaacacttttaaaaagaacatgscgttaagattagtttgttcagtttccctgtagaaaataatttatggaaagataataaaagattattctgaacactaaaacaagaaaactaaaaaatgaat

SEQ ID NO: 10725 - DNA, 201 bp, Homo sapiens
ttgtatacattcatgtataactctaagagattttaagaagaaactttctgattttagttgcaacttttggaaatttgacatgatgtttcctgccaaccccrgatttttcaacaggtttttcttttaggtttaattattgacttcatatgacaaaactttgacattctccaactatttttcccttgtatcctgaattcctga

SEQ ID NO: 10726 - DNA, 201 bp, Homo sapiens
aatcatcatgttttccataaagacagcattgatttcatccactggcatattgagatgctttcctgtttgacattggtcacagaatttaaaaaggaacaagracattcctgcaaattcaggaatcaggtacacatagatgttaaggtcaagaccttaaaggaaatcttgaccagtgatatcaggcttgcctttaaaaaaatt

SEQ ID NO: 10727 - DNA, 201 bp, Homo sapiens
tatcaattctggtagtgtttgcatttgttcttggaaatgttgccaatggcttcatagctctaattaatgtcaatgactgggttaagacacaaaagatctcmtcaactgaccaaattgtcactgctctggcattctccagaattggtttactttgatcatattattacattggtatgcaactgtgtttaattcagctttata

SEQ ID NO: 10728 - DNA, 201 bp, Homo sapiens
tttttataaatatatgtggttcaaagataattttgttacatgtatacattgcataatggttaaatcatggccttagggtttccataacaagaataacaaayattgcatttactaattaatgtctaactcttaattccctcccacccactcactcttccaaggcttcagtgtctatagttctcccctctatatctatgtaaa

SEQ ID NO: 10729 - DNA, 201 bp, Homo sapiens
aatgttactgcacatttagaaatcaagtgtttatcgaagttaatgtctggatattaagggaatcacaaccagtgttattaagcctgcatttttttttttgttgttgttcaaacatatgtgttctgctcatcattttatcaattctggtagtgtttgcatttgttcttggaaatgttgccaatggcttcatagctctaatta

SEQ ID NO: 10730 - DNA, 201 bp, Homo sapiens
caggcagaagaaatctctagctgaactttataacaatttgaactggtcaagaagcctcctggccagaactcgggggaggatgtgaatcgggcatgcagacktcacaggctggggaagaactaaagcccttttctctcatggctgggaggcagatagccttgggcaagttttcaagcccattttgccctctgcctggaaata

SEQ ID NO: 10731 - DNA, 201 bp, Homo sapiens
gaggttggatcaatagaaattatatactctaaacaatacagggtaaaataattgaaaaaattatacatcatatcatgaatatgaaaggctataacaaatgrtgtactattcatgcattctgagtttcagaaaagcagaagaggttgatgttgaaaaaggactcagagaaataatgatcaaaaattttccaaacacagcaaa

SEQ ID NO: 10732 - DNA, 201 bp, Homo sapiens
actcatccactgtccagcaaggccaccatcatccctgtctactgggatcagtataggatcttcacagctgcacttccctgaatctgtcttgcattctccayatccttcccagcagtcccatgtctctataaatgcaaatctcactctctcactcccccggtacaaattctttattgggttctatttgtgcaatcaataaat

SEQ ID NO: 10733 - DNA, 201 bp, Homo sapiens
cacgtgccaccacaccctaatctcttatttttaaaaagaggattttaggactaaacaaatcaaatgtaagtttcccctcacctctttgatctctcacttgrgtaatgatgcagtttgaaggcaaagagccccatttctacattataagcaaaataaaagttaattcatggaatacaatggtgtatttgtaattgaggtact

SEQ ID NO: 10734 - DNA, 201 bp, Homo sapiens
ttatttttgtttattatttttattatttatttatttttcttttgagacggagtcttgctctctagcccaggctggagtgcagtggctccatctcagctcaytgcaacctccgcctcttgggttcaaacgattctcctgcctcagcctcctgagtagctgagatgacaggcacgtgccaccacaccctaatctcttattttt

SEQ ID NO: 10735 - DNA, 201 bp, Homo sapiens
tcatgatcaatctattatttttgtttattatttttattatttatttatttttcttttgagacggagtcttgctctctagcccaggctggagtgcagtggckccatctcagctcattgcaacctccgcctcttgggttcaaacgattctcctgcctcagcctcctgagtagctgagatgacaggcacgtgccaccacaccct

SEQ ID NO: 10736 - DNA, 201 bp, Homo sapiens
tacaattcttcaatcagagagataaaccatttcatgatcaatctattatttttgtttattatttttattatttatttatttttcttttgagacggagtctygctctctagcccaggctggagtgcagtggctccatctcagctcattgcaacctccgcctcttgggttcaaacgattctcctgcctcagcctcctgagtag

SEQ ID NO: 10737 - DNA, 201 bp, Homo sapiens
atgtcctccatcaaaggtattatttcagtctaagccctgatgctgagaataatatgagaatcataaagccaggagaaagaataattgtgttatcccattaycctgaattgtagcacttagaaaaatgaatggtcacatttattagctagcagtctaccttgtagctatcatcatcatctctatctacatctatcccattaa

SEQ ID NO: 10738 - DNA, 201 bp, Homo sapiens
ccctgccagccctaaagcagctggctggttctagcgtcagtgagccccagttccctcccatgaaggggtaagggaaatgtcctccatcaaaggtattattycagtctaagccctgatgctgagaataatatgagaatcataaagccaggagaaagaataattgtgttatcccattaccctgaattgtagcacttagaaaaa

SEQ ID NO: 10739 - DNA, 201 bp, Homo sapiens
tcccgagttaaaaatcttaagatttctttgtccaaaaaatctaagtagaatagtctctgatattgtttttttctaggctttcaaacaaaataggaacacaytgagtatccatatttttttttagcattttctttcttatcagacccgtaaaattctaattaggttttttttaaaaaaaatagtatctgcttatggaaattt

SEQ ID NO: 10740 - DNA, 201 bp, Homo sapiens
tccctcatttaccattctccaattcggttgtgcaacctcatttttcttggaagctggacaagagctcaggagccaggaatgcagatacgaaaagttgttamactgaacctctgcccttgctggcaagaggcagccgcctcaagcgaaaaggcaaagggcccactgagctactaacacttaagacgtctgcagatagcagag

SEQ ID NO: 10741 - DNA, 201 bp, Homo sapiens
gccggacttcaggggaagattaccttcctgcttcacattccctttccagctccccttcctgctgagagtcacttccatcaaaataaaatctccctcatttmccattctccaattcggttgtgcaacctcatttttcttggaagctggacaagagctcaggagccaggaatgcagatacgaaaagttgttacactgaacctc

SEQ ID NO: 10742 - DNA, 201 bp, Homo sapiens; identical to SEQ ID NO: 9459

SEQ ID NO: 10743 - DNA, 201 bp, Homo sapiens; identical to SEQ ID NO: 10205

SEQ ID NO: 10744 - DNA, 201 bp, Homo sapiens; identical to SEQ ID NO: 9669

SEQ ID NO: 10745 - DNA, 201 bp, Homo sapiens; identical to SEQ ID NO: 10379

SEQ ID NO: 10746 - DNA, 201 bp, Homo sapiens; identical to SEQ ID NO: 9672

SEQ ID NO: 10747 - DNA, 201 bp, Homo sapiens; identical to SEQ ID NO: 10381

SEQ ID NO: 10748 - DNA, 201 bp, Homo sapiens; identical to SEQ ID NO: 10382

SEQ ID NO: 10749 - DNA, 201 bp, Homo sapiens; identical to SEQ ID NO: 10498

SEQ ID NO: 10750 - DNA, 201 bp, Homo sapiens; identical to SEQ ID NO: 10605

SEQ ID NO: 10751 - DNA, 201 bp, Homo sapiens; identical to SEQ ID NO: 10499

SEQ ID NO: 10752 - DNA, 201 bp, Homo sapiens; identical to SEQ ID NO: 10500

SEQ ID NO: 10753 - DNA, 201 bp, Homo sapiens; identical to SEQ ID NO: 9530

SEQ ID NO: 10754 - DNA, 201 bp, Homo sapiens; identical to SEQ ID NO: 10504

SEQ ID NO: 10755 - DNA, 201 bp, Homo sapiens; identical to SEQ ID NO: 9411

SEQ ID NO: 10756 - DNA, 201 bp, Homo sapiens; identical to SEQ ID NO: 850

SEQ ID NO: 10757 - DNA, 201 bp, Homo sapiens; identical to SEQ ID NO: 10661

SEQ ID NO: 10758 - DNA, 201 bp, Homo sapiens; identical to SEQ ID NO: 845

SEQ ID NO: 10759 - DNA, 201 bp, Homo sapiens; identical to SEQ ID NO: 10296

SEQ ID NO: 10760 - DNA, 201 bp, Homo sapiens; identical to SEQ ID NO: 9417

SEQ ID NO: 10761 - DNA, 201 bp, Homo sapiens; identical to SEQ ID NO: 9771

SEQ ID NO: 10762 - DNA, 201 bp, Homo sapiens; identical to SEQ ID NO: 9774

SEQ ID NO: 10763 - DNA, 201 bp, Homo sapiens; identical to SEQ ID NO: 10412

SEQ ID NO: 10764 - DNA, 201 bp, Homo sapiens; identical to SEQ ID NO: 10523

SEQ ID NO: 10765 - DNA, 201 bp, Homo sapiens; identical to SEQ ID NO: 10524

SEQ ID NO: 10766 - DNA, 201 bp, Homo sapiens; identical to SEQ ID NO: 10082

SEQ ID NO: 10767 - DNA, 201 bp, Homo sapiens; identical to SEQ ID NO: 10668

SEQ ID NO: 10768 - DNA, 201 bp, Homo sapiens; identical to SEQ ID NO: 10670

SEQ ID NO: 10769 - DNA, 201 bp, Homo sapiens; identical to SEQ ID NO: 10528

SEQ ID NO: 10770 - DNA, 201 bp, Homo sapiens; identical to SEQ ID NO: 10531

SEQ ID NO: 10771 - DNA, 201 bp, Homo sapiens; identical to SEQ ID NO: 10677

SEQ ID NO: 10772 - DNA, 201 bp, Homo sapiens; identical to SEQ ID NO: 10679

SEQ ID NO: 10773 - DNA, 201 bp, Homo sapiens; identical to SEQ ID NO: 10236

SEQ ID NO: 10774 - DNA, 201 bp, Homo sapiens; identical to SEQ ID NO: 10316

SEQ ID NO: 10775 - DNA, 201 bp, Homo sapiens; identical to SEQ ID NO: 847

SEQ ID NO: 10776 - DNA, 201 bp, Homo sapiens; identical to SEQ ID NO: 10094

SEQ ID NO: 10777 - DNA, 201 bp, Homo sapiens; identical to SEQ ID NO: 10453

SEQ ID NO: 10778 - DNA, 201 bp, Homo sapiens; identical to SEQ ID NO: 10095

SEQ ID NO: 10779 - DNA, 201 bp, Homo sapiens; identical to SEQ ID NO: 10097

SEQ ID NO: 10780 - DNA, 201 bp, Homo sapiens; identical to SEQ ID NO: 10098

SEQ ID NO: 10781 - DNA, 201 bp, Homo sapiens; identical to SEQ ID NO: 9697

SEQ ID NO: 10782 - DNA, 201 bp, Homo sapiens; identical to SEQ ID NO: 9698

SEQ ID NO: 10783 - DNA, 201 bp, Homo sapiens; identical to SEQ ID NO: 846

SEQ ID NO: 10784 - DNA, 201 bp, Homo sapiens; identical to SEQ ID NO: 9700

SEQ ID NO: 10785 - DNA, 201 bp, Homo sapiens; identical to SEQ ID NO: 10100

SEQ ID NO: 10786 - DNA, 201 bp, Homo sapiens; identical to SEQ ID NO: 10548

SEQ ID NO: 10787 - DNA, 201 bp, Homo sapiens; identical to SEQ ID NO: 10101

SEQ ID NO: 10788 - DNA, 201 bp, Homo sapiens; identical to SEQ ID NO: 9703

SEQ ID NO: 10789 - DNA, 201 bp, Homo sapiens; identical to SEQ ID NO: 10549

SEQ ID NO: 10790 - DNA, 201 bp, Homo sapiens; identical to SEQ ID NO: 10254

SEQ ID NO: 10791 - DNA, 201 bp, Homo sapiens; identical to SEQ ID NO: 10550

SEQ ID NO: 10792 - DNA, 201 bp, Homo sapiens; identical to SEQ ID NO: 10257

SEQ ID NO: 10793 - DNA, 201 bp, Homo sapiens; identical to SEQ ID NO: 9547

SEQ ID NO: 10794 - DNA, 201 bp, Homo sapiens; identical to SEQ ID NO: 10258

SEQ ID NO: 10795 - DNA, 201 bp, Homo sapiens; identical to SEQ ID NO: 10708

SEQ ID NO: 10796 - DNA, 201 bp, Homo sapiens; identical to SEQ ID NO: 10711

SEQ ID NO: 10797 - DNA, 201 bp, Homo sapiens; identical to SEQ ID NO: 9553

SEQ ID NO: 10798 - DNA, 201 bp, Homo sapiens; identical to SEQ ID NO: 10344

SEQ ID NO: 10799 - DNA, 201 bp, Homo sapiens; identical to SEQ ID NO: 9649

SEQ ID NO: 10800 - DNA, 201 bp, Homo sapiens; identical to SEQ ID NO: 10118

SEQ ID NO: 10801 - DNA, 201 bp, Homo sapiens; identical to SEQ ID NO: 9651

SEQ ID NO: 10802 - DNA, 201 bp, Homo sapiens; identical to SEQ ID NO: 10120

SEQ ID NO: 10803 - DNA, 201 bp, Homo sapiens; identical to SEQ ID NO: 9652

SEQ ID NO: 10804 - DNA, 201 bp, Homo sapiens; identical to SEQ ID NO: 9453

SEQ ID NO: 10805 - DNA, 201 bp, Homo sapiens; identical to SEQ ID NO: 9454

SEQ ID NO: 10806 - DNA, 201 bp, Homo sapiens; identical to SEQ ID NO: 10278

SEQ ID NO: 10807 - DNA, 201 bp, Homo sapiens; identical to SEQ ID NO: 10279

SEQ ID NO: 10808 - DNA, 201 bp, Homo sapiens; identical to SEQ ID NO: 10282

SEQ ID NO: 10809 - DNA, 201 bp, Homo sapiens; identical to SEQ ID NO: 9455

SEQ ID NO: 10810 - DNA, 201 bp, Homo sapiens; identical to SEQ ID NO: 10280

SEQ ID NO: 10811 - DNA, 201 bp, Homo sapiens; identical to SEQ ID NO: 9456

SEQ ID NO: 10812 - DNA, 201 bp, Homo sapiens; identical to SEQ ID NO: 10283

SEQ ID NO: 10813 - DNA, 201 bp, Homo sapiens; identical to SEQ ID NO: 9457

SEQ ID NO: 10814 - DNA, 201 bp, Homo sapiens
taagaagagtattgagtaggtggacgggaaagatattcagaaggaaaactgtgctctgtagttggtgggtgacaaagcagtgtcttgagtcagaaagactrgtgcaagataaaactggaaaggtcagtgggtcattagctgctgggctgtgaagtttggtcttcattgagcaatgagtcatgggaagatgtttgaccagat

SEQ ID NO: 10815 - DNA, 201 bp, Homo sapiens
ataaaatgatgggcatgtccaaatttgggtatctgcctttctcgtggttaggctgttttcatttcttcacatgtaccttgaaaggctttaaatcatagackttacctggcccttgattatgaaggtgatgttaaattgctacctctcttaatccttggagtgtttaaatgaatgttctgtaattgatggatcaaagtgtcc

SEQ ID NO: 10816 - DNA, 201 bp, Homo sapiens
aatgttattggtttgatttttttatatgggctggttagttaattccgtagctattaacgctcctgacactggtccactattgtcttcatatttcccatccrtcttaaggaacagaaaaacagaacaggtaagcagtgtgagcaacattcaccaatgtctggttaatggaagaataggcttttgttttacagatttaaattt

SEQ ID NO: 10817 - DNA, 201 bp, Homo sapiens
agaaaagttgcatgccggaaagtacaggattgacatgtggttggacttttctttaatctggcgtttctcatggaccattttaggagattctcttccctcargatgctccatgagcaaatcagtttgagaatcatgaacagtagttctcatcttagagattcacatatagagtaaaaagcaaggccttgggaagtcttggca

SEQ ID NO: 10818 - DNA, 201 bp, Homo sapiens
caccagatgatagcccacaattctagttacatatgaagtggtggtgtggtgaaataacattgcagctcctcactaaaccaaaaactgcagcaagcttgtcrcagagagaccctcattttcccagctgtcaacctgactgatattttaatttttttgccctgtagaaaacttcagtctcttatccaatagataaatgagtga

SEQ ID NO: 10819 - DNA, 201 bp, Homo sapiens
cttgagtcagattatatcgtttctttgctgaaaaccgtccatgcttttccatagccgttagaataaaatccaaacccattacatgcctgttaaagaagaarggaagccaataaggcctgaacatggggattgtctgatgtgctggactggatataagatggtgtaagaaagaaagatgattcctgtatctctggcttcagc

SEQ ID NO: 10820 - DNA, 201 bp, Homo sapiens
tcatttacttgcagaaaaaaggattctactacaattatacttttttccacttgccctgaacttttgtcttctaataataatgttcccaaggtcattcctcmtacttttaggccaatatttagagctagcgaagaggatacagattaagagctggcacctttgggcccataagccgtaggtaggcagagggccaggttaaaa

SEQ ID NO: 10821 - DNA, 201 bp, Homo sapiens
ttattgcaagttttcttgtatgtatgtcaatgtgtttgctagcactgcaatgctgagttatttaattaaacctttccagctttctaggagtgttatcctcrtgttttagacaagtacagtgagacacagtaagggtatgtactttatccaaggtcgcgggaatagtaagtggcaaaaccaggaagtgaaccctggcagtct

SEQ ID NO: 10822 - DNA, 201 bp, Homo sapiens
gaatcctggggcataacttcctgcaaatttaggtttagtcacacaagtttactgtcactttccattctaagactgagtgtgcacttgtttcaactctctcrtttcaggtcagagatgtttctcctatcctagaactatttgaacttcaacttccccaggctctgcctcaaaattaactttagtaattaatgaccttcagta

SEQ ID NO: 10823 - DNA, 201 bp, Homo sapiens
ttgagggtaacatcaactttctgtaacccttatcaactttctgaggttgcagtgagccgagattgcgccattgcactccagcctgggtggcagagcaataytctgtctcaattaatcaatcaaccattcaataaatgtcaggcataaataaataaataagtaaatgtcagtgtttcttcgtaacagaaagaatattaactg

SEQ ID NO: 10824 - DNA, 201 bp, Homo sapiens
gagatccatcaggttaaattatcagatgaagaccccaatacattggttgcctcaagtagttctttctgaaaataaacattaaataggtaagttcctttgargaccggaactcattcccctttaatcactgtgatagtgcctggcacataataaaccttggataaatttttttaaaattaatgtgttcgtccaggaatgggg

SEQ ID NO: 10825 - DNA, 201 bp, Homo sapiens
ctgggcaaaagagaataatacaaagagaatggtgaaaaataaattgccattaagaagaaaagtatattactagtttgtcacctgtggagagagttgctaaytaaattctaaggtcatgcttacatcaaatgagcaatttttaaaagtctctcacttatggcagatgacatgtcttttattgcatcataaagtgttgggctc

SEQ ID NO: 10826 - DNA, 201 bp, Homo sapiens
tgaagaaacagacaggaaatgatattaggagatgttttgttgttttcgtaagctactggcaaccagataaaaatgatgaatctggaaaaaaacaagacaartgacctaacttttattatcatcctcactgtagaagtttctctgtaaatttctcgtcattgtgaaaaataagaaagatttgccagtttgtgttaagtatat

SEQ ID NO: 10827 - DNA, 201 bp, Homo sapiens
agccctgccccactgctatctcacctcttacctgccttttgtctagcaaactcctgctcattgttcagatccctgcctagaaaccacttaccccaggaaayttttcatgacacccagtcctggtgagatgccccacctgtgtgggcctgtggtacctgtgcacgtctctcgtagcacacgtcacgtggttctgccattgcc

SEQ ID NO: 10828 - DNA, 201 bp, Homo sapiens
cacataatggagacttgacttttcctcaaatcgcattagagtctataggtaagcctttcctttcttagcaatccagcactcatatagaagttgtattttcttttttttttttttcttttttctttttctttttcttttttttattgatcattcttgggtgtttctcgcagagggggatttggcagggtcacaggacaatag

SEQ ID NO: 10829 - DNA, 201 bp, Homo sapiens
cctttggattagatgactattaataagctgtagccagaaagaaagggaggccacaagttctgggtagctcaagaagggattgtataggcatgactggcctrgaaattgacatggatagaacagtattgttagagaaggcattttgttttaaagaatacattgaattttttttaaactcagaaggcatctttgtaatgttgg

SEQ ID NO: 10830 - DNA, 201 bp, Homo sapiens
accccatctctaccaaaaataaaattagctgggcatgatggtgcacactggtggtcccagctactcaggaggctgaggtgggaggatcacttgaagccccrgaggttgaggccacagtaagccatgattccaccactgcattccaacctgagtgacagagtgaggccttttctttttaaaaaaggcatagtaagagattaa

SEQ ID NO: 10831 - DNA, 201 bp, Homo sapiens
gagtaggcagaatatgggaatggacctggcctggactcacatgagtgagttgcattgcagtgggatactggcagtttttaaaactctggtgttctatttgrtgtttggaaatggtgaactgagtactgatgattaatgagcacagggattagtggtgatattagtaattttgcttggcacaggtcacatttaatgcctatg

SEQ ID NO: 10832 - DNA, 201 bp, Homo sapiens
ggtagggaagaacaatagttgattgaggaatgtcttccagcccaccccgcacacacacacacacacacacacacacacacacacacacacacacacacacmccctctgagggaaaaagcctcctttctaccttgacgttgttggtgatgtgccctgccacacagtgtgatagtttgggaccctatgacttccctgggctaa

SEQ ID NO: 10833 - DNA, 201 bp, Homo sapiens
gcaccttctgctatcaatttcagtctcgccactagttgctgtttctcagaagcacatctgacgacagatgtgagccattgggctagttctggcaaagtgcmgggatcaacagtgttggccccagtctctgtgactgttcctgagataaccttttggttttcatgtccctgtcaactggtttgggtgggtgagggatgggga

SEQ ID NO: 10834 - DNA, 201 bp, Homo sapiens
tgaaagggatttgcccagagatgtctgcatttgaccttaggttcctttttcttccagctgacttcatgattgtctagctccagcatcttagtaaatacatagcagcagtgcccattccagtgaaggatgctacaggggaggatgcatggggaggagtatagatattttctaaacaatagtaataggtcaagcatgagcatt

SEQ ID NO: 10835 - DNA, 201 bp, Homo sapiens
aagaggtgggctcccatggccttagatagcttcgcccctgtgtttttgcagggtactgcccccatgctgctctcatgggctggcattgagtgcctgtgacrtttccaggtgcactgtgcaagctgtcagtggatctaccattctggggtctagaggacagtggccctcttctcacaggtccactaggcagtgccccagtag

SEQ ID NO: 10836 - DNA, 201 bp, Homo sapiens
aagttacttccaagataaagtgggggtactggcattgggtaagcgctctcattccaaatcagagaaattggccaaaataaggaggctacaggccccacgcragtctgaaatccagcagggcagtcatgaagtcttaaagctctaaaataatctcctttgactccatgtctcatgtctagttcaccctcatgcaagaggtgg

SEQ ID NO: 10837 - DNA, 201 bp, Homo sapiens
gttatttttagtgtagtgtgcaataatggttgcagaaaatctttaaaaacaaatctttatgttgaatagggctgaaaattgctacaaatgtttgattagtmattttttacattttcttctcttaacttcaagccagcatgagaagaaataaagtcagagcaatgggaagtacactgctgtcaagaggcaggagtcccagaa

SEQ ID NO: 10838 - DNA, 201 bp, Homo sapiens
tcctttcaacaggccctttaatggtttccctactggcattctcccctctttctaatccatcctacataccaagattaatcttcctaaaatactgtttccaytgtgctcaaaaacctttagcggcccccccatggcctacaggatgaagtccagacctcttagccagttaagtcttcctacagactagttctcacttatttt

SEQ ID NO: 10839 - DNA, 201 bp, Homo sapiens
acctgagtgacagagtgaggccttttctttttaaaaaaggcatagtaagagattaatagcaataactaataataaattaaaacaattataacaatatactrtaataaaagttatgtgaatatcatctctctcactcaatatcttattgtacagtactcacttattttcggactatggttgaccttggataaagggggaact

SEQ ID NO: 10840 - DNA, 201 bp, Homo sapiens
taaaacattttcttggtgttaaaaaaagaatgatgatatatggatacatttaaaattggaatttgttctaaagtatgatttgttgtaggtagattttttttcctacctcctgtgttacggagttagcgtgatgatcatgatgattcaatatactgaagtaatgatagatgacacttaaaatttattacattgtaggtactc

SEQ ID NO: 10841 - DNA, 201 bp, Homo sapiens
aaagtctgttgtttaatctttttccatagggttgtatataacagttttagattctgtccagattcaaaataataaactagacagcagggtccaaagttctrccattatatctaatgattgtaatttttaaaaacaacaatgcagtcataaacttggattcagtctgtaacatttgcatgcactcagactttattataaatg

SEQ ID NO: 10842 - DNA, 201 bp, Homo sapiens
agtagtggtgtaagtatatttcaagtatatataattggtttgaattctttggtagagagaaatttataaaattatagtatcattatgagtgtagtttaackttttgcttaatgtatatatagaccctcaaatcttttttaaattggagccataatttactcaaatataataaaagagcgaaaatattgttcagtttacata

SEQ ID NO: 10843 - DNA, 201 bp, Homo sapiens
aatgtaagtaacagaaactaaataaaaaccttacattactgtcctgaaggtgtaacttggggatgaagtggggatggggacccgtgtcccgtgtaaataargcatttaattaagtgcaattttaacatttaaagttggcacctggacaaatttttactcccaacatttacatcttaaaaagtagtaaactttgctggaaag

SEQ ID NO: 10844 - DNA, 201 bp, Homo sapiens
ggaagcaataaagaagtgcaggaattactttaattaatgattgcagaggggaaaaatatttacgtttctctctatattcattcttagacttttttttttttaaaatggaagactggcttattctgttattttatatatttgtgttgcttgatatgctgggtttttggcttgtagtgtctgttgttagtatttatttgcctt

SEQ ID NO: 10845 - DNA, 201 bp, Homo sapiens
caccatcctcctaaggctgttcttgtgatagatttctcatgagatctggttgtttaaaagtgtgtgacagtccctctccctctttctcttttcctccttctctggccataaaagatgtgcctacttcatcttgcccttctgccataattgaaagtttcctgaggcctcccaaaatgctgccatgcttcctgtacagcctgt

SEQ ID NO: 10846 - DNA, 201 bp, Homo sapiens
gcaccatcctcctaaggctgttcttgtgatagatttctcatgagatctggttgtttaaaagtgtgtgacagtccctctccctctttctcttttcctccttctctggccataaaagatgtgcctacttcatcttgcccttctgccataattgaaagtttcctgaggcctcccaaaatgctgccatgcttcctgtacagcctg

SEQ ID NO: 10847 - DNA, 201 bp, Homo sapiens
agcaccatcctcctaaggctgttcttgtgatagatttctcatgagatctggttgtttaaaagtgtgtgacagtccctctccctctttctcttttcctccttctctggccataaaagatgtgcctacttcatcttgcccttctgccataattgaaagtttcctgaggcctcccaaaatgctgccatgcttcctgtacagcct

SEQ ID NO: 10848 - DNA, 201 bp, Homo sapiens
gactggcctagaaattgacatggatagaacagtattgttagagaaggcattttgttttaaagaatacattgaattttttttaaactcagaaggcatctttktaatgttggttaaaatgcattaggatgtctaaaacatttttggattgtctgtttgattagaccacttatatgtgtttgaatcataaaacatgaaggcact

SEQ ID NO: 10849 - DNA, 201 bp, Homo sapiens
ttggatcatgggtgtggtttctaatggtttagcaccatcctcctaaggctgttcttgtgatagatttctcatgagatctggttgtttaaaagtgtgtgacagtccctctccctctttctcttttcctccttctctggccataaaagatgtgcctacttcatcttgcccttctgccataattgaaagtttcctgaggcctcc

SEQ ID NO: 10850 - DNA, 201 bp, Homo sapiens
agtgaaggcttggatgtttagactgcgtcttgaaaggtgactccctcccaatggtacaggagagagggcaatgtaggcgtgtgtaaaggcaaggagatggrcgtagaacaggatatgtaatattaaggaagaaaactgtagaatttgaggttggagagttaggccatcaccaaatgatgaagtcttgaatgctgtacaaag

SEQ ID NO: 10851 - DNA, 201 bp, Homo sapiens
ggtgattggatcatgggtgtggtttctaatggtttagcaccatcctcctaaggctgttcttgtgatagatttctcatgagatctggttgtttaaaagtgtrtgacagtccctctccctctttctcttttcctccttctctggccataaaagatgtgcctacttcatcttgcccttctgccataattgaaagtttcctgagg

SEQ ID NO: 10852 - DNA, 201 bp, Homo sapiens; identical to SEQ ID NO: 3140

SEQ ID NO: 10853 - DNA, 201 bp, Homo sapiens
attacaggtgtgtgccaccatgcccgggtaatttttgtattttttagtagagacggggtttcaccatgttggccaggatggtctcgaactcctgacctcargtgatctgcccaccttggccctcccagagtgctgggattacaccgtagttcttaatgagtaaatctgtcttactcatttgtgtcaccttttatatgtcaa

SEQ ID NO: 10854 - DNA, 201 bp, Homo sapiens
aaagagtggaaacacgttctgggtcacctggtagccacttgttgccttgtgatgtcaataactgcgtgtgcttttgcagttgctttagggccagttggatkgcagagcacgtaacagtgccctgcataaaggtccacagaagggtgggcttcattaggggaaagaagaaagatgagacatgtacatcaatgtttgaatcag

SEQ ID NO: 10855 - DNA, 201 bp, Homo sapiens
tgggaatagggtaatagtgcttggagttggcagaggtgcaacagtagatggccatgggtgctgctttggaagggcctaaggatacagttgttgaatgattktaagaacaagagaaaggtggagtctcaataaggcagccgtacaatatgtttatcaagccttcaataggtttagtatatactcctttggcgcatgcttaca

SEQ ID NO: 10856 - DNA, 201 bp, Homo sapiens
ataacattctaaagtactacacaactattagttattattcttctttgttatttagaagcagctttccccagactcgtgagttcagggatctattcctttgygtctgtcttccattttgttcaagtgtccacaggaccctaaatgagcctgcctggcctggacccagtacttacaagggcttatgcttgtgactttcttctt

SEQ ID NO: 10857 - DNA, 201 bp, Homo sapiens
gattagtgatgtctgtcactggcttaagcattgaatgagtaggcatttttcctttgtatttgctactcctgctttagaagcatatataaaaatttgttcamcccttgactgacggtgcgtaaaccagaaataggaaggatctggttggggaaggggagagaaaggaggaagagagagaaggaaaaaagaaggacgaaagcc

SEQ ID NO: 10858 - DNA, 201 bp, Homo sapiens
tgaagagactgtgaaccaagttttctgtggagtagcagggcagctttaggtatgtttgctactgcagtgaaaaaggagaaacgtgttttgtttcagtttgmctgcctaggctgcacgttaagatcccaaagaatgaataggactgcgattacagatttaaagtttgcttgtatcctgaaaacttgcccagattaatatatt

SEQ ID NO: 10859 - DNA, 201 bp, Homo sapiens
attgataattagctgaagggtaataactggattcactcagtttttctgtcaacctggattccaaagaaataataattcaaggtcttctgattctttatgaraatctttaaaatttgttttctctgtcctgtggttatttctatgattactataatcatattttcggtcaataggatggaccttacaaatttgagaaacact

SEQ ID NO: 10860 - DNA, 201 bp, Homo sapiens
gtttgtctggaaaatacaagttaggctgaagttgggatgacccaaggtaagttttaaatataacggtacatgctacttgtattttcccaaatcactacttstgcacttctacaacaaacttctgctttctcacaggacttttatggaaggaagaaaagtaatttgaatcccttgggcctttttataggtccattgtcagcg

SEQ ID NO: 10861 - DNA, 201 bp, Homo sapiens
ttttttataaagctcttttattccaggcatgttcattatggcaactgaaggaaactgaagtacaaaaatattatttctccacttgtatcttttccatattgtgcgggagatagtataagaaatgtgttataaatagaaattgagaagatgcagaatagtctcatctttatcatcttgtaccccttgtcagacctaccaaag

SEQ ID NO: 10862 - DNA, 201 bp, Homo sapiens
attaacttgattgtggtagtcattttatattgtatatgtatatataaagtcatcatgctgcatacctaaaacatatgtaatttttacttgtcagttacacmccagtaaaactggggaaaaataaagaaccggtgggaaaaaataattaagtgacccaaatttttgtatcatagtggatgaaacccctttgctgtctctaag

SEQ ID NO: 10863 - DNA, 201 bp, Homo sapiens
gtcagttgtgttctggcactgcttcttctacatcttctcattgtctggcgctgtttcgaaagcactcatcaccataatgtcgtccatcttctgttaattcstctggtgtggtgtctgttagttctggaatttctccaaggtccatcttgaagcccttcatctcccaccttttttggttatattcacaatctctttcatgat

SEQ ID NO: 10864 - DNA, 201 bp, Homo sapiens
ttaagctttgaaagaaaggtgataaagattatgtaccttgaagaagtagtttttttgggtggttttccttaaaggtattaatatgtttgagagtcgagggwaagaagccaatggcaagagaaggataaaaaatgtaagaaagaggtgataataagttgatggagcaaaatctcaggatttgaggagggagtaggttcgagg

SEQ ID NO: 10865 - DNA, 201 bp, Homo sapiens
tccatctgaccaacaggtttattgcttttgaaacttaaaaattaatatggtaaatatatcctgcagtgtccatagtgggtctgaaaaaaaataaactattyatcattcaggagcacttccaatgttacctgaaggtcccttgggtttgcaactcaaaattttgttctatttctgactcacagctggctgttttcttgcttt

SEQ ID NO: 10866 - DNA, 201 bp, Homo sapiens
atcacaggtcttggctttatagtttaattacttgcttaacaattgctagtgattcactaaatcacaaggcttccaaacaaataacatcagtaactctgctrtgcctgagcaactccaattttcttgacaatggctaccaaactgtgtttagcctaatataaactgttagtttaactgcaagcaatgggggcttcaagcatg

SEQ ID NO: 10867 - DNA, 201 bp, Homo sapiens
ttcttcatttcattatgaacaaagagaattacttgtgtgctttttcagaggacatttgtgttatatgtttttctccattcatgttttatagatgttgtcayagagcatcttcatgtctgtaataccagtctagatcccatcatattatttttagctcttcaatgtatttcttatggatatcttcttttaatataaaaacac

SEQ ID NO: 10868 - DNA, 201 bp, Homo sapiens
tcttttttaatatctactgatatattttttcatatttaatgttttacaacagaattatgaagagggcagaacacaaagtatcccatattcctaaacacaaytgagaacctcctggaggaaagctgatgtggtcaggtttatacagctgaccattggaagggccagagcttctaacttgtgtctactttttgtgtctagact

SEQ ID NO: 10869 - DNA, 201 bp, Homo sapiens
ctttaaaaaagccaaatgacctctttacttttgaaacatgcaaatcaatgtatacttttctcacagttatttgaataatagttatatttactaaggatgcwcttttttaatatctactgatatattttttcatatttaatgttttacaacagaattatgaagagggcagaacacaaagtatcccatattcctaaacacaac

SEQ ID NO: 10870 - DNA, 201 bp, Homo sapiens
tttgaaggaaatgcatactttatttagaagttagtgagaataaagatgcattttttttcctatccaagtttacagatctcttgaattcccaggttaagaaytacttcatcagattataccggtctctcatgtttataaacatttatgccacctgctggatctgctcttaaaaaacagaataaacaattacaaaagcaaaaa

SEQ ID NO: 10871 - DNA, 201 bp, Homo sapiens
agaagcttagagtggctgccatatacaccagagcaaggcggacccccatgtgccttggaagcacatggcaggcctgctgctgccctaaccctcctgcctgwccctctgcctgggacatcctcccctgctttctaccacacctctcagccctcttttaaactttgcctttcatttcatcccatagcataaatatctcattct

SEQ ID NO: 10872 - DNA, 201 bp, Homo sapiens
tggggtcttccttgatgacttctgctttactcccacatctactcagatactgggtagtgatgctgagggatgtttgagtgggatcttttttttttttttttgagacggagtctcactctgttgcccaggctgtggcgcgatctcactgcaagctctgcctcccgggttcacgccattctcctgcctcagcctcctgagtag

SEQ ID NO: 10873 - DNA, 201 bp, Homo sapiens
aagaagcttagagtggctgccatatacaccagagcaaggcggacccccatgtgccttggaagcacatggcaggcctgctgctgccctaaccctcctgcctrtccctctgcctgggacatcctcccctgctttctaccacacctctcagccctcttttaaactttgcctttcatttcatcccatagcataaatatctcattc

SEQ ID NO: 10874 - DNA, 201 bp, Homo sapiens
cctctcaaccactgctccaaaatttgtctctggatggttgcctgaggataatccctgaccctgtgtccacaaaggacgtgggttctgccagccctgacagyttcttccacattctcctaaactgtcaggccagcaaaatgtctagtgtcgtggccatgagcttcctcttgtaacagagccatgtaatcagacataggtgac

SEQ ID NO: 10875 - DNA, 201 bp, Homo sapiens
gatctttgtagccttaccaatattataattttcatactgcactcctaactcctttgtgaagaggtggtatttttttctatatttttttcttggtgattagraagcaaataatttgattttcacaagtcttaagacatattttattaactttagggtctgaatattggtttctcttatttgtttgaaatactgacactatat

SEQ ID NO: 10876 - DNA, 201 bp, Homo sapiens
attaaggtgcaaagggctggttataattccatcactttatgatgacgtggcattcattgtgaacatatttacttcattgcctggtctgttggaattttatygaactgacatcataatctcatttcctactaaagaggctaagaaatacagcccttggtatttgctttaacctgcaacaaattaaaagttaagcataatcaa

SEQ ID NO: 10877 - DNA, 201 bp, Homo sapiens
tgtcattctctattttctgctttctcctactgcagggaactactaatctactttctgtgtctatggacttttctattctggacatttcacatgaatggatrtagcaggtgacctttcatgtctgacttctttcccttagcgtagtgttttcaagattcatcatgttgtagcatgtatcagtagttcattaatttttatggc

SEQ ID NO: 10878 - DNA, 201 bp, Homo sapiens
ttttcactttcagtctcatatgattccactccccttttcatcctccccctcttcatttttatttatttatttaatttttgagacagaatctctctctgtcrcccaggctggagtgcagtggtgcgatctcggctcactgcaacctccatctcctcagttcaggattctgctgcctcagcctcccgagtagctgggattaca

SEQ ID NO: 10879 - DNA, 201 bp, Homo sapiens
ctggtccaagccctttgcacatgtgattatttaaccttcatagcagccctatggggcaggttctgacctgctagtctcctcactttgtagatgaagtagcygaaacacagaggtcacttgcttatagccacatagccagaaagcagaggagctggaatttgaacgcaggcagtcggcatctgcagtcacccatacttacca

SEQ ID NO: 10880 - DNA, 201 bp, Homo sapiens
tgtgtgtttaaactacattctggatttaaaagcctgggctaactcaatcacaggtgcagccttgtttctatgaaaggagataaattcctatagagagtgaraaagggatgcggaagccatagcaaagagaagcctccctcccttccagtccctcctgttgttttcaaacattttttgttagcagttagcggaatcctaata

SEQ ID NO: 10881 - DNA, 201 bp, Homo sapiens
ccccacagtcttagattttatatctgtgaaatggtaataacagagctgttatattggaattaaatgaggtccatttatgtttttagcatatcctaagcagkgaatagtgagctattaataattactgtagtcacaatagttgaattttctgttgggtgaattttgtgtttttttaattgatgctcatcatatgatctaata

SEQ ID NO: 10882 - DNA, 201 bp, Homo sapiens
acagaatggagatatctgctctacttggcccctcagtgggactgctgctgtcctggtggcttttctgggcaggattttgtggaatgttgggaattgtaccmtctgaggaattgggcctgctgctgtgggctccccttgtctctgaacattgtagagtccgtcttttgttgagatgctgaagacagcccaggttgagggctg

SEQ ID NO: 10883 - DNA, 201 bp, Homo sapiens
gatggcttcccactttgcaattccttgatgtttttgctcagagaggaaacccatctctgcggtacatggtatggcctccatttttgaggaattttgtggargacaaggtcatggagcttgagacacatgcagtctgtgatcaggcttatgctttatctgagtaggaccacaatgagcctccgtcagggcaagctgtatgga

SEQ ID NO: 10884 - DNA, 201 bp, Homo sapiens
aggtcattgtacaggaaaaggctttgcttaaacaagtgcccggttcaggaaaagatatgtttcctgaagaagatactttttttttttttttttttttttttgagatagaatctcattctcttgcccatgctggagtgcagtggtgcgatctcggctcattgcaacctccaccttctgggttcaagcgattttcctacttca

SEQ ID NO: 10885 - DNA, 201 bp, Homo sapiens
atgttttgaatgagaatgtaaggcagatgagctccttatattcttacagcaatctttccagattgtcttcatggcaagtcacacaactgtcagttctgatrcagttcttgtgacttgttttcaacctattgtgcatggacctcaggtttagtgaattcagtattacattgaacagcaatattatttaccatgtgataaact

SEQ ID NO: 10886 - DNA, 201 bp, Homo sapiens
tatactggttcatattagattgtgtttgaaaacaaccttgcaaatgtcaccatctgtccttcactttgaggccagaataggtaatagtggtttaacagaartttcagtgggtactctttcttgcaacatcacaagtaataccttgtgaggaggcaggggatatgataaatattttggaagtaaaattagctttggtaggtg

SEQ ID NO: 10887 - DNA, 201 bp, Homo sapiens
cgttagacaccactcccagccctgaccttttgatgtcggttattgaaggtttggcctcccctcccctcccttcccctcccctctcttctcctcccctcccytcccctcccctctcttcccctcccctcccctcccctctcctccttttctttcttagttttgagacaggatttggctctgtcgcccatggtggagtgcagt

SEQ ID NO: 10888 - DNA, 201 bp, Homo sapiens
tgttagttacagtgagaagccataaaattcttcctatgcaggaaaatggtagaagcattttttgtgtctaaaattgttctttcttaaaaagaaaagaaaaraatctttttctggtgtggtaacaaaaaattgaaatagcaaattcaaatagtagaaagtgtaaaaattcacaactgatgaggtgatagcatactttttttt

SEQ ID NO: 10889 - DNA, 201 bp, Homo sapiens
agcctaactacaagcaaggtttctagtatcagtaacttcatatcatttgaaatacaaaaattagcaatcaatgtaaaaaacgtcctgggctaagcatagcrtgaagtctgacttcagtgtagcattgaggagggtcctggcctcagatactgcaccagttgtttgttcagctctgggcaagaacattagtcagatcattag

SEQ ID NO: 10890 - DNA, 201 bp, Homo sapiens
gttatatggcttcgtatatgtgtttcccacagtggctggatcagtgcacctcatccaaatggttgatcaacaaatattcccaacaggttatagaaagaagrttctcagagtaatgatgtgtttctattgcttctttctaaatacttcccttctccttgcacccctccctgtaaagccagggactctatttcttgattcatt

SEQ ID NO: 10891 - DNA, 201 bp, Homo sapiens
ccatgctacttatagtcttgtgaggattcccacttttgggaaagccaggactttgtctttcttttaactaattgctatgtttgcatttatttattcaacaygtaattgagtgcctaatatatgccagtgctgagcaaacagtaagcagtcaatacatatttgttgattgaataaatgactgattgcatctactgaagccct

SEQ ID NO: 10892 - DNA, 201 bp, Homo sapiens
ggatacatgcttatctacaacttaaactacctctttctaaggagtccataacatgaggtgaattatcccatcgtgagtagactttttaaaggaaaaaatamactgtcttctttatgacatgcagtgtgtggatgctcatttttacagtcttttcccgtatgttaatgaggaagggctgcatatctggtcagggttgttcta

SEQ ID NO: 10893 - DNA, 201 bp, Homo sapiens
gctctgggcaagaacattagtcagatcattaggtatttttgtccctttctgcattgtccttcgtcatatatttattaaacacctactgtatcctaggcagyatttcccagggatgcaaagatgaattagatctggttgcttttcttcagagtctgaagttaagtgtcaggtttgtggggaaggttattcttgccttgtgta

SEQ ID NO: 10894 - DNA, 201 bp, Homo sapiens
cctcatatctatcttgagaccacctcagcctggacttcattgtccatatcactatcagcattttggtcaaaaccgttcaacaagtctctcagaagttccaractttcccatatcttcctttcatcttctgagatctccaaattgtcccaacgtctgtccattacccagttccaaacttgcttccacattttctgtatcttt

SEQ ID NO: 10895 - DNA, 201 bp, Homo sapiens
tataaactacgctttccctcccccgctgactttatccccacagctcatggctgtctccacgaagtaagtgattctgtctgagtaggtattttttttttttytatttaacctaggatcagacctaagggagttttgttgttgtcgttgttgtttttgagacagagtttcgctcttgttgcccagcctggagtgcaatggcgt

SEQ ID NO: 10896 - DNA, 201 bp, Homo sapiens
tctccttgcctcagcctcccgagtagctgggattacaggcgctaccaccatgcctggctaattttttgtatttttaatggagatggggtttcgccatgttrgctaggctggtctcgaactcctgacctcaggtaatccacccgtcttgcctcccaaagtgctgggattacaggcatgagctgccgcgcctggccaatttta

SEQ ID NO: 10897 - DNA, 201 bp, Homo sapiens
ccaccatgcccagctgatttttttttaaatcttttgtagagatgaggtctcatgttgcccgggctggtcttgaactcctgacctcaaatgatccccccacytcagcctcccaaaatgctggcattacaggcatgagccaccatgcctgtcctttgttcaagtatttttgatagctgagaaatatggcatcagacgtcactc

SEQ ID NO: 10898 - DNA, 201 bp, Homo sapiens
gtcccccagcagtgccagcccaccggcgctgcgctcgatttctcgccgggccttagctgccttcccgtggggcaaggctcgggacctgcagcccgccatgygtgagcctcccacccgctccgtgggctcctgtgcggcccgagcctcctcgacgagcgccaccccctgctccacagcgcccagtcccatcgaccacccaag

SEQ ID NO: 10899 - DNA, 201 bp, Homo sapiens
tttcaccatgttggccaggctggtctcgaactcctgaccttgtgatatgcccgcctctgcctcccaaagtgctgggattacaggcatgagccaccgtgccyggcctataaaatattttaagccaatgtaatgactagctgcacgcccacacctcatttttaaaaatatagcaacccagcaaagcccgtgttcccatacttt

SEQ ID NO: 10900 - DNA, 201 bp, Homo sapiens
aactaagcctagcacaaggccatttacattcagctgctgatggatttggtctggttacatttgggtcacactgagcaataaggcgacgttcagacacagcstggttattgcagacttttctttgccctgtaatgtctatgagtgtgtactaggaaaaggaatcatttcagagcctaattcacattattcaccccgattcca

SEQ ID NO: 10901 - DNA, 201 bp, Homo sapiens
cttaataactatacattctttaacagctttacttatttatttagagacagggtcttgctctgttgcccaggctggagagcaggggcgcatttatagctcayggtggcctccaagtcctgggttcaagtgatcttcccacgtcagcttccagaataaataggactatatgtgcataccactatgcctagctaatacttttaa

SEQ ID NO: 10902 - DNA, 201 bp, Homo sapiens
gaatgcctgttgaaactaagcctagcacaaggccatttacattcagctgctgatggatttggtctggttacatttgggtcacactgagcaataaggcgacrttcagacacagcgtggttattgcagacttttctttgccctgtaatgtctatgagtgtgtactaggaaaaggaatcatttcagagcctaattcacattatt

SEQ ID NO: 10903 - DNA, 201 bp, Homo sapiens
agatgattgttagcattttttagtgataaagtatttttaaattaagattatgtactttttttgacataatgctattgcacgcttaacagactacagtgtaktataaacatgacttttatacgcactgggaaaccaaaaagtttgcatgactcactttattgtgatagtgtgaaaccaaacctgcagtatctccaaagtatg

SEQ ID NO: 10904 - DNA, 201 bp, Homo sapiens
ataatcaatatcctattgtcagattatatcttatttacccaaacatctattgttcactcttagttgttgctttaaataatgctggttgcattttcttagaygtaaatactcttatattttaatatttgctaggattgaatgcctggaagtgaaattggccacataagaagattaatgataataatgatttatacacacatt

SEQ ID NO: 10905 - DNA, 201 bp, Homo sapiens
ttatttatttatttatttatttatttatttaagaaacagcattttgccacgttgcccaggctggtctcaaactcctgtgctcaggagatcctccctccttygcctcccaaagtgctgggattacaggcgtcagccacagcacccggccagaaatacctaggatcttaacatcaccaaatagcctctgagaagctcaatatt

SEQ ID NO: 10906 - DNA, 201 bp, Homo sapiens
attttgttttattttatttatttatttatttatttatttatttatttatttatttaagaaacagcattttgccacgttgcccaggctggtctcaaactccygtgctcaggagatcctccctcctttgcctcccaaagtgctgggattacaggcgtcagccacagcacccggccagaaatacctaggatcttaacatcacca

SEQ ID NO: 10907 - DNA, 201 bp, Homo sapiens
aaagtaggagaagcagctagggtatgacttggcaaagactctggaagtaatatccaagagtggtttggaacatgggtgcagggctgggtcagtgcatggtratgtggtgattccgaagagtcaacatgggcacccaagtcttctgtctcctcactgagtttcttactgtgtcatagtgctaataacatccaaattatgaaa

SEQ ID NO: 10908 - DNA, 201 bp, Homo sapiens
gatggctgtgagagacctctttagaacacttcaaaggtcttttgaaaagtgcagtattttactgccaccttccctgttgtcataattctttagtgccttgrggccaactcccattggaaaggtggacacttaaaatccttttgtaggtaatgagcatttggttttactgcagccaataatttggactccagtggaaagctg

SEQ ID NO: 10909 - DNA, 201 bp, Homo sapiens
ccacctcagcgtctcgagtaactgagactacaggcacacaccaccatgcccagctaatgtttttgtttttggtagagattgggtttcattgtgttgcccargctgatttcaagcttctgggctcaagtgatctgcccactttggcctcccaaagtgctaggattacaggcgtgagctactgcgcccggccttgttggggtt

SEQ ID NO: 10910 - DNA, 201 bp, Homo sapiens
gtattacatgacttctgtagggttccgatgtctaatagctgaggtaacaaagaaaataagtcacagtccttggaatttacattctagtaaatgtaggttgytaaattgtattagactatggtgtagtcagtgtcacatgcatggcaagaaaagtgaatacgggaccaatggggtcaccataaagggaatgatagactgtac

SEQ ID NO: 10911 - DNA, 201 bp, Homo sapiens
aagaccaacctggccaatatggtgaaaccccgtctctactgaaaaacaaaaacaaaaacaaaaattagctgggtatggtggcgggcaccagtaatcccagytacttgggaggctgaggcaggagaatcgctccacggcggaggttgcagtgaaccgagattgcgccattgtactgcagcctgggtgacaagagcaaaactc

SEQ ID NO: 10912 - DNA, 201 bp, Homo sapiens
gatgaggtctcactatgatgtctaggctgattttgaactcgtgggctcaatcgagcctcctttctaggcctcccaaagtgctgggatgacaggtgtgagaygctgcatcctgagcccctttttttgtttgttttttgttttggcgatagagtctgtcacacaggctggagtgcagtggcaccatatttgctcactgctacc

SEQ ID NO: 10913 - DNA, 201 bp, Homo sapiens
tcactaagtatccttttctttttttcttctttaacacagaagcatccagggccataacttcactgccaccttttacctgttccacattgactcttgccaastgaactactttctgtctaccctctttggctttcatttggttttctgtgcccttgttccaacaaacatttatttatttattactggctatgtgccagacac

SEQ ID NO: 10914 - DNA, 201 bp, Homo sapiens; identical to SEQ ID NO: 853

SEQ ID NO: 10915 - DNA, 201 bp, Homo sapiens
gccagatgtaatccttcccttttgtattttactgttgccagatgtgtccctttaaagcagttcttaatgggctagataggtctgcctgactcagtctcttkgtcttgtcccacagtgcctagtatctcacaggcactctaaaggatatggaattgacctcatcctgccacctccatttcttcttcactgcccactttcttc

SEQ ID NO: 10916 - DNA, 201 bp, Homo sapiens
ctgcctaagccctttccattcttgaagaccctagtgaaattccattatctcatctaaaacttttcctagtcatctccagccagatgtaatccttccctttkgtattttactgttgccagatgtgtccctttaaagcagttcttaatgggctagataggtctgcctgactcagtctctttgtcttgtcccacagtgcctagt

SEQ ID NO: 10917 - DNA, 201 bp, Homo sapiens
acttgatgggaatgtcatggtctgcttgcagaatgtgtccttgatgaaagtgttttggctctttaatctgtatgtaaatttccatgtgaatcttaaaaaamaaaaaagtctgttagagatgtcactgcctccagctctagccttttcttctctcttcttttgctgcctttccttcatttacttgtctgtctagaatgcctt

SEQ ID NO: 10918 - DNA, 201 bp, Homo sapiens
tatatatatatatatatatttatgtgtatgttagcatatacatggtatatgattttaaattaaacttgtgaaatcatgagctcatgcagaataagtaatcmttgctgtctagcatccataaactcttattccattttccattactcattaaccattcattttactgcacgtctgttttggagagcaagaaaggacttgggc

SEQ ID NO: 10919 - DNA, 201 bp, Homo sapiens
gaattgtggtgcccaggcatctagagggaaaagcaaacttcattacagcaatttctcggaggatacaatatatataaataaaatgccgtatatttttgaayattatttcttgataagcaatatatgcacatgatagaaaatgtaaatattatatgcaaaagtcaatctccttcataactctttggccacctatccaactcc

SEQ ID NO: 10920 - DNA, 201 bp, Homo sapiens
ataatgtgttggtttctctgtgtcttttctcacaaggttactgagatactaaatcagaagggtttgtgccaaacttgtgctgaaggctgataatgtagggrgcattatgaattgtttcccagcttacattttggtctttgtgtagagtttgcatgtgggatttcatatctgtcgtctttaagttttcaatcagttttctat

SEQ ID NO: 10921 - DNA, 201 bp, Homo sapiens
aatccataaattacagggcattttgacttcctgatggggttgttggattaaaaccaaatgataccaaaaaaagtaccccacaaagtcaactgaaaccactratgtgacaagtgtctactagttaagaaacacttatgcaacagagtttctgcaattcttccattatttctaccgaaccaggtaggtttgacataggaaatt

SEQ ID NO: 10922 - DNA, 201 bp, Homo sapiens
agggatatgttggaatttaatgccttcttatggcatcagtactgaatatttaatcagaacaaaaagagaaacatgttagaattttcaaattacagagttaycgtgtggatgcttcacagaggtacgtgcagttcagtgtgcttatacacccgtatgaacttctcacatttattagctataaaatacttcgaaggtgtattt

SEQ ID NO: 10923 - DNA, 201 bp, Homo sapiens
attctacaaagaacagctggctagactggaggagagggtatgactattttttatcattgattctattaccacatctgctgttttcttgtatatttatttaraaattaataaattagaacttcaactgcttttcctggttgtaaagtggccaggaagtgaagaagcaaagcaggtagttagttcgtcctctgtaacaatgtc

SEQ ID NO: 10924 - DNA, 201 bp, Homo sapiens
ggaggcaggggttacatcttgtaggacctagtaggtcataatcactattttggatgtatcccaagagaggtaggaaatcttgaagagttagggttgtaacytagaagttgtgagaccagatttgtggtttaaaaggggcactctggttgttgttgttttgataatgaattgtggtagagatgagggtaagagaccaaaaat

SEQ ID NO: 10925 - DNA, 201 bp, Homo sapiens
ttgttttcaggcgatatgagtctcatccagtctgtgctgatctgcaggccaaaattcttcagtgttaccgtgagaacacccaccagaccctcaaatgctcygctctggccacccagtatatgcactgtgtcaatcatgccaaacaggtaggtgtgccagccaggccactgggggcactgggcaaattgaaaactggatgac

SEQ ID NO: 10926 - DNA, 201 bp, Homo sapiens
acctcttttgaacatttggaaagtgaagcgctgagaagctgatataataggagaattgaaaaccaaaatgtatacacatcttcaccttttctaacagacgmcaagacaaatgaaaaatacatcctcagaacttgatgatgcaaagaaaataggattgttgctccagaaagtgcattaggctgggatctttaaaagaggccg

SEQ ID NO: 10927 - DNA, 201 bp, Homo sapiens
gaatatgatctgtacattatagtatttatggctgttaatgtcctaatttgatcatggtgctgtagttatataacagattgtccttgtgttttggaaattaygttggaatatttaggggtaaaggcatcatgtctgcaatttatcgtcatgtgtttcagaagaaaatatttgtgtgtgtatgtgcgtgttatgtttgtatag

SEQ ID NO: 10928 - DNA, 201 bp, Homo sapiens; identical to SEQ ID NO: 3107

SEQ ID NO: 10929 - DNA, 201 bp, Homo sapiens
ggggagagagaagagcaaagagacctccaggaccatcactccaaggaactccaacattgagggatcagttagaagacaatgagccagagagccgggaggaraaacaggagagtgtagtattatggaagccaagaaactcttttcaagaaaggggcaatttactggaacaagtctgtgctgatcgggtcctataagatgtct

SEQ ID NO: 10930 - DNA, 201 bp, Homo sapiens
caaggggagaactggatgtttctaaaactgtgtgtggtgaggaaatagttccccagcaggaaatcatgatgagcattccataaggagggggaacggatgcygggtggctgaatttctttgcatgcccctgattttaagattttagtgtatttggtgtaccctatgaaatatattgctgcaagttttaacacaatactttat

SEQ ID NO: 10931 - DNA, 201 bp, Homo sapiens
ccacttttttgctctgcatgtttgtctaattcattcctttactttgtagattttcactgtacgaatacccagtagttatccgttctctcattggaaaacakaatgagtgttttttgttgggttggttgtttttttttttttgttgttgttgtttgtttttttttttttgaatgagttctgtccatttgtaaaagtgtcttc

SEQ ID NO: 10932 - DNA, 201 bp, Homo sapiens
cagatttaaatttttattaaaatggcttttttaaaaaaccaccccaccccacactatacagtttttttccccctgttcaaataatttttaataataggtcrcattcctaagtccctggtgctacaaagagttttacatatattaccttatttaatccccagagaatcctattaggtaatcattgttacactagtcctgttt

SEQ ID NO: 10933 - DNA, 201 bp, Homo sapiens
cttttactatataatgaactaccacaaacttagtggcttaaaacagctaccattttactcacatcctgattctgcaggttaccaatttggactgttatcarctgggctcactcctgctgagttggctgaggtttggctgctctaggctgtcctcaccatagatagcctgtagtctctctcccgcttgcaggctagcctggg

SEQ ID NO: 10934 - DNA, 201 bp, Homo sapiens
ggtcatttcagtagaggaagacaaggatactttgtggtgttgtgtaatttcctcctaggtagttttggttgtgaatttctgagagagagtgggtgcaggasccatggatataggaacattaacttatgaactaaaatcagaatacttttcaaatataaatgtatttttcagtgcagtaggagaaaatatttaagaagaagg

SEQ ID NO: 10935 - DNA, 201 bp, Homo sapiens
cagatctggcgtaaatgtgatttagttaactggtgagtattacaccttatctataaatgtataattgtgccataagatcaaatgtcacagaagaaataaamcagctttgtgacatttctagctttataagtaaaacaataccctctatatagtagatactaaataaatacttgttgattattgaatttgaccattccttca

SEQ ID NO: 10936 - DNA, 201 bp, Homo sapiens
gccataggtcatttcagtagaggaagacaaggatactttgtggtgttgtgtaatttcctcctaggtagttttggttgtgaatttctgagagagagtgggtscaggagccatggatataggaacattaacttatgaactaaaatcagaatacttttcaaatataaatgtatttttcagtgcagtaggagaaaatatttaaga

SEQ ID NO: 10937 - DNA, 201 bp, Homo sapiens
ttagttgtctgtacatacaaaatcctgtcactgagacctatatgtagctggcgagatacaacagatatgcaataggtgagatatgatatagctgggaatastctaattgccctggagtggactcagtatttctaaaattgccacagcagatctggcgtaaatgtgatttagttaactggtgagtattacaccttatctata

SEQ ID NO: 10938 - DNA, 201 bp, Homo sapiens
caaagaagtggccataggtcatttcagtagaggaagacaaggatactttgtggtgttgtgtaatttcctcctaggtagttttggttgtgaatttctgagaragagtgggtgcaggagccatggatataggaacattaacttatgaactaaaatcagaatacttttcaaatataaatgtatttttcagtgcagtaggagaaa

SEQ ID NO: 10939 - DNA, 201 bp, Homo sapiens
tgggaggttggggctgcagtgagtcgtgattgggccactgcattctagcctaggcaacaaagcaagaccctctctctctcaaaaaaaaaaaaaaaaaaaaagaaggaaacttgagaacaagtacaaagtagcacgtagtctcataactgcaaagtaacatagtacaattttaaaagaatataatgatgagatgtaatcaac

SEQ ID NO: 10940 - DNA, 201 bp, Homo sapiens
gacaaagaagtggccataggtcatttcagtagaggaagacaaggatactttgtggtgttgtgtaatttcctcctaggtagttttggttgtgaatttctgaragagagtgggtgcaggagccatggatataggaacattaacttatgaactaaaatcagaatacttttcaaatataaatgtatttttcagtgcagtaggaga

SEQ ID NO: 10941 - DNA, 201 bp, Homo sapiens
ctgaggtgggaggatcatgaggtcaggagatggagaccatcctggccaacatggtgaaaccccatctctactaaaaatacaaaaaaattagctgggtgtgktgacacgcacctgtagtcccagctactccggaggctgaggcaggagaattgcttgaacctgggaggcggaggttgcagtgagccaagattgcgccactga

SEQ ID NO: 10942 - DNA, 201 bp, Homo sapiens
ttgaacctgggaggttggggctgcagtgagtcgtgattgggccactgcattctagcctaggcaacaaagcaagaccctctctctctcaaaaaaaaaaaaaraaaaaaagaaggaaacttgagaacaagtacaaagtagcacgtagtctcataactgcaaagtaacatagtacaattttaaaagaatataatgatgagatgt

SEQ ID NO: 10943 - DNA, 201 bp, Homo sapiens
tacagatgcgcgccatcacccctggctaattttttgtatttttttgtgtagacatggttttgccatgttacctaggctggtcttgaactcccgggcccaarcaatctgcctcactgacttcccaaaatgctgggattacaggcgtaagccaccgagccgagccctgtgttttaatcaatttaaattttaggtgtttctgat

SEQ ID NO: 10944 - DNA, 201 bp, Homo sapiens
tgttgcaaactttgggaacatagtagttaaaccagtgttgtgttatgcccatatgaccatggttgctcgtatctgtttatttggctagtattttcattaawtttatttatttatttatttatttatttatgagacggagtcttgctctgttgcccaggctggagtgcagcggcgcgatctcagctcactgcaacctctacc

SEQ ID NO: 10945 - DNA, 201 bp, Homo sapiens
ggtactatgcattgtgtacatccttgttccaagattgttgggaaagaaatagtaatatcagtgtcagtaccatcaacgtcatcattaaaacatccaccatyggcacccgcctgtagtcccagctattcgagaggctgaggcaggagaatcacttgaacctgggaggcagaggttgcagggagccgagattgcgccactgca

SEQ ID NO: 10946 - DNA, 201 bp, Homo sapiens
ttctcttaaacaccagattctgaaccgcagaccaagactgatggttaaagcaaacaattcctaatacctcataatgatttgtcccaaatttccttctcttycattaattatattttccttaattaattaattttatgttagaatagcgtgactgatctcttaaatatatccgtggcctatcttcaaattgcctagtttcgg

SEQ ID NO: 10947 - DNA, 201 bp, Homo sapiens
aaatttatagtcattaaagcagcttaaaaatttcttcttgaggtcttcattcacttgctcatactttgattaatactgccttccatcttttcatctctttscatcttctggaaagaaagcaaaccttttttttttttttttttttttttttttttacttttgacaaagtgttctgatagttatttcatcagagtttggatc

SEQ ID NO: 10948 - DNA, 201 bp, Homo sapiens
gtgatttgtctagagtcaccagtcagtttggctccagactcatgctctgggctactatgccaaaccatctctttagtataaatgtgttttcttagtataaytgtgaacattaccagttcagatataggcactatatgaaatatgacccttcttggtatagatggatatttacaaaaattttaaaattacaacctgcaagaa

SEQ ID NO: 10949 - DNA, 201 bp, Homo sapiens
caaattgcctagtttcggtggtgattctatttggagatttttctgtggcatagtcatggtatgtattgtgttaattcttgtacatttccctgggtttttgrccgtggtttgtttttttcagttctgcagttcactgccctctcactagaatttatacctttcctttagaagatatttagaaagggctggtagaaacatagc

SEQ ID NO: 10950 - DNA, 201 bp, Homo sapiens
ttgaaacatttttttttctctgtatgtctgtgttctttagaggatagtaggaagtcagggaaccaccaacatgctttgcatttctattctagtaaaatatrtattagcttagtgtactggataaaaataatgagacaaatcatcacccaggcgtttccttattgatgagaaatattccccctgtgttctctaggggttttg

SEQ ID NO: 10951 - DNA, 201 bp, Homo sapiens
gcaggagaaagaggagatatgcggcaaacgtgagatcaattttggacactttgggtgtgaggtgcttctggtttgccagaaggaaggtgttcattaggcamttcagtgtggagaccgggcttctgagagataggtcttaagctcgagtgaatgcatttattaatggaatttattagtttatcaacaacagttagaaatcaa

SEQ ID NO: 10952 - DNA, 201 bp, Homo sapiens
gaggtggaggttgtggtgagccaagatcgcgccactgcactccagcctgggcaataagagcgaaactccgtctcaaaaaaaaaaaaaaaaaaaaaaaaaagagaaatcatgcacctagcatggtgcttttcacatagtaaagtctcacaagtatttgttcagttgaatgaatcactgggtctggaaaatcatgataacctt

SEQ ID NO: 10953 - DNA, 201 bp, Homo sapiens
ctacattatattaaaataaaaacttaaattatctctttgaaattggctactgaccagagactatagatacttgtcttaaaaatctttcttttaatttagtwtagtgttgaacacttgttttcctgtcatagacacaaattacacagttatgaaaattacataccttcaacctgcatgtaatttctaggtgtaagtaattaa

SEQ ID NO: 10954 - DNA, 201 bp, Homo sapiens
atctcggtttaagatgcctctaaatattcagttcaagttagacaaagaagtggccataggtcatttcagtagaggaagacaaggatactttgtggtgttgkgtaatttcctcctaggtagttttggttgtgaatttctgagagagagtgggtgcaggagccatggatataggaacattaacttatgaactaaaatcagaat

SEQ ID NO: 10955 - DNA, 201 bp, Homo sapiens
agctgatgatctcggtttaagatgcctctaaatattcagttcaagttagacaaagaagtggccataggtcatttcagtagaggaagacaaggatactttgkggtgttgtgtaatttcctcctaggtagttttggttgtgaatttctgagagagagtgggtgcaggagccatggatataggaacattaacttatgaactaaa

SEQ ID NO: 10956 - DNA, 201 bp, Homo sapiens
taaaactaagatttaaaactgtccaacttagaagtcagtttaactaatcccatggtagaattgagttatggtatatgtccaaaaagagactgagaacgagmcaataactaaagacatgggcacaatcaagtgggtctctcctaggtctgcccctgcttgcttctctctcttaccttgtgccattgtcaattctttattagc

SEQ ID NO: 10957 - DNA, 201 bp, Homo sapiens
cactgcatttgtagtttagaaatgaatgtctccttcaggagaggtagataggagctgaatagcagaagttaaacatgagttaggagaaggaaaagagatayggcgtcaagtcagcatgggtctagaattggacagagatggacaaaagaaggcagtgagtttaagaatgagagtttgagcaccttatcagtgcccttttca

SEQ ID NO: 10958 - DNA, 201 bp, Homo sapiens
ttctagtttatattatttgtgtatatttcttttgttgtttttcggtggggagaggagtgggggatgaggcttcttttttcagtgctctatatgttaataayattaactctcccagttacatgttgggatttcttttcctgtttttgttacttgcttcttctttggattttataatgcttttgttttatgcagtttcttatg

SEQ ID NO: 10959 - DNA, 201 bp, Homo sapiens
aaattaaatttgttgattgatgcggtgtcctcagcaggctcaagtgttgaattctcttagtgttttctaaataatgataatggaatatccattatgatttyttttgcattttaaaaaatctcactttgtgaacaaagggaacattacctagtatgagtgttttaatagccagggtagataatgccatacattgaatggggg

SEQ ID NO: 10960 - DNA, 201 bp, Homo sapiens
tagaattcaattaattgaatacatggctactttaattattctgttaacagctaattgatattcacagtgatcatgttttacagcttctaaatgcaatattmccttacaagtttatggttcggcctcctttgatatttcagttctttttctgttttatgtcagcatataattttcttaggttcgtatatattgcacctcata

SEQ ID NO: 10961 - DNA, 201 bp, Homo sapiens
ttttcccagagctgcgtatgatcttccttccttccctcctgttgctggtgtcagacctgcagcacagtctgaggctctcctgctttcttctgctccttctytcctccacccttcccacacatgcccccataatcagtctcttgtactttatgtcttagtgagaggtgacagcgtgctggcagtcctcacagccctcgctcg

SEQ ID NO: 10962 - DNA, 201 bp, Homo sapiens
cagagaggttaatacctttcccaaagttcccctagattgttgatggccatggtgggattagacattaaatagtttttcctctattccctgattccctgtayagtgttctttttattcttttctttcctcttcctctccccccctccctccctccctcccttccttccttctcttcatttctttctttctccctctctctct

SEQ ID NO: 10963 - DNA, 201 bp, Homo sapiens
gattttcccagagctgcgtatgatcttccttccttccctcctgttgctggtgtcagacctgcagcacagtctgaggctctcctgctttcttctgctccttytctcctccacccttcccacacatgcccccataatcagtctcttgtactttatgtcttagtgagaggtgacagcgtgctggcagtcctcacagccctcgct

SEQ ID NO: 10964 - DNA, 201 bp, Homo sapiens
agtttcttatgacccttgaatgacctgagcgttaggaacactgatcccttgtgcagttgaaaatctgtatataacttttggctccctaaaaactgaactastaatagtcatctattgaccggaagccttaccaatagcagagtagattaacacatattttgtatgttatatgtattacatactgtattcttacaataaagt

SEQ ID NO: 10965 - DNA, 201 bp, Homo sapiens
ttctagttggcacagtgcatgtgggctgctgagcagaaccaagtattgtcattgtggcagttacagtttttatttaacaaacatatagaaaatttaagcastttacatattaaaccatttgacctcataacatctttatgtgggaggtactgttagtagtcccatctttggccgggcgcagtggctcatgcctgtaatccc

SEQ ID NO: 10966 - DNA, 201 bp, Homo sapiens
actgggctcagtctgttttaaggtgtttcccagttgtcctgtccctgaccccatgtttccccaaagtccgttcctccttaccatagctcgaaatccttgcygctctcttccagtggatgaccttgagagcttgttgaggtaaataggattgcagagtgtttttttgttgatttggtttttttttttttgagatggagtact

SEQ ID NO: 10967 - DNA, 201 bp, Homo sapiens
tgagaccagcctgggcaaatatagagagaccccatctctaccaaaaataaaattagctgggcatgatggtgcacactggtggtcccagctactcaggaggytgaggtgggaggatcacttgaagccccggaggttgaggccacagtaagccatgattccaccactgcattccaacctgagtgacagagtgaggccttttct

SEQ ID NO: 10968 - DNA, 201 bp, Homo sapiens
aaagatccacattgcagttgaaaagttgaataaagaaatgtttggctgtataatacagatacttagttaaaagaggagagggttgaggggatcactttttyctactatgtgcagaagtatgatatagaggattacgactggctcttttctagttatgtctgagtatgggattaatttttttttttgtaagaattcaatttc

SEQ ID NO: 10969 - DNA, 201 bp, Homo sapiens
agctcttctttatttcagtatatttacctatcaattgggattgttgatacctccttcaaataaatattgggtttatttactgtttacttttaggatgagcstaatatgcagagacttgcagattattaatcttattactttgaaaaagaactgtttcaaggggtgaatactgaaacttgtcccagtacttggaattttctt

SEQ ID NO: 10970 - DNA, 201 bp, Homo sapiens
ctaggttatatacaaatatgatgccattttacatgagggacttgagcatctgtggactttggtatctgaagggggtcctggaaccaatcctctgcagatamcaggggatgactatatatcaaaagtgcagcttacagaatgcaaatatgtacattatctcatttgcgcctcacaaattccttttacggatagaatacttcc

SEQ ID NO: 10971 - DNA, 201 bp, Homo sapiens
actatgttggccaggctggtcttgaactcctgacctcaggtgatccacccaccttggcctcccgaagtgctgggattacaggcgttagccaccacacctgkccccatttattctttagagtaggaggctaagacagcccaaggggtacacagtcagataagacacttgtgatgcaattctattccagtgtcctgagaagtg

SEQ ID NO: 10972 - DNA, 201 bp, Homo sapiens
gaggctgaggcaggggaattgcttgaaccagggaggtggaggttgcagtgagcggagattgcaccactgcactccagcctgggtaacagaacgagactccygtctcaaaaaaaaaaaaaaaaaaaattaggagtgggaggttaagaaggaggaagtgagttaggcaacaccataaagcttactccggcttgaagactgata

SEQ ID NO: 10973 - DNA, 201 bp, Homo sapiens
tttttgctttgtcttagtgtctgcatgtgtttgacaagtgaacaataaaatgtgctgtttgattccacactgtcttgattcttttctgtgtccctcctgcmatctttctttttcatgtcacattacatgaggctcttttcacctctctctcctgaccctgagttctagtgttcattgctctctctcacccaggatgtgctc

SEQ ID NO: 10974 - DNA, 201 bp, Homo sapiens
aaccatgagctaaacaaacttcttttctttacaaattacccagtctttggtattctgttacagcagcagaaattgactaaacaccctatgatagaaaggargcttagaaaagtgaagtgatttgtctagagtcaccagtcagtttggctccagactcatgctctgggctactatgccaaaccatctctttagtataaatgt

SEQ ID NO: 10975 - DNA, 201 bp, Homo sapiens
tattcccgacaatgctaagaagaatgtcttcttggctaaatcttagccaatctgcactcctgctctctcagatcactcagccctgctagagtcttgatagmggagcagttggagaatcaagggagatgatgatattaaaaccaacagtactgtgttcctaatttttgggttgccagcagttgtaaggcaccctgtgtcacc

SEQ ID NO: 10976 - DNA, 201 bp, Homo sapiens
tattttggatatttgaccatttttccatttttggatatttgtggtgttttcttttttttttttctttatccttttttactattcccgacaatgctaagaaraatgtcttcttggctaaatcttagccaatctgcactcctgctctctcagatcactcagccctgctagagtcttgatagaggagcagttggagaatcaagg

SEQ ID NO: 10977 - DNA, 201 bp, Homo sapiens
ttgtggtgataagtagtggcaaataataacttttttttttaacagcttgccttgcaaccacaagatgctcatccatcaatctgatccaaatgattaaaagygaaataagtttctgcttcaaagttaaataatcgacattatctaataaatcataatatagaagttgggacaaacagccaaaactttaaatattaaaccaca

SEQ ID NO: 10978 - DNA, 201 bp, Homo sapiens
gagtctcgcactgtcacccaggctggagtgcagtggcgcgatcttggctcactgcaacctctgcctcctgggttcaagcgattctcctgcctcagcctccygattagctgggcttacaggtgcacaccaccgtgcctggccaatttctgtgttttttaatagagatggggtgtcacatgttggccaggctggtctcaagct

SEQ ID NO: 10979 - DNA, 201 bp, Homo sapiens
aaaataaaccaaaattacacattatatattccctctcccaaaggaatctccttgggaagctgttacgttttctactatagctgcccttatcgaagtttcgrtcctaccctcccttctccttctccgtccctcactcttccaccattttcttcccctctttcttttctttctgtctatcaagagttgcatgaaaaagcacat

SEQ ID NO: 10980 - DNA, 201 bp, Homo sapiens
ttcttgtcctcagagtgatttgatgggatatgggcaatattctaaacaatattaaatcaggaaggctttagttttctaacatacaaactctcagagagctraagactaaaaatttatttttctttgtataaccagtacctggcacaatactaggctattcatgctttgttgaactgagggctaaaactcagaaagttgata

SEQ ID NO: 10981 - DNA, 201 bp, Homo sapiens; identical to SEQ ID NO: 3126

SEQ ID NO: 10982 - DNA, 201 bp, Homo sapiens
gcaaattgttctgagtttcagtgtgttcctgtacttttttttttttttttttttttgagacagagtctcgcactgtcacccaggctggagtgcagtggcgygatcttggctcactgcaacctctgcctcctgggttcaagcgattctcctgcctcagcctcccgattagctgggcttacaggtgcacaccaccgtgcctgg

SEQ ID NO: 10983 - DNA, 201 bp, Homo sapiens
gtatattttggatatttgaccatttttccatttttggatatttgtggtgttttcttttttttttttctttatccttttttactattcccgacaatgctaaraagaatgtcttcttggctaaatcttagccaatctgcactcctgctctctcagatcactcagccctgctagagtcttgatagaggagcagttggagaatca

SEQ ID NO: 10984 - DNA, 201 bp, Homo sapiens
ttattatacaaaatgtttattatacaaaaatttgcaccagtagatttgaaaacgtaaaacatccataatcctaccactcctgatgactagtgttaatactkgctgtttgattcctgtttttaccatgcatatatacttctggggagtgtatggataggatggaggaggtacaaatttcggctcatattttactactattta

SEQ ID NO: 10985 - DNA, 201 bp, Homo sapiens
gacaaggtcatggagcttgagacacatgcagtctgtgatcaggcttatgctttatctgagtaggaccacaatgagcctccgtcagggcaagctgtatggaygtctagaggtacaggcagatggcgagggacgtcgagtgcatacagaatggagatatctgctctacttggcccctcagtgggactgctgctgtcctggtgg

SEQ ID NO: 10986 - DNA, 201 bp, Homo sapiens
ctgcataggtagggaagaacaatagttgattgaggaatgtcttccagcccaccccgcacacacacacacacacacacacacacacacacacacacacacamacacacaccctctgagggaaaaagcctcctttctaccttgacgttgttggtgatgtgccctgccacacagtgtgatagtttgggaccctatgacttccct

SEQ ID NO: 10987 - DNA, 201 bp, Homo sapiens
gtgtaggtagaataacattgtgatttgaggctactgccaggttatgccttttcaaaaatagacttttcactcatttggcatggcctcccctttcttctctrtttggcctgaaattcttaatttccctctctctcaagatagaattaagggcaagtgtgctggaagtgtttaatttggcaagaccaccattgatagacacat

SEQ ID NO: 10988 - DNA, 201 bp, Homo sapiens
ttcccatcattccctgtcatgcacaggtgatagaagaatgtattggtgcttcaaactgattattactttttacctccttgatgaactcaatatattattamgagagtggctcagtttcaaccctggaggcatcaaaaagaacaagttctaaataacatcctcctttagaatgcagcatattttaactgtgtctctccatct

SEQ ID NO: 10989 - DNA, 201 bp, Homo sapiens
tgtcattgctagagttttagtaagaagaaagtggaatgggcaaaaaagaggtgaagaatttcattcagacctatagattaatattctatattgtgggtgarttgaggaaaaaccattgttttggaaattttcttttcatgaactaaaaatgctttcagcatctgtatagatcccgtatcttcaaaatgcagcaggcatcca

SEQ ID NO: 10990 - DNA, 201 bp, Homo sapiens
tgactttgcagttatattttctttttaaaattccagttaaaattttgactcactcttttttatgtcttactacattatgctggtttaatgttagatttttwaaattttaattatttttaaaaatttaagtagagacagagtcttgctatggatcttgaactcctggctcaagtgatccttctgccttggtctcccagggtg

SEQ ID NO: 10991 - DNA, 201 bp, Homo sapiens
aatgcctagcacagtgcctggtgtgcattcagtaaatggacgagttgagtaagtttggagaaagagacgatggttaccttcaaatatttgtcatgtagatkgctttttttttttttttttaaacggagtctcattcgcccaggctagaatgcagtggcatgatctcagctcactgcatcctctacctcccaggctcaagca

SEQ ID NO: 10992 - DNA, 201 bp, Homo sapiens; identical to SEQ ID NO: 3139

SEQ ID NO: 10993 - DNA, 201 bp, Homo sapiens
aatgtggggattacaatggtatataagacaaagttctacccccatgccacttattttaatggtatctgtatatttgtgtgtgtgtgtgtgtgtgtgtgggkgtgtgtgtgtgtgtattttctgtaagaatgcaggctctgaagttgggctgagtttaattctggctatacctctcactggttttattttgggtaaatttga

SEQ ID NO: 10994 - DNA, 201 bp, Homo sapiens
atttaatgtggggattacaatggtatataagacaaagttctacccccatgccacttattttaatggtatctgtatatttgtgtgtgtgtgtgtgtgtgtgkgggtgtgtgtgtgtgtgtattttctgtaagaatgcaggctctgaagttgggctgagtttaattctggctatacctctcactggttttattttgggtaaat

SEQ ID NO: 10995 - DNA, 201 bp, Homo sapiens; identical to SEQ ID NO: 3145

SEQ ID NO: 10996 - DNA, 201 bp, Homo sapiens
aaatgctttctgtcaaattattaaccaacagttagcagcactactcaaaataataattctgttttaatatgctacatgagaactacataatgtggttagamatacatacgcaatggtatgctcagacaaaatgcagccattgttagttcatgatatagttctcacctaaaaccttgtcatagttttagaatatttttcttc

SEQ ID NO: 10997 - DNA, 201 bp, Homo sapiens
cttcctaagtcaaagcctcaagatcagtgcatatggaggaatttgccctggcacaatttctgtccgccttctgaaggacaatttcatctccccggtgaacygtatttatattagaccaggattctgctcctaagtctgtgacatattttgagtatgaaggggtcctgaaaacatagtagtagcttttgcttaaaaatcaag

SEQ ID NO: 10998 - DNA, 201 bp, Homo sapiens
ggatcttgaactcctggctcaagtgatccttctgccttggtctcccagggtgttgggattatagatgtgagccaccatgcccagccacatatttcttgttmtcatcacagaactatgtagtattttctcttcttttcttttttttttaaatctaaatgttaaaaagaagtctcaatttacttacttaaggcaatatttact

SEQ ID NO: 10999 - DNA, 201 bp, Homo sapiens
ctgttgcccaggctggagtgcaggggtgtgatctcagcttactgcaacctctgcttcctgggttcaagcgattctcctgcctcagcctcccaagtagctgrgattacaggcacccgacaccacatccagatgatttttgtatttttagtagagacggggtttcatcatgttggccaggctggtctcaaactcctgacccca

SEQ ID NO: 11000 - DNA, 201 bp, Homo sapiens
taactttgggataactttttagcactatttttgaagctcaggactctgtgaatggggaaaaacaaagagtggaaacacgttctgggtcacctggtagccasttgttgccttgtgatgtcaataactgcgtgtgcttttgcagttgctttagggccagttggatggcagagcacgtaacagtgccctgcataaaggtccaca

SEQ ID NO: 11001 - DNA, 201 bp, Homo sapiens
aaggaggagggaagagttctgaaacaaacaggagtttgtgggtagcatcatgtttaaaatacatgatacaagaaatcatgtggctgggcctggtggctcaygcctgcaatcccagcactttgggaggctgaggtgggcagatcacctgaggtcaggagtttgagaccagcctgaccaacatggtgaaaccccatctctact

SEQ ID NO: 11002 - DNA, 201 bp, Homo sapiens
ctatgtcttttctttgctgcgttctgatcttttctcttttgtttgctcacatacctgcttggaatggatatattgtttttacctcttaaacatgcttttakgtatataatttgatgctcaaaagatgagtaataggaaaggtttttttttttttttttttttgagatggagtctcactctgtcacccaggctggagggcag

SEQ ID NO: 11003 - DNA, 201 bp, Homo sapiens; identical to SEQ ID NO: 370

SEQ ID NO: 11004 - DNA, 201 bp, Homo sapiens; identical to SEQ ID NO: 371

SEQ ID NO: 11005 - DNA, 201 bp, Homo sapiens; identical to SEQ ID NO: 373

SEQ ID NO: 11006 - DNA, 201 bp, Homo sapiens; identical to SEQ ID NO: 375

SEQ ID NO: 11007 - DNA, 201 bp, Homo sapiens
ctttgtagatgaagtagctgaaacacagaggtcacttgcttatagccacatagccagaaagcagaggagctggaatttgaacgcaggcagtcggcatctgsagtcacccatacttaccatcactcgatcagactgtgtttcagaggctaaattattttctgatccagcagtaatgttacctattatatgtctgtctgaatg

SEQ ID NO: 11008 - DNA, 201 bp, Homo sapiens; identical to SEQ ID NO: 378

SEQ ID NO: 11009 - DNA, 201 bp, Homo sapiens
actagattagataaccttggttaggaccttctgaccctgcaatactaaaaaacgtttaaagaaaataattcaaccattaggtttttttttcctctttccartttttcaaaacttcctgattataactctcccttttttttttttttttttttaaccatgattggtgcttcaaccctggagttgagtgagttggaaataagt

SEQ ID NO: 11010 - DNA, 201 bp, Homo sapiens; identical to SEQ ID NO: 368

SEQ ID NO: 11011 - DNA, 201 bp, Homo sapiens
tttccatctgaatctgaaggtgacccttgtttaaaacttcatactctgggcggtctttttgtgtcagccttgctttttgccattttctttttcagatgacrcaaaacagacaagatcagctgggagcccttcaaagccagctctaaatggaattaaaagaaggtattctgaggcaggaaatagttgttagatgaagggcct

SEQ ID NO: 11012 - DNA, 201 bp, Homo sapiens
cccgggttcaagcaattctcctgcctcagcctcccgagtagctgggtgggactacaggcatgcaccaccacgcccagctaatttttatatttttagtagasacggagtttcgccatgatggccaggctggtctcagactcctgacgtcaggtaatctgcccgccttggcctcccaaagtgctgggattacaggtgtgagcc

SEQ ID NO: 11013 - DNA, 201 bp, Homo sapiens
gattaaaggttcttaacctgctttgtgccaagttgcactttggcattctggtgaagcctgtggatccattttacttttaaatacaaaaaatatggccgggygcggtggctcacgcctgtaatcccagaactttgggaggccgagacgggcagatcacgaggtcaggagattgagaccatcctggctaacacggtgaaaccc

SEQ ID NO: 11014 - DNA, 201 bp, Homo sapiens
gaatctcatgggattgagcccaaatactgcttttgtacaagaccttgctggcagacagacctttgtctgttgtgttgaacttctttgtctagtcatattgwagttcttgtatatcctcagacttatccttttgagtttttttatttttgagttggagttttgctgttgttgcccaggctggagtgcaatgcctcaatcttg

SEQ ID NO: 11015 - DNA, 201 bp, Homo sapiens; identical to SEQ ID NO: 3137

SEQ ID NO: 11016 - DNA, 201 bp, Homo sapiens
cttcattattcagcttccatttgctctgccttggctcatgaaagggaaagggcagatgagatgaataaaaggtgccagtgaaagccaatttcatatctcasgtggaatggggtgggcagcctagctgtaacctggacaaatgactattgataaagaatttattttctgtcacctttaaggagagcagagggtggtacagcc

SEQ ID NO: 11017 - DNA, 201 bp, Homo sapiens; identical to SEQ ID NO: 3138

SEQ ID NO: 11018 - DNA, 201 bp, Homo sapiens; identical to SEQ ID NO: 369

SEQ ID NO: 11019 - DNA, 201 bp, Homo sapiens; identical to SEQ ID NO: 372

SEQ ID NO: 11020 - DNA, 201 bp, Homo sapiens; identical to SEQ ID NO: 376

SEQ ID NO: 11021 - DNA, 201 bp, Homo sapiens
attagagtctataggtaagcctttcctttcttagcaatccagcactcatatagaagttgtattttcttttttttttttttcttttttctttttctttttcytttttttattgatcattcttgggtgtttctcgcagagggggatttggcagggtcacaggacaatagtggagggaaggtcagcagataagtgaacaaaggt

SEQ ID NO: 11022 - DNA, 201 bp, Homo sapiens
cattagagtctataggtaagcctttcctttcttagcaatccagcactcatatagaagttgtattttcttttttttttttttcttttttctttttctttttyttttttttattgatcattcttgggtgtttctcgcagagggggatttggcagggtcacaggacaatagtggagggaaggtcagcagataagtgaacaaagg

SEQ ID NO: 11023 - DNA, 201 bp, Homo sapiens
attccacctctgaaatactcgtgtatgagactcatcataatcatttggagaatctgtgtggtagattgttgttttctatacttcgtagttggtcttgttcrttttagtctcagcagcagactagaatgttaagccaatttgctaaatcttgcctgtcctctgtaaaatgcttaaatccgtttatataatacaaagggatat

SEQ ID NO: 11024 - DNA, 201 bp, Homo sapiens
ccaatatatttatactctaattaaaaatggaatatatttttataaaattagactaggagactcatcatttttggatataaatttttggagttaattcttartgacctgtaacaataaaagtttaatgtttgccattccctactgagtggagctccaaatgacatgaaattccagttttaactcagatcttgagcaaactga

SEQ ID NO: 11025 - DNA, 201 bp, Homo sapiens
cctcccaggtagctgggattacaggaatgtatcaccacgcccagcgaagttttgtatttttagtagagacggggtttcaccatgttggccaggctggtctygaactcctgacctcaagtggtccacttgccttggtctcccaaagtgctgggattacaggtgtgagctgccaccacgcctggcctagatggtttgttaatt

SEQ ID NO: 11026 - DNA, 201 bp, Homo sapiens
tgtgatttattgttttctgccttcttaaagtttctattttattgtattttcatattaaaaatgctagtgtgatatgctaaaatgatataatagtccaatartaggtagcaacctccagtctgaaaaatcactgagagtcagtgctggccttgtagggttcatgtggctgagcgaaatctgtgttccactagttttactttt

SEQ ID NO: 11027 - DNA, 201 bp, Homo sapiens
gctggagtgcaatggcgtgatctcagctcactgcaacctctgcctcccgggtttaagcaattctccttgcctcagcctcccgagtagctgggattacaggygctaccaccatgcctggctaattttttgtatttttaatggagatggggtttcgccatgttggctaggctggtctcgaactcctgacctcaggtaatccac

SEQ ID NO: 11028 - DNA, 201 bp, Homo sapiens
gaaaaattggttgacagctcatctaccttttgcagatggctgttgaatagtatagctccatgcggtataaaaccaaggggccagagaggaagctttgaaartaattgggggtttctgaaaacataagcagtttttctttgcaaagtggttttggctcagtaaagaatttacaggaaccattgaaagaggaaacttagaaga

SEQ ID NO: 11029 - DNA, 201 bp, Homo sapiens
ctgggttcaagcgattctcctgcctcagcctcccgattagctgggcttacaggtgcacaccaccgtgcctggccaatttctgtgttttttaatagagatgrggtgtcacatgttggccaggctggtctcaagctcctggcctcaggtgatccacctgccttggcctcccaaagtgctgggattacaggtgtgagccaccgt

SEQ ID NO: 11030 - DNA, 201 bp, Homo sapiens
ctcaggaggcagaggttgcagtgaggtgagattgcaccactgcattccagcctgggctacagcaagactccatctcaaaaaaaaaaaaaaaaaaaaaaaaraaaagaaaagaaaaaaaggaagtggtcaattctagatctattagaatttagactagactacgtgacagaatggatattgggaatgaaagggggaaagggg

SEQ ID NO: 11031 - DNA, 201 bp, Homo sapiens
tttgagaccagcctgtccaacatggtgaatccctgtctttacaaaaaaaaaaaaatacaaaaattaaccaggtgtggtggcgcatgcctatagtcccagcyactggggagggaggctcaggtgggaggatcacctgagcctaggaggcaaaggttgcagtgagctgagatagcaccactgccttccagcctgggcaacaga

SEQ ID NO: 11032 - DNA, 201 bp, Homo sapiens
tgttcccacctgttggttatgagtctctgtagttaattgataattagctgaagggtaataactggattcactcagtttttctgtcaacctggattccaaaraaataataattcaaggtcttctgattctttatgagaatctttaaaatttgttttctctgtcctgtggttatttctatgattactataatcatattttcgg

SEQ ID NO: 11033 - DNA, 201 bp, Homo sapiens
tcatatgattccactccccttttcatcctccccctcttcatttttatttatttatttaatttttgagacagaatctctctctgtcgcccaggctggagtgyagtggtgcgatctcggctcactgcaacctccatctcctcagttcaggattctgctgcctcagcctcccgagtagctgggattacaagcgtgcaccaccat

SEQ ID NO: 11034 - DNA, 201 bp, Homo sapiens; identical to SEQ ID NO: 3120

SEQ ID NO: 11035 - DNA, 201 bp, Homo sapiens; identical to SEQ ID NO: 3124

SEQ ID NO: 11036 - DNA, 201 bp, Homo sapiens; identical to SEQ ID NO: 3127

SEQ ID NO: 11037 - DNA, 201 bp, Homo sapiens
cagcaagaaaaaggcaaaagaaaaagcagaaaaaaggaggagggaagagttctgaaacaaacaggagtttgtgggtagcatcatgtttaaaatacatgatmcaagaaatcatgtggctgggcctggtggctcacgcctgcaatcccagcactttgggaggctgaggtgggcagatcacctgaggtcaggagtttgagacca

SEQ ID NO: 11038 - DNA, 201 bp, Homo sapiens; identical to SEQ ID NO: 377

SEQ ID NO: 11039 - DNA, 201 bp, Homo sapiens
tttcctcaaatcgcattagagtctataggtaagcctttcctttcttagcaatccagcactcatatagaagttgtattttcttttttttttttttctttttyctttttctttttcttttttttattgatcattcttgggtgtttctcgcagagggggatttggcagggtcacaggacaatagtggagggaaggtcagcagat

SEQ ID NO: 11040 - DNA, 201 bp, Homo sapiens; identical to SEQ ID NO: 3129

SEQ ID NO: 11041 - DNA, 201 bp, Homo sapiens
atcctgccttttgaaatgcagcctcaagaagtggctgcttgaatgttgcagtgcccccactggcttacaagaaccttgtcagtgtttggagaagtttaaakctagcaggtgtaattgttgttatgctttctggcttggctgtggtctttttctgaaggaactcttcaagaacattgagcagtattctctgtgcttgaaata

SEQ ID NO: 11042 - DNA, 201 bp, Homo sapiens; identical to SEQ ID NO: 3130

SEQ ID NO: 11043 - DNA, 201 bp, Homo sapiens
gaaacattgatgtggaggttcatgtcctcctcctagttactaatttagtttagaaaggaaatcatctgtgtagacttgacaagttttggtgagtgctgtaktgagttgggattttcccttctcggaccctcccgctctcagttcctgctaccctcctcactttcctcctccattgggtcgaagttaatctgacattagtac

SEQ ID NO: 11044 - DNA, 201 bp, Homo sapiens
ttgacttttcctcaaatcgcattagagtctataggtaagcctttcctttcttagcaatccagcactcatatagaagttgtattttcttttttttttttttyttttttctttttctttttcttttttttattgatcattcttgggtgtttctcgcagagggggatttggcagggtcacaggacaatagtggagggaaggtca

SEQ ID NO: 11045 - DNA, 201 bp, Homo sapiens
atgaaagctgctaaggcttggggcttgcaccctctgaagcagtggcctgagctataccttggcctcttttagccacggctagagctggagctgctgggacycagggcaccaagtcctgaggctgcacacagcagcagtgccctgggtctggtccaggcaaccgtttttccttcctaggcctctggacctacgatgggaggg

SEQ ID NO: 11046 - DNA, 201 bp, Homo sapiens
cagaaaatgagtaatgaatggatgggttttgttccgataaaactttatttccaaaaggcaagatttgggccatagtttgttgatgccagcattagagtgayaattcttgttctttgtgtattcatttatacagccctgctccatggactactcatgttataataaagggatagagaagggcatgatgacgatgtgcgttcc

SEQ ID NO: 11047 - DNA, 201 bp, Homo sapiens
tgcaagctccgcctcccgagttcacgtcattctcctgcctcagcctcccgagtaactgggactacaggcgcccgccaacacacccggctaattttttgtawttttagtagagacgggggtttcaccgtgttaaccaggatggtctcgatctcctgacctcgtgatctgcccgcctcagcctctcaaagtgccgagattaca

SEQ ID NO: 11048 - DNA, 201 bp, Homo sapiens
ccttcaaatatttgtcatgtagattgctttttttttttttttttaaacggagtctcattcgcccaggctagaatgcagtggcatgatctcagctcactgcrtcctctacctcccaggctcaagcagttctcctgcctcagcctcccaggtagctgggattacaggaatgtatcaccacgcccagcgaagttttgtattttt

SEQ ID NO: 11049 - DNA, 201 bp, Homo sapiens
ggtgagcacactccctcagcatcgcaccgctgcctcttccctttgcttatctcttccacattaggttgctgattagcgacagggcttggaaggattgccamttctgtaacgattcaatttgggggactgcataggcactgatacctttacaaagcaacgccgacattagtttattaccttctcaattttagcaactctgaa

SEQ ID NO: 11050 - DNA, 201 bp, Homo sapiens
ccctggttgactctgttgtaaatcatgtgcaatatctggacacagtttcctccaggaggagtttgttgttttgggcttgatgactttcatggctttttctktaacaacagtggcatcttcatgaggtaatcctttcagacttcatgatgttctctctgtccgggttctcttccatagtgttgacagtccttttcatagatt

SEQ ID NO: 11051 - DNA, 201 bp, Homo sapiens
cttgacttttcctcaaatcgcattagagtctataggtaagcctttcctttcttagcaatccagcactcatatagaagttgtattttctttttttttttttycttttttctttttctttttcttttttttattgatcattcttgggtgtttctcgcagagggggatttggcagggtcacaggacaatagtggagggaaggtc

SEQ ID NO: 11052 - DNA, 201 bp, Homo sapiens; identical to SEQ ID NO: 3147

SEQ ID NO: 11053 - DNA, 201 bp, Homo sapiens
gattagggcataacttgtgtccgatcattgtcaaagagcccatatcttccttatgtacaactcatttacttgcagaaaaaaggattctactacaattatamttttttccacttgccctgaacttttgtcttctaataataatgttcccaaggtcattcctcatacttttaggccaatatttagagctagcgaagaggatac

SEQ ID NO: 11054 - DNA, 201 bp, Homo sapiens
aatctatcacataatggagacttgacttttcctcaaatcgcattagagtctataggtaagcctttcctttcttagcaatccagcactcatatagaagttgwattttcttttttttttttttcttttttctttttctttttcttttttttattgatcattcttgggtgtttctcgcagagggggatttggcagggtcacagg

SEQ ID NO: 11055 - DNA, 201 bp, Homo sapiens
gttcatgactgaagtatgcagttgttacagtataaaattatgggcattataaggattaaacctagcttgtcaattgtgggtgaacgtcttttttattggartatgctacagtgtaaagataaaggcataacaactgttttaaattgtttttctttctcattttctctgtggtacgaaatatggtaaaaatacctgctaact

SEQ ID NO: 11056 - DNA, 201 bp, Homo sapiens
ctgtgatatcctttaagtgtcttttgtcatgtaggatttttattttattacgaagcaagtgaatttagcaaaatacaggttctgtattcttaatctgtgtwcaaattctggctctgctgtggaattcaaccaagtcaaccaatacttcttcaactgcaaaaagggggcaaatggaagaactaatttttaggcttacagtga

SEQ ID NO: 11057 - DNA, 201 bp, Homo sapiens
tgagttagagatggggagtgactgtaaagtagtgagcccatttttcttgagtttttggaaggcaaagaaggaaatcccaaaacaggaaatctcagtttatkgtgtatatttgttaaaaacaaaagaaaacaaaacaaaaaactagtcttgtttgataatgacattgcaagttttgtatattatttatttatttttgtattt

SEQ ID NO: 11058 - DNA, 201 bp, Homo sapiens
cacttttcctacccttccaaatagattcatggtctctagatcatgataatatgcccttgtatttcaggggacaagcctatgttaaatccactttggattcmgaaaatatggtcatcatattgatgcttttcagttaaggaagttggaaactgaaaccatttcattccctgcaactcctcaaaccaagtcaattctgtggca

SEQ ID NO: 11059 - DNA, 201 bp, Homo sapiens
atgtgtcaaccttgctcaggggctgtgctaatctctgtattgttcaaattgtcctagatgtgttgccaaagcaatcacttttacactgtttttgctgtagmttttctatgtttacatatatttgtacacacaaataccactgtgttacaattgcctacagtatttagtacagtgacatgctgtacatctttgcagcctggg

SEQ ID NO: 11060 - DNA, 201 bp, Homo sapiens; identical to SEQ ID NO: 3114

SEQ ID NO: 11061 - DNA, 201 bp, Homo sapiens
tctcagaagtagtcttcattaagctaccctacgactgtaatgaaacgctaagttttgagccaggaatttgtgtatagaacactaggaatggcttcattagkatcatgcatctttttcattaaactgtgagtccctttgagagaaagattgtgtctctgaacttagtggcctaaatttctagaattatgtcttcaaaaagtt

SEQ ID NO: 11062 - DNA, 201 bp, Homo sapiens
tattaacactgagtaattttcttctttcttaacttgtagttgttagagaacaatttagaaaattgatgcttctgtcaaaagtctggatgggtaggatacaygctcagtgtggatatgacaacattaagaactccacaacttttactaactatgaaaaaaagaatatattttatactccattaaactgttacacatcatcaa

SEQ ID NO: 11063 - DNA, 201 bp, Homo sapiens
ccagcacccgccgggtcaccttcgaggcggacgagaatgagaacatcaccgtggtgaagggcatccgggtgagtgcccgtggacgggcggagggccagtgsttggactcggaccccaaggccccatcttctccggacccgctcagcctgggtttctcccgtcctggaccctagcgtattaaggccagaagcccaggtgtct

SEQ ID NO: 11064 - DNA, 201 bp, Homo sapiens
cagagtcactcctatagtgttctgtattaggccaaatcagtgctaccagggaacagtaagtgcttttaagtcccccttttaaaccttctctgcccccaggrctacttgacactttgttgacagctgtcactgtacttgagtattccttgaaaagcctcgggaacccatgtggatcattatagaaggatctccaaactttat

SEQ ID NO: 11065 - DNA, 201 bp, Homo sapiens
taaaatttctgatgaatgacatttgataagtggtgtgatcctgtgaatactgataagcactcgaaattcagttggtgaagcatcaatttcacacctgagaycccagttccaagtttaggttaaaggtttgcctggcgtccgcagtctttttctcaggtcccttgataagtgcagtcattccaaaccacatttttcttctgc

SEQ ID NO: 11066 - DNA, 201 bp, Homo sapiens
tagtaattctaaaatttctgatgaatgacatttgataagtggtgtgatcctgtgaatactgataagcactcgaaattcagttggtgaagcatcaatttcayacctgagaccccagttccaagtttaggttaaaggtttgcctggcgtccgcagtctttttctcaggtcccttgataagtgcagtcattccaaaccacattt

SEQ ID NO: 11067 - DNA, 201 bp, Homo sapiens
aaagtgctgggattacaggtgtgagccaccgtgtccagtcgattttgtctatttttgaaactgtaacagttaagtcagttttgtccacattaaaaaatatrgttggtccacaaatgaaatacaatatagtgtcatatttaaatttttttcataattaaaggctgcaacaagttaaattttatcttgatataaatggtataa

SEQ ID NO: 11068 - DNA, 201 bp, Homo sapiens
agttatttggaaagttacattagatttgtaagacttcaaataatctatctggtataatgagtggtttaataaattagtcataaattttatcagccatctgkgttagagtatagtgtagtccttttatttttccattgatagcattgttgatatcatcaaataagggcttaaaacttatttgtaccttttagtttctcatac

SEQ ID NO: 11069 - DNA, 201 bp, Homo sapiens
caggaatttcccagtcgatcagcaaatgtatgcatcattgaaaattatattgcctgccacaggcactaaagtaaatattttggctcatgatgaatatcgtrtgtgatacatagtgcccggattaacaaatagcactaattattattctgttcacgtaaaaaaattaggatgttacagacataagtaaggttggaaataaaa

SEQ ID NO: 11070 - DNA, 201 bp, Homo sapiens
gaggctgaggcacgagaatcacttgaacctgggagccagaggttgtagtaagccgagatcacgccactgcactttagcctgggtgacaagagtgagacccygtctcaaaataaaagaaagtctatgagggcaaaattcattgtctgtcatatagtaggtaccaaaaagggattttatattaaattacgataatattttact

SEQ ID NO: 11071 - DNA, 201 bp, Homo sapiens
ctcaatgactctggtggcaattaaggtctcatattgaacgaagagtattacctgtcattggcaaatgtatcaagttttctgcagtgtaaatttttaagcarttttgtttctctttgtcactttttgaaataattgttgataaaattgctgatctgataaaagtgagataggtgaatttagtagcattatataatgtcatga

SEQ ID NO: 11072 - DNA, 201 bp, Homo sapiens; identical to SEQ ID NO: 3143

SEQ ID NO: 11073 - DNA, 201 bp, Homo sapiens
ttagacctcctgtgaaccatagagtaactgggaaacttttgatattcgcagagtgtaagagagtgatgagttcaagcattggtctctgacaaaatttgttytggattgctgtgaacacatttggtctcttgctgtttttttttttttttttttttttttttttacaaccctgttagttacagtgagaagccataaaattct

SEQ ID NO: 11074 - DNA, 201 bp, Homo sapiens
agagaaagggataacattgtgtttggcttttaaaaaagacattctgaaaggagatccggagggttagcagtacctgactctgctaatgtagttaatgcccygaaatgaaggtagtcagtggctttgcacacaaatatgtaattttaagaattctcatttatatgccagaaggtaacatgcaaggattgagggcattgaata

SEQ ID NO: 11075 - DNA, 201 bp, Homo sapiens
attttatttcctctcttaggtggggaatcataagctgtttcttctaaactgttaagcccctctgtctgagttgctccagagatactaagtaactcggatgstgttgacaggaaaagctttaggtagaggggaaaaaaacgactgagcacatttaccgctcagcagggttgccatgctcccctaaccccgcatcatgcagtg

SEQ ID NO: 11076 - DNA, 201 bp, Homo sapiens
atgtccaagagtgacaggggctaacatagctataaataagcaactattaagaaattgtaaaaagcagtgactgccaagagaaaaatatagagaaaatgccktgtgaatttggaggaagtttagagtgataggagctgtgtgccaaagccactagtctttcttgggcaattcccattatggaacaaagggatccagaatgca

SEQ ID NO: 11077 - DNA, 201 bp, Homo sapiens
taagcctgaaaaggtttgttttattgcttttcactgggtgagtctgaacctcttcgtcagttgtcaggcctgacagcttaagtgtattgtagttgcttccrtccttacctaaaatctagttctactctttcttttgttaattaaatgggaggcattcacttaaatgcattttatttcctctcttaggtggggaatcataag

SEQ ID NO: 11078 - DNA, 201 bp, Homo sapiens
aattatatataattaaaaaaacccaagtttgtaatatacactgacttactagcacattaaataaaatgacctggtgttgggtgtattaactactattattkcaaagtagtgatgagcatgaatatttggaatgtctgaaactattgtaatgtgttatgaaaatgtgtgatttctattggtgacaaatcacaggtactgtgg

SEQ ID NO: 11079 - DNA, 201 bp, Homo sapiens
cttttatattctagccaaacaaaatcttgtattgttaacccctttggagggaggtgggagtaatacaatttttgtctgtattataaaatattaaaaaaaawttttttttttctcgagatggagtcttgctctgtcgcccaggctggaatgcaatggcgcgatcttggctcactgcaacctccacctcctgggttcaagtga

SEQ ID NO: 11080 - DNA, 201 bp, Homo sapiens
gatgctcaaaagatgagtaataggaaaggtttttttttttttttttttttgagatggagtctcactctgtcacccaggctggagggcagtggcgcgatctytgctcactgcaagctccgcctcccgagttcacgtcattctcctgcctcagcctcccgagtaactgggactacaggcgcccgccaacacacccggctaatt

SEQ ID NO: 11081 - DNA, 201 bp, Homo sapiens
gataatataatgcccctctgttttatttatcccctgccaccacctttttcaagattttttatggaatgaggaataatatgtttaaggtatagactttttakaatgtttatatgcaaaggaccataagattatatagtagttcaaccttcaaattttaaaactgaggaaactgaggcttattagattgtacagctaagttgt

SEQ ID NO: 11082 - DNA, 201 bp, Homo sapiens
tgtttgagttccctaatcaataattgtaaaataactagaaattgatctatgccagctgtaaacccatgcatgcatttattttttctttttctttttctttyttttttttttttttgagacggagttttgctctgtcgcccaggctggagtacagtggcacgatctcggctcactgcaacctctgtctccagggttcaagtg

SEQ ID NO: 11083 - DNA, 201 bp, Homo sapiens
aagaatagtacaaagagcttgactctgattcatctgtttttaggcatttaccacactttatcattctatttctgcctacatatattatatatatatatatwtttttttttatttgggggaggggatcaattgagcatgggtagaagacatgctcatttacctcttaatacttctgcctcttagaaatcagtgtttcttaca

SEQ ID NO: 11084 - DNA, 201 bp, Homo sapiens
ggtaatgctgtgttaggaacactggagaagagtgtgaggtccttctgtgcaggatctggaaatactggagaatattcagagagagtccctgtttcccctcytgacctccatagctttgccaatatagcctcgagctaaaaaggaatgtgggcaacacagttgtaaatcaaatgtaaattttctctccagattataatactt

SEQ ID NO: 11085 - DNA, 201 bp, Homo sapiens
tgccccactgctatctcacctcttacctgccttttgtctagcaaactcctgctcattgttcagatccctgcctagaaaccacttaccccaggaaacttttmatgacacccagtcctggtgagatgccccacctgtgtgggcctgtggtacctgtgcacgtctctcgtagcacacgtcacgtggttctgccattgcccgtta

SEQ ID NO: 11086 - DNA, 201 bp, Homo sapiens
gatgtggacataaggggaacctaggtgaaggatagatgggaatcttttgcctattttctgtaactttaaaattttttcacaataaaaatgaagagagtatrtttgcttagtattgtgtatacactgcaacagtttagtattcaagaatatataaaatccccacttagccaaccttttcaggatgtgcccgccctgcccaat

SEQ ID NO: 11087 - DNA, 201 bp, Homo sapiens
ccatacataagtaaactaaaatggaaaaaaaaagtagtaatttttaaacagtactttaaaattagatacaccaaatgtggtagatgtgataattcagttgwacagaattcattttatgttcatgaactaataatagaatttgaataaacattttatatatgtttgtaaagtgcctagcacagtgcttagtagttgatccat

SEQ ID NO: 11088 - DNA, 201 bp, Homo sapiens
gcatcctttgatcttacaagggtagattccaaataatggcaatctaaagaatctttccaaaatgttaggaattttctccaaaggatcaaatgataaggaaytgtaactgtgaacgtttactctgtaattataatccgcataccaacaactctactgttatttaaacgagtagctttacatgtgttttataagtatccatgc

SEQ ID NO: 11089 - DNA, 201 bp, Homo sapiens
catgttttgcttctttttcattaacttgccaaaatccttatgatcctgtatttcttaaagttgaaccatgtagaactccatatgtaattaaaatctaagcyatacataagtaaactaaaatggaaaaaaaaagtagtaatttttaaacagtactttaaaattagatacaccaaatgtggtagatgtgataattcagttgaa

SEQ ID NO: 11090 - DNA, 201 bp, Homo sapiens
cttttataagtatgggggatatagcagtgaacaaaaatagggcaaatcgttgtccttatggagctatggacaagagggaaaggaagcagcttgtgaaaggktctagctgctggagttagtagagtcaatttgtgattttagaagtccttagagatcataaaaataaagcagaatttattggtgaaaaattggaaaagatga

SEQ ID NO: 11091 - DNA, 201 bp, Homo sapiens
aattacttcattgaattacccagcttagctcttctgtttaaaaatggatggtaaacagtatcttgaatgctggttcggcaggttctgacaaaatatgatgygttaaaataaaattcattgttagcattaaaatgacctttgaggttgtcgtcactcatttttctctttcagtgtttgaaatagcctttctgcatcaagtgc

SEQ ID NO: 11092 - DNA, 201 bp, Homo sapiens
tgagaagtgttaagcttctctgttcccttatttttgtcaagtcttattaatcaaaaactgtatacgtgttttgtccttatttttaatagtctaataattayttcattgaattacccagcttagctcttctgtttaaaaatggatggtaaacagtatcttgaatgctggttcggcaggttctgacaaaatatgatgcgttaa

SEQ ID NO: 11093 - DNA, 201 bp, Homo sapiens
ttccaggatttgaaacgatttgagctgagaagtgttaagcttctctgttcccttatttttgtcaagtcttattaatcaaaaactgtatacgtgttttgtcmttatttttaatagtctaataattacttcattgaattacccagcttagctcttctgtttaaaaatggatggtaaacagtatcttgaatgctggttcggcag

SEQ ID NO: 11094 - DNA, 201 bp, Homo sapiens
ggcatggagttgggtacagagggaagaactctctgttgagatgacatttgggaagaggcctatggtaatagggaagcaagccattgccaaaaccgtgaagmaggcgtgaacttggcatgtttgggaaggctggggggtttgggagcagatgaaccctctggctgctgtgttgggcaagagttgaagcaacagagaattagt

SEQ ID NO: 11095 - DNA, 201 bp, Homo sapiens
gggagaccgtggggagagggagaccgtggggagagggagaggagggagagggagaggaggagcctttccgagaagttgtattttcaatacaagattaaaargtatttctcaaaacatgcaggggttttggacctgctggcatagctgcattgaaggcttcgtgaattttcttttctttttctacaacagtccttatgctgg

SEQ ID NO: 11096 - DNA, 201 bp, Homo sapiens
atctgggagttgtcagcccatgaggggagtttaaagccatgagactggaagagcttcgctaagagaccaagtgtaggtcaaggagaaaagtggaccttgarcagccctgaggtctgaactgggggttacttcttaagggaagacaagagtccagtggaattcctccacagggactgaaggggaaggaggcaggagttgtgc

SEQ ID NO: 11097 - DNA, 201 bp, Homo sapiens
taggaattttctccaaaggatcaaatgataaggaattgtaactgtgaacgtttactctgtaattataatccgcataccaacaactctactgttatttaaaygagtagctttacatgtgttttataagtatccatgccacctatacaagaaagtcttctactgcttgagtggctgaaacaaggttttatgtgttttttgaag

SEQ ID NO: 11098 - DNA, 201 bp, Homo sapiens
caattgtgccataaactcaactgcatttgcacaaaactagtagagatagcctatcccttcctatcttaaatctttgtacttgcttctcttctttactaatrtatgtctttcatgccatttattttctagagtagggcacttttgtctgcattaaaaatctgttcaggcagttatcctttcttctcaatgattttcttaatg

SEQ ID NO: 11099 - DNA, 201 bp, Homo sapiens
gtgcagcctccaaatcctgcagtcaagtgattctcctgctgtagcctccctagtagcttggacttacaagcaggtgccaccacacctgactgataaaaaawtttttttttgttagagatgggggctcactatgttgcccaggctggttctgaactcctggcttcaagtgatcctcccacctcatcctcctgagcagctggg

SEQ ID NO: 11100 - DNA, 201 bp, Homo sapiens
gagtcctggcaaaaacgtgtcccttatgaaaaagaaacgtaagtgcaaaacaatgtaaatgatgtatgttttgtctacagaagtgtactgagattctcacrttatttcatagcttacggtcctctttatgagaccccacccatgtctctcaggtcacggaaccaggattattgccctagtttctgtcttcaggaggaagcc

SEQ ID NO: 11101 - DNA, 201 bp, Homo sapiens
cgagtcctggcaaaaacgtgtcccttatgaaaaagaaacgtaagtgcaaaacaatgtaaatgatgtatgttttgtctacagaagtgtactgagattctcayattatttcatagcttacggtcctctttatgagaccccacccatgtctctcaggtcacggaaccaggattattgccctagtttctgtcttcaggaggaagc

SEQ ID NO: 11102 - DNA, 201 bp, Homo sapiens
ttacaatggtaatgtcatctctttgtctggcctaaggtttccctagccttatcaatgaacataatttcaaaattcgagtcctggcaaaaacgtgtcccttrtgaaaaagaaacgtaagtgcaaaacaatgtaaatgatgtatgttttgtctacagaagtgtactgagattctcacattatttcatagcttacggtcctctt

SEQ ID NO: 11103 - DNA, 201 bp, Homo sapiens
aaaaaggtagaaataattctggttttttctcagtatatctaaaataataacataaggagtataaaatttattttcataccaagtgttcaaaatccagtgtrtattttatgattaagcaagtcttggattggactagccacatttctgggctcagtagccgcatgtggctaatggggactgtattggacattgcagctccac

SEQ ID NO: 11104 - DNA, 201 bp, Homo sapiens
tacaaggaaattatttccataggaactaatgtacagtgccccagattgccctatcttgcactttttacttattaactctgccctaaaattctttaagtaaycctttaatgttaaaacattaagatgaaatagacattttaaaaatggagaggattctgggagttggagacttgaagcatctctgcaccttctgctatcaat

SEQ ID NO: 11105 - DNA, 201 bp, Homo sapiens; identical to SEQ ID NO: 3110

SEQ ID NO: 11106 - DNA, 201 bp, Homo sapiens
ggttccccttcctttaaaacagtttcttttgtcttaagttttcatttctaggttcctcccttccttcagtcttgtaatgatggtctcaagcagtaacaatrgtaactgctgtaatgacgatctcaaaatagtaaccatggcagtcggccacggatggatctgtattcaccacctccatggtccctttcctgcttttgttaa

SEQ ID NO: 11107 - DNA, 201 bp, Homo sapiens
ctaacaatcctaccaagctattcaaaatgaagagtaacatttattgcaagttttcttgtatgtatgtcaatgtgtttgctagcactgcaatgctgagttayttaattaaacctttccagctttctaggagtgttatcctcatgttttagacaagtacagtgagacacagtaagggtatgtactttatccaaggtcgcggga

SEQ ID NO: 11108 - DNA, 201 bp, Homo sapiens
gtattataaaatattaaaaaaaatttttttttttctcgagatggagtcttgctctgtcgcccaggctggaatgcaatggcgcgatcttggctcactgcaayctccacctcctgggttcaagtgattctcctgcctcagcctcctgagtagctgggattacaggcatgagccaccacgcctggctaatttttttgtattttt

SEQ ID NO: 11109 - DNA, 201 bp, Homo sapiens
agttagagctcatttgggagttaggtgtaggtagaataacattgtgatttgaggctactgccaggttatgccttttcaaaaatagacttttcactcatttrgcatggcctcccctttcttctctatttggcctgaaattcttaatttccctctctctcaagatagaattaagggcaagtgtgctggaagtgtttaatttgg

SEQ ID NO: 11110 - DNA, 201 bp, Homo sapiens
gctaggtgacccccactctgccatcaaactgaggagcaattggatgtggtagctctgctttctacaggtttattttacaaaagtagcttggagtgggcaastaccttgacctgacaacaggcagcatcaggttcaaatccagttctcttttactccaagcccgttcccaacatttcagattttcatagtgtttaggaagtg

SEQ ID NO: 11111 - DNA, 201 bp, Homo sapiens
gtatatcctactacataccctacatacctaggctatatggtataaccatgcacagtcaccgttcagtatgcagtctgtcactgaccaaagtgtagttatakggcttcgtatatgtgtttcccacagtggctggatcagtgcacctcatccaaatggttgatcaacaaatattcccaacaggttatagaaagaagattctca

SEQ ID NO: 11112 - DNA, 201 bp, Homo sapiens
gaaggtatttatcatgcagttaaccacaagaaatcttgaatgagatcatcatcaagtaacttaaataaaacagttattttctgacactttatcaccagagycattctttaggacacttagcattattatgtatgcatttttctttttcatataattgccaactattttgaagaatgggatgcttcagattaacgtcttggg

SEQ ID NO: 11113 - DNA, 201 bp, Homo sapiens
ctgcctcaaaattaactttagtaattaatgaccttcagtacatgtaccactcaattaactaccctcaagccagccgtacttttaaccttcctcgatggcasattcttgtccatctcctgccacagcattccttcctaggagatctccatgcttgcgttctctctgcagattgctctgcctgtgttgggcatccccttattt

SEQ ID NO: 11114 - DNA, 201 bp, Homo sapiens
ttcttttgaggttgtaaggagttgaggtaaaaaatatagggccatctttattcagaagtaagactgttggaaattgttttctaaggcctatgtttaactasctaataataacaattgttgtgattgtgttcaatgatataaaatttgattcttaagaggcgatttatccttttgctggagtgggtttcaagtagtttttca

SEQ ID NO: 11115 - DNA, 201 bp, Homo sapiens
agggaatactagaaataaaacatctgtcaaggaatgaattttttgcagatgagtagtgtcagagaggcatgaaattgattgctgtgatctaaggagaatgygctgtggagcaggcatggtgggtgctgatgttgtctgttggtctctctgtgtatgccaaggtgactttcaacagaaagatgagcttggtctaggggataa

SEQ ID NO: 11116 - DNA, 201 bp, Homo sapiens
aataaccctacaatgacctctgagtgttcaattgaaaggaagagtcacacatctttctttaaatcaaaagctagaaatgattaagcttaatgagaaggatrtgtgcaaagcctaggtaagctaaaagctgtgccgtttgcaccaaacaattggccaagttgtgaatgcaaaggaagtgttcttgaaggaaattaaaagtgc

SEQ ID NO: 11117 - DNA, 201 bp, Homo sapiens
gaaccagccgaaccagacccaattgcaaaggccaactgaaatcaccatctgtgctttactggcagtgatgtaatgtgattgcatgctttcagaaatagggytacagaggaaatgaaccccagttcttcacatgggaaatggaaaggtggtagttaaatcaccactgaatagaggagagagagagagagtgagctcatgtgg

SEQ ID NO: 11118 - DNA, 201 bp, Homo sapiens
tcaggtcccttgataagtgcagtcattccaaaccacatttttcttctgcatcaaatccaggcagcactcggaatcattaaatattaaaacttatattcagraacattattcattcataaatatttcattgcagcctaaactgcattgttcaaaacattttaggatgttatgcaactctgtcaaagtacattaacaaactta

SEQ ID NO: 11119 - DNA, 201 bp, Homo sapiens
gttatatatgctatggtgatctatgatgtgatctttgatgttactattgtaattgttttgggacaccacagaccacacccatataaaaagctgaacttaaytgataactgttacgtgtgtgttctgactcctccacccatcagccatttccccatctcttttccctcccctgagaggcctccttattccctgagacgcaac

SEQ ID NO: 11120 - DNA, 201 bp, Homo sapiens
tcttcagagcactgtgattttgggtattagttaactgatttgtcagtaaatcctcttctccttgctgttttaatgctaatttttaagacaggattgtttgyaaatgagacaaatccaataatctgtgcagattacccattgatttgattaaattgactcattgaccaactttgctgtgtgatattttagattaggtacttc

SEQ ID NO: 11121 - DNA, 201 bp, Homo sapiens
ttgctgaattcaagaataactattctctaatttcttagtctcatctgtaatttagaatactttcaaataattttttggacttttataaagctttaaaaagyaataccttttaaggctttaaggttttaaaaggtatgactttaacaacattttaatgtaatttaatacccttgtttctaacagtttaagacttttgccaaa

SEQ ID NO: 11122 - DNA, 201 bp, Homo sapiens
gttgtgccttcagatatacccagatattagtaacatttttattcgtaaagatatagtgctggttttcttattgatatttttatatccaataaacaaatccragtggtaagaatatgtattttccaccatagtactaaataaaaccattttcatcttcagttaagtaaagaagcagccccataagcatttttgtttgtccgt

SEQ ID NO: 11123 - DNA, 201 bp, Homo sapiens
tggtgctcagcacgaatgatttttcattgaaattgtagcatcaattcttttaaatggtttaacagaagaaattgactctcaatgactctggtggcaattarggtctcatattgaacgaagagtattacctgtcattggcaaatgtatcaagttttctgcagtgtaaatttttaagcagttttgtttctctttgtcactttt

SEQ ID NO: 11124 - DNA, 201 bp, Homo sapiens
gcataacagggtattggtataagtctttctgccttatactttctcatcattcatttactctaaaattagtaaaagcaataaaattctgtatgtgcatgatrcatattttaagtaacctggaatattgactttaatgtatttctattattgtattagtaactttctttatctgtggacgttttaaggagagagaagggtttg

SEQ ID NO: 11125 - DNA, 201 bp, Homo sapiens
attgtgctcggtaaaaatgttctaaatgaacatctatatgcctttttgtctcagttactcatacttgagaaaagtctaattactgaatctgtgtacctttrcagagataccactgttacctgataggattaggactggtgctcagcacgaatgatttttcattgaaattgtagcatcaattcttttaaatggtttaacaga

SEQ ID NO: 11126 - DNA, 201 bp, Homo sapiens
atgaaattttcatttctaaagaaaaatgtactgggtcagacttaattctggcacatctcatcattttgtgcaacttatgcaagagtctattaaaaggactmaccaaagagcaaaatcaccaaagcccttttcgttataaaactaaaggtctcagcatatgttggccagctcagaaaaccttcacagacggctgtgttaacc

SEQ ID NO: 11127 - DNA, 201 bp, Homo sapiens
tgcaaggattgagggcattgaatagtaggttaaacacaggccttgcagagagaaattaaatcatttttggtgagggagatgccatctaaagctatgccttrataaagatcttagaaattaacagtcacacagctgtatgttatgaggcgagaactgatgagaagttgtaacatgtacctctgtattgctttgaagttttgg

SEQ ID NO: 11128 - DNA, 201 bp, Homo sapiens
gcgcccattgttttatttaatagtgaatcttgtttaaagagaagttgaaccagctttattacagggcatgattagatacagttaattagtacggctatagygtataggctaaattgataggaaaggtgctgaaagtaaggaaattgtaaaggatctgtgaactgggtcttattcctctgaggggatgcagagaaaagaagc

SEQ ID NO: 11129 - DNA, 201 bp, Homo sapiens
gagatccggagggttagcagtacctgactctgctaatgtagttaatgccctgaaatgaaggtagtcagtggctttgcacacaaatatgtaattttaagaaytctcatttatatgccagaaggtaacatgcaaggattgagggcattgaatagtaggttaaacacaggccttgcagagagaaattaaatcatttttggtgag

SEQ ID NO: 11130 - DNA, 201 bp, Homo sapiens
aaatatttactctctggccttttatggcaaaagtttgtcacctcctgctttagacatcttttttcccctagaagttcctgaggataattgattgtggacayatccaactatgttccaagacatgggctggggacacaggaaaaagcaacaaacaaggagaacctgtttcccaccatcacagagctcagagtctagcgagtg

SEQ ID NO: 11131 - DNA, 201 bp, Homo sapiens
gatgggatttcaccatgtctgcccggctgatgtcgagctgacctcaagtgatctacctgcctcggcctccctaagtgctgagattacaggcataagccacmgagtccggccctccccctctttaaaaagatttttggtggaggtgggcctgacattttttgtttagaaccactagagtcaagtaacagattctcaactgag

SEQ ID NO: 11132 - DNA, 201 bp, Homo sapiens
acttgttgattattgaatttgaccattccttcatttttttgaaggataacttgatgtttgccttttgcttgttacatacaaaaaaaggaaaatcaaataamtttgtagattgaaatgaaaactccatgagaagcgaaaatcagtgactgagctttgggcttaaaaaattatatagcgtatacttttgtgatttttgtttct

SEQ ID NO: 11133 - DNA, 201 bp, Homo sapiens
tcaggattctgctgcctcagcctcccgagtagctgggattacaagcgtgcaccaccatgactggctaatttgtagagatgggatttcaccatgtctgcccrgctgatgtcgagctgacctcaagtgatctacctgcctcggcctccctaagtgctgagattacaggcataagccaccgagtccggccctccccctctttaa

SEQ ID NO: 11134 - DNA, 201 bp, Homo sapiens
agagtggctagtttctctctacccttgtgtctttaaatgttggagggacctggagtgagcagccgtagtgatgatactgctgccattctgcacactgctgrtgcggggccagccattccgttaggattggtttctggacactgacctgcttgctagggtctcaaaaggtgagtgtcagaaaagctagcttataagtaaagg

SEQ ID NO: 11135 - DNA, 201 bp, Homo sapiens
tgagggattattataagctaggcagtgcttgaaattagttaacataatactgtattctatccctagaacaaaccattaggggaaggtatttctttgccagscaaccagttgatttgttgagtctgaaagacattgagtaacttgacctgggattcttagctggtgcacccaggcctctgtcttcctcctcaccaatggcct

SEQ ID NO: 11136 - DNA, 201 bp, Homo sapiens
ttctgttccatcagagcctcaaggtttctgtgaccctctagaaagaatctataggacttgctattcttttgtgaggaagcagtaaggtttacttacatagsgtagaaagtgcgcctttgtatctggagaataagtttgatgatggtcagtaatcacatgctctgcaatttaatttgtcttcgtaaaacgtttagaactgga

SEQ ID NO: 11137 - DNA, 201 bp, Homo sapiens
gtagcatgccaccaatggaaagtctgaaccagaatattcttcccttttatgaaatgaagtaggaaggtaattaaattggataaattactcctgtggatctytacaaatcttcccgcaagtgttgccaagatatggtgctgaaggagcaagtgaaagagatatcaacatcttctgttccatcagagcctcaaggtttctgtg

SEQ ID NO: 11138 - DNA, 201 bp, Homo sapiens
tgattgttcttcaggttcatgcagagttgcataggtaaatgaatggaaatccaggctctttggattacctagggagccaagggttgctggcaagaatggtrttgtgatggagaaccactgccttccacaaggagaaaccaggccctatgccaagtactgaacttacatagtcccactgatacagtcatcctgaaagataaa

SEQ ID NO: 11139 - DNA, 201 bp, Homo sapiens
tactggatctgatatactgtgaatatgaaccgatgttggcaatttgcaatctatttaaattagctttgatttttctgtctgaggacagcattctcctgggrgcattgagtaaagacggagggtaggggataaaaggagagagtccagtgaagtggactcaaggccataggtttaagaagtttcagtaataaaatattcttt

SEQ ID NO: 11140 - DNA, 201 bp, Homo sapiens
cagccagtgtggtattgtaccttgaaggtacaggaccagacttgtttctgccaccattctcttggtgctaaggatctgtggagttgccaccatccttgaayggacaggcaatcgtcttgttcttttctgggaaatagtgtcaggccaccagaatttaaattgtacttcagccctcatgtgttacatagtcatgccctaatc

SEQ ID NO: 11141 - DNA, 201 bp, Homo sapiens
agcctttgaaagaagtgtatgttcgcttcccatgttctgtacgctcagccacagtgaccgtattataaagttaggtgcctcataaatgtttgtggaatgcrtgagctaaagcaaatcagataatgaagcctgatatgtacaagtgcctgtgtccactaagaggcaagcaggaaaaggggtctttctcttaggttggttcca

SEQ ID NO: 11142 - DNA, 201 bp, Homo sapiens
gtacaggaccagacttgtttctgccaccattctcttggtgctaaggatctgtggagttgccaccatccttgaacggacaggcaatcgtcttgttcttttcygggaaatagtgtcaggccaccagaatttaaattgtacttcagccctcatgtgttacatagtcatgccctaatctccatatgaagcattctataaaagaac

SEQ ID NO: 11143 - DNA, 201 bp, Homo sapiens
tttagtactgatccttgtaatagtatgtacttcattgtgttacaattacatgtttacttgtctgtttttcccatttgattatgagcctttgaaagaagtgwatgttcgcttcccatgttctgtacgctcagccacagtgaccgtattataaagttaggtgcctcataaatgtttgtggaatgcgtgagctaaagcaaatca

SEQ ID NO: 11144 - DNA, 201 bp, Homo sapiens
catgccctaatctccatatgaagcattctataaaagaactgacaagagccagttacatttttcttatgacctctttgatttgttctttttgtacatgcgaygggtatgatcatactagttataataaaacaagattcagaatctgagaaaatattgcacgaatactgtgtgtgtatgtgcatgttttcttttgatcaaatt

SEQ ID NO: 11145 - DNA, 201 bp, Homo sapiens
ccacggccagcccagagaaacttgggaatgatgcccactcttgttgattctcgtttccttccgtacggtctagaaactttgttcttggggatgaagatacmagatgggtaaatcccccccataccccaaattagtttaaggagagattggaaagaaatattggaatacttgcatctaaaatcaaccactttgttttgtact

SEQ ID NO: 11146 - DNA, 201 bp, Homo sapiens
aataggtcacattcctaagtccctggtgctacaaagagttttacatatattaccttatttaatccccagagaatcctattaggtaatcattgttacactaktcctgttttacagaggaaaagtaactgttgaggttaagtaacttactcagtttcacaagggtagggccatgatttggccatctggctccaaagtccatgt

SEQ ID NO: 11147 - DNA, 201 bp, Homo sapiens
catggtaggtgcaagacaaaagccagcgctttggggaagtaaaaggatgaaatgatgcctttctctccgtccttggagagctccctgctgatggcatcacagctctgccaggtcacagtagctttccagaccactgcttgggaagagtgttgtgatttatatgaggctgtggagtggtacattccaatcagtttctcactt

SEQ ID NO: 11148 - DNA, 201 bp, Homo sapiens
gcatggtaggtgcaagacaaaagccagcgctttggggaagtaaaaggatgaaatgatgcctttctctccgtccttggagagctccctgctgatggcatcacagctctgccaggtcacagtagctttccagaccactgcttgggaagagtgttgtgatttatatgaggctgtggagtggtacattccaatcagtttctcact

SEQ ID NO: 11149 - DNA, 201 bp, Homo sapiens
ttaggccaatatttagagctagcgaagaggatacagattaagagctggcacctttgggcccataagccgtaggtaggcagagggccaggttaaaaaaaaaacaaaacaccaccgttcagtcactgtccaacgcttccaccagttgatagagttcacttagttggacagggaaagggaaaccagagatagcattttaaaaag

SEQ ID NO: 11150 - DNA, 201 bp, Homo sapiens
ctagccaaagctaaccttttcttttaaagcccaagctgtagctatttgattaaatagtatggccctcattacaggtcatagtctgctctcagtgtgactggttcgttgagctaagtactgagctaggtgatgtccaggttggcattcctttctctggtaacagtggaggctgcttggcattttgtgttgtgatggtagaaa

SEQ ID NO: 11151 - DNA, 201 bp, Homo sapiens
cagccaatccctctgttttttctccacctgccagattcgtgcaggtggagaaaaaacagagggactggctgggcacagcaacccaccaccgggaagagtgkattccttccctttctcctctagttccaatagattattttgcttcctaatatctttctgctttcctcaacttatcccagttcctcctgtcttccttctgtt

SEQ ID NO: 11152 - DNA, 201 bp, Homo sapiens
tactttgggaggccaagaagggcagatcacttgagcccagaagtttgagaccagcctgggcaacatggtgaaaccccatctcagcaaaaaaaaaaaaaaaatcacaaaaattagccaagtgtggtggtacacgcctgtagtcccagctactcaggaggctgaggtgggaggatcacctgagcccaggaggtcaaagctaca

SEQ ID NO: 11153 - DNA, 201 bp, Homo sapiens
actggaagagcttcgctaagagaccaagtgtaggtcaaggagaaaagtggaccttgaacagccctgaggtctgaactgggggttacttcttaagggaagasaagagtccagtggaattcctccacagggactgaaggggaaggaggcaggagttgtgctaatttatccagggaagcagttctccatcatctttagaggaag

SEQ ID NO: 11154 - DNA, 201 bp, Homo sapiens
atgggtgactcacttgcttttgcttgggttagcacatatttctccaaagctttccttttttctttctttctttcttttatttttatttttattttttttttgagacagggtctcactctgtcactcaggctggaatacagtggcatgatcatagctcactgcagccttgacctcctgggtcaagtggacctcctgggtcaa

SEQ ID NO: 11155 - DNA, 201 bp, Homo sapiens
gagattctagacaacgataggttggtagtgtatactgaacaaacaagattcttcctaacgtgttctgtagtcacttgctcagcatttgggccatatatatwtttttttttccagaagtaaaaaggacagtgtggctaagtgtctagattagtccccaaaagcccgtttaacccctgcagttcagaaaagaagactagatgt

SEQ ID NO: 11156 - DNA, 201 bp, Homo sapiens
aaatttcagtgggtactctttcttgcaacatcacaagtaataccttgtgaggaggcaggggatatgataaatattttggaagtaaaattagctttggtagrtggaggagagggagaaggaagaatgctgttgactcctgggaaagattggcattttgcaggctattcattcactagaattcgtgtagatgaacacaaaaag

SEQ ID NO: 11157 - DNA, 201 bp, Homo sapiens
tatctgttgtgacatatatttgaaaggtgtatgctttgtgcctataagagcaagacaatattctgattgtcttgaattcctattctaagtgactgtttcaktctggtgttccttcttggccgttttcagatcctgcatgttggggaatgagtaggtttttcacatgatgattgtacatgtaagttttaatgctcagcacaa

SEQ ID NO: 11158 - DNA, 201 bp, Homo sapiens
gccagagagtaattccaggaaggctgtaatgaattagaggacattttcaaagggcaagtaaattaatcaggaagctaaaaatcagaaagttgggacacgtrtattgtagcatgggaggagacagggaggctcagcagagatgtagcagggcatccctaaggaggtccagagagtggctagtttctctctacccttgtgtct

SEQ ID NO: 11159 - DNA, 201 bp, Homo sapiens
tggtagtataagttctttaatacaatttatactaatcatccagtttaacattttcttacctttctattccttgacacctgaggcttaaaatttggatagaycaggcatcagcaaactgataataatttatacatttttaaatggttggggaaaaaattcaaaagaataattttatgacacaacaattctatgaaattcaaa

SEQ ID NO: 11160 - DNA, 201 bp, Homo sapiens
taattcatggttttaatataatagtcctgttgtttatgggacatataatatcagatgttgagaagccagagagtaattccaggaaggctgtaatgaattaraggacattttcaaagggcaagtaaattaatcaggaagctaaaaatcagaaagttgggacacgtgtattgtagcatgggaggagacagggaggctcagcag

SEQ ID NO: 11161 - DNA, 201 bp, Homo sapiens
aacaaattcaccagtcagggaacaaagtgagagaaaaatgaagaacaatattagaaaagaatcctttgggaagctgcacaaaaaatgttatattaaaatcrataccagggcttgaccttttgtggtagtgtatattttaaagcctcctattgattctcttttaataacatgtttattctagtttactgacataagcctaca

SEQ ID NO: 11162 - DNA, 201 bp, Homo sapiens
attacaggtgtgagccaccgtggccagcccttgtgcgttttgagttgaagattatctcttgcttcttggcctcttgtatctgtcctcccactgactacctktgtgttctggtttttgttgttgttgttttttttttttttggtcttttttgttttttcatttgccagcagcttgtcataggaatgacacatactcagcaga

SEQ ID NO: 11163 - DNA, 201 bp, Homo sapiens
tttttttttttttttctagatagggtcttgctctgttgcccaagctggagcacagtggcatgatcatggctcattgcagccttgacctcctgggctcaagygatcctccctcctcagcctcccgagtagcaattcaacacttgatgaatttactgagttgtgcaaacatcactacaatgcaattttagaatatttttatca

SEQ ID NO: 11164 - DNA, 201 bp, Homo sapiens
catgacgaaaccctatgtctactaaaaatacaaaaattagccaggtatggtggcaggcatccgtagtcccagctactcaggaggctgaggcacgagaatcrcttgaacctgggagccagaggttgtagtaagccgagatcacgccactgcactttagcctgggtgacaagagtgagaccctgtctcaaaataaaagaaagt

SEQ ID NO: 11165 - DNA, 201 bp, Homo sapiens
gtatttatttgccttttgtatgatagtcagtcatcacatttagtctacaaacttagatgttttgaaatcaattaaaaacttagctgctgggacaatttgcygttggaactagaatattgaatttatctgtcaaaatattcagccacgatgggagcaattgttagttatatgctatttacaattgcttccttacatataaac

SEQ ID NO: 11166 - DNA, 201 bp, Homo sapiens
attctgttttaatatgctacatgagaactacataatgtggttagacatacatacgcaatggtatgctcagacaaaatgcagccattgttagttcatgatayagttctcacctaaaaccttgtcatagttttagaatatttttcttcacttgagattctagacaacgataggttggtagtgtatactgaacaaacaagattc

SEQ ID NO: 11167 - DNA, 201 bp, Homo sapiens
actgaatttcacattttttctctttctatacatgtttctaccattttgaggtgaaaattaaaaaatctagtatactgcttagtgtggctttaaaatcaatrtatttgtttttgaatttttttagtgtgatttcatagggaatactagaaataaaacatctgtcaaggaatgaattttttgcagatgagtagtgtcagagag

SEQ ID NO: 11168 - DNA, 201 bp, Homo sapiens
ttctcttttcctccttctctggccataaaagatgtgcctacttcatcttgcccttctgccataattgaaagtttcctgaggcctcccaaaatgctgccatrcttcctgtacagcctgtagaaccgtgagctaattaaacgccttttctttataaattacacagtctcagatatttctttatagtgatgcaagaacagacta

SEQ ID NO: 11169 - DNA, 201 bp, Homo sapiens
acttttaaagattctttacattttaggaaggctcagcaggctgttttatttgaaaaacaattatttactcactttactttctttgagctcctttcttgctrttgataagaatattacagccaggaaatcattatgtttcctgcgtatgagattgaaattggctaaatcctttgaattttcttcacatccaatttcaaagtt

SEQ ID NO: 11170 - DNA, 201 bp, Homo sapiens
cttccaggaatatgtgagagacatttaggtctctaatgatgaagtattttctaggcgtaatgcaaaagattgtaaagagattttcttctgtattgtgatgrcagtgagaattacaatgtctaactatttctattaggaattctgcacacacttttgtattagacagtgtaaaaatgctgaatccattaattcgtattgtaa

SEQ ID NO: 11171 - DNA, 201 bp, Homo sapiens
aaagccccttgaaagctggaaagagcttaacaaatatcagctgttgccatgaaagaatatttgcttactttccattgtgtataagataacgataatcatakaattaatattattcaacttccttgtgtcttttgcacatttctgtacagtcctgtttttgtttgttactgtcattctcaaagtactcaagttgaattttgt

SEQ ID NO: 11172 - DNA, 201 bp, Homo sapiens
aggtggaatatatacactgctgttacttaatactcgataactccacattaagtaaaagaaagaatgttagacaaggagtcagaaggtatgcttttgtcatstggctgttcggcaattcacctaatcccttgtggtgtctggttctttatctgcaaaatggggatatactctgttccttgctcatcttcatggtgattgggg

SEQ ID NO: 11173 - DNA, 201 bp, Homo sapiens
gatggaaaacatgttttatgcttatatcaaacaataagactttctgttttaaagaaagaaattattaaatcacacctttgatatttgaattaaatcacatktacctgccacaaatttacattaaccgtaccattggacaaatcatgtcaagtattttttctgctgtttatggggcaggacaatatgcagagtgaatatgaa

SEQ ID NO: 11174 - DNA, 201 bp, Homo sapiens
ccacttggatgtctaacggtggcaaattctggttttcatctgtactttaatgtgatttttctcacccaggagcactttcatcctactgcatctcttcctakcttttactcctccttaccttgtaaatcttccctaatcctctgttccagccctgccttcaaagcctggctacatgtgctgcccattgtgttttctgtatac

SEQ ID NO: 11175 - DNA, 201 bp, Homo sapiens
ggagtgcagtggcacaatcttggctcactgcaacctctgactcctgggttcaagcaattctcatacctcagccagccgagtagcagggactacaggtaccygcaaccacagctggctaatttgtatttttagtagagatgaggtttcaccacgttatcctggctggtcttgaattcctggcctcaagtgatccgcccgcct

SEQ ID NO: 11176 - DNA, 201 bp, Homo sapiens
ctttggcaggcaggcctggcatcaggggaagtgaacttgagccaaacttgaggctaagagggatgggaggggggttagagtagaaggtaatcctggtagarttagcacacagaccagattaattcagataaaggtttcttgtagggtctcatgggtgggtaggttgaagtcaatgagtttaattctatcctatagggcctg

SEQ ID NO: 11177 - DNA, 201 bp, Homo sapiens
catatagttttcacacatcacaaaattttgcttaaatttttttccaaccacttaaaaatgtaaaaccaaaaacaggtactgggcctgatttggctccctcrttgtagtgggcagaactctgatttagagcacaaggctctgatgtcagatgccttggattcaaatttctgacctggcatttccctgctgtgtaatgtggag

SEQ ID NO: 11178 - DNA, 201 bp, Homo sapiens
gatcctagctactcgggaggctgaggcaggagaatcacttgaacctgggaggcggaggttgcagtgagccgagattgtgccactggactccagcctgggcraaagagtgagattccatcttaaaacaaataaacaaaaacgaaagaaatctatgtaccatcagaacactacagtaatcattgctgcaggcaggactcgcca

SEQ ID NO: 11179 - DNA, 201 bp, Homo sapiens
atgtctccttcaggagaggtagataggagctgaatagcagaagttaaacatgagttaggagaaggaaaagagatacggcgtcaagtcagcatgggtctagwattggacagagatggacaaaagaaggcagtgagtttaagaatgagagtttgagcaccttatcagtgcccttttcaataaagtagattggttatctagatt

SEQ ID NO: 11180 - DNA, 201 bp, Homo sapiens
accacaccacatgactgctgccactcggagatcatcagtggaacttggtgtttactattcttgttcattacttttcacttttccaatcttggcataaggtrcatcgtactgatcagatctaccacttttttgctctgcatgtttgtctaattcattcctttactttgtagattttcactgtacgaatacccagtagttatc

SEQ ID NO: 11181 - DNA, 201 bp, Homo sapiens
gttgaatgattttaagaacaagagaaaggtggagtctcaataaggcagccgtacaatatgtttatcaagccttcaataggtttagtatatactcctttggygcatgcttacaagtttactgaactataaccaaacatcccactgggaaatgttttgaattgatgtgagaatttgacattaagtagcaacttgggacatcag

SEQ ID NO: 11182 - DNA, 201 bp, Homo sapiens
tatttttatcaccccaataagatctcttgtgcctgtttacagttaatccctattcccaccccagctctaggcaactacttaatctactctatagggatgcyttttctgggtgtttcatataaatagaatcattcaatatgtggcccttgtgtttgcttctttcacttagcttaatgatttttaggtctatctgtacggtag

SEQ ID NO: 11183 - DNA, 201 bp, Homo sapiens
ttttggttttcatgtccctgtcaactggtttgggtgggtgagggatggggagagactttctccaggttttcttaagagggggctgcaaactcatcagctgstggcataccactgggcctcagcagcagaggctgcctcatctcccaccacttagtggatccttccacttaaggcagcccaacagtgggacctgagctctgg

SEQ ID NO: 11184 - DNA, 201 bp, Homo sapiens
tattatcatccatactcgatgggttaggaacactggaagggaagctgggggagattaaagacctgctcaaggtcacagaacagaaccagaaaccagatctktcagcttagtcctgtctctctccagatattacagttccagtgcttaaactaagcaaaagtattaattaagatgttattgcttagccagcattttaataga

SEQ ID NO: 11185 - DNA, 201 bp, Homo sapiens
tggtgagccaagatcgcgccactgcactccagcctgggcaataagagcgaaactccgtctcaaaaaaaaaaaaaaaaaaaaaaaaaagagaaatcatgcamctagcatggtgcttttcacatagtaaagtctcacaagtatttgttcagttgaatgaatcactgggtctggaaaatcatgataaccttttttctagaaggt

SEQ ID NO: 11186 - DNA, 201 bp, Homo sapiens
atctgtcagcttagtcctgtctctctccagatattacagttccagtgcttaaactaagcaaaagtattaattaagatgttattgcttagccagcattttartagatagttcagtaacataatacccactcaacagttcattagagtaatttgggagtttctcatctttagtgagagtaactattgttagtgattagtaact

SEQ ID NO: 11187 - DNA, 201 bp, Homo sapiens
taaatcgtagcccaaataagattatagtaaatgttagcatcgtaggggactataggttgatagaaagccattcatcatctcaaatggtgacctgtctatgkctctagccaccctgagtctgctatctaatcacatacctattgattttatctacatccaagaatcctggatgtgactgtcattggacaaccaagattgtta

SEQ ID NO: 11188 - DNA, 201 bp, Homo sapiens
ttcccaatttatttaccagatttctccctttattgttgttatttattattatggaagacatacatattcattggatcaagattagaaaataaatacaaagrgatactaaaatcactcaatgtactacaattcagagatagttactgttaacattttggtttgttgtgtttatattcctttttacttcccactgagttggta

SEQ ID NO: 11189 - DNA, 201 bp, Homo sapiens
ataggcatgagccataccatcttgatgacaaaaatattgtgtagaaagaaatgatctttaatatcctagtaggaacaccaatggaataatatataaatacraatgtgtgtgaatttcagtttttgatctcaggcatcctttgatcttacaagggtagattccaaataatggcaatctaaagaatctttccaaaatgttagg

SEQ ID NO: 11190 - DNA, 201 bp, Homo sapiens
ggctaatctaaatttaattctggatcttgtaatatatagtttaggagttcatttaaatttaatttacatagggtgaaaataagctttgacctttataattsctgtatcagtaaagtcacaggttcattgacttgttagccaatttttcctgtgttacttttcttctggttttgttgttgttgtttcagtttgtaatataca

SEQ ID NO: 11191 - DNA, 201 bp, Homo sapiens
tgatacatctatttgtacttcatgtcataaaattctacctttatatgctacagtatctaggaagtagacgtaagaaagagcaaatgtttaatatactacargttttgctgtagcatctaccagaaaatatgcttattttctctcgtctgtggttcctggtcttcctgatttctttttaagtttattaggacttctcttcat

SEQ ID NO: 11192 - DNA, 201 bp, Homo sapiens
aaggtaatagtattcaattagaggctaaatgccacctcctacacaaagccttctaattgttttgtatagatggtgatctcttttcataaggcattcaatayagtgatctggaaatcagtacgttaatacagtgatttgcaaatcactgtactgtagctgttaagcatattacctctggagctcggctgcttggatttgacc

SEQ ID NO: 11193 - DNA, 201 bp, Homo sapiens
gctgtttcacgtgtatttgtatctgcagctgacaggtatcctgaacatcttctctaacacgtattgatgtctacttataacctactttagtgctgtgtgaatggatctaatataccaaatgtacatgataaatgttttatctctgattctcattgatcagttttgaaatgatcaaatggtgtatctcagtaagacactaat

SEQ ID NO: 11194 - DNA, 201 bp, Homo sapiens
gaggaaaaaagtgaagatgccaggtgctcatgcctgtaatcccagcactttgggaggctgaagcaggtggatcacctgaggtctggagttcaagaccagcytggtcaatgtggtgaaaccccatctctactgaaaattcaaaaatcagccaggcgtggtggagtgtgcctgtagtcctagctactcgggaggctgaggcag

SEQ ID NO: 11195 - DNA, 201 bp, Homo sapiens
cagcacttagggaggccgaggcgggtggattgcttgaccccaggattttgagaccagcctgtccaacatggtgaatccctgtctttacaaaaaaaaaaaaatacaaaaattaaccaggtgtggtggcgcatgcctatagtcccagccactggggagggaggctcaggtgggaggatcacctgagcctaggaggcaaaggtt

SEQ ID NO: 11196 - DNA, 201 bp, Homo sapiens
aggctgccttctgagatttgccagtctccctgtcaccagtagtgtttcaggcacaatgagaacaatcacttgtcggggatactgtaaagaagattcttggraaaggatttgatgacctggaaggtctttacacgttaaagttcaatgattctagctccagtttcatggatttaataagacagcctctcttcctagctcctt

SEQ ID NO: 11197 - DNA, 201 bp, Homo sapiens
gatctgatgcttaatcatattttattcgatatttatctagatgcaggtcttgctataattagtcacttagtggtatctgtgcctatactctttgaagcacrgctgattccttttaaatcctgatgttcgtggtaaaggattagggaaatctgtgtccagaaaaattcacagacatctgaagtttgaaatcttaaagcatgg

SEQ ID NO: 11198 - DNA, 201 bp, Homo sapiens
tttgagccttaagtatttcatctttaaaatgagggttgtgaaaaattattatttaatatttcttttgacaaactaactcccaatttacacaaaatatacasaacagaatatgaattttagattaagactgctattttcttaggaaatagagaaggcttatgacttacaatttaaaaaatcaagatttaattagtactgcca

SEQ ID NO: 11199 - DNA, 201 bp, Homo sapiens
acagagtgagattatgtcttaaaagaagaaaaagaaaaaacaatcagatgggaagtctctacaagtgcaagagaaaaaaaaagttgttgaaagtttagacrtggcgccaggcgtgatggctcacacctgtaatcccagcactttgggagactgaggcaggcagatcacttgaggccaggagttcaagatcagcctgggcaa

SEQ ID NO: 11200 - DNA, 201 bp, Homo sapiens
gtggaatattagttcaccagatgatagcccacaattctagttacatatgaagtggtggtgtggtgaaataacattgcagctcctcactaaaccaaaaactscagcaagcttgtcgcagagagaccctcattttcccagctgtcaacctgactgatattttaatttttttgccctgtagaaaacttcagtctcttatccaat

SEQ ID NO: 11201 - DNA, 201 bp, Homo sapiens
atttgaacttcaacttccccaggctctgcctcaaaattaactttagtaattaatgaccttcagtacatgtaccactcaattaactaccctcaagccagccstacttttaaccttcctcgatggcagattcttgtccatctcctgccacagcattccttcctaggagatctccatgcttgcgttctctctgcagattgctct

SEQ ID NO: 11202 - DNA, 201 bp, Homo sapiens
cccagtagttatccgttctctcattggaaaacagaatgagtgttttttgttgggttggttgtttttttttttttgttgttgttgtttgtttttttttttttgaatgagttctgtccatttgtaaaagtgtcttctgaggccaaaggagatctctactctttctgaactccagtaacacttatctatgacttttaactcggc

SEQ ID NO: 11203 - DNA, 201 bp, Homo sapiens
atgtgcctctattcacatgcatatttctctgccaagtctttcaaaaaggcctttcctttgaaatacaaaaagataaacacatctttgaaatagattgatgrtcctttgccacttttgagctttctccaattcatatctgagattattaacccttaagactgacttttctgttcacctgtgtaactttacgtgtgttgctag

SEQ ID NO: 11204 - DNA, 201 bp, Homo sapiens
tgggatactgagcttgtttgtggcactcatcctttatgagaggtgcgtattttctgtggtgctggaaaggtattacttttgagcaaatagatttgattctkctggaattacagctcatctggtgctgaggagcacagcaagtatcatgcctgtgaaagagttcagaggtttgctcaatcttcaggaaagtttttcttaggt

SEQ ID NO: 11205 - DNA, 201 bp, Homo sapiens
agtcttggataatctgaacccttgtgccagattgtctaatgtcagttgtgttctggcactgcttcttctacatcttctcattgtctggcgctgtttcgaargcactcatcaccataatgtcgtccatcttctgttaattcctctggtgtggtgtctgttagttctggaatttctccaaggtccatcttgaagcccttcatc

SEQ ID NO: 11206 - DNA, 201 bp, Homo sapiens
tactttgtagattttcactgtacgaatacccagtagttatccgttctctcattggaaaacagaatgagtgttttttgttgggttggttgtttttttttttttgttgttgttgtttgtttttttttttttgaatgagttctgtccatttgtaaaagtgtcttctgaggccaaaggagatctctactctttctgaactccagt

SEQ ID NO: 11207 - DNA, 201 bp, Homo sapiens
ttgtggcactcatcctttatgagaggtgcgtattttctgtggtgctggaaaggtattacttttgagcaaatagatttgattctgctggaattacagctcakctggtgctgaggagcacagcaagtatcatgcctgtgaaagagttcagaggtttgctcaatcttcaggaaagtttttcttaggtagattttctgaatcaga

SEQ ID NO: 11208 - DNA, 201 bp, Homo sapiens
ttactttgtagattttcactgtacgaatacccagtagttatccgttctctcattggaaaacagaatgagtgttttttgttgggttggttgttttttttttkttgttgttgttgtttgtttttttttttttgaatgagttctgtccatttgtaaaagtgtcttctgaggccaaaggagatctctactctttctgaactccag

SEQ ID NO: 11209 - DNA, 201 bp, Homo sapiens
accaggggtaaaatggagtgcaagcctgagatgtgttggcaatacgaatgtgacacgttctgtataaagccatccagtggatgtgctattaaatgtgcacrtggcatcacctcattgagcacttcccaaggaaaacttatgacctggagagtgactgtgtcacatcacacagcccttgagagaatgggaggttcctgtgct

SEQ ID NO: 11210 - DNA, 201 bp, Homo sapiens; identical to SEQ ID NO: 3133

SEQ ID NO: 11211 - DNA, 201 bp, Homo sapiens
acatcttagggcttacagaggtctattcctgattactttcaccctgtctatcataaaaatagaatggctgacataagaagtagatttttttcttgtttaayaaaaggctggcatggtggcttcagtgtcatcagagccccagacacctattattccattgcagcaccctaacacaggcttttgctctttaaggtcagctta

SEQ ID NO: 11212 - DNA, 201 bp, Homo sapiens
atgccagaagcagctctaaatagctctgtttctttatataagaaagagtaaagatggaacgaaagggtaattataaaagcagtttattaattttgccaagscacccaggagataatggggttttcatgaaatgtgacttctcagagatggtaagatttgatgctagagttcaacatggctttgacattttttaattcttcc

SEQ ID NO: 11213 - DNA, 201 bp, Homo sapiens
ttgagtgttacgatgatcctgatttgtggtgataagtagtggcaaataataacttttttttttaacagcttgccttgcaaccacaagatgctcatccatcratctgatccaaatgattaaaagcgaaataagtttctgcttcaaagttaaataatcgacattatctaataaatcataatatagaagttgggacaaacagcc

SEQ ID NO: 11214 - DNA, 201 bp, Homo sapiens
taactctcccttttttttttttttttttttaaccatgattggtgcttcaaccctggagttgagtgagttggaaataagtagtcacactgaagctaaatgaraaggttcttttcagacataggagtaccagtgctctgtgatatcctttaagtgtcttttgtcatgtaggatttttattttattacgaagcaagtgaattta

SEQ ID NO: 11215 - DNA, 201 bp, Homo sapiens
tctttccaatttttcaaaacttcctgattataactctcccttttttttttttttttttttaaccatgattggtgcttcaaccctggagttgagtgagttgkaaataagtagtcacactgaagctaaatgagaaggttcttttcagacataggagtaccagtgctctgtgatatcctttaagtgtcttttgtcatgtaggat

SEQ ID NO: 11216 - DNA, 201 bp, Homo sapiens
tctttacaaattgtgtgaactttcctttctttgggatgacttaagtcatcctgcctggggcaagaactagattagataaccttggttaggaccttctgacyctgcaatactaaaaaacgtttaaagaaaataattcaaccattaggtttttttttcctctttccaatttttcaaaacttcctgattataactctccctttt

SEQ ID NO: 11217 - DNA, 201 bp, Homo sapiens
acacccctactgggtaggcattactgttatcctcattttataaatgaggaaacagagagggtaagaaacttaccaagttatatggtttggttctatgtccscacccacatctcatgttgaaatataatccccagtgctggaagtggggcctgtaggaggtgattggatcatgggtgtggtttctaatggtttagcaccatc

SEQ ID NO: 11218 - DNA, 201 bp, Homo sapiens
tttgctgtttttttaaatgctttattgcattgctgttgttttatactcatacttttccatttgattctgcttaacaattgataaaaagacctaaccagttstgaatgtagtaggaacacgtcctagccacccagtatttttcactggaaggtgattggaagtgctgtgtctgtactaggtattggaatcttgtgccatctg

SEQ ID NO: 11219 - DNA, 201 bp, Homo sapiens
ttagtttctcatactaatggtgaaatttacagggatggtaccatctgtttaagttcattatatatgataatttatcttgatttttattattacatatgttstgcctttgaaaaaggcagcaagaaaaaggcaaaagaaaaagcagaaaaaaggaggagggaagagttctgaaacaaacaggagtttgtgggtagcatcatg

SEQ ID NO: 11220 - DNA, 201 bp, Homo sapiens
tacttgtattttcccaaatcactacttctgcacttctacaacaaacttctgctttctcacaggacttttatggaaggaagaaaagtaatttgaatcccttrggcctttttataggtccattgtcagcgtcttgtgtctgccttgacccatttgcattctggtggttgctgggaacagtaagataacctatgaatagtcctt

SEQ ID NO: 11221 - DNA, 201 bp, Homo sapiens
ttctagtttctgatgaagaattgaaaagaagagtagctgaggagctggcattggagcaagccaagaaagaatccgaagatcagaaacggtgagttttgtgrtatcagagagaggttttggtgggttttgtcatatttaccagtatttttagagaagaatgattgtgataagtctcattatttgtgtatgactgaacttcag

SEQ ID NO: 11222 - DNA, 201 bp, Homo sapiens
ccaagttttctgtggagtagcagggcagctttaggtatgtttgctactgcagtgaaaaaggagaaacgtgttttgtttcagtttgcctgcctaggctgcaygttaagatcccaaagaatgaataggactgcgattacagatttaaagtttgcttgtatcctgaaaacttgcccagattaatatatttctgaaatgtacatt

SEQ ID NO: 11223 - DNA, 201 bp, Homo sapiens
ttttgtgttttgttgttgttgttgttgttgttgttgttgtgtgtgtcatatatttctgttttgtatttaataaaggtctcaagctcttctttatttcagtrtatttacctatcaattgggattgttgatacctccttcaaataaatattgggtttatttactgtttacttttaggatgagcctaatatgcagagacttgca

SEQ ID NO: 11224 - DNA, 201 bp, Homo sapiens
acctattgtgcatggacctcaggtttagtgaattcagtattacattgaacagcaatattatttaccatgtgataaactatgtgatataccatgtgcaatgrcgcctgcttcattttcgtgtattggatgttaaatttttcacagtgttgaatatcacagctctgtattccttttctgtatccgtgcttttattgctttgat

SEQ ID NO: 11225 - DNA, 201 bp, Homo sapiens
tcagagttctacagagtcaccactgaacaatatcagaaagctgctgaagaggtggaagcaaagttcaagtaagtttttaatagtattataattatttactrttcttaacaagatgaaagcacagttttagtgctttttgcacagatcatagtttgttatatagcactctagaatacttggaagagttttggggtggttgag

SEQ ID NO: 11226 - DNA, 201 bp, Homo sapiens
tgtattccataatagagagctgcttataaaaagacatctcagtagagattcttggtaaacaggatggattctgatgttttgttaaaacgaaaatacctatrcagttacccctctgtatccatgggttttgcatttttaaattcacccatccatggattaaaaatatttggaaaaaaaaacaacaatacaacaacaaaaaat

SEQ ID NO: 11227 - DNA, 201 bp, Homo sapiens
gatgtttgaccagatgagcactctgatttctgggctcctgaaggaaaagtaacctggcagtggatgtgaggtttagttggagacatgaaaaataagaactygaagaatgagataaggtcagctgtggtggttcacacctgtaatcccagcattttgagaggctgaggcaggaggatcgcttgaggcctgaagttcaaaacc

SEQ ID NO: 11228 - DNA, 201 bp, Homo sapiens
cttttagttctcactgacctttaaagaaaacagttgaaaatgtagataatctgcagagaactcagcagaaccatactggaggaaaagggctgatactcatrtgagacaattgggaaataatttgttacttagatatgttattgcaactttattgtgaagtacatacatatctttttaattgtttttcacttactggtctcg

SEQ ID NO: 11229 - DNA, 201 bp, Homo sapiens
agagaaggagagttaggtccagtaagtccctcccagtgaaatgctattcagctaaacctttaatctgccagggtggaaatcatcaggtgccccagctttaytcacttctgcaatacccattaagtttaggctgaaggcaaggcaacttcttctgtacctttgacatccacccacaacccagataggctacctgaaacaagt

SEQ ID NO: 11230 - DNA, 201 bp, Homo sapiens
ttggctgtcacatggactcggttatttagaacacaaaattcctcaggcaggttatttattatgtctttgacttgtgtcttccatctataaaatgtaaattrtaactgtcaccttctgtagggcatataagctgagaaagtttaaaagttaactgagaaagttgtctttgatccttatctaaaaaatggtcgtaagttgttt

SEQ ID NO: 11231 - DNA, 201 bp, Homo sapiens
atattcaaggaaggcagctgtgttttcctttaagcaaatgtaattgttgggggaaggcatctcagtttatcccatggacaaatacattatgggtaatgccmaaaaaaaaaaaagaaagaaagcttgggaccccaggaaaattacatgaatcttttcaactcttcataaagcagatgagtgctgcccttttctttagagctg

SEQ ID NO: 11232 - DNA, 201 bp, Homo sapiens
gtgaaataagctgctgatggtgcagccagattggccacgtccttcgtaagtccatgacctggagcattcttctctgttcttgctgtggcagttggggtttrttggtgttgcaccaagcatcttctttcctttcgtataagtggtttatgtgtaaacatgtaaatgatcaaaccattcttgtggcagctcttaggtttgtgg

SEQ ID NO: 11233 - DNA, 201 bp, Homo sapiens
gagtcctaggagaaccaggacagcaggatgtcagaaaagccaagggagggctttccagaagacgggagtggccagaggtgttagatgctaaagggaagccrtataaataaggcattttataaatataaaatatttatttacataaatatcaaaagttatttatttggtcattggtgacttctaccagagaatgttcactgt

SEQ ID NO: 11234 - DNA, 201 bp, Homo sapiens
acacctatgttcatagcaggtttattcatagtatcaaaaactagcaacaatccgaatggtcatcattgagggaatggagaaacaaaacagacagtattccrctcaactcagtggtatcctgcagaaaggggcaggagagatggcaaagctgattggaatatagggataaaaagcgcagttttctactttatattcatacag

SEQ ID NO: 11235 - DNA, 201 bp, Homo sapiens
attcagcaatagagaagagcaaactatcgatacatgtaacagcacggatggatctcaaacatcatggtacacacaaagaagccagatgcaaaacagtactwcctatgtggttcatttaaacgatgttcaaaaataggcaacatttgcctgtggtgggaatagaggagatttgattggaaagggacccaagcagcatttctg

SEQ ID NO: 11236 - DNA, 201 bp, Homo sapiens
tttgtgttgcttgatatgctgggtttttggcttgtagtgtctgttgttagtatttatttgccttttgtatgatagtcagtcatcacatttagtctacaaayttagatgttttgaaatcaattaaaaacttagctgctgggacaatttgccgttggaactagaatattgaatttatctgtcaaaatattcagccacgatggg

SEQ ID NO: 11237 - DNA, 201 bp, Homo sapiens
tgtgacaggtcacagtcaaaggcaggtccacaacatgtagtctgttgactgtgcctcaggaagaaaatgaccttcaggctatgtatagtatatatgaaacrtaaatggattccatattttggttggggtcccatccccaagatatgtctttatgcatatgcaaatattccaaattccagaacccaaattcaaaaacacttc

SEQ ID NO: 11238 - DNA, 201 bp, Homo sapiens
agaagcttgcttggcctgctttatgctgggcctccaactatgaagccatcagttctgaaaaaggggtgtgttggcaaggaggagaagagagaagggtatcratccttgatctgttaccatgttttgtgcttgtgcaagctgtgggcaggaggtcaatgcctcacacctttgtttcccaagcagagctcttgaacaagatga

SEQ ID NO: 11239 - DNA, 201 bp, Homo sapiens
gagacattctactcctactacctagagagcatagatagagaaaaataagcaccttctatacccataccaggacttaggcagctgctgcttgcaatagctgyaggcctggtcctcatgcaccttacagagaacgagtcagtacaagctcagacccagttgataaaaatgaaccaaaatgaattaaaaaagtccctgtggttg

SEQ ID NO: 11240 - DNA, 201 bp, Homo sapiens
tgttttgtgcttgtgcaagctgtgggcaggaggtcaatgcctcacacctttgtttcccaagcagagctcttgaacaagatgaagtgatcaaagctgggtgstagtgcattatcacagtctcattactttgcaagctgcatgcccagatgctgctgttttctgcatcaggcttcgctgatttacattcgtaacacctccatt

SEQ ID NO: 11241 - DNA, 201 bp, Homo sapiens
actgaaatcaccatctgtgctttactggcagtgatgtaatgtgattgcatgctttcagaaatagggctacagaggaaatgaaccccagttcttcacatggraaatggaaaggtggtagttaaatcaccactgaatagaggagagagagagagagtgagctcatgtggtgtatatttagtgttcaaagggcttttgccattt

SEQ ID NO: 11242 - DNA, 201 bp, Homo sapiens
ctaaggttttccttgtgtagtggcagggctgtcaatgaatctaggattcctattctaattagaaaaccaaatcaagaaaaaaaaaaaaacaaaaaaaaaamcctgagactctaattaatgaagtttctaaagctcctggaataaaactagaaatgccagaagcagctctaaatagctctgtttctttatataagaaagagt

SEQ ID NO: 11243 - DNA, 201 bp, Homo sapiens
agtctaggaagaccaagaggaataagtttgttcattgaaacaaacaaaaaacaatgtgggattgtgttctctctctctctctctctttctctctctctctmtctatctatctataaaaaaaaatctgtttatttttgagatcgagtctcactccatcacccagactggagtgcagtggcacaattttggctcgccacaacc

SEQ ID NO: 11244 - DNA, 201 bp, Homo sapiens
atagaaccagttactgagtctaggaagaccaagaggaataagtttgttcattgaaacaaacaaaaaacaatgtgggattgtgttctctctctctctctctytttctctctctctctatctatctatctataaaaaaaaatctgtttatttttgagatcgagtctcactccatcacccagactggagtgcagtggcacaatt

SEQ ID NO: 11245 - DNA, 201 bp, Homo sapiens
atttcattcgtttcttctttccctcctttctttcttccctccttccttccttcatttcatccatccatccatccatccatccatccatccatccatccathagcaaacattaagtgctggatttcaagattcatagacatgattcctttttcttaaggtacagtaggttagtgggaaggaatatagggattattttatggt

SEQ ID NO: 11246 - DNA, 201 bp, Homo sapiens; identical to SEQ ID NO: 3108

SEQ ID NO: 11247 - DNA, 201 bp, Homo sapiens; identical to SEQ ID NO: 3109

SEQ ID NO: 11248 - DNA, 201 bp, Homo sapiens
cacttgctcatactttgattaatactgccttccatcttttcatctctttccatcttctggaaagaaagcaaaccttttttttttttttttttttttttttttttacttttgacaaagtgttctgatagttatttcatcagagtttggatcgttgtgtgttcttcaggaaaatgtgtatttttcaggagtctgttggtcctg

SEQ ID NO: 11249 - DNA, 201 bp, Homo sapiens
cagttctccatggctagggaggcctcaggaaacttacaattacggcagaaggtgaaagggaagcaggcacctttttcacatggtggcaggagagagagaatgcgtgcaggggaaactacttttaaaccatcagatctgagaactctctcacttatcacaagaacagcctggggaaaccacacccatgatccagttacctcc

SEQ ID NO: 11250 - DNA, 201 bp, Homo sapiens
acagttctccatggctagggaggcctcaggaaacttacaattacggcagaaggtgaaagggaagcaggcacctttttcacatggtggcaggagagagagaatgcgtgcaggggaaactacttttaaaccatcagatctgagaactctctcacttatcacaagaacagcctggggaaaccacacccatgatccagttacctc

SEQ ID NO: 11251 - DNA, 201 bp, Homo sapiens
gtggtgataagaagtgcccttcaggctttgcaggctgccttaggaccattttctaatggaaaaatgcattcagaattccaaacacttgccttagaatttartcctcagaaaatgacttaatccttttttgtgttttgttgttgttgttgttgttgttgttgttgtgtgtgtcatatatttctgttttgtatttaataaagg

SEQ ID NO: 11252 - DNA, 201 bp, Homo sapiens
ccctttcttccagctaggcctctcccctcaggattctgtgtgtgctaggcttcttcccctgctgaatcctggccaccgctttctcccctcactcctcccaktcccaccccagtcctccacctggattctctccatggtggaaggtccttggagaagccttccctgctcgctccagctacagggttgccctctgcaccaggc

SEQ ID NO: 11253 - DNA, 201 bp, Homo sapiens
ctactaaaaatacaaaaaaattagctgggtgtggtgacacgcacctgtagtcccagctactccggaggctgaggcaggagaattgcttgaacctgggaggyggaggttgcagtgagccaagattgcgccactgaactccagcctggcgacagagcgagactctgtctcagaaaaataaaagatacatacagtaatagatca

SEQ ID NO: 11254 - DNA, 201 bp, Homo sapiens
aactgcaaagtaacatagtacaattttaaaagaatataatgatgagatgtaatcaacactctgctactgaccagggatatagagattaaaaagacatagtwtctgctctaaagattcatacagtaaggttgggagcggtggctcacgcctataatcccagcactttgggaggctgaggtgggaggatcatgaggtcaggag

SEQ ID NO: 11255 - DNA, 201 bp, Homo sapiens; identical to SEQ ID NO: 3111

SEQ ID NO: 11256 - DNA, 201 bp, Homo sapiens
actctgtctcagaaaaataaaagatacatacagtaatagatcagcacataattggattcatacagtaatagatcagcacataattgaagctcaaaaatgcractgcattgtagatgcctttggcataagagaatgccatggtgtgttgtggcctgctgcttttaatgttgagagggattaattgaagaatagtaccatcat

SEQ ID NO: 11257 - DNA, 201 bp, Homo sapiens; identical to SEQ ID NO: 3112

SEQ ID NO: 11258 - DNA, 201 bp, Homo sapiens; identical to SEQ ID NO: 3115

SEQ ID NO: 11259 - DNA, 201 bp, Homo sapiens; identical to SEQ ID NO: 3117

SEQ ID NO: 11260 - DNA, 201 bp, Homo sapiens
gtatttcaaccttaagtgctaaaatttcatctgagtagctgtgactaatctagtctttatttgtaacacattcaaattaggaggtgtatgttcttgtccaygtactttctcattagcactaatattgctaatgggagtgacaaatgtattatgttttttccttcgatcactcacgccttttagataactagctttttagag

SEQ ID NO: 11261 - DNA, 201 bp, Homo sapiens; identical to SEQ ID NO: 3119

SEQ ID NO: 11262 - DNA, 201 bp, Homo sapiens
gatatcttcttttaatataaaaacacaggagaaacagaaaattcttccaatgtataaagccgcaggattcaataatgtaaaattacagtgggttctgttaraatcttcagagaattgcaattattaacactgagtaattttcttctttcttaacttgtagttgttagagaacaatttagaaaattgatgcttctgtcaaaa

SEQ ID NO: 11263 - DNA, 201 bp, Homo sapiens; identical to SEQ ID NO: 3122

SEQ ID NO: 11264 - DNA, 201 bp, Homo sapiens; identical to SEQ ID NO: 3123

SEQ ID NO: 11265 - DNA, 201 bp, Homo sapiens
aaaaatggaatatatttttataaaattagactaggagactcatcatttttggatataaatttttggagttaattcttaatgacctgtaacaataaaagttkaatgtttgccattccctactgagtggagctccaaatgacatgaaattccagttttaactcagatcttgagcaaactgagcaacaccatagaggagctctt

SEQ ID NO: 11266 - DNA, 201 bp, Homo sapiens
gcattgaatagtgaaaatggctgaaacagtgtgggagaggtctagtggaatatgagaccacaaagcaagactggagtcagacttgaagaacttgaaatgcygtattttaaaaggcagagttaatagggcataaagattcaaccaagtgttctacctacttggtggccgagcgtggtggctcatgcctgtaatcccagcact

SEQ ID NO: 11267 - DNA, 201 bp, Homo sapiens
caactgagaacctcctggaggaaagctgatgtggtcaggtttatacagctgaccattggaagggccagagcttctaacttgtgtctactttttgtgtctaractagccattctgtgctactctacaatgatctttgtagccttaccaatattataattttcatactgcactcctaactcctttgtgaagaggtggtatttt

SEQ ID NO: 11268 - DNA, 201 bp, Homo sapiens
gaaaaagagcctcatcttttcataccaattgaaatggtatatgattagttttcattactcctagctatgatatctttgaatggtgtcctaagaattcacawggtaccaggttctttgtgtcattgcaatgaatgtgtgagagacaaacgtatgtggtttattcagatgtgttttatctggatgtctaatttttaatttatg

SEQ ID NO: 11269 - DNA, 201 bp, Homo sapiens
gaagagggcagaacacaaagtatcccatattcctaaacacaactgagaacctcctggaggaaagctgatgtggtcaggtttatacagctgaccattggaarggccagagcttctaacttgtgtctactttttgtgtctagactagccattctgtgctactctacaatgatctttgtagccttaccaatattataattttca

SEQ ID NO: 11270 - DNA, 201 bp, Homo sapiens
cctgaagaaccaggcgcaggtttcagtagcatgccaccaatggaaagtctgaaccagaatattcttcccttttatgaaatgaagtaggaaggtaattaaaktggataaattactcctgtggatctctacaaatcttcccgcaagtgttgccaagatatggtgctgaaggagcaagtgaaagagatatcaacatcttctgtt

SEQ ID NO: 11271 - DNA, 201 bp, Homo sapiens
aggcctgtttccctagcatctgtcacaattcagagtcattagcatacctttaatggtttcttttcaaaataatttctactagggcatttagaatgcatcarggaaaaatattgagttgtagagatgaggaattttaaatgtagacaaatggttttcattcccttggatgtaattttgataaaatcaagaaaccacatagca

SEQ ID NO: 11272 - DNA, 201 bp, Homo sapiens
ctggtcctggagaactcactgccaagactctgggggcctatccagtcaacacggtgttgccattctccaaggaactgtgtcagactgtgtggccttttggrcagtgattagaaaagaagacagcacagttgagtagaatgctattgatgttcttggcaacaattagtcatatttaaggacagctagggggaataactctgc

SEQ ID NO: 11273 - DNA, 201 bp, Homo sapiens
aaaagcaaaaagaaaaaaaaaagtgcgttttctcgtgtgtgtgcatttaaactacattctggatttaaaagcctgggctaactcactcacaggtgcaaatragagtgtttttactctgaaagggatctaatatagctctgaatttacactagaggaaactgttgtctaaaaactaagaattatagacttgggagtttgaag

SEQ ID NO: 11274 - DNA, 201 bp, Homo sapiens
ttacaggctgttaatacagggctgatttttgttggacattagctaattgccagagttcatctctagtacatgccagatagaagctgggcttttctcttgayggtatcaataggataattaagactatagcaaaattcaaaacatgatggagtatttattacattaagacttgtcattaattgggaattccttcagttcaga

SEQ ID NO: 11275 - DNA, 201 bp, Homo sapiens
ctcaagcttgataaacatacaaataataaatttttcctctaattattttttcctgtcctattaaacatacctctactgacataggcactatttcataaccygtgttcatcttttttgcaaaaatgacatttacaaaagtgatgacataaaacttgttaaaaatggtgattttaaaaattgttcatgattgattataggact

SEQ ID NO: 11276 - DNA, 201 bp, Homo sapiens
tataggcattttctgagcaaagcactgatgaaactaagacatagaggagaaaattcctgtgtactttaaggataagagaaccattcctttttctggctcarttaaaactggactgattgtcaagtcccattaacctagtgggtcactaccttgcttgcattagtggcagccccaccgtaatgtggagcagtcttgccacgt

SEQ ID NO: 11277 - DNA, 201 bp, Homo sapiens
aagacagggatgccctttgtgtctcttgtctgtttttcaggcagccacatttgtcatagttgaacctacttccattttgatattccagggttttttttcargcttttgtatgccatttattgaattctggcaagatttggccgttctcggatcttctttatctagggaaatcctttgtgcaaatgtgggaggcaatcctct

SEQ ID NO: 11278 - DNA, 201 bp, Homo sapiens
catattaacctttggtacatttttgaaatagtctcctgggcaaaggccttagtttataagcagggaaataagacttcagtcagatggcctcactcctaaayactggaagaaggaaatgctccatctgttaaacagttctttcagtctaaatgttggcacttataaccaatattggagatctaaaagtggctggatttgatg

SEQ ID NO: 11279 - DNA, 201 bp, Homo sapiens
agagaagagtaagagtgatcacttggggtttttagtatcactgaaattagccaggtgaacgaaattgcagtgtaagcagtggtttcccgggttcttttatkgggcatttaaagataattttagaaatctgttgtttttgggtgcaatttagacttggattataacctctgttaaaactctctctggttatgtatgttgtgt

SEQ ID NO: 11280 - DNA, 201 bp, Homo sapiens
attcattttactgcacgtctgttttggagagcaagaaaggacttgggctggaagtactggacactcagtataagtgtgaggtgaagcccatcagtaaatgmgtaaatatattcctgccttagatatacttaccttatatgtaaaattagatgctgtagtggaaagtacagcctggggggcagagaggacctggagtatccc

SEQ ID NO: 11281 - DNA, 201 bp, Homo sapiens
ggctgttgaaatagtccaggcaagtggttatggtggttcagactaggataatggcaatggaaatacaaagtggtccattccaggccaggcgcggtggctcrtgcctgtaattccagcattttgggaggccgagatgggtagatcacttgaggtcaagagtttgagaccaacctggccaacatggtgaaaccccatctctac

SEQ ID NO: 11282 - DNA, 201 bp, Homo sapiens
tgcatagggtaaaggtagagacactaggaaattacaatttttttttttttttgagatggagtctcactgtatcgcccaggctggaatgcagtggtgcagtytccgctcactgcaagctccacctcctgggttcactccattctgcctcagcctcgcgagtagctgggactacaggcgcccattaccatgcctggctaattt

SEQ ID NO: 11283 - DNA, 201 bp, Homo sapiens
gagatttttgaggaggctgcagatggcatgaataatcctagtaatagggggagagtgagtttaccaaagaagtgccataacattgtggcaggatttagtgyctgtgaatttatagtgattctagtttccctagttttgtgatttttctccagacatactcaactggagagtagtattaaggggctgtcataaggcagccat

SEQ ID NO: 11284 - DNA, 201 bp, Homo sapiens
tgttcttggcaacaattagtcatatttaaggacagctagggggaataactctgcttagaatgtgttctcatattttctaagtgtgattttgaaaattcatyaagttacttgcaaaccagttggttcagggcagttcttgttgagtggtgtcctgtgtgttagccgtaataacttattgacatcctatcacttgggtcatta

SEQ ID NO: 11285 - DNA, 201 bp, Homo sapiens
gaggaccccctgcctccctcctgtggcctttgcctttgcctcagggtggcttctttaatgggcagatgatggcatgtctctcttcagtcacctccatcccrgcactgaggtggctgatttccatcctatcttgtgtgcgctgttgctttctattcagatgactcgtgctttgagcgcattctcttctttccattgctccct

SEQ ID NO: 11286 - DNA, 201 bp, Homo sapiens
tagggccatctttattcagaagtaagactgttggaaattgttttctaaggcctatgtttaactagctaataataacaattgttgtgattgtgttcaatgakataaaatttgattcttaagaggcgatttatccttttgctggagtgggtttcaagtagtttttcagaataaaattagttttgcagcatatattcctttgga

SEQ ID NO: 11287 - DNA, 201 bp, Homo sapiens
tgaggtcaggagtttaagatcatcctggccaacatggtgaaaccccatctctactaaacacacacacacacacacacacacacacacacacacacacacacgccaggcatggtggtgggcatctgtaatcccagctactcgggaggctgagacaggagtgtcacttcaacccaagaggcagaggttgcagtgagccaagat

SEQ ID NO: 11288 - DNA, 201 bp, Homo sapiens
atgcttagatattgagataaagtgcctcctgtttctggttatttctactacatggcttatttcattcaatttttgtttaataaaattatgccttcaactaygataataataaatttaaagcattaacagtagtgattagctaattataagaaagttattttattaagatatctaattgtctacttgctttaaaaataacca

SEQ ID NO: 11289 - DNA, 201 bp, Homo sapiens
atgaggtcaggagtttaagatcatcctggccaacatggtgaaaccccatctctactaaacacacacacacacacacacacacacacacacacacacacacacgccaggcatggtggtgggcatctgtaatcccagctactcgggaggctgagacaggagtgtcacttcaacccaagaggcagaggttgcagtgagccaaga

SEQ ID NO: 11290 - DNA, 201 bp, Homo sapiens
catgaggtcaggagtttaagatcatcctggccaacatggtgaaaccccatctctactaaacacacacacacacacacacacacacacacacacacacacacacgccaggcatggtggtgggcatctgtaatcccagctactcgggaggctgagacaggagtgtcacttcaacccaagaggcagaggttgcagtgagccaag

SEQ ID NO: 11291 - DNA, 201 bp, Homo sapiens
tcatgaggtcaggagtttaagatcatcctggccaacatggtgaaaccccatctctactaaacacacacacacacacacacacacacacacacacacacacacacgccaggcatggtggtgggcatctgtaatcccagctactcgggaggctgagacaggagtgtcacttcaacccaagaggcagaggttgcagtgagccaa

SEQ ID NO: 11292 - DNA, 201 bp, Homo sapiens
aaggcatagtaagagattaatagcaataactaataataaattaaaacaattataacaatatactgtaataaaagttatgtgaatatcatctctctcactcaatatcttattgtacagtactcacttattttcggactatggttgaccttggataaagggggaactactgtaattttctaccatgttcttttcattctagag

SEQ ID NO: 11293 - DNA, 201 bp, Homo sapiens
aaaggcatagtaagagattaatagcaataactaataataaattaaaacaattataacaatatactgtaataaaagttatgtgaatatcatctctctcactcaatatcttattgtacagtactcacttattttcggactatggttgaccttggataaagggggaactactgtaattttctaccatgttcttttcattctaga

SEQ ID NO: 11294 - DNA, 201 bp, Homo sapiens
agtcacccatacttaccatcactcgatcagactgtgtttcagaggctaaattattttctgatccagcagtaatgttacctattatatgtctgtctgaatgyttttttttttttttttttttgaggcggagtcttgctctgttgcccaggctggagtgcaggggtgtgatctcagcttactgcaacctctgcttcctgggtt

SEQ ID NO: 11295 - DNA, 201 bp, Homo sapiens
aaaaggcatagtaagagattaatagcaataactaataataaattaaaacaattataacaatatactgtaataaaagttatgtgaatatcatctctctcactcaatatcttattgtacagtactcacttattttcggactatggttgaccttggataaagggggaactactgtaattttctaccatgttcttttcattctag

SEQ ID NO: 11296 - DNA, 201 bp, Homo sapiens
aaaaaggcatagtaagagattaatagcaataactaataataaattaaaacaattataacaatatactgtaataaaagttatgtgaatatcatctctctcactcaatatcttattgtacagtactcacttattttcggactatggttgaccttggataaagggggaactactgtaattttctaccatgttcttttcattcta

SEQ ID NO: 11297 - DNA, 201 bp, Homo sapiens
gaatggatatattgtttttacctcttaaacatgcttttatgtatataatttgatgctcaaaagatgagtaataggaaaggtttttttttttttttttttttgagatggagtctcactctgtcacccaggctggagggcagtggcgcgatctttgctcactgcaagctccgcctcccgagttcacgtcattctcctgcctca

SEQ ID NO: 11298 - DNA, 201 bp, Homo sapiens
aataaaatcccatttccagcagtcattttgctaattagcaaaacatcactgttgattaagacatggatgactgaagcccttctagtagcctcctacttttygagcttctaataagaatacttgctgattgctcctggattgtgcattcctgagtaacatgctggcagcacctaattcagagcttacataataatgtacata

SEQ ID NO: 11299 - DNA, 201 bp, Homo sapiens; identical to SEQ ID NO: 3141

SEQ ID NO: 11300 - DNA, 201 bp, Homo sapiens
cattcttttatatttatttaccacaaaaataaagttctggaataccatgccttacttgaaaagcattatttctgagtattttcacatttatttaattaatygttttaatgttaggtagtgctggcttaaggggaacctttttgaaagctgaatttttaaaacaatgaaaacccaagaagtcttcatgatttttaatggcaa

SEQ ID NO: 11301 - DNA, 201 bp, Homo sapiens
atacagagaatgatgatcattgatagacctcattctgtgattataatgacattatattgtacttatgtggaattataataaagcttttacaatttataacwtgacttgcctgtcataaccaatgcccattgttttagcaagagtggactttttcttctcgctcttctttatgtctgtactgatgtgtgtttgtgtatgtat

SEQ ID NO: 11302 - DNA, 201 bp, Homo sapiens
gaattccagtgtgtagtttttgttgagtactgtagtgagaaatctcaggattacagtagaagtatatgtgcccatcgagtagaaattataacagtatcaasctgggagataatataatgcccctctgttttatttatcccctgccaccacctttttcaagattttttatggaatgaggaataatatgtttaaggtatagac

SEQ ID NO: 11303 - DNA, 201 bp, Homo sapiens
aaaattattgttgttttgtagtcacttcaagttatatgtgcatattattttcccagcccagtgtcagagtactagcagatataagcagatataaactacgytttccctcccccgctgactttatccccacagctcatggctgtctccacgaagtaagtgattctgtctgagtaggtattttttttttttttatttaaccta

SEQ ID NO: 11304 - DNA, 201 bp, Homo sapiens
tgtgagccttaggaacatgtacactggtcccgtagagtgacacaacaaaagcaggctcttggtgtagtcaggttttgtccttgtaaatgacatggtacaartgcatgcggtggattaaaatatgttcaccctgacagaaatcttttagttgaagtgaaaaagcctccgtcaattctgattgcaacaaaggttgctgctgcg

SEQ ID NO: 11305 - DNA, 201 bp, Homo sapiens
cttccaagctgctgactctcattctgcatttttttttttttttttttttttttttttttttttaagacacagcctcctctgttactcagcttaggtacagkggcaagatcttggctcactgcaacctccacctttcgggttcaagcaattcttgtgcctcagtctcctgagtagctgggattacagacatgcagcaccaca

SEQ ID NO: 11306 - DNA, 201 bp, Homo sapiens
atagttctacagtatttttaataatactctattgtatacttgaaatttgccaagggaatggatcttaaatgttcttaaccgcacgcatgcattgtgtgcgwgcacacgcacaggtgtgagatgatagatgtgttaattaacttgattgtggtagtcattttatattgtatatgtatatataaagtcatcatgctgcatacc

SEQ ID NO: 11307 - DNA, 201 bp, Homo sapiens
agagtgagctcatgtggtgtatatttagtgttcaaagggcttttgccatttaatagttgtgtgatcatggacaagttgtctcatttttcttcagaataaartggggagactaatgccaatttctcatggttgccatggagactaaatgagaaaatatacaggtgctgagtgaaatatagcaggtgatcactaagtatcctt

SEQ ID NO: 11308 - DNA, 201 bp, Homo sapiens
tgcttagtgaaataatgtatgcacaatcataatgctatcagggattgagaataatttgtttaccagcgtgggtgagaaatattagcactaccatttccatmgaaaccattttgcatttaaaaagttctggcatgtcaaactgtaaatttcagtatttaaaaacattctcttatgtgaatccctgtattgcaaaagatactg

SEQ ID NO: 11309 - DNA, 201 bp, Homo sapiens
ttctgtatccgtgcttttattgctttgatatgattcctaaatggcactgagttatgctttttctgtgtttcttgatgttctgacctgtgtcctgatttggsgatgggggcaggtggcagctatcttcatgtatcttgtaactattcccttacccataaagacattggacattttcttgctcactcttttctttactaactg

SEQ ID NO: 11310 - DNA, 201 bp, Homo sapiens
gccattgagcctggcctgaactgaaactttttaaggctatgttatattttgattgagaactacctttttctctccatccaagtaaaattcttttagttgawcaaacacctccctattcccagccctgcagcatcatctgtgatgtgcctcaataggtgtaacttgaaccagccgaaccagacccaattgcaaaggccaact

SEQ ID NO: 11311 - DNA, 201 bp, Homo sapiens
ccctgagctgactcttgaagtatgagtaggatttgctcccaaggttgaggagtgggatgaaacagccttaggtattgcaggcaaaagcttggaaacgtggrgatagggggacactactagaagttgctgagtgggaatcattgtggcagttagaacatagtctgttctttaagtgggtgtgtgtgtgcaggggattcacga

SEQ ID NO: 11312 - DNA, 201 bp, Homo sapiens
ctgaatatttaatcagaacaaaaagagaaacatgttagaattttcaaattacagagttaccgtgtggatgcttcacagaggtacgtgcagttcagtgtgcytatacacccgtatgaacttctcacatttattagctataaaatacttcgaaggtgtattttcttctagtttttatatttaatttatggaatattaagtagg

SEQ ID NO: 11313 - DNA, 201 bp, Homo sapiens
cactaattactaaattaatacaagaatattatagaacacttggaaaacaaaaaattacaaagaaaatcagtattgttataattctgtcatctatcattaakgtttagaggtataaagttctttctcccttccccatatgtatatattttatacatgctttagggtctcagattatgtatcccaccaccctccaaaccagta

SEQ ID NO: 11314 - DNA, 201 bp, Homo sapiens
aggtaggttgtataatgtagattagaaatatagtaatgtcgtggagtcacagtactcaggagctggaagttaactcgggagttatgacctagtaatttcamtgacagcagagaaaaaagacgctgttttaaagaagctccccatttttgctgctgtagattctggacactaactttaaatggaattatgggatagtggatt

SEQ ID NO: 11315 - DNA, 201 bp, Homo sapiens
gatttgttactcaacataactaaaatattaagcaacatgttttgattggaatagcatatctgcagtctgttctgttttacctaataaatcttgtctattgwctgtctttactgctttgtgtagctggtgaagcatgagaaactggcctcgtacattctgatttgtagatctcttatttacagattctggttgtgtggtata

SEQ ID NO: 11316 - DNA, 201 bp, Homo sapiens
agctgaaggattttttgaggaagctgaaaaaatatcaggtcagtgggttgaaaagtcatttctatgtatattaaagtctccaaatttggaagctaaggatktagtggaggaggttaatagtgctcatgtttgaggaaggtacgagagcaaaactcttagtttccagcgggcagaagaataccttggttggcatttctcttt

SEQ ID NO: 11317 - DNA, 201 bp, Homo sapiens
acccagcaaaccatttccttccactcctccccatctcaccagcctcattttgtaatatccttcactgtggacacccttcttaggaaatcgaagtgttattycttaaccacaccaggtctgcaaggaccatgccctcctttctgcctgcccttctttgtctttctttcaaagaattgaaaactcactcttttcacactacct

SEQ ID NO: 11318 - DNA, 201 bp, Homo sapiens
aacagtcttttctaagataatttttttaaaaagaaaatattttttaatcttttaaaagattacatagacatgtttttgttgttgtctttaaaagtattacyaacagacagaagaaggtttaaaagacacccatcaatctgtctttctgatataaccatggtttacaccagtgtgtgttttcctcgagattatttttttcta

SEQ ID NO: 11319 - DNA, 201 bp, Homo sapiens
ccatgcctccattcttgccggatcattctcttcatcagcttgtttcatctttatagctgggtgctgctccactgacctctctgccatggagttccacttcyatccatctgatttatttttacactggatccgccttctcaagatggtacctttataacttcaccctctcatttagaaaggccagtggcttgtcaacacctg

SEQ ID NO: 11320 - DNA, 201 bp, Homo sapiens
cacttctatccatctgatttatttttacactggatccgccttctcaagatggtacctttataacttcaccctctcatttagaaaggccagtggcttgtcawcacctgcaggatagactctaggtgtgctgtctcttcttggcagactgtccatatcccggcccctcccttcttagcactacccaacccttccaaccctcta

SEQ ID NO: 11321 - DNA, 201 bp, Homo sapiens
taaactgttcttgacttctcttggtattaaaagcactctcttaaatttgatcacggcagggaagaggtaggggtactggaatgtatttttatgcatggackactcaaatgaaatttcaccaaacttcgcaccacccgagtcacccctcagctgagaatgagcatataaaattcatcccaaagggcaattctttgtgaaaaa

SEQ ID NO: 11322 - DNA, 201 bp, Homo sapiens
aaccaaccctcatgtttttaatcctaagaccaattttgatgaacattccaaagtagcatcatgagggattggaaataactcacaaagcctcgagggtatcmccataagtagaatacattatatagatatttaagaaaatagttatttaaggaaaaatctatgattgatgcattgtatatggctcatgatgaacatatttct

SEQ ID NO: 11323 - DNA, 201 bp, Homo sapiens
caggcagcaggggagtcccatcgtgtcagggtgtgttactctcccctgagcaccacagagaagacaccaacccctaccagctgtcacgtggccacatgttrttagagtcctgctctcctaggtttttccaccctgccccccatcatttccaaggacccaatattattgaaaaagaaaaacatattgcaaaattgaaaagtt

SEQ ID NO: 11324 - DNA, 201 bp, Homo sapiens
ggaggcggagcttgcagtgagccgagatcgcgccactgcactccagcctgggcgacagagcaagactccgtctcaaaaaaaaaaaaaaaaaaaaaaaaaaagaataaacccaactatataggattagagtaaaattaatgatgatgatgattcagatacagtataagctcttatctgaccttcacagaatctacctcgtgg

SEQ ID NO: 11325 - DNA, 201 bp, Homo sapiens
cagaattccaaacacttgccttagaatttagtcctcagaaaatgacttaatccttttttgtgttttgttgttgttgttgttgttgttgttgttgtgtgtgtcatatatttctgttttgtatttaataaaggtctcaagctcttctttatttcagtatatttacctatcaattgggattgttgatacctccttcaaataaat

SEQ ID NO: 11326 - DNA, 201 bp, Homo sapiens
tgagtgtcactgacaatttccttttctaaattaagatactttgtgaactatcaaaatatgacattaatgaaagtttagacattagaaaatgtttaacccaygtatttgtgcttatttttaaatactttaatcaatgcttaaaacatgtaatatcaaattgaataatagatcattgtcactgacaatttccttttctaaatt

SEQ ID NO: 11327 - DNA, 201 bp, Homo sapiens
tcagaattccaaacacttgccttagaatttagtcctcagaaaatgacttaatccttttttgtgttttgttgttgttgttgttgttgttgttgttgtgtgtgtcatatatttctgttttgtatttaataaaggtctcaagctcttctttatttcagtatatttacctatcaattgggattgttgatacctccttcaaataaa

SEQ ID NO: 11328 - DNA, 201 bp, Homo sapiens
aatgcattcagaattccaaacacttgccttagaatttagtcctcagaaaatgacttaatccttttttgtgttttgttgttgttgttgttgttgttgttgttgtgtgtgtcatatatttctgttttgtatttaataaaggtctcaagctcttctttatttcagtatatttacctatcaattgggattgttgatacctccttc

SEQ ID NO: 11329 - DNA, 201 bp, Homo sapiens
aattaaagccgtttgccatcaattctgttgagttcccctcactgcttagtcacaagtagcagccctgccaccagcagtgggtaaatctatgccaagtgtarttacttcaaatacaattccatttattcatagggtggactgttgctccccgtgagcacgtacttggggaaagaaaagatatgtaggtttatgttcattatg

SEQ ID NO: 11330 - DNA, 201 bp, Homo sapiens
tttcttgcattccaatttccattcgataggcacttttccttagacaatattataaggagtagttagtttacctgggactcctgagttttgatggtgatgtactttagctgtgtattgaattaaataagaacttgcctaggctgcctgtgttgatttccaaaattaaatttcaagtgactctggaaccacccatttccaagt

SEQ ID NO: 11331 - DNA, 201 bp, Homo sapiens
ctttcttgcattccaatttccattcgataggcacttttccttagacaatattataaggagtagttagtttacctgggactcctgagttttgatggtgatgtactttagctgtgtattgaattaaataagaacttgcctaggctgcctgtgttgatttccaaaattaaatttcaagtgactctggaaccacccatttccaag

SEQ ID NO: 11332 - DNA, 201 bp, Homo sapiens
gctttcttgcattccaatttccattcgataggcacttttccttagacaatattataaggagtagttagtttacctgggactcctgagttttgatggtgatgtactttagctgtgtattgaattaaataagaacttgcctaggctgcctgtgttgatttccaaaattaaatttcaagtgactctggaaccacccatttccaa

SEQ ID NO: 11333 - DNA, 201 bp, Homo sapiens
agctttcttgcattccaatttccattcgataggcacttttccttagacaatattataaggagtagttagtttacctgggactcctgagttttgatggtgatgtactttagctgtgtattgaattaaataagaacttgcctaggctgcctgtgttgatttccaaaattaaatttcaagtgactctggaaccacccatttcca

SEQ ID NO: 11334 - DNA, 201 bp, Homo sapiens
cataaaataagtcatttgtagtcttggataatctgaacccttgtgccagattgtctaatgtcagttgtgttctggcactgcttcttctacatcttctcatygtctggcgctgtttcgaaagcactcatcaccataatgtcgtccatcttctgttaattcctctggtgtggtgtctgttagttctggaatttctccaaggtc

SEQ ID NO: 11335 - DNA, 201 bp, Homo sapiens
atagctttcttgcattccaatttccattcgataggcacttttccttagacaatattataaggagtagttagtttacctgggactcctgagttttgatggtgatgtactttagctgtgtattgaattaaataagaacttgcctaggctgcctgtgttgatttccaaaattaaatttcaagtgactctggaaccacccatttc

SEQ ID NO: 11336 - DNA, 201 bp, Homo sapiens
catatataaataacttaattgtagttcactattagacatttacggttccaaataaatggttcagaatgtttcacttttatgaacactctgcattggatatycttattattaaatttacacatatccagtgttatttccttagggtaaatccctagaaatggaattactaggtcaaaggttatactaaatattattattgtc

SEQ ID NO: 11337 - DNA, 201 bp, Homo sapiens
ttttctctttctatacatgtttctaccattttgaggtgaaaattaaaaaatctagtatactgcttagtgtggctttaaaatcaatgtatttgtttttgaayttttttagtgtgatttcatagggaatactagaaataaaacatctgtcaaggaatgaattttttgcagatgagtagtgtcagagaggcatgaaattgattg

SEQ ID NO: 11338 - DNA, 201 bp, Homo sapiens
ggggtgtcacatgttggccaggctggtctcaagctcctggcctcaggtgatccacctgccttggcctcccaaagtgctgggattacaggtgtgagccaccrtggccagcccttgtgcgttttgagttgaagattatctcttgcttcttggcctcttgtatctgtcctcccactgactacctttgtgttctggtttttgttg

SEQ ID NO: 11339 - DNA, 201 bp, Homo sapiens
tttctaaattaagatactttgtgaactatcaaaatatgacattaatgaaagtttagacattagaaaatgtttaacccacatatttgtgcttattttcctcytttatagaaacagaataaggcaatatacaaagtgccatttccttttattataataaccataatggaaatttcagtaaagaaagtataactaaagcagtac

SEQ ID NO: 11340 - DNA, 201 bp, Homo sapiens
aggggagaaacattcaagccataagcacaaacagacaaaaaacccaagacaacaataagaaagatgtgatacaattttattagtttacttagaacactgaycccagtgcatcatagttactctctgaggttttacagaagcctagttttaattgaattaaattaaattgaattttgattgagaatcctgttgaattttgcc

SEQ ID NO: 11341 - DNA, 201 bp, Homo sapiens
gatagttttaaaacagataaccgagtgtaactgtgttatagagtcttaagaggggacttctgaatactcccttggctttgtttttgctaaaactgttttcrtttctctttgatcagttaatttaacttacaggaaagtctcctaaggtaataatcagaaatggtagttaataatttatgtccttcaccatgttttttaagc

SEQ ID NO: 11342 - DNA, 201 bp, Homo sapiens
ttatttttaaatactttaatcaatgcttaaaacatgtaatatcaaattgaataatagatcattgtcactgacaatttccttttctaaattaagatactttrtgaactatcaaaatatgacattaatgaaagtttagacattagaaaatgtttaacccacatatttgtgcttattttcctcttttatagaaacagaataagg

SEQ ID NO: 11343 - DNA, 201 bp, Homo sapiens
agaacagatcaccaaacaggaaatcaagagccctggaagtgagtagtattgatttgtggtgataaaagtatattttgacacatttcaaatcataaataackcatggactttaacttgcatgactaatagctcaacccaggatacatgcttatctacaacttaaactacctctttctaaggagtccataacatgaggtgaat

SEQ ID NO: 11344 - DNA, 201 bp, Homo sapiens
gtgtgtggatgctcatttttacagtcttttcccgtatgttaatgaggaagggctgcatatctggtcagggttgttctagccttccctcctcacctccttcsccctgcttttaaatctgagacacattggagacacgatcagttgtcaacactaggatagaatgtaaccttgctttcctatgagctattagtcattagtcat

SEQ ID NO: 11345 - DNA, 201 bp, Homo sapiens
ggaaacgttgattccttctgctgacaaactccatagatttgaccttctaacccaactaaatctagtgtttaagttacacagcatgcctttctgcagtctartttgatgtagttataataatatcacttggtgtaaaatttttatactctacaaatatccgacgggagggttagtattatctggatagctggaaaataaagt

SEQ ID NO: 11346 - DNA, 201 bp, Homo sapiens
ctccttgtgaatttaggctaacctcatgaccccagctgtgcccctgttaagagactccggcaagatacgtagtcccgactgcctattttagcagttcctcrtgggccaacttcttacattttcttcttatgtttcctgttaaatccagagaacaagctggacatgctaaacatggaaaatactatacatgacaacaagcca

SEQ ID NO: 11347 - DNA, 201 bp, Homo sapiens
ctggcagaggtctcatcagaccaaccctaggaatgaatctttagccttaagaacaaattggaagatgatgtgggaatcggatggaagccttgaaaagagayccccttcccctcttctcttgctcccattgaaacagtaggtgaccccagtcccctggctagctcacagctgtgaccagaccctcccttggttctactgctc

SEQ ID NO: 11348 - DNA, 201 bp, Homo sapiens
gctcccagtcaccctgcttctctccccgacccacatcagggtccccccgatgtacacggtggccactttcagagagcacgaagataatcaagaaggttaaytttctgggaagccccccaggagcatgtttttattgtgttcgaaagctgctttatcattatcgcttgatgacatttattaattgcccagctgggatgctgg

SEQ ID NO: 11349 - DNA, 201 bp, Homo sapiens
taatttatcttgatttttattattacatatgttctgcctttgaaaaaggcagcaagaaaaaggcaaaagaaaaagcagaaaaaaggaggagggaagagttytgaaacaaacaggagtttgtgggtagcatcatgtttaaaatacatgatacaagaaatcatgtggctgggcctggtggctcacgcctgcaatcccagcact

SEQ ID NO: 11350 - DNA, 201 bp, Homo sapiens
gcttctctccccgacccacatcagggtccccccgatgtacacggtggccactttcagagagcacgaagataatcaagaaggttaactttctgggaagcccyccaggagcatgtttttattgtgttcgaaagctgctttatcattatcgcttgatgacatttattaattgcccagctgggatgctggtcacagggtgactga

SEQ ID NO: 11351 - DNA, 201 bp, Homo sapiens; identical to SEQ ID NO: 3132

SEQ ID NO: 11352 - DNA, 201 bp, Homo sapiens
ataccattttttatctttgattttttttttaatggaatgcttcagaaattcatgtgtcaaccttgctcaggggctgtgctaatctctgtattgttcaaatkgtcctagatgtgttgccaaagcaatcacttttacactgtttttgctgtagcttttctatgtttacatatatttgtacacacaaataccactgtgttacaa

SEQ ID NO: 11353 - DNA, 201 bp, Homo sapiens
gatagctttcttgcattccaatttccattcgataggcacttttccttagacaatattataaggagtagttagtttacctgggactcctgagttttgatggtgatgtactttagctgtgtattgaattaaataagaacttgcctaggctgcctgtgttgatttccaaaattaaatttcaagtgactctggaaccacccattt

SEQ ID NO: 11354 - DNA, 201 bp, Homo sapiens
cagatatacccagatattagtaacatttttattcgtaaagatatagtgctggttttcttattgatatttttatatccaataaacaaatccgagtggtaagwatatgtattttccaccatagtactaaataaaaccattttcatcttcagttaagtaaagaagcagccccataagcatttttgtttgtccgtaattggccct

SEQ ID NO: 11355 - DNA, 201 bp, Homo sapiens
ggatagctttcttgcattccaatttccattcgataggcacttttccttagacaatattataaggagtagttagtttacctgggactcctgagttttgatggtgatgtactttagctgtgtattgaattaaataagaacttgcctaggctgcctgtgttgatttccaaaattaaatttcaagtgactctggaaccacccatt

SEQ ID NO: 11356 - DNA, 201 bp, Homo sapiens
gggatagctttcttgcattccaatttccattcgataggcacttttccttagacaatattataaggagtagttagtttacctgggactcctgagttttgatggtgatgtactttagctgtgtattgaattaaataagaacttgcctaggctgcctgtgttgatttccaaaattaaatttcaagtgactctggaaccacccat

SEQ ID NO: 11357 - DNA, 201 bp, Homo sapiens
tggggatagctttcttgcattccaatttccattcgataggcacttttccttagacaatattataaggagtagttagtttacctgggactcctgagttttgatggtgatgtactttagctgtgtattgaattaaataagaacttgcctaggctgcctgtgttgatttccaaaattaaatttcaagtgactctggaaccaccc

SEQ ID NO: 11358 - DNA, 201 bp, Homo sapiens
tatggggatagctttcttgcattccaatttccattcgataggcacttttccttagacaatattataaggagtagttagtttacctgggactcctgagttttgatggtgatgtactttagctgtgtattgaattaaataagaacttgcctaggctgcctgtgttgatttccaaaattaaatttcaagtgactctggaaccac

SEQ ID NO: 11359 - DNA, 201 bp, Homo sapiens
ttatggggatagctttcttgcattccaatttccattcgataggcacttttccttagacaatattataaggagtagttagtttacctgggactcctgagttttgatggtgatgtactttagctgtgtattgaattaaataagaacttgcctaggctgcctgtgttgatttccaaaattaaatttcaagtgactctggaacca

SEQ ID NO: 11360 - DNA, 201 bp, Homo sapiens
cttatggggatagctttcttgcattccaatttccattcgataggcacttttccttagacaatattataaggagtagttagtttacctgggactcctgagttttgatggtgatgtactttagctgtgtattgaattaaataagaacttgcctaggctgcctgtgttgatttccaaaattaaatttcaagtgactctggaacc

SEQ ID NO: 11361 - DNA, 201 bp, Homo sapiens
ggcttatggggatagctttcttgcattccaatttccattcgataggcacttttccttagacaatattataaggagtagttagtttacctgggactcctgagttttgatggtgatgtactttagctgtgtattgaattaaataagaacttgcctaggctgcctgtgttgatttccaaaattaaatttcaagtgactctggaa

SEQ ID NO: 11362 - DNA, 201 bp, Homo sapiens
tgtggcttatggggatagctttcttgcattccaatttccattcgataggcacttttccttagacaatattataaggagtagttagtttacctgggactcctgagttttgatggtgatgtactttagctgtgtattgaattaaataagaacttgcctaggctgcctgtgttgatttccaaaattaaatttcaagtgactctg

SEQ ID NO: 11363 - DNA, 201 bp, Homo sapiens
ctgtggcttatggggatagctttcttgcattccaatttccattcgataggcacttttccttagacaatattataaggagtagttagtttacctgggactcctgagttttgatggtgatgtactttagctgtgtattgaattaaataagaacttgcctaggctgcctgtgttgatttccaaaattaaatttcaagtgactct

SEQ ID NO: 11364 - DNA, 201 bp, Homo sapiens
aagcccaggaaggttgcggtttggtttggcttctgggtaggggttggaaggaaggtccaatgcttgggccagtcctcccagtgtggggacgactgggagaycagggagctagctcagggagctccccgtgtgctcaaacacacagaagcatctgaggagccctaactaataaagagctaagaaaacctctagaatttgctt

SEQ ID NO: 11365 - DNA, 201 bp, Homo sapiens
gataaggtaaagaaaggatgttagttggaaactagcaatcaggaaggtcagctgctgcctggtctaggtagagtggcagggcagaggagggcttggctggwtatggtaactactgctccatggatgggtagtgacagtccttgactcacgcttcagtccttttctccccaggcctaggacaccttttctctgtgctacttg

SEQ ID NO: 11366 - DNA, 201 bp, Homo sapiens
aggccctctgtaaaaatccaaggatctctgcagctggaatgttgcagtgttagatgtgagagaaagggataacattgtgtttggcttttaaaaaagacattctgaaaggagatccggagggttagcagtacctgactctgctaatgtagttaatgccctgaaatgaaggtagtcagtggctttgcacacaaatatgtaatt

SEQ ID NO: 11367 - DNA, 201 bp, Homo sapiens
ttgttgatgatcttgtttttccttgttaaaaaaaaaaaaaatttaaaagtaaggtctgacccagcatttcatttctttcctttaccctctcctgcctccckggtttattcagagtcactcctatagtgttctgtattaggccaaatcagtgctaccagggaacagtaagtgcttttaagtcccccttttaaaccttctctg

SEQ ID NO: 11368 - DNA, 201 bp, Homo sapiens
tgctagattatgtgtgtgtgtgtgtgtgtgtgtgtataatcgtttgtgttgcatagggtaaaggtagagacactaggaaattacaatttttttttttttttgagatggagtctcactgtatcgcccaggctggaatgcagtggtgcagtctccgctcactgcaagctccacctcctgggttcactccattctgcctcagcc

SEQ ID NO: 11369 - DNA, 201 bp, Homo sapiens
ttttgacagtggtgtggaagtgacaagcgttcagtaaactcagcttctggcattaccttcagcaaaatccgttgtaaaccaaggagcatctataatttcakcttcctttatttttttcatataatgacttgggttcattcccttaatataaatatgttggcaattatgaggtttttttgagttggagtctccctgtgttgc

SEQ ID NO: 11370 - DNA, 201 bp, Homo sapiens
ttttttgacagtggtgtggaagtgacaagcgttcagtaaactcagcttctggcattaccttcagcaaaatccgttgtaaaccaaggagcatctataatttsatcttcctttatttttttcatataatgacttgggttcattcccttaatataaatatgttggcaattatgaggtttttttgagttggagtctccctgtgtt

SEQ ID NO: 11371 - DNA, 201 bp, Homo sapiens
tcgacttaggattttttgacagtggtgtggaagtgacaagcgttcagtaaactcagcttctggcattaccttcagcaaaatccgttgtaaaccaaggagcwtctataatttcatcttcctttatttttttcatataatgacttgggttcattcccttaatataaatatgttggcaattatgaggtttttttgagttggagt

SEQ ID NO: 11372 - DNA, 201 bp, Homo sapiens
aggatggttcgacttaggattttttgacagtggtgtggaagtgacaagcgttcagtaaactcagcttctggcattaccttcagcaaaatccgttgtaaacmaaggagcatctataatttcatcttcctttatttttttcatataatgacttgggttcattcccttaatataaatatgttggcaattatgaggtttttttga

SEQ ID NO: 11373 - DNA, 201 bp, Homo sapiens
taggatggttcgacttaggattttttgacagtggtgtggaagtgacaagcgttcagtaaactcagcttctggcattaccttcagcaaaatccgttgtaaamcaaggagcatctataatttcatcttcctttatttttttcatataatgacttgggttcattcccttaatataaatatgttggcaattatgaggtttttttg

SEQ ID NO: 11374 - DNA, 201 bp, Homo sapiens
actgtggcttatggggatagctttcttgcattccaatttccattcgataggcacttttccttagacaatattataaggagtagttagtttacctgggactcctgagttttgatggtgatgtactttagctgtgtattgaattaaataagaacttgcctaggctgcctgtgttgatttccaaaattaaatttcaagtgactc

SEQ ID NO: 11375 - DNA, 201 bp, Homo sapiens
ggactgtggcttatggggatagctttcttgcattccaatttccattcgataggcacttttccttagacaatattataaggagtagttagtttacctgggactcctgagttttgatggtgatgtactttagctgtgtattgaattaaataagaacttgcctaggctgcctgtgttgatttccaaaattaaatttcaagtgac

SEQ ID NO: 11376 - DNA, 201 bp, Homo sapiens
ctcaacttgacatatcccaaatcaacctttattttcacccccagacttgcttttcttctctgtctttcccactaaatggcacaggtagtcaggtccccaaytggggattcatccttgttttcttttttccttacaccttacatcagactgttagctagtcttgtcaactccatctctaaaacatgtctaaatatgttcctt

SEQ ID NO: 11377 - DNA, 201 bp, Homo sapiens
tggactgtggcttatggggatagctttcttgcattccaatttccattcgataggcacttttccttagacaatattataaggagtagttagtttacctgggactcctgagttttgatggtgatgtactttagctgtgtattgaattaaataagaacttgcctaggctgcctgtgttgatttccaaaattaaatttcaagtga

SEQ ID NO: 11378 - DNA, 201 bp, Homo sapiens
tttcactgttctctttctctttctctctgtctgtatataacagtgagaaatgtgtgtacattatatgtatatgtgtgtgtatacacacacacacacacacatatataaaggccaagtaaatttttagttaaattgaattattccttaatggttacgtgagaatatcttatcaagtctaaatatagtaatcatcagtatgat

SEQ ID NO: 11379 - DNA, 201 bp, Homo sapiens
ttttcactgttctctttctctttctctctgtctgtatataacagtgagaaatgtgtgtacattatatgtatatgtgtgtgtatacacacacacacacacacatatataaaggccaagtaaatttttagttaaattgaattattccttaatggttacgtgagaatatcttatcaagtctaaatatagtaatcatcagtatga

SEQ ID NO: 11380 - DNA, 201 bp, Homo sapiens
tttttcactgttctctttctctttctctctgtctgtatataacagtgagaaatgtgtgtacattatatgtatatgtgtgtgtatacacacacacacacacacatatataaaggccaagtaaatttttagttaaattgaattattccttaatggttacgtgagaatatcttatcaagtctaaatatagtaatcatcagtatg

SEQ ID NO: 11381 - DNA, 201 bp, Homo sapiens
atttttcactgttctctttctctttctctctgtctgtatataacagtgagaaatgtgtgtacattatatgtatatgtgtgtgtatacacacacacacacacacatatataaaggccaagtaaatttttagttaaattgaattattccttaatggttacgtgagaatatcttatcaagtctaaatatagtaatcatcagtat

SEQ ID NO: 11382 - DNA, 201 bp, Homo sapiens
agtaataaagatgcaagtttgcataaaaatagaatccatcactgtggagctcagtctgatatataccaggttttactccatatttataaaattataaaccratatatttatactctaattaaaaatggaatatatttttataaaattagactaggagactcatcatttttggatataaatttttggagttaattcttaatg

SEQ ID NO: 11383 - DNA, 201 bp, Homo sapiens
agaggtgtttgctttgttcacgaccatggttgtgggtcttttctgcataggtagggaagaacaatagttgattgaggaatgtcttccagcccaccccgcacacacacacacacacacacacacacacacacacacacacacacacacacaccctctgagggaaaaagcctcctttctaccttgacgttgttggtgatgtgc

SEQ ID NO: 11384 - DNA, 201 bp, Homo sapiens
tagaggtgtttgctttgttcacgaccatggttgtgggtcttttctgcataggtagggaagaacaatagttgattgaggaatgtcttccagcccaccccgcacacacacacacacacacacacacacacacacacacacacacacacacacaccctctgagggaaaaagcctcctttctaccttgacgttgttggtgatgtg

SEQ ID NO: 11385 - DNA, 201 bp, Homo sapiens
aaaaataacaagtggtattatagtgtccttactatttttatgagctgctttatttttgctcataatatatcataaaaatatgttgtcagtacatatataartaacttaattgtagttcactattagacatttacggttccaaataaatggttcagaatgtttcacttttatgaacactctgcattggatatccttattatt

SEQ ID NO: 11386 - DNA, 201 bp, Homo sapiens
ctttggatatacaacttctgggcttaagtggtcctcctgctctggcctctcagaaagctgagtttctaccatggcattagttaacctgacctctaggctasatggttttaaatccctcttgtatttgaattttacctttacttacaagctagctgtgctgtcacttaccttttgcttttacagctcacctttgcagtcagt

SEQ ID NO: 11387 - DNA, 201 bp, Homo sapiens
gagttttttttttttctcttgcatcattttgaagctatgcaggcatatttccagattgcaacaaaattttattgtgaattaaaataaaatcaccttttctmtgttcctttggaaaggaaggaaaccttgacttaaattctgagtgccattttcaatgctatttacacagaaatgtagatgaccaaaataaatgtcctcttg

SEQ ID NO: 11388 - DNA, 201 bp, Homo sapiens
gacaccactcccagccctgaccttttgatgtcggttattgaaggtttggcctcccctcccctcccttcccctcccctctcttctcctcccctcccttcccytcccctctcttcccctcccctcccctcccctctcctccttttctttcttagttttgagacaggatttggctctgtcgcccatggtggagtgcagtggtgc

SEQ ID NO: 11389 - DNA, 201 bp, Homo sapiens
gtaagtaattaaaaaaacttttcagggaatcagtactattgataactaatattgatcaaggcttataaaggcatagttttgaaatgatcttatgagatcasttagcagtcagtatattctcaatgcagtcacaactgacacaggcaaatgaatttcacttgtaatttataaatagttgcaaagaaggttattgcagaaatt

SEQ ID NO: 11390 - DNA, 201 bp, Homo sapiens
agacaaagcaaaataagttttgagtgagaagacattggttagaaaaaaatgtataaatccatattctcgtgctttagtacagacacagtgctaacagcaamcaaaatcgaaagagaatgtggccacagcacagagattcatatcaagtattagataaggttggatggaataactgtgacagcagggataggtattctatta

SEQ ID NO: 11391 - DNA, 201 bp, Homo sapiens
ggcctttctgaatcctaggcatccctagaagcttctggagtcctgggtcttcacatcagtgctctgtatttgtgagactaaactattttttttttttttttgagacagagtctaactctgttgcccaggctggagtgcagtggtgcaatttcagctcactgcaatctctgcctcccaggttcaagcgattctcatgcctca

SEQ ID NO: 11392 - DNA, 201 bp, Homo sapiens
taaaatgtttaaaaactttttcttctgaaactgttaccttgagaataatttattaaacttttcttcatagaaactcagactgtcgaactcagtttttggtmtgtgaccagtatttctttatatcatgctaattaatggtagtactacattttgtaataaaatatctgaggctgtattctttgagttattgtgtttcagtta

SEQ ID NO: 11393 - DNA, 201 bp, Homo sapiens
caaagcatgtgctcacttagtgtctctgtgccacattttggtagttcccataatatttcaaactttttctttgttgttatatatgctatggtgatctatgrtgtgatctttgatgttactattgtaattgttttgggacaccacagaccacacccatataaaaagctgaacttaattgataactgttacgtgtgtgttctg

SEQ ID NO: 11394 - DNA, 201 bp, Homo sapiens
gtgagaaaatgaaggagcacataggcctgatgccttttgttaggatgagttggaattgtatgttattgtagacaccttaagagcaagtcctaggttttacrctctgtctcctgccggccaattccgcagcttcacactatggcctgcacattagattcacaaaaagtgcttttaaatgcacttcaatttcaggttacttca

SEQ ID NO: 11395 - DNA, 201 bp, Homo sapiens
gtgtgtgtgtgtgtgtgtgtgtataatcgtttgtgttgcatagggtaaaggtagagacactaggaaattacaatttttttttttttttgagatggagtctyactgtatcgcccaggctggaatgcagtggtgcagtctccgctcactgcaagctccacctcctgggttcactccattctgcctcagcctcgcgagtagctg

SEQ ID NO: 11396 - DNA, 201 bp, Homo sapiens
tcctgagtagctgggactggaggcacattccaccatgtctggctaattttgttttattttatttatttatttatttatttatttatttatttatttatttaagaaacagcattttgccacgttgcccaggctggtctcaaactcctgtgctcaggagatcctccctcctttgcctcccaaagtgctgggattacaggcgtc

SEQ ID NO: 11397 - DNA, 201 bp, Homo sapiens
ctcctgagtagctgggactggaggcacattccaccatgtctggctaattttgttttattttatttatttatttatttatttatttatttatttatttatttaagaaacagcattttgccacgttgcccaggctggtctcaaactcctgtgctcaggagatcctccctcctttgcctcccaaagtgctgggattacaggcgt

SEQ ID NO: 11398 - DNA, 201 bp, Homo sapiens
cctcctgagtagctgggactggaggcacattccaccatgtctggctaattttgttttattttatttatttatttatttatttatttatttatttatttatttaagaaacagcattttgccacgttgcccaggctggtctcaaactcctgtgctcaggagatcctccctcctttgcctcccaaagtgctgggattacaggcg

SEQ ID NO: 11399 - DNA, 201 bp, Homo sapiens
gttaatctgacattagtacctttgtcccctggaattttaggctaggagttttaggtgaggtttggttagggtgtctagaggtaggtccctaacttggaaamcaagttacccctggcttccttttctagtagaacccgctgctctcttcctgttgtcaaaactctgggacacttgagagtggagcttttcttcactctatct

SEQ ID NO: 11400 - DNA, 201 bp, Homo sapiens
acctcctgagtagctgggactggaggcacattccaccatgtctggctaattttgttttattttatttatttatttatttatttatttatttatttatttatttaagaaacagcattttgccacgttgcccaggctggtctcaaactcctgtgctcaggagatcctccctcctttgcctcccaaagtgctgggattacaggc

SEQ ID NO: 11401 - DNA, 201 bp, Homo sapiens
aggtttgtggggaaggttattcttgccttgtgtattttgtcccaacttaagctataatttttgaatttgtaaaaccttatactgtttagaaaaaaaaaaaacacagtaaaaaaaaaaaggatgggtgaatgcataaatttagtttttgaaaatttaagcgactgtttctccaaaatgtcacttttcatccccagtttgcct

SEQ ID NO: 11402 - DNA, 201 bp, Homo sapiens
tatagtagagacggggtttcactatcttggccaggctggtcttgaactcctgaccatgtgatccacccgcctcggcttcccaaactgctgggattacaggygtgagccaccgagcccggcctgtcttctttttttgtcctttgcctttggttttattgtctttgaaacctcaggggtcagcaatgtaggcttctttctctc

SEQ ID NO: 11403 - DNA, 201 bp, Homo sapiens
ttcccgtatgttaatgaggaagggctgcatatctggtcagggttgttctagccttccctcctcacctccttcgccctgcttttaaatctgagacacattgragacacgatcagttgtcaacactaggatagaatgtaaccttgctttcctatgagctattagtcattagtcatgtatttgctaggttcagctgatctgatg

SEQ ID NO: 11404 - DNA, 201 bp, Homo sapiens
tatttaatgtagcctgggattatatcacagatgtgccacatctaacatggtggctaggcccttggaggatacagtttgtctcgttagttgtttcttatatrccatcgccttgtgttcttttgcagtttgttttccttgttttgtttgtggttagaaatatgccatttatttatttattcattcattcattcacacatgcat

SEQ ID NO: 11405 - DNA, 201 bp, Homo sapiens
tgttggaggggctctggactgttgtggcacctcctgttgtaggctatttaatgtagcctgggattatatcacagatgtgccacatctaacatggtggctargcccttggaggatacagtttgtctcgttagttgtttcttatatgccatcgccttgtgttcttttgcagtttgttttccttgttttgtttgtggttagaaa

SEQ ID NO: 11406 - DNA, 201 bp, Homo sapiens
tgcctcagagacccttctaagtgtcacaggaatctaactgaaggaaatcctttcttggtgcttctggacccaactgatgtttcctctgcctaagacactttctccttccccatgttgctcagttaatgtcctgtagagctcaagttaaatatcagtcccacccatgcagtgtcatagatacctacctaactttttaaaaat

SEQ ID NO: 11407 - DNA, 201 bp, Homo sapiens
gacagatcacctgaggtcaggagttcgagaccagcctggccaacatggtgaaatcccgtctctaccaaaaataacacaaattagctgggcatggtggcgcrtgcctgtaatcccagctactcgggaggctgaggcaggagaatcacttgaacccaggaggcggaggttgcagtgagccaagatcacggcactgcactccaa

SEQ ID NO: 11408 - DNA, 201 bp, Homo sapiens
tcatctggaagggggagatgaaagctagttaggattatggctgtaggtaatccataattatagtcctaggctttcagttatgggctgagttttttttttttctcttgcatcattttgaagctatgcaggcatatttccagattgcaacaaaattttattgtgaattaaaataaaatcaccttttctctgttcctttggaaa

SEQ ID NO: 11409 - DNA, 201 bp, Homo sapiens
ttagagaaatttggtttgtatgagtgtcattgtgcttattgcttaggaagtttcccaaaggttacttttgcattagagaatttcgaaatacagattttaasttgtttctagtcctctttttttttatttaagacacaaaactacacagctttgatttttaggggaaaaggatgataactttggaatatatctcacaaggtg

SEQ ID NO: 11410 - DNA, 201 bp, Homo sapiens
cgtggggagagggagaccgtggggagagggagaccgtggggagagggagaccgtggggagagggagaccgtggggagagggagaggagggagagggagagkaggagcctttccgagaagttgtattttcaatacaagattaaaaagtatttctcaaaacatgcaggggttttggacctgctggcatagctgcattgaaggc

SEQ ID NO: 11411 - DNA, 201 bp, Homo sapiens
ccttactatttttatgagctgctttatttttgctcataatatatcataaaaatatgttgtcagtacatatataaataacttaattgtagttcactattagwcatttacggttccaaataaatggttcagaatgtttcacttttatgaacactctgcattggatatccttattattaaatttacacatatccagtgttattt

SEQ ID NO: 11412 - DNA, 201 bp, Homo sapiens
tgaaaggtgactccctcccaatggtacaggagagagggcaatgtaggcgtgtgtaaaggcaaggagatgggcgtagaacaggatatgtaatattaaggaaraaaactgtagaatttgaggttggagagttaggccatcaccaaatgatgaagtcttgaatgctgtacaaagaatttgaatttttctgtaaacagacagtag

SEQ ID NO: 11413 - DNA, 201 bp, Homo sapiens
aagagtattgagtaggtggacgggaaagatattcagaaggaaaactgtgctctgtagttggtgggtgacaaagcagtgtcttgagtcagaaagactggtgsaagataaaactggaaaggtcagtgggtcattagctgctgggctgtgaagtttggtcttcattgagcaatgagtcatgggaagatgtttgaccagatgagc

SEQ ID NO: 11414 - DNA, 201 bp, Homo sapiens
atccctggtgtcattgccctagtctggccaccattatctttttcctgcattaccctgacagtctcttgcttggggtccctgcctttagtcttgcattcccyggtctattctcactgcagccctagtttctttccaaagcatgaaactaatcatgccattcctctgttagaaacttgagccctccaccccaccccggccttc

SEQ ID NO: 11415 - DNA, 201 bp, Homo sapiens
gaaaaggctttgcttaaacaagtgcccggttcaggaaaagatatgtttcctgaagaagatactttttttttttttttttttttttttgagatagaatctcrttctcttgcccatgctggagtgcagtggtgcgatctcggctcattgcaacctccaccttctgggttcaagcgattttcctacttcagcttcccaagtagc

SEQ ID NO: 11416 - DNA, 201 bp, Homo sapiens
ctacctttttctctccatccaagtaaaattcttttagttgaacaaacacctccctattcccagccctgcagcatcatctgtgatgtgcctcaataggtgtracttgaaccagccgaaccagacccaattgcaaaggccaactgaaatcaccatctgtgctttactggcagtgatgtaatgtgattgcatgctttcagaaat

SEQ ID NO: 11417 - DNA, 201 bp, Homo sapiens
actttttagttgagcctttaagaagagtattgagtaggtggacgggaaagatattcagaaggaaaactgtgctctgtagttggtgggtgacaaagcagtgkcttgagtcagaaagactggtgcaagataaaactggaaaggtcagtgggtcattagctgctgggctgtgaagtttggtcttcattgagcaatgagtcatgg

SEQ ID NO: 11418 - DNA, 201 bp, Homo sapiens
tgaacacctgatgccactgagtaaataactgtttcagagcttctgtgcctggaattgtatctgcgcagcaattaatgcagcattaaattgggtccccaagygcttaactctcacctttgggaaaacatacttgcctacatctagctgattatgtatcatagttcctgggtgaggattataacaaaaactataattaagact

SEQ ID NO: 11419 - DNA, 201 bp, Homo sapiens
tgggaggctgaagcaggtggatcacctgaggtctggagttcaagaccagcctggtcaatgtggtgaaaccccatctctactgaaaattcaaaaatcagccrggcgtggtggagtgtgcctgtagtcctagctactcgggaggctgaggcaggcgaattgcttgaacctgtgaggctgaggttgcagtgagctgagatcgta

SEQ ID NO: 11420 - DNA, 201 bp, Homo sapiens
gtgttttaatcaatttaaattttaggtgtttctgatacaattgatttcaataaaacatttggaccattgagtatggaatcagaggcaaggtctgggctggstatatagatctgggagttgtcagcccatgaggggagtttaaagccatgagactggaagagcttcgctaagagaccaagtgtaggtcaaggagaaaagtgg

SEQ ID NO: 11421 - DNA, 201 bp, Homo sapiens
tggcactatttacctagttatgattatctcatcagataagttctaggcaagtgagtgggtgtttgtctgtttaggttcctgcaattgatttgtgttggggkggccctcccaaatatagacaagtggatatggattcatatattagacctcctagttattggctatttattcttagataaatcatgtaacctgtttgaccct

SEQ ID NO: 11422 - DNA, 201 bp, Homo sapiens
gcagggtcacaggacaatagtggagggaaggtcagcagataagtgaacaaaggtctctggttttcctaggcagaggaccctgcggccttccgcagtgtttrtgtccctgggtacttgagattagggagtggtgatgactcttaacgagcatgctgccttcaagcatctgtttaacaaagcacatcttgcaccacccttaat

SEQ ID NO: 11423 - DNA, 201 bp, Homo sapiens
ttagtagagacggggtttcatcatgttggccaggctggtctcaaactcctgaccccaggtgatccacccaccttgacctcccaaagtggtgggattacaarcgttagacaccactcccagccctgaccttttgatgtcggttattgaaggtttggcctcccctcccctcccttcccctcccctctcttctcctcccctccc

SEQ ID NO: 11424 - DNA, 201 bp, Homo sapiens
cttttctttttttcttctttaacacagaagcatccagggccataacttcactgccaccttttacctgttccacattgactcttgccaactgaactactttytgtctaccctctttggctttcatttggttttctgtgcccttgttccaacaaacatttatttatttattactggctatgtgccagacactgtactaagtgc

SEQ ID NO: 11425 - DNA, 201 bp, Homo sapiens
ggtcctctcttttggattttcctgggtttagggcttttactcagggtcctaacactggagtggaaggctggcagtgctttcccctcctgccctccaggtcrcgttccccacgtagatctgactgtggaattgtgaacctgacatctttttccaaagtcaacagtggattaaaattaaaatgttaagtcttaaagtattttc

SEQ ID NO: 11426 - DNA, 201 bp, Homo sapiens
agagtagggcacttttgtctgcattaaaaatctgttcaggcagttatcctttcttctcaatgattttcttaatggcatctgggaactggtttgctgtttcytggtcagcagaagctgcttctcctattatcttgacatttttaagtaaaacctctttctcaaattatcaaaccatcctttgctggtattaaattcgccttt

SEQ ID NO: 11427 - DNA, 201 bp, Homo sapiens
tggcatctgggaactggtttgctgtttcttggtcagcagaagctgcttctcctattatcttgacatttttaagtaaaacctctttctcaaattatcaaacyatcctttgctggtattaaattcgcctttaatctatcacataatggagacttgacttttcctcaaatcgcattagagtctataggtaagcctttcctttct

SEQ ID NO: 11428 - DNA, 201 bp, Homo sapiens
gtaaaaccacatactaaaattgaaaccagaactttcaggatacattgtatttaaacttgtattcttgttgctcatttgaatgtataattaccaagtcaccyctcatggtttcagtcttgtcaagtattcttatttctggctcttctgatttttcttaagagataagcaaacaaaatacaaaaattgttagattggacctta

SEQ ID NO: 11429 - DNA, 201 bp, Homo sapiens
caaaatctcaggatttgaggagggagtaggttcgagggtagaaatagtccttggaaagagaaggagaaccctgcttcagggtaagagacggagaaaagcarggatgacctgagcaaatttaaaagggagggaggattcctcctgaatggcctccattttctcaattaagggatttattgatattttgtatccttctacgtt

SEQ ID NO: 11430 - DNA, 201 bp, Homo sapiens
tgttgtctcctgaatgtttccagccaatgaatataggcctagaattgtatagggacccagcagggatagttcaggaagtcacgtgacttagagtgatttgytttctagctctactgctttctgaatatattcctttgggcacagtccagtctttgtatctcagttttctcatctttcaaatgagcataggtacttacttca

SEQ ID NO: 11431 - DNA, 201 bp, Homo sapiens
ttttcttctcattgttggcttgggttcctttctctctgtttgcaaccagaccctttattacttgtgcatggttggacatgctgtaagcaatagagacctcytgcagcaaaccagatacctagtggtaggctgcacatgggatgtagcttttcttattaacaaaccacgttagtttattcacctttgaacttattgtagcca

SEQ ID NO: 11432 - DNA, 201 bp, Homo sapiens
ttttatttggatcgtttaaaaatctttcatactttcataaagagctctaatacttgcctgaatgcaaacagaattctgttctaggggtttcctaagttttrtttgaccccttcaaagtagaggcttatatttttctcatgctatatagactatgaagtaggagagaggcaaaacagaagcatagtatacagttggaagggt

SEQ ID NO: 11433 - DNA, 201 bp, Homo sapiens
gtttttcaagctctattctggagatacgtttgttacttggttctcagctttgacttggttataatcttgtcttggcttgttctctttccagaatacactasttttcatttttctttggccttttctcaagatttatgaaagggggtatttagctttttgtctggcaaatagcaaaggctgtttgagttccctaatcaataa

SEQ ID NO: 11434 - DNA, 201 bp, Homo sapiens
ttcttcacaacttctcagaatggatcttttaaattccttgtttcttggtgccattttgtcaaggttgatttagattaaaacaaaaatctcataaaaatccrtaaattacagggcattttgacttcctgatggggttgttggattaaaaccaaatgataccaaaaaaagtaccccacaaagtcaactgaaaccactaatgtg

SEQ ID NO: 11435 - DNA, 201 bp, Homo sapiens
ccttaaatgaaggaagcaattttttataacttgcaaagcttctccctcattctttagggaatttcctatgttaatttatgcagtgttaaatttatgcagcrttgaaattcagcccaacagcagtacttacggaaccaatacagagacagtagaacctataaggtgaaagctgaataacacagaccccaccagactacggat

SEQ ID NO: 11436 - DNA, 201 bp, Homo sapiens
aaaaaaaaaaggatgggtgaatgcataaatttagtttttgaaaatttaagcgactgtttctccaaaatgtcacttttcatccccagtttgccttttgtctsaaatgcaccagtgaagcaatcaagaagaagaattgattaattttgtgctgtatgcctttcagttctgtattttgtttgtgcttcaaactgtgacagttga

SEQ ID NO: 11437 - DNA, 201 bp, Homo sapiens
ccaagtgccaggtattatttaatgtggggattacaatggtatataagacaaagttctacccccatgccacttattttaatggtatctgtatatttgtgtgkgtgtgtgtgtgtgtgtgggtgtgtgtgtgtgtgtattttctgtaagaatgcaggctctgaagttgggctgagtttaattctggctatacctctcactggt

SEQ ID NO: 11438 - DNA, 201 bp, Homo sapiens
tgtaataatatttattataggagatttggctggcttttaggaattcattttgctggtgtaccttaagtccctcgcctgattgacaatatactgaggaaagrgctaagttgctagggcttgaggtctaagggcagcactgactggtatttgtttcattaagcttaggcaagctatccaattacttaatgcaaacaagaaaag

SEQ ID NO: 11439 - DNA, 201 bp, Homo sapiens
aatctattagttactttagctattttctgtggctaaatacttgtttttcatttttcagtatgatgaactccacaatgaacaaatttttagctaaatttttrtatacattcatgattatttcacatatttccagacatgaagcctttgagtcagagtacattcgaaaggcatttgaaacatgttgccgtaaattgtaccaat

SEQ ID NO: 11440 - DNA, 201 bp, Homo sapiens
tctctcccgcttgcaggctagcctggggtgattgacatggccctgtgcagggttgcaagagagaggcccaggtttgaaactggtacaccatcactgttgtygtattctggtgcccagagcaagacacaaacacagcccagactgaagggatggggaagtaaactccatactctcatcatgagagaagctgtgaagtcatgt

SEQ ID NO: 11441 - DNA, 201 bp, Homo sapiens
tgattggatcatgggtgtggtttctaatggtttagcaccatcctcctaaggctgttcttgtgatagatttctcatgagatctggttgtttaaaagtgtgtgacagtccctctccctctttctcttttcctccttctctggccataaaagatgtgcctacttcatcttgcccttctgccataattgaaagtttcctgaggcc

SEQ ID NO: 11442 - DNA, 201 bp, Homo sapiens
attggatcatgggtgtggtttctaatggtttagcaccatcctcctaaggctgttcttgtgatagatttctcatgagatctggttgtttaaaagtgtgtgacagtccctctccctctttctcttttcctccttctctggccataaaagatgtgcctacttcatcttgcccttctgccataattgaaagtttcctgaggcctc

SEQ ID NO: 11443 - DNA, 201 bp, Homo sapiens
cttcttttggtgatttacccagctgtttataaaaggagtttctgcaggcccagatacgtgaatgatgagcaaaagcaaggaatttctttctccacattaarattaagtgttagcagttccttaaatgaaggaagcaattttttataacttgcaaagcttctccctcattctttagggaatttcctatgttaatttatgcag

SEQ ID NO: 11444 - DNA, 201 bp, Homo sapiens
atttgaggcaagcggttaggatggttagtaaggttttaataagcggaaatgacacgcaatctcaggtctccaggggcgctgttcttatttgtgagctgccrgttgttcttcagtggctggaatgagaaaaagacttgggaaaagagcagtgttcatgcctgaaccactctcttcttttggtgatttacccagctgtttata

SEQ ID NO: 11445 - DNA, 201 bp, Homo sapiens
aatatgtaacaattatattataattaattataataaatatataacaattataattaattacataacataattataattaattataataaatacataacaawtataattatgattactatataacataactattataattatataacataattataattaattataatcaaatatataatacaactaattataaatatataa

SEQ ID NO: 11446 - DNA, 201 bp, Homo sapiens
atgagattactgcttaacagaaatatttgaggcaagcggttaggatggttagtaaggttttaataagcggaaatgacacgcaatctcaggtctccaggggygctgttcttatttgtgagctgccggttgttcttcagtggctggaatgagaaaaagacttgggaaaagagcagtgttcatgcctgaaccactctcttcttt

SEQ ID NO: 11447 - DNA, 201 bp, Homo sapiens
agtagctggcatgctgctatgatagtcaacccctccaagaaagctgtgattcaaaaatcagttgatgagattactgcttaacagaaatatttgaggcaagyggttaggatggttagtaaggttttaataagcggaaatgacacgcaatctcaggtctccaggggcgctgttcttatttgtgagctgccggttgttcttcag

SEQ ID NO: 11448 - DNA, 201 bp, Homo sapiens
actccctataggtcaaagctacctggcagaggtctcatcagaccaaccctaggaatgaatctttagccttaagaacaaattggaagatgatgtgggaatcrgatggaagccttgaaaagagacccccttcccctcttctcttgctcccattgaaacagtaggtgaccccagtcccctggctagctcacagctgtgaccaga

SEQ ID NO: 11449 - DNA, 201 bp, Homo sapiens
cctatgaacaggcatgcttatgcacaccacctaccttacaggagaaatggaaaggagcgggaatgagaagccaatagtatttgctcatgggtagaccaaamtgtgcccaagttctgttttttaaaaaaggggaagggtgtcgaaagggtttgctgtcagatctgcattacgtctgggaccattccctgggacataccacct

SEQ ID NO: 11450 - DNA, 201 bp, Homo sapiens
gtatcttgaaagtctgcctttcattatttttgcctaataggggctttttccatcagcaggaatgaaagcagtcaataaaagtcaattgctgactctatgawtatatggagggtttaccataatgcatattggaaatgttttgaaacctttatcctgaatggaaggtgccatggcttgtgttttatggccttctaatgttag

SEQ ID NO: 11451 - DNA, 201 bp, Homo sapiens
agccaatttcatatctcaggtggaatggggtgggcagcctagctgtaacctggacaaatgactattgataaagaatttattttctgtcacctttaaggagrgcagagggtggtacagcctttgtattattttttcttttttaaaaaaagttttgtttgaagcctccttcatgaaaacttcagctgtcaaatcttggcaaaa

SEQ ID NO: 11452 - DNA, 201 bp, Homo sapiens
ttcttgaccctgaaacctaattgagatattcaaataaaaagtttggtctgtgttaagattacttggtctcattcacacattgatatatcctttggagattyggatttaacagtttcattccaatacctgtggatcttttgaaaggacaaagagaataatcttcaaatttgcaattattataaccaagggctacttctatgg

SEQ ID NO: 11453 - DNA, 201 bp, Homo sapiens
ctgggtgctagtgcattatcacagtctcattactttgcaagctgcatgcccagatgctgctgttttctgcatcaggcttcgctgatttacattcgtaacamctccattacagctcatttgatactgctcataatcaaccagttcttgtcttttcctgatagtgtttctccaatacaaaagacgctagtgtaatgaagaaaa

SEQ ID NO: 11454 - DNA, 201 bp, Homo sapiens
actctcctcctcttcaacctaggaccttgtaggtaggcttggataaggtttgaaaattacttttgataaagggatttcaaaggcagtatttgtgaatgaawcatttgtacagtagcactggtacttttcaatataataatcatatgcagtaatttgttcatactatttattgagtcctggcagaatgcttgaaaacttgta

SEQ ID NO: 11455 - DNA, 201 bp, Homo sapiens; identical to SEQ ID NO: 3134

SEQ ID NO: 11456 - DNA, 201 bp, Homo sapiens; identical to SEQ ID NO: 379

SEQ ID NO: 11457 - DNA, 201 bp, Homo sapiens; identical to SEQ ID NO: 380

SEQ ID NO: 11458 - DNA, 201 bp, Homo sapiens
ccctagaatagagtagagggattgaatctggaaacacaggttgaattctatttgaagtatttatctttttttttttttttttggtgagataggtctcgcastgtcacccaggctggagtacagtggcgtgatctctgttcaccgcaacctctgcctcccaggctcaagcaatcctcccacttcagcctcctgaatacctga

SEQ ID NO: 11459 - DNA, 201 bp, Homo sapiens
atggcctcccctttcttctctatttggcctgaaattcttaatttccctctctctcaagatagaattaagggcaagtgtgctggaagtgtttaatttggcargaccaccattgatagacacatatgttgcccgggcaaaaaagatgctggttaatatttggatgagaagggtacatgttttcttcctctcccagttgtggtg

SEQ ID NO: 11460 - DNA, 201 bp, Homo sapiens
gttagtgtcttgaagcttatgagctttgctgataagcagcatcacagtaaaagcaatatttgtttttagatttagttttttttttttttcatttaactaaragccttcaactgtactatcttcttgggtgtttgatatgggcaggacatctatcattgattcctattagagatgataaagcaaacattcaaagagactgtg

SEQ ID NO: 11461 - DNA, 201 bp, Homo sapiens
gaaatacagattttaacttgtttctagtcctctttttttttatttaagacacaaaactacacagctttgatttttaggggaaaaggatgataactttggamtatatctcacaaggtgacttttttttttctgttgtagttgatttctgagaattccagagtatcaggatgatgtagcaatttaaaaatagtaacacaaaat

SEQ ID NO: 11462 - DNA, 201 bp, Homo sapiens
tgaacacatcaatgataagaaagtgaaacagctttattactgctgtggagaaagattcgtggtttggtggaatatcagaccagccacaacattcccttaarccacagcctaatctagagtaagaccctaattttcttaagttctacgaaggctgaaagaggcaaggaagcttcagaggaagcattggaagctatcacaggt

SEQ ID NO: 11463 - DNA, 201 bp, Homo sapiens
gtgcccggagctgtgctgggtgctggcacccgagatgcggactccacggtgcctaaccacaacacttcaatacccagggcgatgagagccagaaacaaaakaagtaagataacttcttggtaagcaggaggaaggggaaaagattagaggagggtaaagaaagcaacctaagtaaaagttagaaggtacaaatgggcatgg

SEQ ID NO: 11464 - DNA, 201 bp, Homo sapiens
tgtgtataaacatgtatatgcacacacatttacacacatacatatatgtagtttcacttattctttcaacaaatgcatatggagtgctaaacacgtgcccrgagctgtgctgggtgctggcacccgagatgcggactccacggtgcctaaccacaacacttcaatacccagggcgatgagagccagaaacaaaataagtaa

SEQ ID NO: 11465 - DNA, 201 bp, Homo sapiens
tccaaatcttctccatgtcaacaaaagacaaccctccttccagctgttcaggaaaaaaaccttgaagtcattctcgatccctctttttctcacaccccaartccagttcatccagcaaatccagctggcaccaccttgaatgtctccaaatctgaccacttcaccccacctccataaatgaggctgcacgtcaagccacca

SEQ ID NO: 11466 - DNA, 201 bp, Homo sapiens
atcttctccatgtcaacaaaagacaaccctccttccagctgttcaggaaaaaaaccttgaagtcattctcgatccctctttttctcacaccccaaatccarttcatccagcaaatccagctggcaccaccttgaatgtctccaaatctgaccacttcaccccacctccataaatgaggctgcacgtcaagccaccatcatc

SEQ ID NO: 11467 - DNA, 201 bp, Homo sapiens
ttccagctgttcaggaaaaaaaccttgaagtcattctcgatccctctttttctcacaccccaaatccagttcatccagcaaatccagctggcaccaccttkaatgtctccaaatctgaccacttcaccccacctccataaatgaggctgcacgtcaagccaccatcatctgtctctttgttatttgcattaccttccaacc

SEQ ID NO: 11468 - DNA, 201 bp, Homo sapiens
caggaaaaaaaccttgaagtcattctcgatccctctttttctcacaccccaaatccagttcatccagcaaatccagctggcaccaccttgaatgtctccaratctgaccacttcaccccacctccataaatgaggctgcacgtcaagccaccatcatctgtctctttgttatttgcattaccttccaacccatctccttgc

SEQ ID NO: 11469 - DNA, 201 bp, Homo sapiens
atggcctcctataactactctatgtaaaagaaaggtcctgcctaccttactctctattccactctcttgcttttctccatagatctcatgtgatacactgyacattttatttgtttgatttttgtagttgtctttcttccttcactagaatataaaatccttgggtgtaaggactttatctgttttactcacttttgtgtc

SEQ ID NO: 11470 - DNA, 201 bp, Homo sapiens; identical to SEQ ID NO: 4340

SEQ ID NO: 11471 - DNA, 201 bp, Homo sapiens
ataactactctatgtaaaagaaaggtcctgcctaccttactctctattccactctcttgcttttctccatagatctcatgtgatacactgtacattttatytgtttgatttttgtagttgtctttcttccttcactagaatataaaatccttgggtgtaaggactttatctgttttactcacttttgtgtcctcagagcct

SEQ ID NO: 11472 - DNA, 201 bp, Homo sapiens; identical to SEQ ID NO: 4343

SEQ ID NO: 11473 - DNA, 201 bp, Homo sapiens
aagaaattcataagagaatggcacctttcgccgggcacggtggctcatgcctgtaatcccagcattttgggaggccgaggcgggcggatcacgaggacagkagatggagaccatcctgactagcttggtgaaacccagtctctactgaaaatacaaaaaattagccgggcgtggtggcgggtgcctgtagtcccagctact

SEQ ID NO: 11474 - DNA, 201 bp, Homo sapiens
cctccaaggctggatcataaaagatataatggggccgggcgcggtggctcacacctgtaatcccaaaactatgggaggctgaggtgggtggatcacctgargtcaggagtttgtgaccagcctggccaacatggtgaaaccccatctctactaaaaatacaaaaaaatatctgggcgtggtggtgggcacctgtaatccca

SEQ ID NO: 11475 - DNA, 201 bp, Homo sapiens
aatgcatctgctacatgtactcaagaatgttgagtctgacccctcaaatttattcattaagttttgctacatcagactacacaaaggtcgggaaatcatgkgtccaaaataaaatcagatttgagctccaccttattctggcctatacaatgtccctgttcttaccaccttttctcgtctttcacaaccttgaatcagaat

SEQ ID NO: 11476 - DNA, 201 bp, Homo sapiens
cgccgggcacggtggctcatgcctgtaatcccagcattttgggaggccgaggcgggcggatcacgaggacagtagatggagaccatcctgactagcttggwgaaacccagtctctactgaaaatacaaaaaattagccgggcgtggtggcgggtgcctgtagtcccagctactcggaaggctgagacaggagaatggcttg

SEQ ID NO: 11477 - DNA, 201 bp, Homo sapiens
ttcttatttgtcttcatcgctataatatgaggtcactggctcctgagctagtgaggaaatccaagttctaaaaaacattccttccttatatttgttttttktgtgtgtgtgtgtgtgtgtgatctttttgataagaatagttgtcaaggctgggcgtggtggctcacgcctataatcccagcacttttgggaggcagaggt

SEQ ID NO: 11478 - DNA, 201 bp, Homo sapiens
ctgactagcttggtgaaacccagtctctactgaaaatacaaaaaattagccgggcgtggtggcgggtgcctgtagtcccagctactcggaaggctgagacrggagaatggcttgaatccgggaggcggagcttacagtgagccaagatggcgccactgcactccagcctgggtgacagagcgaagattccgtcaccaaaaa

SEQ ID NO: 11479 - DNA, 201 bp, Homo sapiens
tgcctgtagtcccagctactcggaaggctgagacaggagaatggcttgaatccgggaggcggagcttacagtgagccaagatggcgccactgcactccagsctgggtgacagagcgaagattccgtcaccaaaaaaaaaaaaaaaaaaaagagagagagagagagagagagaatggcacctttattttcacttaagtgaaa

SEQ ID NO: 11480 - DNA, 201 bp, Homo sapiens
gagagggaaatttttatctaagtagttcaaagcttcaaaatggatgaaaggttcaggaaaagggaaagtttattttctttaaaaccagttcaacatatttkgtgcctatggccacattcatgtttaacctgttacagcagtaataaattgaattctatcccccttcaggtgagaataaccagtaaggaaactttctgtgac

SEQ ID NO: 11481 - DNA, 201 bp, Homo sapiens
agggaaagtttattttctttaaaaccagttcaacatatttggtgcctatggccacattcatgtttaacctgttacagcagtaataaattgaattctatccsccttcaggtgagaataaccagtaaggaaactttctgtgacatattttatattcttggatcttttccctgttttaacacacaagagtggcaataccaaaac

SEQ ID NO: 11482 - DNA, 201 bp, Homo sapiens
agtccattttagccatagaccttgtttttcaaatgaccttatgattcagttattatacctgcgctcattctgtgacaggtcattccagaagagacacaatygtacaaagctgaacataaaataaatcttggtttcttattgaattttaaattacattgggaatgcttttggaataattccagaccttaggagaaaaaacgt

SEQ ID NO: 11483 - DNA, 201 bp, Homo sapiens
tccataaatatagttccttctatgttaagtggctttatttctaagaacccagccctcggtcctgggggtgcttcccagcccgctgctggaattcctgatcrtggcagtctgctgaaacatgagctcagttaccaaatatagctgagtggagtaagaggacagatgagagtctgaggccacagttgcctcaaagtgaccacg

SEQ ID NO: 11484 - DNA, 201 bp, Homo sapiens
attcatcacctctctggagtcttcaaactgaccaagcattgaaaaggtctgtaaggtgtatcttaatatactaactagtagggcaacattttaaggacttaaaaaaaaaaaactaaaaatacaaaagtttttctgaagatatgatactatttacaagataccttaattattcttttgcttggagaggaaacgtaatgagaa

SEQ ID NO: 11485 - DNA, 201 bp, Homo sapiens
tcctctgctatgctgagttttcttcctccaccttcaagaagtggcaaggaaaaaaagatagaaaaatcactgaccaattagaagtttttgtttcaattcaraccaccctaaagttcctggaaattgcatatatgaactctagtaagctgaataccaaaaatgagagggaagtagctgataccaggctacagattgtgggct

SEQ ID NO: 11486 - DNA, 201 bp, Homo sapiens
tagaactcttggactcagacaatcctcccacctcagcctctggagtagctggggctacaggcacacaccatcacactcagctaagtttttgggtttttttytgtatttttgtagagatgaaatctaactatgttgcccaggctggtattgaactcctgggctcaagcgatcttcctgcctcagcctccaaaagtgctggga

SEQ ID NO: 11487 - DNA, 201 bp, Homo sapiens
gggtttttttctgtatttttgtagagatgaaatctaactatgttgcccaggctggtattgaactcctgggctcaagcgatcttcctgcctcagcctccaamagtgctgggagtacagatgtgagccaccatgcccagccccctataaatatttcttaactgacaacatagaggattctcccaaatatcatagagctggctt

SEQ ID NO: 11488 - DNA, 201 bp, Homo sapiens
tcttggctccatcacgcatcagttaggtcactgtggcaagttatttcaactttctgtgcctcagtttctttgttggtaaaatggaaataatagaagtaccyacctctagggtaattatgaatgttaagtcaattaacacagagaaagagtttaaaactgttagcacattgtagtgtcttaataaatattaatgtattattt

SEQ ID NO: 11489 - DNA, 201 bp, Homo sapiens
agatgacagcttttagccttggttgttgaaaatggtgagtatttctaatgaaattgaaaacaagtctagggaaatgaatttccaagtaatggaggagaatmtttgagaacgagaagaaagaggagaggagaggaggggaggggaggggagggtaaggaaggaggaagggaggaaggaggggggagggaggaaggagggagg

SEQ ID NO: 11490 - DNA, 201 bp, Homo sapiens
tatacgaatattaaggatgttccctggggtgttttccccagtgaattgaacttgtgaataagtcctaagtgccagcaatgaaagcgaagcaggtatctgtyaaggctgattaggaacggagcatagagaatagaaccacagaaaccaaagaagactaaaactggttctaagggttgaggcctgagaaaaatccataccagg

SEQ ID NO: 11491 - DNA, 201 bp, Homo sapiens
ttaagaaagttttcaaggatgaaccggagtttgaaaaacagaaagagggctggatgcagtggctcatgcctgtaatcccagcactttgggaggccaaggcrggtggatgacaaggtcaagagatcgagaccatcctgctaacaaggggaaaccccgtctctactaaaaatacaaaaattagccgggcatggtggtgggcgc

SEQ ID NO: 11492 - DNA, 201 bp, Homo sapiens
gatgacagcttttagccttggttgttgaaaatggtgagtatttctaatgaaattgaaaacaagtctagggaaatgaatttccaagtaatggaggagaatcyttgagaacgagaagaaagaggagaggagaggaggggaggggaggggagggtaaggaaggaggaagggaggaaggaggggggagggaggaaggagggaggc

SEQ ID NO: 11493 - DNA, 201 bp, Homo sapiens
ggtatttatacctttaaaaatattttatcaactgtatgttttaaaccatttaaatgtaaggagactgggatcaaaaactgtgaaatgatgtgcctagtaayacaaaaatcattcattagtcatggagactggagtataactcagctcttatgattcttgatcccatgctgcagttgttaatgagaagacttagccactgtc

SEQ ID NO: 11494 - DNA, 201 bp, Homo sapiens
gggaggcctgagtgcatgtgtgttggtgatgacagagggtgaggctggagcatttccatcagctcaggctgtccacgggtatgtttaacctgcacgtcgtsctttggaacttttctcatcagccggggagcatcataggaaaaaaataaaaaccaaaagagtgacgtgacacaatttgtacctatgatctctcttaccatt

SEQ ID NO: 11495 - DNA, 201 bp, Homo sapiens
tgggtacatagtaggcatatgtatatatggggcacatgagatttttttgatacaagtatgcagtgtgtaataatcacgtcatcatagaaaatgaagtatcyctcccctagagcattaacgaatctgtacattttaactgctatactctactgccataacccttctcaagatctgtctcaatggagtttgggtgagtcctcc

SEQ ID NO: 11496 - DNA, 201 bp, Homo sapiens; identical to SEQ ID NO: 858

SEQ ID NO: 11497 - DNA, 201 bp, Homo sapiens
tcaaatcatcttctgtcctcataaacctccaatgcacagaagtctcagtttgggaactctcctttctttctattacaaattttgcagagaatctcatgtttctctctctctctccctttctctcttaccgccccccatgccccaacacacatacaccctttgttacttctcctaacaatgaaagaactgcccccttcctac

SEQ ID NO: 11498 - DNA, 201 bp, Homo sapiens
tttgggaggctggggctggtggatcactggaggccaggagatggccaacctagtgaaacttcatctctactaaaaatacaaaaaatttcgttgggcatggkggcacatccctgtaatcccagctactctggagactaaggcaagagaattgcttgaaaccaggaggtggaggttgcagtgagctgagattgtgccactgca

SEQ ID NO: 11499 - DNA, 201 bp, Homo sapiens
gtgagttcagtttctcactgagcctcagaatatgaggaattctccaaaatgaagacgtccagatgacagcaacaccaaacgtgaaaccatgataaatgtgygcaccccctggattactgcacaagccttctcacggaccgccctactgtcagtcttgtcttcctctttccctacctctgtcccggatccagactgcaatca

SEQ ID NO: 11500 - DNA, 201 bp, Homo sapiens
caaatcatcttctgtcctcataaacctccaatgcacagaagtctcagtttgggaactctcctttctttctattacaaattttgcagagaatctcatgtttctctctctctctccctttctctcttaccgccccccatgccccaacacacatacaccctttgttacttctcctaacaatgaaagaactgcccccttcctact

SEQ ID NO: 11501 - DNA, 201 bp, Homo sapiens
gaagatttttaaatcccaattaacaaaatacaccatcaataaaaataatattatattgctttgggaaaaagtaggatataataaaattagaatagaattaygtaagtaaaaatttcagaggattgtctgaaaaatcagaggataaagctaactatcttgtagaagaaaaaatgacatttcttaaaatgtagatcacacagg

SEQ ID NO: 11502 - DNA, 201 bp, Homo sapiens
aaataaaataaaataaaataaaaaaacttgttcctccacttgtagcatgtaagttaatggtaccagtcatctggttgttgaggtgagaaacctgtaacccygcctctgcatcacctctgcctttaatcaattaccaagttctttcctttctatcatctatcttatggaccctggacccactgcttccctgaatcaccagct

SEQ ID NO: 11503 - DNA, 201 bp, Homo sapiens
ctctttgttatttgcattaccttccaacccatctccttgctttcgttattgttcatcacagtctacacagcactcagagtaattctttttcatgaaatcaytatcacagcactgcccgaacgccgtccaggggcttctcacttagtccgagtaaaatccatagttcttatacatcctaatcaggcttcatctctctgattt

SEQ ID NO: 11504 - DNA, 201 bp, Homo sapiens
cttcactgaatacattttaacttatactcctttatttgttttgataaaaaagagagtcaaacagaattgtctggaatcttttcttaaggttaacagctttytgttcccctttgttcaagtgttcattttaataatctaattattccagatctatgactcctgctactcaggactctcccaaaagacccctgacttctgatg

SEQ ID NO: 11505 - DNA, 201 bp, Homo sapiens
tgctttaagctttgttatataatgctccttgtgaagttttaaaatgtatcatattatgttcatttggaactaaaaagcaattgaattaatagcagaactcwgatttctgatccacagttttgttagtttgatacattgcttaggattctcaattatgaaaactacaatggtaagatggtaaagtgcatagaacatgagctc

SEQ ID NO: 11506 - DNA, 201 bp, Homo sapiens
tccgctgcctcggcctcccaaaatgctgggattacaggcgtgagccaccgcgcccagcggaaaagattttctagagtttagtgctttcaaattatctttamtacagatacatttctaaaaggatatgcctttccaatttcattaagttgcttagggtgagaacacaggactgaggaaataattgggcacaaaaaacagctc

SEQ ID NO: 11507 - DNA, 201 bp, Homo sapiens
ggccagggaggcctgagtgcatgtgtgttggtgatgacagagggtgaggctggagcatttccatcagctcaggctgtccacgggtatgtttaacctgcacrtcgtgctttggaacttttctcatcagccggggagcatcataggaaaaaaataaaaaccaaaagagtgacgtgacacaatttgtacctatgatctctctta

SEQ ID NO: 11508 - DNA, 201 bp, Homo sapiens
cgcagatatgttgactcactgttacttaagcgtcaatgaattattcagggctcaagatggggataaatattcagggaggtaactgcactcattctttatcygtttgtgttattcgggtttttacttggtttctttatttttgcttttttctcatatgagaagtgttcagatgacagcacatccaacaacaaaattcagccc

SEQ ID NO: 11509 - DNA, 201 bp, Homo sapiens
atggtaaacttgatctgtataatatttggacctccctcaaaaaacaaatcattcatgaagctttggaaaggctattataaccaaataatgtgtgcataagraaccttctccccacatctctgagccccttttcattatggaacctcacagcatccctcaggatatccctgagcccaggggaagatgagagtgggaggaatt

SEQ ID NO: 11510 - DNA, 201 bp, Homo sapiens
aagccagatcagatttttgtcattgtataaactccagtaggagaagagggatgcgtttttaaggtgatttctagaatgctctggccgacttagctgcagargaaaaaggagaaaggaagagacagtgtatattttggcactgaaacttctttagtaacaatgcattcattcacaaatctggagagaactgaatgtctgctt

SEQ ID NO: 11511 - DNA, 201 bp, Homo sapiens
actaactacagtcagtaaagatgagagggggttattttgtagctcttcctgcaggctgtgagaatttttttcgttaaaaaattcgttaaaaaagcaggatrtactgcttcagtccttaccatgagagccactcccatcggaacataaattagtcttagtatatttcaggttctcccacatgttcacattccaactgggtgc

SEQ ID NO: 11512 - DNA, 201 bp, Homo sapiens
gttcattctctacagttttgtggtatgattaacttcgaagtccactgcagacacaaatgaactttccctaaaatgcaacacgagagtactaactacagtcrgtaaagatgagagggggttattttgtagctcttcctgcaggctgtgagaatttttttcgttaaaaaattcgttaaaaaagcaggatatactgcttcagtc

SEQ ID NO: 11513 - DNA, 201 bp, Homo sapiens
tgagtggagtaagaggacagatgagagtctgaggccacagttgcctcaaagtgaccacggaccaggcagtctctaatgaataggcaaggccacaacctccwttctcccagaaaagaagaaatgctcatctgaaattcatcacctctctggagtcttcaaactgaccaagcattgaaaaggtctgtaaggtgtatcttaata

SEQ ID NO: 11514 - DNA, 201 bp, Homo sapiens
tgctgttttattctgtttgtttcacactgttcttattttcatctgtagacaggaaggttagtaagtactaagtttctaaacagtctgtggagataaggttctgtttttcatatgtttgggtagcagaggtcaaagcagggaacaaaggtcatggatgtcagtgataaaccacaaagccgaggcaaaagacagtaaatctgg

SEQ ID NO: 11515 - DNA, 201 bp, Homo sapiens
aactgccaagttatcataagatgtatatattcagtttcacttataagtgttatttctttagctggatagttttgccatatatatcaagtaccaacaaattrgttgattatatgtaacacaatgaagtagaaattcattaggtttttttcacttgccttgttttaccaaaatcttaaatgtaaatttccaatatcttagttt

SEQ ID NO: 11516 - DNA, 201 bp, Homo sapiens
agcactgattactctatcaagtttttaccagaaaacagagcccgggacacaagcaacagttgataaaacagaagaaaaacctagtttaagagcagaataaygtttagctgcactcagtggctcacatctgtaatcccagaactttgggaggccaaggcaggaggagcccttgagtccaggagtttgagactggcataggcg

SEQ ID NO: 11517 - DNA, 201 bp, Homo sapiens
tggacccagagcaagggccatttccagacagtctccaccagcccactggattcacctggctcctcagacctctgcctcttccatttccgtatgacctaatyacctgctgtcttttgatatattaagattttgtgccactctcctactgagatggaccttaaatcctcatgagctgatactgtctcgtctactttatgagaa

SEQ ID NO: 11518 - DNA, 201 bp, Homo sapiens
ttatcttttttttttttttggcatcttccctctccacataatctcgtctcaactgcagggactacagttaagtttaactgggcttactaggcaagatgtgstactaaatgggcatctagtttaatgtataaaacacaatctctgtaagttttcctctattctgcctccgccacagttgtaagagagagacatttctacctc

SEQ ID NO: 11519 - DNA, 201 bp, Homo sapiens
gttttgagaccaccctggccaacctggtgaaacattatctctaataaaatacaaaaaaaaaaaaaaaaaaaaagccaggtgtggtggcaggtgcctgtagwctgagctactcaggaggttgaggcgcaagaattgcttaaacctgggaggcgtggccaggcacagtggctcatgcctgcaatcccaggactttgggaggcc

SEQ ID NO: 11520 - DNA, 201 bp, Homo sapiens
aaaaaaaaaaaaaaaaaaaaacctgggaggcggaggtggcagtgagccgagaatgtgccactgcattccagcctgggcaacaaagagcaaacaaacaaacmaacaaacaaacaaaaaagtctccttcaggctcagcacaattaattatccagcatgtgcttcttgaacaccaactacacgtcagacccaaagtgttcaaca

SEQ ID NO: 11521 - DNA, 201 bp, Homo sapiens
cactccagcctgggcaacaagagcaaaactccgtctcaaaaaacagtcttaacaactacacaaaagtctcaatatccgcttatccccagtgcatatctaastattttttccaacaaatagcattattcctcagaaaaattctgagaccagttagaaccaccctgttaaaatatcatcagaaattcacaaggaaaatgttgg

SEQ ID NO: 11522 - DNA, 201 bp, Homo sapiens
acgcccagacaatatgtgttaagcattgtgctaatacttcatatgctgggcaacatccaacaacctataaccctacaaacctataacccaacaaccctatragataaatctctagtgtcattggcccattttaaagatgtgaaaactgagtctcagagatattaggtaagtcacccaagcttacttagccagtaagtgagg

SEQ ID NO: 11523 - DNA, 201 bp, Homo sapiens
tgagacagagtctcactctgtcacccaggctggagtgcagtggcgtgctcacctcacttcatcctccgcctcctgggttcaagcgattctcatgcctcagyctcctgagtacctgggattacaggtgcctgcagccacacccggctaacttttgtatttttatttttagtagagacgagattttgccatgttggccaggct

SEQ ID NO: 11524 - DNA, 201 bp, Homo sapiens
aaagtctgcaaaaggtagagatgggtaaagttaaagcaaacagagtctaagtccaagataaggtaattcatttataagagtcattaatgcaagtgctacarttgaaaattttttaacgtaaaatgtttaaactagtaagtgacatatttgcaatcagtggattcagaaaaattaagttactggagagaatattcctgtgct

SEQ ID NO: 11525 - DNA, 201 bp, Homo sapiens
gtttttttggactgtttttccttatgtctaacttagattctgataagcaccaagctgcttccctacctgagtgccttggaatatgcatttttcctcttacyggaatgttctttctcctctccctcctactaccattcaatggagagggcttctgggtagggtaggggcatcatgttatttttatttgctgaatcagggaat

SEQ ID NO: 11526 - DNA, 201 bp, Homo sapiens
tggttcaatgcaggacatccctcggcttgtacatgaagcccggtagctctgttttatgagggtaggaaacatctggtcaccattggtttatgaaatatttrccacctgaaaaaccattattattaggtcattccttgttccttgctttatttttctgagtttttttctctccattaagaacatatttcctggaactcctta

SEQ ID NO: 11527 - DNA, 201 bp, Homo sapiens
ttaactgagctccaaatgtgatgtttctggtggtcacttcaagtcattctaaccaattaatcaatctcctggtgctctgacttggatcctatgttttcagsccctggagcagtggttctcaagcctggctgcccattaaattcatttgggggattaaaaaaaaaataccgatgcctagaccccaccctggaccaactagat

SEQ ID NO: 11528 - DNA, 201 bp, Homo sapiens
gtatacacacacgtatatacatacatgtgtgtacacacacatacatacatgtgtatacacacatatatacatacatgtgtatacacacacatatatacatrcatgtgtatgcacacatatatatacatacatgtgtatacacacatatatacatatacactatataaactgtgtttgtgtgtgtatacatatataaacggt

SEQ ID NO: 11529 - DNA, 201 bp, Homo sapiens
gtcagacctggggtgggagagcagagaaagcggggctggcagagacaggggtgagggccgggagaggcgatgacatcattccctggcagctggcggggagrgggtggggacggaggggtccccccgacctgagccgagccctcccttcccaagcccatcctcctttctttgggatggttcaccccacctgggcgccattca

SEQ ID NO: 11530 - DNA, 201 bp, Homo sapiens
tgtacatgaagcccggtagctctgttttatgagggtaggaaacatctggtcaccattggtttatgaaatatttgccacctgaaaaaccattattattaggkcattccttgttccttgctttatttttctgagtttttttctctccattaagaacatatttcctggaactccttattggcaaggaaagctaactcacttttt

SEQ ID NO: 11531 - DNA, 201 bp, Homo sapiens
aaaaatccataccaggttccagcctttccctaactaaaaaggaggaagatggctgaatctgcctggtggggagaggggtaatttgctgcaggtggaaccaytttattcagacctgagcaccgcagcgagccctctgtggacccgctttgctgagaaaacttgctgctccctgggttctatccagagcagcctggcgattgt

SEQ ID NO: 11532 - DNA, 201 bp, Homo sapiens
ggtggaaccactttattcagacctgagcaccgcagcgagccctctgtggacccgctttgctgagaaaacttgctgctccctgggttctatccagagcagcmtggcgattgtgttctaattttccttttagatagctgaatatgagtattagaatgaaagatctgatattagcagatcaatcatctctttctccactttctg

SEQ ID NO: 11533 - DNA, 201 bp, Homo sapiens
tggcccatcttgacaccttattaataaattattcaaaagcttacctctggatagcatagttgttaagacctagggatccagtcaaaaagagggatcgattscaggctcagatgcaaattaactctataacctaagacaccctatttaaccttcttaaatcttcatttcctcatttgtaaaatgtgtatagaaccaccccga

SEQ ID NO: 11534 - DNA, 201 bp, Homo sapiens
tcgatcacagctcactacaaccttgatctcccagggtcaatcaatcctcctacctcagcctcctaagtagctggagctacaggcatgagccaccaagcccrgctaattttttatatttttgtcgagacggggtctccctatgctgcccaggctggtctcaaactcctagtcctatgagttcctcctaccccagcctctgaa

SEQ ID NO: 11535 - DNA, 201 bp, Homo sapiens
atctgttcctcatatagtctcagaaaatggcaccaccatctagccacttgcttaaagccaaagcctgagagtcatactctgttccttcacagcttacttcrtcagcaggtcccattggcaaaacctccaaatctgaacacgcttcttgccacccacactgctcagccctggtccaagccatccttccacggacatcagcag

SEQ ID NO: 11536 - DNA, 201 bp, Homo sapiens
tgctctttttcctagatcttctcatgatgacaggtctcagctcaaaagtcaccatctcaggaagccctgctctgaacactcccgccaaaggatccctcccytaccccatttctttctaccccattgcctttttttttgttaattgtgtagcatttaccactctctgcagtcatttgtttatttacctgcttatgtgttgaa

SEQ ID NO: 11537 - DNA, 201 bp, Homo sapiens
agagaagagttcctcagggctaatcctaagttaaaagggatgactttactttgtctgagtcagtgcaaaactacattttttttttatcaaaacagaaaackaaaacaaagaaaaatggtaagtgcttcaatcataccatccaaagcagagaattaccatattcaagtcatggagctcccccaggcctacaagtatttgagt

SEQ ID NO: 11538 - DNA, 201 bp, Homo sapiens
ataaacaacaatctgctaagctttcaaatgatagcagctagaaagatcttcaagagtctagggatttggaaaattctggcatcatgatagtcaatccccartggagacattctttgaagaccacataggcaatcacttgaccaaatgccacctaaaaattgaaatatttttcacgttttgcttggtttgctagaacacacc

SEQ ID NO: 11539 - DNA, 201 bp, Homo sapiens
ttaaggccattttttgtccgtttcctcctgcgactatcagtgcctatactttaaagtgttctataaccgtgaaatctttcctgggataacccagtccactrtacccactcccaccaacccccaccaccaaaaactatagatctactgctgagtcaatttcttcacatttgaaagctcaagaagggggagaacaagttgaaa

SEQ ID NO: 11540 - DNA, 201 bp, Homo sapiens
agccaaagaaaagtgatttgtttctgtctctactcctccttcatacaactaattatctccccatcctctctttctaaatgtagaagctgtgaaggtcagcygtactgtggattactgtcaatttagaacaccttccaaaaataaaatctctttgactattgttttcttgctgctttaaaaattgtttagcaatttccctca

SEQ ID NO: 11541 - DNA, 201 bp, Homo sapiens
cagtccatgaattttctttgcatttcatcctaaccaccgttgccttctttaccattcagttctcctttctcccagaagctttccagagtttcttccctctkttccttctgcttcatttattctgcaccacatgctctaaaacttaccagttcattcatctatttactctatgtgtgattctgtgaactgtaagtagaagat

SEQ ID NO: 11542 - DNA, 201 bp, Homo sapiens
ttaccctccagtgccaatagccaatggcttttatgcattgaatccaaactgtatttaaaaataaaatacattgtctacgagaactttaaaaaagacgcatrtggaagtcccacacacagaaatccatttggtaatagcatttaaaagctcgtggatccccaaggacccagggaacttttaccttgaatatccttttgaaca

SEQ ID NO: 11543 - DNA, 201 bp, Homo sapiens
aagagagcacaggtagcggaagaagtgaggtctagatgtcatcacctatgggaccaattttggatggcttatcaatatgagctgcaggctgactgacatcrtttccttactaaacatcatttttactgagaacttagtaacctagacctagacattaatgttacttagttgtatgttcagtattttttaagtgaaggttag

SEQ ID NO: 11544 - DNA, 201 bp, Homo sapiens
caaaattgtgtgaggtaggcccgccacattagagaacggggatcaggcaaacagagatgaagtactgctggagcgccacgcaggagactcttaagcttggygttgacgtctatgacattcggatgcctttgtgaggctgtcaaacctactgcgaagtaggcggccctcagctttcagatgggttgtgttctgattgtgggt

SEQ ID NO: 11545 - DNA, 201 bp, Homo sapiens
tgatgatgcggtttggccctgtgtccctacccaaatctcatatcaaattgtaatcctgatgggaggtaattgaatcatgggggcggacgttccctttgctrttctcatgatagtgagtgagttctcacaagatctagttgtgtattttattatttatttattttttgagttggagtttcactctgtcacccaggctggaat

SEQ ID NO: 11546 - DNA, 201 bp, Homo sapiens
gcttatagtagtaagatttcttgattatgtatgtgtgaatatatataattgtgggaccatgtggtgattttttcccctttttctactatttgtcagaatgyttggtaataagactgctttggagtaacaaagaattgcttaagtagactagctataaattttaagctgatgatgatcaatctgaaatggatggttagaccc

SEQ ID NO: 11547 - DNA, 201 bp, Homo sapiens
aggaaggcaaaggacttgagaaggcaaagagcagtggaaacagtttgttctctaagatggtggaactagtaacaaataggcacacttaagatgtgaaactkatttactcgaagtactgtgaaaagtgtgtgtatatttgaatatgagttgctaaagacggttgaaagcatggctaaaactagctgctatctagaagtgaaa

SEQ ID NO: 11548 - DNA, 201 bp, Homo sapiens
cagcacagggtagaacaccatggagtgaagaatgggataaaataggtgaagaagagtatgccgtctttactcagaaggggacctagaaagttttttttttktttttttttttttttttttttgagagggagtttcactcttgttgcccaggctagagtgcaatggtgcgatctcggctcactgcaacctcctccccccagg

SEQ ID NO: 11549 - DNA, 201 bp, Homo sapiens
agcacagggtagaacaccatggagtgaagaatgggataaaataggtgaagaagagtatgccgtctttactcagaaggggacctagaaagtttttttttttkttttttttttttttttttttgagagggagtttcactcttgttgcccaggctagagtgcaatggtgcgatctcggctcactgcaacctcctccccccaggt

SEQ ID NO: 11550 - DNA, 201 bp, Homo sapiens
cctgcgtataatctcagaaactcactcaataacatcaactcaaagtttatgtatgactattctatttctatataatattgatgtatctttttaaactgtaytttgagaaattccaaaatatgttatgatttttagtgtaaaattcctggcctgagatgtcattatatcttctttcctaaaagaataatttaattacatttc

SEQ ID NO: 11551 - DNA, 201 bp, Homo sapiens
acctacgtgtctagaaccatcccaaatagtcacatgaattaaggctttgctcctgagatttatagtggaataaaatgcaatgtcatttgcctcttcctttwaaaaaaaaaaagtcaactatgcaaaaattactataagagacttcataaagtataacacacagtgaaattactggttccctaataatcttctatataaatt

SEQ ID NO: 11552 - DNA, 201 bp, Homo sapiens
tcagctctaccttttctgctcagcatatatcttgttagccaagaaaagtactttgtttagtaaagacactaccagtcaccaggcaaaaaaaaaagaaaaargaaaaaaaggaagacgagtccaatcaaaagttcagctttgaaattcagaccaaaagcacatgctctcttctacgtgcaacctcaggctttcccacccacc

SEQ ID NO: 11553 - DNA, 201 bp, Homo sapiens
ataacttggtttctttaacaatacctgtttatgtgcatgcctagaaccaattaaatactgggctattttaagtttcccaatgcagctatattttggcaagygtgaaagaataaattagacacttttccaaagcacagtgatctactgagatctgtactatgtaataaacatgggatgatgcctaagcctgtggtatggtgg

SEQ ID NO: 11554 - DNA, 201 bp, Homo sapiens
aaacagtgcatgtgtgtgtatatcacacacacacacatatatatacacatgcactgttttagactttttcaaatatgtgtgtattgtatacacacacatayatacatacatgtgtatacacacacgtatatacatacatgtgtgtacacacacatacatacatgtgtatacacacatatatacatacatgtgtatacacac

SEQ ID NO: 11555 - DNA, 201 bp, Homo sapiens
tacacatgcactgttttagactttttcaaatatgtgtgtattgtatacacacacatatatacatacatgtgtatacacacacgtatatacatacatgtgtrtacacacacatacatacatgtgtatacacacatatatacatacatgtgtatacacacacatatatacatgcatgtgtatgcacacatatatatacataca

SEQ ID NO: 11556 - DNA, 201 bp, Homo sapiens
gcactgttttagactttttcaaatatgtgtgtattgtatacacacacatatatacatacatgtgtatacacacacgtatatacatacatgtgtgtacacayacatacatacatgtgtatacacacatatatacatacatgtgtatacacacacatatatacatgcatgtgtatgcacacatatatatacatacatgtgtat

SEQ ID NO: 11557 - DNA, 201 bp, Homo sapiens
actgttttagactttttcaaatatgtgtgtattgtatacacacacatatatacatacatgtgtatacacacacgtatatacatacatgtgtgtacacacayatacatacatgtgtatacacacatatatacatacatgtgtatacacacacatatatacatgcatgtgtatgcacacatatatatacatacatgtgtatac

SEQ ID NO: 11558 - DNA, 201 bp, Homo sapiens
aaagcaatttagtaatggcaaaagcataaagtgtggaccagaggggtcttcaaaatattagggaagatagagcagaaaaccatttttttcagtttgttgtkataaaattatacacacactctgagtcaccaaacacattggaggttgataaggaacataggagtagtcacgggtcctaattctgcagtacgtggctatgcg

SEQ ID NO: 11559 - DNA, 201 bp, Homo sapiens
gttgcagtcctctccatcacacacgtcataaaggcagcaccagaaacaagccattgcccaagataagggtacctatttactgcgtgaatttttgtttcagrtttactttattgctgctctaattagaattcttgtccctttgtttcacactcgtagcatgtatttatgtcatctcttctctgatttgaaagataccattgt

SEQ ID NO: 11560 - DNA, 201 bp, Homo sapiens
ctctgggcacaatgcccaccgcagggtaagcagtccattattagccattatcattatcaatcatcgtgatcattaatagcctttatatgtgttatatgaaktcattaggtagctaatgttctatagaaggggttggcaattttttcctgtaaaagtgcaggtaaatattttagacttcatgtgccatatagtctctgttgc

SEQ ID NO: 11561 - DNA, 201 bp, Homo sapiens
aaatgaaataatctacatgatgactctgggcacaatgcccaccgcagggtaagcagtccattattagccattatcattatcaatcatcgtgatcattaatwgcctttatatgtgttatatgaattcattaggtagctaatgttctatagaaggggttggcaattttttcctgtaaaagtgcaggtaaatattttagacttc

SEQ ID NO: 11562 - DNA, 201 bp, Homo sapiens
cttggaaaccgcccttgttcatcctcattgaatgagcattttccctagaccacgtgcatgttcccgcggcaataactggcttgcaaattaagcctgaaccrgatatgccatagaactattattttctttttcaatgtgcaagcagttttaaagctacacctaatcctgactactggatcctgtcagatggcgcctctttaa

SEQ ID NO: 11563 - DNA, 201 bp, Homo sapiens
atcctgccacatgccacaatatggatgagccctggaggatattatgccaaatgaaataagtcagtcacaaaaagacaaatactgtatgatttgcggtgatkaaagcagtcaaagtcatataaacatggaaaagaacagtggttgccaggggcttggaggaaggagaaatagaaagtcattcaataggtacagcatttccat

SEQ ID NO: 11564 - DNA, 201 bp, Homo sapiens
aaaaaaaaaaaaagtaaatgtggtatagacatacaatggaatattattcagccttaaaaagaagaaaatcctgccacatgccacaatatggatgagccctkgaggatattatgccaaatgaaataagtcagtcacaaaaagacaaatactgtatgatttgcggtgatgaaagcagtcaaagtcatataaacatggaaaaga

SEQ ID NO: 11565 - DNA, 201 bp, Homo sapiens
gagcaatgagaaacgatattaaatgtataatagaagtgattagatattagatattaagaaaatattaaaaattaaaagcattgataattaactggtgtggyggtagcacccaaactaaaaaaaaatcaaccaaggaaatataatgtccagaaatagactcagctatacacaggaatttaatagatgatgataatagcatct

SEQ ID NO: 11566 - DNA, 201 bp, Homo sapiens
cccactaccacgcccagctaattttttgtattttttagtagagacggggtttcaccgtgttagccaggatggtctcgatcttctgacctcgtgatccgccygcctcggccacccaaagtgctgggattataggcgtgagccaccgtgcccggcctgccactcaactttaatttgtggccaggaagagttaagtctcccctt

SEQ ID NO: 11567 - DNA, 201 bp, Homo sapiens
cacccggtatttcttagcttttctccatcagctgctgtaacccagacagtgtgctaagcatttgccatacaaagacgccagtcacagctcctgcttccatkgggctcacagttgaatgaggaaagcattctctaaacaaatacttgtaatttaatatgatgactgctgtgagaaacgcaatgcaaagtaacatgcttggaa

SEQ ID NO: 11568 - DNA, 201 bp, Homo sapiens
tgcagtggctcatgcctgtaatcccagcactttgggaggccaaggcaggtggatgacaaggtcaagagatcgagaccatcctgctaacaaggggaaacccygtctctactaaaaatacaaaaattagccgggcatggtggtgggcgcctgtagtcccagctactcaggaggctgaggcaagagaatggtgtgaacctggga

SEQ ID NO: 11569 - DNA, 201 bp, Homo sapiens
gcaaagggaaagcaagacaccttccacacaacgcagcacaaggcaggaagaaatgtcaagcaaagcgaggaagagccccttataaaaccatcagatctcgygagaactcactcactatcacgagaccagcatgggggaaacgacctccatgattcaattacctccacctggtctctcccttgacacttggggattatggga

SEQ ID NO: 11570 - DNA, 201 bp, Homo sapiens
ggccagtcaaggaacaaggaactataggagaggaactacaaggagaatcttcagattttcaagcctattattgttcaatacatagtagtttaaaaaacttygacagttgtacttaaagtcccttctcatcctatgagtctctgcctctgccagtatgtgatgtttctggctcatggtgatgacaaattcggatgcaaaagt

SEQ ID NO: 11571 - DNA, 201 bp, Homo sapiens
aattgttcttttcaccgcaagagttatgtattcagagtaaaaatgggtagatgtatattttctctgtgaaggaaaagaactggaaggtgcttattttattycaagagttcccaaagcgaggccgggtgtggtggctcacacctgtaatcccaacagtttgggaggccaaggcgggcagatcacgaggtcaggagttcaaga

SEQ ID NO: 11572 - DNA, 201 bp, Homo sapiens
ggtgtggcagatgctgcgaaaaaaatgtgccacaacctctgagggcaggaaactgaaagacctcgtgtggtttggaggcctgaggaaagagcctcaggaartgatgtttgacctgacatctgaaggctaaatgggagacagagacaggtgtgcagtcaggaggaatcgcacattgaagggaagggctgagactctgagaat

SEQ ID NO: 11573 - DNA, 201 bp, Homo sapiens
gcaagagttatgtattcagagtaaaaatgggtagatgtatattttctctgtgaaggaaaagaactggaaggtgcttattttatttcaagagttcccaaagygaggccgggtgtggtggctcacacctgtaatcccaacagtttgggaggccaaggcgggcagatcacgaggtcaggagttcaagaccagcctggccaacat

SEQ ID NO: 11574 - DNA, 201 bp, Homo sapiens
tcctcacaagccctgaaccgactttagagagccactgtcgattgcacagctgcattcctctggattaggaacatgagatatgtactctccaccccttaggkgcctgctgtggggcccagtagcaaatgcacctctccagcccagcggctctgtcattccaccaagcacacatgggtggctgcaatgccacaaccctggagg

SEQ ID NO: 11575 - DNA, 201 bp, Homo sapiens
gctcttgctttgcaaagaaatcatcagtaaagttctatatttttcttaggaaagaaaataaagtaacaccaatgagaacagggaagtggaataagaggccrctacgaagtgagaggtagcttccagtcctaccacctctgattagtttattggctggatgatctcaaccaagtcgcttatactctaagcctcagtttcctt

SEQ ID NO: 11576 - DNA, 201 bp, Homo sapiens
cacctgactttgggaaccttaattacatctgcaaatcccttcaaagcagcagctaaatcgccatttgattggaataactgagagaaggtgtgtatacaccmgaggatggggatattaggggccatcttacagttctgcctgccacagcaatgtactgtaggtatgcatgtaaatacacaccagtgccatgacgtacaagga

SEQ ID NO: 11577 - DNA, 201 bp, Homo sapiens
gagatgtttaaataggattttgaagtccctgctcttgctttgcaaagaaatcatcagtaaagttctatatttttcttaggaaagaaaataaagtaacaccratgagaacagggaagtggaataagaggccactacgaagtgagaggtagcttccagtcctaccacctctgattagtttattggctggatgatctcaaccaa

SEQ ID NO: 11578 - DNA, 201 bp, Homo sapiens
ttattaattttacgtgtaaaatggaattgtgattatggaaaagtcttgtttttagaaatgcatactgagctatatgggggtaatggtatataaaatctggratttatttttaaatataaaaaataagagagtgactaaatgatgggtatatacacacttaccatactggttatctctatttttaatcatatttaagaaaga

SEQ ID NO: 11579 - DNA, 201 bp, Homo sapiens
aaatagcccaactctccatttcttctatacgatagagaaataaatgtctgcctggtttaattcgtaagtctctcattttggtgttttgttttcagttgtgraatggagtagggtagacggtatgtgcagctaagcctaaactaaatgatatagactccaagaaaaaaaatgtctgctttttcttccataatcctagaacct

SEQ ID NO: 11580 - DNA, 201 bp, Homo sapiens
gttgtctgcagattttgagagagaaatggaaatagtttcagatactttttattttttttttgagacagagtctcactctgtcacccaggctggagtgcagwggcgtgctcacctcacttcatcctccgcctcctgggttcaagcgattctcatgcctcagcctcctgagtacctgggattacaggtgcctgcagccacacc

SEQ ID NO: 11581 - DNA, 201 bp, Homo sapiens
tgtgtatcaaaggacaaaatcaacagagtgaaaggtcagcctatgttacagaagaaaataattgcaaatcacatatccaataagggattaatatccaggakatagatagatagatagatagatagatatatatatatatatatatatatatatatatatatatatatatatatcctataaggggttaatattcaggatata

SEQ ID NO: 11582 - DNA, 201 bp, Homo sapiens
acaggcgagcaccacctcgcccagctaatttttgtatttttaatagagacggggtttcaccatgctggccaggctggtctcgaactcctgacctcaagtgmtccaccctccttggcctcccaaagtgctgggattacaggcataagccccacgcctggctgaaacctgtttctattaaaagacttataccttggaacttta

SEQ ID NO: 11583 - DNA, 201 bp, Homo sapiens
ggcacactcagtacatgaagggagacactattaaaagcaaaaagagggttattgtcaaacttagaacgatgctaatttgagttctgagctctaaaactggyagaattcaaacattaaatgtagaatgtactagtattctatgccttaaacagttgaaaggaaaggcttacattggcaaaatgtatttcacaccaaataatg

SEQ ID NO: 11584 - DNA, 201 bp, Homo sapiens
tgttagaggtgggggaaaaaaaacaaacatttttttttttctattattcttttactattttttctattaccattttttctagtaccattttttctattatycttttactataattgtatataatatggcagctgcttgccacatgtactatgtggagagatgtaccaccctgcatcagcttttaccctacagaaggaaatc

SEQ ID NO: 11585 - DNA, 201 bp, Homo sapiens
gggttgttttttttttttaaagcaaaattttggctagactgtcagtcctattttttcttctaaagatggtgggttcctaacagctgcagagctgaggaggmggcccttgcaaggcagggattgttagaggtgggggaaaaaaaacaaacatttttttttttctattattcttttactattttttctattaccattttttct

SEQ ID NO: 11586 - DNA, 201 bp, Homo sapiens
ggccatttgttttctttgaagaaatgtctgttcaagtcctttgcccatttctaagtagggttatttggggatattgttactgagttactcagtaaactcarctgaattaagtttcttatatatacggatattaactccttaccagatttatggtttgctaatattttatcccatttcttaggttgtctctttactctgttg

SEQ ID NO: 11587 - DNA, 201 bp, Homo sapiens
aagcgtgggtattcttcacacaaacacacacacatctttatttcatagtttatagccatttaaaagtacggttgtgatgaccacagtgataaaaatgaaaytaataataaatctgtcattaaaagtatattgctttgaagaaagctatttatagtagtactttttaaaaatgagtttctgaagaaacagtacaaataaaaa

SEQ ID NO: 11588 - DNA, 201 bp, Homo sapiens
aaagctatttatagtagtactttttaaaaatgagtttctgaagaaacagtacaaataaaaaattgtctgagcctgaatcactctattttattgtgtgtttyggtcaaaaagactttgtatgttattttatttaagggaaatataattctttgcaattattatagataacactgatatcttaactttaccattatctttaat

SEQ ID NO: 11589 - DNA, 201 bp, Homo sapiens
ttgactccaaataattccctgtaacattctaaatttaatcatttgactctgagtagattcgttcctcatttaatatctttgtcactttcccttcaaattcyttctactgttctttactttgggcttacttttgctgtgcctctttttcttcatttctaatctactatacattctttttttttttttctttttgagagaagg

SEQ ID NO: 11590 - DNA, 201 bp, Homo sapiens
tgagccacagtgccccgcccccattttctaattctaagataagttagagggacatctttctttcatctgttttgcagcagggctttttgtttttttggggkttttttttttttttttgagacggagtctccctctgttgcccaggctggagtgcagtggtgtgatctcagctcactgcagcttccacctcccaggttcaag

SEQ ID NO: 11591 - DNA, 201 bp, Homo sapiens
agggatcagataaggaaatcatattattaccccatgtattttaagaaaacagatgactaaaagtctggaagtaactactatctatatttctatctatctgkcatctttcttgtttcaaggcctcgttctagatcaagggacagtggagacgaaaatgaaccaattcaggagcgattcttcagacctcacttcttgcaggct

SEQ ID NO: 11592 - DNA, 201 bp, Homo sapiens
tttcactgccaatatcttctttctttagtgaatactgttggtttttagtgtctttcgttttagtgttttagtttttaaccacctatgtttcactattttcmttgtgagaaaaatatgaaaaggaatgatttgaaggttactttcaccctttccacttttctccccaaatacttggcgaattgagcccaatgtttcatctca

SEQ ID NO: 11593 - DNA, 201 bp, Homo sapiens
ttgtatttttttagtagagacggggtttcaccatattggccaggctgggctcgaactcctgacctcgtgatccacctgcgtcagcctcccaaagtgctggsattacaggcatgagccatcgtgcccggccagccactaacatttaattagtatattactataattagtatattactaaaaagagaaaactgaaatcatcta

SEQ ID NO: 11594 - DNA, 201 bp, Homo sapiens
acaagaacggcctaacacactacataatgtaactaattgagtgagtgacttcctatcacctttaaaaaaaaaaaaaaaattggtcaagagcagtggctcaygcctgtaatctcaacactttgggaggccgaggcagttggatcacctaaggccagaagttcgagactagcctggccaacatggcaaaaccccatctctact

SEQ ID NO: 11595 - DNA, 201 bp, Homo sapiens
gactgcagtgggtgctatcttggctcactgcaagctccgcctcccaggttcatgccattctcctgcctcagcctcctgagtagctgggactacaggcgccygccaccgcacctggctaatttttttgtatttttagtagagacggggtttcaccatgttagccaggatggtctcgatctcctgacctcgtgatctgcccgc

SEQ ID NO: 11596 - DNA, 201 bp, Homo sapiens
gaaattaatatgcaacagtctcctcctttgccagctgcttgtggcatttgtctcagctctctgtgaaaaattgtgtgtactcacaataacaaacatatacrcgacagcaatccttccgaggtgacacgagtcattgttgaagagtcgtgctcccagcacgttgggaggctgaggatggcagatcacctgaggtcgggagtt

SEQ ID NO: 11597 - DNA, 201 bp, Homo sapiens
taaataatgaaatatttagtggcttttaagtagcagggcatatggttttgaattttgtttttccagttggagtaagaaacaattcttcatgattatcctaragaaccaggaagaaaatgagcaagggactggctgggcttctaggagatgtccgtggcacacagtaggatcttggtaataactgacctactctataactaa

SEQ ID NO: 11598 - DNA, 201 bp, Homo sapiens
ccactgcactccagcctggttgacagagtgagactttgttttttgttttgttggttttttgtttttttttttttttttttttttgagatggaatctcactstgtcgcccaggctggaatgcagtggcgcgatctcggctcactgcaagctccgcctcctgcgttcacaccattctcctgcctcagcctccctagtagctgg

SEQ ID NO: 11599 - DNA, 201 bp, Homo sapiens
tgaacctgggatgcggaggtttcagtgagccaagactgcaccactgcactccagcctggttgacagagtgagactttgttttttgttttgttggttttttktttttttttttttttttttttttgagatggaatctcactctgtcgcccaggctggaatgcagtggcgcgatctcggctcactgcaagctccgcctcctgc

SEQ ID NO: 11600 - DNA, 201 bp, Homo sapiens
gggttatgtcctgataaactcattataagttgaaaatattgtaagttgaaagtgcatttaaggcggggcacagtggcttacgcctgtgatcccagcacttkgggaggccaagaccgggtggattacctgaggtcaggagttcaagaccagcctgaccaacatggtgaaaccccgtctctactgaaaatacaaaaattagcc

SEQ ID NO: 11601 - DNA, 201 bp, Homo sapiens
gggattaatttgatagtaattagatgaagcaaaacaacttgtggtataactcttgcagttttattcatactgttgtatttcttccctcaaaccaacaaacytgttttttaaacactgagtaacttctttaagagaaaacatagttaaagttatctttcatttaatattaaatagggaatatttacatagactcccttgtct

SEQ ID NO: 11602 - DNA, 201 bp, Homo sapiens; identical to SEQ ID NO: 4329

SEQ ID NO: 11603 - DNA, 201 bp, Homo sapiens; identical to SEQ ID NO: 4330

SEQ ID NO: 11604 - DNA, 201 bp, Homo sapiens
ccttttccatcttccttatggatactgttcttgggatgagttctgtggaaagtagagggcaagtcacagaaaagcagtattaatatcatcagtcaacctcwcagctaatttttattgagcacatactatgttaagtgactgacagaattctttccatcagtgatacctgttctttttattcttcttcttgattattctcct

SEQ ID NO: 11605 - DNA, 201 bp, Homo sapiens
cctgggaggcagaggttgcatcactgcattccaacctgggcaacagaacaagactccccgtctcccccacaaaaaaaaaaaaagaaaagaaaatgaaatcmgtagcaatatctgcattcccatgttcattgcagcactattcataatagccaggatacgggatcagcctaagtgtcaacagatgaatgaataaagaaaata

SEQ ID NO: 11606 - DNA, 201 bp, Homo sapiens
ttttgtcatgtaccattctgccacttgggacagtgtttttagtgtggttaactttttctgaacttgctttaatctagtggtaggagagatgactgaattasaaaataaattaggtcatacacctctccttatctctgtcaaatctaaatctttgccccatccaaccatctgtaaaattattcttgttgaaagctttctgca

SEQ ID NO: 11607 - DNA, 201 bp, Homo sapiens
gccggctgagctggggttccaagccagttcgatctaactgtgactctagccctttttgtcatgtaccattctgccacttgggacagtgtttttagtgtggktaactttttctgaacttgctttaatctagtggtaggagagatgactgaattagaaaataaattaggtcatacacctctccttatctctgtcaaatctaaa

SEQ ID NO: 11608 - DNA, 201 bp, Homo sapiens
ttgttttaaaagttctggtttgtaaagtaaccagaattgatttgattttattctgctatgaaagataatttattgagctcatactctgaaccaggcactgkgcccatttaattctcacaatgaccccacaagctagtagccggctgagctggggttccaagccagttcgatctaactgtgactctagccctttttgtcatg

SEQ ID NO: 11609 - DNA, 201 bp, Homo sapiens
ccagttccccatttgcccacctgccactgctgttcccctgccagccacttgcaatggacataggtgaagagaaacatcccctgcaataagtaaaacattgktcttgttttaaaagttctggtttgtaaagtaaccagaattgatttgattttattctgctatgaaagataatttattgagctcatactctgaaccaggcac

SEQ ID NO: 11610 - DNA, 201 bp, Homo sapiens
aaagttataggctgagtgcggtggtcacgcctgggaggccgaggtgggaggatcacttgagatcaggagtttgagaccagcctggacaacatagcgagacsttgtcttgaacaaaaaaaaatgttttaaattagctgggtatgatggcacgtgcctgtagccctagttactcaggaggctgaggtgggaggatcacttgag

SEQ ID NO: 11611 - DNA, 201 bp, Homo sapiens
ggtcaggtctggcatggagccgaaaaataagagcttgcttgcagtttgactttcactgtgattcagttttgcaatcttttaaaaacatccttcaggagacygccatgtatctatctgtggacatctcccagattttccaaaacaagcacaagataaataagggggatttggaaatttccaaattttaacagatgggaattt

SEQ ID NO: 11612 - DNA, 201 bp, Homo sapiens
tttaaaaacaaagctatttaggccatgtgtggtggctcacacctgtaatcccagcacttggggaggccaaggtgggaggactgcttgagcctgggcaacayagtaagaccctgtctctactaaaaaaaaaaaaaaaattccactgggtgtggtggcacacaccagtagttccagctgctcatgaggctgaggcagaaggat

SEQ ID NO: 11613 - DNA, 201 bp, Homo sapiens
actcaggctgtattttcatctggaggctcaactggggaagaatgggcttccaagctcctttaggttattagcagagtgcatttccttgtggttatatgacygggccttggtctcttattggccatttaatggaggctgccctcagttcctagaggccactccagttatctgccatgtggccctctccagaggcagttcaca

SEQ ID NO: 11614 - DNA, 201 bp, Homo sapiens
tattgccatataatagaacacattcttatgctctctgagcctgtctcttttcttcgtctcactgtttcttgacggttatgttgcaacctgaggcagagtgycagaaagagatgagagggatggcaaaaacccattcatactttgagactccttttctctaatttttaaagctttttctctccttccattagatactgttgt

SEQ ID NO: 11615 - DNA, 201 bp, Homo sapiens
ggggagaactcagagaagaaaggggatgcactgctgggcctcatgagttggcttatacttcaccttgagctaagcatactaatacccagtccaggcagcaytgaacagctccgcgcagatctcaccctccaaaaaacaggaagaaaaagccctctcactgcaagcaagatccaaagagagaagagcaagggaggggctgat

SEQ ID NO: 11616 - DNA, 201 bp, Homo sapiens
ctcccaaagtgctagaattacaggcatgagccactgcgtccagcctgaacatgctgtgtttgaaatctctatttagctagccacgtggatgtgtcaggccrgtagttgcaaatataaacatagatgtctagagcacagggtgagaatgctgtatttggggagcatcaggatatagatggtaactaaagctgtgggactgga

SEQ ID NO: 11617 - DNA, 201 bp, Homo sapiens
tatctcaaaaacaaaaaacaaacaaaaaagaatggttggagagagagagagagaaagaggaaaataaaaagagcaattcatcctgcaaagacctagaacakgagtgcctcttctgatgaggctcagtggtcctggaaagctcctattggacaaatcttggagaataaacagaaacattttggagaggtgggagagcgaagg

SEQ ID NO: 11618 - DNA, 201 bp, Homo sapiens
caacaatgtataagcattcccttttctccacatcctggccagcagctgttgttttgacgttgtagtaatagccattctgactggtgtgagatggtatctcrtcgtggttttggtttgcatttctctgatgattagtgatgctgagcattttttcatgtttgtcagctgcttttatatcttcctttgagaaatatatgaccc

SEQ ID NO: 11619 - DNA, 201 bp, Homo sapiens
gagagagtccccactttctctgtgtcctaggggaggcttccttgccaccatccttaaaattgcagccccccgggaagtcccatcacagcccgtgcccctcycctgcttgatgactttcctgcttcactcaccaccgtatcatgtacttatttctcttctgtgtcctcacaagatcagaggggtatgtgtgtgtgtgtgtgt

SEQ ID NO: 11620 - DNA, 201 bp, Homo sapiens
cccatgtgtgtacagacatttttttccttagaaattttggccttaaaagtcaaatacaggttgttttacagatgatcaatggtccttctagaagaagtccmcagaagctctcagatgccctctagaccagcctttactcactcctctgtcagcatcctgcctcccagctcgcattttaccaaagctagaaaagaccctcaa

SEQ ID NO: 11621 - DNA, 201 bp, Homo sapiens
tcaacaacaacagtgctttgcctgtcaccactgctttctagttatgtgaccttcaattacttcacctcttggttccttggtgtccttgtctataaattggrcataattcacttcttagtgaggttcattatgatgatgattaaatgaggtaaagtgcccagcagacgccgggcacataggacatatgcaaaaattggtagt

SEQ ID NO: 11622 - DNA, 201 bp, Homo sapiens
acacagattggcaggtcctgttagacacaggttctcagtgctacgaataatcagataaaatgtgtgcccctttgaagtgacattgtgaagcgtgctgtgaygtgaaatgtggaattgttcctggtaatcacatagggtaaagcccttggtgctgggaccactgccgtgcctctctaggcagagattccattcactgggttt

SEQ ID NO: 11623 - DNA, 201 bp, Homo sapiens
aacactgctaggcccatttcttctatttttcctgatgttgtctctgaacaatgagcagctcaagaatcagaaatccctttctcggcaaggtagttcacgcytagagtcccagcactttaagaggccaaggcaggtggatggatcacttgagctcaagagtttgagaccagactgggcaacgtggtgagaccctgtctctac

SEQ ID NO: 11624 - DNA, 201 bp, Homo sapiens
ctttccatgtgacactgctgaacttactgagacatccgacacctttgggtacctctgactatagatagatcgtatgtgactttagataaattgaagggagrgtaaggaaactggacatagcaagaatgaagaggtgtgaagattcagtctgctaagcctaacataaagtgctttagaaaactggctccttggccttgtgaa

SEQ ID NO: 11625 - DNA, 201 bp, Homo sapiens
accttctctttttcaaggtcatatccccgtccctagcgcactaccaggcatgtggtagatagtccataaatacactttgagtgggtaattctggtccatgyagtacatctatcccagcttaggcttcacaatttcgtcatgtcaagaatcaaaggttttgttgcaattatttccttggattttcagcttaatctaccacag

SEQ ID NO: 11626 - DNA, 201 bp, Homo sapiens
agcttttcccatgtgtgtacagacatttttttccttagaaattttggccttaaaagtcaaatacaggttgttttacagatgatcaatggtccttctagaaraagtccacagaagctctcagatgccctctagaccagcctttactcactcctctgtcagcatcctgcctcccagctcgcattttaccaaagctagaaaaga

SEQ ID NO: 11627 - DNA, 201 bp, Homo sapiens
attgtttgaggaatggtgagtgggccagggaggcctgagtgcatgtgtgttggtgatgacagagggtgaggctggagcatttccatcagctcaggctgtcsacgggtatgtttaacctgcacgtcgtgctttggaacttttctcatcagccggggagcatcataggaaaaaaataaaaaccaaaagagtgacgtgacacaa

SEQ ID NO: 11628 - DNA, 201 bp, Homo sapiens
gcataattactagcttttcccatgtgtgtacagacatttttttccttagaaattttggccttaaaagtcaaatacaggttgttttacagatgatcaatggkccttctagaagaagtccacagaagctctcagatgccctctagaccagcctttactcactcctctgtcagcatcctgcctcccagctcgcattttaccaaa

SEQ ID NO: 11629 - DNA, 201 bp, Homo sapiens
gctcagagcctgccaccaaccctggttccgtcctgtttttgtcctcttcagttttgctgacgcattgaactcctctctttagagcactctgctttgatccyactcaggtcttagatatgctctcacccctgattttgtcggcctcggctgctccagatgagaaagcctatctccctaaggcctttccagatgccgctgtaa

SEQ ID NO: 11630 - DNA, 201 bp, Homo sapiens
gtatgtccaggcctgcactactaaaatccttcataaaagtcctctagaagataacgattgttcacattgcaaacctgtttgaaaagcctggaaaaaatgcrgtatactgtagggaaagtcagtctccttttctcacttatataatttgtaagtctgtcatttcttttttttttttttttttttttttttttgagatggagt

SEQ ID NO: 11631 - DNA, 201 bp, Homo sapiens
cttgcttgaactcctgaccttgtgatctgcccgcctcggcctcccaaagtgctgggattacaggcttgagccaccatgcctggtgcaatacaggtttctaygtgatggaaaaatctaagctcattaggtaaaatatagtcattgtatttccttatgtctacaattggattttcttctccgttagcccctgctactagtctc

SEQ ID NO: 11632 - DNA, 201 bp, Homo sapiens
acccattaaaatgtcaaattcacatatcctttgacccaataatctcatttctagacatgtttgccacagaaaactcaaaacaagtatacagtacaaattasttgtacaggcagctttattgctacactatttgcactaatgagtacttgaagagagcatgtctatcattaataaagaatggtttatactatggaatactat

SEQ ID NO: 11633 - DNA, 201 bp, Homo sapiens
attgtttattcttgttaatacacatatacgcacacagaagagagaagtggggaaccccacaagccttgagaatttcaagaatttgtggatttcagaatggktgagcagctcatagcttttctaacactgaacttttctctctccaagtcccagtcgctcgtcaaaaactgtgccatcagcgcaagaccctgtgatttctgt

SEQ ID NO: 11634 - DNA, 201 bp, Homo sapiens
tgagtgactgctacaggaaacctacacacttgtccagaaatttcatttaagcttttcgtcctaattgtcacattgttctctcccttttctgaaatgctgtratgttcctagttcccaaaacagtacttgtatagcaattactgttaattatttcattgagttaatctcattcccataacggattaagttttagactaagaa

SEQ ID NO: 11635 - DNA, 201 bp, Homo sapiens
tacacacacatctagatatgtaaataccataataatgtaaagagtgaatttttaaatggattaaattctacaaagacatggaatggaaggtaatttacccyatgtttatagttgggagaatgaagcacccagagaaactccatcgctttattattgcaggcaatgtgacatcaagtaatgctctggaaccagactccctgg

SEQ ID NO: 11636 - DNA, 201 bp, Homo sapiens
cctgtgtgaggagcatgggggatggttggaaataatgcagctttatttttattgtgattgttggaattcatgaatcataaaattctgatagctgggatggygtggtagctcacctgctttaaataatgtaataacgacaggcccagtctgtcccaggtgaggaccactgacttagtaaacaataaacaggtgtcctactca

SEQ ID NO: 11637 - DNA, 201 bp, Homo sapiens
ctaaaacgctgccctggagtcgcgtttattggacactctttagtctgtaaaggaaaaaaacacaaacaccggaggagaatcatcctaacaagccgacaacrtatctatgggcctaaaaaacttaaattctttcccgttattagcacttctcgatcgttccaggaaagcccgatttgtagcttggctgccccaggaaggggc

SEQ ID NO: 11638 - DNA, 201 bp, Homo sapiens
actaattaatggaaatctaaaaattatccttcctcttcttagaaaagaaatatactgcatgatgatttgtgcttttcgatttaatgtcacacaatcgtttwtacactgtatgtgctttccctccccacagccccagtcccagccccagtctcgcagttccattccttcagggcagcttccattctaccgtgagtttttatt

SEQ ID NO: 11639 - DNA, 201 bp, Homo sapiens
caaggataagtcagtgaagcccaaatcaccaccaagaccccttcctttcccaaagttgctatagacagatacactacctaataagggctaataagcagacraccaattttctttttttttctctctctctttttgaaacagggcctcactctatcgcccaggctagagtgcagtgccacaatcacagctcactgtagcctc

SEQ ID NO: 11640 - DNA, 201 bp, Homo sapiens
tctatataatatatattatgtttattttatttttatatgtttatatattttacttatatgtattaattatatatatttaaaaaaaaattttttttttgaaragtctcgctctgtcgctctgttgcccaggatggagtgtggtggcgtgatctcggctcactgcaagctccacctcctgggttcacaccattctcctgcctc

SEQ ID NO: 11641 - DNA, 201 bp, Homo sapiens
gcctgttatcccagctacttgggaggctgaggcaggagaatcgcttgaacccaggaggtggaggttgcagtgagccgagatcacgccactgcactccagcytgggtgacagagtgagactttgtctcaaaaaaaaaaaaaaaaaaaaaagttataggctgagtgcggtggtcacgcctgggaggccgaggtgggaggatca

SEQ ID NO: 11642 - DNA, 201 bp, Homo sapiens
tttcatctctttcatcagattttccctctccattcttctaaactctcatctctcctactaagcttttttccaacacagctaaagtttcttggattctttcraatatcatgggctccagcttctctctgctggatctgttctgattaaggggaggaagagagacctctcagctctaccttttctgctcagcatatatcttgt

SEQ ID NO: 11643 - DNA, 201 bp, Homo sapiens
tccataagaagaaatcacagataatgaaagaaagggaaaccattgaaagaaatattagaagaaaattagcttttgctgaagaaatacaggaaccttctgaytgattgaaagacacatcaatcaagcattgggcaggatagatgtttaaaaaataataaagctcttgatgcaatctcaagatgaagagacaattctaaaagc

SEQ ID NO: 11644 - DNA, 201 bp, Homo sapiens
aaaaaaaacagacgcgtgaggggaggtagtatcccactaatacttaacaaatcaaatgtttgtaacacagagaatgaatgtcttttcagaaccttgtatasagcttaatgaaaccggtatagtgaaagagcatcatttgtagtcagaccaaagaggacttgaattcttgttcatgtgatattgggtcaaatgatctaacct

SEQ ID NO: 11645 - DNA, 201 bp, Homo sapiens
gggagtggcagacagaagaataaataatgatttggggcctgagcaagtgagtggatagtggatctgttagctgaaatgggaacaactggtgggtgggcagrtttcacaggcaggtggttgagaagacagttggtgtcaagcttctgttttagacatgttaagttggagatacctattaggcatctgactagtgatctcaga

SEQ ID NO: 11646 - DNA, 201 bp, Homo sapiens
tcctacagtgctgtgaaacactaaaactttttcctcctatgtagctgtaattttgtatccattaaccaacttctggctatctccccgaccccaccaccccrtcaaaatttcaattgacaaatttaagagaacaaaatataggtttttttaattacataggcccttatcatatgacccacatattttaggtatttaactgct

SEQ ID NO: 11647 - DNA, 201 bp, Homo sapiens
cttccacagtatattggagatcagaattctctagttcacttcttgaggagagagattatcttctaactccttttttttttttttttttttttttttgctgkgtcatttacttggagcagagtcctgcacttactatgtgtatggttaatgcttgttgagtgactgctacaggaaacctacacacttgtccagaaatttcat

SEQ ID NO: 11648 - DNA, 201 bp, Homo sapiens
taatcagtttctctagaaagacagatattcagccaccttccttgggatggtgggggtggttgtgggggcaggtaacatgcttggcagacagcatttggagsctgagtaagggaagggggttggcttttatcatttagtagacatatgcatccatctaattccttacccccatttttcaccctcttctcttacctgttcatt

SEQ ID NO: 11649 - DNA, 201 bp, Homo sapiens
aaggctggggaaagagtgctccggaccaagggaacaaatgccctggtgaggacagccagatgtgcctaagttgcaggaagaagtccagggtaactggaacrtcaggtggaagagttagctcagaggcttgggccgcagccggggtatgccggacacagggcctatagtcactgttagtttggctaaataaaattgaaaatc

SEQ ID NO: 11650 - DNA, 201 bp, Homo sapiens
ccacctgctacataccaaacagtatgttaggtactgcaatggcagcatcgcactgtgtcttttcaacagcagtccagggtaaataccttaacctccacttyacaaatgagaaaacaaaacctttgtgatttcaaggtcatggaaacagtggaactgaccccactctgtccagctccaaaggccatgctcttttcaggacat

SEQ ID NO: 11651 - DNA, 201 bp, Homo sapiens
ggctggagtgcagtggcacgatcttggctcactgcaacctccacctcccaggctcaagcgattctcccacctcagcctcccaagtagctgggactacagaygcacaccaccacacctggcttctattttttgtagagatggagttttgccatgttgcccaggctggtctccaactcctgggctcaagtgatcctcccacct

SEQ ID NO: 11652 - DNA, 201 bp, Homo sapiens
gtcaattatataaactatatatcagataaattcttttttttttttttttttttttgagacaagttatcactctgacacccaggctggagtgcagtggcacratcttggctcactgcaacctccacctcccaggctcaagcgattctcccacctcagcctcccaagtagctgggactacagacgcacaccaccacacctggc

SEQ ID NO: 11653 - DNA, 201 bp, Homo sapiens
aatgatcttacttctttggagcaatggaattattttttacatttacgactatggaaatcttgggtaaaaaaaaaatcttaattttttttccttgaaatctrgtacttcattgtatcagcagtgacctagtataactcacttaaggggcctgtaacaggcaatatcaatattattgtcaattgttttaactgtcaattatat

SEQ ID NO: 11654 - DNA, 201 bp, Homo sapiens
gtgtgtgtgtgtgtgtgtgtgattcctccggtatagctgtgaataatgtgaggtaaccagagactggcagagtcagcccaggattaaacaccgtcatcagmagcaccccagtttaaagagaagattcagagcacctgcatcaggatctccttctaaagccctgaatggcaattgggagccaatcctgacattgagatcaca

SEQ ID NO: 11655 - DNA, 201 bp, Homo sapiens
gagaacattgacaactaaccagatagtgaactctgcctctatcagccaaatctaactgccaaaacactgaggaataaagtaaccactaattaagcagcctrgagttttgtttttgggttttttttggtggtggttgtttttaatacataccctgccataggatgagggcaattgtgtgaaatacatgctttgcggtgactt

SEQ ID NO: 11656 - DNA, 201 bp, Homo sapiens
tgtctgcttggaaggaaagattaatatcttgattctcttttgtcatgagtagataaggaagtgtatttttaatcagtaggtattcaaaaaatgtttactgmtggccaggcatgatggcacatgcctgtaatgccagcactttgggaagccaagctgggaggatctcttgagtccaggagtatgagaccaacctggaaaata

SEQ ID NO: 11657 - DNA, 201 bp, Homo sapiens
tcttcaggatccactctcagagcgtcttggtgtttttccagtactgccgtcatacctgtgttccctttccttttgttctctactagcacctggctgttttrgagtggaattgtgtgtgtgtctgcttggaaggaaagattaatatcttgattctcttttgtcatgagtagataaggaagtgtatttttaatcagtaggtat

SEQ ID NO: 11658 - DNA, 201 bp, Homo sapiens
gaacccgggaagcggagcttgcagtgagccgagattgcgccactgcagtccgcagtccggcctgggcgacagagcgagactccgtctcaaaaaaaaaaaaraaaaaaaaagaagaagaagaagaaaattcaggatagccaaagtatgatagttagatgtggaccctggaggagtctggaaggagtgggaccatgaccacaa

SEQ ID NO: 11659 - DNA, 201 bp, Homo sapiens
gactcagtttcttcatctgtgaaatgggaagtataatgatacctacatcattctgttttatgattaaataatacatggggaaaattaaagcagtaccttgyagctagtaactgctgcagtagtgttacctattatctttattatttctcatttcttaattttatatggcaaaatgaaaataacaagtcaggattatactac

SEQ ID NO: 11660 - DNA, 201 bp, Homo sapiens
gctcaaagccaatggatgatagggggcaagtgttagaaattacccaaggctcttagcacctggagtgttttctcacagcctcacctgtatggataattttrtcagccaaatagagtaagtggatcttagttgatcagagcaggaaacaagcttgaagccaggggtaaaaaaaaaaattaagagaagcaaatgaagcctcca

SEQ ID NO: 11661 - DNA, 201 bp, Homo sapiens
aatacaaattttcacaatgtaggtaactttgaagtgtggcttgtcaggtcatgctgacttatttttgtacttgcatagggaattggtgaggatgaatctakttttttagctaacaagtgtaacttgagaatttgtgaatgagtgacagatggggtgggaacctttttttccttcacgtattgtgaaatgtactcctgtcta

SEQ ID NO: 11662 - DNA, 201 bp, Homo sapiens
atgctatccctccccttgtcccccacctcccgacaggccccaggtgtgtgatgttcccctcccggtgtccatgtgttctcattgttcaactcccacttatragtaagaacattcagtgtttggttttctgttcctgtgttagtttgctgagaatgatggtttccagcttcatccatgtccctgcaaaggacatgaattcat

SEQ ID NO: 11663 - DNA, 201 bp, Homo sapiens
gtggctcatgcctgtaatcccagcactttgggaggccaaggctggtggatcacctgaggtcaggagttcgagaccagcctggccaacatggtgaaaccccrtctctactaaaactacaaaaaattagccaagcatggtggcaggcacctgtaatcccagctactcaggaggctgaagcaggagaaggtggtggtggttgca

SEQ ID NO: 11664 - DNA, 201 bp, Homo sapiens
gagaaacataaggccataagaaagaagaaatgctccagggaaagtcttagactgagaagagaggagggctaaagacagactctggaaaatgtctgtattcmagaaccagacgtggggctgggcactgtggctcatgcctgtaatcccaacactttggaaggccaaggtgggtggatcacttgaggtccagaagttctagac

SEQ ID NO: 11665 - DNA, 201 bp, Homo sapiens
agagaaacataaggccataagaaagaagaaatgctccagggaaagtcttagactgagaagagaggagggctaaagacagactctggaaaatgtctgtattyaagaaccagacgtggggctgggcactgtggctcatgcctgtaatcccaacactttggaaggccaaggtgggtggatcacttgaggtccagaagttctaga

SEQ ID NO: 11666 - DNA, 201 bp, Homo sapiens
attgatgttctcacttttttcttttgttgcctatttttattgtactttctttagacctcttcacctttgtcttccagaccttctgctgaatctgttatttytgctattgtatttttaatttccaagagttctttctcattctctatattctttcatggcattctgttctgtctcatggatgcaatcgtgtcctttgcctca

SEQ ID NO: 11667 - DNA, 201 bp, Homo sapiens
cagatctcatgagacttattcactactacaataacagtatggaggaaactgcccccatgattcaattatctcccaccggatccctcccacaacatgtgggwattatgggagtacagttcaagatgagatttgggtggggacacagccaaaccatatcaagtatataagcaggccagggattttaagcatttgcagtgggtg

SEQ ID NO: 11668 - DNA, 201 bp, Homo sapiens; identical to SEQ ID NO: 4360

SEQ ID NO: 11669 - DNA, 201 bp, Homo sapiens
caatctcagctcactgcaacctctgcctcctggttcaagtgattttcctgcctcatcagcctctcaagtagctgggattacaggcttgtgccaccacgccyggctaattttgtatttttagtagagacagggtttcaccacattggtcaggctggtctcaaactcctgacttcagatgatctgcccacctccgtctcccaa

SEQ ID NO: 11670 - DNA, 201 bp, Homo sapiens; identical to SEQ ID NO: 4361

SEQ ID NO: 11671 - DNA, 201 bp, Homo sapiens
tggaatgcaatggtgcaatctcagctcactgcaacctctgcctcctggttcaagtgattttcctgcctcatcagcctctcaagtagctgggattacaggcwtgtgccaccacgcccggctaattttgtatttttagtagagacagggtttcaccacattggtcaggctggtctcaaactcctgacttcagatgatctgccc

SEQ ID NO: 11672 - DNA, 201 bp, Homo sapiens
tacattgttactcactggtgtgggaacaatgtatgttaatgacataagtactgcccttgagagtactgcccaaaacagccccaggttgaaaatgtatcctyacagatttaatttttcttataaaagaaagaggtatgttccttctgtgtagagcgaactagaaatatattaaccctgcaactaacatgcagcacttcacaa

SEQ ID NO: 11673 - DNA, 201 bp, Homo sapiens
catgcttttagttatttttaaatgtacaattaagttcctattgactatagtcacccttttgtgcagtcaaatactgggtcttattcattcttctatttttktgtacccatcaaccaccctcacctcccaccttgccccccactgtccttcccagctctaactaatttttttagtatttatggagacagggtctgccatctt

SEQ ID NO: 11674 - DNA, 201 bp, Homo sapiens
aaaggagtattttaaatttatgtttgacatttaatgatttcagatagttcttggacatcaggataaacaaattcagtgtagcacatacgtagtataagaaytctgttgatataatgccgcagtcatagttgtagcccattattccaggtaataatgatgctacaattagaaagttttccaattgtagttttgatttgcaca

SEQ ID NO: 11675 - DNA, 201 bp, Homo sapiens
aatggtctatgactagcctcttcacctcaggccagccttgggttttgtcttctgtctcttgttttcatgaggccatgaaaactgaagctcattctctagcytctgagaaattccctcagggtaaaacagctttaagtgctctgctttccactctgtgttcccacttttatttaaattttcccttataaatccttcttcttc

SEQ ID NO: 11676 - DNA, 201 bp, Homo sapiens
tatacatatatatgtgtgcatatatatacatatatatgtgtgcatatatatacatatatatgtgtgcatatatatacatatatatgtgtgcatatatatayatatatatgtgtgcatatatatacatatatatgtgtgcatatatatacatatatatgtgtgcatatatatacatatatatgtgtgcatatatatacatat

SEQ ID NO: 11677 - DNA, 201 bp, Homo sapiens
taaccagctgttaagcataattactgtggttttgccagaaaggaattctaaatgcaggaaggtttgccattagtgggccacagaacatgaaagacttccckgcaaaccttttagaaaatttatgctagtttatatttcaggaggtaatacccattggatatactctaatttgggaaacatgggatgattaatgaattgata

SEQ ID NO: 11678 - DNA, 201 bp, Homo sapiens
catttgaagagttagcaaggaatgtgatgaagactgaatatcttgaaacaaagtttggttgtgcagttgctctgctatgaattatgggtctgattcccctytttatatgtggcttttggattttcttctgcccttgaggtaatctgctcctcctttcattcaccgtgcttttaggtttggtttcagatacagcatcccttc

SEQ ID NO: 11679 - DNA, 201 bp, Homo sapiens
gttggcttactgagggaaccacacagtggcagtttctacaacttggccagctgccctgggctggcagttgaggagaaaatgcagcagtggggttgagtagrcacctcagccacggagtgacagtcattgtgttctaggtaccacctgaccgctctctgtctgctccttctgtggctctataatatctgagctcctgggtaa

SEQ ID NO: 11680 - DNA, 201 bp, Homo sapiens
gaagaccagtttatttgggaaagcaattccaatggaaaagtgcggttggcttactgagggaaccacacagtggcagtttctacaacttggccagctgcccygggctggcagttgaggagaaaatgcagcagtggggttgagtagacacctcagccacggagtgacagtcattgtgttctaggtaccacctgaccgctctct

SEQ ID NO: 11681 - DNA, 201 bp, Homo sapiens
cgacataactgcgttgcagcaaaaacggcaggagagtgcaggtctctaagccaagtcttggactaggttcttgattccaacagttctccagtgatgcttcygaagacactgggctgaaagtgaacagtgaccctctttcccgaatgtctataattttctcaatttaaaatttttctcctaaaagacaatggctattttaat

SEQ ID NO: 11682 - DNA, 201 bp, Homo sapiens
aagagcttagggaaaggaggaataagaggaggtagttggctaccaacagacatctgaattcttaaccaatgaagagaaaaaatgtaaaagtggtcccagcygcttgggagaatgaggcaggaggattgcttgagcccaggaattcaaggctgcagtaagctgtgattgtgccactgcacttcagcctgggaaacagagcaa

SEQ ID NO: 11683 - DNA, 201 bp, Homo sapiens
gccagtctaaaactgtcctccataaaatagggaaatacactttgggaatttcataagctaaacactatttccacattggtcaccatggtgaacacaaatawgcaaaatcgactgaatggtaacaaggcagggagagaacgtgcttcctataggatttgatctgctgcttattctgatcaaagtggaaactgtaaaggttgg

SEQ ID NO: 11684 - DNA, 201 bp, Homo sapiens
caggatctttctatgttgtccaggctggagcacaatagctattcacaggtgcagtcatagcacactacggcctcaaattcctgggctcaagagattctctyacctcaacctccagagtagctccgactacagatgtgtgccactgtgcccaacttttagagattttttttttctggctcagaaaaaatccctctcagtatg

SEQ ID NO: 11685 - DNA, 201 bp, Homo sapiens
aacacaaatatgcaaaatcgactgaatggtaacaaggcagggagagaacgtgcttcctataggatttgatctgctgcttattctgatcaaagtggaaactrtaaaggttggttggagcggatagcccaatgcctgcccagtaacagggctgcaggaattaacacggtggacgagggaaggtacagaccattttcggtggct

SEQ ID NO: 11686 - DNA, 201 bp, Homo sapiens
cgagggaaggtacagaccattttcggtggctaaatgagaaataatactaagcgataggatatcctgtatgtttagattacttgcctctgaaaacgagctcyaattctttttcagaacaagtattgggaacaaactgtggatatttaatcacttaagggtactttcttctgggaaaatcgctcactcttaatttttcagttg

SEQ ID NO: 11687 - DNA, 201 bp, Homo sapiens
acccatttcatagatgaggtgtaactaacaatgtagcttcaattatactggcaggtcacagaaaagagatttgcaaccagccttatgcctctcctcccacstctctctactgacccacatctttttatgaagtagggattgcagccatcccacagctcatcaatgctgtcatgtctatgcacgaaggcactcttagataga

SEQ ID NO: 11688 - DNA, 201 bp, Homo sapiens
gtgtaagcatccctctgctgaaccactgtatcattacagtgtgcgttaagaatgccaataggcatggaacagatgccagataaccaagatggtacttttastgggtctggcattaaacaaagaaatgtgttcataagtcatctttcttggatctcaaccaaaaattgttattttggattttgtcatctttccatttaaatt

SEQ ID NO: 11689 - DNA, 201 bp, Homo sapiens; identical to SEQ ID NO: 603

SEQ ID NO: 11690 - DNA, 201 bp, Homo sapiens
tactttccttcgatatcttttctttcttccaaccttccaatccaaactgaggtggtggtattccccaccaccaagaaaggcatagtttccattttttctcyaccagttctagtacatgcaattaaattttctgagcccaaaatttctcatctctgaaataaggagcatgaaactctgtgcgtgggtgcatatgaagctaat

SEQ ID NO: 11691 - DNA, 201 bp, Homo sapiens; identical to SEQ ID NO: 4339

SEQ ID NO: 11692 - DNA, 201 bp, Homo sapiens; identical to SEQ ID NO: 604

SEQ ID NO: 11693 - DNA, 201 bp, Homo sapiens
tgccatagtcttcatatagactttgtatattcttattccatatccctatgttataacaggcatcagacctatcatttgacaccaacagctggcatccaagmccacaggaatgatgcccaaagcagtctacacccactccccactagggcccaggaggaagtgtgtttgcagccctgacctaaatccacttgtacctttctc

SEQ ID NO: 11694 - DNA, 201 bp, Homo sapiens; identical to SEQ ID NO: 4346

SEQ ID NO: 11695 - DNA, 201 bp, Homo sapiens
tcaataaagttttgccatagtcttcatatagactttgtatattcttattccatatccctatgttataacaggcatcagacctatcatttgacaccaacagmtggcatccaagaccacaggaatgatgcccaaagcagtctacacccactccccactagggcccaggaggaagtgtgtttgcagccctgacctaaatccact

SEQ ID NO: 11696 - DNA, 201 bp, Homo sapiens
tacaaaagcaagcagtgggccagatttggactatggaccatagtttgccaacccctagtctaaagaaaacagcatttctactcacaaattttatatatatrtgtgtgtgtgtgtgtgtgtgtgtgtgtgtgtgtgtgtgtatagtactgtttctgttgaacagataaaaccatatattcatggtagctgcagaaagcaaaa

SEQ ID NO: 11697 - DNA, 201 bp, Homo sapiens
tgagctgttggacctggatctcctgaggccaactgtgtttttcttctcagcacagcaagcatcctttgagatgcagagtgatcttaccacttgaaaatgtrcatcaagggcaactgcagaattttccaaaagcttaagcacagatggcaaatctggcaaagtcaaattgagaacactgactacatgttcaggaggaaagtt

SEQ ID NO: 11698 - DNA, 201 bp, Homo sapiens; identical to SEQ ID NO: 4347

SEQ ID NO: 11699 - DNA, 201 bp, Homo sapiens
gcactgcagtggcgtgatctcagctcactgcaacctccaccaccggggttcaagcgattctcctgcctcagcctcccgagtagctgggattacaggtgtgygccaccatgcccgactaattttggtatttttggtagagatggggtttcaccatgttagccaggctggtctcgaactcctgacctcaagtgattcgcccac

SEQ ID NO: 11700 - DNA, 201 bp, Homo sapiens
tttttttttttctttttgagagaaggtctcactctgttgcactgcagtggcgtgatctcagctcactgcaacctccaccaccggggttcaagcgattctcytgcctcagcctcccgagtagctgggattacaggtgtgtgccaccatgcccgactaattttggtatttttggtagagatggggtttcaccatgttagccag

SEQ ID NO: 11701 - DNA, 201 bp, Homo sapiens
acattctttttttttttttctttttgagagaaggtctcactctgttgcactgcagtggcgtgatctcagctcactgcaacctccaccaccggggttcaagmgattctcctgcctcagcctcccgagtagctgggattacaggtgtgtgccaccatgcccgactaattttggtatttttggtagagatggggtttcaccatg

SEQ ID NO: 11702 - DNA, 201 bp, Homo sapiens
acagagcaagactgcatctcaaaaaaaaaaaaaaaaaaagatagcaaatacatccatcatcctcaaaaatttcttcctaccccattataatcccttcctcytgccacctgctccctcctggtaaccgctgatctgttttctgtcactatatatttgtcttcattttctaaggttttatataaatggaatctttccgtatat

SEQ ID NO: 11703 - DNA, 201 bp, Homo sapiens
gggtcactggctggacgtttaatgggtttacattattccttaacagtcattgtttcaaaatgaggcatctctgatggctccatgctggcttgtctctttcygcctatgacattctctcaagagtttagagtaggagaggattttagaacatgatagtaacaagtaaaattagtattttttggactccaggtacctgtttga

SEQ ID NO: 11704 - DNA, 201 bp, Homo sapiens
gggactataggcgcctgccaccacgcccggctaatttttttgtatttttagtagagacagtttcatcgtgttagccaggatggtctgatctcctgaccttrtgatccgctgcctcggcctcccaaaatgctgggattacaggcgtgagccaccgcgcccagcggaaaagattttctagagtttagtgctttcaaattatct

SEQ ID NO: 11705 - DNA, 201 bp, Homo sapiens
taatgttatatgcatagttgcctccaacctaagccagtgcctgataaatgaaaggctttgcactcttaattgaacaaattccttggttccagtactttacygttcattgaaagccaggaagtactgggacaaagaaattattagagttgataataaaagagtaaacagcatactcattattagcagcgtactttctcattt

SEQ ID NO: 11706 - DNA, 201 bp, Homo sapiens
ttgaatttctgatcttagaggaaaagctttcatttcttcgctgtttatgatgttagctatgggcttgtcatatatgcctttagtatattgaggaacatttmtttgatacctatctcgttgagaattcttatgaaaggagttaattttgtcaaatgttctttctgcatctatggagatgatcagataatatttatccctcat

SEQ ID NO: 11707 - DNA, 201 bp, Homo sapiens
tgttagtgtacagaaacacaactgacttttgtatgttgactttgtatcctgctactttactgaatttgtttatcagattttttgtggagtcgttagggctytctatataaaagatcagatcatctgtgaacagagactatttgacttctcccttttgtgatctgaatcccttttattcctttttcttgcctaattgctctg

SEQ ID NO: 11708 - DNA, 201 bp, Homo sapiens
gtttgcttttcttcacgcccttgccaacgcttaatcttttgtctttttgatagtagccattctaacaggtgtgaggtcatatttcattgctgttttgattkgcatttctctgattagtgatatcaagtgctttttcatgtatttgttggccatttgttttctttgaagaaatgtctgttcaagtcctttgcccatttctaa

SEQ ID NO: 11709 - DNA, 201 bp, Homo sapiens
gcaggattgtgctggattttatgctagttctatttttttttttgagcaaccttcatactgttttccataatggctgcaccagtttccattcccaccaacartgtacaagggtttgcttttcttcacgcccttgccaacgcttaatcttttgtctttttgatagtagccattctaacaggtgtgaggtcatatttcattgct

SEQ ID NO: 11710 - DNA, 201 bp, Homo sapiens
tctcacttataattagcagccaaaaaatgagaacatgtggacaggaggaggaaaacaatggaaactggggcctactggagggaagaaggttggaggtgggwgaggttcaggaaaaaaaaaaaactgtcagatactatgatttgtacccatgtgacaaaataatctgtataccaaaccactgagtcacaagtttacctatat

SEQ ID NO: 11711 - DNA, 201 bp, Homo sapiens
tggggcaggagggcagatcccttatggcttagtgctgtcctggcaatagtcagtgagttctcgttaaaagtgtgtggcacttccctgccactctctctctsttgctcctgctctcaccatgtgacctgcctgctcctgcttcaccttccaccttgagtaaaagcttcctgaggtctcctcagaagctgagcagatgctggt

SEQ ID NO: 11712 - DNA, 201 bp, Homo sapiens
ctgtgttgcccagactggtcttaaactcctggcctcaagtgaccctcctgcctcagcctcaccagtagctgggattacagatgtgagctgctgtatgattmtgtctcgcataattggatatattttaaatggtaaacttgatctgtataatatttggacctccctcaaaaaacaaatcattcatgaagctttggaaaggct

SEQ ID NO: 11713 - DNA, 201 bp, Homo sapiens
atctggaggctcaactggggaagaatgggcttccaagctcctttaggttattagcagagtgcatttccttgtggttatatgaccgggccttggtctcttaytggccatttaatggaggctgccctcagttcctagaggccactccagttatctgccatgtggccctctccagaggcagttcacagtgtggcaatttgctgc

SEQ ID NO: 11714 - DNA, 201 bp, Homo sapiens
agaggccattatccttagctaactaacacaggaacagaaagccaaatactgcatgttctcacttataattagcagccaaaaaatgagaacatgtggacagraggaggaaaacaatggaaactggggcctactggagggaagaaggttggaggtgggtgaggttcaggaaaaaaaaaaaactgtcagatactatgatttgta

SEQ ID NO: 11715 - DNA, 201 bp, Homo sapiens
acaactctgtaagttggaaaaatctaaaaacaatgcaaattatactggtgcatagatatacaaatgattttttttctagtagaaatgctatagttttccaytcttatgattccaaacattgtattttattgctctatagatattaaccagtttcaaatctattaccaacttcatatcagcatgcctgattgcctacatgtg

SEQ ID NO: 11716 - DNA, 201 bp, Homo sapiens
ttaagtaggattttaaaaataagtagaagcaaaacgggaatgataattgaaaatgtatagaattataaaatgtgcctcatgatttgaagtatagatccagkgaattattctgagtaagtaaacaatccacttccttttttctatctggaatctaataaaatgttttaaaggctttgcccttaaaatgaaaaggtaagtata

SEQ ID NO: 11717 - DNA, 201 bp, Homo sapiens
tcattcttttttatgcctgcatagtattccatagtgtatatgagccacatttaaaaatatggaacgcttcacgaatttgcatgtcatccttgtgcagaggycatgctaatcttctctgtatcatctcgatcttagtatatatgagctgccaaagcaagcacaggttcctggtttttaattgtttgtttgatatggaattta

SEQ ID NO: 11718 - DNA, 201 bp, Homo sapiens
cactccatattaaagataggaaagaaaagtttggggagttgctaagcatgagaggcattgttgataaattatcttgagatccagatattagttgagcctcrctcgcaactgaaagaatcaagcctaatggacttttctgcccagtgccagactggaaagatttaaactcttgaaggtctctaaggattcccaactgctttt

SEQ ID NO: 11719 - DNA, 201 bp, Homo sapiens
cagaggttgcagtgagccaagatcatatcactgtactccactccagcctgggtgacagagcgagactctgtctcaaaaaaagaaaaaaaaaaagttaactsaaaattatttgatttggaaaaaaatggtaaagtagacatcactggctaaagattgaattgaaacactggtactttcttactaatagcatttcacagatca

SEQ ID NO: 11720 - DNA, 201 bp, Homo sapiens
tttccccccttttgcgcggtactgctccttgctgctgccatgtgaagaaggacatgtttgcttccccttctgccataattgtaagtttcctgaggcttccycagctgtgctgaatgtgagtcaactaaacctctttcctttataaattactcagtcttgggtatgtctttattagcagcatgagaacagactgatacagtg

SEQ ID NO: 11721 - DNA, 201 bp, Homo sapiens
ttagccaggatgggctcgatctcctgacctcgtgatctgcccgcctcggcctcccaaagtgctgggatcacaagcgtgagccaccacgcccagcctgtaartatttttttaaaagacgtgcagatagaaattatcttaaataattgcttacaagacaaagagaacgacctgcccccaagtcccccagataaagtaggatat

SEQ ID NO: 11722 - DNA, 201 bp, Homo sapiens
ccaccttagcctcctgaagggctgggattacagaaatgttttttgttgttgttgttggttttgttttatttttttgagacggagtctcgctcttttgcccwggccggactgcagtgggtgctatcttggctcactgcaagctccgcctcccaggttcatgccattctcctgcctcagcctcctgagtagctgggactacag

SEQ ID NO: 11723 - DNA, 201 bp, Homo sapiens
acatagatgttttgatttttgatgaaatcaatcaaagacaaaaaccatgcgttacccaatgtaggattaagcttttagaaggaagctatgggtgtttgatytaatggtgatttcttaaaagtgtttatcattctatctaaaagaaaagatgaattcatttgctttagtgataaaagactattcagtggtttttgtaaaggc

SEQ ID NO: 11724 - DNA, 201 bp, Homo sapiens
agaggacaacactctggggcagtcacttcagtcataggatatttccctctccaaataaccgaggagagagcctaacctctggggtgagtgtggtgtataaagtgtgagaatcgtgcgtgtccaggaagagagtgctgctaacagatgactccttgggggccccctttgttctctgcttctgtttgtattgagtcagcttgc

SEQ ID NO: 11725 - DNA, 201 bp, Homo sapiens
aatttgagatgagatttgggtggggacacagagccaaaccatatcaccactctaaccccagattttttattggtgaggtctgacttggggatgaagaattsgcatttctaacaagtctctcggagctgccgttgctggtcttgaaaccacaactttcagaactcctggtctacaatgcttctctcagtttcatgcacctat

SEQ ID NO: 11726 - DNA, 201 bp, Homo sapiens
taaatgtagtactattagaatcatcatatgaccacaaaagtaaacataactggaagatagaataggaatgcaaacctgaagcctgtggctccttgattatkatgctcccttgtgatgcagaaagggaatgggaacaaacattcgctaatgtgtgctaagcccattcacatatactattagtttgttaaataagacatattt

SEQ ID NO: 11727 - DNA, 201 bp, Homo sapiens
ggaaaccgcccccatgatccaatcatctccctccctcaacatgtggggattataatttgagatgagatttgggtggggacacagagccaaaccatatcacsactctaaccccagattttttattggtgaggtctgacttggggatgaagaattggcatttctaacaagtctctcggagctgccgttgctggtcttgaaacc

SEQ ID NO: 11728 - DNA, 201 bp, Homo sapiens
acatctcccttgggcctcttatgggtaattacagaatctgtcaaatagggctgatctgcctggagagacaaggagcacagcatctatggaacagggagttsggcagaaagtttagcaaagaagcctccaggatggcaatctgagtcatggccagatgtcaggcgagaatgcgtttccagcacatcgctgtgatgatttaag

SEQ ID NO: 11729 - DNA, 201 bp, Homo sapiens
gatacagaggccaaatttatcccagggaaggaataagtacatttgaaataagtcactgagaggagaagactgtgtgttttaaagccaggtttgtttaaagkgttatgatagtattaagatgttctttcattttcatagaagtacttcatttggctagaaggtcaaatgcctggtgctttgaggacctgaacagtttctgtt

SEQ ID NO: 11730 - DNA, 201 bp, Homo sapiens
gtaatatctttaaccctgtgcttagtaaatagtaaatgctcaatgaatattagcgatcattagtagtagtggtagtcatagtagtgtgttttcttatggtyttactctgtttgggctgctgaaaccagccattatagactgggtggcttataagtaatagaaatgtatttctgctagttctggaggctgggaagtcccaga

SEQ ID NO: 11731 - DNA, 201 bp, Homo sapiens
tcctatggtctgttcataaagcataaaggtacccttcccaattatacgaagctgcataccattattggtgtggaaaaacagtaaccctggtattgtatttmtaaatgcttgagactactaacataatcttgatcactatgttcatttatccttggaatacaaccttttacgtttgaatcttaattaaagagaaaacaactt

SEQ ID NO: 11732 - DNA, 201 bp, Homo sapiens
ggtatcttccttttaagttgtgtaaaaacaagacttttgcctaagtgtaagaccagaattttgcaaaattctggacctgcctctctggcctgcctctctcmggttttgtgtagggcagcaggaggcctggcaacgtgaatgtctccaaatcctacttctgctctaaactgagattttgtggtttctttttttttttttttt

SEQ ID NO: 11733 - DNA, 201 bp, Homo sapiens
aaccagtcttcattgacagctgactttatttttcgatttgtcagagcacgccaaagcccagtgccctgtgaccaggacaaaaggggaagtggctgcatttygacatgtcccagcttcactagagaaagcccacttgtttctgactttccagtgcgggcaaaagctggcagatccaccacctgtgctcttgctgcccagcat

SEQ ID NO: 11734 - DNA, 201 bp, Homo sapiens
gcaggtctgatttctcagatccagcaacttcaatccttggaatattagattaactctctcagcctgtgagaggaaatcaaagtggtggcagaaataatccmggagctcagactgaaatcatttcctcatgagctttttattttcatcctctctggtttccaaaactcaaattccttacttagtatctctctaaagcctgag

SEQ ID NO: 11735 - DNA, 201 bp, Homo sapiens
tgatcatggattgggtgggggtggaggacaagaatgaaagaggactgagatggctgaaggagcctctatggaagacacagagcatacacgagacttgtatstagcaagcgttaagaagagtccacaatgttcgataatttttattttgttttaatatgtgttctatctacttttcattttttatttttatttttttgagat

SEQ ID NO: 11736 - DNA, 201 bp, Homo sapiens
tgctgaaagttctgtgccaggccatggtgggctggcctgaggcctgatcccagaaccctccagctgaaaggaatgttagagctcagccatccagcccctcygcagaacacatggggaaactaagagagtatgagaattttgtctcaagacctcatttccaagaggactcaggacctgatgaggtctttgttatatttaaag

SEQ ID NO: 11737 - DNA, 201 bp, Homo sapiens; identical to SEQ ID NO: 4348

SEQ ID NO: 11738 - DNA, 201 bp, Homo sapiens
tggggctaggggaagacttcaggggtgtatgcgtataccactttccaagaagagattggaaatgtgcagagttatcacatggtgggtatcacaatggatgraaagtgattgtggcatttagtaggatggggtgtttaacaccttgcaatactgaagccaccacggtgagaattgttccatttgaacacccattgcatccct

SEQ ID NO: 11739 - DNA, 201 bp, Homo sapiens
ttagaaatctggttttatcggcagaatgcaagattcttgaaggtaaatttcatgctatgaacatcagccttccacaactgcttattgagtagactactaarccaaagaatcttaaagctttctctgtagattttaaacctgaagagaagttaatgttctgaataattctattgcctcgagactactgtagatgactgagtt

SEQ ID NO: 11740 - DNA, 201 bp, Homo sapiens
gtggtaaaatttaagaaagttttcaaggatgaaccggagtttgaaaaacagaaagagggctggatgcagtggctcatgcctgtaatcccagcactttgggrggccaaggcaggtggatgacaaggtcaagagatcgagaccatcctgctaacaaggggaaaccccgtctctactaaaaatacaaaaattagccgggcatgg

SEQ ID NO: 11741 - DNA, 201 bp, Homo sapiens
ggatccattttaaaactaagataacttttttcccctaaacgtaagcactatgtccaagttatcaatcaaatttatctgctttgatagttgactcattacayacctgaaactggaaaagttttcttccattcacaattcttaggttagcttaatatttacgtaacttatcaaccattcaattagaagtttttaagtatatct

SEQ ID NO: 11742 - DNA, 201 bp, Homo sapiens
aagaaaagagccatgattgattctttagtggtcctcatgagaaaactgtgctgtatacattcccagcccactttgtggtgtcacatgaggaagagccagcrtctttactcttagcaacaaccttccttgttgcaacttgtgagggcctgagctacagtgcctcctctatcaaagccattttgctgggtttctctttctttt

SEQ ID NO: 11743 - DNA, 201 bp, Homo sapiens
aattttccatttgtcctgagtccggaatttgcattgccaggctgaatgacatccatttcattggtcagcctctcaagtcagaaatgcttccatatagcatktcttctctttctttttcctttttccttccttttttttagagaaaattataaaactttattaaaagacattttaaaaggcccaaataaatggagacatatg

SEQ ID NO: 11744 - DNA, 201 bp, Homo sapiens
gattttatttcaaaccaaatagatactgtctttgtaaatgctgaaatgtttggtttttgtttttagcccagaagaaaattcccataaatacaaacccattytggccacctaagaattttgtcctagaagtggcatgctttctttcccttacgggttttaaaacttggccacatggtatttttaagttggcaaagtaatacc

SEQ ID NO: 11745 - DNA, 201 bp, Homo sapiens
atgctgtggcagtggtttcgggctgagcaaaacacgcatagcatgctgaccagagacagcagcagctgtgaggctcatctgtttcccaacacattttctaractgtgaagtccccttggaggaggactgtccatgaattccaagcatggaaggaatctgaccattctttttcattttaaaaccacattacctttgtcctag

SEQ ID NO: 11746 - DNA, 201 bp, Homo sapiens
ggaatttgcattgccaggctgaatgacatccatttcattggtcagcctctcaagtcagaaatgcttccatatagcatttcttctctttctttttccttttyccttccttttttttagagaaaattataaaactttattaaaagacattttaaaaggcccaaataaatggagacatatgacatgcttgcagactaatagacc

SEQ ID NO: 11747 - DNA, 201 bp, Homo sapiens
aagaagatttatatgtgtgtgttcttcttttcaaaaggcagatttaggtaccttttggagcacaattggaatatgcaaattgctgaccacaattgctatartgtattacattctatgcatgcaaaaaagaataccagggtttgttctctcctcttttaaacacccagatttaatctgacctacaaagcaaatagggctaaa

SEQ ID NO: 11748 - DNA, 201 bp, Homo sapiens
accgagtacaaagtaaacaacttactttactgtcaaaagttttactgcaatatgttgcggggcttactactagaacaaccattcaataattgtctgtctayttaacgggcggattttatttcaaaccaaatagatactgtctttgtaaatgctgaaatgtttggtttttgtttttagcccagaagaaaattcccataaata

SEQ ID NO: 11749 - DNA, 201 bp, Homo sapiens
actattctaggccagagtttaaagcaacatgggcccttttggttttatgaatatattagtttattagtttttatttctattagtaaccaataaatatatarcaaaaaaatcattaggctttatcgacctagtgataaagagaaaattagaggtacatagataatttccatcataattgatcatttttagaaattctatagc

SEQ ID NO: 11750 - DNA, 201 bp, Homo sapiens
atagagaacgtttttttttacacaccttgttacacctcacaattgagcctcaacttgagattcccttgcccagcaaagtccagaattcaccactgtctacmtgctggacccaattcgttttgctgtcgttgatcactaatttgggaattgtgggagggagaggaggagcgaatccctctctttactttagaactggtaaaa

SEQ ID NO: 11751 - DNA, 201 bp, Homo sapiens
gggcagggcagcgttaaaaaggtagggaagagaaccagcgtgacacagattggcaggtcctgttagacacaggttctcagtgctacgaataatcagataaratgtgtgcccctttgaagtgacattgtgaagcgtgctgtgatgtgaaatgtggaattgttcctggtaatcacatagggtaaagcccttggtgctgggacc

SEQ ID NO: 11752 - DNA, 201 bp, Homo sapiens
tagaatataggctgaagaagatagtgcaagagagaaaaatagatcatgcaggagggaggagagtaagatggggaaaggaaatggaatctgtactagatggygagagggtaccctcaagaactagctggcagagagagcttctcaagaatttcctatgtaaataggaaagatccatgtaaacatgtaaaataaatacagaca

SEQ ID NO: 11753 - DNA, 201 bp, Homo sapiens
ggagagagggtggattaccacttaatagatgagtaaactgaggttcaaataattcaatgattttccaaaagattcagtattcaaactacagtctatacttyttaattcttaactgggttaccttctactaccagaagtgctgttgattttctgtaattgagattcagataaccgaacccacatatcctaggccagtggttc

SEQ ID NO: 11754 - DNA, 201 bp, Homo sapiens
ttccgacacagacctaatgagcttctgagagaatgcctggcagactcagtcctattcagtgtgttaaatagagggtaagaaacaaagttctcaactgatasagttttctgtaaagctctattgtttctgcgagttaagatatactattacattggtcaaaggatatttgatcttccagctaccactttggttaactggaga

SEQ ID NO: 11755 - DNA, 201 bp, Homo sapiens
attaaaatgttaatatcttaattatttggcaaaaataaaatctaccagaaattcctattatggaaaagtccataaatattgagtctgttctaataaatttmttttatctgctagtatgtacataaaaattatatccattcagcatcaaataatcagtgatgcttaaaggatcttctaaggttattttaccacccctggttt

SEQ ID NO: 11756 - DNA, 201 bp, Homo sapiens
aaaaaaaagtagaaaaccattacatctggatgtctctaaatcatggtttaatgaatatgttcaaagacaacactcacagaaaggttttcccccacagtctkgaaatgtaaactcattcctaagtaatgagtatgtcttataagtatcaccatgtcctccctcagcctttattacctattgaatgctcaggggtgtttcagc

SEQ ID NO: 11757 - DNA, 201 bp, Homo sapiens
gaaaagtgaaacccagacctcttgaatcacaggccagtaaagtcttccagggttaatgaataaactccattagcatcctagcatctctaccgctctgccamaattcttcatgatgtcctgtggcatatttagacacacgataccagatcaccatcatcttgggttaagaagctaacaaccacttacataagtgaataaatc

SEQ ID NO: 11758 - DNA, 201 bp, Homo sapiens
tgtacacatggacatagtgaatggaataatatacaatggagactccaaaaggtgggaggatgggaggggggatgaaaaattacctatcgggtacaatgtaygctatttgggtgatgggtatactaaaagccaagactgtaccactacataatatgtccatataataaaactacatttgtatcccctaaatctataaagttt

SEQ ID NO: 11759 - DNA, 201 bp, Homo sapiens
aaggagtttatcagatcaccctcaattacatcactttgggataatttcatacccaaggaaatttgaggcatttttgccttggaaaagagcaggtgccttaygaaaaagaaactagatttgtgagaactgggcttatgtttcaaatttatattctcaactttactctgaagagatggcttggaagaagtgacggtaacacag

SEQ ID NO: 11760 - DNA, 201 bp, Homo sapiens; identical to SEQ ID NO: 605

SEQ ID NO: 11761 - DNA, 201 bp, Homo sapiens
cctttactatgacattatcatagttcatagtatccaaatgtgactcacagggaattcactcaacagttactgagatacctgaattaacatttctaggtctyttgttcaaatgttaataaagccagtgcttcttagaggcgaggtgaggttagataaggtcacgtagactccaacataaccagtgtctcaagtgaggtgacc

SEQ ID NO: 11762 - DNA, 201 bp, Homo sapiens
agaggaactctcaaatactaagtacaaaatcctgtttcctcccttgcaatccagctcccgcaacatagactttctattagtggtctttcccccttccccaraagataaccatgaagcattctttgtgctaacagcacagctttaaagagaagtaaaccaaaactctgttctttatataggttgatttttaagaactctcaa

SEQ ID NO: 11763 - DNA, 201 bp, Homo sapiens
aaaatgcagttcattccaaagcagttgatttaatccctcattatccatttatgtattcagcatcatggcccatcttgacaccttattaataaattattcaraagcttacctctggatagcatagttgttaagacctagggatccagtcaaaaagagggatcgattgcaggctcagatgcaaattaactctataacctaaga

SEQ ID NO: 11764 - DNA, 201 bp, Homo sapiens
gtggatcttgcagtgaactgagatcatgccactgcactccagcctgggcgacaaagcaagactccaactcaaaaaaaaaaaaatggctgtggctaatgagygttttagggaaaatgacaattaagctaaactgctaaagctggagatgatggataagacaaggatgagaaaaagaagaagacagaagaatttctaggaaat

SEQ ID NO: 11765 - DNA, 201 bp, Homo sapiens
aataaatccagatcatttaaaaataagtgatagtacacaaagaaatattttccattcactactctgaaatccttatatttctccagagatgaatgtcattsaataggtattttagcacgtttcttttttgcacgtcaataaaaaaaaattcttttctctcctttcccataatccctatatcaaaaaagagtacaagttaaa

SEQ ID NO: 11766 - DNA, 201 bp, Homo sapiens
caggaggtcttcgtatcctcaggtaggtctacagaaacacaatttagttttcctttcatcatgcaaacacaatgctacacctgcactaatcatctgtgctyaaagccaatggatgatagggggcaagtgttagaaattacccaaggctcttagcacctggagtgttttctcacagcctcacctgtatggataattttatca

SEQ ID NO: 11767 - DNA, 201 bp, Homo sapiens
gaaagggaatctgaaagagacaaggtgaaggattagaagcagatggcatgagaaacagttccaagaagcaatgagaaaaggcagagctggtgatagttcastgctagagaccattaaacatccatatcccaaatggttccagatcagacctcccagggaatgaaattaatatgcaacagtctcctcctttgccagctgctt

SEQ ID NO: 11768 - DNA, 201 bp, Homo sapiens
tagagacttgagggagattcatggaggccaaggtgcattcagtagaattccataagaagaaatcacagataatgaaagaaagggaaaccattgaaagaaayattagaagaaaattagcttttgctgaagaaatacaggaaccttctgattgattgaaagacacatcaatcaagcattgggcaggatagatgtttaaaaaat

SEQ ID NO: 11769 - DNA, 201 bp, Homo sapiens
ttccccaaaagataaccatgaagcattctttgtgctaacagcacagctttaaagagaagtaaaccaaaactctgttctttatataggttgatttttaagarctctcaaactgtcaattcactggaagctcagagccactgaaagctcagagccactagaagctcagagccactggaagctcagagccacttctccagcctt

SEQ ID NO: 11770 - DNA, 201 bp, Homo sapiens
caaacctttgggagttgagggagaagactggctttttactttctaccttgctgttgttttaatttttaagatcatcttttattacttttataactaaattmttttaaaaatatctttcccttctaattaattctatccatggacagaattaattagtaggcaaagagactagacgctgttacctaattagaatgttattat

SEQ ID NO: 11771 - DNA, 201 bp, Homo sapiens
gagaagtaaaccaaaactctgttctttatataggttgatttttaagaactctcaaactgtcaattcactggaagctcagagccactgaaagctcagagccwctagaagctcagagccactggaagctcagagccacttctccagccttccactttctgtgtctggaccatggaacatctctcttctgcagggctgttccct

SEQ ID NO: 11772 - DNA, 201 bp, Homo sapiens
ctccgccacagttgtaagagagagacatttctacctccataatggtgtagatgattgaatgcaaatggcaggagggcaaaaaaaaaaattaaatgaagtaratgaaaatgagctaaatgtttgaaaatgagctacatatttaattatattaaatactgtatattataccctgtcccaagagtctgagtcatcatttgaagg

SEQ ID NO: 11773 - DNA, 201 bp, Homo sapiens
tccttagtgtaaatgactatttcctttactctcttttaatagaactcaagattggccgggtgtggtggctcacacctgtaatcccagcactttgggagggygaggcaggcggattacctgaggtcaggagttcaagaccagcctggccaacatggtgaaacctcgtctctactaaaagtataaaaaaattagccgggcgag

SEQ ID NO: 11774 - DNA, 201 bp, Homo sapiens
atatttatgagcttctaaagagccactgggagagtctccccgtgcccagtgcccacctaaacttctgtagttacattcctcactcactatgggggcgcccyctttgggaactttgctaatcaagctgggcactcaagatcaaatttttgctatacaagcaaattagtctcacttatagggggtcagtatttcgttttgtct

SEQ ID NO: 11775 - DNA, 201 bp, Homo sapiens
aaacttctgatatttgtgacaacggcgattttaaaaactgttcatttaccacatctttccctgagtccaaggtccgtggcagcagagaccatgtctgtccrgcccccactgaggccagcgcagtgcctggcacacagggaactatcactaagccctggttcaatgcaggacatccctcggcttgtacatgaagcccggtag

SEQ ID NO: 11776 - DNA, 201 bp, Homo sapiens
acacacacagtgaatgatactcagtttaacctaattcaacaagcacttcctgattcctgactgtatagaaagtactgtgcaacatattgagactcattcaragatgtttttctttctttcttttttatgtttttgagacggagtttcactcttgttgcccagactggagtgcaatggcgcgatctgggctcactgcaacct

SEQ ID NO: 11777 - DNA, 201 bp, Homo sapiens
cactcagaatatgctagctaaggaagaataaatttggatgaggagggaggaaggaaacatctcccccgcaccctgcgtcttcatcacttatcctacatacrctccttctgtttcagatctcccccgcgccctgcatcttcatcacttaccctacatacactccttctgtttcacatctaccctgcgccctgcgtcttcatc

SEQ ID NO: 11778 - DNA, 201 bp, Homo sapiens
atctttccctgagtccaaggtccgtggcagcagagaccatgtctgtccggcccccactgaggccagcgcagtgcctggcacacagggaactatcactaagycctggttcaatgcaggacatccctcggcttgtacatgaagcccggtagctctgttttatgagggtaggaaacatctggtcaccattggtttatgaaatat

SEQ ID NO: 11779 - DNA, 201 bp, Homo sapiens
aagggactcaaaacgactgtgaggagggcaagtctggggaaaaaaagccttataatgttgtaatggctctggtaaaagtctgcaaaaggtagagatgggtraagttaaagcaaacagagtctaagtccaagataaggtaattcatttataagagtcattaatgcaagtgctacaattgaaaattttttaacgtaaaatgtt

SEQ ID NO: 11780 - DNA, 201 bp, Homo sapiens
ccaaggtccgtggcagcagagaccatgtctgtccggcccccactgaggccagcgcagtgcctggcacacagggaactatcactaagccctggttcaatgcmggacatccctcggcttgtacatgaagcccggtagctctgttttatgagggtaggaaacatctggtcaccattggtttatgaaatatttgccacctgaaaa

SEQ ID NO: 11781 - DNA, 201 bp, Homo sapiens
gtgcctgttacagtcattgtgtctttctctaggcttctttctgtttccgaaacacaaaactacagaaaccacctcaccctctttctgtccttagggttcaygctaattatgtttttactctgaaacgggttttaggattgaagggccatgtcgaatggtgataattctatttcagttagacaagagcctggaaaaaaaatt

SEQ ID NO: 11782 - DNA, 201 bp, Homo sapiens
tgtctctacaaaataactttttaaaaaaattatccaggcatggtggttcacacctgtggtcaggaggctgaggtgggaggatagtttgagtgcaggaggtygaggctgcagtgagccatgattgagccactgcattctagcttgggcaacagagcgagaccctgtctcaaaaaatacatatatgtttatgaatattggaac

SEQ ID NO: 11783 - DNA, 201 bp, Homo sapiens
cacctctatgtcagccaatccgtggtcaccacagatgttcatagtctcacagcaatgcatgttacctgtatttttagaattgtttaaaacaaaagcgactrttattatttaacaagttgtaatgctgacatggtaaacattaaaatatttgaggctaagtacgctcttaatttttttaaaagatttttgttatggagcaat

SEQ ID NO: 11784 - DNA, 201 bp, Homo sapiens
cccttcgtctcctcattaccaatggccatttgggactccttcctcagctcctgcaaatcagttcctcatcttcagcctttttctgatgaggtcacctctcmcccctacgggctactgtgttgtaccaacagcagctccatccttcatgtcccatgtttactcatcccccagctctggcccccaaactgcaagtgaaaacca

SEQ ID NO: 11785 - DNA, 201 bp, Homo sapiens
aagttcaggagtaagtctgtgttctaagcactggagatatcgctatgaacaagacagattaggtttctgccttcaagtttatgtgctggcaagaggaaaawgatagcaaatacataaacaaataagtaagtaatgtaattttaaatggtgttaagttcttgaaaaagataaagatgcaggctggaaagtaaccaggactac

SEQ ID NO: 11786 - DNA, 201 bp, Homo sapiens
tacacatgtgatgagtgcagcacagagctgggggagatgcaacacctctgcaggaggcttagagataagtcaggaaggaaggtgttccagaccaagaaaaycaaacctggaggtaagaaagaacacggtgcattcattcagctaaaacctatccagcttgacttaagccagaggagctccagagagaggcacatgaggaga

SEQ ID NO: 11787 - DNA, 201 bp, Homo sapiens
ttaaaaaatcaaacttttccattggattatctattgagattcttttcaattatctacaaatatttttcattttagtttttaaaaatactctaaataaaagytgaaatttcttactattctaggccagagtttaaagcaacatgggcccttttggttttatgaatatattagtttattagtttttatttctattagtaacca

SEQ ID NO: 11788 - DNA, 201 bp, Homo sapiens
gcaatttttattctctaagagattgtttgttatgctggggcaggagtcaagagtagagaggcaatttggaaactgaaagaaaggctaaattgaccattackcaaaagaggccaccagttccagggactcttggaggacccaagagtagagaggcaatttggaaactgaaagaaaggctaaattgaccattacgcaaaagag

SEQ ID NO: 11789 - DNA, 201 bp, Homo sapiens
ctattacttcccaaactcatttaaaaagagaacactgtttgaggctcacccattaacatttggtaaacactattctgtaaaattccagtttgtgtgctctrtatgtgtcaatttctagttttaaccaactcctagtagatttctattttcaagtagggaaagagttttcacaggaaaagaagagcatttggagatcaaaga

SEQ ID NO: 11790 - DNA, 201 bp, Homo sapiens
tattagcagcgtactttctcattttccctccctgataggactttaactctcttctatatatttcagccctaatgtacttatcatatagtctttaggaacargagaaaagaccaagtagaatatgtacaaaactaaaataaatacagagacatttctttttgttttattaggaaaagttaggaggatgagaaacagtgaaat

SEQ ID NO: 11791 - DNA, 201 bp, Homo sapiens
cccagtctgtgctgcgacatgagccctaacgattttctcattagcagatgctctagctggtttccatgaaggctttccacagtgacttccatagtcgtcakaggcgactactatcagattccatctcaacgtttcacattcacaggcagaggctccaaaaataaattacaggcaagcttaaaagatcagaaaggctttccc

SEQ ID NO: 11792 - DNA, 201 bp, Homo sapiens
agctcaccagatttcactggaaagactgcccaaaccagtctctgccagggactccaaagcgcagggaggcttcagtgctagggagagcggatgtgaaggcrgttatgaaggacagctgtgccagcatctcccaacttttccgttttttctcaaacctcagcttgccttgtgcatggctaaggttatccctggccagctgct

SEQ ID NO: 11793 - DNA, 201 bp, Homo sapiens
ggatgaaaagtgattgtggcatttagtaggatggggtgtttaacaccttgcaatactgaagccaccacggtgagaattgttccatttgaacacccattgcmtccctcttaagaaactcagcaagtttaggcaaataaagggaactatagccacctctacaaatatctgaccaagagtcctcctttatgctgtctataaggg

SEQ ID NO: 11794 - DNA, 201 bp, Homo sapiens
aaactgagaggggaagaacctacagtaatagaaattaggggcctgaatcaaggaatgttttgaagatatttttcatgatttggtgagttattgaaattaakaataaaggagaaagaaacaataaaggtgattcctacaagtctgaatgactagatgactagataattatgccattcagatgagaaagaccaaaggaggaat

SEQ ID NO: 11795 - DNA, 201 bp, Homo sapiens
agtctctggaagaagtgtttgtgcaaattacagagcatatttttaaaatattctcccttttgtcaaatacccttaattcaaggcatgaataaaaaggactrgaaaataataatgttatgatattgcttatagtagtaagatttcttgattatgtatgtgtgaatatatataattgtgggaccatgtggtgattttttcccc

SEQ ID NO: 11796 - DNA, 201 bp, Homo sapiens
ctgatacctagatattcccaacagagaatccagtctctggaagaagtgtttgtgcaaattacagagcatatttttaaaatattctcccttttgtcaaatayccttaattcaaggcatgaataaaaaggactagaaaataataatgttatgatattgcttatagtagtaagatttcttgattatgtatgtgtgaatatatat

SEQ ID NO: 11797 - DNA, 201 bp, Homo sapiens
aggaggtggaggttgcagtgagctgagattgtgccactgcactccagcctgagcaacagagccaaactctgtctcgagaaaaaaaaaaaaaatgtgttttkctcttcaaaatctgactccctccctcagtcatgtaacctgcagcatagtattagcgcaagtgcagggagccaggcgaagggggagagtggtacacaatta

SEQ ID NO: 11798 - DNA, 201 bp, Homo sapiens
ataagaactaggtgtgccattaagaattatgctttgggccgggcacggtggctcacacctgtaattccagcactttgggaggctggggctggtggatcacyggaggccaggagatggccaacctagtgaaacttcatctctactaaaaatacaaaaaatttcgttgggcatggtggcacatccctgtaatcccagctactc

SEQ ID NO: 11799 - DNA, 201 bp, Homo sapiens
tttgcttttagacttaagtaaacttcaactccaattctataacttagtaaaagaatcacattgatgtgaaagtccaaaaagacatttgatgttgtaagtgraattttctcattcgttcactctctgtcaatgagaaattaaatgactaacactaaatggagtgctacatatgtctggcattttttacaaaggaatttatat

SEQ ID NO: 11800 - DNA, 201 bp, Homo sapiens
agtggcatgctttctttcccttacgggttttaaaacttggccacatggtatttttaagttggcaaagtaataccttttagacacgccttcaggattttgcytaattgagtacagcaggttaacaaaagtgccaatgttcctttaaaacaaaaaccaaaatgctctgtggacttaaagctaatgctaaatattagattaaat

SEQ ID NO: 11801 - DNA, 201 bp, Homo sapiens
actgaatagtaaagttagaaagaaaatcaaggaaatgataactctgcaagtcaggattgcggttaccctgggaaaacccaggggtatgagggggaggcacrcacaggaatcttctgttctatttttttacctgagcagtggttacaatctgggtgtttgctctataactctttgttaaagtgtaaaatttttttgtttgtt

SEQ ID NO: 11802 - DNA, 201 bp, Homo sapiens
accagtaaattatttttaataacaatgtcagcattcatggttttccttacatactgaggtttatttactccctgtctctgattttttttttttttttttttccgagacagagtttcgctcttgttgcccaggctggcctgcagtggcgcgatctcagctcaccacaacctccgcctcccgggttcaagcgattctcctgcc

SEQ ID NO: 11803 - DNA, 201 bp, Homo sapiens
ttaacaggtaaatcaacaaatatcacccagtgtgacaactgccaaaagagaaatgtgttcagatctagggaacccagagaagcagggaatacaaaagactscatacgtgaactctgagcaaagttccattaattagatgaagccatgcagaaatattgccaggtatgaaggcacagtgggatttgcccgtgttcagcaggc

SEQ ID NO: 11804 - DNA, 201 bp, Homo sapiens
ttatcaacattttaatagaccacttaaatattcttgatctaagttataattaaaagtatctcaggatttatttttctgagaaaacatacagcagttttttsttcatctaaaaatctttatattgtaaactttatatcataaagtactttaagactgttgatatgctccttagtagacttgcagaagagtaatcaaatgtta

SEQ ID NO: 11805 - DNA, 201 bp, Homo sapiens
tgcagaagagtaatcaaatgttatacagatgaaaatgtgtccagttaattatgaatgtataattttatcaatgacattttattaccatttaataacttcargaaagacctatttttcaaaattcagaaaagtacagcttgttctatgttaggcacagctgcttaaatgtgttcattatgttttgttggggatgtttcttgt

SEQ ID NO: 11806 - DNA, 201 bp, Homo sapiens
agatagtctgcagcatttcccaaacatacttgagtataaatcccttttatatccagaaatatctcatggtattaatcgtgaaacataatctggaaaaaackattctacattattaggcttcttctcgtgtagtaattgaaaataactctgaaaactctcccttaggaaagtaattcatgagagctgcagtgagaaacaaga

SEQ ID NO: 11807 - DNA, 201 bp, Homo sapiens
catgtctctgagaattcctgctgtcagtgactggaaaggatcccactggggaaatgctcgctacctaacaatgccactggtggtgactcatccaaaattcygacacagacctaatgagcttctgagagaatgcctggcagactcagtcctattcagtgtgttaaatagagggtaagaaacaaagttctcaactgatacagt

SEQ ID NO: 11808 - DNA, 201 bp, Homo sapiens
tctgccctctgcctccctgtctttgctgccaatcttactctgttcctgcagtccaaggggctggaaatatggctaccagctgctcacaagtttgcattttwtaggtcccaccacttaaagagctggctcttgttcagtaggtcccgtttttacaattccaaagaagagaccttggttggtccacctgtttagttaaacaat

SEQ ID NO: 11809 - DNA, 201 bp, Homo sapiens
ctgtctttgctgccaatcttactctgttcctgcagtccaaggggctggaaatatggctaccagctgctcacaagtttgcattttataggtcccaccacttwaagagctggctcttgttcagtaggtcccgtttttacaattccaaagaagagaccttggttggtccacctgtttagttaaacaatcgctgtggctgtagag

SEQ ID NO: 11810 - DNA, 201 bp, Homo sapiens
gcgttttcacacctgttgcttttcagttgcctcaaaattgtttgcttgtttgtttgttttcttgggtttcacttgattgcagttctttgtctaaccaaatycaatgctactttcccggttctcctctccctttggacggggtccctgttgttagcattcagttggcggtggttcttagggaacaagtggcaggcagaatac

SEQ ID NO: 11811 - DNA, 201 bp, Homo sapiens
cacatcaaaaggagagagattcctctgcccacagtaaaattcatcagggggccacatggtatagtgtatctaggtgttaggtgtgcagacaaggaatggcrtgcctcagtttggggtcagtttcactgactgaacatttgtgctgccccattgtacacactcagctctacaaatatcttgaccaattcatttccaacctag

SEQ ID NO: 11812 - DNA, 201 bp, Homo sapiens
aattctgcaagatcattttttacgaaataaataattttaactttgaacagggagctaagagggaagcatgaagattgaagaaatcaaattaactttggaaygagagattgtcgtcatagcctaaaaagtcaatgagcacatcaaaaggagagagattcctctgcccacagtaaaattcatcagggggccacatggtatagt

SEQ ID NO: 11813 - DNA, 201 bp, Homo sapiens
tcctagatttgtatctcagagtcggaatcatcacaaaggctgccaggaagtagtgggatactttcccttggtctctgtataacatactattttttttatamatttttacctcacttggccttctgttccttcactgctgcagggtatgggatcaaagccaaagaaaagtgatttgtttctgtctctactcctccttcatac

SEQ ID NO: 11814 - DNA, 201 bp, Homo sapiens
ctgagacaggagaatggcttgaatccgggaggcggagcttacagtgagccaagatggcgccactgcactccagcctgggtgacagagcgaagattccgtcmccaaaaaaaaaaaaaaaaaaaagagagagagagagagagagagaatggcacctttattttcacttaagtgaaaagatagccttatctctgactcctacca

SEQ ID NO: 11815 - DNA, 201 bp, Homo sapiens
acctttcgccgggcacggtggctcatgcctgtaatcccagcattttgggaggccgaggcgggcggatcacgaggacagtagatggagaccatcctgactarcttggtgaaacccagtctctactgaaaatacaaaaaattagccgggcgtggtggcgggtgcctgtagtcccagctactcggaaggctgagacaggagaat

SEQ ID NO: 11816 - DNA, 201 bp, Homo sapiens
attcagtcttgtgccatggatcttttatggtatagtctactttatttgctgcagtcaattaaaaaatctgtatatgagcttcttgtttttaaggaaaaagyctgcattaggcacaaacacacacacacactatggacctggttaggactagtgagagggaatttgaaaatgaacaagtgcttcctgtcactatctcaccaa

SEQ ID NO: 11817 - DNA, 201 bp, Homo sapiens
tatttaatagtgaaaaatactgactttcatgttaatctactatcctcatgatgtatcaataagttcagcagcaatgtttctaatgaatactttgatttacyccataaaaaccatccagaaaatatcttggtgttaagcactgtgaatcggataggttggcttttagccatttgtccatataattttcagggttgttttagt

SEQ ID NO: 11818 - DNA, 201 bp, Homo sapiens
agatataaactacatcattttaatatttaatagtgaaaaatactgactttcatgttaatctactatcctcatgatgtatcaataagttcagcagcaatgtytctaatgaatactttgatttaccccataaaaaccatccagaaaatatcttggtgttaagcactgtgaatcggataggttggcttttagccatttgtccat

SEQ ID NO: 11819 - DNA, 201 bp, Homo sapiens
aagggctaagtcattaagatgaattgatctctatgttcaaagagtggcaggatcagataatctacagtgtgttgaaatccagtaaatggaaactatgaccyccttgacactctaatgaaagtcatatattctttcgtcttaaaaaatgcatatatacatttgtactcaaatttgcatgaataattttaggaggtttaccag

SEQ ID NO: 11820 - DNA, 201 bp, Homo sapiens
tctacagctgaacctggtaagaatatttttagggtttttttttttggtggtgggggagcagataatgtatcttttgggtctcaatagttctttctttctaycttaaagccgtaagcagaacaatgtttttgtggctccctggaaatgtgaaacccccttaaaaacaatatcttctttatcatggagtctgtacactgcatt

SEQ ID NO: 11821 - DNA, 201 bp, Homo sapiens
cagctttaagaaaagaaaacgtcactcctactcatgttaaccacctattgccatataatagaacacattcttatgctctctgagcctgtctcttttcttcrtctcactgtttcttgacggttatgttgcaacctgaggcagagtgtcagaaagagatgagagggatggcaaaaacccattcatactttgagactccttttc

SEQ ID NO: 11822 - DNA, 201 bp, Homo sapiens
cctgcctcagcctcaccagtagctgggattacagatgtgagctgctgtatgattatgtctcgcataattggatatattttaaatggtaaacttgatctgtmtaatatttggacctccctcaaaaaacaaatcattcatgaagctttggaaaggctattataaccaaataatgtgtgcataaggaaccttctccccacatct

SEQ ID NO: 11823 - DNA, 201 bp, Homo sapiens
atgtctgctctatgctctgctccatttcacaatgttctttaggtctgttttgttatttaaatgtaatgatgtatgtatccacaataggtagcatttgagasactccagctgtgagcctctggatgtgaagctagtgaaacaattgaatgactaacagttgaatgcctagccaaatattttcacttcactttatatgtcagc

SEQ ID NO: 11824 - DNA, 201 bp, Homo sapiens
gtataaattaataagagagaatgctgtcagcgaagaaagtgtaagtactttgtctggagagtaagagaccggccagttagtcctaataaatccgagggttyggggagcctcttttgagataggtgatgcattgctcattattagagaatctcttggcatgagtacttttgcaccaagcatctgcttttaaggtctcttcat

SEQ ID NO: 11825 - DNA, 201 bp, Homo sapiens
caagggttttttatggtgctgagaggaaaggccttcataaatatgtacatttacttaatttctgtatctacattcccactgtgttttcctagagctcactrctgtacaccatctcgactctgaagccctgggaatgtctgctctatgctctgctccatttcacaatgttctttaggtctgttttgttatttaaatgtaatg

SEQ ID NO: 11826 - DNA, 201 bp, Homo sapiens
gtggagggagcctcaaccaactgaagcatcatttggagaacagatgaaaaataaagaagcgaagccttttgaattctaaagttttagctttttccaaaagyaaggcattttcctctcattctcaatctcttcttccattcagttttctcctcccatattcttagtcgtgattacatagattaaggcaaggaactgggggtt

SEQ ID NO: 11827 - DNA, 201 bp, Homo sapiens
tatttttgtctactacaggctgaaatacattaggttgacaatttttttaccattgatttattttttctgcaaatgtgtgagtttttcattcatactaatamatcacctaatagtgagaacattagttacagggaggtttattttaattggtttctattacaagtatgaaaccagagagttcattttctcaacaaatctgag

SEQ ID NO: 11828 - DNA, 201 bp, Homo sapiens
ttcttagtcgtgattacatagattaaggcaaggaactgggggtttcactaatgaactcggggaaattttgagggacatctcctgtcctttgactttggggmaagttcttccattgctaaggaaaaaagttgtattggatgtaattgtttgttaaatgcaaagaactaactgctgggcattctaggagtccgtacatgaact

SEQ ID NO: 11829 - DNA, 201 bp, Homo sapiens
ttctcatttgattagcatcttaatttaaaacattatgaaaaatgagacattcggaaggactaggaggacattttcactctctagtacatacttgcaatgtyagttggccacagtgcaatcacactgctatttcaaggtgtgtgtacttgacatgttaacaccccatcagatgccagacttgtggtgaagggccaagagctt

SEQ ID NO: 11830 - DNA, 201 bp, Homo sapiens
atgcccaaatggcagcttatttaaaaaaacagaaaattcttggaattaacggtcaaggatacgtgagagattagaaatcaacatttcacattaattcctgygtaagaaaattatacgtaaacatagactgttaaaacaggcatagcaaatatgtttcaactcaggggccaacactaattggttggtagtggctgcccctag

SEQ ID NO: 11831 - DNA, 201 bp, Homo sapiens
aatctctgcttctctttattcctaccaaaaaaacggtccttcagccagggcgcggtggctcacccctgtaatcccagtactttggaaggccaaggtgggcrgatcacgaggtcaggagatcgagaccatcctggctaacacagtgaaaccccatctcttctaaagatacaaaaaattagccgggcgtggtggcaggtgcct

SEQ ID NO: 11832 - DNA, 201 bp, Homo sapiens
tcccttaatttgaatttttataagtccttaagaattgtcattgttcccaaatattgtatgatctttccatcctaattatgagatcataattacatattttyatgattttatggcagaaaataaaaaatgtgattgaagttgaaatttatcagaagttcagaatgggaatgtagataataagattttaattttttgatatgc

SEQ ID NO: 11833 - DNA, 201 bp, Homo sapiens
ttatttaaggccctgggaaggcctgcagcaaagaaatttgtttaacgttgtctcaatccagccatttactaaacttatttgaccatgaaattttttctcaytgagtacctgctaacaacccgtgaatatgttgcagaatgcttttctgtactgtttcttccatggaatttgtactttaaaaaaataaattaagactgatta

SEQ ID NO: 11834 - DNA, 201 bp, Homo sapiens
agtggcatgatcatggctccctgcagccttgttctcctgggctcaagcaagtagctgggactacagactcacaccatcacacctggctaatttttttttttattttagcatagacgaggtttcactgtgttgcctaggctggtctcaagatctgggctcaagtgatcctcccacctcaacctcccaaagtgctgagattac

SEQ ID NO: 11835 - DNA, 201 bp, Homo sapiens
taaaactcttcagcaaccgcatatggcaaaatgattggtgcttgtaaaccactaggctgacctgtttttgctttttaaatatgcatgttttttgttctccrcctcagtgaataaaattgaaacagcatctcagattgtaatacataggagaaataatgcagagaaaagaataaatttgcccagtaaggtataagtaaaata

SEQ ID NO: 11836 - DNA, 201 bp, Homo sapiens
acaggcagtaggcttgcaggctataagttcactgagttagaggacaacatactagtcacttaggtagttggcaaatgtttccctgtggagtacatctaacsaaaagaaacgaatccttctctctatggaacctctgttgcatttttttatgcttcattttcccccagtaggtggtttatatcttttttatggaatgtagaa

SEQ ID NO: 11837 - DNA, 201 bp, Homo sapiens
tgcccagcagacgccgggcacataggacatatgcaaaaattggtagttccctttctaacccagcgtccatcctcagggaactcatcattttctagcaggcrtgatattctaggtgacgtgagtgctgtaaacaagaacgctgggagttcagagaaagagcacagaatagtgcctgggctgaccgtggaagatagcgtatca

SEQ ID NO: 11838 - DNA, 201 bp, Homo sapiens
attgaatccaaactgtatttaaaaataaaatacattgtctacgagaactttaaaaaagacgcatgtggaagtcccacacacagaaatccatttggtaatarcatttaaaagctcgtggatccccaaggacccagggaacttttaccttgaatatccttttgaacagagaagagtaacagatgtgaaatgaggaagtggaac

SEQ ID NO: 11839 - DNA, 201 bp, Homo sapiens
tttcaggcttacggatgtagtagtacagagaaatgtgtgggaatgaggaacagtcaattccagacagcagtaacctttgagatgaagcacgtgatttgtgrggagtcaactgtgttggcagtattttatatcttaaggtgggtagtagagacacagatataaactacatcattttaatatttaatagtgaaaaatactgac

SEQ ID NO: 11840 - DNA, 201 bp, Homo sapiens
cccagatatctgcaggattaaatccttgatcccctccatatctctatcacctttacaatatggcctcctataactactctatgtaaaagaaaggtcctgcmtaccttactctctattccactctcttgcttttctccatagatctcatgtgatacactgtacattttatttgtttgatttttgtagttgtctttcttcctt

SEQ ID NO: 11841 - DNA, 201 bp, Homo sapiens
tacacgtgttgttactgcaacatgaaacgtaaataggtacaaccagtttggagaactgttttacgatacacaattaagatgtgcatacactaagcctttayagatacacaactgcctacttgacaccactatatcgatgtctgatactcttatcaaatttgtcgaaaactaaacttctgattctcctctcctccaaaaacc

SEQ ID NO: 11842 - DNA, 201 bp, Homo sapiens
tgttaaagaatatagtcagcaatgagataccagataataccatcagatcatcaaaatgaaaaaatcctgacaatacacgtgttgttactgcaacatgaaaygtaaataggtacaaccagtttggagaactgttttacgatacacaattaagatgtgcatacactaagcctttatagatacacaactgcctacttgacacca

SEQ ID NO: 11843 - DNA, 201 bp, Homo sapiens
cagtggaactgaccccactctgtccagctccaaaggccatgctcttttcaggacatgccttcactagatgatctcttcagccccctcccgactctgatttygagtcctctggaattgtctcggatgttcaaggcttacctcactctcataagctcagcctgttttttgtttatcgtagcgtggcctttctttacattccaa

SEQ ID NO: 11844 - DNA, 201 bp, Homo sapiens
caggagtatcgttgttgttaaagaatatagtcagcaatgagataccagataataccatcagatcatcaaaatgaaaaaatcctgacaatacacgtgttgtkactgcaacatgaaacgtaaataggtacaaccagtttggagaactgttttacgatacacaattaagatgtgcatacactaagcctttatagatacacaact

SEQ ID NO: 11845 - DNA, 201 bp, Homo sapiens
ttcaccatgagactcacagttcaccagaaggcagaggcaaaaatcagagttgccaattaaaattatttctaaagatgggttcactgcttcctattcccaarcctttctgagactccatggggtgaatcacttgcttcttttctgtatctcctcctgcaggcatttaagctttgtaatttagttacatgcatacttatattt

SEQ ID NO: 11846 - DNA, 201 bp, Homo sapiens; identical to SEQ ID NO: 855

SEQ ID NO: 11847 - DNA, 201 bp, Homo sapiens
acctacaacttggaattctgcccctaggcaaaacttcacatggaaatctagcaaagatattttcagacttgtaagatcccccaaattttcctctggaaccygacagtgtgctccaccacagcaagagaattaatccagaaaggacaagatgtagaggtggggtacaggaagcaggagatcacatagaagcaagaggcaaag

SEQ ID NO: 11848 - DNA, 201 bp, Homo sapiens
tgcctctggtccagcccgtcttttatttggatgacagaatggcagggcggtaagcctgacccagaaatctcatgtctacttgggctgtcctgctctcccckccatggactgtcacctggatcagctgggaacactcatcttacccccacagaagcgttctgctttggtcagtcctgacatctagaagtcggccatgttgag

SEQ ID NO: 11849 - DNA, 201 bp, Homo sapiens
taacttttgtataaggtatcagttgtgagctgaggttggaaatccaatagggtttggaggggttttttgtttgtatttaatcatgtgtattctttaaaaaataggatttaatttcaagagattaaaaagaaatattgtatagaaatgtctgcagttataataagtagttcaattttaaaaagaaaaagttgttttgtttgc

SEQ ID NO: 11850 - DNA, 201 bp, Homo sapiens
ctgggaggggtattgagaggctgtggggggagatgcagatggttaattggtacaaaaatatagttagaaagaaagaataagacctagtatttgatagcacracagggtgactgtagtcaataagaaattaattgtacattttaaaataactataagagtgtaattggattgtttaattggagtataattggattgaataac

SEQ ID NO: 11851 - DNA, 201 bp, Homo sapiens
taattacttgcaaagaattttgcctcggctacatggatgaccagtgaatgcttttgggagtgtaggactacactgaataatcgaataaatctattgaatayggaattaaaaaaaaaaaaactaagtaaaaaagcattagaaccaccatacagcttatatctatatgcttattatgtatgggctggcttaggagggaacttg

SEQ ID NO: 11852 - DNA, 201 bp, Homo sapiens
aagtaagtctctaaatccctttatgtgacataagcagtcattttctgatttccattccttaccaaaatttattttacagatgtcttatacgtctttgttcragtgagatgccaccagatgaaaattcagtattacaacctggctcatctcatttcctcatggctttcttcatttttataatgtcagaaccatacaagctat

SEQ ID NO: 11853 - DNA, 201 bp, Homo sapiens
tttctttgaaaatccaaatatatggatctgtctcagatacacgtgggtacccattatccaccaccatgcttgtgcttccattgaagcagagaccagaggakccccattctaacatcctgttacataagtgaaaatggaatttctttggaatgccatttattgtcatggtgccaggagttcatcataatcaacattacaaag

SEQ ID NO: 11854 - DNA, 201 bp, Homo sapiens
ttgaaggaaagagagaaggagggcttaaaaaactataccattgtcatgtgggcattaagagtgtaagcttttggagttggaatagacctgatgattttctmattcaagtttaattcatgtaaaagatgtgtctcaaccccttgataagattacaggaaactcaaaggcaggaaccattaattatctccatatctgcagcta

SEQ ID NO: 11855 - DNA, 201 bp, Homo sapiens
cgaggaacgagtcagttagtctaggatggtctcttttggaagggcttatgtctgctccatatggtctcttcctcctacaggttagcacagccttgttcacytaagggttcatcagggttccaagagatggagcagaaacaggccaggcctctcaaggatttggctcagaattggccaacaacatcactttcaccacattct

SEQ ID NO: 11856 - DNA, 201 bp, Homo sapiens
gataggattctgtaatgactcacaatatttgccaaccctcccaaacctttgcttcaccaaatgtttgcttaagatgaagagtttggcattaggcacacgtygaaattcacctgggagaatttcccttcagagcgccatgaggtgacatggcagctgcccccatggtacactctgaaggaacctaaaggaccattgacctga

SEQ ID NO: 11857 - DNA, 201 bp, Homo sapiens
gtcgataggattctgtaatgactcacaatatttgccaaccctcccaaacctttgcttcaccaaatgtttgcttaagatgaagagtttggcattaggcacaygtcgaaattcacctgggagaatttcccttcagagcgccatgaggtgacatggcagctgcccccatggtacactctgaaggaacctaaaggaccattgacc

SEQ ID NO: 11858 - DNA, 201 bp, Homo sapiens
ggaggtcgaggctgcagtgagccgtgatagtgccaccgcactccaaccagggcaacagaatgagacccagtctcaaaaaaaataaaaattaaaaaaaaaaatccagagtgggctttaagaaggaagcaatagtagtttcttggaagaaagataatgtgtgtttaagagtcccgttctgcccattgtctggcactattcaat

SEQ ID NO: 11859 - DNA, 201 bp, Homo sapiens
ttctccaaaatgaagacgtccagatgacagcaacaccaaacgtgaaaccatgataaatgtgcgcaccccctggattactgcacaagccttctcacggaccrccctactgtcagtcttgtcttcctctttccctacctctgtcccggatccagactgcaatcagttatctctcaaaaatgtaagtctggtgatgtttctcaa

SEQ ID NO: 11860 - DNA, 201 bp, Homo sapiens
ttcacttttgttgcccaggctggagtgcagtggcccgatcttggctcactgcaacctctgcctcccgggttcaagcaattctcctgcctcagcctctcaartagctgggattacaggcacctgccaccatgcctggctaatttttttgtgtgtgtttttaggagagatggggtttcaccatgttgcccaggttggtcttga

SEQ ID NO: 11861 - DNA, 201 bp, Homo sapiens
ccacaggtttggttgacacaaaatgtttttcaatctcctttagcactgatttcaacacaaaaactgaatttctttcaggccataataaataaataaataayaaataaaaaacacagtagctttctttcaaagaaaaataaattttacaagaaatgcaataaatgaaaatatagtctgttgtgcctttggtacacaaaccta

SEQ ID NO: 11862 - DNA, 201 bp, Homo sapiens
ctaagggtaagaaaatatggtatctcccatcttttggctgatttggtttcggaaaatgtagcaacagcgccactagccaatagtttatgaatattcagtgyttgtaaagtgaagatccagatggcttagcccaggagtatcgttgttgttaaagaatatagtcagcaatgagataccagataataccatcagatcatcaaa

SEQ ID NO: 11863 - DNA, 201 bp, Homo sapiens
aagaaaaacaagccatgaatttacttttcttactaagggtaagaaaatatggtatctcccatcttttggctgatttggtttcggaaaatgtagcaacagcrccactagccaatagtttatgaatattcagtgcttgtaaagtgaagatccagatggcttagcccaggagtatcgttgttgttaaagaatatagtcagcaat

SEQ ID NO: 11864 - DNA, 201 bp, Homo sapiens
gaaagaggtttaactgactcacagttcatggctggagaggtctcaggaaacttacaattatggcggaaggcaaagggaaagcaagacaccttccacacaaygcagcacaaggcaggaagaaatgtcaagcaaagcgaggaagagccccttataaaaccatcagatctcgcgagaactcactcactatcacgagaccagcat

SEQ ID NO: 11865 - DNA, 201 bp, Homo sapiens
aatcataagatacctactaggtcatcattgttagccctgtaaagttttatttactatatataattaaaagtaatacaattatttctttttataatcgaaayacagcatgtccaatgcctccaattagtttacatcagcaagactttgatcatcatcaaaagccaaaacaagaggattagccatatcaaatctatgcaactc

SEQ ID NO: 11866 - DNA, 201 bp, Homo sapiens
caaaagaatggcacacttagagtaacaaggagtcattgcttcacaatataaagttcaaaatgtcagtggaatttaaagctgtaatagcttacagataatgraataccttttatttaattctgctgatattcccatgtaagtgttctatgccaggcctctagttatctcatgccctttaagattagattagactctcatagc

SEQ ID NO: 11867 - DNA, 201 bp, Homo sapiens
ttattattgcatatccaacaaaatctcaacaagagaaagaagagctgatagaagaaaaccctatgcataaaaaaggacgttatatacaattgaggtagtaktcacatgatatgcaaattatattaacaatttgaattactacattaaatgaaatcaagtcagaattcattttttctctgcttatgctcaaatgtcccatat

SEQ ID NO: 11868 - DNA, 201 bp, Homo sapiens
tttttgtttgagagggagagcatagatgctcattggattttttaaatttctgttccaaagatcttgatcctccttgtcatgtatttgtaagtgcaccagaygcctaagaacattgagctcttttgaccacatgagacatatgacagtcataagagaaaatctttgaaggaaattttctatcaggaagaaaacctttattaa

SEQ ID NO: 11869 - DNA, 201 bp, Homo sapiens
aaggacagtgccagggccccatgttgttagagagcactctgttgtctttggcatgggagaggacttcagtgcaaaacggtgtacgaagtgtgttgtcagcrgaagctaatttacaccctgtgctggacggagggttgcttgtttggagttgtttttcctgtggctaaaggattcctgggaatgctgttcaggcatgtctct

SEQ ID NO: 11870 - DNA, 201 bp, Homo sapiens
atccttgcagagacctcctttgtaaaccaagaagcccccgactcccctgttacagaggtaattgctttggccttacctgttttacctcctggtaagttacrgcacttagcaccttgcaattagaggtcatagatttccctgcttctctagaatgtgagattcttaaaggcagggattttatctcatttattagatttgtat

SEQ ID NO: 11871 - DNA, 201 bp, Homo sapiens
acaaggtagaaagttgaggttcaccacatccaggaagcttccattattcactcctagactcagtcttgtggcagacatcaccgctgatgttttctagatcktccctctcagtactctatgaacaatatatagcaaaagaatggcacacttagagtaacaaggagtcattgcttcacaatataaagttcaaaatgtcagtgg

SEQ ID NO: 11872 - DNA, 201 bp, Homo sapiens
cacaagaggtgctgagggcagcttagtggatgtgggctgtcaagatgtccttgcagggagttgcgatggctggagtaaaaggtgggctcctgtgtggataygatgtgggacccaagacgcatctcatacagctcagaaccttctgaatctgaggtttctatgtgcttccttaattctgggaagttctctgttactgttcct

SEQ ID NO: 11873 - DNA, 201 bp, Homo sapiens
ttgggaggctgaggtgggtggattgcttgagctcaggagttcaagaccagcctgggcaacatggcaaaaccccatctcaacaaaaagtacaaatattagcyaggtgtggtggtacatgcctatagtcccagctacttgggaagctgaagtgggaggaccacttgagcccgagaggttgaggctgcagtgagccaggatcgt

SEQ ID NO: 11874 - DNA, 201 bp, Homo sapiens
tggtttgtgcaatgagctcaggactacacatttagatatgaagtaattagaaataatgaacctctgggattaccccaagacttccaggagacagagtgtgscccaagtcatgctggctacaaagactagaactcgttatggataaaaatgggagaattcgattaaactaattcacgggtgtatatccaaagagtatttaaa

SEQ ID NO: 11875 - DNA, 201 bp, Homo sapiens
gatacaaaaatctttggtcagaaccagtattacaaaagaacctaagaatttctgctttctcatctttctgtttaccataacacaggcatatatccaaaaayatatagaaagcaaaaatttggagagaatgacatgcgctttcctaaatgcaccttaatgctttccctggtgttactattactactgttggaagcatcactg

SEQ ID NO: 11876 - DNA, 201 bp, Homo sapiens
gaaaatagaagtggagatggtgaaaagaagttggatttgcggtatatttttagagagagagctggaagaacttcctggaagattgtttgtggggagtggcrgacagaagaataaataatgatttggggcctgagcaagtgagtggatagtggatctgttagctgaaatgggaacaactggtgggtgggcagatttcacagg

SEQ ID NO: 11877 - DNA, 201 bp, Homo sapiens
aagaagtccacagaagctctcagatgccctctagaccagcctttactcactcctctgtcagcatcctgcctcccagctcgcattttaccaaagctagaaargaccctcaagggcctgggtgcgtggaattattagagaccagataaaagacatgtaaggagtgctggtgtggcagatgctgcgaaaaaaatgtgccacaac

SEQ ID NO: 11878 - DNA, 201 bp, Homo sapiens
cctgtgtaagaaaattatacgtaaacatagactgttaaaacaggcatagcaaatatgtttcaactcaggggccaacactaattggttggtagtggctgccyctagcatcactggagaaggactctgaaaccgagttggggatcaatgggatatagggcttgccgtattactgatgtctgccataagctctggaaaagctag

SEQ ID NO: 11879 - DNA, 201 bp, Homo sapiens
gtctgccaaaataatctaatgttgaagcagtccaccgcatttcaggtctcctggaaatgtgctgcgattttctgaaaattagaggcaacaacttgctgttraggacaggaaaaaaagaggaggctaagacgcaaggtcctctgaagcttctgccagctctctcaccagaacctaactcttgataccagtggagtgaatctg

SEQ ID NO: 11880 - DNA, 201 bp, Homo sapiens
aaaataggtcaccgtggacatttacctttgaaagcaatatttgcttaggataagccaagatgcttataaggatataagctgcctgttgacaattcaaggtygataggattctgtaatgactcacaatatttgccaaccctcccaaacctttgcttcaccaaatgtttgcttaagatgaagagtttggcattaggcacacgt

SEQ ID NO: 11881 - DNA, 201 bp, Homo sapiens
gttttccccttatctaaatttttaaagtaatttcctataatatctccaatgagagaagaaaactttgcagttaaatgcaggcttccaccctgagtctgccrctttctgatggctcaggttgggccaaataattgaaactttttctgctgcagttgtgggtaatacaaacaataaaatagaaaaataacatctactacatgg

SEQ ID NO: 11882 - DNA, 201 bp, Homo sapiens
gcctccctaacctgggggccgcgtcccagagctgcgagccacgcctcctctctcccgcccgccgcgccgccggactcttattttgaagggcggcgggtgamggctcggagcctcctgagtcacccggcgggcgaggtataaagcccgatacctgccccgcgcccggtccgcggagcccgctgcagctcccgctcgctccgg

SEQ ID NO: 11883 - DNA, 201 bp, Homo sapiens
ctgcagctcccgctcgctccggacgcggaatcgggcagcagcgggaggcggcccggagagccgaggtaggcgcggggaatcggccctgaggctggtggaakaaatgtgtgaattaaagggagtgcagcgtgcagggtgggccgcgagtcgggagtgcagggctcgggacagggtgggggcggggaggacaagagactcgtc

SEQ ID NO: 11884 - DNA, 201 bp, Homo sapiens
ataccaggagaggaatatagaaatgagggacaagacaggcaattcagaacacagctcacagaagcccggaacaagactggaccaaacaagttcaagtacargctaaaagtcatgccatcattatattgaaaagatgtgatgaaaaagtaatgtacccactgactgattttgccttattgcttgggcatagtgagaaggccc

SEQ ID NO: 11885 - DNA, 201 bp, Homo sapiens
ccctctcttcctatcattgttttgataaaagaaaaaaaaaacaaactaccctggcacccatcagagctaaatgctgtctctacctgccttccccaaccagrttcatgcctggtttgcttagggattatctgatgttactagccatgtctcttcttgcctccactggcatggaaaatctgggtaaccacaagcaaacttgac

SEQ ID NO: 11886 - DNA, 201 bp, Homo sapiens
gacttaaaaatggaagaggctcttccttactttttttcagatgaaaaaaggaaaagagatcatttccttctaactcaggaaaaaaaaaaaacagggaaacwctaatactctcagcagatcatattactcctaaattatctttacacttctttgttttctggtgtacacaaagaaaagaagcaatgatttgagatgattttg

SEQ ID NO: 11887 - DNA, 201 bp, Homo sapiens
taaggatatacaagtcttatttttaaaactatcttacatgtttcctttgaaaggttgctttaaaattattaccgtaaatgattttattcttgaaattaackatttaaatacaaatttgaggagcgtggtaaataatatgaaagttgcagactgggtacagtggctcatacttgtaatcacaatattttgggaggccaaggc

SEQ ID NO: 11888 - DNA, 201 bp, Homo sapiens
tctctactaaaaatacaaaaattatccagacgtggtagcaggtgcctgtaatcctagcttcttgggagactgaggcatgagaactgcttgaacccaggagktagaagttgcagtgagctgagattgtgccactgcactccagcctgggtgacagagagagactctgtctcaaaaaaaaaaagaaaaaaaaatcagacatgg

SEQ ID NO: 11889 - DNA, 201 bp, Homo sapiens
cgacaggcccagtctgtcccaggtgaggaccactgacttagtaaacaataaacaggtgtcctactcatagtagccttagtgttgcttcagtagatccttaygagctctagatagtttttagttgacttttaatatttttaaaggtaacaataggccgggcatagagactcacacctgtaatcctagcactttgggaggccg

SEQ ID NO: 11890 - DNA, 201 bp, Homo sapiens
cgtggtagcaggtgcctgtaatcctagcttcttgggagactgaggcatgagaactgcttgaacccaggaggtagaagttgcagtgagctgagattgtgccmctgcactccagcctgggtgacagagagagactctgtctcaaaaaaaaaaagaaaaaaaaatcagacatggggcaaaatggagctgatgaacacagctaag

SEQ ID NO: 11891 - DNA, 201 bp, Homo sapiens
gtggtcacgcctgggaggccgaggtgggaggatcacttgagatcaggagtttgagaccagcctggacaacatagcgagacgttgtcttgaacaaaaaaaaatgttttaaattagctgggtatgatggcacgtgcctgtagccctagttactcaggaggctgaggtgggaggatcacttgagcctgggaggtcaaaactgca

SEQ ID NO: 11892 - DNA, 201 bp, Homo sapiens
caggaggtggaggttgcagtgagccgagatcacgccactgcactccagcttgggtgacagagtgagactttgtctcaaaaaaaaaaaaaaaaaaaaaagtyataggctgagtgcggtggtcacgcctgggaggccgaggtgggaggatcacttgagatcaggagtttgagaccagcctggacaacatagcgagacgttgtc

SEQ ID NO: 11893 - DNA, 201 bp, Homo sapiens
ttgtcaccttcaagttcttcaagtaaaaatagttttactgaggcacttaactcacagggaaagtgtttttctgaaaagggttagtcattactcaaatggcmtactgaattttttatgaaataatgtcttatagagaataggacagtaggcatgatagtgcttagtggttaatagttttaaataggaaatcatttatttcct

SEQ ID NO: 11894 - DNA, 201 bp, Homo sapiens
atagtaaacttccaaactaaacaagagtttgcttttctgattttttaatgtgtaaatcttagctgtagggatcagataaggaaatcatattattaccccaygtattttaagaaaacagatgactaaaagtctggaagtaactactatctatatttctatctatctgtcatctttcttgtttcaaggcctcgttctagatca

SEQ ID NO: 11895 - DNA, 201 bp, Homo sapiens
gccggcatctacacatgtatagctaccaaccgagcaggacagaactcattcagcctggagcttgtggttgctggtaggctcatctgtgaatccttgctctstgacagaatgaacatcagacttacaaatgtaaactaattctacattactaaccaatacggaaaataaagtattgaaaaaatagattgtatcatcaaaata

SEQ ID NO: 11896 - DNA, 201 bp, Homo sapiens
gaaaggtgaagctaaacagggaaatactgttagaaatattagaataggcaaagtgattttcactctttaaagtttgtgttccaggacaatgaattgttggyctatcaccctctcaaaaatgcaagagatgataatgctttgtattatccccagaaagatgactatggtcagtatattattaggttaaaaaaaataggttac

SEQ ID NO: 11897 - DNA, 201 bp, Homo sapiens
tgggcgtaaacaagctgagaattcaaagaaaggtgaagctaaacagggaaatactgttagaaatattagaataggcaaagtgattttcactctttaaagtytgtgttccaggacaatgaattgttggtctatcaccctctcaaaaatgcaagagatgataatgctttgtattatccccagaaagatgactatggtcagtat

SEQ ID NO: 11898 - DNA, 201 bp, Homo sapiens
cctaactctcatctggtggcactctttagtcagtgtcccatcacagcctgcaagaaaaccctgctgcaggccacgtgatgtcattgctgcagccctaaggkccctttgacatgggcgtaaacaagctgagaattcaaagaaaggtgaagctaaacagggaaatactgttagaaatattagaataggcaaagtgattttcac

SEQ ID NO: 11899 - DNA, 201 bp, Homo sapiens
tacaaatgtaaactaattctacattactaaccaatacggaaaataaagtattgaaaaaatagattgtatcatcaaaatagccaatgaggacatggttatawggcctagcaaaacagaaacagaaatctttcatttctcccactaacctggcaaagagagaaaaagattttattagctcttttgggtcattcgacctcctgt

SEQ ID NO: 11900 - DNA, 201 bp, Homo sapiens
tgagatcagaggagccatcttgaggcacaagctgagattttctcttgctcataacattgagttccaaaatttaagatgtaaacaagatgcaagataggccrgccatttttctttaagatgagggagaaaggtaaaatcatattttgtatgtgtttcactaacctatgctaagaacctaagatacaaaaggcacgggggctg

SEQ ID NO: 11901 - DNA, 201 bp, Homo sapiens
aaacaaacaatgacagagggaactgggaagtacaaaacacacagtgaccggaggtgtaactggttgattactgttctgactcatgtaattttgtcgactcrtgtaattttggcactcggtgtgagctttttttctgtaagaattgaataatcaactacagcggacccttgtattccaggctttgatagttatatatccata

SEQ ID NO: 11902 - DNA, 201 bp, Homo sapiens
gctctcctaactcttctctgaacacctcgcacccccacggccccccgcccctctcttaatcttggccacgctccctgaggggtcagacctggggtgggagrgcagagaaagcggggctggcagagacaggggtgagggccgggagaggcgatgacatcattccctggcagctggcggggagagggtggggacggaggggtc

SEQ ID NO: 11903 - DNA, 201 bp, Homo sapiens
gctgagattgtgccactgcactccagcctgggtgacagagagagactctgtctcaaaaaaaaaaagaaaaaaaaatcagacatggggcaaaatggagctgrtgaacacagctaagaaggagtagtcagggaagtgttaatagaaggagggtggagagaacaatgtgggggcaaggagtggaggtcagcctctgaggaagac

SEQ ID NO: 11904 - DNA, 201 bp, Homo sapiens
acagagagagactctgtctcaaaaaaaaaaagaaaaaaaaatcagacatggggcaaaatggagctgatgaacacagctaagaaggagtagtcagggaagtrttaatagaaggagggtggagagaacaatgtgggggcaaggagtggaggtcagcctctgaggaagacagggctcattctaaagattaacattctgaagatc

SEQ ID NO: 11905 - DNA, 201 bp, Homo sapiens
atgtttaatgtttgtgggtacatagtaggtgtatatatttatagggtatatgagatgttttgatacaggcatgcaatgtgaaataatcacaatgtgaaatmatggagaatggggtacccgtcccctgaatcatttatcctttgtgttacaaacaatccaattacatgcttttagttatttttaaatgtacaattaagttcc

SEQ ID NO: 11906 - DNA, 201 bp, Homo sapiens
ccctcaaactcccccgtagctgtgaccacaggcaagcaccaccacatctggctattttttgtacttatttttttttatgtttaatgtttgtgggtacatartaggtgtatatatttatagggtatatgagatgttttgatacaggcatgcaatgtgaaataatcacaatgtgaaatcatggagaatggggtacccgtcccc

SEQ ID NO: 11907 - DNA, 201 bp, Homo sapiens
gatttgtcagagcacgccaaagcccagtgccctgtgaccaggacaaaaggggaagtggctgcattttgacatgtcccagcttcactagagaaagcccactkgtttctgactttccagtgcgggcaaaagctggcagatccaccacctgtgctcttgctgcccagcatctagggagctttgctattctgagtgtttctgagg

SEQ ID NO: 11908 - DNA, 201 bp, Homo sapiens
gatggtgctcaactggatttttctacttagagggctttatggattttaatgtagaggtcgtggcttctctgcatcactggcaagtgttgtccatctctccrtccttcttgagttccatacccagtgcatcatgaacaaatccatcttttttatctgacctatgctgtgtctactctctcagctcctgcttttgcttatccc

SEQ ID NO: 11909 - DNA, 201 bp, Homo sapiens
ttccaacccatctccttgctttcgttattgttcatcacagtctacacagcactcagagtaattctttttcatgaaatcattatcacagcactgcccgaacrccgtccaggggcttctcacttagtccgagtaaaatccatagttcttatacatcctaatcaggcttcatctctctgatttcacctcttgccactcccccag

SEQ ID NO: 11910 - DNA, 201 bp, Homo sapiens
aaatggttctttcctatttaattttaattgatttgagccaagaaatagcatcctattggatatctgctgaaataggactaaactgctggtctcctgaactstgatagagaaatccaatcaaaagcttttcctggccaaaaataatactaattgcaagtgaaaactagctttgttctctcggttatgagttccaatggtgaa

SEQ ID NO: 11911 - DNA, 201 bp, Homo sapiens
attgtttggcagcttaattatttacttggccagtactatatgctgtttctttattagtggttcataaaacaatggtatctagtggtgatttcatgttagaktcagtgaactagaaatttgttttctccattttaaaaataacatactaagatatgaatagtttagcaaaacttcccaattgtccagttactggtagggatg

SEQ ID NO: 11912 - DNA, 201 bp, Homo sapiens
gaggcaggagaatcgctttaacccgggaggcagagattgtggtgagctgagatcgcgccattgcactccagcctgggcaacaggagtgaaactccatctcaaaaaaaaaaaaaaaaaaaaaaagtcatgctcatggcattacttccttaaaactttgagtaggatacagaaggaaataaagacagtaacctctttggggtt

SEQ ID NO: 11913 - DNA, 201 bp, Homo sapiens
cgccattgcactccagcctgggcaacaggagtgaaactccatctcaaaaaaaaaaaaaaaaaaaaaaagtcatgctcatggcattacttccttaaaacttygagtaggatacagaaggaaataaagacagtaacctctttggggttctgtacatcttcacaaagcttttcttcatagatcagaaaagaaacttaaatattc

SEQ ID NO: 11914 - DNA, 201 bp, Homo sapiens
tctctcatccagttatctcgcaagctctgtagggtaggttctgttattacgtgttttagatgtgagaaaactgagactcagagaggtaggcaaactatccaaagacataacgtgacagtaatgtgtctgggattattaacaccaaaagttggctttttggtggaatttgtaatgatgagtgattcatacatttgaagtggt

SEQ ID NO: 11915 - DNA, 201 bp, Homo sapiens
tactgtaaagaattagaagtttttgaggatttactctccagaatagtgactgaatgtactttgatagaaatggagtaacaatagctaactctaatttatcyactgcaattggtaataaaggaagatagttaagatctcaaatctggaagtctgatattttagccaacaatctcaaccttctcattaaacaaaatatttctt

SEQ ID NO: 11916 - DNA, 201 bp, Homo sapiens
actcaggaggctgaggcaggagaatcgcttgaacccgggaggcggaggttgcagtgagccgagatggcgccactgactgtctcaaaaaataaaaataaatmaataaataaataaataaataaagatgctttggaaaacctaaaggttgtgcaaaggcctctcacaatttcttttcatagttaatttatgaaaatgcaacac

SEQ ID NO: 11917 - DNA, 201 bp, Homo sapiens
ccaagaaatattgcaggtattacacattctcctacatcaaagcaaaggcactccaagccccctttttaatgaaaagagtttttagcaggtgggaagaaaaraaaaaaaaagcacttgctcctgagatgataaaaagccatttttcactgcaaaattattaaattagctgtaaggagttggagtttgtatttggcattcctt

SEQ ID NO: 11918 - DNA, 201 bp, Homo sapiens
agcattcaacactcacaacagccttgcgaaataggactatttttattcccattttacaggtaaggaaacagagaccagaggtgcaataactttcttaaaaygactagagggagcaagtgacagctaggacttgaacacaggctgttggccttcaggatctaggctcctaacacaatgcaccaaagccaagtcagtgccaaa

SEQ ID NO: 11919 - DNA, 201 bp, Homo sapiens
actatgtgctcaaattcgtatgtgtatgtttcccaaactggtctcatcatcacaaacacacacatacacacacctttaaggttatactgctgttatccacrttttgcaagtgagaaaactgaggcacagcaaggataagtaatgtgtcagtcacccaggtagtgaatgacatgtccaagactctagcctgagcagtttgtc

SEQ ID NO: 11920 - DNA, 201 bp, Homo sapiens
cactcacaacagccttgcgaaataggactatttttattcccattttacaggtaaggaaacagagaccagaggtgcaataactttcttaaaacgactagagkgagcaagtgacagctaggacttgaacacaggctgttggccttcaggatctaggctcctaacacaatgcaccaaagccaagtcagtgccaaagttattcca

SEQ ID NO: 11921 - DNA, 201 bp, Homo sapiens
gtgacagctaggacttgaacacaggctgttggccttcaggatctaggctcctaacacaatgcaccaaagccaagtcagtgccaaagttattccatacaaayggcacttgttctttcaccctttcaatgttcatgttatctctgctcttattttcatcttcattgtacacctccccttacatgtatttgcaagtctctcact

SEQ ID NO: 11922 - DNA, 201 bp, Homo sapiens
cttgaacacaggctgttggccttcaggatctaggctcctaacacaatgcaccaaagccaagtcagtgccaaagttattccatacaaacggcacttgttctytcaccctttcaatgttcatgttatctctgctcttattttcatcttcattgtacacctccccttacatgtatttgcaagtctctcactttgcaaaatggaa

SEQ ID NO: 11923 - DNA, 201 bp, Homo sapiens
agcacacaatccaggctcgtattctttgtacataaaaatacaactattacatcatcgcattaataatcacataagcaacgtggtgtgtaatttacaagaasacttaaagaactctcagtaccttggtgccggttagagacttcactgaatacattttaacttatactcctttatttgttttgataaaaaagagagtcaaac

SEQ ID NO: 11924 - DNA, 201 bp, Homo sapiens
tagaggggaatcccagaaaaaaatctaagtctgaaagctccacagagttctctgcctttgccttccctggaaaaggggtcgggggagagcaaacagatgcyagaagccagtaaagtcctgtcctcatgaaagctctcagcccagaggacaacactctggggcagtcacttcagtcataggatatttccctctccaaataac

SEQ ID NO: 11925 - DNA, 201 bp, Homo sapiens
tcttcatgagactgagacttcatgacctacatcagtatgacatcacttcccaaagaaacatgaatccatatccaaaattcttgcaatacataatgtaagcrttcattgaagtttcttgaagcggctagaagaggaattactacatcatgtaacatgtatcaagacctctttagaaagcctcattagatatttctcttcttc

SEQ ID NO: 11926 - DNA, 201 bp, Homo sapiens
taagtctgaaagctccacagagttctctgcctttgccttccctggaaaaggggtcgggggagagcaaacagatgctagaagccagtaaagtcctgtcctcmtgaaagctctcagcccagaggacaacactctggggcagtcacttcagtcataggatatttccctctccaaataaccgaggagagagcctaacctctgggg

SEQ ID NO: 11927 - DNA, 201 bp, Homo sapiens
gcaaacagatgctagaagccagtaaagtcctgtcctcatgaaagctctcagcccagaggacaacactctggggcagtcacttcagtcataggatatttccytctccaaataaccgaggagagagcctaacctctggggtgagtgtggtgtataaagtgtgagaatcgtgcgtgtccaggaagagagtgctgctaacagatg

SEQ ID NO: 11928 - DNA, 201 bp, Homo sapiens
taaaaagagtatttgacttcaaaatcatacttctcagtatttgccctgaggaagtaactcaaaatgggaaaagaaatgtataagcctgaagatgtttagtrtagcatattttttataatttcaaaacaaaaaatttagaagtcaaatacacagaatattctcttatctcaacaatgcaatattatgcagcaattaaaactg

SEQ ID NO: 11929 - DNA, 201 bp, Homo sapiens
tgcaagtgagaaaactgaggcacagcaaggataagtaatgtgtcagtcacccaggtagtgaatgacatgtccaagactctagcctgagcagtttgtctctgggatctgtggttttatggtaactaaaaccgccactcatggctagacatggtgggttgtgcctgtggtcccagctactcgggaggctgagatgggagggtg

SEQ ID NO: 11930 - DNA, 201 bp, Homo sapiens
gggagggcgaggcaggcggattacctgaggtcaggagttcaagaccagcctggccaacatggtgaaacctcgtctctactaaaagtataaaaaaattagcygggcgaggtggcaggtgcctgtaatcccagctacttgggaggctgaggcaggagaatcacttgaacccaggaggcggaggttgcagtgagccgagattgc

SEQ ID NO: 11931 - DNA, 201 bp, Homo sapiens
tttccatgtggtctgctttttgagtgatgaattttctttttttacaaagatatcattgaaataattaaaattgtcaattgattgcaatgtcacacttctcaaaaaaaaaaaaattagtattgcagcgtctaaaccaaaagcataagggcagtgaatgcaaaacagatgttcatctcggtgggtgttcaaaacaatttttta

SEQ ID NO: 11932 - DNA, 201 bp, Homo sapiens
agatgagaaacaaagatatccatcaaagggctatttaattttagaaaagttaaccagccattagacattcatgggcaatagttcaaggaacaagaaccacaaaaaaaaaaatgagagttagaattgaagaaacaaatctttaaccctcagaaaaccaagaggttttttaataccttattttctatagtagcatttagcaaa

SEQ ID NO: 11933 - DNA, 201 bp, Homo sapiens
atagatgtggaaaataaggttcataggacgaaattacttcctcaaaagcgacataactgcgttgcagcaaaaacggcaggagagtgcaggtctctaagccmagtcttggactaggttcttgattccaacagttctccagtgatgcttctgaagacactgggctgaaagtgaacagtgaccctctttcccgaatgtctataa

SEQ ID NO: 11934 - DNA, 201 bp, Homo sapiens
tgggaaacagagcaagactgcatctcaaaaaaaaaaaaaaaaaaagatagcaaatacatccatcatcctcaaaaatttcttcctaccccattataatcccytcctcctgccacctgctccctcctggtaaccgctgatctgttttctgtcactatatatttgtcttcattttctaaggttttatataaatggaatctttcc

SEQ ID NO: 11935 - DNA, 201 bp, Homo sapiens
aggaagatggctgaatctgcctggtggggagaggggtaatttgctgcaggtggaaccactttattcagacctgagcaccgcagcgagccctctgtggaccsgctttgctgagaaaacttgctgctccctgggttctatccagagcagcctggcgattgtgttctaattttccttttagatagctgaatatgagtattagaa

SEQ ID NO: 11936 - DNA, 201 bp, Homo sapiens
attgccagtaaagaatattgctttaatattctttattaaatataagcaaagctattcctcagaaatgaaagaaaataaagtctttttcagatatgcaaaarctaagggaagactagccttacaagaaacactcaagagagttttagatctggaagtgaaaagacaataaccaccaccatgatgaaaacaaatgaaattata

SEQ ID NO: 11937 - DNA, 201 bp, Homo sapiens
taaatcttcatttcctcatttgtaaaatgtgtatagaaccaccccgaagttccgggatcatggattagagagagaaaaggtttaagacctcttagcacagyttctaacacatagtatagtcagtgttcgtaaatggagttcatattaataccctttttttttttgagacagagtctcactctgtcgcccaggctggagtgc

SEQ ID NO: 11938 - DNA, 201 bp, Homo sapiens
tattacaaatattgaaatatcttaaaatccatctaaattcagcattacttcaaaattatggcagttgttagagttaccaatagatgtaatttataggcatktgtattataaatttgtttttaatactttgataattacttaaaaataatttgttttatgtattttatgcctccatgaacattattttgagaagggatccag

SEQ ID NO: 11939 - DNA, 201 bp, Homo sapiens
acagagtctcactctgtcgcccaggctggagtgcagtggcgcaatctcggctcactgcaggctccgccccccgggttcacgccattctcctgcctcggccyccagagtagctgggactacaggtgcccaccaccacgcccggctaattttttgtatttttagtagaaacggggcttcaccgtgttagccaggatgctctcg

SEQ ID NO: 11940 - DNA, 201 bp, Homo sapiens
cctactctgtggattttttaaaaatttccttcatagtgatggagcagtttttaattttgatgaagtcaaatttatcaacttctatgtatcatgctttgatrtcttattaaagaaattcttgcctaatccaagctcacaaagattttctgctatgttttcttccaggcacacatattatagtttatgttatatgtttagacc

SEQ ID NO: 11941 - DNA, 201 bp, Homo sapiens
tgataattttgacatggtacctggcacatagtaagagctcaataaatttcagctattattttagtgtagttggaaactaaagtaaaatttcaattacaaaatgtgtacacacctaacaaaattccacagatggttaaaatttgtgaacttggatgggaaaaacattaccccctagctgaaatttagaatttccttcaatta

SEQ ID NO: 11942 - DNA, 201 bp, Homo sapiens
aagatgggaggaaaagtgtcacaccttggggctgccccgatgtctctttgcctcttaggtgcagggtactccatactctcgtgactaaggcatgaagcctrgaagtggctacttctgcctgtggtttatagccctactttattctagacagctccctgcacagattagaaggcaggaagcagagcaagtgttcctgtaatc

SEQ ID NO: 11943 - DNA, 201 bp, Homo sapiens
tggcaaatttttctgaatgtgacctttttttgctgatttgctgggtttgggattaactagcattattttgccacctttatattgtatttataaaaaaaaaagtactatcaatcaatcatactactttggattgttgtgctggtgtaatgtggatttaacatcaataaatatttgacaaataatagttgcagttttgtgaag

SEQ ID NO: 11944 - DNA, 201 bp, Homo sapiens
atacagttgacttctatattattgattctataatctgcaaccttaccaaacttattctagtagcatttttatagattccattggatttctacataatagtrttgtttgcaaatacagacagctttgcttcctcctttccaaactagatgcctgctatttatttttcttgccatattgcaatggccaaagccttcagtaaaa

SEQ ID NO: 11945 - DNA, 201 bp, Homo sapiens
gggtttcaccatgttggccagtctggtctcaaactcgtgacctcaggtgatctgcccatctcagcctcccaaagtgctgggattacaggcgtgagccaccrctcccggcctccacttgttcgttcaatatacgtttgccctatagagttccacgcatctgagaatattccaacaaatcttagaccatttccaagcaacgga

SEQ ID NO: 11946 - DNA, 201 bp, Homo sapiens; identical to SEQ ID NO: 863

SEQ ID NO: 11947 - DNA, 201 bp, Homo sapiens
tatattattgattctataatctgcaaccttaccaaacttattctagtagcatttttatagattccattggatttctacataatagtgttgtttgcaaatamagacagctttgcttcctcctttccaaactagatgcctgctatttatttttcttgccatattgcaatggccaaagccttcagtaaaatgttgaatcaagtg

SEQ ID NO: 11948 - DNA, 201 bp, Homo sapiens
aatataaattaaaaccacaaagcaaatggaaagcaaaattgtggaatcaacctaagtgtccaatgtccatcaatggttgattggataaagaaaatgtggtktgtgtgtgtgtgtgtgtgtgtgtgtatgtagatatatatattatacattatatataatatatataatatacacacatgtacaccatggaatactactcag

SEQ ID NO: 11949 - DNA, 201 bp, Homo sapiens
gagggaatctaagtggtcaaattcctagaaatacttgtcctcagcaccactaggtggcagtagttggttgaggctgtgaatgatcggtaacataatcactagtagtgaagccatcacagatgctagcaatgacttaggagtctcccacagctggtcagacaggcattctgtgaagcagatggccagtggacagtgtgagcc

SEQ ID NO: 11950 - DNA, 201 bp, Homo sapiens
caaataacaaccttttcttccattttaaattttgtatgactttggctgagggtcattgaaaaatcaaggatgggaatacacacacacagaggcacacacayatacacacacacacacacgccccacagtcttacatggtgaggtcctgactgaagtttattaggaaaactaggagagacaggccacaggacttttcaacct

SEQ ID NO: 11951 - DNA, 201 bp, Homo sapiens
tgagggaatctaagtggtcaaattcctagaaatacttgtcctcagcaccactaggtggcagtagttggttgaggctgtgaatgatcggtaacataatcactagtagtgaagccatcacagatgctagcaatgacttaggagtctcccacagctggtcagacaggcattctgtgaagcagatggccagtggacagtgtgagc

SEQ ID NO: 11952 - DNA, 201 bp, Homo sapiens
gccccacagtcttacatggtgaggtcctgactgaagtttattaggaaaactaggagagacaggccacaggacttttcaaccttcctgagtagagctaacakgagactaagcctactcagtgagtctcagtgaaaactgggaaagagggatacggaggagaagcagtaagcactgctgcagttatggcttggaagaatgctg

SEQ ID NO: 11953 - DNA, 201 bp, Homo sapiens
gtgagggaatctaagtggtcaaattcctagaaatacttgtcctcagcaccactaggtggcagtagttggttgaggctgtgaatgatcggtaacataatcactagtagtgaagccatcacagatgctagcaatgacttaggagtctcccacagctggtcagacaggcattctgtgaagcagatggccagtggacagtgtgag

SEQ ID NO: 11954 - DNA, 201 bp, Homo sapiens
gatccaagaaaacaatttcccattggatggtattattcagagtgttattaacaatcagtcctgaatttttcagaatagtactaaagttgtcttttttttttaatgggttccttccttcaaggttataataaagcttttttataaccttcaaagaatacaaagtggaatttgtaatttataggatatacattcctagtttac

SEQ ID NO: 11955 - DNA, 201 bp, Homo sapiens
agaaagagagagagagagagcatgcaagcaagcagtatataaaccagtgaattttacctggcgcttttaaaaataatatttgagttcatatgaaattcaamtagcatcttacaaatttcaatgtatatttcctagaagtaattcaaggtaccctcaatatatgctgtcaggtagagtataaaggggtgtaatgatcaatgc

SEQ ID NO: 11956 - DNA, 201 bp, Homo sapiens
cttaattatttacttggccagtactatatgctgtttctttattagtggttcataaaacaatggtatctagtggtgatttcatgttagagtcagtgaactasaaatttgttttctccattttaaaaataacatactaagatatgaatagtttagcaaaacttcccaattgtccagttactggtagggatggaattcacactg

SEQ ID NO: 11957 - DNA, 201 bp, Homo sapiens
atgctgggtggtatactgtgtcagccaagaatgaagcagggattgtgtcctgtactgccaggctggacgtttacagtgagtgccacttcatctcatttcaytgcgtttactcattaaattatgaaaaattagacatctggacagcaaatcacattactctttataaacaactattgtgttttatttgtcaaaaaaattcat

SEQ ID NO: 11958 - DNA, 201 bp, Homo sapiens
cgcttgaacccaggagacagaggttacagtgagccaagatcgtgccactgcactccagccaggtgacagagcgagactccatctcaaaaaaaaaaaaaaaagtgcatttaatacacctaacctactgaacatcttaggttagcctagtctatcttaaatgtgctcacaacacttacattagcttacagttgggcaaaatca

SEQ ID NO: 11959 - DNA, 201 bp, Homo sapiens
ccccgtctctactgaaaatacaaaaattagccgggtgtggtggcgtgcgcctgtagtcccagctacgcgggaggctgagacatgagaatcgcttgaacccrggagacagaggttacagtgagccaagatcgtgccactgcactccagccaggtgacagagcgagactccatctcaaaaaaaaaaaaaaaagtgcatttaat

SEQ ID NO: 11960 - DNA, 201 bp, Homo sapiens
catatatacagatgttcttcaacttagtatggggttatgtcctgataaactcattataagttgaaaatattgtaagttgaaagtgcatttaaggcggggcrcagtggcttacgcctgtgatcccagcactttgggaggccaagaccgggtggattacctgaggtcaggagttcaagaccagcctgaccaacatggtgaaac

SEQ ID NO: 11961 - DNA, 201 bp, Homo sapiens
gtgatgatttttattattctaaaaagatctctaagataactaaaattaagcaggctgcacgttctctaatcatgtaatgaatgaatcaggattcttgtctsagatgcaggccaaatgtgctctggaactggttagtgcggcatatggtgaatctacatcagacttgacccccgcaggtttgtaactgaaactttgtataaa

SEQ ID NO: 11962 - DNA, 201 bp, Homo sapiens
aacccaggaggtagaagttgcagtgagctgagattgtgccactgcactccagcctgggtgacagagagagactctgtctcaaaaaaaaaaagaaaaaaaaatcagacatggggcaaaatggagctgatgaacacagctaagaaggagtagtcagggaagtgttaatagaaggagggtggagagaacaatgtgggggcaagg

SEQ ID NO: 11963 - DNA, 201 bp, Homo sapiens
gaccacgtttcctgtctcttcccttcttgtgctttttgccttgctttatgatgctggcaagtatggaagcctttatctaccgtgtaaatgtatatcgttgyaattcaacagggaaccgggcttcaaattacagcctccgaatgcaataaccttggttatttaccgagtacaaagtaaacaacttactttactgtcaaaagt

SEQ ID NO: 11964 - DNA, 201 bp, Homo sapiens
gtcagagtgttctttttaaattgtaaatctgatccagacatcagcctgccaacaacccaccagcacaggtggttgtcagcaggctgatgtctggagcagattttttttttattaatttagaacaaaatcttctgttcttaatataatctacaagtaaggcccagccagcatgttctagagtctgtccacctctccaccctc

SEQ ID NO: 11965 - DNA, 201 bp, Homo sapiens
ctagactagagaggctgttcatctgagagcatactggtttgttttgttttgtttttccctcttcctgatatatccagaaaatacttcctcctcccagcccmgtttagcagtaacttacttccttggagaacaatgcctcaacccatattcaggccttaggttggtacagacaatggcactttacatgcgtgggactctccc

SEQ ID NO: 11966 - DNA, 201 bp, Homo sapiens
tctaccatcttctccccaactcacgcctacagctgtgttctgagtaagctttctttccatttctcaagatttccaagcacaggaagtctcagggcctgtgyatttccagttccttctgcctggagtgctctttttcctagatcttctcatgatgacaggtctcagctcaaaagtcaccatctcaggaagccctgctctgaa

SEQ ID NO: 11967 - DNA, 201 bp, Homo sapiens
tacatttttactttaaaaagcatcagtgcttcttctcttactatatggaaattaaagattctttttgcaattttgtttcttattctttctacattctgtartgtattagaaacatgaaattactcctttgttcttcaggaactgttcatttgaaactctccaacataaggatgctggggagaaaacattcctatgttttat

SEQ ID NO: 11968 - DNA, 201 bp, Homo sapiens
cctggcttatttcacttaagatgatgtcctccagcctcatcaatgttgtcacaaattgcaggatttccttctttttaaagactgaatattatttcactgtggtgtgtgtgtgtgtgtgtgtgtgtgtgtgtgtatcacattttctttatccatgcatccatcaacagatgggcaaaggacatgaacagacaactttcaaaa

SEQ ID NO: 11969 - DNA, 201 bp, Homo sapiens
ctctccaacataaggatgctggggagaaaacattcctatgttttattttgataatgaaatattgtgtagttttaaagcttagacatataaacttcatgtgracatcatatatatataaaaaatcatatatatataaaatatcatatatatacacacacacatgtgcacacccttgcatctaatttataaattctaagatag

SEQ ID NO: 11970 - DNA, 201 bp, Homo sapiens
ctggcttatttcacttaagatgatgtcctccagcctcatcaatgttgtcacaaattgcaggatttccttctttttaaagactgaatattatttcactgtggtgtgtgtgtgtgtgtgtgtgtgtgtgtgtgtatcacattttctttatccatgcatccatcaacagatgggcaaaggacatgaacagacaactttcaaaag

SEQ ID NO: 11971 - DNA, 201 bp, Homo sapiens
gagagaaacataaggccataagaaagaagaaatgctccagggaaagtcttagactgagaagagaggagggctaaagacagactctggaaaatgtctgtattcaagaaccagacgtggggctgggcactgtggctcatgcctgtaatcccaacactttggaaggccaaggtgggtggatcacttgaggtccagaagttctag

SEQ ID NO: 11972 - DNA, 201 bp, Homo sapiens
tggcttatttcacttaagatgatgtcctccagcctcatcaatgttgtcacaaattgcaggatttccttctttttaaagactgaatattatttcactgtggtgtgtgtgtgtgtgtgtgtgtgtgtgtgtgtatcacattttctttatccatgcatccatcaacagatgggcaaaggacatgaacagacaactttcaaaaga

SEQ ID NO: 11973 - DNA, 201 bp, Homo sapiens
gcttatttcacttaagatgatgtcctccagcctcatcaatgttgtcacaaattgcaggatttccttctttttaaagactgaatattatttcactgtggtgtgtgtgtgtgtgtgtgtgtgtgtgtgtgtatcacattttctttatccatgcatccatcaacagatgggcaaaggacatgaacagacaactttcaaaagaag

SEQ ID NO: 11974 - DNA, 201 bp, Homo sapiens
tgtatgtggagtgaggtaagggtctactttccttcttctgcatataaatatccagtttttctagtgccatttattgaagaaactgtcctttccccattatrtaatttgggcacccttgttgaagaccaactgtccatatatgtatgggtttatttctgggttctctactatgtttcattggtctatatgtctgtttttatg

SEQ ID NO: 11975 - DNA, 201 bp, Homo sapiens
ttgtcccattccaatgtggctttgcataattggaaatcattatgtatagacatcaggtaaaatctagcaccagcttatatagtactctaagaccatcaggtttttttttttttacctcgtcttcagttttaatttaaagcaattaaaattaatatattcagatttcaacaaagtgtaagcatccctctgctgaaccactgt

SEQ ID NO: 11976 - DNA, 201 bp, Homo sapiens
atgataaatgtgcgcaccccctggattactgcacaagccttctcacggaccgccctactgtcagtcttgtcttcctctttccctacctctgtcccggatcyagactgcaatcagttatctctcaaaaatgtaagtctggtgatgtttctcaaggacttaacactcttccttgcctactgactacccataacataaaatgca

SEQ ID NO: 11977 - DNA, 201 bp, Homo sapiens
tgccgtgtgactgtaatcttgtgatgggttctgagagatgtgagcaggaacttgatagagcctaaaatctagtgggaaagccaagacagatagaaaaaaawaaaaaaaaaaaaaaaacctgctgtgtaggaaattgcttaggagatctagcaagttttatagaaattcagaaaaactgactaattttccatttgtcctgag

SEQ ID NO: 11978 - DNA, 201 bp, Homo sapiens
atatgtgttttttctctttgcctttggatagttttctggctttcagattttgatctttcagattttgacaaatcagaaaaagaccaaacccagccaaaacstgtctttcattacagtttgttctggttgaaatgttaaaccttctcacatccgtggtattgaagcaaattatgatccaaaaagaaagaggagttgggttca

SEQ ID NO: 11979 - DNA, 201 bp, Homo sapiens
cataaaaatacaactattacatcatcgcattaataatcacataagcaacgtggtgtgtaatttacaagaacacttaaagaactctcagtaccttggtgccrgttagagacttcactgaatacattttaacttatactcctttatttgttttgataaaaaagagagtcaaacagaattgtctggaatcttttcttaaggtta

SEQ ID NO: 11980 - DNA, 201 bp, Homo sapiens
cacaacacccagaaaaatctcataaaatctcatacatggaacacgtaacatggccagtttaacaatcggccaaacaatctgcaaaaatgatataacagtgmctgaatttgaacatctctagacataacaaatagagcatagttacattaccagactaacaacgcttgattaaggcatacagagaatttggaagacacaaag

SEQ ID NO: 11981 - DNA, 201 bp, Homo sapiens
atgtatcaaaagatacattttatatagcatggaaatctatgtgtaaaagccacatagatgttttgatttttgatgaaatcaatcaaagacaaaaaccatgygttacccaatgtaggattaagcttttagaaggaagctatgggtgtttgatctaatggtgatttcttaaaagtgtttatcattctatctaaaagaaaagat

SEQ ID NO: 11982 - DNA, 201 bp, Homo sapiens
acaccttctctgcccttcaccagagctggggccagcctcttccgataaatgctaaataatgactatcgctttgaaggtgcacttattagcaagggagtccrtgtgtctagggttcttttacgccattacagtgtatgaataatgtacatttgacgggggatgatcctctcaccctactcaagtttggaaccatttgacaga

SEQ ID NO: 11983 - DNA, 201 bp, Homo sapiens
agcttgtacacaatagtgtgaaaggtgctggtgaacatttaatacctatgcgccatctccattcagaggctgaacaggtataatgagctaaaaaatggtgkccttaaaagagatttatgctcttgtagcagcaacccataaaattaattgccactgctgacttctttcatctttgcattttgaatatgtatttgcagtgct

SEQ ID NO: 11984 - DNA, 201 bp, Homo sapiens
atttacaaaagagatttattggacttacagttccacatgtctggagaggcctcacaatcatggcagaaggtgaaaggcacatctcacatggctgcactgtkagagagcatgagagccgatggaaacgagtttcccctcatcaaaccatcagatctcatgagacttattcactactacaataacagtatggaggaaactgcc

SEQ ID NO: 11985 - DNA, 201 bp, Homo sapiens
atgtgtgccactgtgcccaacttttagagattttttttttctggctcagaaaaaatccctctcagtatgtttattccaaaccctttctaacaggtgtccaygcgttaggcaaaaagccttacagcttctcagattcttctcagattcaaagattcatctgtattcatcatttgagattcatctcaaagacttgcttagaga

SEQ ID NO: 11986 - DNA, 201 bp, Homo sapiens
tccattccaacattctgcccatcacagacattccctgggagcacccaaggcaggcggttgtccagcctgtgaatggacacatgcagagacggagagcctgkttcctgagaaggccaagccatgatgggcatctgtagtggctgcaagacagcataatgcgggggaaagagtataggattgggaggcatgggaattggttca

SEQ ID NO: 11987 - DNA, 201 bp, Homo sapiens
tcaaactcctgacctcaggtgatccgcccaccttggcctcccaaagtgctgtgattacaggcgtgagccaccaagcctggcctcgttttttcctttgagayagagtttcactctcgttgcccaggctggagtacaatggtgcaatctcagctcactgcaacttctgcctggcaggttcaagtgattctcctgcctcagcct

SEQ ID NO: 11988 - DNA, 201 bp, Homo sapiens
actatgaagctgttggatatgatctcagtcattctagcaataacatggtcatttaaagttgtttttctacgtctagccaaaactggcctcctgtaactgcmagctattggtgttagttctaattttgagaaatgtagaggatgggtcttatctcattggtgtggcagctcatcaagtatttaaagatggctgcaatgaccc

SEQ ID NO: 11989 - DNA, 201 bp, Homo sapiens
ttcagagatgtttttctttctttcttttttatgtttttgagacggagtttcactcttgttgcccagactggagtgcaatggcgcgatctgggctcactgcracctccgcctcgtgggttcgtgcgattctactgcctcggcctcctgaatagctgagattacaggcaagcgccaccatgcctggctaattttgtattttta

SEQ ID NO: 11990 - DNA, 201 bp, Homo sapiens
gattttatctcatttattagatttgtatcccatgtacctgacctagtatctagcacaacttagtagatatcaattaatgttcattgtatagtcctttgatratgcggtttggccctgtgtccctacccaaatctcatatcaaattgtaatcctgatgggaggtaattgaatcatgggggcggacgttccctttgctattct

SEQ ID NO: 11991 - DNA, 201 bp, Homo sapiens
tgcagtttatcaagtggttttataaccattatcttgtttaattctcacaacatccttatgagtagtgtgtgtgtgtgaccatgagaatatatgagtgtgaktgtgtgtgtgtgtgtgtgtccgtgtaggagaggaaatgattaacccatttcatagatgaggtgtaacccatttcatagatgaggtgtaactaacaatgta

SEQ ID NO: 11992 - DNA, 201 bp, Homo sapiens
aaaaaagagttcccaaagtgagaccattactcaaaaatttgagatgggaggctaaattgcccctgctgtgtatttagagggttagtattgaataggtcaamaagcatttcctaagtctctaggctgaatttctaatacggtttcttagtaaccattctcttaaagaatgtgagatttgaggtaagctttgctttaagggag

SEQ ID NO: 11993 - DNA, 201 bp, Homo sapiens
agaatcgtttaaacccgggagacggaggttgcagtgagccgagattgcgccattacatctcagcctgggtggcagggtgaaactctaaagaaaaaaaaaaagagttcccaaagtgagaccattactcaaaaatttgagatgggaggctaaattgcccctgctgtgtatttagagggttagtattgaataggtcaacaagca

SEQ ID NO: 11994 - DNA, 201 bp, Homo sapiens
agcaaagtccagaattcaccactgtctacatgctggacccaattcgttttgctgtcgttgatcactaatttgggaattgtgggagggagaggaggagcgartccctctctttactttagaactggtaaaactgagatagccagagatttctagaactgccaagctaaaacgtaagctgaatcattgtgcaagtatggatta

SEQ ID NO: 11995 - DNA, 201 bp, Homo sapiens
taaaaatgattggtgattgaatctcaaatgtattagtccgttctcacactgctataaagaactacctgagactgggtaatttatgaagaagagaggtttarttgactcacagttccacaggctgtacaggaagcatggctgcgtggctgggaggcctcgggaatcatacagtcgtggtggaagtgtgaaggggaagcaagc

SEQ ID NO: 11996 - DNA, 201 bp, Homo sapiens
tgtttatgaagtagccttaaaaaaaacagacgcgtgaggggaggtagtatcccactaatacttaacaaatcaaatgtttgtaacacagagaatgaatgtcttttcagaaccttgtatagagcttaatgaaaccggtatagtgaaagagcatcatttgtagtcagaccaaagaggacttgaattcttgttcatgtgatattg

SEQ ID NO: 11997 - DNA, 201 bp, Homo sapiens
aggtgtaagccactgtgcccgggctacattacatttttactcagttaagagcaaacaataataggtgaatagcagcctgattctgtatgttaaaaatgatwggtgattgaatctcaaatgtattagtccgttctcacactgctataaagaactacctgagactgggtaatttatgaagaagagaggtttaattgactcaca

SEQ ID NO: 11998 - DNA, 201 bp, Homo sapiens
atcgcttgaaccaggaggcagaggttgcagtgagccgagatcgtgccactgcattccagcctggcaacagagcgagactccgtctcaaaaaaaaaaaaaamaaagtaggaagtaatgctgataacttgaacacaaacactttcgtattttcatttcaggtttaaagtattcatatatcataatttaactcactagcagagt

SEQ ID NO: 11999 - DNA, 201 bp, Homo sapiens
ttttagactttttcaaatatgtgtgtattgtatacacacacatatatacatacatgtgtatacacacacgtatatacatacatgtgtgtacacacacatayatacatgtgtatacacacatatatacatacatgtgtatacacacacatatatacatgcatgtgtatgcacacatatatatacatacatgtgtatacacac

SEQ ID NO: 12000 - DNA, 201 bp, Homo sapiens
agtagagacggggtttctccatgttgctgaggctggtctcgaacccccgacctcaggtgattcacccaccttggcctcccaaagtgctgggattacaggtgtaagccactgtgcccgggctacattacatttttactcagttaagagcaaacaataataggtgaatagcagcctgattctgtatgttaaaaatgattggtg

SEQ ID NO: 12001 - DNA, 201 bp, Homo sapiens
gtggtgtctttcaacaatataaaagacacctaaaaataaagaagggaaatgaaaagcttggtgaaatctgccctttgctgaaagctataactggttatggytgtgaaaatatctgtgcccagtgtgggcttccaacatacagctaaggatgtagccactccctggaggccatggaaaagggggatctactttcagcccttt

SEQ ID NO: 12002 - DNA, 201 bp, Homo sapiens
cacacacacacatatatatacacatgcactgttttagactttttcaaatatgtgtgtattgtatacacacacatatatacatacatgtgtatacacacacrtatatacatacatgtgtgtacacacacatacatacatgtgtatacacacatatatacatacatgtgtatacacacacatatatacatgcatgtgtatgca

SEQ ID NO: 12003 - DNA, 201 bp, Homo sapiens
acgtatatacatacatgtgtgtacacacacatacatacatgtgtatacacacatatatacatacatgtgtatacacacacatatatacatgcatgtgtatrcacacatatatatacatacatgtgtatacacacatatatacatatacactatataaactgtgtttgtgtgtgtatacatatataaacggtgtgcgtgtgt

SEQ ID NO: 12004 - DNA, 201 bp, Homo sapiens
tcctgagtagctgagattacaggcatgtgccaccatacccggctaattttatagtagagtagtagagacggggtttctccatgttgctgaggctggtctcraacccccgacctcaggtgattcacccaccttggcctcccaaagtgctgggattacaggtgtaagccactgtgcccgggctacattacatttttactcagt

SEQ ID NO: 12005 - DNA, 201 bp, Homo sapiens
tactttctaaccactcaatctaaccaagacaggaggggataatggggccgggcaaccaccatccagcatagagcactcttgtgactccggtgagtctgcakatattaatgtttgagtcagacagttggtctggccagtcagggcaagagtgcagggtcacaaggtccaaagcatggcaactaagcgtcaaaaacccttcag

SEQ ID NO: 12006 - DNA, 201 bp, Homo sapiens
tacatacatgtgtgtacacacacatacatacatgtgtatacacacatatatacatacatgtgtatacacacacatatatacatgcatgtgtatgcacacayatatatacatacatgtgtatacacacatatatacatatacactatataaactgtgtttgtgtgtgtatacatatataaacggtgtgcgtgtgtgtgtatt

SEQ ID NO: 12007 - DNA, 201 bp, Homo sapiens
ttgagtcagacagttggtctggccagtcagggcaagagtgcagggtcacaaggtccaaagcatggcaactaagcgtcaaaaacccttcagggtgagatttkgaaatggacagatatctgtcaaaagagagttatgtactcgccaggcaggcactttggagaccacttattcacccagccattccaccatttgttgaatgcc

SEQ ID NO: 12008 - DNA, 201 bp, Homo sapiens
tacatgtgtatacacacatatatacatacatgtgtatacacacacatatatacatgcatgtgtatgcacacatatatatacatacatgtgtatacacacayatatacatatacactatataaactgtgtttgtgtgtgtatacatatataaacggtgtgcgtgtgtgtgtattaatagtttggccacaatttagtttacat

SEQ ID NO: 12009 - DNA, 201 bp, Homo sapiens
ttgccaccagaagaattcactgtttgtattttggtttgcagacttgggctacgccaatgtcaatatagatttttatccttttttttaagagtttgcccaatttttttttagggcaaatttctagaaatctctttttttcattaaagggcatctatattttaaatttctacaatcattgctaaagtaccttctgtaaggctt

SEQ ID NO: 12010 - DNA, 201 bp, Homo sapiens
tgtatgcacacatatatatacatacatgtgtatacacacatatatacatatacactatataaactgtgtttgtgtgtgtatacatatataaacggtgtgcrtgtgtgtgtattaatagtttggccacaatttagtttacatattatatttatacagatttttcaacagttacatgttctaccattcctagtggctattttt

SEQ ID NO: 12011 - DNA, 201 bp, Homo sapiens
aggactcaaacttcctttattcagacgctgtggctcgggtcaagatacatattagccagaattatgtttacctgtgaataattggcagcccaatttgcagkggcttacattaataggggtctattttttactataacaagaagtctggccttagagagttgctgatgttggtttagcagttccacttgtcaagcactgatc

SEQ ID NO: 12012 - DNA, 201 bp, Homo sapiens
tcccaaagtgctgggattataatgtgagccatcatacctggccctgaatgtattaaaactatgcagtgataccccagtcatggattaaccactctaaatakaaattgtttctatcaaatacatatttatctctaatttaaggactggcaatggagaattttttaaagatcctaagcaacccattgccatcaaaacttccag

SEQ ID NO: 12013 - DNA, 201 bp, Homo sapiens
tctatgaccaaatagtaatgaaaaattctgcaggctacatttcacttctggcatttgtctgttttgaagttttgcctttctggtaccattttaatgctcarctacctggaatctgggctgatactgctcacggatttttcttctttctggtagtacatgtttctcaccagcagtcttaaagcctgcttgattctctgtcct

SEQ ID NO: 12014 - DNA, 201 bp, Homo sapiens
aaaacgattctacattattaggcttcttctcgtgtagtaattgaaaataactctgaaaactctcccttaggaaagtaattcatgagagctgcagtgagaamcaagaagggaaagaaaataaacaggcctgacaaattctgtagaagctgagaggttagacagtaacatcagtagtgttatacaaaccaagaaggacaaaaa

SEQ ID NO: 12015 - DNA, 201 bp, Homo sapiens
  misc_feature (1)...(201): n = A,T,C or G, or insertion/deletion polymorphism (see Tables 1-2)
ctcagatattttggaagaaagaaaatgaatcactcactcacagcactgaccgagtgaggtaagactgcacaatgagaacctgatccttaactgttcagtcntaatgatgtatcaaaagatacattttatatagcatggaaatctatgtgtaaaagccacatagatgttttgatttttgatgaaatcaatcaaagacaaaaa

SEQ ID NO: 12016 - DNA, 201 bp, Homo sapiens
aataaatagacataaaatggttttcttctcacaaaaatttgtaagtagtgtaaaagatattatatattgaaggaattcttgccaccagaagaattcactgyttgtattttggtttgcagacttgggctacgccaatgtcaatatagatttttatccttttttttaagagtttgcccaatttttttttagggcaaatttcta

SEQ ID NO: 12017 - DNA, 201 bp, Homo sapiens
ccttaactggtactaaattttcaggaaaataactaattccactcccatagcaacaagcatcactattttcatgtgtgctgagagtacagatctagttacaytgtgacctgctggtggtgaccttcagctcctgagatcatgctgtctttacttagccaggagaactggggttagaaaaaaggtacaaggggcattctcttt

SEQ ID NO: 12018 - DNA, 201 bp, Homo sapiens
ccctttcattcccaccacacttaatgtagtttattaaaaaacaaacaatgacagagggaactgggaagtacaaaacacacagtgaccggaggtgtaactgrttgattactgttctgactcatgtaattttgtcgactcatgtaattttggcactcggtgtgagctttttttctgtaagaattgaataatcaactacagcgg

SEQ ID NO: 12019 - DNA, 201 bp, Homo sapiens
gagaacatgaggtgagagtggttatgatgactgatgagaaacatattaataaatggctttataaaactctccttattctcttagattggcaagacaaagaytagacttttgtgttagggaaactaaccacaaattgtggcctggagccaattaggattgttcccaacccccttgtccaagcttggcctccttagaaatacg

SEQ ID NO: 12020 - DNA, 201 bp, Homo sapiens
ccctagtgttacatagagaaatagtaacagcagcatggactccaagaaccaaagaatttgcttatatataaagttttatatttatatatatatatatatayacacacacacacacacacacacacacacacacacacacacacctggtttttaaaacaacactgtcatctaccctcatagtcattgtcaaactacactcag

SEQ ID NO: 12021 - DNA, 201 bp, Homo sapiens
acacctggctaattttgtatttttagtagagatggggtttctctatgttggttaggctggtctcaaactcccaacctcaggtaatccacctgcctcggcckcccaaagtgctgggattacaggcatgagccaccgtgcccagcctctgatcttatatcattcctcttaccctcagtggaagacctcagtccaagcctggct

SEQ ID NO: 12022 - DNA, 201 bp, Homo sapiens
gtctcaaaaataaaaataaaaatgtccaccacagacctcttctaagtttcctaaaatgcctacttttaagaaattcagtgtccttgaaatctaggtttacaaaaaaaaaaaaaaaatgctcatcttataatttccaaaatcatctcttcaacccccttgaaatagggaactgatatatcacatccccatgtggttccaccc

SEQ ID NO: 12023 - DNA, 201 bp, Homo sapiens
cgacgttgctgcctccccagccaaggggggtgcttgtaatttctcctgcattatctttgaggtatcactcaccaaagcaatgaagggtaaccattccgaaycccaccagtgactccttctgaaaaacctatcagtaggagccttcagttttaaataatccctgccttgtagtcacacaggggaagaataccccagtcaatt

SEQ ID NO: 12024 - DNA, 201 bp, Homo sapiens
tggtggcacgctcctgtaatcgcagctactcaggaggctgaggcaggagaatcgcttgaactcgggaggcagaggttgcagtgagctgagatcgcaccacygcactgcaacctgggcgacagagtgagatgctgtctaaaaaaacaaaaaaaattacccttcattgggcaaaaaaccagggaactcaaccaaaaagatgtc

SEQ ID NO: 12025 - DNA, 201 bp, Homo sapiens
gaaaagacagcagcatgcttgttaatggaagatcctagacttcagatgcagaccctcaccaaatttctggctaaaccatgggtctatacctcaaaattaarccacacagtatatgcaaaaagtatgagtagtaaaagcaacaaatgttactttcccccacttcttttaaaataaagtaatataatattctaagctagtgat

SEQ ID NO: 12026 - DNA, 201 bp, Homo sapiens
tgacctacatcagtatgacatcacttcccaaagaaacatgaatccatatccaaaattcttgcaatacataatgtaagcgttcattgaagtttcttgaagcrgctagaagaggaattactacatcatgtaacatgtatcaagacctctttagaaagcctcattagatatttctcttcttcctccccacaaactgtcttttct

SEQ ID NO: 12027 - DNA, 201 bp, Homo sapiens
attgtcttacaaatccttatctagagtttatttctggagagagggtaaaaatccctagcccgcaaatgaggatctatggaactcccgctggggccgctacrtgacacaaaccagagtgagaaaaaaggtgccctgctcctattttcagctccttactccttccaccaccccagtcttgatagttaatcctagaaatttttc

SEQ ID NO: 12028 - DNA, 201 bp, Homo sapiens
atgtaacatgtatcaagacctctttagaaagcctcattagatatttctcttcttcctccccacaaactgtcttttctcttaatccatctctgatatccagrgctgtttgttgttattgctgctgctgttgttgttgctgctgctattttggtttttcatttgtttggatttttctataccctaacttctatgaatcactct

SEQ ID NO: 12029 - DNA, 201 bp, Homo sapiens
caacagagtgaaaggtcagcctatgttacagaagaaaataattgcaaatcacatatccaataagggattaatatccaggagatagatagatagatagatakatagatatatatatatatatatatatatatatatatatatatatatatatatcctataaggggttaatattcaggatatatatatatatctcctacaact

SEQ ID NO: 12030 - DNA, 201 bp, Homo sapiens
ccatctcaacaaaaagtacaaatattagctaggtgtggtggtacatgcctatagtcccagctacttgggaagctgaagtgggaggaccacttgagcccgasaggttgaggctgcagtgagccaggatcgtgccactgcactccagcctgggtgacgaagtgagaccctgtctcaaaaataaaaataaaaatgtccaccaca

SEQ ID NO: 12031 - DNA, 201 bp, Homo sapiens
agagtgaaaggtcagcctatgttacagaagaaaataattgcaaatcacatatccaataagggattaatatccaggagatagatagatagatagatagatakatatatatatatatatatatatatatatatatatatatatatatatatcctataaggggttaatattcaggatatatatatatatctcctacaactcaac

SEQ ID NO: 12032 - DNA, 201 bp, Homo sapiens
ggtgaattaaaccagactgccttgcaactgcctcaaagtctgtctcaacacagtgactcatccaagagaaacagagatgtgtcaccaaaaatatctataawtttttttcctgttttactagaaactccttagggatagagtcgagggactcatgctgtgcttagagctaaacttcctgaaaatcttctcccagggtcctgg

SEQ ID NO: 12033 - DNA, 201 bp, Homo sapiens
tgaaccgggaggtggagcttgcagtgagccgagatcgcaccactgcactccagcctgggcgacagagcgagactccatctcaaaaaaaaaaaaaaaaaaarggtggtgactgggcactgtggctcatgcctgtaatcccagcactgtgggaggcagaggcgggtggattgcttcagcccaggagatagagaccatcctggg

SEQ ID NO: 12034 - DNA, 201 bp, Homo sapiens
aaggccatgtaagtgtgaaggggctgatatggattaggagctgaatgaaacccagtgggctggaatgtggaagggagctggcaggagctggagaaggaagsagcagccaggtcatttggttggcatttaaatgacttttgcttttaatctaactgaaataggcagccacttagctgttttaaacagggaactgagctaatc

SEQ ID NO: 12035 - DNA, 201 bp, Homo sapiens
ctccctctcccctattccataggctctgggtcaaaacacacatacacacagcccctcacatgcagacaaaatctggtctccattcctcactttccccatcytcctccctatgccaaattctacattcctccagtgtagatactataaatataaaaagaacaaactcaatcccgaatcacgagggtgcttttctttgcatga

SEQ ID NO: 12036 - DNA, 201 bp, Homo sapiens
cccctcacatgcagacaaaatctggtctccattcctcactttccccatcctcctccctatgccaaattctacattcctccagtgtagatactataaatatwaaaagaacaaactcaatcccgaatcacgagggtgcttttctttgcatgaccacaacataagcactggtccatcattttgggatttttatgaagccttgaa

SEQ ID NO: 12037 - DNA, 201 bp, Homo sapiens
gatcacagtggttcagaaagcctaagtgtgaacgcataaggaaaggcataccgggcaaacggaactgaaaaagcaaggttatgaccttactctcaggtgawgtgtaattcaggccagaaattaatatagtaagaaaaggggcactttgtaatgctaaatagtgaaactcaaaatgaggctacagcaattatgaatacacat

SEQ ID NO: 12038 - DNA, 201 bp, Homo sapiens
gctcatgcctctaatcctagcactttggaaggctgaggcaggtggatcacctgaggtcaggagttcgagaccagcctggccaacatggcgaaaacccattyctactaaaaatacaaaaattagcctggcatggtggcgtgcacctgtagtcccagatactcgggaggctgatgcaggagaatcacttggacctaggaagaa

SEQ ID NO: 12039 - DNA, 201 bp, Homo sapiens
agagtgagactctgtctccaacatatagatagatagataaatagatagatagaccaaatacctaaatatcaaaaataaaatcagagtatataggataagayaggcctatctatgactcttttaaaaactgataaattcaattaaataaaattagaaacttttttaatgtcatgagatatcaagagccaagtcgaaagacaa

SEQ ID NO: 12040 - DNA, 201 bp, Homo sapiens
aagcctaaaattttggctgaatttggaaattatcagtgtgaaggctacacaccaaaaatataagaaccaactgtcctgaaagtttgggagttaagatttgrggaaattatttgaaatcatttcaatctaccaattcctgatttttttgcactaagaattgaaattctgaatcccttaatttatgtatcaaatatatctacc

SEQ ID NO: 12041 - DNA, 201 bp, Homo sapiens
tgagacaggagaattgcttgaaactgggaggcagaggttgcagtgagccaagattatgcctctgcactccagcctgagcaacagagggagaatacatctcaaaaaaaaaaaaaaaaaaaaaaaaaattctgaggatcaaatggggaaacatagatgagcatgctgtgtaacagtttacatcattattaaaaggagtccaat

SEQ ID NO: 12042 - DNA, 201 bp, Homo sapiens
gtattttcattttacaacacattctagtgtgttaggaagtatgtgttaagagttctcttctatttattattttcattactttcccattccagtatagacayagtaaactcctaaaattaagtatattcttcttaaagaattctaagtgaccattttggtggaaaaactacctgcgctagtttgcatgtgatctaaatgatc

SEQ ID NO: 12043 - DNA, 201 bp, Homo sapiens
ttagaacattgatccacaagacaacctttgagtatgctgttcttttccttcacagcaaacacgtatagtcattatcgtttgcttgtttgtttgtttgtttstttctttctttcttttttgagacagagtctcatctggagactcccaggctggagtgcagctcactgcaacctctgcctcccgggttcacgccattctcct

SEQ ID NO: 12044 - DNA, 201 bp, Homo sapiens
ggtttcaccatgttagccaggatggtctcgatctcctgacctcatgatccgcccacctcgacctcccaaagtgctgagattacaggcatgagatcagttattttttttttaagacacagagtctcactgtgttgcccaggctggcttcaaactcctgggctcaagcaatccttcaacctcagccttctaagtagctgggac

SEQ ID NO: 12045 - DNA, 201 bp, Homo sapiens
acctgatgagaaaatcttatagaattggaaaaatgtcaagaaggcaacattgtatgatggaaatcaaactacattggaattgaggatcctggttttgccaytatgtgaccttgaaccagctatttagtaatgtaacattgataaagcactgtattacatttgatcatttccttcccaaatatgacatgtgatcatcagaac

SEQ ID NO: 12046 - DNA, 201 bp, Homo sapiens
ggaacatcctacattctcttccccacctttctctcagaagcagatacttccccataaggatcttgtacctctccccagttttcccagcccatgacattagyccatcaagcctagatcaaatgccaatttccccagcatgtttactgtgtttcctttcactggaaataaattttagcatgttaaagacagcctctatattac

SEQ ID NO: 12047 - DNA, 201 bp, Homo sapiens
actggtggttttcaaggacagccatttggtctgaagcagctgcagccccttgattttaattatcctcctgaccctttgatccctaaccaaaaaggccctakgactgtggacagatgcagccactctcctttaacaactggactcagaccaagtcagcagtcacatttaacctcaccttgaaatgtagaaagtgaacaatta

SEQ ID NO: 12048 - DNA, 201 bp, Homo sapiens
cctgccaaaggtatatggacatgcaaggctggcacagatgtaaagctcaatatattaaactagatagcaaagaaatatacaccaagcccagcaatacaaascaccctgccttcatgcagttaaacattcttctgttttaggccacactgtacttgctggcttcatgtggcttcatgaaggcaagtgctgtgtctgttttga

SEQ ID NO: 12049 - DNA, 201 bp, Homo sapiens
agtttggaaaggagtttcgcccttgccacaacagtctgattggactcagaccatgaatcataagaaatgttttcttttacttaaacctgttcactcctcartaggctacaaagaactattggccattcaactttttttttttttttttgagacggagtcttgctctgtcacccaggctggagtgcagtggtgtgatcttgg

SEQ ID NO: 12050 - DNA, 201 bp, Homo sapiens
ataatgtgatccttgaatttttggcaccatctaatttttaagctggaatgtttggaaaatccttacggggagggaggaatcattatgcaacaacaacaatacacacacacacacacatatgtatgtgtacgtatacatatttataaaaaacaatttcaaaatcccagcacagaatagtataaagaaatatgccatcttaca

SEQ ID NO: 12051 - DNA, 201 bp, Homo sapiens
aatttttggttattttgcaagaggtattatttgccttaagccatggtaattagatttattctgctttgtgggcttttagatgagttaatcggctacaattkctcttaattccctctaatgctttctaggtgtggatatcaagaaacctacatgttgtgtttagaatattttatgtatcacagatatcagtgggtagtagac

SEQ ID NO: 12052 - DNA, 201 bp, Homo sapiens
tctccaggtatcacttgtgaaatggtgcacaggaggcatccaagaatgaatcaagatctggcccacagccaccacacagcttggggcctctggtttccccrtggtatcagtggcataagattaatttctatggctccaagcaatgattacagaaacatcctatttctctttgctacaaaatagagaatatcttagccatga

SEQ ID NO: 12053 - DNA, 201 bp, Homo sapiens
taatgtgatccttgaatttttggcaccatctaatttttaagctggaatgtttggaaaatccttacggggagggaggaatcattatgcaacaacaacaatacacacacacacacacatatgtatgtgtacgtatacatatttataaaaaacaatttcaaaatcccagcacagaatagtataaagaaatatgccatcttacag

SEQ ID NO: 12054 - DNA, 201 bp, Homo sapiens
atttttggttattttgcaagaggtattatttgccttaagccatggtaattagatttattctgctttgtgggcttttagatgagttaatcggctacaatttstcttaattccctctaatgctttctaggtgtggatatcaagaaacctacatgttgtgtttagaatattttatgtatcacagatatcagtgggtagtagact

SEQ ID NO: 12055 - DNA, 201 bp, Homo sapiens
gagtaaaagctgtaagtagacaccttgtcatcttctcctgtatatgcaagtttccattttgtttcataattagcttctctctcctcccagcaaggttttcragatccaacccaaagactgcttaaggagtggaacttagacttcttttacttcttcaagagtcacttcatggataaaaagcatcctgttcttgggactttg

SEQ ID NO: 12056 - DNA, 201 bp, Homo sapiens
atgaacccgggaggcggagcttgcagtgagctgagatcgcgccactgcactccagcctgggcgagacagcgagactccatctcaaaaacaaacaaaaaaartggttgctatgtgaaacaagtgagcaacctggatggaaagccaagactctgtgaggcgggtcattctggtccagaacttatcagaccaacacttcttaaa

SEQ ID NO: 12057 - DNA, 201 bp, Homo sapiens
tttttggttattttgcaagaggtattatttgccttaagccatggtaattagatttattctgctttgtgggcttttagatgagttaatcggctacaatttcycttaattccctctaatgctttctaggtgtggatatcaagaaacctacatgttgtgtttagaatattttatgtatcacagatatcagtgggtagtagactt

SEQ ID NO: 12058 - DNA, 201 bp, Homo sapiens
acacaaacattttaaagttagaggttctacgtcaatgaaataaggctaaaacatgaaccttgggaagaaacattggaaactttagtacaaaggaagttacsaatgaatatgattaagtttagaaagctttcctaggagaggaaatgtgagatgttgattcaggttttcgttcaaagaatgaaagcattatttaaaatatat

SEQ ID NO: 12059 - DNA, 201 bp, Homo sapiens
ataatatgttgcaactactacttgactctgactataatgcaaaagcagacatagacaacatgtaaatgaatgagcatggttatgttccccgccccccaccaaaaaaaaaaaaccttatttaaggactccgaaatgtgaactttatgtcacaaaatactcttcttcttttgatttttttcaaacccttaaaagtataaaaac

SEQ ID NO: 12060 - DNA, 201 bp, Homo sapiens
tgtgccattctttagtgttcagcacaccaggcattagatgatttgtcccactttcagccgtcagttgtcatgcttgctaaaagaaaagaaaaatgatagcmccagtcatcgtagtccctcaaggaatcatccatctagttcttgaattttctttacaacacctctgtcaattatttcttcctcttcagagcatctagtgac

SEQ ID NO: 12061 - DNA, 201 bp, Homo sapiens
gcctgtcaagtcaccagttctatgttgttaaaatgtggtaagttagggtgtgacccaagaggaggaggaaaaaaaaaaaaaaaaaaccctgcaaatatttkgatggcaggctctccctaaaaacaaaaagggcagcatagtttctggccagtatttagatcagtgtgtgtttgatctatgattggaatcatttgctcaatg

SEQ ID NO: 12062 - DNA, 201 bp, Homo sapiens
agcggagcttgcagtgagccgagattgcgccactgcagtccgcagtctggcctgggcgacagagcgagactccgtctcaaaaaaacaaaaaaaacaaaaamaacaaaaaaaaacaaaaaaaaaaaaacaaaaaaaacaaaaaagctgggtgcaatggctcacacctgtaatcccagcactttgggaggccaaggaggagat

SEQ ID NO: 12063 - DNA, 201 bp, Homo sapiens
ggagcttgcagtgagccgagattgcgccactgcagtccgcagtctggcctgggcgacagagcgagactccgtctcaaaaaaacaaaaaaaacaaaaaaaamaaaaaaaaacaaaaaaaaaaaaacaaaaaaaacaaaaaagctgggtgcaatggctcacacctgtaatcccagcactttgggaggccaaggaggagatcaa

SEQ ID NO: 12064 - DNA, 201 bp, Homo sapiens
ggtaggttaggcgtattaaatgcattctcaacttatgatattttcaacttacgatgagtttattgggccataaccccactctaagtcaaggagcatctgtwtaggctttggggtcaggcatcagctggaatcctgactctacctctttagttcagctatgaccttgaataagtcacttagactctttaagctttagcttta

SEQ ID NO: 12065 - DNA, 201 bp, Homo sapiens
gctgcccccatggtacactctgaaggaacctaaaggaccattgacctgagcatgttctcctcttgtgactttcaccaccctccccgccaagggtgtgcccmccaaaacaacagtggtctgtagatgtgaacattaacatgcgaatgtgcacttcattttatcttatatgtctgcaccctaacaactttcaaagctagtttg

SEQ ID NO: 12066 - DNA, 201 bp, Homo sapiens
gacacactgggcttggtgcatctgcggaccagcggctagcatgtttgttctacccagtctctgtagctgctaccacccatgctatcacctctaccagtagyccccaaaaataaatagacataaaatggttttcttctcacaaaaatttgtaagtagtgtaaaagatattatatattgaaggaattcttgccaccagaagaa

SEQ ID NO: 12067 - DNA, 201 bp, Homo sapiens
tttttttttttgagacagagtctcgctctgttgcccaggctggagtgcagtggcatgacctcagttctctgcaacctccgcctcctgggttcaagtaattytcctgcctcagcctcctgagtagctggaattatggacgtgtaccacaacacctggctaatttttgtatttttagtagagacggggtttcaccatgttggt

SEQ ID NO: 12068 - DNA, 201 bp, Homo sapiens
caccacacccggcctgcagtcaactttttaaactttgaaatatcttatcatgaactatgtaatataaataaggaagtatatacaatttatacgtatacctyaataaaatgaaattcttatccatttctagtacctttgaagcccccatttgaccctccccaattgcatccactactctccctgagaggtaactgctaccct

SEQ ID NO: 12069 - DNA, 201 bp, Homo sapiens
aatacgtccttcactttcctgagagaacagctttaagaaaagaaaacgtcactcctactcatgttaaccacctattgccatataatagaacacattcttakgctctctgagcctgtctcttttcttcgtctcactgtttcttgacggttatgttgcaacctgaggcagagtgtcagaaagagatgagagggatggcaaaaa

SEQ ID NO: 12070 - DNA, 201 bp, Homo sapiens
ttagagaaaatctctaagtgctcattaagagctaaatggacaatattttcccagagaattcaatccttttagttctaagtggcagatttctacatatttctttaaaaataaatcccatttggggtttttttagggcagctttgggctttgttttgttttgtttgtatgtttgtttcttggtaaaatgtaaaggccaccaaa

SEQ ID NO: 12071 - DNA, 201 bp, Homo sapiens
gaggcaggaggatcgctcgaggccaggagtttgagaccagactgggcaacatactgagaccctgtctcaaaaaacaaaacaaaacaaaacaaaaaaacacttttttaaagttagcctggcctggtggcgtgtacttgtactcccagctattcaggaggctgaggaggtaaggagggaggattgcttgagcccatgaggtca

SEQ ID NO: 12072 - DNA, 201 bp, Homo sapiens
agcccatgaggtcaaggttacattgagttatgatgataccactgccctccagcctggaagacaaagcaagaccccatctcttaaaaaaagagaaaaatttraaaataaaaagtaacgattactgatgactaaaagtatgtacctttactttcagtgaaaggatcctccacattacctttggtagaaaacatcttggagtgc

SEQ ID NO: 12073 - DNA, 201 bp, Homo sapiens
caaggtgaaaccccgtctctactaaaaatacaaaaaattagccgggcgcggtggcgggcgcctgtagtcccagctactcgggaggctgaggcaggagaatkgcgtgaacccgggaagcggagcttgcagtgagccgagattgcgccactgcagtccgcagtctggcctgggcgacagagcgagactccgtctcaaaaaaac

SEQ ID NO: 12074 - DNA, 201 bp, Homo sapiens
gtgagccgagattgcgccactgcagtccgcagtctggcctgggcgacagagcgagactccgtctcaaaaaaacaaaaaaaacaaaaaaaacaaaaaaaaamaaaaaaaaaaaaacaaaaaaaacaaaaaagctgggtgcaatggctcacacctgtaatcccagcactttgggaggccaaggaggagatcaagatcagcctg

SEQ ID NO: 12075 - DNA, 201 bp, Homo sapiens
ctactaaaaatacaaaaaattagccgggcgcggtggcgggcgcctgtagtcccagctactcgggaggctgaggcaggagaattgcgtgaacccgggaagcrgagcttgcagtgagccgagattgcgccactgcagtccgcagtctggcctgggcgacagagcgagactccgtctcaaaaaaacaaaaaaaacaaaaaaaac

SEQ ID NO: 12076 - DNA, 201 bp, Homo sapiens
gccgagattgcgccactgcagtccgcagtctggcctgggcgacagagcgagactccgtctcaaaaaaacaaaaaaaacaaaaaaaacaaaaaaaaacaaamaaaaaaaaacaaaaaaaacaaaaaagctgggtgcaatggctcacacctgtaatcccagcactttgggaggccaaggaggagatcaagatcagcctggcca

SEQ ID NO: 12077 - DNA, 201 bp, Homo sapiens
cagtccgcagtctggcctgggcgacagagcgagactccgtctcaaaaaaacaaaaaaaacaaaaaaaacaaaaaaaaacaaaaaaaaaaaaacaaaaaaamcaaaaaagctgggtgcaatggctcacacctgtaatcccagcactttgggaggccaaggaggagatcaagatcagcctggccaacatggtaaaaccccatc

SEQ ID NO: 12078 - DNA, 201 bp, Homo sapiens
gattgcgccactgcagtccgcagtctggcctgggcgacagagcgagactccgtctcaaaaaaacaaaaaaaacaaaaaaaacaaaaaaaaacaaaaaaaamaaaacaaaaaaaacaaaaaagctgggtgcaatggctcacacctgtaatcccagcactttgggaggccaaggaggagatcaagatcagcctggccaacatg

SEQ ID NO: 12079 - DNA, 201 bp, Homo sapiens
tctggcctgggcgacagagcgagactccgtctcaaaaaaacaaaaaaaacaaaaaaaacaaaaaaaaacaaaaaaaaaaaaacaaaaaaaacaaaaaagcygggtgcaatggctcacacctgtaatcccagcactttgggaggccaaggaggagatcaagatcagcctggccaacatggtaaaaccccatctctactaaaa

SEQ ID NO: 12080 - DNA, 201 bp, Homo sapiens
gcgccactgcagtccgcagtctggcctgggcgacagagcgagactccgtctcaaaaaaacaaaaaaaacaaaaaaaacaaaaaaaaacaaaaaaaaaaaamcaaaaaaaacaaaaaagctgggtgcaatggctcacacctgtaatcccagcactttgggaggccaaggaggagatcaagatcagcctggccaacatggtaa

SEQ ID NO: 12081 - DNA, 201 bp, Homo sapiens
tcatttagtgtcacctaggagccaagcactgttcttcatttttacagagatcacctcatttcatcctcacaaatatcacaccatttaaaattttcttattyttttaaattgacaaataataattgtacacattcgtgaggtatgtggttatgctttgatacatattacgtatagtgatcagatcagggtaattagcatatc

SEQ ID NO: 12082 - DNA, 201 bp, Homo sapiens
cgccactgcagtccgcagtctggcctgggcgacagagcgagactccgtctcaaaaaaacaaaaaaaacaaaaaaaacaaaaaaaaacaaaaaaaaaaaaamaaaaaaaacaaaaaagctgggtgcaatggctcacacctgtaatcccagcactttgggaggccaaggaggagatcaagatcagcctggccaacatggtaaa

SEQ ID NO: 12083 - DNA, 201 bp, Homo sapiens
atttttacagagatcacctcatttcatcctcacaaatatcacaccatttaaaattttcttattcttttaaattgacaaataataattgtacacattcgtgrggtatgtggttatgctttgatacatattacgtatagtgatcagatcagggtaattagcatatccatcatctcaaacatttatcatttgtttgtgttgaga

SEQ ID NO: 12084 - DNA, 201 bp, Homo sapiens
ctggggaaagagtgctccggaccaagggaacaaatgccctggtgaggacagccagatgtgcctaagttgcaggaagaagtccagggtaactggaacatcargtggaagagttagctcagaggcttgggccgcagccggggtatgccggacacagggcctatagtcactgttagtttggctaaataaaattgaaaatcatgg

SEQ ID NO: 12085 - DNA, 201 bp, Homo sapiens
ggttatgctttgatacatattacgtatagtgatcagatcagggtaattagcatatccatcatctcaaacatttatcatttgtttgtgttgagaacactcartatcctccttctagctacttaagaccatataaggtattattgttaactatagtcatcctgtagtggtatggaacattagaacgtattcctcttacacttt

SEQ ID NO: 12086 - DNA, 201 bp, Homo sapiens
tgactctttggttggtagaagcctattgcagcaggacagaggagagatgcgggtgcctcaggaggatatggcggagatgagggagtgagtcagattcgagytgggttcagaggcaggtccaaaaccctgcagtggttccatgtggaggcgaggggaggaaaggaatcagggatgactctgtggattcagctataccgtttg

SEQ ID NO: 12087 - DNA, 201 bp, Homo sapiens
gatccgcccaccttggcctcccaaagtgctagaattacaggcatgagccactgcgtccagcctgaacatgctgtgtttgaaatctctatttagctagccaygtggatgtgtcaggccagtagttgcaaatataaacatagatgtctagagcacagggtgagaatgctgtatttggggagcatcaggatatagatggtaact

SEQ ID NO: 12088 - DNA, 201 bp, Homo sapiens
ttgtggaagcaattacagttgaagcggattgcgtatacaaaaagaaacccagcttttctgttgaaacgtttcaaggaattatttctgctaaaaaaaaaaamcaaaaaaacgaaaacaaaaaatattctgactaaacactcaccttcctattttccagagctcaaaagaaaacaacttctgtttccttgacaataggatcat

SEQ ID NO: 12089 - DNA, 201 bp, Homo sapiens
acagttgaagcggattgcgtatacaaaaagaaacccagcttttctgttgaaacgtttcaaggaattatttctgctaaaaaaaaaaaacaaaaaaacgaaamcaaaaaatattctgactaaacactcaccttcctattttccagagctcaaaagaaaacaacttctgtttccttgacaataggatcatcatctccaaagaca

SEQ ID NO: 12090 - DNA, 201 bp, Homo sapiens
tttgaacatatggaataattttagccataagaaacctcagggaattttttttaattccttcaacatagacctaacatagtacccagacaactatttttacstccaatttcaaacaacctggaaaaacagcggatcagtggaacactaaaggctatagggagactatgatcattcttgcccaaaggaattgcaaaaaggcag

SEQ ID NO: 12091 - DNA, 201 bp, Homo sapiens
ccagttagtcctaataaatccgagggtttggggagcctcttttgagataggtgatgcattgctcattattagagaatctcttggcatgagtacttttgcascaagcatctgcttttaaggtctcttcatgaatgttcttcttatgtgctgatatctttatgcttacacaaacttggtggaaggcactattgttgcatcatt

SEQ ID NO: 12092 - DNA, 201 bp, Homo sapiens
gaaagtgtaagtactttgtctggagagtaagagaccggccagttagtcctaataaatccgagggtttggggagcctcttttgagataggtgatgcattgckcattattagagaatctcttggcatgagtacttttgcaccaagcatctgcttttaaggtctcttcatgaatgttcttcttatgtgctgatatctttatgct

SEQ ID NO: 12093 - DNA, 201 bp, Homo sapiens
accgtttgtgaggacaacggtgccaatctctgaaatgaggaagacggaaaaggaataggattggagacagaaggaattaagtgctgtcttttgaacgtgctgtgtgtgtgtgtgtgtgtgtgtgtgtgtctgtgtgtgtatttggagatggagtctcgctctgtcactcaggctggagtgtaatgccgcgatctcggctca

SEQ ID NO: 12094 - DNA, 201 bp, Homo sapiens
ccgtttgtgaggacaacggtgccaatctctgaaatgaggaagacggaaaaggaataggattggagacagaaggaattaagtgctgtcttttgaacgtgctgtgtgtgtgtgtgtgtgtgtgtgtgtgtctgtgtgtgtatttggagatggagtctcgctctgtcactcaggctggagtgtaatgccgcgatctcggctcac

SEQ ID NO: 12095 - DNA, 201 bp, Homo sapiens
cgtttgtgaggacaacggtgccaatctctgaaatgaggaagacggaaaaggaataggattggagacagaaggaattaagtgctgtcttttgaacgtgctgkgtgtgtgtgtgtgtgtgtgtgtgtgtctgtgtgtgtatttggagatggagtctcgctctgtcactcaggctggagtgtaatgccgcgatctcggctcact

SEQ ID NO: 12096 - DNA, 201 bp, Homo sapiens
cctgtgcaagtttgctaacagcctccagctccatgcacatccctgcaagggatatgatctcgttctccaaaagccctactcttattctctacagggaaatmagatcttcactacttcagaggaaacatagcacattacttataccagtcatcctaagtcttcattcataaacataatctaactatcagaatagccaggtat

SEQ ID NO: 12097 - DNA, 201 bp, Homo sapiens
gtgatgtgaaatgtggaattgttcctggtaatcacatagggtaaagcccttggtgctgggaccactgccgtgcctctctaggcagagattccattcactgrgttttgaaaacttttggagaaaagctaaaccagtttaactttggccattcttcgtgttatctattttaaaataacctttcatggtattttatgatggctc

SEQ ID NO: 12098 - DNA, 201 bp, Homo sapiens
ggcttcgtgtagcaatctttaaaaattaaaaggaacagattagtaggctgattaccatggttacctttgggactaaatagatatttgttgaacgactgccrtgtgactgtaatcttgtgatgggttctgagagatgtgagcaggaacttgatagagcctaaaatctagtgggaaagccaagacagatagaaaaaaaaaaaa

SEQ ID NO: 12099 - DNA, 201 bp, Homo sapiens
tttaaataaaataataaaattcagtccattttagccatagaccttgtttttcaaatgaccttatgattcagttattatacctgcgctcattctgtgacagktcattccagaagagacacaatcgtacaaagctgaacataaaataaatcttggtttcttattgaattttaaattacattgggaatgcttttggaataattc

SEQ ID NO: 12100 - DNA, 201 bp, Homo sapiens
cacgatctgcgcctcgtccccagacaagctttaccacttcccagttctctttcttcattccagcagaagcctggaaggtgtgtatgaggaaggcatgaagmtaggccctctgaggaactcacacgcgcgcacctcatgaaggccacctggaggtcacgtggtgtgggggcaaggtcacagaccacgaggctcaacaacaac

SEQ ID NO: 12101 - DNA, 201 bp, Homo sapiens
tcttctctttctttttcctttttccttccttttttttagagaaaattataaaactttattaaaagacattttaaaaggcccaaataaatggagacatatgmcatgcttgcagactaatagaccgtataaagccatgactccctgattaatctgtatttaatgtaatctggctaaaattctagcagcttcctgggttttttt

SEQ ID NO: 12102 - DNA, 201 bp, Homo sapiens
ccatcctcagggaactcatcattttctagcaggcatgatattctaggtgacgtgagtgctgtaaacaagaacgctgggagttcagagaaagagcacagaayagtgcctgggctgaccgtggaagatagcgtatcaagaaaagatggataggagtttcctaaggagtgaaaactatgactaaggtacaggcatggaaaacaa

SEQ ID NO: 12103 - DNA, 201 bp, Homo sapiens
ctgattaccatggttacctttgggactaaatagatatttgttgaacgactgccgtgtgactgtaatcttgtgatgggttctgagagatgtgagcaggaacytgatagagcctaaaatctagtgggaaagccaagacagatagaaaaaaaaaaaaaaaaaaaaaaaacctgctgtgtaggaaattgcttaggagatctagca

SEQ ID NO: 12104 - DNA, 201 bp, Homo sapiens
ctttttccttccttttttttagagaaaattataaaactttattaaaagacattttaaaaggcccaaataaatggagacatatgacatgcttgcagactaayagaccgtataaagccatgactccctgattaatctgtatttaatgtaatctggctaaaattctagcagcttcctgggtttttttgttttggtttggtttgt

SEQ ID NO: 12105 - DNA, 201 bp, Homo sapiens
aaggcaggagaatcacttgaacccaggaggcagaggttgcagtgagccaagattgcgccactgcactccagcctgggtgacagagcaagattccgtctcaaaaaaaaaaaaaaaaaaaaaaaaaaaacacttatctggaacaatacacatcagacttaatgtggtatttgggaatggcatttaggaaggtacccactgatc

SEQ ID NO: 12106 - DNA, 201 bp, Homo sapiens
ccaaataaatggagacatatgacatgcttgcagactaatagaccgtataaagccatgactccctgattaatctgtatttaatgtaatctggctaaaattcyagcagcttcctgggtttttttgttttggtttggtttgttttttttactttaaattctgggatacacgtgcagaatgtgctggtttgttatgtaggtatac

SEQ ID NO: 12107 - DNA, 201 bp, Homo sapiens
cttgaacccaggaggcagaggttgcagtgagccaagattgcgccactgcactccagcctgggtgacagagcaagattccgtctcaaaaaaaaaaaaaaaamaaaaaaaaaaacacttatctggaacaatacacatcagacttaatgtggtatttgggaatggcatttaggaaggtacccactgatctttactattaggctg

SEQ ID NO: 12108 - DNA, 201 bp, Homo sapiens
tagaccgtataaagccatgactccctgattaatctgtatttaatgtaatctggctaaaattctagcagcttcctgggtttttttgttttggtttggtttgktttttttactttaaattctgggatacacgtgcagaatgtgctggtttgttatgtaggtatacacgtgccatggtggtttgctgcacctatcaacccgtca

SEQ ID NO: 12109 - DNA, 201 bp, Homo sapiens
tgtaatctggctaaaattctagcagcttcctgggtttttttgttttggtttggtttgttttttttactttaaattctgggatacacgtgcagaatgtgctsgtttgttatgtaggtatacacgtgccatggtggtttgctgcacctatcaacccgtcatctaggttttaagccctgcatgcattaggtatttgtcctaatg

SEQ ID NO: 12110 - DNA, 201 bp, Homo sapiens
ttcctaatgaatgtgaatttgtttgcttttggtgtatatatggataaattatgtttgagttattttgagagtcctacaccttacattcgatccaatattcyttttttttttttttttttttttttttttttttgagatggagtcttgctctgtcacccaggctgaagtgcaatggtgtgatcttggctcactgcaacctct

SEQ ID NO: 12111 - DNA, 201 bp, Homo sapiens
gtttttttgttttggtttggtttgttttttttactttaaattctgggatacacgtgcagaatgtgctggtttgttatgtaggtatacacgtgccatggtgrtttgctgcacctatcaacccgtcatctaggttttaagccctgcatgcattaggtatttgtcctaatgctatccctccccttgtcccccacctcccgacag

SEQ ID NO: 12112 - DNA, 201 bp, Homo sapiens
tttttttactttaaattctgggatacacgtgcagaatgtgctggtttgttatgtaggtatacacgtgccatggtggtttgctgcacctatcaacccgtcawctaggttttaagccctgcatgcattaggtatttgtcctaatgctatccctccccttgtcccccacctcccgacaggccccaggtgtgtgatgttcccctc

SEQ ID NO: 12113 - DNA, 201 bp, Homo sapiens
atctcccccgcgccctgcatcttcatcacttaccctacatacactccttctgtttcacatctaccctgcgccctgcgtcttcatcacttatcctacatacrctccttctgtttcagatctcccctgcgccctgcatcttcatcacttaccctacatacactccttctgtttcacatctaccctgcgccctgtgtccttatc

SEQ ID NO: 12114 - DNA, 201 bp, Homo sapiens
tggcctgtgaaaagccactggcaagacccagtctccaaaacaagttttaaaagaaactagaaaagcaaaaaaaaaaaaaaaaaaaaaaaagcaagccaaamccaaaattagcagaaggaaagaaataataaagattagagtagaattaaacaaaattgagatttaaaaatacaaaagatcaacaaaaagttggttttttga

SEQ ID NO: 12115 - DNA, 201 bp, Homo sapiens
ttttcatagggcagtacatatttgtgatttttttctaattttgtattttttgtgacttacgttgtttagaggttaacatacgaagaaagaatggctcgtcractgctaggtgctgacagtgcaactgtctttaatattcaggagccagaagaggaaacagctaatcaggtaccatgttgctctggacttcttagggtaaca

SEQ ID NO: 12116 - DNA, 201 bp, Homo sapiens
cagccttggctgtgaggataatttcttgatttgtgttatgcaggctcctgtcaggactgtctccttaactcccactacctaaggaaaagatagccagagarttgtccagggatttgggtttgggttgcttctagaaagacagcatctttcttgctattttttttttcacatccccccaaaacaatttttttcccccttcag

SEQ ID NO: 12117 - DNA, 201 bp, Homo sapiens
tatcagtgccaggcctgactgagttacagcattttttatcagtgccaggccgggcatggtggttcacacctgtaatcccagcactttgggaggccgaggcrgatgaatctattgtagtatggtggctggtcaataggcttggcccttataatacctgaagcactagaagcttaaagcctgagaagaaaggccttgcttagt

SEQ ID NO: 12118 - DNA, 201 bp, Homo sapiens
atgttatctgtcaacttgctacagaactagtttcttggtacacatttgaggaaactctagtcttagcccattccttgcatttcacgaataaggaaactatraccccaaatgagagactgactggaccacagtcaacttagttgatctatggaccaggcaaaactggaactcagtgatataagagttaagaagaaattattt

SEQ ID NO: 12119 - DNA, 201 bp, Homo sapiens
gactaaatagatatttgttgaacgactgccgtgtgactgtaatcttgtgatgggttctgagagatgtgagcaggaacttgatagagcctaaaatctagtgrgaaagccaagacagatagaaaaaaaaaaaaaaaaaaaaaaaacctgctgtgtaggaaattgcttaggagatctagcaagttttatagaaattcagaaaaa

SEQ ID NO: 12120 - DNA, 201 bp, Homo sapiens
atcccatgtgtcaattttggcttttgttgccattgcttttggtgttttaagacatgaagtccttgcccatgcaggctacagtaaccaaaacagcatggtaytggtaccaaaacagatatatggatcaatggaacagaacagagccctcagaaataacgccacatatctacaactatctgatctttgacaaacctgagaaaa

SEQ ID NO: 12121 - DNA, 201 bp, Homo sapiens
cttctgtgctactcccttcctgtcctgtttatgttggactgcagcttcaactccaacgtgtggctttggcaatagaacttacaaagttgaacattatcccrtccttcaacctctactagttagggttcaagatctcactatattactgtttgacattagtatacaaatggtttcttaggttctgttcttgtataaacctta

SEQ ID NO: 12122 - DNA, 201 bp, Homo sapiens
ttacatgcctatcaagcaaatatatacgtatatataaaatgtgtattttttcttttatttttagacaagtgcctacccaccacatatactgttctgcaccwtgccttttctatttagcagtagattttagagatgtttcatgtgagtaattaaaaagtcttatttttaagtgattgtatatatttattgtagaaatgattg

SEQ ID NO: 12123 - DNA, 201 bp, Homo sapiens
ccgccttggcctcctcaagtgctaggattacaggtgtgagccaccatgcccagccaaaagtattatttaaaaaagtttttcttacttgtattttaggttcrgggatacatgtgtacattagttatatatttgcctgtcacaggggtttggtgtacagataattttgtcacctgggtaataagcatagtacccaatagataa

SEQ ID NO: 12124 - DNA, 201 bp, Homo sapiens
ctgcctcctgagttcaagtgattttcctgttccagcctcctcggtagctgggattacaggtgtctgccaccacgaccggctaatttttgtatttttagtaragacaggatttcgccatgttggtcaggctggtctcgaactgctgaccctaggcgacccacccaccttggcctcccaaagagctggaattacagatgtgag

SEQ ID NO: 12125 - DNA, 201 bp, Homo sapiens
aagtgctaggattacaggtgtgagccaccatgcccagccaaaagtattatttaaaaaagtttttcttacttgtattttaggttcagggatacatgtgtacrttagttatatatttgcctgtcacaggggtttggtgtacagataattttgtcacctgggtaataagcatagtacccaatagataatttttctgatcctctc

SEQ ID NO: 12126 - DNA, 201 bp, Homo sapiens
tttttcttacttgtattttaggttcagggatacatgtgtacattagttatatatttgcctgtcacaggggtttggtgtacagataattttgtcacctgggyaataagcatagtacccaatagataatttttctgatcctctccctcctcccgctctccaccctcaagcaggccttggtgtctgctgttcccctcctagttt

SEQ ID NO: 12127 - DNA, 201 bp, Homo sapiens
tcttaaagccgtaagcagaacaatgtttttgtggctccctggaaatgtgaaacccccttaaaaacaatatcttctttatcatggagtctgtacactgcatkttacatcaacgtctttattagcaaaacattaagttccattcagacaagaaggtcaagctcagtgacttcatgctttttaaaatacagtcttttaggctca

SEQ ID NO: 12128 - DNA, 201 bp, Homo sapiens
atgtgatgatgactttgcatttgcatttctcttcctcctttctctcactcccagtcttagatacccgattgttccataaatcttgtcttaagagaaaggcmtatcctataaactcattcatgtgaaggtatttgcattagcagtgttggtcttggatcactttgcaaacaacccttccctgaaaatgagaagtccaatcaa

SEQ ID NO: 12129 - DNA, 201 bp, Homo sapiens
acttatttctgaacaaagggtagaaaaacaagtcattttcctgtttctcctgtttgttcctctgcttcagtgtcaagcagatcttgccacatgtgtcttargagccatgaccttgctctgactcttcttgggggaactggaaagtcctctgtgggccactgcaggtcagattactgcagtcagtccctgaacttctcacat

SEQ ID NO: 12130 - DNA, 201 bp, Homo sapiens
tcatgcatgcatttatttaaacataattatagggagcctaccatgtgtgagatgctaagaatatggccatgaacaaaaattgtttctgcactcagaggttrtatttcagcgaaccagaaactaacaaactaattacacaataaattatttagcagggtgaggtggcacatagtcccagctacccaggaggctgaggcagga

SEQ ID NO: 12131 - DNA, 201 bp, Homo sapiens
aggtacctaaaagcagatagctgtaattactactatttatcttttgtgctctgaggtttctcatactgtgttggtgccacactctaatcagctgcataaawgggtagatcacttgccaccacagaggcatgtgggagaagacagcatgtctaggacattacgctgaggctgaggcagtaggcaaggaagtccaacctgcag

SEQ ID NO: 12132 - DNA, 201 bp, Homo sapiens
atcacttaccctacatacactccttctgtttcacatctaccctgcgccctgcgtcttcatcacttatcctacatacactccttctgtttcagatctccccygcgccctgcatcttcatcacttaccctacatacactccttctgtttcacatctaccctgcgccctgtgtccttatcacttaccctatatacactccttct

SEQ ID NO: 12133 - DNA, 201 bp, Homo sapiens
ggtggaactagtaacaaataggcacacttaagatgtgaaactgatttactcgaagtactgtgaaaagtgtgtgtatatttgaatatgagttgctaaagacrgttgaaagcatggctaaaactagctgctatctagaagtgaaaggcacgagtgtgtagaggccaaccttcagattagcccccaataacgcattaaagggaa

SEQ ID NO: 12134 - DNA, 201 bp, Homo sapiens
caccatatgtagagaaggcagggaaatttaattgtttgtagagaaagagacccaagacttcgtaaagccatgggatatggagttgggggacctgccagtcrccttgtcagttcacttcattttataaagaaaatttctagtctcagggaagccaagcaactttcccaaccaaaacgttagctttgcgttaagagaatttta

SEQ ID NO: 12135 - DNA, 201 bp, Homo sapiens
atgatgtgattatttcacactgcatgcccttatcaaaacatgtcatgtacccagtaaatatatatacttcctatgtaaccacaattttttttaatttaaaraaacaaaatatggagataccatctccagcaacaactatattcctgctggatgcccacatgaggccccaccagactgctccaccgagtgagccttatattt

SEQ ID NO: 12136 - DNA, 201 bp, Homo sapiens
catgtctctgaaaccctggaattcaaagagctttctggactatgccctcactggattcggaactaccaggctttcatcatcaagaatccatcttgccagcmtggggctgaagtttctgcttcctgaataccttttcccccatcaacttccttcagtaactagtggagaaaaatgaaaatattctgggaggtggcatgacag

SEQ ID NO: 12137 - DNA, 201 bp, Homo sapiens
aagagtgtaagcttttggagttggaatagacctgatgattttctcattcaagtttaattcatgtaaaagatgtgtctcaaccccttgataagattacaggmaactcaaaggcaggaaccattaattatctccatatctgcagctataaaatattaagacagtgtactcttaaaaatgcttaacaagtgggtagatgactat

SEQ ID NO: 12138 - DNA, 201 bp, Homo sapiens
aaaatatttacaaaacacattagtagacatcaatgggtctaaaactgtggtcctccaaaccagcaacatcagcatcagctaggaatttgtggaaaatgcarattttcagtctcaccccaaatcagttgaaccagaaactctggggtgggacctggcaatctgtatgtatttaaacaagtccaccaggtgtttctaaccact

SEQ ID NO: 12139 - DNA, 201 bp, Homo sapiens
cttgttgattttagctcagagttcttttttaccaactgtgttagccaaaccatgtggtgtgaaaggtaaaagctggatttcttttttagggacttgggacaaaaaaaaaaaaaacagttgcaaaggaagccatttatgaaaatgtccccttattacccagggaacccagtaatcttatccttgctgcctcatcattttatg

SEQ ID NO: 12140 - DNA, 201 bp, Homo sapiens
ttacaaaacacattagtagacatcaatgggtctaaaactgtggtcctccaaaccagcaacatcagcatcagctaggaatttgtggaaaatgcaaattttcwgtctcaccccaaatcagttgaaccagaaactctggggtgggacctggcaatctgtatgtatttaaacaagtccaccaggtgtttctaaccactggtacag

SEQ ID NO: 12141 - DNA, 201 bp, Homo sapiens
tgaataattctcatgaatcatttggataatgagaataattagttttttcagcatcgggaaactccatttcctgacttaaatctttcattaccttactttaygtaagatttcttgtgtcctgaactaggaaaaatgcagaactagagaggctagaaaaaaagaacatcagctctagaaaaaaagaacatcagctctagaaaa

SEQ ID NO: 12142 - DNA, 201 bp, Homo sapiens
ctactaaaaatacaaaaaaagttagctgggcatggtggtgtgcacctgtaattccagctacttgggaggctgaggcaggagaatcacttgaatctggaagrcggaggttgcagtgagccaagatagcaccattgcactccagcctgggcgacaagtgaaactccatctcaaaaagaaagaaaaaaagaacatgcgtgtcgg

SEQ ID NO: 12143 - DNA, 201 bp, Homo sapiens
taccaaaacagatatatggatcaatggaacagaacagagccctcagaaataacgccacatatctacaactatctgatctttgacaaacctgagaaaaacargcaatggggaaaggattccctatttaataaatggtgctgggaaaactggctagccatatgtagaaagctgaaactggatcccttccttacaccttataca

SEQ ID NO: 12144 - DNA, 201 bp, Homo sapiens
tattttaaggttaaatataaaataacggtataagtcctgggtttgatttttttttttttaagtgtaaaaagttatctgtgttcagtaggtggagaagccavctacatcctgctgacacaaagctaatcagtggcttgacaactctagtcaaacatccacatagaatgtcttggccataatctatgtgtctcctgtattgtt

SEQ ID NO: 12145 - DNA, 201 bp, Homo sapiens
gcagacagaagacaattacaaaatcaaataaagctgttataattttaaatcaaataattacagacaaaatgactaagtattgatatttttgtttttaaaawtaaaaccaggctaaataaatgaaaataaatacttaaagaagtaattgttgcagctaaagcaaagcatataccttcttcacctaaaatattagcttacatg

SEQ ID NO: 12146 - DNA, 201 bp, Homo sapiens
atttttagtagagacagtttcatcgtgttagccaggatggtctgatctcctgaccttgtgatccgctgcctcggcctcccaaaatgctgggattacaggcrtgagccaccgcgcccagcggaaaagattttctagagtttagtgctttcaaattatctttaatacagatacatttctaaaaggatatgcctttccaatttc

SEQ ID NO: 12147 - DNA, 201 bp, Homo sapiens
agagcattacctctccataaaattgggtgatctggagttgtcctgaatttcagcagcaggactcaaacttcctttattcagacgctgtggctcgggtcaasatacatattagccagaattatgtttacctgtgaataattggcagcccaatttgcaggggcttacattaataggggtctattttttactataacaagaagt

SEQ ID NO: 12148 - DNA, 201 bp, Homo sapiens
cacattagtagacatcaatgggtctaaaactgtggtcctccaaaccagcaacatcagcatcagctaggaatttgtggaaaatgcaaattttcagtctcacyccaaatcagttgaaccagaaactctggggtgggacctggcaatctgtatgtatttaaacaagtccaccaggtgtttctaaccactggtacagacaaatca

SEQ ID NO: 12149 - DNA, 201 bp, Homo sapiens
tcagttctaagtaatatagggggtgaatatatcaaatcctttgggagaataaaagcttagttgacttctatggtgtattcgtttcctattctgtataacarattaccatgaatttagtggcttaaaacaccccacatttaataagcttcgtaagttcctgtggatcaggaatccaagcataggttagctgggtcctctgct

SEQ ID NO: 12150 - DNA, 201 bp, Homo sapiens
agcaggagtctctctctagtctgctaagatggtgtcatatatgtcatataacataatcatgggagtgaccttccatcacctttaccctgtgacagagtttrgatatatgtccctgccaaatctcatgttgaaatgtaatccccagtgttggaggtggggcctggtgagaggtgcttggggcaggagggcagatcccttatg

SEQ ID NO: 12151 - DNA, 201 bp, Homo sapiens
gagaaaatattttttaaaaggagaggggggatgagaattaggaagcttatcagctattccaaaggattccctgtgctgcagtgtttacttaaaaaaaaaaagataaactacacttgacctttgtaatctagctgctttattcccactatcctgtatagacagtaaatctgcaacatgtgagtaaaatgcaaaagtgttcct

SEQ ID NO: 12152 - DNA, 201 bp, Homo sapiens
ttccccactgcttggtttgcagctgagcagatataagaggtagctgtatgtacagaaagaactctgacatgcaatcagcttaactcctacatgcaaaatayagagctgcacacttgcagacatctcgttttatcttcacagataacccattgggtatgtattatccccattttatagatgaggacaccgagactgctcttg

SEQ ID NO: 12153 - DNA, 201 bp, Homo sapiens
ggcactattgttgaataatgattacaaagcactagaagactgaataaaagtatgataaaaatacgttctctttcaacctctcaacattcatatgtggtatrtatttttttaaaacttgcccaaggtcacaaacttaatacgagatagagtcagattttaaacctagctctacttataaatcatatcattctttcactttat

SEQ ID NO: 12154 - DNA, 201 bp, Homo sapiens
gagagagatgtgaaacagtcacctggcagaaagggagcctgaatttagctggtgaaatgtacactcaggatctgcccatggtcaaattctgactcttaacrtccttccacagtatattggagatcagaattctctagttcacttcttgaggagagagattatcttctaactccttttttttttttttttttttttttttgc

SEQ ID NO: 12155 - DNA, 201 bp, Homo sapiens
taatcgcagctactcaggaggctgaggcaggagaatcgcttgaactcgggaggcagaggttgcagtgagctgagatcgcaccactgcactgcaacctgggygacagagtgagatgctgtctaaaaaaacaaaaaaaattacccttcattgggcaaaaaaccagggaactcaaccaaaaagatgtccaaattatagtgctca

SEQ ID NO: 12156 - DNA, 201 bp, Homo sapiens
acacctgaggaaggaaaataaggtagtgttaggaaggagtgggatttgtcctataagatagcaagacgttttaaaggtatagtaattaggacagtatggtrctggtacaaggctagagaaattgatgtgtaatcggagtagagcccacaaagtttctgaatacctacagaaacttgcaaattgctggagaaagaatgaatt

SEQ ID NO: 12157 - DNA, 201 bp, Homo sapiens
aagtggaagccaagctttcattgtaaacagatggtgctgctaacaaggaaagtaaaaaattcttccagtcactcctcgcaccagagacctgaagaagattstgctttaaaaacaaatgaacaaaactatcaaatactccctctcccctattccataggctctgggtcaaaacacacatacacacagcccctcacatgcaga

SEQ ID NO: 12158 - DNA, 201 bp, Homo sapiens
ttattttatatttttgagatggagtttcactgttttgcccaggctggagtgaagtggcgcgatcttagctcactgcaatctctgcctcctgggttcaagcratcctcctgcctcagcctcccgagtagctgggattataggcgcccgccaccacgcccagctaatttttgtatttttaatagagataaggtttcaccctgt

SEQ ID NO: 12159 - DNA, 201 bp, Homo sapiens
tgaggatagtgtctaagtctcatcactcaagaatatagcacttcatgacatgtacctttatttatacttttctggtaacaatatagttttaaaatactcawggcctttctaaataatggtataaatatgatatctcaatcctcaaaactaccaacaaatttaaggtatttataacacatacaaccaatacttatgcataaa

SEQ ID NO: 12160 - DNA, 201 bp, Homo sapiens
catgaacccgggaggcggagcttgcagtgagctgagatcgcgccactgcactccagcctgggcgagacagcgagactccatctcaaaaacaaacaaaaaamatggttgctatgtgaaacaagtgagcaacctggatggaaagccaagactctgtgaggcgggtcattctggtccagaacttatcagaccaacacttcttaa

SEQ ID NO: 12161 - DNA, 201 bp, Homo sapiens
tgaagtgcaatggtgtgatcttggctcactgcaacctctgcctcctgagttcaagtgattttcctgttccagcctcctcggtagctgggattacaggtgtytgccaccacgaccggctaatttttgtatttttagtagagacaggatttcgccatgttggtcaggctggtctcgaactgctgaccctaggcgacccaccca

SEQ ID NO: 12162 - DNA, 201 bp, Homo sapiens
tatttattttacactctcactcattttatttatttatttatttatttatttatctgttgagacagtcttactctgtcgcccaggctggagtgcagtggcaygaggcccaggttcaagcgattctcctgcctcagcctcctgagtagctgggattacaggcgctcgccaccacacctggctaatttttttgtatttttagta

SEQ ID NO: 12163 - DNA, 201 bp, Homo sapiens
tgggaatgcttttggaataattccagaccttaggagaaaaaacgtctcccaactctaaagtcccaggttccatctcaacgtttcacattcaccggcaaagsctccaaaaataaattacaggcaagcttaaaagatcagaaaggctttcccattgtgcaagtgggtgattacccgcgattggtgtctgttacagtcattgtg

SEQ ID NO: 12164 - DNA, 201 bp, Homo sapiens
gctgcctagaaaataataaaaattgtgaagtgggactgatggcttttgaaaaatacaatcaggggcttgtgtctctttgcaattctagaagaaacgtcacrggattttaattcctgccaagcaatattgaccacgtttcctgtctcttcccttcttgtgctttttgccttgctttatgatgctggcaagtatggaagcctt

SEQ ID NO: 12165 - DNA, 201 bp, Homo sapiens
aagtagactagctataaattttaagctgatgatgatcaatctgaaatggatggttagacccagaaccttatgattattttgcctgaacaaattacagagaygaaaggctgccttcaaatttttggacaggatatcccaggtaaagatggaattcatcctaaaccagaggagtgatgtaataccaattccattaccactcag

SEQ ID NO: 12166 - DNA, 201 bp, Homo sapiens
ttaacagtaggcaaaggcataaccatgtttttcacatgttcttgttactgtgttctgcaaatgactgccttttaacatttcttcctatattctatcgcagkgtcctaatgcactctaaacgtgtgttccattgatcctggaatgcgtacttttgtggcttagtgcttttctcattaatatatcttaagcagccagcagtag

SEQ ID NO: 12167 - DNA, 201 bp, Homo sapiens
tgtggaaatagagtaaaatttatcatttcttataaagttttaacattagaaaaaaagcttcttatgactaaaactaaggcatttggtaaaattttcttacygcttctactataatatctatttctctttagatagataaagatacagatttgcagtaacattggaaagtaagtgaaaaacacagaggaaattaaaacttta

SEQ ID NO: 12168 - DNA, 201 bp, Homo sapiens
ttgtttccaaaacctcttcatccttttaaccagtcatttaagtttactttaaatgctgtagccctttgctacatgtgtggtgggaggcatcttgcaggtamtatcagttgagtatcacgtagcaggaatggaatttgtgagtcctctggctgatgctggcaaagctagttcttcaaaagaactgttttacagtctaagtga

SEQ ID NO: 12169 - DNA, 201 bp, Homo sapiens
ttttttgccccctgtttactgatcttaaatttagtttaactcttaaatatggataaggttttaaaaagttatttgggctccctctgctggttctgtatggratatgagaacacaaatataggctgcttagaggatttgggcattgtttcttcagaaagtaaatctgggattatagaaatgtataaaaagaataaatataac

SEQ ID NO: 12170 - DNA, 201 bp, Homo sapiens
atcatcccacgcatacttcttacataacactcattttatcatgctcattttaatgtatggtttggggaagggatgccactaacttttttttttttttttttgagacagagtcttgctctgtcacccaggctggagtgcagtggcaccatctcagctcactgcaacctccgcctcccgggttcaatagattcttctgcctca

SEQ ID NO: 12171 - DNA, 201 bp, Homo sapiens
tgctaaaatcaaaaatcaaaaggacatgtactgcttcctgagatattttctttcccagcttccacgatatctagcttttcttgcttccctgtgattattcraaggattctatcttctccttcttttttcctcgatgaccttatgcattcccatgtcttaaagtgccacccataggctaataatccccaatccagctctgtt

SEQ ID NO: 12172 - DNA, 201 bp, Homo sapiens
cactaaaaaagttaactgattttgcaagtaatctcatgagctagcccaccctaacagaaagggaccatttttacaccaggacaatgtttctcccagctaamcttgtttctggagggttgtccaagtcatccccagggaaacaacgtaaaagctacttcagattttgtgggtctcttgggacacaaacaccatacacgtgcc

SEQ ID NO: 12173 - DNA, 201 bp, Homo sapiens
ctactagaacagtttacataataggttatctcatactaattggctgtcttttatcgcattacccaaagataatgactactgaggattattcctaatacaayctaatacaacctccatatctgcatctgtggattcaaccaatctcagattgaaaatatttgaaaaaaaatggtgtctgtactgaacatttacagacctttt

SEQ ID NO: 12174 - DNA, 201 bp, Homo sapiens
tattaggaacagtcggtattaattcattttaatgtccactaaattagcatagtttttataagaatcaactaatatcttcctgctgttttcactggccttcrcatcagtagaaatgaaaatcattttgggcatttaactgtgatgcagagtcaactcttttagaagctgacttcggattcctcccccaaaaagaggctggga

SEQ ID NO: 12175 - DNA, 201 bp, Homo sapiens
gttattggcaacattatttattcaaaaatgtttagttcttcagttataggcctatgttaatagaaatttgaaaagtcgtctttatagtgttgttcaccatrtgatataatgtttctaaattgtatcacatttagtgatacagtatctcaagagatggaacagcataacagatgagtaatattagtgatattcagatgttca

SEQ ID NO: 12176 - DNA, 201 bp, Homo sapiens
ccatccacatgttccatgctttcctgtgtatctcggcgcacagatactatacatacttcagtggctttttccgttgtttaaatcttaaaaagaaaaggcayattctggtgtatatactacttccctaaatgaagggccatctactatataagtcttacagtataatcatgaaatccagatgtggtgtgcaacaaacttcat

SEQ ID NO: 12177 - DNA, 201 bp, Homo sapiens
ctttgtctctttacatcctcttcccttcctcccatgtgtctctaacctgccaattgcaccaacatttattccctgctgcagagcctgtggacccacagtcyggcttacctttattttctccatctccagaatatgtctctcctccatacccccataaattaaaagtgacttaaatatataaaatggaagagagaggcagga

SEQ ID NO: 12178 - DNA, 201 bp, Homo sapiens; identical to SEQ ID NO: 864

SEQ ID NO: 12179 - DNA, 201 bp, Homo sapiens
ttcttctcctgtctgtattacattcctatgtgtctttgccttttctgggtggttatagccctaaagaagtccaggttttaggagacctagagaacccccccagttagagtcctgcccttcagtgaatcttgctatgggatttttctctgcattccctccactagtgccctcaccctgacccccactccagtctactcacag

SEQ ID NO: 12180 - DNA, 201 bp, Homo sapiens
cctttcctaggggcttacttgtaatggggtaattaatttatggctttgcagtaaggcggcatcagaggagcaatttaactcacaagaggtaacgcagatgsagagtacaactgaaagataccttgtgtggaagggtacagaaggaacctcaagctggacgttgatttcttttatcagtaatacaaattcactactagctgc

SEQ ID NO: 12181 - DNA, 201 bp, Homo sapiens
ctgtaattgtagcaacagaatagctgaatgtgcacctctagctgatttatgtatgcaatttctcattctcagctctctataatccattctccacccccccmccccccacccccaacgctttggagccttgaaagcattcaatacaaattttcacaatgtaggtaactttgaagtgtggcttgtcaggtcatgctgacttat

SEQ ID NO: 12182 - DNA, 201 bp, Homo sapiens
tgactgtagtcaataagaaattaattgtacattttaaaataactataagagtgtaattggattgtttaattggagtataattggattgaataactaaaagrataaatattataggggacagataccctgttctccatgatgtgattatttcacactgcatgcccttatcaaaacatgtcatgtacccagtaaatatatata

SEQ ID NO: 12183 - DNA, 201 bp, Homo sapiens
gattcctaaatcataaaacctcttgtaaaaaggaagacttatacatacaaagaactcagctagtcaagactaagaaagtaccagtgggaagtaaagccacrgttttaaatagtaatgtaatgaatgcttcccaagggcttgaaagtcgtttgtcttaagcagcacttttgccaattgttatactactgatttatttgacaa

SEQ ID NO: 12184 - DNA, 201 bp, Homo sapiens
attaacacgtattctgtatgttatatgtattatagactgtagtcttaaagtaagctagagaaaagaaaatgttacaaagaacatcttaaggaatagaagakacatttacaattcattaagtggaagtgggtcatcataaaggtcttcatcctcattgtcttaaattagagtggtctgaagagaagaagacaaggggttggt

SEQ ID NO: 12185 - DNA, 201 bp, Homo sapiens
ttcctccatgatgctaaaagactgtgtctgtgttctccaaaatggagtcagtttgtgaagagaatttttgtcagaccagtttattcattgctacacaaagytttcttaagtgacatgcagtgggcaaacaagggaacaatgacaccaaagttatgtcaagcttgtacttgtaccacccacaaatgaagatggaataataat

SEQ ID NO: 12186 - DNA, 201 bp, Homo sapiens
ttttattcttcttcttgattattctcctttccagtacatttccattttcctatcctatgttttatgcaaaataattttgtgtggagaaacacattttcgcygacattgtctgaaataactagtgaatatttcccattagagttggaccttgaacaacacgggagttagggggaccaaccccaagcacagttaaaaacccac

SEQ ID NO: 12187 - DNA, 201 bp, Homo sapiens
atagaaaaaaattagccacggggtggtgcacgcttgcagtcccagctactcgggaggctgaggtgggaggatggcttgatcccagaagatggagactgcartaagctgagatcataccacggcactccatcctgggcaacagagcaggacccatttcaaaaaaaaagaaatccctttctccttatgtaacactacttggcc

SEQ ID NO: 12188 - DNA, 201 bp, Homo sapiens
taaatgataaaataatagttaccttgtgaaactgcaagctatttgtatagctatgctttgaggactagaaaagaacatggagaaatagtgccagttatgcrtatggatacatatgcatcacaagtgcgtatgttgagatttagacaaagtatcagccttgggatttacacccaaagcatgagctcttaagcatgaacttgc

SEQ ID NO: 12189 - DNA, 201 bp, Homo sapiens
tatgagctgaataaacttcacagaagatggtctgaaaggagacagatgaggaacttacatcacaggcatgcccacaatctgtaagggagccaagaaggcargtcatctggaaagctaaatatcattttaagacattcatattctcctataaccatcaatgaccactactcacctctctctccaaactgccctttcttctca

SEQ ID NO: 12190 - DNA, 201 bp, Homo sapiens
gtgacttaaggagaatgggagagaacagcagcatttattacagtgaatcttccaaggaatcaactttgcacccaaaaaactaataagattgtggacaaccraaagagttagaattgcctggattcgtggttcagccaacatgtaaagtgacatcccaaacatattcttcaggatccactctcagagcgtcttggtgttttt

SEQ ID NO: 12191 - DNA, 201 bp, Homo sapiens
aattttatggtttgtgaaagttcaaagcatgtcttccatatcttttctcacctattggactcctgttgctgcacatgctgcttctgtgatgcattcagtgsactcagatgtaaaactgcactgtctctttgagttcacatttagcaattttttattcacacttatgagctgaataaacttcacagaagatggtctgaaagg

SEQ ID NO: 12192 - DNA, 201 bp, Homo sapiens
gaccacaagttggggcttgggtagtatttcaagggaatggaaatacttcccctccaaagtcagaggttaaggacaaaaaaattgagtgctcacaggtaagmtgacggagatctcctagatagaacagatgttgaaagacatgagatttggtgacttaaggagaatgggagagaacagcagcatttattacagtgaatcttc

SEQ ID NO: 12193 - DNA, 201 bp, Homo sapiens
ggaagcggagcttgcagtgagccgagattgcgccactgcagtccgcagtccggcctgggcgacagagcgagactccgtctcaaaaaaaaaaaagaaaaaaraagaagaagaagaagaaaattcaggatagccaaagtatgatagttagatgtggaccctggaggagtctggaaggagtgggaccatgaccacaagttgggg

SEQ ID NO: 12194 - DNA, 201 bp, Homo sapiens
gccccaggttgaaaatgtatcctcacagatttaatttttcttataaaagaaagaggtatgttccttctgtgtagagcgaactagaaatatattaaccctgmaactaacatgcagcacttcacaactcattagtgaggcccctgggatatggctccatatatttgcccacaagttggtataggccagaaaccagctgctttt

SEQ ID NO: 12195 - DNA, 201 bp, Homo sapiens
tgcttgtttggagttgtttttcctgtggctaaaggattcctgggaatgctgttcaggcatgtctctgctggtggtatgctgtcatccttttcttttccatytacagtgtagagctgttacagttgtaaacaggcctggctttttacattgttactcactggtgtgggaacaatgtatgttaatgacataagtactgccctt

SEQ ID NO: 12196 - DNA, 201 bp, Homo sapiens
cgagccacgcctcctctctcccgcccgccgcgccgccggactcttattttgaagggcggcgggtgaaggctcggagcctcctgagtcacccggcgggcgargtataaagcccgatacctgccccgcgcccggtccgcggagcccgctgcagctcccgctcgctccggacgcggaatcgggcagcagcgggaggcggcccgg

SEQ ID NO: 12197 - DNA, 201 bp, Homo sapiens
gtaaccgtgagggtttaaaggacagtgccagggccccatgttgttagagagcactctgttgtctttggcatgggagaggacttcagtgcaaaacggtgtaygaagtgtgttgtcagcggaagctaatttacaccctgtgctggacggagggttgcttgtttggagttgtttttcctgtggctaaaggattcctgggaatgc

SEQ ID NO: 12198 - DNA, 201 bp, Homo sapiens
ctttttattcttcttcttgattattctcctttccagtacatttccattttcctatcctatgttttatgcaaaataattttgtgtggagaaacacattttcrctgacattgtctgaaataactagtgaatatttcccattagagttggaccttgaacaacacgggagttagggggaccaaccccaagcacagttaaaaaccc

SEQ ID NO: 12199 - DNA, 201 bp, Homo sapiens
cttttatgcttctgttttataaggaatttcttccttgtgctatatacaaaagttgcttccaggtggattaaacaaggcataaaaagataataaaggaaaartttgataagtagttcaaataaaaaaattctgatcattaaaaggcaccctaaggagtattaaaagacaagtcatagggtggaaagtatttgcaacttatgt

SEQ ID NO: 12200 - DNA, 201 bp, Homo sapiens
agttaatgattctcttctcttcatggttttaccatgtatgtatgctcccctcagtttctttctaaaacttttgcatgtaacacctagagaacttgttaaaacacagattgctgggccccaactctgaatttgtgattcagtaggtctggagtgatgccaaaaatctgcatttctaacaacttcaggtcatgctaatgctgc

SEQ ID NO: 12201 - DNA, 201 bp, Homo sapiens
aaacattatattcttttccctgaggcagaaaatgtaaataatacattcccacaggtaacaactataactatttcctatgtatgttttcaaaaatggttcaygcacttacgagcatttgtgtactgtatgtattcatgcacttatatagggtaccctaagagatgatttttacatgagggcctatcacacttacatattctt

SEQ ID NO: 12202 - DNA, 201 bp, Homo sapiens
tccagcatgctttctatgatgagtagatgtttgatagtacacctcacttatctgtgcctccccagttggggagcctttttcttatctaaaaggccttgccrtatcaaaggtaaggatactgtttggtaaattcctctaaataagaatgccactaggagaaatttaaattatatgtaaaggaataaaagttgaaaaataaag

SEQ ID NO: 12203 - DNA, 201 bp, Homo sapiens
tataagtttagaaattcagggataaaaataacccactgagtgtcaggcctgattgctaagtgctgttcaggtgtgatctcacagctctctcagcattttcrtcactgccaccacttcacaggtgagaaaagtgaggcagacaacagacaagttactggtctaagtggtagaataaaaatataaccccagctccagagcctc

SEQ ID NO: 12204 - DNA, 201 bp, Homo sapiens
tattaaaaataagctgttctcctggcttctataaatcagatttccacgcacacaatcctggaagagtatatctgtgcacatgcctgccctggagctatccrttagaactgtcctcacagtgacgtggaaaactttgcctcatctgtataaggtctcgtctttagagagaggagaaaggattgggaatttcaggcttgaatc

SEQ ID NO: 12205 - DNA, 201 bp, Homo sapiens
ggcctcccaaagtactgggattacaggcatgagccaccacccagccggtatgtgttttatttgagtgtgtatagatgacttttccagtgaagaacattcaktgtatcccagtcaaatattaaaaataagctgttctcctggcttctataaatcagatttccacgcacacaatcctggaagagtatatctgtgcacatgcct

SEQ ID NO: 12206 - DNA, 201 bp, Homo sapiens; identical to SEQ ID NO: 4331

SEQ ID NO: 12207 - DNA, 201 bp, Homo sapiens; identical to SEQ ID NO: 4332

SEQ ID NO: 12208 - DNA, 201 bp, Homo sapiens; identical to SEQ ID NO: 4333

SEQ ID NO: 12209 - DNA, 201 bp, Homo sapiens; identical to SEQ ID NO: 4334

SEQ ID NO: 12210 - DNA, 201 bp, Homo sapiens; identical to SEQ ID NO: 4335

SEQ ID NO: 12211 - DNA, 201 bp, Homo sapiens; identical to SEQ ID NO: 4336

SEQ ID NO: 12212 - DNA, 201 bp, Homo sapiens; identical to SEQ ID NO: 4337

SEQ ID NO: 12213 - DNA, 201 bp, Homo sapiens
gcaattctgctttgtagtccccaggtgatcccttatccctgggtttcctcatactctgacgataccttcagatataatcttttcatgaaaccctccttgcrttgtttgagttttagtgtgccctctctttctagctaggaccacaactgctacatcctcctcctgattgcccaaacctaaaatgatgatgacccataatta

SEQ ID NO: 12214 - DNA, 201 bp, Homo sapiens; identical to SEQ ID NO: 4341

SEQ ID NO: 12215 - DNA, 201 bp, Homo sapiens; identical to SEQ ID NO: 4344

SEQ ID NO: 12216 - DNA, 201 bp, Homo sapiens
ccaagggaacttgtggctgacttttaaaaaccagttctccgctcctccgattgagatgacctgttctgaccttgatggtctccctgtctcccctttctttytcatttgtgctgagaacacagctcttagtgtagtctacctgcagaaacacagtggtgccttctgtcattgaaggctgctcatcagcacatagttgttcta

SEQ ID NO: 12217 - DNA, 201 bp, Homo sapiens
ttggttattagcctttgtgatcaaggaccatcctttaggatgtgggggggtctttgccatctcacttaaataatgttgagtgcttgctttggcagtgtgartactaaaattgcaatgatacagagaagattagcatggcctctgtgcaaggatgacacacaaagtcatgaagtactctgtatttttaaaccatatagcctc

SEQ ID NO: 12218 - DNA, 201 bp, Homo sapiens
tttgctccttaacttattccccaacttggttattagcctttgtgatcaaggaccatcctttaggatgtgggggggtctttgccatctcacttaaataatgktgagtgcttgctttggcagtgtgaatactaaaattgcaatgatacagagaagattagcatggcctctgtgcaaggatgacacacaaagtcatgaagtact

SEQ ID NO: 12219 - DNA, 201 bp, Homo sapiens
cctatggtttaggccaccactgtagagtcacctcctcagaagtctgatggaccacactgtctgatacagtcatctgctcatacttctgtcctttcattgcrtttaccacctcctgatatgtcttgccttccattcttttctcttatctctttctgccatatccaccataaaaatacaatttttctaactattgtgacctag

SEQ ID NO: 12220 - DNA, 201 bp, Homo sapiens; identical to SEQ ID NO: 4353

SEQ ID NO: 12221 - DNA, 201 bp, Homo sapiens; identical to SEQ ID NO: 4354

SEQ ID NO: 12222 - DNA, 201 bp, Homo sapiens; identical to SEQ ID NO: 4356

SEQ ID NO: 12223 - DNA, 201 bp, Homo sapiens; identical to SEQ ID NO: 4357

SEQ ID NO: 12224 - DNA, 201 bp, Homo sapiens; identical to SEQ ID NO: 4358

SEQ ID NO: 12225 - DNA, 201 bp, Homo sapiens; identical to SEQ ID NO: 4359

SEQ ID NO: 12226 - DNA, 201 bp, Homo sapiens
atttaaaagattaagccttttagtgaaagaagttctcaccttggtgtcatcacttgagaggctaagagtgaagcaacctagttactactctgggctctgtyggtggcctcctgtgtggcactgcaccaaacgtacttattactcagctggatgagatgatcccggttccttccatccacatgttccatgctttcctgtgta

SEQ ID NO: 12227 - DNA, 201 bp, Homo sapiens
aaatatttgaaaaatatatattttgtccttttgccctagagatataaattgacacaaaaatatttacaaaacacattagtagacatcaatgggtctaaaamtgtggtcctccaaaccagcaacatcagcatcagctaggaatttgtggaaaatgcaaattttcagtctcaccccaaatcagttgaaccagaaactctgggg

SEQ ID NO: 12228 - DNA, 201 bp, Homo sapiens
aaaaaaaaaaaaaaaaaagaggagggacttcaaaccttagtgctggtagtaacacctgagacagaaaacccgtgtgacacagaatatgagtccttaagcawaaggactgtcgtattcatccctgtgtctctggagctagcacagtccttagtgcattgtacatttgaacaaatgtttgagtgaataacaagcccgttctcc

SEQ ID NO: 12229 - DNA, 201 bp, Homo sapiens
gagatctgctgccagagacacatgttgcaatatcaatagaaggtcgtcaaattgccttccatgagggagtgggtctgtttaatgctatcattttgtgacaytgagaacacgtgaggccacccacaccttctctgcccttcaccagagctggggccagcctcttccgataaatgctaaataatgactatcgctttgaaggtg

SEQ ID NO: 12230 - DNA, 201 bp, Homo sapiens
agagagcttggtcaataggtgaaaacatcagttagaaaaaataagttctaatgttcgttagcagaatagggtgaccatagttaacagaaagttgttgtatrtttcagaatagctagtagacaggatttgaaatgttcccaacacagaaatgataaatacttgagctgatgaatactctaaatacccagacttgatccttac

SEQ ID NO: 12231 - DNA, 201 bp, Homo sapiens
attagattcagtgcaacccaaatgccttctcttcccactttaatgtttgaaagatacatcattcagtttttgattctgaagatttaatatgcaccagcttytgtttctggttaagtgattttcattatcctcgaaggctagtcaaataacaaagcaatttagtaatggcaaaagcataaagtgtggaccagaggggtcttc

SEQ ID NO: 12232 - DNA, 201 bp, Homo sapiens
cgtgcagatgcatacacatatacacaaaatgctgcacatctttcagcatcatacaaattttgtagaagaatggccaatccctaaattagattcagtgcaayccaaatgccttctcttcccactttaatgtttgaaagatacatcattcagtttttgattctgaagatttaatatgcaccagcttctgtttctggttaagtg

SEQ ID NO: 12233 - DNA, 201 bp, Homo sapiens
ttgcattgtcactgaattctttctacttactagactctgctctttctcatgtatattccttgtcttccccaagttcctccacgtcaaagaaatctgttgtmatttcaacagtcaatagtgccttgattcatggggatcatgccagggggtggtcccataagtcttgtttgtttgttttttgagtcagggtctctcttttgc

SEQ ID NO: 12234 - DNA, 201 bp, Homo sapiens
tttagctgtaactatttgattattccctcacatgtgtatgctctttcatatagccaaatttattagctcattacaaattaaaagacaagtctgcataccarcaaaaagctttcccactcctaaaagctaaacaaataagaaaaaacaactcaaattccttgacttcaccatgctttttgatcttgcttttattttattgta

SEQ ID NO: 12235 - DNA, 201 bp, Homo sapiens
ggagcttgtggttgctggtaggctcatctgtgaatccttgctctctgacagaatgaacatcagacttacaaatgtaaactaattctacattactaaccaayacggaaaataaagtattgaaaaaatagattgtatcatcaaaatagccaatgaggacatggttataaggcctagcaaaacagaaacagaaatctttcattt

SEQ ID NO: 12236 - DNA, 201 bp, Homo sapiens
ctttcttagaaataaaaggaaaagactttcaagcatagagtccaggcaggtatctatcattctgctttcttccttcatggaatcaacatttttagttcccrtgtatgagtggaacatgcaatatttgtttttctttgtctggattatttcactttacacaatgatctcccattccattcatgttgctgcagatgacagcct

SEQ ID NO: 12237 - DNA, 201 bp, Homo sapiens
accatgttggccaggctggcctcgaactcctgacctcaggtgatccacccacctcggcctcccaaaatgctgggattacaggtgtgagccaccgtgcccarccagtgttctctctacttttcttttcttactgctaccaccctgttgtaggcctggacatctcacttctaagtgctccacaacatctaaactgatctttct

SEQ ID NO: 12238 - DNA, 201 bp, Homo sapiens
ggtttcaccatgttggccaggctggcctcgaactcctgacctcaggtgatccacccacctcggcctcccaaaatgctgggattacaggtgtgagccaccgygcccaaccagtgttctctctacttttcttttcttactgctaccaccctgttgtaggcctggacatctcacttctaagtgctccacaacatctaaactgat

SEQ ID NO: 12239 - DNA, 201 bp, Homo sapiens
tagtagagatggggtttcaccatgttggccaggctggcctcgaactcctgacctcaggtgatccacccacctcggcctcccaaaatgctgggattacaggygtgagccaccgtgcccaaccagtgttctctctacttttcttttcttactgctaccaccctgttgtaggcctggacatctcacttctaagtgctccacaac

SEQ ID NO: 12240 - DNA, 201 bp, Homo sapiens
tgtatttttagtagagatggggtttcaccatgttggccaggctggcctcgaactcctgacctcaggtgatccacccacctcggcctcccaaaatgctgggrttacaggtgtgagccaccgtgcccaaccagtgttctctctacttttcttttcttactgctaccaccctgttgtaggcctggacatctcacttctaagtgc

SEQ ID NO: 12241 - DNA, 201 bp, Homo sapiens
ctaagttttgtatttttagtagagatggggtttcaccatgttggccaggctggcctcgaactcctgacctcaggtgatccacccacctcggcctcccaaartgctgggattacaggtgtgagccaccgtgcccaaccagtgttctctctacttttcttttcttactgctaccaccctgttgtaggcctggacatctcactt

SEQ ID NO: 12242 - DNA, 201 bp, Homo sapiens
gtactaccatgcccggctaagttttgtatttttagtagagatggggtttcaccatgttggccaggctggcctcgaactcctgacctcaggtgatccacccrcctcggcctcccaaaatgctgggattacaggtgtgagccaccgtgcccaaccagtgttctctctacttttcttttcttactgctaccaccctgttgtagg

SEQ ID NO: 12243 - DNA, 201 bp, Homo sapiens
gcgtgtactaccatgcccggctaagttttgtatttttagtagagatggggtttcaccatgttggccaggctggcctcgaactcctgacctcaggtgatccrcccacctcggcctcccaaaatgctgggattacaggtgtgagccaccgtgcccaaccagtgttctctctacttttcttttcttactgctaccaccctgttg

SEQ ID NO: 12244 - DNA, 201 bp, Homo sapiens
cccaaatagctgggattataggcgtgtactaccatgcccggctaagttttgtatttttagtagagatggggtttcaccatgttggccaggctggcctcgawctcctgacctcaggtgatccacccacctcggcctcccaaaatgctgggattacaggtgtgagccaccgtgcccaaccagtgttctctctacttttctttt

SEQ ID NO: 12245 - DNA, 201 bp, Homo sapiens
ctcccaggttcaagcaattctcctgcctccgcctcccaaatagctgggattataggcgtgtactaccatgcccggctaagttttgtatttttagtagagayggggtttcaccatgttggccaggctggcctcgaactcctgacctcaggtgatccacccacctcggcctcccaaaatgctgggattacaggtgtgagccac

SEQ ID NO: 12246 - DNA, 201 bp, Homo sapiens
tcatccatgtccctgcaaaggacatgaattcattcttttttatgcctgcatagtattccatagtgtatatgagccacatttaaaaatatggaacgcttcaygaatttgcatgtcatccttgtgcagaggtcatgctaatcttctctgtatcatctcgatcttagtatatatgagctgccaaagcaagcacaggttcctggt

SEQ ID NO: 12247 - DNA, 201 bp, Homo sapiens
tcacttgatttttgttttttcgtgttgcatatttacctgccatttaactaggtagaaaataatatgtgatgatactttttaaatatatatttttaaatttycttatgatttagaatatgttattggattttgttttattacaaaatcagtggatgcttgatgtgacaattcaaacaacacagaggctattaaagtttatac

SEQ ID NO: 12248 - DNA, 201 bp, Homo sapiens
ccacaattgctataatgtattacattctatgcatgcaaaaaagaataccagggtttgttctctcctcttttaaacacccagatttaatctgacctacaaarcaaatagggctaaaacactgggcacgtttatcaagtcttcaaaagaatggaatagaggctaatgaacaaaatgctcacatcccttaagataactcaaaga

SEQ ID NO: 12249 - DNA, 201 bp, Homo sapiens
cttccaattgctagtgacctcagtgtcaaaaatgtgctgacaactgtgatgaagagacaaggagagaaaaacagaccctcaggagaaacagtgggaggggraggggagtggttattaacgtgaagtttaaaatattcaaagataggaaacgagaagcttaacgtgattgtctacagtggtgtaaagaagatttatatgtgt

SEQ ID NO: 12250 - DNA, 201 bp, Homo sapiens
gggtatgccggacacagggcctatagtcactgttagtttggctaaataaaattgaaaatcatggagggtttaaactgattcatattttctaactgactctytggttggtagaagcctattgcagcaggacagaggagagatgcgggtgcctcaggaggatatggcggagatgagggagtgagtcagattcgagttgggttc

SEQ ID NO: 12251 - DNA, 201 bp, Homo sapiens
ttctcgaggtcccggccctcacttcatcagttccattcagtatatcccccaaacagcatttccactcagcctgccaaggagaaggaaagagagtatttagratacgtccttcactttcctgagagaacagctttaagaaaagaaaacgtcactcctactcatgttaaccacctattgccatataatagaacacattcttat

SEQ ID NO: 12252 - DNA, 201 bp, Homo sapiens
actctcaccatactgatctttaacttttaatgtggttcttctgtgtaaaagcctctgaactgccagtcctcttttgccagtcctttcaaatcatctgcctsaggtactgaatatgagaaaagtatccctctagttctatatggtacgtatctttcatgttcgggacttcaacagagatagtggatttcttccagtgcccag

SEQ ID NO: 12253 - DNA, 201 bp, Homo sapiens
gcaccactgcactctagcatgggccacagagcaagaccccatctcttagagagagagagagagagaggagaaagaggagggagagggtgatgctagtagtrgtagtgtagtaaggatggcaatgttctgaaatgtctacttttctatgtaataactgaaatttttcttggaggctgagtcattctcatgaatatcaaagat

SEQ ID NO: 12254 - DNA, 201 bp, Homo sapiens
ctcttcacccctagtactttgaaatgttgtgatgatatgtaatatttttcagaaattatagaaaatagtgggccctttcaatctgaaaacactcatgtatwtacattctgaaaattttcttatttttaaatttcttctccattttccctgttctctctttgtgaaacttgtattattacattaataaaactcctaattgat

SEQ ID NO: 12255 - DNA, 201 bp, Homo sapiens
ttggtaggacaaactataaaacgttttgcaatatacaaaatggtactgggtgtccttgcaatagacacccagtaccattgctggactggctctggtggacsttccagggtcatctaattccacaggggtctatgccttttattgtctttacaattttacaactctgtaagttggaaaaatctaaaaacaatgcaaattata

SEQ ID NO: 12256 - DNA, 201 bp, Homo sapiens
acaggggcaccaattctgtcttattttcctttgaatcctctatagctactagaacagtttacataataggttatctcatactaattggctgtcttttatckcattacccaaagataatgactactgaggattattcctaatacaacctaatacaacctccatatctgcatctgtggattcaaccaatctcagattgaaaat

SEQ ID NO: 12257 - DNA, 201 bp, Homo sapiens
tgcctcagcctcccgagtagctgggactacaggcacctgccaccacgcccggctaattttttgtatttttagtacagacggggtttcaccatgttggccargatggtctcgatttcctgacctcatgatccgcccgcctcggcctcccaaagtgctgggattacaggcgtgagccaccacacccagcctgttctctttaat

SEQ ID NO: 12258 - DNA, 201 bp, Homo sapiens
tgaccttgtgatccgctgcctcggcctcccaaaatgctgggattacaggcgtgagccaccgcgcccagcggaaaagattttctagagtttagtgctttcarattatctttaatacagatacatttctaaaaggatatgcctttccaatttcattaagttgcttagggtgagaacacaggactgaggaaataattgggcaca

SEQ ID NO: 12259 - DNA, 201 bp, Homo sapiens
gcactacgaacctctggatgctagagcagatacagaaattctgtgtcagcattcctactgtgttgtgctagagcacactactctgtaccatctgatgctgrgaagcaaaagcatcgtcctgaggatcacttgctgctatttcatgaagagtgactaagattacttgcagttggaaggaaatagagccatttccaatataat

SEQ ID NO: 12260 - DNA, 201 bp, Homo sapiens
atctgctttgatagttgactcattacatacctgaaactggaaaagttttcttccattcacaattcttaggttagcttaatatttacgtaacttatcaaccrttcaattagaagtttttaagtatatctaaggaaaaaattttaattgcaatccctgacttcatttaaattccagttgactcccaaaatgtgttacttttca

SEQ ID NO: 12261 - DNA, 201 bp, Homo sapiens
aatctcaacactttgggaggccgaggcagttggatcacctaaggccagaagttcgagactagcctggccaacatggcaaaaccccatctctactaaaactrcaaaaattagctgggcatcatgggcacctgtaatcccagatactcagaaggctaaggcaggagaatcacttgaacccgagaggcagaggttgcagtgagc

SEQ ID NO: 12262 - DNA, 201 bp, Homo sapiens
gattcaagggagaattggagaaggaagatgaggaggaagaaagctatagtgcagagttttgcactacgaacctctggatgctagagcagatacagaaattytgtgtcagcattcctactgtgttgtgctagagcacactactctgtaccatctgatgctgagaagcaaaagcatcgtcctgaggatcacttgctgctattt

SEQ ID NO: 12263 - DNA, 201 bp, Homo sapiens
ttgctcagaaggatactgaggaggctggagacatcatcagggacagccagacttcagttaagacaaagcatttctaaggaaaaggtttgaggaagcagagkttggttagaaacagccaaggaatcccataggcaatagaagagatctagaaaagggattcaagggagaattggagaaggaagatgaggaggaagaaagcta

SEQ ID NO: 12264 - DNA, 201 bp, Homo sapiens
atatttagacacacgataccagatcaccatcatcttgggttaagaagctaacaaccacttacataagtgaataaatccagatcatttaaaaataagtgatmgtacacaaagaaatattttccattcactactctgaaatccttatatttctccagagatgaatgtcattgaataggtattttagcacgtttcttttttgca

SEQ ID NO: 12265 - DNA, 201 bp, Homo sapiens
gatcttggctcactgcaacctctgcctcctgagttcaagtgattttcctgttccagcctcctcggtagctgggattacaggtgtctgccaccacgaccggstaatttttgtatttttagtagagacaggatttcgccatgttggtcaggctggtctcgaactgctgaccctaggcgacccacccaccttggcctcccaaag

SEQ ID NO: 12266 - DNA, 201 bp, Homo sapiens
gctccctgcatctcctcatcacagagaaaacttctcctggcccataacttgtttttgatggtttgttgtttgccccgtttgtgtccctactccgccagttmatcctgcacactgacttttccagcccccactctcggtgcctacacgaccaggttcaaacaagtcagccccagcgtcccagtcctgcctgtgtttcgagat

SEQ ID NO: 12267 - DNA, 201 bp, Homo sapiens
tcaggtagtcctttatagaaacacaagaacggcctaacacactacataatgtaactaattgagtgagtgacttcctatcacctttaaaaaaaaaaaaaaaattggtcaagagcagtggctcacgcctgtaatctcaacactttgggaggccgaggcagttggatcacctaaggccagaagttcgagactagcctggccaac

SEQ ID NO: 12268 - DNA, 201 bp, Homo sapiens
gaaacaaggaccctgcagaaccctccttgctcagaaggatactgaggaggctggagacatcatcagggacagccagacttcagttaagacaaagcatttcyaaggaaaaggtttgaggaagcagagtttggttagaaacagccaaggaatcccataggcaatagaagagatctagaaaagggattcaagggagaattggag

SEQ ID NO: 12269 - DNA, 201 bp, Homo sapiens
atcaaatactgtagtcactttccagactgtggaaatatacaactgcatattttgtctgtgaaatgtcattgaataaaattgcataatgctacttttctaakacatggattttctgagattaaatctgctgcatgagctaatatgggaatcctgtagggagttagggcacatcttgtgcatttgctattttaaacaacttta

SEQ ID NO: 12270 - DNA, 201 bp, Homo sapiens
acatgagatgaataaacctgttttctttataaattacccagtctcaggtagtcctttatagaaacacaagaacggcctaacacactacataatgtaactarttgagtgagtgacttcctatcacctttaaaaaaaaaaaaaaaattggtcaagagcagtggctcacgcctgtaatctcaacactttgggaggccgaggcag

SEQ ID NO: 12271 - DNA, 201 bp, Homo sapiens
gttaaagcgtgagagaattcatagttaattctttgtacagctaaattgttcagtaggaaatgcagaaagaagtgttaaaagaaaatcttcagccaaatttmatttaatttaaaagagtttaattgagcaatgaacgaatcatgaatcgggcagcccgcagaatcacagcagattcagagagactccgggggtgccttgtgg

SEQ ID NO: 12272 - DNA, 201 bp, Homo sapiens
actgttctttactttgggcttacttttgctgtgcctctttttcttcatttctaatctactatacattctttttttttttttctttttgagagaaggtctcrctctgttgcactgcagtggcgtgatctcagctcactgcaacctccaccaccggggttcaagcgattctcctgcctcagcctcccgagtagctgggattac

SEQ ID NO: 12273 - DNA, 201 bp, Homo sapiens; identical to SEQ ID NO: 4362

SEQ ID NO: 12274 - DNA, 201 bp, Homo sapiens
gcacttcatgacatgtacctttatttatacttttctggtaacaatatagttttaaaatactcaaggcctttctaaataatggtataaatatgatatctcartcctcaaaactaccaacaaatttaaggtatttataacacatacaaccaatacttatgcataaatattataaaaacatggcctacctctcaatgtgcatag

SEQ ID NO: 12275 - DNA, 201 bp, Homo sapiens
tattaaaaaccgggagacgacctcacagggatgctgagccttgtatgttatttgctattctaagaagaaactggggcaagaagccaacttcatcaccaggygacaaagtggtctcctggctgctgttcaagggatggcagcatgcagcatcacctccaggccatcacagcctcttcctggctgcaggaagctcagctttcc

SEQ ID NO: 12276 - DNA, 201 bp, Homo sapiens
agtgcactccagcctgggtgacagtgtgcgacacagtctcaaaaaaaaaaaaaaaggaaatagggagaaagatattttttctaattcaggatcttccactraatatcagtattcaaattatgtagcctttttgaccctcagtatcccaatccgtaaaatgaaggcaatagtacccagctctaaatgttgttgtaaagatta

SEQ ID NO: 12277 - DNA, 201 bp, Homo sapiens
ggccgggcatggtggttcacacctgtaatcccagcactttgggaggccgaggcggatgaatctattgtagtatggtggctggtcaataggcttggcccttrtaatacctgaagcactagaagcttaaagcctgagaagaaaggccttgcttagtaagaaatcgacttcctgtccctcctgatacagtactcagtgcagtgg

SEQ ID NO: 12278 - DNA, 201 bp, Homo sapiens
ctcttatgtgtgttttatcaaggaacaagtagattcctgatgaaaaaaagtttttagactgaaagcagactaacagagtggttgaaaattgacatgggacrcaaccgaactcccagtcttggtagacacattccacttactgcctcttctctattcccttttccaagtgcaggaatcttcttttttatttttatttatgta

SEQ ID NO: 12279 - DNA, 201 bp, Homo sapiens
cttaaatttcatttacatgtggcttcgtgtagcaatctttaaaaattaaaaggaacagattagtaggctgattaccatggttacctttgggactaaatagrtatttgttgaacgactgccgtgtgactgtaatcttgtgatgggttctgagagatgtgagcaggaacttgatagagcctaaaatctagtgggaaagccaag

SEQ ID NO: 12280 - DNA, 201 bp, Homo sapiens
ccagaaccaagcgtgggggtagctcgcgaggcctcagccctcctgctcctgtgtgagagtgctttcttctgcaacctggctcctggaaggaatgaatgctmccccttcagcccctactccccaccaagaatttaaaagataagagggaaacatttccctgactctaaaatggtttgtttttaatatggtatgtccaggcct

SEQ ID NO: 12281 - DNA, 201 bp, Homo sapiens
ttaggcctgggtcagtagctcagaaacatcagaatgcatttgaaggctttagcctttccttcatgattagaagatagctgtagctgctcaaataccaagtsctgtcaccatctccagagcaggaaggatggggcagaagcaatacattttgtgaggctctgcttattttattccgaagtcctttctgggagacttcttaag

SEQ ID NO: 12282 - DNA, 201 bp, Homo sapiens
gagatatttcactgcctcttgaaaccagctgcagaatccaactgggatagacccaaactctcaccatactgatctttaacttttaatgtggttcttctgtrtaaaagcctctgaactgccagtcctcttttgccagtcctttcaaatcatctgcctcaggtactgaatatgagaaaagtatccctctagttctatatggta

SEQ ID NO: 12283 - DNA, 201 bp, Homo sapiens
acttacaaaatgcacacacacacacacacacacacaatcatttatactttgccgtagcctacgaggtattattagtgttccttttttataactgaggcccrgagaggtagaagaaacttgttcaaagtcacacaataatttgaaccaagacagtcttgctccagggcccatattaaccaccctatcatactgataggtatt

SEQ ID NO: 12284 - DNA, 201 bp, Homo sapiens
atgaaaactttaccctcagagacaatggtgaaggagaaaagatgcaatgaaggcaagactaagattccaattcaaataacaataatgtcaggaaagtatgygatgaaggcatctgctgaaagaggaaagacagttgtggtaactgtgggtaatattacaaagcacgaaaagggtggagaactaagagagagaaagaatacc

SEQ ID NO: 12285 - DNA, 201 bp, Homo sapiens
cacttacaaaatgcacacacacacacacacacacacaatcatttatactttgccgtagcctacgaggtattattagtgttccttttttataactgaggccyagagaggtagaagaaacttgttcaaagtcacacaataatttgaaccaagacagtcttgctccagggcccatattaaccaccctatcatactgataggtat

SEQ ID NO: 12286 - DNA, 201 bp, Homo sapiens
taactttactcctccacaaacactgttttccaacaacacctgcccccaccaaacaaaactcttatccctttaattgtacatctcaggtgtttaaatgaatrtgatatgaataagctatttatgtatatatgtatgtatgtattttcaagccagggtctcactctgccacccaggctggagtgcagtggtctgtcacagctc

SEQ ID NO: 12287 - DNA, 201 bp, Homo sapiens
tctagaaaccaatgaccttcaggattccatctggatttttagaactcttcctaggaatccttccccagaaaatgtcctatattccaaaataactttactcytccacaaacactgttttccaacaacacctgcccccaccaaacaaaactcttatccctttaattgtacatctcaggtgtttaaatgaatatgatatgaata

SEQ ID NO: 12288 - DNA, 201 bp, Homo sapiens
tcattaactattcctgattttccaactttttgacataatgcttttataattacaaagtattattttaaaataaataggtacttttgatcctttctcttccrtcctccttcctccattaaacttcagttcatttgactgttcatcatggatgcttcttgttaaataatagttgcttgctaagtaagcttaattttgagcaca

SEQ ID NO: 12289 - DNA, 201 bp, Homo sapiens
ctcagcctcctgagtagctggaattatggacgtgtaccacaacacctggctaatttttgtatttttagtagagacggggtttcaccatgttggtcaggctsgtctcaaactcccgacctcgtgacccacccgtcttgtcctcccaaagtgctgggattacaggcgtgagccactgctcccagccaccagtctaagtttcaa

SEQ ID NO: 12290 - DNA, 201 bp, Homo sapiens
agtcttatttttaagtgattgtatatatttattgtagaaatgattgataattcctttctctattgttgccaatctaattttttttttttttttttgagacrgagtctcgctctgttgcccaggctggagtgcagtggcatgacctcagttctctgcaacctccgcctcctgggttcaagtaattctcctgcctcagcctcc

SEQ ID NO: 12291 - DNA, 201 bp, Homo sapiens
tccacttcagctcctacatctccctttgtttctaacactctccctcaagtgtaagcagaagatagttaaatgtaggccatttggtgagtcccagatgtccygcacacaggatttgtgcaacgccttaccacccgctgtgggactgcgaagtgtgcttaaacgctgcacaagaaaaaattaatagcattatttctgcaactc

SEQ ID NO: 12292 - DNA, 201 bp, Homo sapiens
gcatccacttcagctcctacatctccctttgtttctaacactctccctcaagtgtaagcagaagatagttaaatgtaggccatttggtgagtcccagatgwcccgcacacaggatttgtgcaacgccttaccacccgctgtgggactgcgaagtgtgcttaaacgctgcacaagaaaaaattaatagcattatttctgcaa

SEQ ID NO: 12293 - DNA, 201 bp, Homo sapiens
atgagctcttttctctaactaggcccagcccccaccctgtactgtccaacagaagtcgtcacctatagactcacagccatcccagacctccagccgagtcygtggtaccgctcataaagtaggggttcctggtccagtctatgatacctctcataaagtaggggttcctggctcagtctgtggtacctctcataaagtgag

SEQ ID NO: 12294 - DNA, 201 bp, Homo sapiens
cgggcacctgtagttggaataaggcagacacacagagatgacagatctaatggatcatccttcttttgctgtctcctcagagtaaaggaagtgcgtatgtyttctcacagccaatcaactctccaagtctattctaccccacagtcccttccatggccggtaaacactacaggtggtaatatcagacatctgttttattct

SEQ ID NO: 12295 - DNA, 201 bp, Homo sapiens
actttataaaatattatcatgttacctatgctgagcattttgagctagatagtgtgcaatacccgtcagtagttagatagatcaatcagtcgattgataartagatagatctgtgatttggtttcactgccaatatcttctttctttagtgaatactgttggtttttagtgtctttcgttttagtgttttagtttttaacc

SEQ ID NO: 12296 - DNA, 201 bp, Homo sapiens
ggtctcctcagctgttctgagtctagatcaggtcctttgcttagtcccttagctaaagcttcatcttaatccatagtttagtccattctggcggctataaygaagtaccataaactggatacattataaacaacagaggtttattgctcacagttctgaaggctgaaaagtccaaggtgaaggtgccggtagattcagtgt

SEQ ID NO: 12297 - DNA, 201 bp, Homo sapiens
ttcttgggctcagaagcagtgagtcttgcctccctggatgtgaatgttcagccctgagatcaatatctgaagtaggagaggagagtcacaagcatgctttrctggttagaaaggaagtctgtaagagagatcagaaaactggtaactctgtgaagaggaaaagaagagctaagtgactcagtaatgatcttaaagtttatt

SEQ ID NO: 12298 - DNA, 201 bp, Homo sapiens
ctgtaaaatagcatttttatttggacaatttttttccatcaagctttaatcatactttgccaatgcatattgaactttgtttctctgaggtgcctaaaggsacatccaatacatttaccatcccttcaaagtctgtatacttagctctttgaacagtttcttaaaaaaataataataataaataaacaaaagctccaatgg

SEQ ID NO: 12299 - DNA, 201 bp, Homo sapiens
gttgccaggggcttggaggaaggagaaatagaaagtcattcaataggtacagcatttccattttgaaagataaaatgttctggagatcttttgtacaacarcatgaacatacttaacactacagaactgtacacttaaaaatgattgagatggtatattttatgtgttttttaacaacaactaacatttaaaaaattattc

SEQ ID NO: 12300 - DNA, 201 bp, Homo sapiens
agaaattatcacgctcctccttgtaactgagttattttttactcttgtctaatccctcctactggattgtaagatcatttaaggagaataactacgcctgsctcatctttgtcctccttgaagcttctcttgcacaactaagcagttgttccgttgatttcatgttcaacttactattccaggaaagggaagtagaagaaa

SEQ ID NO: 12301 - DNA, 201 bp, Homo sapiens
tagcagtcatcatattaggtattatgagtaatctagaagtgatttaaggtatactggaggatgtgcataggttttatgcaaatactacatcattttatatyaggaacttgagcatctctgaattttggtatccaagggaggtcctggaaccactcccccatagatactgaggaatgactatattatttccttatgtaggtt

SEQ ID NO: 12302 - DNA, 201 bp, Homo sapiens
ggaggcctgagtgcatgtgtgttggtgatgacagagggtgaggctggagcatttccatcagctcaggctgtccacgggtatgtttaacctgcacgtcgtgstttggaacttttctcatcagccggggagcatcataggaaaaaaataaaaaccaaaagagtgacgtgacacaatttgtacctatgatctctcttaccattt

SEQ ID NO: 12303 - DNA, 201 bp, Homo sapiens
tttttttttttcaaatcttcgtatgtttaaacatattcttagggaatcacttgatttttgttttttcgtgttgcatatttacctgccatttaactaggtaraaaataatatgtgatgatactttttaaatatatatttttaaattttcttatgatttagaatatgttattggattttgttttattacaaaatcagtggatg

SEQ ID NO: 12304 - DNA, 201 bp, Homo sapiens
tctccagggagagaaagggcaaatgtgttgaatgactaggacttgactgtggtcttgattaagtaaagtctatctactctaatgggtatcataaattggaygtaaatcacaggagagcaaatacgaggagctgttaagaggcatctacagcccgtcttatctcaggagtttcaacagctctgcagcttttagctctgcttt

SEQ ID NO: 12305 - DNA, 201 bp, Homo sapiens
tggttaaaatatagaaagaatattaaaatccttgaggtctgtacttttttaaactatttaatagcaccaatatctccattatgtggaggtgaagaaggcargatgtgagccaccatttatagctccttcaagaactggcccacaataattagctttaaaagtagggccaggtgaggtagctcatgcctgtaatcccagcac

SEQ ID NO: 12306 - DNA, 201 bp, Homo sapiens
tgttaattggttgctttcaaaataatggttaaaatatagaaagaatattaaaatccttgaggtctgtacttttttaaactatttaatagcaccaatatctycattatgtggaggtgaagaaggcaagatgtgagccaccatttatagctccttcaagaactggcccacaataattagctttaaaagtagggccaggtgagg

SEQ ID NO: 12307 - DNA, 201 bp, Homo sapiens
gataaaatgtacaagatgctttacaaagaaaacctgtgggaattgtctagtcattaatttcacagtctaaattgtagagtttccattagtaacactgacaytgttttttttttaatcaaacaaacatcattttgcatagcaaccagccttcacttctgctttattgttttaaacatcaccatttcctttctttccctccta

SEQ ID NO: 12308 - DNA, 201 bp, Homo sapiens
acagggtcttgtcatcttgcccagactggtctctaactcctgggctgaagtgatccttccaccttggcctcctaaagtgctgggattataggcgtgagccrccatgcccagcctgtatttgtttttaaaagatggtaaataaatatctgtatattcctagtgtcagacactaagctacctctcatggtcaaaaagaaaaaa

SEQ ID NO: 12309 - DNA, 201 bp, Homo sapiens
gggctggtccatccttctattttatcctttttccttaggagataaagtggttatttgaggaaagacttgctagacatgaatctggttttggttcaaattcyattttattatttcctgggctttgaatttcaaaaagccaatctatttattggtctctttggggccataaggttaaagtacatctgttgtccacacaaattt

SEQ ID NO: 12310 - DNA, 201 bp, Homo sapiens
ggggccataaggttaaagtacatctgttgtccacacaaatttagctattggccttcgagctaagcagtcatgaaattatagccatagtaaatttagacaaygattaatttcacttcggtctgcctataagtccacatgacagaataaacatagtgtgtcatgtggttaatgtgaacacatgtaaaaaattaagaaatcttt

SEQ ID NO: 12311 - DNA, 201 bp, Homo sapiens
tgctcatacttctgtcctttcattgcgtttaccacctcctgatatgtcttgccttccattcttttctcttatctctttctgccatatccaccataaaaatmcaatttttctaactattgtgacctagttcaacattgtatttctagcacctagaacagagttgaacactgagaaggcaatcagtaagggttatttgcacat

SEQ ID NO: 12312 - DNA, 201 bp, Homo sapiens
gaaatgcaatacttatagatggcctgacttggagcttaggcagcaacaaaacttatcttgggcatcactttcaaatttcgttttggtggttctccagttcktggcagaccactgccattcctttgaggaaaaggaacacctggaaaatataaccattgctgaagcacttatctctctggggttttttcctaccctttattt

SEQ ID NO: 12313 - DNA, 201 bp, Homo sapiens
aagcacctgattgtttccattaactggcttttaacatttaccattttgcttagcaaagttggagaacattagccaagattcactgatgaaactttataagygttataagtcagatttgtttcattttaaaagccacatgtttaaaatacagtgcacagagaattttcatgatacgtagttgtggttcaataaaataaagat

SEQ ID NO: 12314 - DNA, 201 bp, Homo sapiens
tctaatttttaagctggaatgtttggaaaatccttacggggagggaggaatcattatgcaacaacaacaatacacacacacacacacatatgtatgtgtaygtatacatatttataaaaaacaatttcaaaatcccagcacagaatagtataaagaaatatgccatcttacagaactataatgttacaatcctttttcctt

SEQ ID NO: 12315 - DNA, 201 bp, Homo sapiens
taatgctatcattttgtgacattgagaacacgtgaggccacccacaccttctctgcccttcaccagagctggggccagcctcttccgataaatgctaaatratgactatcgctttgaaggtgcacttattagcaagggagtccatgtgtctagggttcttttacgccattacagtgtatgaataatgtacatttgacgggg

SEQ ID NO: 12316 - DNA, 201 bp, Homo sapiens
actataatgttacaatcctttttccttttatgtactataatcctttatgaacaaggaaaattcaatactggagaatattatctcctctccaacaaattgayttcaacttgagtattatatccaaagaaacttaatctgtaagtatgaagctatacccaactttgaaagatttttgaagcagtacaagtttctttcttcttc

SEQ ID NO: 12317 - DNA, 201 bp, Homo sapiens
cctggtgcaatacaggtttctatgtgatggaaaaatctaagctcattaggtaaaatatagtcattgtatttccttatgtctacaattggattttcttctcygttagcccctgctactagtctcatgaactaagaaacctggcttagctgacatctatgcttccagtcgattcctgcattgcggttgaagtgaaaaaagccc

SEQ ID NO: 12318 - DNA, 201 bp, Homo sapiens
tctccctttttcttttatataaggaattggctgctttttatgtactggcttcctttttgtagacccttccatgatggccaggaactctaggtgattctatscttctagacacatttcccttccatcttcagtacgaaaagtcccagggaaaggccctgcttggcctggcctgacctggattatatacttatccttggataa

SEQ ID NO: 12319 - DNA, 201 bp, Homo sapiens
gtctggccagtagtccaacatgattgcctctggaattcaccatgagactcacagttcaccagaaggcagaggcaaaaatcagagttgccaattaaaattayttctaaagatgggttcactgcttcctattcccaagcctttctgagactccatggggtgaatcacttgcttcttttctgtatctcctcctgcaggcattta

SEQ ID NO: 12320 - DNA, 201 bp, Homo sapiens
agaatccataagaaagcaaaacctaattttatagttgcctattttcttattcttttatttcttaattcattttaaatctttttttttctgtgtatttgcaytgaattgaacaaacaaaagcctttatattttgcggaggacaataaatattccctagaacacccaattactgttgaactagaaagcaaaagaaattcataa

SEQ ID NO: 12321 - DNA, 201 bp, Homo sapiens
aaaaaaaaaaaaagagagagattctagggccctggctctaagacatactgattgcttaagtctgagtggagccctgggatctgcgttttaataagcaccgyagagggttttgagtaagcctttgcatgccatacttgaagaaaccctctcctaaactatgctgtctaggccagaccctttaaatactacagatctaccttt

SEQ ID NO: 12322 - DNA, 201 bp, Homo sapiens
tgtggtgcatgtacttttatataaattatgtaaatgtattacttattcaaaacattaaattaacaaaagaaaaataaaagctgatgtcagctcccaaagaytgtaattcagtagttctgagcagggctcaggggaatctgcattttcaacaagctcccccaccctcccatcccttcctgggtggggtagatcaccctcaaa

SEQ ID NO: 12323 - DNA, 201 bp, Homo sapiens
agttggctgattattgtatgttctttaattccccaggtcttatctcttctttggtgggaatcacatatttactgttgagcatggtttctggggttgatacycagagtattagcaaactcatttgctttattaactttattttcaaattaaattagacaaaaacctgtattattctactctaaatacagaaaaaacatgtct

SEQ ID NO: 12324 - DNA, 201 bp, Homo sapiens
aggataagacaggcctatctatgactcttttaaaaactgataaattcaattaaataaaattagaaacttttttaatgtcatgagatatcaagagccaagtygaaagacaaacggcaaaatgagaaaacaatctgaaactcctaacgcaaagggataatctccttaacatacgtggagtttcaagaactgaagaacaagacc

SEQ ID NO: 12325 - DNA, 201 bp, Homo sapiens
agttggaaatgtgcctatcataagctgagtcacattttatgtgtcccctcctctcaagccactgttttctctctctttttttttttttgcgattaaaaaawatatatatatcctgtgtaaaataaaacagattcagaaaactgcgtaaaacaattcattatataatttgtatatataatgaatgaaagaaatagaactttc

SEQ ID NO: 12326 - DNA, 201 bp, Homo sapiens
gggccatataatatgttgcaactactacttgactctgactataatgcaaaagcagacatagacaacatgtaaatgaatgagcatggttatgttccccgccscccaccaaaaaaaaaaaaccttatttaaggactccgaaatgtgaactttatgtcacaaaatactcttcttcttttgatttttttcaaacccttaaaagta

SEQ ID NO: 12327 - DNA, 201 bp, Homo sapiens
gctgagccccacccggcctccccacccacctcgccgcctgttctctccctcaaatccgaaaggtcacgggtacacacccaacttcagatagcatttagttwgcttcccctccaacactgaggaaatgttcattaaatgctccagccatttaacaagtctatttaacttcattttcaatttaaccatgtattatttcagttt

SEQ ID NO: 12328 - DNA, 201 bp, Homo sapiens
tggaggaaggagaaatagaaagtcattcaataggtacagcatttccattttgaaagataaaatgttctggagatcttttgtacaacaacatgaacatactyaacactacagaactgtacacttaaaaatgattgagatggtatattttatgtgttttttaacaacaactaacatttaaaaaattattctttttgaaagtgg

SEQ ID NO: 12329 - DNA, 201 bp, Homo sapiens
ttcttttttatttttatttatgtatttattttattttatatttttgagatggagtttcactgttttgcccaggctggagtgaagtggcgcgatcttagctyactgcaatctctgcctcctgggttcaagcgatcctcctgcctcagcctcccgagtagctgggattataggcgcccgccaccacgcccagctaatttttgt

SEQ ID NO: 12330 - DNA, 201 bp, Homo sapiens
aattgaggatggcaaatgtgtttcatttcagccttcaactttagttgctttgtagccttaaacagctgtgctgaggattctcagacattctgtctcactarcaaagaacattctgatgagtgagtgatgtctgccacaggaagaagggggatagtgtccttgcctgtgccatgcatttaccaaacctatacttcatcctat

SEQ ID NO: 12331 - DNA, 201 bp, Homo sapiens
cttaaagtgcacatgatcacctaggggatctgaactgattcagtagatttggggtgagggtcaagatactgcacttctaacaagcttccaggtgatgctgrtgctgctggcctcaggaccacactttgaggagcaaaaagcaggagtggggaatcattttctataaagatccagatactacataattggggctttgagggc

SEQ ID NO: 12332 - DNA, 201 bp, Homo sapiens
ttattcaaatggccaaataaaacaaggtgtaattagtcctgacttcctgttcttgctcacacacctgaggcccctccccgctctgctgcagctctgcatamccaggctctcaggggaagcagtggaggcagccttcttggacaacagctcacttgtctacacagtcaaaagtatgtatttgatcaaaatggttgggaggag

SEQ ID NO: 12333 - DNA, 201 bp, Homo sapiens
atcattgtatttcagtggacaggttccaaatgcacagaagactgacagcattgtctgataaagcatctcccattttatcccatttggaatgtaatccaagwtacaacaatagctaataattacctgctgtaattgtagcaacagaatagctgaatgtgcacctctagctgatttatgtatgcaatttctcattctcagctc

SEQ ID NO: 12334 - DNA, 201 bp, Homo sapiens
ctcaggggccaacactaattggttggtagtggctgcccctagcatcactggagaaggactctgaaaccgagttggggatcaatgggatatagggcttgccrtattactgatgtctgccataagctctggaaaagctagttgtaaaatgtatgctaggtattaaatgtcaccaccatagagccagatgaggttttagtgata

SEQ ID NO: 12335 - DNA, 201 bp, Homo sapiens
ggtcaaactgattaagtttaataaaaaaagggattctctgagaaagtaatgtttgtggggaaacataagactgagtaggagagtgccaagtactccaggakgagccagggcttagaaacttaccagagcgtggcttcacaaggagctgccccagagcccatgtgcccagtgctcagaaggcaatgatgtgcgaggcacaga

SEQ ID NO: 12336 - DNA, 201 bp, Homo sapiens
actggagaaggactctgaaaccgagttggggatcaatgggatatagggcttgccgtattactgatgtctgccataagctctggaaaagctagttgtaaaaygtatgctaggtattaaatgtcaccaccatagagccagatgaggttttagtgataatccaacccagtgttttcaaaatgtgttcccagaacactgatcctt

SEQ ID NO: 12337 - DNA, 201 bp, Homo sapiens
caagaagcagggacctaattatgcagggcttcagagaccatgttaaaattttttattttatcctcaaagtcatggaaggatgggaggatgataaaatttcrttcttattaagagagccctctgatttagaaggggcaactgtatattcatcctcaggttttctgaaaaatggcatgactaaaagaaccacaaagtcgtaga

SEQ ID NO: 12338 - DNA, 201 bp, Homo sapiens
ggaaggatgggaggatgataaaatttcgttcttattaagagagccctctgatttagaaggggcaactgtatattcatcctcaggttttctgaaaaatggcrtgactaaaagaaccacaaagtcgtagaagcatcagaaggaattctttacaagtcatcaagatcatcgatctaaaaccactttatattatccctactgaat

SEQ ID NO: 12339 - DNA, 201 bp, Homo sapiens
ttctgcaagcatgaagaaagtcatcttgcccccagatcactcttaattatcaggtcgtttgaccagatcacagtgctatgtgatccaggagcctcgggccyagctgttccctgcctcagacatattgcgtatttatggttcctcgtggagtgaaatagtgtttgtaaaggaaacaaatttttgtctaggtacttcatcgta

SEQ ID NO: 12340 - DNA, 201 bp, Homo sapiens
ataaattttataggactaggtcagtgatattttccaaatgctaaaacataaatagcctttgaaattcaggaaaacatttaagcattctgtttttattactstctcttcctaccctcttcctttcctctgagagagtcactcttgctcgctctctccccctcctctctgtctctttctctcccctcacctccttcattccct

SEQ ID NO: 12341 - DNA, 201 bp, Homo sapiens
tcttttctatgacataatctctttgtgaaactgagtttttgatgagtgtgtgataaaaagtaagtacctcatgaaaatccatgtaaaacatgaaatgaggytggctcatccaatctgattccaagagaggtggtacagtgcccagcagatgcacacagccattagtaagaaatagtggttatttaagaataaaataatagt

SEQ ID NO: 12342 - DNA, 201 bp, Homo sapiens
aggagtgtccaatcttttgaattccctgggccacactggaagaagaattacctggggtcacatataaaatacactaacactaatcatagcttttgagcttaaaaaaaaaatctcataatgttttaggaaagtttatgaatttatgttgggccacattcaaagctgtcctgggccacatgtggctcagaggccacgggttgg

SEQ ID NO: 12343 - DNA, 201 bp, Homo sapiens
aagcggcgagagacaggattatcaatgaaataatttttttaaagttccccaaactgaaagttatcaattgccagatggaaaaatccactgattgcacaacrtatggaataaacccagacccaggcacgtcatcatgaaattcagaatttccaggacaaggagatcatgttataagtgtcctgggagaaaacatcaggttat

SEQ ID NO: 12344 - DNA, 201 bp, Homo sapiens
accagaggtacaatatacatttttaaaaaatggttgcttgggaggttgaggcaggagaatggcatgaacccgggaggcggagcttgcagtgagctgagatsgcgccactgcactccagcctgggcgagacagcgagactccatctcaaaaacaaacaaaaaaaatggttgctatgtgaaacaagtgagcaacctggatgga

SEQ ID NO: 12345 - DNA, 201 bp, Homo sapiens
aagtcaacaaattccaaaagatagaaacattacaaataatatttttggtcacaatgcaataaaacaaaaaattgttatcaaaatctcagttatcaatatcratacagaaaattctaaatgaatactggcaaacagcattcactagcacattaaaaaaagtaattaccatgacgaaatggagcttgttgtaggaatgcaaga

SEQ ID NO: 12346 - DNA, 201 bp, Homo sapiens
aaaggacaagatgtagaggtggggtacaggaagcaggagatcacatagaagcaagaggcaaagggcatccccaggagggtgacagctgtgcatcaggaatkaagggcaagttcagattgaagcctcgtgtctcgagggacaaatgcaatgaggctttcatcattaggaggttcattgcctctggtccagcccgtcttttat

SEQ ID NO: 12347 - DNA, 201 bp, Homo sapiens
gaaataggcagccacttagctgttttaaacagggaactgagctaatccaacctgcacatgaagatgatgtcactgctgttgtagggatagccagttaggargctcttcaggtgcctggtctggaaagagttgtgtgattcaggttgggctgataactgtagttagagaagtttggagatcaactgtttcttatactgtggt

SEQ ID NO: 12348 - DNA, 201 bp, Homo sapiens
aacccatctatgcctgaggttgcaattttttgaatttttgcaatcagaccttgacgatgaccttgagcagtaggatataagtaactcccaaatgcttagcrttccaataatggaacactaggcataaatgggtaaaaagcagaaaataccagcaatctcattgctggatatatacccaaaagaaaggaagtcagtatatca

SEQ ID NO: 12349 - DNA, 201 bp, Homo sapiens
actagcaatggcagagcaaagaggctcaactgtgactttaggaaagtcattgagccttccagttcaggttcctcatctgtatgaagagacaaaatgtcaasggttttttgttaaatggaagagtgtatttttaatgattgtgttaaaaaatatttcacaaaatgatgtagaaaattctttgatgaagggtgcaagtaatta

SEQ ID NO: 12350 - DNA, 201 bp, Homo sapiens
gtgggggatgagatatggagatgggtttccatgcttgcagattcacagcctttgcagctcctgggtcaccagaacaagactaggggccggccagtcaagcrgtaggaagattatctgcaaccttatgcaatcattagaattaaagagagtataatgaggggatgaagagcaaagactataggcagagtcagactccctggg

SEQ ID NO: 12351 - DNA, 201 bp, Homo sapiens
gattgtaatacataggagaaataatgcagagaaaagaataaatttgcccagtaaggtataagtaaaataattagcatgagccatgcatattgctttcaggsaaagcaactgacagccagggaaagtcagttattgacgtaagtgcctgtcaagtcaccagttctatgttgttaaaatgtggtaagttagggtgtgacccaa

SEQ ID NO: 12352 - DNA, 201 bp, Homo sapiens
ctcagtggatacttcatttatcatagctctccttggaaagctgacctctaaacatgaacttctagaaggaacacagaataagaacaagggaaaagcattcrggaaggagggtggctttgaaaggagttagctgggaaaacccttgaaaaagaaagtgaatccatttctgtacatacaattattgactgacggggcagttta

SEQ ID NO: 12353 - DNA, 201 bp, Homo sapiens
tgtagcacacccatctcgtccaatgtgtggtgccaaacttcaaaactctaagattctgttagtttagacaagaaggtgatgcatctttaatcagctacatraagagtggatgaggcagatttccttttctcatatatgcactaactagattattttcagtttaattttatgctttttaaatgcacttcagtttgagttggt

SEQ ID NO: 12354 - DNA, 201 bp, Homo sapiens
cagtgtttggttttctgttcctgtgttagtttgctgagaatgatggtttccagcttcatccatgtccctgcaaaggacatgaattcattcttttttatgcytgcatagtattccatagtgtatatgagccacatttaaaaatatggaacgcttcacgaatttgcatgtcatccttgtgcagaggtcatgctaatcttctct

SEQ ID NO: 12355 - DNA, 201 bp, Homo sapiens
actgggtgtgtggcaagcacccggccagtgatttaacctttcagaaactaagtttccctgtttgtaaagtagaaaagccaatttctggcaaacttgcctcwggttattaggaaaaccaagtggggagtgtgtgggagtgtgtgtgttgtgtgtgtgtgtggccagcataacaccgccaataacaccacaatgaacgtggag

SEQ ID NO: 12356 - DNA, 201 bp, Homo sapiens
tcaaggataagtcagtgaagcccaaatcaccaccaagaccccttcctttcccaaagttgctatagacagatacactacctaataagggctaataagcagaygaccaattttctttttttttctctctctctttttgaaacagggcctcactctatcgcccaggctagagtgcagtgccacaatcacagctcactgtagcct

SEQ ID NO: 12357 - DNA, 201 bp, Homo sapiens
aggtggatcacttgaggtcaggagtttgagaccagcctggccagcatggcgaaaccccatctgtactaaaaatacaaaaattagttgggcatggtggtgastaccggtaatcccagctacccggttggctgagacaggagaattgcttgaaactgggaggcagaggttgcagtgagccaagattatgcctctgcactccag

SEQ ID NO: 12358 - DNA, 201 bp, Homo sapiens
aagaaaggaagaaaaaagaaagggaaggaaggagtgagcgaggaatgaaaagagaaagagggaaagagggaaggatggtgagcctcttcagaaagacggcygctcatgcttgctctcttgggcatggagtgggtcactggctggacgtttaatgggtttacattattccttaacagtcattgtttcaaaatgaggcatctc

SEQ ID NO: 12359 - DNA, 201 bp, Homo sapiens
gaaagatttggtcccagtggccaaggagcacactctggaaggagaaagaagacagaaattgttgtgacatggtgtgccaacccagctactggaggattatmcacagagccaggggtgtccttagctgatctggtgaaagaaaagttggtgatctggatttagggctaagcccacaatctgtcacaaattttgcatagaata

SEQ ID NO: 12360 - DNA, 201 bp, Homo sapiens
tactaatagctcacatttatcaaaggcatgcttgaacattgctcaaaatacttcacatgtactaccacatttcatcttcacagtctaggagggaagtgctrtcatgacccccattttatttattttagattcactggttacatgggcaggtttgttacaagggtatattcatgatgctaaggtttgggtttccattgatcc

SEQ ID NO: 12361 - DNA, 201 bp, Homo sapiens
atttcttctatacgatagagaaataaatgtctgcctggtttaattcgtaagtctctcattttggtgttttgttttcagttgtggaatggagtagggtagayggtatgtgcagctaagcctaaactaaatgatatagactccaagaaaaaaaatgtctgctttttcttccataatcctagaacctgcctggtactgataagc

SEQ ID NO: 12362 - DNA, 201 bp, Homo sapiens
tcctgggctcaagtgatcctcccacctcagcctcctgagtacctgggactactgacacgtgccaccatgcccagttagttttcaaattttttttgtagagrcagggtcttgtcatcttgcccagactggtctctaactcctgggctgaagtgatccttccaccttggcctcctaaagtgctgggattataggcgtgagcca

SEQ ID NO: 12363 - DNA, 201 bp, Homo sapiens
tttagataatcaaaagcatgtgtccccacaccttgccagttccaccaagggatcctcagcacccatctcagaggggtctgatgtgacatctgaaaggcgaygttgctgcctccccagccaaggggggtgcttgtaatttctcctgcattatctttgaggtatcactcaccaaagcaatgaagggtaaccattccgaacccc

SEQ ID NO: 12364 - DNA, 201 bp, Homo sapiens
ttccagtactttaccgttcattgaaagccaggaagtactgggacaaagaaattattagagttgataataaaagagtaaacagcatactcattattagcagygtactttctcattttccctccctgataggactttaactctcttctatatatttcagccctaatgtacttatcatatagtctttaggaacaagagaaaaga

SEQ ID NO: 12365 - DNA, 201 bp, Homo sapiens
gctttgaaaggagttagctgggaaaacccttgaaaaagaaagtgaatccatttctgtacatacaattattgactgacggggcagtttacagttttaagttygtgtgcactcatgccctgtttgagatgcctgttttgtggttcctcagagaccacactagccacatttgaacaccattagattagactagagccaggactc

SEQ ID NO: 12366 - DNA, 201 bp, Homo sapiens
caagcctgtagaaggtaaggaggagattatatgatgaaagtattattgattttagtggaatcatggaatttaacatatcttctttacttccaagttagtgyttttcactctacatcatgcccaacactttcctaggtaaacaagggctataaaagaagggcttttaatgtatctcttcccctgctttggagcaaggcagtt

SEQ ID NO: 12367 - DNA, 201 bp, Homo sapiens
ataatggaatagcagcttcaggtttttaatccatcattagaaatagttgttttgcaacttgagagagaaaaagtagaaatctatggcataatgaagggggraaaatgggtcatgttactgtagagatagatgcaaattctatattatgtcataagtgaaagctttttcggtccatatgggtataaattaataagagagaat

SEQ ID NO: 12368 - DNA, 201 bp, Homo sapiens
gtaggttaggcgtattaaatgcattctcaacttatgatattttcaacttacgatgagtttattgggccataaccccactctaagtcaaggagcatctgtawaggctttggggtcaggcatcagctggaatcctgactctacctctttagttcagctatgaccttgaataagtcacttagactctttaagctttagctttat

SEQ ID NO: 12369 - DNA, 201 bp, Homo sapiens
ggggtttcaccgtgttagccaggatggtctcgatcttctgacctcgtgatccgcccgcctcggccacccaaagtgctgggattataggcgtgagccaccgygcccggcctgccactcaactttaatttgtggccaggaagagttaagtctccccttagcttgcctgtcttttaggttcaataataccagatctttttgctt

SEQ ID NO: 12370 - DNA, 201 bp, Homo sapiens
agctgaataccaaaaatgagagggaagtagctgataccaggctacagattgtgggctacaaaagattgataaacaagtggttcttttgtgcaaatttagayatgaaatcatgcagaaaacacttaacagaccactagacagaggattttatgagacatgttacacatggatggtgaaaggctgaaaattaatacttaactt

SEQ ID NO: 12371 - DNA, 201 bp, Homo sapiens
tgaagtgtagaggaaaaaaataaataaaaagatctaatgacatacaagaagggactgaacctgtcaaccccagaatattttcagtctgaaaagcaacctcrtccttattaactttacattgattcccaaagagcggaaaatttaataaggaagaaaaaattcaatatttcatgactcaccacttcctcgggataataaata

SEQ ID NO: 12372 - DNA, 201 bp, Homo sapiens
ttgtttcatatgcaattgaattgggctcagactgtgtttttaagctgtatggtaaaaatatcactgtcttctagggccttattggggggcagggagagacrtgacactttgtcagaagggattgagtctgctaacttaaactttccttgattcaggaatacaaagtctccagctgtgaacagagactcatcagtgaaatag

SEQ ID NO: 12373 - DNA, 201 bp, Homo sapiens
attgtatacatgaaagctaaattgtctatctacttgtataagataccatgagaaaatacacatttttggaaaccttacctcagtctctgccatctgtttaktggggatacctgctctgccaaactcacagtactacctgaaggatccaaagagatcacatgtcaggctgcccaaggtactatttgtatcaccacctaaata

SEQ ID NO: 12374 - DNA, 201 bp, Homo sapiens
ctgtgcttttgctttggatctcaacctcaaactcctgggctcaagggatcctccaacctcagcctcctgagtagctgggactataggcatgcaccaccatmcctggctaattttttttttttttagagacggggtcttgctatgttgcccaggctggtcttgaactcctgggctcaagcagtcttcctgccttggcatccc

SEQ ID NO: 12375 - DNA, 201 bp, Homo sapiens
tgcaggcacctgccaccacacctggctaatttttgtaattttagtagagacggggtttcgctatgttggccaggctggtcttgaactcttgaccttaggtratctgcccacttcagcctcccaaagtgctggaattacaggcatgagccactgcacccggccatgtgtagttttcaaaagagccatagataggagtcgaca

SEQ ID NO: 12376 - DNA, 201 bp, Homo sapiens
tatatatgtatattttatatgtaaatatttatatatgcatattatatataatatatgtattctacaaatgtattatatatctataaaatagtaccatggawtgctttaaatatattgtaattggttttcagagttggggtgtgtgagttgttctatattttaaggatagtgtcctttttaggaaaacatttaagtgtgatc

SEQ ID NO: 12377 - DNA, 201 bp, Homo sapiens
tatcaaaggacaaaatcaacagagtgaaaggtcagcctatgttacagaagaaaataattgcaaatcacatatccaataagggattaatatccaggagatakatagatagatagatagatagatatatatatatatatatatatatatatatatatatatatatatatatcctataaggggttaatattcaggatatatata

SEQ ID NO: 12378 - DNA, 201 bp, Homo sapiens
gatttcctgcaatggggcattttagaacctgactcagactgtgtcagtccagaggacctaggacctggagcttaggcagacctattgattggcaggccatytcctgaggtcacagaagcagttgacagacgtgtggagaggcaaggagatgtcaggagaatctaaagcaagccataagcagaagcccaagagacactggtt

SEQ ID NO: 12379 - DNA, 201 bp, Homo sapiens
tgcaggaagaagtccagggtaactggaacatcaggtggaagagttagctcagaggcttgggccgcagccggggtatgccggacacagggcctatagtcacygttagtttggctaaataaaattgaaaatcatggagggtttaaactgattcatattttctaactgactctttggttggtagaagcctattgcagcaggaca

SEQ ID NO: 12380 - DNA, 201 bp, Homo sapiens
ccttttaaagtcaaggcaggagactcatttttgtgacatttccactggccaaagcctggagcaggatcgtcggcgtgtgattccttcactctgcgtgggargcagaataggaaaagttaaggtttaggcaggtaactgttaggtgaacagatgatagtaactacaagggctagaacatgtaactctttcagactggagcct

SEQ ID NO: 12381 - DNA, 201 bp, Homo sapiens
gccacaactgctccttcctctttcttccctctaatgagctccaccaacaatgaaaattcagaccatcccaccagtttgcggtgaagtctaagcttgtttaraaactccttgctataaatcactctctgctgaactgaatcgattgtctctgatcctgtgagctatgttccatcacatcctgccgggggccagctgccagag

SEQ ID NO: 12382 - DNA, 201 bp, Homo sapiens
ccatgattacataccaggaggctctgactggacccttggtcactggggaccaggcccttcctggtttggacctaatatcagcaaacggagttgttttctgkttctggggtctactccaagagcctgcgccatactctgccatttgctcaggtttcctgacagctgccacaactgctccttcctctttcttccctctaatga

SEQ ID NO: 12383 - DNA, 201 bp, Homo sapiens
gtgggaattgtctagtcattaatttcacagtctaaattgtagagtttccattagtaacactgacattgttttttttttaatcaaacaaacatcattttgcrtagcaaccagccttcacttctgctttattgttttaaacatcaccatttcctttctttccctcctatcctttgacctccatttggcctgcagatggttctg

SEQ ID NO: 12384 - DNA, 201 bp, Homo sapiens
tcaaatgatgtcagccaaggatggcaagcccatgcccgaaaaactggcagcagctcacccataccaagccacctgagacatttcctgggctggaaacaacrttacggaaattgaacttccgtgccaaatttaccacacctcgccaaagcctgggcacctctcttattcatgggtgcctcaggagtaattacagctttatag

SEQ ID NO: 12385 - DNA, 201 bp, Homo sapiens
atgtgcataggttttatgcaaatactacatcattttatattaggaacttgagcatctctgaattttggtatccaagggaggtcctggaaccactcccccayagatactgaggaatgactatattatttccttatgtaggtttttatattttttaaagtattttaaggtacataagatctcttgattttcacaagaattaag

SEQ ID NO: 12386 - DNA, 201 bp, Homo sapiens
agtgacatgcagtgggcaaacaagggaacaatgacaccaaagttatgtcaagcttgtacttgtaccacccacaaatgaagatggaataataatgttgccayctataagctaatgaacaaaatgcaacaatgggcccaaacatgcatatacccattgccaataaattaatctctaatgagacttttgctaaaattgaggtaa

SEQ ID NO: 12387 - DNA, 201 bp, Homo sapiens
agcctcctgagtagctgggactacaggcgcccgccaccgcacctggctaatttttttgtatttttagtagagacggggtttcaccatgttagccaggatgrtctcgatctcctgacctcgtgatctgcccgccttggcctcccaaagtgctgggattacaggcgttgagccaccacgcccggccacagaaatgttttaagt

SEQ ID NO: 12388 - DNA, 201 bp, Homo sapiens
gaaacttctgaaaaggtaatacaagataagccttcttgtataaaatgtaatacaagataaaactcagagaagctgtaaaggccttcaaactcaaatttcaytgatagtctgtatcaatgatagtatataactaatatgaaaaagaaagcaatgtattgtattattgaagtcaattttcaaaaatatatggatattttctaa

SEQ ID NO: 12389 - DNA, 201 bp, Homo sapiens
atcctggaagcagatcctggaagctgtccatgattacataccaggaggctctgactggacccttggtcactggggaccaggcccttcctggtttggacctratatcagcaaacggagttgttttctggttctggggtctactccaagagcctgcgccatactctgccatttgctcaggtttcctgacagctgccacaactg

SEQ ID NO: 12390 - DNA, 201 bp, Homo sapiens
attaaatgaaatcaagtcagaattcattttttctctgcttatgctcaaatgtcccatattctcatatactccttccaaacagcataaagacctgttccctsacatcactcaccttccctgttctctccactcttgactttgtgagttagtaaaaaatttgtgaagaattttagttcaaaattacctccggtattataaaaa

SEQ ID NO: 12391 - DNA, 201 bp, Homo sapiens
gtcaataagagcttttatacagatgtattaatgacagcttttattatataggcccacagctccttatggacattatctcattgtcgctctctttctccctsataggaaacgggtaggtggggacactatcatcgttactcaagaggtgacgggatttcccagggttctggaagaaatgcctgagcaaggagagcatagcgt

SEQ ID NO: 12392 - DNA, 201 bp, Homo sapiens
aatttacccttgtaaccaacctgcacatgtaatgtaccttgtgaacctgaaataaaaattgaaaaggaaaaaaaaaaaaaaacagaatacccaactttcarttatgaccaaagcaacccataccatgcttgtgttgttataaatgtactactaatagtaattagattttttggtagtttaagtatactatttatactccat

SEQ ID NO: 12393 - DNA, 201 bp, Homo sapiens; identical to SEQ ID NO: 4363

SEQ ID NO: 12394 - DNA, 201 bp, Homo sapiens
atttttttaccaatcctcttaagtgaatactttttaaatgatattctaaactcttatttctctcagtgcagtcttctctctgaactcttttcatgagccatatcttattaaaatccattatatattgtaaaagaaatagccattggaaaatattcataggccaccagttcctttgaacatagcagattgaaccaaagttta

SEQ ID NO: 12395 - DNA, 201 bp, Homo sapiens
atcacttgaacccaggaaatggaggttgcagttagccaagattgcgccattgcactccagcctgggcaacaagagcaaaactccgtctcaaaaaacagtcytaacaactacacaaaagtctcaatatccgcttatccccagtgcatatctaagtattttttccaacaaatagcattattcctcagaaaaattctgagacca

SEQ ID NO: 12396 - DNA, 201 bp, Homo sapiens
gtggaagaatttactgaagcctccaggattggcacacttaaaagttcttttctcaggttgactagaagtcttaaccactcaggctgggctcagtggctcaygcctgtaatcccagtactttgggaggccaaggcggggggatcacctgaggtcaggagtttgagaccagcctggccaacatggcgaaaccccgtctctact

SEQ ID NO: 12397 - DNA, 201 bp, Homo sapiens
ccttatacaaaaattaattcaagatggattaaagacttaaacattagacctaaaaccataaaaaccctagaagaaaacctaggcattaccattcatgacayaggcatggacaatttttaattatttaaaagatagagaaccatatacctgtttgtaccttaaaaaatttgtatgttgactggacgcggtggctcacgcctg

SEQ ID NO: 12398 - DNA, 201 bp, Homo sapiens
gcatgagaacagactgatacagtgttctaaacaataagactgtggaaaatgttttacatgtgaagaaaaaaacacagaggagttagataatagattgataraatagacagatgatagatgattgatagatatcataggtagataaatatgttggtaggtaatatgatagatcaatggatagatagatagtcccagtgctta

SEQ ID NO: 12399 - DNA, 201 bp, Homo sapiens
aacttcttattgctgtttcatgtctatcttccctcaactcttttataatatttgatatgcttattttaatcttcctggcccatcaactatgttgcatctcrgatagctttccaccaggagtctttctctttattctccttggcagtctcagtgtttttccctcagagctcctgttctcctgagggcattcatctccttgat

SEQ ID NO: 12400 - DNA, 201 bp, Homo sapiens
accaggatcactgtgagccctgggaggatggatttgtaaaaaattcctggagccaaacaccctgagctatgaaactggcccattattgtgagaattttcaratgttgaagaaatgtggggttgggaaagagaggagcaccttaaagaagatttattcacctagtcaccctcagatggttgtctgcagattttgagagagaa

SEQ ID NO: 12401 - DNA, 201 bp, Homo sapiens
gtaattatagcaactgatttaaaagagaggaaaagaagtaaataatagaaatgagagaaaggatgtatttattcctcaaatcttgaaaggcaaaatatgtrtaaaaggataaactccatgactcagttcagtaaagtcagttagagatttaaaacatatctatataatatatattatgtttattttatttttatatgttta

SEQ ID NO: 12402 - DNA, 201 bp, Homo sapiens
gcccagactggtcttaaactcctggcctcaagtgaccctcctgcctcagcctcaccagtagctgggattacagatgtgagctgctgtatgattatgtctcrcataattggatatattttaaatggtaaacttgatctgtataatatttggacctccctcaaaaaacaaatcattcatgaagctttggaaaggctattataa

SEQ ID NO: 12403 - DNA, 201 bp, Homo sapiens
tggtggagagaattgcacaatcacacagattaatgacactataaatacatcacatctaacttcaaccaggccctcacctctacccataaatccttcttacraaacttccttccccctttttctacaacagctatttcaaatcatcttctgtcctcataaacctccaatgcacagaagtctcagtttgggaactctcctttc

SEQ ID NO: 12404 - DNA, 201 bp, Homo sapiens
ttgtggaattaaaaaatattttctcctgaatttccttaaaaaaaaatcgaacgttccctcagggcaaggagacatagctaggggtaccatgcgataagagrgtgagtaaaaaggaaaagtctagtatcctagacagtctctttgcagagctgcgcttctgctcagaagacatttgtcaatgcctagagacatttcggttgt

SEQ ID NO: 12405 - DNA, 201 bp, Homo sapiens
tcacacagattaatgacactataaatacatcacatctaacttcaaccaggccctcacctctacccataaatccttcttacaaaacttccttcccccttttwctacaacagctatttcaaatcatcttctgtcctcataaacctccaatgcacagaagtctcagtttgggaactctcctttctttctattacaaattttgca

SEQ ID NO: 12406 - DNA, 201 bp, Homo sapiens
agttagcttggggaatcttcttagtactcttaagaggccagagctgagatttccacacaatgacatattaaagtattggatccagggtcctttgcattggkagaatgtcaggaaaatagcattagctagataaacttctttccctcaaaccaaatacagtcgtattgtttactattataggtctattaaggttgctgttta

SEQ ID NO: 12407 - DNA, 201 bp, Homo sapiens
ttaccgccccccatgccccaacacacatacaccctttgttacttctcctaacaatgaaagaactgcccccttcctactggaagctgaacacctcatactcygtttgtcctataataactcatttcttcttacatcttttgagagctgacctataaatcatccccgcttttttacatttattttcagcttctcccttcttac

SEQ ID NO: 12408 - DNA, 201 bp, Homo sapiens
tctgtctctccttctttctatgatcttttcaaaacaaaccaccacacctgtaatattttctttctttccttctttcctttccttccatgtagcaatctggyttatatttctgttgcatacaccgaaagtgctgttgcaatggtgctaaatattcccaagttgctaaaatcaaaaatcaaaaggacatgtactgcttcctga

SEQ ID NO: 12409 - DNA, 201 bp, Homo sapiens
gcccctggccccatcagtttaattctgagcgctcaggacagtatgaggagcagcctgtcgttttcggagacaccagctgagggagcctgtggacacaataycagttgaaaagctccccagcccagggtggaaccaagcagcccacgcctgctcttaggagccaagtttcccaaacaatgtcagagttagcttggggaatct

SEQ ID NO: 12410 - DNA, 201 bp, Homo sapiens
caagttctttcctttctatcatctatcttatggaccctggacccactgcttccctgaatcaccagctctcacttcagagtccaagaaggacacatctaatygctgtctaggccaagtgccaagacttgtgcccagtctccaagcggctgggaaagaaaatacttggagatttcacatcccattacaagtgagttcagtttc

SEQ ID NO: 12411 - DNA, 201 bp, Homo sapiens
tgaacccgggaggcagaggttgcagtgagctgagattgtgccactgcactccagcctgggcaataagagtgaaactctgtccaaaaaaaaaaaaaaaaaaaagccacctcttgtactactgaaggaggaatttatgcagacttcttagctaccagtgatttcactctgttttaatacaaaaatttacatgtatttctttta

SEQ ID NO: 12412 - DNA, 201 bp, Homo sapiens
atgcccaacactttcctaggtaaacaagggctataaaagaagggcttttaatgtatctcttcccctgctttggagcaaggcagttacagaacaacaacaamaacaacaaaaataacattatctgattgattggttgattggttggttgattttagagataaggtcttgctctgtcacccaggctggagtgcagtggtgtga

SEQ ID NO: 12413 - DNA, 201 bp, Homo sapiens
ggaagaacttctactttgagtaaataaaatgatgggcttccagaagccaggtatccaggtgataatttttctatttgaatatgagaatgatagttacacarataactccaaaaattacctgcatcagtgaaaatttggaggacagacatatataaattttgcaatgttgtatgtcataccagtgaaggaatctaatgatac

SEQ ID NO: 12414 - DNA, 201 bp, Homo sapiens
aagaccctgtctcaaaaaatgaaatgattctagcttaagggggggaaaaagtgaaatacgtcggatatttatatattgtttactatgattctttaaatctraattaaatatgttctttactcagaaccctacatgacattactctagaaagtcatcaggaggttttatttatccctttaaatgttgaaataataaatatga

SEQ ID NO: 12415 - DNA, 201 bp, Homo sapiens
gtgtgcagtgctattattctcattttactagaggaggaaactgaggcacagagaggttaaataacttccccaaagccttacacctagcaatggaatattaygcagcaattaaaactagtaacaattaagcctatgaaggcaagaatgtttatgataaatgataaaataatagttaccttgtgaaactgcaagctatttgta

SEQ ID NO: 12416 - DNA, 201 bp, Homo sapiens
atgtagctgtaattttgtatccattaaccaacttctggctatctccccgaccccaccaccccgtcaaaatttcaattgacaaatttaagagaacaaaatayaggtttttttaattacataggcccttatcatatgacccacatattttaggtatttaactgcttctagtttttaaatctcaaatatgttcatttcatgaga

SEQ ID NO: 12417 - DNA, 201 bp, Homo sapiens
caattaatcaggtgtgcagtgctattattctcattttactagaggaggaaactgaggcacagagaggttaaataacttccccaaagccttacacctagcartggaatattacgcagcaattaaaactagtaacaattaagcctatgaaggcaagaatgtttatgataaatgataaaataatagttaccttgtgaaactgca

SEQ ID NO: 12418 - DNA, 201 bp, Homo sapiens
gtgaagagagtaagtgggaaagaaaggaagaaggaagggcagatatctggttgggagaggaacaaatgagcaatgccaatggtattaaaaaaaaaaaaaaaggaacacagggattccattctggctgatagggttggggagggatggagaaggtgcgctttggaatggtttgtatctacccagaaacagcgaactgcaatg

SEQ ID NO: 12419 - DNA, 201 bp, Homo sapiens
agtgaagagagtaagtgggaaagaaaggaagaaggaagggcagatatctggttgggagaggaacaaatgagcaatgccaatggtattaaaaaaaaaaaaaaaggaacacagggattccattctggctgatagggttggggagggatggagaaggtgcgctttggaatggtttgtatctacccagaaacagcgaactgcaat

SEQ ID NO: 12420 - DNA, 201 bp, Homo sapiens
atgcaagttctctgcatggctccaggccctctctgacctaactcctgctttctagccttatctctggttattttcccatctccagatagatttctgtttarctgaaatgcttagtagaattacctgagtctgccatgtgctctctgggatccaagtcttaaaatacatatttgccagtatcctcttcacctccccgctctt

SEQ ID NO: 12421 - DNA, 201 bp, Homo sapiens
tgatagatttgggacctggacttggaatgttagctacccacatacctttcttcctttctctaagacttaggttcttgatatttgtccacaacatcatcatyattattattattatttttgagacagggtcacactttgtcacccatgctggagtgcaatggtgtcatcacagctcactgcatccttgacctcccaggctca

SEQ ID NO: 12422 - DNA, 201 bp, Homo sapiens
tctctggttattttcccatctccagatagatttctgtttaactgaaatgcttagtagaattacctgagtctgccatgtgctctctgggatccaagtcttaraatacatatttgccagtatcctcttcacctccccgctcttcctcatccctcacacatcattctttcagctttctctctttcacaaaggtttcctgatcct

SEQ ID NO: 12423 - DNA, 201 bp, Homo sapiens
cttccaaaattgtataatttttacttgtcctgggcctgactttttacatagggtctgatttcacatggctctggcacaagttttcttgactgaggaagggrggggagagagaaatcagaagtagagatggacagtacatccattcactcatttcagaaatattatttgagtgtctgttaacagcactgtgattaacaaagg

SEQ ID NO: 12424 - DNA, 201 bp, Homo sapiens
gaattacctgagtctgccatgtgctctctgggatccaagtcttaaaatacatatttgccagtatcctcttcacctccccgctcttcctcatccctcacacrtcattctttcagctttctctctttcacaaaggtttcctgatcctgaccttgctgttgcttctaggtgctatcacagcactttgtttttctataccactgc

SEQ ID NO: 12425 - DNA, 201 bp, Homo sapiens
actataaattgtacgtattgaaacatcactaggtaccccataattatgtataattattatttgtcaatttaaaaaataaaatacaatttaaaaaaagacawactcaattatataagcttattatttagttgtaatttgtattaagttccatgagggcaaaaaccttctctttttcaaggtcatatccccgtccctagcgca

SEQ ID NO: 12426 - DNA, 201 bp, Homo sapiens
cagagttgccaattaaaattatttctaaagatgggttcactgcttcctattcccaagcctttctgagactccatggggtgaatcacttgcttcttttctgyatctcctcctgcaggcatttaagctttgtaatttagttacatgcatacttatatttatctctttccaacaattttgttcatttctgatatcttctattgt

SEQ ID NO: 12427 - DNA, 201 bp, Homo sapiens
gcgcactaccaggcatgtggtagatagtccataaatacactttgagtgggtaattctggtccatgcagtacatctatcccagcttaggcttcacaatttcrtcatgtcaagaatcaaaggttttgttgcaattatttccttggattttcagcttaatctaccacaggtttggttgacacaaaatgtttttcaatctccttt

SEQ ID NO: 12428 - DNA, 201 bp, Homo sapiens
tctctgattaactaccctctgttaaacagcaggtctatgactcactgcatccagtgaagcagtaggctcttgagctggatttctacaaccccctcgactcytgcataatgtattttgaaattagagattttcttagatgggaagatacttctacgcaagcaactcaattcagtcctctgaagacacaccatttctggggaa

SEQ ID NO: 12429 - DNA, 201 bp, Homo sapiens
ccagtgaagcagtaggctcttgagctggatttctacaaccccctcgactcttgcataatgtattttgaaattagagattttcttagatgggaagatacttytacgcaagcaactcaattcagtcctctgaagacacaccatttctggggaatgtcccaccaagtttactcctgactgacacaaggtagaaagttgaggttc

SEQ ID NO: 12430 - DNA, 201 bp, Homo sapiens
ttgaggttcaccacatccaggaagcttccattattcactcctagactcagtcttgtggcagacatcaccgctgatgttttctagatcgtccctctcagtaytctatgaacaatatatagcaaaagaatggcacacttagagtaacaaggagtcattgcttcacaatataaagttcaaaatgtcagtggaatttaaagctgt

SEQ ID NO: 12431 - DNA, 201 bp, Homo sapiens
gggttggataatcagagtcagatttactaaaaatatcaatattctattgatctcattacattaatcaattagagtttgagtaaggtgggcggggggctgastgtgagccctatcctactaatagtgcctactgcacacatcatctttttgaatgatttaatactgcctagtgagatatttgatagcactcacagggcatgt

SEQ ID NO: 12432 - DNA, 201 bp, Homo sapiens; identical to SEQ ID NO: 860

SEQ ID NO: 12433 - DNA, 201 bp, Homo sapiens
cttgaacctgggaggcagaggttgcagtgagccgagatggtgccactgcactccagcctaggcaacagagtgagactctgtctcaaaaaaaaaaaaaaaaraaaaagaaaaagtagaataatcagtttttacttgagccaaagactaattgtaattataccctttgaaaggataaattacccttgtggcagggacacaaac

SEQ ID NO: 12434 - DNA, 201 bp, Homo sapiens
aggcctgttacaaattgtttattggttaaggtttgcctctgagtatggatttttgtgaagagttctggttttggtaactactaactttgaatactattttwtttttttttaattgtgcaaaccatcaaaaaaaaaaaggagatcatgtctttgtcaccactctttttatttcctaatgagttgctactcttcatttatcaa

SEQ ID NO: 12435 - DNA, 201 bp, Homo sapiens
acttccctgtaatagttactcaattttagagccagaatttagcctaatctactcatttaacctctaagaaaactgagcccagggggtgctaagttcctggmgagtggtcctcaggtggtgactgaggactgagttagcctcctccggcaaccctacccccgtcccaccccaccccaccccaccccacccctgggcaaagtg

SEQ ID NO: 12436 - DNA, 201 bp, Homo sapiens
ttattgcatttccagggaaaattaattgcgacttagaacaatgcagaaattatttacacacccaggtgtcaaaaagcagaggagaagcaaagaagtaaatrtatatttatagaatttcctgtgatggcttataataactattgagtaatcatagaatgttaaatgtaatctcatccaaccctctatagtggagatttgaaa

SEQ ID NO: 12437 - DNA, 201 bp, Homo sapiens
tgttacattaatcctgtcttattcaaaaggtattcaccacaaaaatacttactaatcttggtttcctggtatgaactccttgtgcttctgagattagagawatgcttttctttacgggtggccacaatcaagagataagatcatgcctaaaaggacaagttaggaacagaagtgtgattaagtatattctgtattagtttt

SEQ ID NO: 12438 - DNA, 201 bp, Homo sapiens
taattccagcactttgggagattgaggtgggtagatcacctaaggccaggagttcgagacaagcctggccaacatggtgaaaccccctctctactaaaaayacaaaaaattagccaggcatggaggcgagtgcctgtaattccagctactcaagaggctgaggcacaagaatcacttgaacctgggaggcagaggttgcag

SEQ ID NO: 12439 - DNA, 201 bp, Homo sapiens
ttgcctcggctacatggatgaccagtgaatgcttttgggagtgtaggactacactgaataatcgaataaatctattgaatacggaattaaaaaaaaaaaaactaagtaaaaaagcattagaaccaccatacagcttatatctatatgcttattatgtatgggctggcttaggagggaacttgagaaatggtaacagtattt

SEQ ID NO: 12440 - DNA, 201 bp, Homo sapiens
agacattacagaccaattgctttgacagagaatattctaattgtgttagtgcaaagagaatgcaatagatatacagttgtggacatctagggagatgagamagaaaatgtttcagttttggactttgaaccactacaaagaccaagaattctccatatcaatatatgaatttgattatgttaatggaccagcatgggccca

SEQ ID NO: 12441 - DNA, 201 bp, Homo sapiens
tgtgcctcatgatttgaagtatagatccagggaattattctgagtaagtaaacaatccacttccttttttctatctggaatctaataaaatgttttaaagsctttgcccttaaaatgaaaaggtaagtatacaaagaaaattgaaagatttaaccgaatgagaaattgcttaatataattcctacagtcatgacattccaa

SEQ ID NO: 12442 - DNA, 201 bp, Homo sapiens
ttgtgggaaggaggccatgaagaaggatgaaaacactgtaaaaataatttaaactaaactttacaatatatttgggataatgctgagaaggaatgttcttttttttttttttttttttttgagacggagtctcactctgttgccaggctggagtgcagtggcgcgatcttggctcactgcaagctccgcctcccgggttca

SEQ ID NO: 12443 - DNA, 201 bp, Homo sapiens; identical to SEQ ID NO: 854

SEQ ID NO: 12444 - DNA, 201 bp, Homo sapiens
tttgtgggaaggaggccatgaagaaggatgaaaacactgtaaaaataatttaaactaaactttacaatatatttgggataatgctgagaaggaatgttcttttttttttttttttttttttgagacggagtctcactctgttgccaggctggagtgcagtggcgcgatcttggctcactgcaagctccgcctcccgggttc

SEQ ID NO: 12445 - DNA, 201 bp, Homo sapiens; identical to SEQ ID NO: 856

SEQ ID NO: 12446 - DNA, 201 bp, Homo sapiens
atttgtgggaaggaggccatgaagaaggatgaaaacactgtaaaaataatttaaactaaactttacaatatatttgggataatgctgagaaggaatgttcttttttttttttttttttttttgagacggagtctcactctgttgccaggctggagtgcagtggcgcgatcttggctcactgcaagctccgcctcccgggtt

SEQ ID NO: 12447 - DNA, 201 bp, Homo sapiens
atttcaatctaccaattcctgatttttttgcactaagaattgaaattctgaatcccttaatttatgtatcaaatatatctaccagcagtgcagggacaatragggtggaaatgcattaactaatagattatatggactgccttaagcaactgtataatttctgttaggatgaaaccgaaccatgttgggaattctgattta

SEQ ID NO: 12448 - DNA, 201 bp, Homo sapiens
aagtatttattaagaacctgcccatcagccaggtaatcaggaatcctaagattaaattattagagtatttttcattgttcaagttttctcttttcagtcayattatgtgtgtgcctcctctgagcacaagagatcaagggaaactacttacaatcttgatttataataagtgcggtttatctggaagtagtattgaagttt

SEQ ID NO: 12449 - DNA, 201 bp, Homo sapiens
ctcctgcctcagcctcctgagtagctgagattacaggcatgtgccaccatacccggctaattttatagtagagtagtagagacggggtttctccatgttgstgaggctggtctcgaacccccgacctcaggtgattcacccaccttggcctcccaaagtgctgggattacaggtgtaagccactgtgcccgggctacatta

SEQ ID NO: 12450 - DNA, 201 bp, Homo sapiens
accacttctcccagctaaaggcagaccatctacattacatttttttttttttaagacggagtttcactcttgttgcccaggctggagtgcaatggcaccaygtcggctcaccgcaatctctgcctcctgggttcaagcgattctcctgcctcagcctcctgagtagctgagattacaggcatgtgccaccatacccggcta

SEQ ID NO: 12451 - DNA, 201 bp, Homo sapiens
aactatgctaaatgaccacttctcccagctaaaggcagaccatctacattacatttttttttttttaagacggagtttcactcttgttgcccaggctggartgcaatggcaccatgtcggctcaccgcaatctctgcctcctgggttcaagcgattctcctgcctcagcctcctgagtagctgagattacaggcatgtgcc

SEQ ID NO: 12452 - DNA, 201 bp, Homo sapiens
tcaaatgtaactactgtttgataaaaaggaactatgctaaatgaccacttctcccagctaaaggcagaccatctacattacatttttttttttttaagacrgagtttcactcttgttgcccaggctggagtgcaatggcaccatgtcggctcaccgcaatctctgcctcctgggttcaagcgattctcctgcctcagcctc

SEQ ID NO: 12453 - DNA, 201 bp, Homo sapiens
tattctcaactttactctgaagagatggcttggaagaagtgacggtaacacagaattgccagtttgcttggcaaggtcaaactattccatatgttaccttrcaagaaaaatatgttaatttaaaaaatatcagagaccaaatgagaagttgaacacacagctgatttagctcagatttttgtttgttgttataccgattgc

SEQ ID NO: 12454 - DNA, 201 bp, Homo sapiens
aatgttctattccccacaggtctctgcagtgaatacagttaattgggagctaatcatgaactgctttatatttttccctaattgtctttttttttttttttgagacagggccttgctttatcacccaggctggggtgcagttgtgtgattatagctcactgccacctcacatttctgtgctcaacagaattctcccccctc

SEQ ID NO: 12455 - DNA, 201 bp, Homo sapiens
cacatagacatacgcgcagcgcacagacgtacgtgcacacgcacacacacatgcacgcacacacacacgcacacacacacacacacacacacacacacacmcccctctggctgcctcaacccctctttcactagctagaggggttatcagtggccaggctagcagaactgatttctggctctgtggacataacctacacgt

SEQ ID NO: 12456 - DNA, 201 bp, Homo sapiens
tgaagagcaatggtagaaagctatctccatggtttagcaatcacagatgcagggactgggtaggtgaggatggaggcggcgaactgcctaacagaaggaakccctgtacaagagagacacacatagatcacagtggttcagaaagcctaagtgtgaacgcataaggaaaggcataccgggcaaacggaactgaaaaagcaa

SEQ ID NO: 12457 - DNA, 201 bp, Homo sapiens
ttcatttaaatgaaatcacagactagaaatagcaatgattgctctctagggctaaaattagaaactacaagagactttttagacacatccctcttgtctcrtggaaggttctgccgagttttctttaaaactcccacttaagcaattattgtaagatgatgtttactctgtaaaatagcatttttatttggacaatttttt

SEQ ID NO: 12458 - DNA, 201 bp, Homo sapiens
tgaactttgtttctctgaggtgcctaaagggacatccaatacatttaccatcccttcaaagtctgtatacttagctctttgaacagtttcttaaaaaaatrataataataaataaacaaaagctccaatggcacttgcaagagacaagactgggtcctgtgatgtgatggcagatggcagttgcatgagctttgtttatgc

SEQ ID NO: 12459 - DNA, 201 bp, Homo sapiens
atttgtctagagtctcctggtaagtgttcagtaaatgtttgctactactgcctctgtttactcatggagtcattcattcattcattcattcattcattcatggatggtatgctgtatctaagataatacattgttgaacagaatagatgtgaactctgctcttgagaaagactggtagtgggagaaaaagacaataaacaa

SEQ ID NO: 12460 - DNA, 201 bp, Homo sapiens
aatttgtctagagtctcctggtaagtgttcagtaaatgtttgctactactgcctctgtttactcatggagtcattcattcattcattcattcattcattcatggatggtatgctgtatctaagataatacattgttgaacagaatagatgtgaactctgctcttgagaaagactggtagtgggagaaaaagacaataaaca

SEQ ID NO: 12461 - DNA, 201 bp, Homo sapiens
aaatttgtctagagtctcctggtaagtgttcagtaaatgtttgctactactgcctctgtttactcatggagtcattcattcattcattcattcattcattcatggatggtatgctgtatctaagataatacattgttgaacagaatagatgtgaactctgctcttgagaaagactggtagtgggagaaaaagacaataaac

SEQ ID NO: 12462 - DNA, 201 bp, Homo sapiens
gatttcattgccctttactttttttattatggttaaagaaacatataacatgaaatctaccttcttaaatttttaagtatacactacagtattgttaactstatgcttaatgttgtgcagcagatgtctagaacgttttcatcttgcatgagtgaaactatgcccactgaacagcaactgccattcctccttgcccccaat

SEQ ID NO: 12463 - DNA, 201 bp, Homo sapiens
taaatttgtctagagtctcctggtaagtgttcagtaaatgtttgctactactgcctctgtttactcatggagtcattcattcattcattcattcattcattcatggatggtatgctgtatctaagataatacattgttgaacagaatagatgtgaactctgctcttgagaaagactggtagtgggagaaaaagacaataaa

SEQ ID NO: 12464 - DNA, 201 bp, Homo sapiens
gcataggaggggcagacttagagccatagtcttgagtggagcccaaatcagaaaggtcctctgtgtctgaggaagtcgcattgcacatggtaaatataagrtaagtcgtggtgctttggttagagacatggtaacgtcatggtcatgagccagagctcctcagtttaaatcccgtctccacttctttccagctgcataatc

SEQ ID NO: 12465 - DNA, 201 bp, Homo sapiens
aactaatgggtgagctttgggtgcttgaggactatatgcaggagaaaagaggagggatggataaaacttttccaactttaaaataaaaattattttctgamtgtgctttaaatgcatctgctacatgtactcaagaatgttgagtctgacccctcaaatttattcattaagttttgctacatcagactacacaaaggtcgg

SEQ ID NO: 12466 - DNA, 201 bp, Homo sapiens
gagttagcctcctccggcaaccctacccccgtcccaccccaccccaccccaccccacccctgggcaaagtgaaagtgaagcaaactgagaggaactcctccactgtcccttctgcttactcagcagatgggagccagccactttgttttgtcctggggcctgtccttgatggcttctaagactaaaaatcaaagctgtaaa

SEQ ID NO: 12467 - DNA, 201 bp, Homo sapiens
aaaacgaaaggccttccttctattcagtcttcactgctttctcctatgcaaaaaacctttctaagagtgaagagagtaagtgggaaagaaaggaagaaggmagggcagatatctggttgggagaggaacaaatgagcaatgccaatggtattaaaaaaaaaaaaaaaggaacacagggattccattctggctgatagggtt

SEQ ID NO: 12468 - DNA, 201 bp, Homo sapiens
acgtctagccaaaactggcctcctgtaactgccagctattggtgttagttctaattttgagaaatgtagaggatgggtcttatctcattggtgtggcagcwcatcaagtatttaaagatggctgcaatgaccctgtaagttatctcttctttagtataaacatctcaagatactgtaaatcttccttttatgacttggctt

SEQ ID NO: 12469 - DNA, 201 bp, Homo sapiens
tgagttagcctcctccggcaaccctacccccgtcccaccccaccccaccccaccccacccctgggcaaagtgaaagtgaagcaaactgagaggaactcctccactgtcccttctgcttactcagcagatgggagccagccactttgttttgtcctggggcctgtccttgatggcttctaagactaaaaatcaaagctgtaa

SEQ ID NO: 12470 - DNA, 201 bp, Homo sapiens
gatttcagaatggttgagcagctcatagcttttctaacactgaacttttctctctccaagtcccagtcgctcgtcaaaaactgtgccatcagcgcaagacyctgtgatttctgtggtattctaattttatctgagatttattagaatatatgaggtggaaaaaaaagttgtgcaacaggagattggactctggcatcccac

SEQ ID NO: 12471 - DNA, 201 bp, Homo sapiens
cgtctagccaaaactggcctcctgtaactgccagctattggtgttagttctaattttgagaaatgtagaggatgggtcttatctcattggtgtggcagctmatcaagtatttaaagatggctgcaatgaccctgtaagttatctcttctttagtataaacatctcaagatactgtaaatcttccttttatgacttggcttt

SEQ ID NO: 12472 - DNA, 201 bp, Homo sapiens
ctgagttagcctcctccggcaaccctacccccgtcccaccccaccccaccccaccccacccctgggcaaagtgaaagtgaagcaaactgagaggaactcctccactgtcccttctgcttactcagcagatgggagccagccactttgttttgtcctggggcctgtccttgatggcttctaagactaaaaatcaaagctgta

SEQ ID NO: 12473 - DNA, 201 bp, Homo sapiens
ctgtcttagataatagttggccctctggatccctgggttccacattcatggatttaaccaaccacagatcaaaaatatttggaaaaacaaaacaaaaacartaatacaacaatagaaataatacaagaaaaaaagcaatatagcatgacagctatttatatagcctttacattaggtattataagtaatctagagatgatt

SEQ ID NO: 12474 - DNA, 201 bp, Homo sapiens
actctgggtgcccacaccatagagggcttgtctacacttggtctcagccatcaccccccaaacacacccagctctttaccacctgattccctcaaggcgastctccttccctctgccagcaccccttggttgtagctttggggaccctggatgtttgaaagtttcatttgtccacaatccaggtataagtcccccttccct

SEQ ID NO: 12475 - DNA, 201 bp, Homo sapiens
gtaagctcctagaatcttccctcatctccctcatttgaccttttggaaaacctcctgttcatccttcaagacgtagttcaaatgttacctcttccgtgaaktttacccgacttcctctcccatccgcattccactggaatccccggttcttttatctatatttctgttgatctttgatactactcttttataacacatgag

SEQ ID NO: 12476 - DNA, 201 bp, Homo sapiens
tgcccatctcagcctcccaaagtgctgggattacaggcgtgagccaccactcccggcctccacttgttcgttcaatatacgtttgccctatagagttccaygcatctgagaatattccaacaaatcttagaccatttccaagcaacggatccctattgtactatttcttctatttctctctgtaagcattaactttgaaac

SEQ ID NO: 12477 - DNA, 201 bp, Homo sapiens
gtagcaatctttaaaaattaaaaggaacagattagtaggctgattaccatggttacctttgggactaaatagatatttgttgaacgactgccgtgtgactrtaatcttgtgatgggttctgagagatgtgagcaggaacttgatagagcctaaaatctagtgggaaagccaagacagatagaaaaaaaaaaaaaaaaaaaa

SEQ ID NO: 12478 - DNA, 201 bp, Homo sapiens
gctggaagtggaattgtttctaactctgggtgcccacaccatagagggcttgtctacacttggtctcagccatcaccccccaaacacacccagctctttaycacctgattccctcaaggcgactctccttccctctgccagcaccccttggttgtagctttggggaccctggatgtttgaaagtttcatttgtccacaatc

SEQ ID NO: 12479 - DNA, 201 bp, Homo sapiens
accaggggaacagaagaaagtttggcttgcaaaatcacaggctccacctggtcagcgcttatcttctttgtttagctcaagttaggtaagtttacctagtytaaaaggagtattttaaatttatgtttgacatttaatgatttcagatagttcttggacatcaggataaacaaattcagtgtagcacatacgtagtataag

SEQ ID NO: 12480 - DNA, 201 bp, Homo sapiens
acttatagtacttacatccttgtggatttttttcattgcagataatttttaacatttttgaggtataattgctatatataagaaagagcacatatttaacrtatgcaatgtaataagttttgacatatgtacatgcccttggaagcattatcacaattaagatagcaaatactggctgagtgcggtggctcatgcgtgtaa

SEQ ID NO: 12481 - DNA, 201 bp, Homo sapiens
ctggcgggtgtctgacattcagtttggctgtttcacttgtcctgtgatagctaactgatcttgctgtctcatcatgcattatttgcacgattggcagttaytaaggtacaccaggctagaagggagtccatctggctctccgctgggccctgtactcttggcccaggatctgaaccatagcctatgcttaataaatatttg

SEQ ID NO: 12482 - DNA, 201 bp, Homo sapiens
caatctggcttgttatatttagtctctgcactaagctctagctacggtagctacagtttacttaatgaccaaataacaaccttttcttccattttaaattktgtatgactttggctgagggtcattgaaaaatcaaggatgggaatacacacacacagaggcacacacatatacacacacacacacacgccccacagtctt

SEQ ID NO: 12483 - DNA, 201 bp, Homo sapiens
ttactgcaggacattggttacagaattggttttttccaggacatcatttattgtcccatcagataatttaaacacacatgcatacaaacaaacaaaacaaytcacacttcctaatgaatgtgaatttgtttgcttttggtgtatatatggataaattatgtttgagttattttgagagtcctacaccttacattcgatcca

SEQ ID NO: 12484 - DNA, 201 bp, Homo sapiens
cacagtagctttctttcaaagaaaaataaattttacaagaaatgcaataaatgaaaatatagtctgttgtgcctttggtacacaaacctactttcagcccycgagtctccccctctccaccttcatgtctcttctggatccatgttacctaatggctcatctccccacaccttgtaagagttgatcctgatcctggcttcc

SEQ ID NO: 12485 - DNA, 201 bp, Homo sapiens
accagcctggccaacaataatgagaccccatctctacagaatattaaaaaaaattttggtctgagagctaggagcaagagcttagggaaaggaggaataaraggaggtagttggctaccaacagacatctgaattcttaaccaatgaagagaaaaaatgtaaaagtggtcccagccgcttgggagaatgaggcaggaggat

SEQ ID NO: 12486 - DNA, 201 bp, Homo sapiens
ctccatttaaaaatacggaagaagaaagaacgcaatcagaaatagttgatcatctaaaccttgtcacttaaagacattctagttaactaccaaaatgtctrtcaaatgtcttctcagacttcacattagacttttatagttcttctgccaatgtcataggttttagaattccctcagggttttagcacacttactgcagga

SEQ ID NO: 12487 - DNA, 201 bp, Homo sapiens
cttggcatctacccatttcctacatctttgactttccgacactgaaaaaaaaaaatgcataatcttaggaataaatcaaagtctcttttggtgcctcaaasctgaagcatgaaaaatattttggtgccatttgtagtctatcctgaacagcttcctggacaagcctagagacatttaataggttaatccgtagaagctgga

SEQ ID NO: 12488 - DNA, 201 bp, Homo sapiens
tgaacaggatgatgtttgagaagatttactgaggttttgggggtatcttccttccctgcattttggccagtttcaagtcagaagtgggcagagcctagttrattgcaatggaaaagggcaaaccaggagccagcagctggagaaccaccttgagcactggcacatagagcacagttgctcagcatggctggtgtggtggag

SEQ ID NO: 12489 - DNA, 201 bp, Homo sapiens
acaatatttggtttttaatattttacagacatcgttattcatttaaaagtcaataaagatatttccgagagaggaatagactacctggctgaagacagtgracctagcaatgctagtgttagatatcagtaatgacggcaggatacagttacagtactaaaccctttaaacaagtggtctactggctattcaaaactagtt

SEQ ID NO: 12490 - DNA, 201 bp, Homo sapiens
ggaggctgaggcaggagaatcgcgtgaacccgggaggcggaggttgcagtgagccgagatcacgccattgcactccagcccgggtaacactgcaggactcygtctcaaaacaacaacaacaaacatcaaaacaccagaagtgaatggaacaagatcctgatgctgacctgattatcagaacatctgttatagacaacattg

SEQ ID NO: 12491 - DNA, 201 bp, Homo sapiens
gatctacagcctggaaattctggtgaagaagaaaaatcagtgtatgagagagctagaggaagaaagtttacagtcaaataacatgtttgaacgtgcagttktgaaaacagagcatgccccaatgtggctataggactgatgggttaaagggaatagaggtgtggtagccaactgccaagatgaccaccaatgcattgtctt

SEQ ID NO: 12492 - DNA, 201 bp, Homo sapiens
gggccaaataattgaaactttttctgctgcagttgtgggtaatacaaacaataaaatagaaaaataacatctactacatggattgttctgaggatcaaackgttcacttttgaaagcaggtaacttccaagctgttatgtaggaacaacttgcattgtcactgaattctttctacttactagactctgctctttctcatgt

SEQ ID NO: 12493 - DNA, 201 bp, Homo sapiens
tggtagaaatggagttgatatggtggagaaggatctgttgacaccagaccctcaaccacagccatgcacagctggacagaagccccctcggactcccaggkctggagtcggggcagaggcagaaagtctaaaaagaaatacatcaatgtagtcatttcagtaataaatgctgtgaagtaaataaaacaagatagtaaaaga

SEQ ID NO: 12494 - DNA, 201 bp, Homo sapiens
actttaatggcgttggtgtttacctcatttcctcttcactcattaacagcagtattagtgggtctttttagtctatttcatcttctgtgtctatcacaccrgcatagaattaccaagagcactgtttgacagaaaacatgaaatctcaggcaaatgatggagatgtttgtgattgcgtttcattccttttgattttgacct

SEQ ID NO: 12495 - DNA, 201 bp, Homo sapiens
agaccctcaaccacagccatgcacagctggacagaagccccctcggactcccagggctggagtcggggcagaggcagaaagtctaaaaagaaatacatcartgtagtcatttcagtaataaatgctgtgaagtaaataaaacaagatagtaaaagagagatgggagtactcttcttgctcactccaatagttgagtgagtc

SEQ ID NO: 12496 - DNA, 201 bp, Homo sapiens
aacatgagctctggagttattccctgggcttaaaccttggttctcccactcagattttctgcctccatttcctcctttctaaaccagaggctgctgtgagkgttttaaatgaaataatctacatgatgactctgggcacaatgcccaccgcagggtaagcagtccattattagccattatcattatcaatcatcgtgatca

SEQ ID NO: 12497 - DNA, 201 bp, Homo sapiens
gtggcaacccaaggccacaatacccaactaacagataagaacaccaaggctagactagagaggctgttcatctgagagcatactggtttgttttgttttgkttttccctcttcctgatatatccagaaaatacttcctcctcccagccccgtttagcagtaacttacttccttggagaacaatgcctcaacccatattcag

SEQ ID NO: 12498 - DNA, 201 bp, Homo sapiens
acaaaacatttatttcttctacctctttatgcaaagtgcttcatgtacattatgtatcagttggccctcacatgagccttatgagataatcagagcaaatsttctctgaattttccagggtcccacttagtaagctgatgattagatttaacacaagactcctagtgctcttctaaacacactacgtcactgagctctttc

SEQ ID NO: 12499 - DNA, 201 bp, Homo sapiens
agaaaccaggctgccttggtaggacaaactataaaacgttttgcaatatacaaaatggtactgggtgtccttgcaatagacacccagtaccattgctggaytggctctggtggacgttccagggtcatctaattccacaggggtctatgccttttattgtctttacaattttacaactctgtaagttggaaaaatctaaaa

SEQ ID NO: 12500 - DNA, 201 bp, Homo sapiens
tctcaattctgactaaccactgttcaagcacttaatagctacatgtggctaatggctaccatagtgggacagtgcaggtctggaggatgtgaaatcgggtraacacacaacctttacacccgaaacagtgctgcagaattgatgataattactctaaatgctcatctcttatcttttcgcgtctgaaaactgctgctgagt

SEQ ID NO: 12501 - DNA, 201 bp, Homo sapiens
tacctttgccttttcaaaatcatactttaactgcctgtttctcatgaagaaaatacattcaagtattaaaaatacactgaatataattgttcctcatataygagccatatctgaataactggagaccagtcaggatgtttctatcctgcagcacagactggacaaaggaattagagtgatatttgggttagtaaagtcagg

SEQ ID NO: 12502 - DNA, 201 bp, Homo sapiens
cactaacttttttttttttttttttgagacagagtcttgctctgtcacccaggctggagtgcagtggcaccatctcagctcactgcaacctccgcctcccrggttcaatagattcttctgcctcagcctcccaagtagctgggactataggtgcatgccaccacgcccggctaatttttgtatttttttagtagagacggg

SEQ ID NO: 12503 - DNA, 201 bp, Homo sapiens
agttagaaaaacttgtggtttttcttggtaaagcttcattttctatttgtcttcataactataaatggatgtatttgtgtggaagatgtagattttttttwaaaaaaatctatttttggctctattaagagacaaaatgaatccaaatgtattccatacttctctcacattgcaccattttgttatgtaacagagaacgtt

SEQ ID NO: 12504 - DNA, 201 bp, Homo sapiens
cacacgcgtagttctagctactcaggaggatgaggcaggaggatcccttgagcccaggaattcaaggctacagtgagctatgatcatgccattgcagtccrggccgggagacagaatgagaccctcactcaaaagagcagaataacacttagctgaagagagcatgtcccagagaaatgtcgcagcaggttctgggaggct

SEQ ID NO: 12505 - DNA, 201 bp, Homo sapiens
gcttgcagtcccagctactcgggaggctgaggtgggaggatggcttgatcccagaagatggagactgcaataagctgagatcataccacggcactccatcytgggcaacagagcaggacccatttcaaaaaaaaagaaatccctttctccttatgtaacactacttggcctagaaaagccagtatttgtgtccactgtgct

SEQ ID NO: 12506 - DNA, 201 bp, Homo sapiens
aaagattcaaagaacccagagcatcacagtaaacagaccagtttctaacactacctattatagtattccaaccaactccaaagatcagttgacactcccarcatcttaaggggtagggctaagagtcttctttacctaaataacccaagacaggcaaaaggaagggaaactcatgaagtctaggcctcagtgtgtaaatgt

SEQ ID NO: 12507 - DNA, 201 bp, Homo sapiens
tcttcgcttaggaacccagagctttactttgtgttattggcacatctacttagacctatgttatatgtgtatgtgtgtatatatatatatatatatatatwttttttttaagtattagattggagtgcttggcatgaatcatagattagagaacattgacaactaaccagatagtgaactctgcctctatcagccaaatct

SEQ ID NO: 12508 - DNA, 201 bp, Homo sapiens
tggtattattcagagtgttattaacaatcagtcctgaatttttcagaatagtactaaagttgtcttttttttttaatgggttccttccttcaaggttatartaaagcttttttataaccttcaaagaatacaaagtggaatttgtaatttataggatatacattcctagtttacaggtaactatttaaagctgccaaattt

SEQ ID NO: 12509 - DNA, 201 bp, Homo sapiens
gttagctcacagagagtaggcaggaaaactgagtaaacatcaaacaagtggtgtgtgactgcatccacacagacttttgttcaacatttggaagacagttstggcaccagagcatgtgtagatttaattctaacttcatcatggcaatacctattcacaggatgctagcctgtatctttgggtataaacatagcatataca

SEQ ID NO: 12510 - DNA, 201 bp, Homo sapiens
tggccagctgccctgggctggcagttgaggagaaaatgcagcagtggggttgagtagacacctcagccacggagtgacagtcattgtgttctaggtaccayctgaccgctctctgtctgctccttctgtggctctataatatctgagctcctgggtaagctccatgcagcctctacaactctgcttggagctcagttttcc

SEQ ID NO: 12511 - DNA, 201 bp, Homo sapiens
atagttttaaataggaaatcatttatttcctgatatttctacagggccgcatcagttgtactggacggctaatggtacaggctgtcaaccaaagaggtcgragtccccggtctccctcaggccatcctcatgtcagaaggtatttaacatgttccttcccagaagtgttacattattttatttattactataaatgtagta

SEQ ID NO: 12512 - DNA, 201 bp, Homo sapiens
cagttgctctgctatgaattatgggtctgattcccctctttatatgtggcttttggattttcttctgcccttgaggtaatctgctcctcctttcattcacygtgcttttaggtttggtttcagatacagcatcccttctgctacattctttaaagttaaaaaaagaaaaacaatttcacttttattggtgatgggcattca

SEQ ID NO: 12513 - DNA, 201 bp, Homo sapiens
aactcaatgatgcctataggccatattacttggtaatacaaaaaaatagatatatatatttgacccaataacacgacatcaaaaactatatagtttgatartacttggacaaattttgaaatgatagatacatgaatttttttctagaatcaaatacaacaaactctgcatttgcctttgaagagtgagattattaagggg

SEQ ID NO: 12514 - DNA, 201 bp, Homo sapiens
tcattactcaaatggcatactgaattttttatgaaataatgtcttatagagaataggacagtaggcatgatagtgcttagtggttaatagttttaaatagsaaatcatttatttcctgatatttctacagggccgcatcagttgtactggacggctaatggtacaggctgtcaaccaaagaggtcgaagtccccggtctcc

SEQ ID NO: 12515 - DNA, 201 bp, Homo sapiens
ctatgttaagtgctggtaacaatacctagtgtatagtaagggttatatagctgtcagctcttgttatcgtcatcatcatcatcatcatccccctcacaatwaccgtgtggtggttaattttgtgtgtcatgcatgactaatacaaactctgtgaggtagcttctattattgtctccattttacggagaagaacactgaagt

SEQ ID NO: 12516 - DNA, 201 bp, Homo sapiens
agccccaaaagagagtggttactgcccttattccaggccccagaattctctgctttgcaaatcccaggctgagccccatggttaaccctctctggttcttygctctaccctttggagagaagacaaagcaatgagaagtggaccaagaacagccctcctaatagaatatcctatccaacctgtgatttcagccaagggtaa

SEQ ID NO: 12517 - DNA, 201 bp, Homo sapiens
cacttgtttttgttttgttttgttttgagacagagtctcgctctgttgcccaggctggagtgcagtgacgggatcttggctcactgcaacctccacctccyggcttcaagcaattctccttcctcagcctcccgagtagctgggattacaggtgtgtgccacctcatctcagtaatttttgtatttttagtagagatgggg

SEQ ID NO: 12518 - DNA, 201 bp, Homo sapiens
actccttaccagatttatggtttgctaatattttatcccatttcttaggttgtctctttactctgttgactatttcctttgctttgcagaaggttttagtytgatgcaatcccatttaactatttttacttttgttgcctatgttttttaggtcatatcaaaaaatcattgcctaaccaatgtcaaggtttttttttatgt

SEQ ID NO: 12519 - DNA, 201 bp, Homo sapiens
ttagcttgccgtggtggcagtcgcctataatcccagctactcaggaggctgaggcaggagaatcacttgaacccaggaaatggaggttgcagttagccaasattgcgccattgcactccagcctgggcaacaagagcaaaactccgtctcaaaaaacagtcttaacaactacacaaaagtctcaatatccgcttatcccca

SEQ ID NO: 12520 - DNA, 201 bp, Homo sapiens
acatgacatataccacaaacattgcaaaatctagaataataacataatatttattgatgtactgcctggcatagctctctactaacttttccctatatttytgatacattctttctgagtatcatttcatgcaacaatgttataatacattatgtagagagaatagaaatataagtcatttttcctccagcatggttggtc

SEQ ID NO: 12521 - DNA, 201 bp, Homo sapiens
atcttcatatgacacttggaacagtccctggcatagagtaaatattaatactataagagtgttcacatattcttgggacataaaaagacagtgaaaagtgraacccagacctcttgaatcacaggccagtaaagtcttccagggttaatgaataaactccattagcatcctagcatctctaccgctctgccacaattcttc

SEQ ID NO: 12522 - DNA, 201 bp, Homo sapiens
gacttttgagtagtaagtttatcctcagggcctttaataacaccagcatggaatcaaaattaggagaattactggactttggctatgtatacaccaggttygtgactgttgaacaggatgatgtttgagaagatttactgaggttttgggggtatcttccttccctgcattttggccagtttcaagtcagaagtgggcaga

SEQ ID NO: 12523 - DNA, 201 bp, Homo sapiens
ctttcaatttttgtgatgacaaagctgttggatttgacttttgagtagtaagtttatcctcagggcctttaataacaccagcatggaatcaaaattaggaraattactggactttggctatgtatacaccaggtttgtgactgttgaacaggatgatgtttgagaagatttactgaggttttgggggtatcttccttccct

SEQ ID NO: 12524 - DNA, 201 bp, Homo sapiens
cccggccatgtgtagttttcaaaagagccatagataggagtcgacatttgaaaccattcaaaatgaacatttttttaaatgccaacagaatacttccctgraaaaaagagccacagatacttgttggctttctttctttcaatttttgtgatgacaaagctgttggatttgacttttgagtagtaagtttatcctcagggc

SEQ ID NO: 12525 - DNA, 201 bp, Homo sapiens
actagatgaaggtgagctgctgaaaatctcccttggatcattccatattacatacatataatatcacattgtaccccacaaatatatacaattataatttrtcaattagaataaaaaagaaatttttgtttattcatttagagacaaggtcttcctcagtcacccaggctggagtacagtggcataatcatggctcactgc

SEQ ID NO: 12526 - DNA, 201 bp, Homo sapiens
ggagctgaagctatgtgagctatgatcgagccactgaattccagcctgggtgacagagcaagaccctgtctcaaaaaatgaaatgattctagcttaagggrgggaaaaagtgaaatacgtcggatatttatatattgtttactatgattctttaaatctaaattaaatatgttctttactcagaaccctacatgacattac

SEQ ID NO: 12527 - DNA, 201 bp, Homo sapiens
cacacacagctgccccttggcaataagatgcagtccctgactaatgcagcattgctctctgaagattttaatccagctttcttagtctcacctagctttawgaaaaatgagaggctagatattttgctgtttcttactaagatttgcattgctcatactataggtgccctgtgtaattgctctaacattttctcttcacac

SEQ ID NO: 12528 - DNA, 201 bp, Homo sapiens
tagcaaacaccgtgaatgccagacggagtcacatatgtagtggtataaaactagttatgtttgtttctttgtgatgacctctctttggtaattcctcattmttctcctgtctgtattacattcctatgtgtctttgccttttctgggtggttatagccctaaagaagtccaggttttaggagacctagagaacccccccag

SEQ ID NO: 12529 - DNA, 201 bp, Homo sapiens
tgctggggctcctaaaaaccatcttgatgcatgtccatgcataatgtctcagacccatgataacacagtaccagctatgaggaatttaataatgataattyatgatgtcacataccatttgatatttatgagagcatttaggttacatcatttaacccttaaaacatccttgtgagagatatatgtagcatccctatttgt

SEQ ID NO: 12530 - DNA, 201 bp, Homo sapiens
tcaagtattaaaaatacactgaatataattgttcctcatatacgagccatatctgaataactggagaccagtcaggatgtttctatcctgcagcacagacwggacaaaggaattagagtgatatttgggttagtaaagtcagggagaatgatgacaccctctgaaggattaaggatttacttgaagaagagtgcgaaatat

SEQ ID NO: 12531 - DNA, 201 bp, Homo sapiens
gaaacttagaaagattaagttacctgcctaaagtcactcacctgtaagggacagcagaactggtttacaaacttagactgattccagagctactgaatgcmatacgaaggtatttaaggctcattccaggattaagagcactaagtggcaggggagatagtggttaaatatgaaagaattttagaaggaggtaagcatata

SEQ ID NO: 12532 - DNA, 201 bp, Homo sapiens
gagttaataggcactcataccaccatgttcattagaatttctatacattcttctgacttcattgtagagtttataccttcccctgagcaaaaatgttaagrggaaagagatcctggagtccccctgcagggtttccagtcatgattccattgcccaagttactctacccctctgtgactcagtttcttcatctgtgaaatg

SEQ ID NO: 12533 - DNA, 201 bp, Homo sapiens
gcttttttttcttttttttttttttttttttcttttttgagacggaatcttgctctgttgcccaggctggagtgcagtggcatgatcttagcccactgcartctccacctcctgggttcaagcaattcttctgcctcagcaccaccacgctcagctaattttttgtatttttaatagagacggggtttcacctcaggtgat

SEQ ID NO: 12534 - DNA, 201 bp, Homo sapiens
ttggaattcatattccaaatatcttcaaagaaaatggtagcctggcaatttccagtatctttctctatggaaaaagaaaacaaatcccttcatgggtatcyttccctttttttgtattaagttaatcatggtcaatcaacagaaaatattttttaaggtgggtatagttagtgtagaaacattcagtgttgggtagttggc

SEQ ID NO: 12535 - DNA, 201 bp, Homo sapiens
ttttgttaggaatcaggaatacttttggctgcaaggaacaaaaaatgacaacaaataacttgctgtggcttaaaaaaggaaaggtttatttgcttatctartaagtctgcaggtggggtgatgtagctattaattcagcatctcagccatgttagggctgttggcactgtgattcattatgatgggcctatctttcaactg

SEQ ID NO: 12536 - DNA, 201 bp, Homo sapiens
cacttagcagtagtagtatttgttccaagtttctgagcatgttgcctagttgattttaattccaagagtaaaaccccttcttttctgtcttgggggcttcrgtaactggtatgtccaaatatggcagatataagttctgtgagtcatcacttaaaaattggagtgaacttcactatccattagcaaaacaaagtggcattt

SEQ ID NO: 12537 - DNA, 201 bp, Homo sapiens
ttgggtagttggcagctgtagtgggaggtgagtgaagtgtggtgccaaggagcttggcaattggccattggaaaagtccaggctgacgcacagggaatgcrccacaggaaaacatggcagcaggaagcaggatcaagacacagggactgggacatgggaagaaactatgttattctcaatcaaattactacaaataaagtt

SEQ ID NO: 12538 - DNA, 201 bp, Homo sapiens
gaactgcttgaacccaggaggtagaagttgcagtgagctgagattgtgccactgcactccagcctgggtgacagagagagactctgtctcaaaaaaaaaaagaaaaaaaaatcagacatggggcaaaatggagctgatgaacacagctaagaaggagtagtcagggaagtgttaatagaaggagggtggagagaacaatgt

SEQ ID NO: 12539 - DNA, 201 bp, Homo sapiens
acctctcaacattcatatgtggtatatatttttttaaaacttgcccaaggtcacaaacttaatacgagatagagtcagattttaaacctagctctacttayaaatcatatcattctttcactttatgctgccgcctcgctaagacttaaatgtaggccttccccatccttggcatctacctacccactaaggcatactccc

SEQ ID NO: 12540 - DNA, 201 bp, Homo sapiens
acttgtaattttcactctgaaaactagctatgcctctgcagtagcttacctgcaaggccatcattaatgagaatattgagtctatttctgcagaccttagygaaatggaataattcagtatccagcaagcccaggaaatattgcccctgttgcatggaattcttgtttaatgtcttgaatattacagagtggcagcagctg

SEQ ID NO: 12541 - DNA, 201 bp, Homo sapiens
gactacagactcacaccatcacacctggctaatttttttttttattttagcatagacgaggtttcactgtgttgcctaggctggtctcaagatctgggctyaagtgatcctcccacctcaacctcccaaagtgctgagattacaggcatgcaacactgtgcccagccaagaaaaaagttttattatgactactgtactgat

SEQ ID NO: 12542 - DNA, 201 bp, Homo sapiens
gaatgttctattccccacaggtctctgcagtgaatacagttaattgggagctaatcatgaactgctttatatttttccctaattgtctttttttttttttttgagacagggccttgctttatcacccaggctggggtgcagttgtgtgattatagctcactgccacctcacatttctgtgctcaacagaattctcccccct

SEQ ID NO: 12543 - DNA, 201 bp, Homo sapiens
atcattatgggggggggggtgcttagctatcatttattgagcactgtgctaagcaactcacatgtattatttcatttgatacaacattcctaagaggtagsattgccccagttaaagtactgaggagtctaggagttaaataaattgcccagggtcacatagccactaaaccgagacacgaatccatgctctcaccaccaa

SEQ ID NO: 12544 - DNA, 201 bp, Homo sapiens
gaaaactagctatgcctctgcagtagcttacctgcaaggccatcattaatgagaatattgagtctatttctgcagaccttagtgaaatggaataattcagwatccagcaagcccaggaaatattgcccctgttgcatggaattcttgtttaatgtcttgaatattacagagtggcagcagctgccttattacctcttctgg

SEQ ID NO: 12545 - DNA, 201 bp, Homo sapiens
aataaggaattatatcttgaacttccaagatattcacaagaagattccatattactttcaaaccttacacaaggcttaagatcactgatcaaattctaagrttattgattcttatagaatactacattaacatgaaagatgggcttttgtttttaatatgactgtacttttttcctaatataaatttaaatgtttcacagc

SEQ ID NO: 12546 - DNA, 201 bp, Homo sapiens
ttcactgaaggtgaggggaaagcaatcctctcctcccccagggtggaagacacaacacacatgcgcacacgcatgcgcgcgcacacacatagacatacgcrcagcgcacagacgtacgtgcacacgcacacacacatgcacgcacacacacacgcacacacacacacacacacacacacacacacacccctctggctgcct

SEQ ID NO: 12547 - DNA, 201 bp, Homo sapiens
tttgggtataaacatagcatatacaggattaggtccattgtcttgcattattctctttgcttctcttgttgtctgcaacacatttttaagcctttccttayatcagtgggtcctggaaagctttttttcccataaattagatctatacttagagaagggtaaactatattaaaaagctaataattattagcctagtatgct

SEQ ID NO: 12548 - DNA, 201 bp, Homo sapiens
aagaagtaatgaatttcttatgacaaataacttctaagtaatttccaaaagctataggcaaccttgcctttctggtacctttcattctttcggcctttttmtctctgtgaaaatcaacttttctaaaaatagcttaatgaggaagaagaaaatggtaaaattgtgcatttcatcacatcacagtccagatatgaaatccat

SEQ ID NO: 12549 - DNA, 201 bp, Homo sapiens
atattgagtctatttctgcagaccttagtgaaatggaataattcagtatccagcaagcccaggaaatattgcccctgttgcatggaattcttgtttaatgwcttgaatattacagagtggcagcagctgccttattacctcttctggtcaacccataacaccatgatgttatgaaaagcccattccagctgtataaatgca

SEQ ID NO: 12550 - DNA, 201 bp, Homo sapiens
actcaggaggctgaggcaagagattcacttgaacccgggaggcagaaattgcagtgagccaagatcacaccactgcactctctagcctgggggacagagcyagactcatctaaaaaaagaaagtcaactactaaaaagtaaaataattatgaagtatgatactttacataatttaagttttacaactcaaagttattagtc

SEQ ID NO: 12551 - DNA, 201 bp, Homo sapiens
tatatacatatatatgtgtgcatatatatacatatatatgtgtgcatatatatacatatatatgtgtgcatatatatacatatatgtgtgcatatatatcrcatatatatacacacacatacatatcacagtaaaaatatagaatggagaccagtgctttacctgaatactagttaaattacttaactctgctttcctgct

SEQ ID NO: 12552 - DNA, 201 bp, Homo sapiens
gtcacctaggctggagtgcaatggcatgatcatggctcactacagcctcaacctcctgggctcaagcaatcctcctgactcagccttccaaatagctaggrctatagacatgcaccaccacacccagataatttttttattttttgggtcttactatgttgcccaggctggtcttgaattcctgggcttgagcaatcctcc

SEQ ID NO: 12553 - DNA, 201 bp, Homo sapiens
aaactattttgagacacacaaaacctaaaagctatttttgtcttgatctgggtagaatttatctataggtatatctgtcttaagaaaaaaatgcaattgaygttagctagttagttgacagaatattcacagaacagattattcacagaatattcttccttttgtaagatttaccatggaattgtttttatctgcctctcg

SEQ ID NO: 12554 - DNA, 201 bp, Homo sapiens
atgcagtgtgtaataatcacgtcatcatagaaaatgaagtatctctcccctagagcattaacgaatctgtacattttaactgctatactctactgccatarcccttctcaagatctgtctcaatggagtttgggtgagtcctcctgaccatcagaaacaccaccacagatagtgagcagttctctaaaagcaaacctcatg

SEQ ID NO: 12555 - DNA, 201 bp, Homo sapiens
tgtgtgcatatatatacatatatatgtgtgcatatatatacatatatatgtgtgcatatatatacatatatatgtgtgcatatatatacatatatgtgtgcatatatatcacatatatatacacacacatacatatcacagtaaaaatatagaatggagaccagtgctttacctgaatactagttaaattacttaactctg

SEQ ID NO: 12556 - DNA, 201 bp, Homo sapiens
gatcatcttctggcaagcttaacagacacctgatgttttccttggccatccagaaatctgcatcctggtgtagatatcatgagttaatgatggagtcaagygtagaaatgtgtctgggacttgcagacctcttgctttgtgatactttcttttattttcttaactggctgagaaaatggctgtcactccaagtctatcttc

SEQ ID NO: 12557 - DNA, 201 bp, Homo sapiens
ccacacttggagtttcaggaaattgactttaagaagaaactcattcaattctccacctactagtgagtcattacttgcttgtaagaatgcttactgccacrcattcaaccattggcctcattctccttccagaaataaagcatgaactccacctacacattctttaacttagtatcagccataagcgattcctggcagtac

SEQ ID NO: 12558 - DNA, 201 bp, Homo sapiens
aatctgtacattttaactgctatactctactgccataacccttctcaagatctgtctcaatggagtttgggtgagtcctcctgaccatcagaaacaccacyacagatagtgagcagttctctaaaagcaaacctcatgaatcgcttccttccattgcccccagacaatgttaagaaaccttaaaaaagaaaagagccatga

SEQ ID NO: 12559 - DNA, 201 bp, Homo sapiens
atatatgtgtgcatatatatacatatatatgtgtgcatatatatacatatatatgtgtgcatatatatacatatatatgtgtgcatatatatacatatatrtgtgcatatatatcacatatatatacacacacatacatatcacagtaaaaatatagaatggagaccagtgctttacctgaatactagttaaattacttaa

SEQ ID NO: 12560 - DNA, 201 bp, Homo sapiens
agcgtctttactcttagcaacaaccttccttgttgcaacttgtgagggcctgagctacagtgcctcctctatcaaagccattttgctgggtttctctttcytttataaacagaacactgatcccaagcagaatataacagatatgacttgtaatccgttatagtaccatttaatccttatgtttagctgccagcattctaa

SEQ ID NO: 12561 - DNA, 201 bp, Homo sapiens
aaaaaaaaaaaaagtaggaagtaatgctgataacttgaacacaaacactttcgtattttcatttcaggtttaaagtattcatatatcataatttaactcaytagcagagtgtacttaccctgcagtcagacaatttcctctctctttaaggaaaaagtataatctaatctggtaggggatttttcttttatttttaactta

SEQ ID NO: 12562 - DNA, 201 bp, Homo sapiens
cagaaaaatgcatagagggagagagataggcttgtgattcacattaatattttgggcaatggaatacagtgtgaccaataaaaatgattcaaatagtatgrtagaagtatactactgtcggccgggcgcagtggctcatgcctgtaatcccaacactttgagaggccgaggagggcggatcatgtggtcaagagattgaga

SEQ ID NO: 12563 - DNA, 201 bp, Homo sapiens
taggtaaaatctttgagatttaccctataaggtaaatctctagtgtcattggcccaatttaaagatgtgaaaactgagtctcagagatgttagtttaagtyacccaagttgactcagccagtaagtgaggagtttgtatttgacatcaatctaaataagagcctatcctttactgcccccaatgtgagagaggaaggaatc

SEQ ID NO: 12564 - DNA, 201 bp, Homo sapiens
gcctagctggctttaaaataaagggagaggggacagagtcagttctaataaactgtagagatatatatatatatatatatatatatatatagcattttaarcccaacttgaagaaagttgctgaattagcatcagaaagccacagaaaaatgcatagagggagagagataggcttgtgattcacattaatattttgggcaa

SEQ ID NO: 12565 - DNA, 201 bp, Homo sapiens
tcaaggctgcagtaagctgtgattgtgccactgcacttcagcctgggaaacagagcaagaccctgaaaaaaaaaagagagagagagagaaagaaaagaaargaaaagagaaaggtaactccagttccagcacacagtgccactgcaggagtgaggaagccacgtgggagaattattttgtgggaaaagctgaggaatgctt

SEQ ID NO: 12566 - DNA, 201 bp, Homo sapiens
catgggatgattaatgaattgatacaacctctagaccaggggaacagaagaaagtttggcttgcaaaatcacaggctccacctggtcagcgcttatcttcyttgtttagctcaagttaggtaagtttacctagtttaaaaggagtattttaaatttatgtttgacatttaatgatttcagatagttcttggacatcaggat

SEQ ID NO: 12567 - DNA, 201 bp, Homo sapiens
gaggatctggattgcactggacaagtacaatcactttgacctccttacctcattttttaaaaatgtagagggcaatcattattcaggtttaaaaataaatmtgacaagttctttaagagataccaagtggaatctgcaaggcccagacaagagctccacttcttaaacaatatgtgtgtggaggctgtcaaagggtattgc

SEQ ID NO: 12568 - DNA, 201 bp, Homo sapiens
tacccagaaacagcgaactgcaatgaaagtatcaaaaagagaatttgttttccatggtatgtactacttacacacgcacacaaatctactagagaaaccaytggggaagttctgttcttttctcccagactactactagatattaattcagcatctgaaagagtaaaggctgttccaaaatcttgttctggtttgttagag

SEQ ID NO: 12569 - DNA, 201 bp, Homo sapiens
tggcacttgacttgtttcacttcccggtttcagctgggattgagatcagcaattactggaaattgtaaatttacccaacatattttcctgattagagagcwtccaatcaaatttgcatttatatttagaagtttggaagtttatctgaaataatttctgtacattttttagattctgccttaccaattattctctatttct

SEQ ID NO: 12570 - DNA, 201 bp, Homo sapiens
gacttgtttcacttcccggtttcagctgggattgagatcagcaattactggaaattgtaaatttacccaacatattttcctgattagagagcttccaatcraatttgcatttatatttagaagtttggaagtttatctgaaataatttctgtacattttttagattctgccttaccaattattctctatttctaatcaaac

SEQ ID NO: 12571 - DNA, 201 bp, Homo sapiens
tttcagattcaaatactttgacagacagttgaatttgaatgtcagtttatgttaccaatttacatactgatttatattaaggaagaagtttgttttaacarctaaagggtctaaagtatatttgttttgttaggaatcaggaatacttttggctgcaaggaacaaaaaatgacaacaaataacttgctgtggcttaaaaaa

SEQ ID NO: 12572 - DNA, 201 bp, Homo sapiens
taagctctagctacggtagctacagtttacttaatgaccaaataacaaccttttcttccattttaaattttgtatgactttggctgagggtcattgaaaaatcaaggatgggaatacacacacacagaggcacacacatatacacacacacacacacgccccacagtcttacatggtgaggtcctgactgaagtttattag

SEQ ID NO: 12573 - DNA, 201 bp, Homo sapiens
ttacattaatcctgtcttattcaaaaggtattcaccacaaaaatacttactaatcttggtttcctggtatgaactccttgtgcttctgagattagagataygcttttctttacgggtggccacaatcaagagataagatcatgcctaaaaggacaagttaggaacagaagtgtgattaagtatattctgtattagttttaa

SEQ ID NO: 12574 - DNA, 201 bp, Homo sapiens
ataatacctcattcctttttattgctaaagagtattttttgtacataaatatgatatctatgcttatagagcatatatatcacaatttattcattcattcagttgttgatatttacatcattttcaattttttactattgggcttttttccaaaatggttatatcgttttacctttccaccatgattgtatgagagttcca

SEQ ID NO: 12575 - DNA, 201 bp, Homo sapiens
aagggcggagacaggcaaagagggcccctgtcctggaaatccctccatgaggaagcagtgaaggatgcagggcccactctgtcagtgtctagtgttccacygatcctacatagtaattttgaaagacgatagcatgatgttcctgaaaggaaaaaaaaagtttcctctatgaggtcattaacatatatcttgagtgacttt

SEQ ID NO: 12576 - DNA, 201 bp, Homo sapiens
ttaagtgactgacagaattctttccatcagtgatacctgttctttttattcttcttcttgattattctcctttccagtacatttccattttcctatcctawgttttatgcaaaataattttgtgtggagaaacacattttcgctgacattgtctgaaataactagtgaatatttcccattagagttggaccttgaacaaca

SEQ ID NO: 12577 - DNA, 201 bp, Homo sapiens
ctgactttctctttccctgttcctctacctcccacatttgcaaattactttcattgccactctgtgaaaagcagaattactcctattaatagctgggcacktgactaacattccacaggttaacccaagctttgccaaaaggaaacagcatagaaagacccagaaactctccagtgatgtggtatcagtggaataagctct

SEQ ID NO: 12578 - DNA, 201 bp, Homo sapiens
aactcaagtgtgtttcagggagcagtggcagatctgccttagatttttaaccactgcatcatcctgttaatcaagatcaatcagatacaaaaatctttggwcagaaccagtattacaaaagaacctaagaatttctgctttctcatctttctgtttaccataacacaggcatatatccaaaaacatatagaaagcaaaaat

SEQ ID NO: 12579 - DNA, 201 bp, Homo sapiens
ataaaaataacatttcttttaaattgtattttgctgtttaaatatctttttttccatgtttttcattaaggacatgacaaatcttttctgtgtggtttctkccttgtcgcttattgctcactttaaatttgtgctgtaccaattggtggctctctggattaggccattagtactagaaagggaggtaaaaaggtagaacaa

SEQ ID NO: 12580 - DNA, 201 bp, Homo sapiens
gaaactctccagtgatgtggtatcagtggaataagctctgccactggagctcattcagtggctcaatgagtggcagagcttgggcagcaatgcaaagtctkcctgtgaccacatctttaatttgagtctattcgttgccgcaattttgcttttgtttttcctttctcaaaaatggcctcattttgtgaaaacaaagtgttt

SEQ ID NO: 12581 - DNA, 201 bp, Homo sapiens
atgctttcccaatttgccagtgcaggggccctttatgggaaacagtgaggaccatccaacagtccaattaactgagcacaaagcacaaggcatatttgttkttctttcttttgaaaacataaatgttagaaaagttcagaaatgaagagatttagaagtataaacttataactgttggaaccatcctcgtattttctagac

SEQ ID NO: 12582 - DNA, 201 bp, Homo sapiens
attgccagtctgggcattgaccttcacttaagcagggcatcagtgtgatgtggtccccctgctggaagtggaattgtttctaactctgggtgcccacaccrtagagggcttgtctacacttggtctcagccatcaccccccaaacacacccagctctttaccacctgattccctcaaggcgactctccttccctctgccag

SEQ ID NO: 12583 - DNA, 201 bp, Homo sapiens
ggttgttttacagatgatcaatggtccttctagaagaagtccacagaagctctcagatgccctctagaccagcctttactcactcctctgtcagcatcctscctcccagctcgcattttaccaaagctagaaaagaccctcaagggcctgggtgcgtggaattattagagaccagataaaagacatgtaaggagtgctggt

SEQ ID NO: 12584 - DNA, 201 bp, Homo sapiens
caacttcaaaaatgcacagttgttgagagcctggaagagacattcaggaacgggctgcaacaagccttgctctggtgtggtcctgcttatccaattgttgmtcaataatgtcccttcccggaggcatagaaggcaggcacccatacattcacacccacaaaaatgtcacctcattccccagagattgccagtctgggcatt

SEQ ID NO: 12585 - DNA, 201 bp, Homo sapiens
tataatacctcattcctttttattgctaaagagtattttttgtacataaatatgatatctatgcttatagagcatatatatcacaatttattcattcattcagttgttgatatttacatcattttcaattttttactattgggcttttttccaaaatggttatatcgttttacctttccaccatgattgtatgagagttcc

SEQ ID NO: 12586 - DNA, 201 bp, Homo sapiens
agttgtcagtttgcaaacctagaaaagtataccattgtaatatcagttcatctcccgcttttccagagctactcagaagcgtggtggatgcttagtgaaaygaccagaggtgtgaagctgccagacctttacccagatcaacttctttgactcagggtacaaatgaacaacgtagtctgacagctcacctaaaagttattt

SEQ ID NO: 12587 - DNA, 201 bp, Homo sapiens
gtataatacctcattcctttttattgctaaagagtattttttgtacataaatatgatatctatgcttatagagcatatatatcacaatttattcattcattcagttgttgatatttacatcattttcaattttttactattgggcttttttccaaaatggttatatcgttttacctttccaccatgattgtatgagagttc

SEQ ID NO: 12588 - DNA, 201 bp, Homo sapiens
tgaggtcttgccatgttgctcaggctggtcttgaactcttgagctcaagtgatctgacctctcagcctcccaaagtggtggcattacaggtgtgagccacygcgactggctaaaaattcttaattgtatactcttttgtagtattctcttgggaccacctaagtcaagcctcattcccaccagatggtgcccctgttgggg

SEQ ID NO: 12589 - DNA, 201 bp, Homo sapiens
tgtataatacctcattcctttttattgctaaagagtattttttgtacataaatatgatatctatgcttatagagcatatatatcacaatttattcattcattcagttgttgatatttacatcattttcaattttttactattgggcttttttccaaaatggttatatcgttttacctttccaccatgattgtatgagagtt

SEQ ID NO: 12590 - DNA, 201 bp, Homo sapiens
ccaagaatggctaatttttgtatttttagtagagatggggtttcaacatgttggccaggctggtcttgaactcctgatctcaactgatcctcctgcctccrgccacccaatgtgctgggattacaggcgtgagccactgcacgtggccggatgttgatatctttcaaacatttattgagcactgaccttgtcccaaggggt

SEQ ID NO: 12591 - DNA, 201 bp, Homo sapiens
aatggggaaaatagacactaaccatatactttttaaaaataatacattaaaagagcactaaagcgttctttgaaagtgctcctggtactatatacgtattkgctcattctagcaatgttcttttgagacaccatacaagaaatggaactcgaccagatttgagaaaaagctgcagagaaggtgaggatttgttccagggcc

SEQ ID NO: 12592 - DNA, 201 bp, Homo sapiens
ccctgggaataagagttggaaatgtgcctatcataagctgagtcacattttatgtgtcccctcctctcaagccactgttttctctctctttttttttttttgcgattaaaaaaaatatatatatcctgtgtaaaataaaacagattcagaaaactgcgtaaaacaattcattatataatttgtatatataatgaatgaaag

SEQ ID NO: 12593 - DNA, 201 bp, Homo sapiens
ctaaatccataaattgatgagtgctctgttaattggttgctttcaaaataatggttaaaatatagaaagaatattaaaatccttgaggtctgtactttttwaaactatttaatagcaccaatatctccattatgtggaggtgaagaaggcaagatgtgagccaccatttatagctccttcaagaactggcccacaataatt

SEQ ID NO: 12594 - DNA, 201 bp, Homo sapiens
aggactagtgagagggaatttgaaaatgaacaagtgcttcctgtcactatctcaccaacccaattgcctctcctcccatctacatacctagacaataggarcaagcacactagggcagaatccataagaaagcaaaacctaattttatagttgcctattttcttattcttttatttcttaattcattttaaatcttttttt

SEQ ID NO: 12595 - DNA, 201 bp, Homo sapiens
aaaaaggtgtattcgacattttcttttgtgtatattttccacttcaacaattttgtatcaaaacgtatggcactttttcagcacttatttcaagagatccrgataaactctgagtaatcacaattcactatacttcaaaaattgcctcccattcagtattttacaaataatcttctacaagtaaatggggaaaatagacac

SEQ ID NO: 12596 - DNA, 201 bp, Homo sapiens
caaggggttttccatgactttctgtgaccatcaacattcaactgatgcctgtttcctatacacttcagagagagccagagcttcacaagccaattaacacattcctaagaatcaaaacttagtttctgggctgggcgccatggctcacccctgtaatcccagcactttgggaggctgaggcgggtggatcacttaaggcca

SEQ ID NO: 12597 - DNA, 201 bp, Homo sapiens
atagtgtatatgagccacatttaaaaatatggaacgcttcacgaatttgcatgtcatccttgtgcagaggtcatgctaatcttctctgtatcatctcgatyttagtatatatgagctgccaaagcaagcacaggttcctggtttttaattgtttgtttgatatggaatttagcaacctgattcaaaaagttgtgtggagga

SEQ ID NO: 12598 - DNA, 201 bp, Homo sapiens
ttcatggatttcggcactgaaaagtgaaaactggtccacgtgtacgcatctttccgggcacctgtagttggaataaggcagacacacagagatgacagatmtaatggatcatccttcttttgctgtctcctcagagtaaaggaagtgcgtatgtcttctcacagccaatcaactctccaagtctattctaccccacagtcc

SEQ ID NO: 12599 - DNA, 201 bp, Homo sapiens
ccaaggggttttccatgactttctgtgaccatcaacattcaactgatgcctgtttcctatacacttcagagagagccagagcttcacaagccaattaacacattcctaagaatcaaaacttagtttctgggctgggcgccatggctcacccctgtaatcccagcactttgggaggctgaggcgggtggatcacttaaggcc

SEQ ID NO: 12600 - DNA, 201 bp, Homo sapiens
aattactgagctccagttagaaattcaggccatctagagttaatgactgtgtcccggtgaaattacagcaaagaaaacaaagattgaacaaagtatcttcractaaaatttctaactgttaaatcatattagagaatatagaagcaaatttggtaaataggttttgaatttaagtgagaagaataaagccctgaattggat

SEQ ID NO: 12601 - DNA, 201 bp, Homo sapiens
accaaggggttttccatgactttctgtgaccatcaacattcaactgatgcctgtttcctatacacttcagagagagccagagcttcacaagccaattaacacattcctaagaatcaaaacttagtttctgggctgggcgccatggctcacccctgtaatcccagcactttgggaggctgaggcgggtggatcacttaaggc

SEQ ID NO: 12602 - DNA, 201 bp, Homo sapiens
aaccaaggggttttccatgactttctgtgaccatcaacattcaactgatgcctgtttcctatacacttcagagagagccagagcttcacaagccaattaacacattcctaagaatcaaaacttagtttctgggctgggcgccatggctcacccctgtaatcccagcactttgggaggctgaggcgggtggatcacttaagg

SEQ ID NO: 12603 - DNA, 201 bp, Homo sapiens
aaatgacccacagaagtatccactcacagaaaggaccatttctaaaggaccagtttggcctataaagaaaatacaatagcagaccttcacaaattttctamcatcagaaaagaaaaaatatttagatattaaactgaatcaaatgtgatggtcttacccagacaaaggaagactcagcaccccatttccaagttaactggg

SEQ ID NO: 12604 - DNA, 201 bp, Homo sapiens; identical to SEQ ID NO: 4352

SEQ ID NO: 12605 - DNA, 201 bp, Homo sapiens; identical to SEQ ID NO: 4355

SEQ ID NO: 12606 - DNA, 201 bp, Homo sapiens
ttttgcattacaataatgcatcttgcttttcttttttatgaagtgttcactttatttttattactccaggtacccaggatcattcatgctctcttctttamggtgttgtacaccttgtgttcagtagacatttttaatttttttcttctctgagacaaggtctcactctgttgtccatgcctggctaatttttttcttttt

SEQ ID NO: 12607 - DNA, 201 bp, Homo sapiens
gtacagactgtggtgacatcattagttagagtctgtgagatgggggggggggcaaataatgattcattctcttaaaaaggggatgtaacactttttttttkccttcttcaactggaatagttagggatgtaacactttaaaagagcatgttgtacatcaaggtaatataggtaacttaaatttattttggattttgtttat

SEQ ID NO: 12608 - DNA, 201 bp, Homo sapiens
agtttctgaaacccataatgcaaatacatgttcctccaaaggtctcaatgttcttatctcaaaatacacattttattgcttttgaaatacatgattatcayatccctttggcatgaatttgtatgaatccttagatttaagtatgtaaaatataataaaaacaaaagtgtgtgaataccccctactgcagagttatgcaag

SEQ ID NO: 12609 - DNA, 201 bp, Homo sapiens
ctgcattccaacctgggtgggcaacagagcaagactccatctcaaaaaaaaaaaaacaaaaaaaaaaccttagtttctgaaacccataatgcaaatacatrttcctccaaaggtctcaatgttcttatctcaaaatacacattttattgcttttgaaatacatgattatcatatccctttggcatgaatttgtatgaatcc

SEQ ID NO: 12610 - DNA, 201 bp, Homo sapiens
ccgtgtgactgtaatcttgtgatgggttctgagagatgtgagcaggaacttgatagagcctaaaatctagtgggaaagccaagacagatagaaaaaaaaawaaaaaaaaaaaaaacctgctgtgtaggaaattgcttaggagatctagcaagttttatagaaattcagaaaaactgactaattttccatttgtcctgagtc

SEQ ID NO: 12611 - DNA, 201 bp, Homo sapiens
accttcaaagttgcaaacattggaatattcagtgttttgcatcagtgccttaaatcttcatggatttcggcactgaaaagtgaaaactggtccacgtgtaygcatctttccgggcacctgtagttggaataaggcagacacacagagatgacagatctaatggatcatccttcttttgctgtctcctcagagtaaaggaag

SEQ ID NO: 12612 - DNA, 201 bp, Homo sapiens
tggcgaattgagcccaatgtttcatctcaaagtaaatttgcatgtttgaagccttaggcctctgagccaaagcctgtgaaggtaaagccagagatgcacgscctaaagcagagactctggcagatacagccagcgaagctggagggagttccttgagtgtcactcctgacgaaataaaagttcattgtgtatttattctct

SEQ ID NO: 12613 - DNA, 201 bp, Homo sapiens
cactgataattaataattactacacttttattctggtatgtatacatacttagaaagcatcacacatgcatgtgtgcacacatacacacacacagtgtgtrtgtattggtagcttaggcctgggtcagtagctcagaaacatcagaatgcatttgaaggctttagcctttccttcatgattagaagatagctgtagctgct

SEQ ID NO: 12614 - DNA, 201 bp, Homo sapiens
atctacatgaaatgcgacacaagattccttgttatggtgtcaccagaggtaatattaatagtattaaaagaacaagctgaggactttatgcatgatcttamccatgacttcatgaattgccactgggattaacgtaaaatctgtaatcctcgcctaaataggccatctttgtctattatccatcactatatatataagata

SEQ ID NO: 12615 - DNA, 201 bp, Homo sapiens
cttcacctcaggccagccttgggttttgtcttctgtctcttgttttcatgaggccatgaaaactgaagctcattctctagcttctgagaaattccctcagkgtaaaacagctttaagtgctctgctttccactctgtgttcccacttttatttaaattttcccttataaatccttcttcttcttcttcttctttttttttt

SEQ ID NO: 12616 - DNA, 201 bp, Homo sapiens
gaaattagtatttctgttggctttaattaagtaaatattatagtttgatccacaacaccaaatctttgtcaatgtcctaaaagaaattgttcttttcaccrcaagagttatgtattcagagtaaaaatgggtagatgtatattttctctgtgaaggaaaagaactggaaggtgcttattttatttcaagagttcccaaagc

SEQ ID NO: 12617 - DNA, 201 bp, Homo sapiens
ggatcacttaaggccaggagttcaagaccagcctggccaacatggcaaaaccccgtttctactaaaaatacaagaacttagctgggcatgggagcgggcasttgtagtcccaactacttgagaggctgaggctggtgaatcacttgaagccaggaggcagaggttgcagtggccaagattgcaccactgcattccaacctg

SEQ ID NO: 12618 - DNA, 201 bp, Homo sapiens; identical to SEQ ID NO: 4326

SEQ ID NO: 12619 - DNA, 201 bp, Homo sapiens
ataataataaagtgacgtacaggaatcagaagtgaagtacagaaacagctggattggttacaggtcagtgtttgccttatttgtacacagtttgaatactyggcagtgtgtgagtggttgaggtatggctgctgggattggccaagactcaaccactgttacagatgcaaacttttaggctgtcaatcttgtttacctatt

SEQ ID NO: 12620 - DNA, 201 bp, Homo sapiens; identical to SEQ ID NO: 4327

SEQ ID NO: 12621 - DNA, 201 bp, Homo sapiens
tatatcaccccatcctgtttttgacttctaatctcctttaccaaatactatgtagcaatattttgtgagtcatccaaaagttgagtatatttagaccaccrtgacaatcaaacagtataaacagaactactcatctgtctgttcatcatcatcccacgcagggagttaattcctaataaaggagtttatcagatcaccctc

SEQ ID NO: 12622 - DNA, 201 bp, Homo sapiens; identical to SEQ ID NO: 4328

SEQ ID NO: 12623 - DNA, 201 bp, Homo sapiens
cagtttgatcaaattgaggggatggatacccacttaccttttcatagtaatagtaaatttgttatagaaaacacattttaccttccttgtctcctaattcraggtcatgtgaagcttagctagaaggagcaaagtacattttgttctgcctgaactgtctctagtgaatacagttaccctgggctttattatgaatacctg

SEQ ID NO: 12624 - DNA, 201 bp, Homo sapiens
tgtgtctctggagctagcacagtccttagtgcattgtacatttgaacaaatgtttgagtgaataacaagcccgttctccattctggttaacttacgagtaytgtaccaattttcttccctgggcggaaaaaattatgaaccatggttcttgtgaaagttattatttttaaatgcctagacattcattcccagaactagaaa

SEQ ID NO: 12625 - DNA, 201 bp, Homo sapiens
ctgtgatagctaactgatcttgctgtctcatcatgcattatttgcacgattggcagttactaaggtacaccaggctagaagggagtccatctggctctccrctgggccctgtactcttggcccaggatctgaaccatagcctatgcttaataaatatttgtggaatgagtaagaggttccatctatgagatgaaaaccact

SEQ ID NO: 12626 - DNA, 201 bp, Homo sapiens
gtttgcatgtgatctaaatgatccaaactaatgggtgagctttgggtgcttgaggactatatgcaggagaaaagaggagggatggataaaacttttccaaytttaaaataaaaattattttctgaatgtgctttaaatgcatctgctacatgtactcaagaatgttgagtctgacccctcaaatttattcattaagttttg

SEQ ID NO: 12627 - DNA, 201 bp, Homo sapiens
aaaaaataggagagtaattttacatgacacctaatgagttgaggaaaacagaactaacctagggaatattgccaagtaaaagaagtttgtctttactccgyagcctcccgtgtcccccactctgagtctctctatgactcttctacttcctctcgcctacccaaaatcttggcatccttaaggtgcacctgagtcctctcc

SEQ ID NO: 12628 - DNA, 201 bp, Homo sapiens
gctataatatgaggtcactggctcctgagctagtgaggaaatccaagttctaaaaaacattccttccttatatttgttttttttgtgtgtgtgtgtgtgtgtgatctttttgataagaatagttgtcaaggctgggcgtggtggctcacgcctataatcccagcacttttgggaggcagaggtaggaggattgcctgaggc

SEQ ID NO: 12629 - DNA, 201 bp, Homo sapiens
aaggagaataactacgcctggctcatctttgtcctccttgaagcttctcttgcacaactaagcagttgttccgttgatttcatgttcaacttactattccrggaaagggaagtagaagaaaggaagcatgactgtaagatgggcgaggccaaggaagagtcatttcctccatggtgaagaacataatgctacgcaacttca

SEQ ID NO: 12630 - DNA, 201 bp, Homo sapiens
cgctataatatgaggtcactggctcctgagctagtgaggaaatccaagttctaaaaaacattccttccttatatttgttttttttgtgtgtgtgtgtgtgtgtgatctttttgataagaatagttgtcaaggctgggcgtggtggctcacgcctataatcccagcacttttgggaggcagaggtaggaggattgcctgagg

SEQ ID NO: 12631 - DNA, 201 bp, Homo sapiens
catcatgttcttttcttaaaactgaatcgcaacgccaaagtcaaagatcaaagaaaagagccttgaattttcaaaccctatatacttcctaataaaatggkatttttaaaataaactccattgttatagaaaactttttacaatattcttggcataatctgcattaacaactgtgtattcacaacatgttatcaaacgcat

SEQ ID NO: 12632 - DNA, 201 bp, Homo sapiens
ggaaacatttctgtgattggtttggcttctgcatgactggtaactgcaaaggtgttagcagagagagaagaactagagagaggagcagagagaggtaattscaaagatgttaacagagagggggcagacagaggttagactttgggatcgttgaaatgaaaaactgtcccatcttcaatcatgttcacctctttaatacca

SEQ ID NO: 12633 - DNA, 201 bp, Homo sapiens
tcgctataatatgaggtcactggctcctgagctagtgaggaaatccaagttctaaaaaacattccttccttatatttgttttttttgtgtgtgtgtgtgtgtgtgatctttttgataagaatagttgtcaaggctgggcgtggtggctcacgcctataatcccagcacttttgggaggcagaggtaggaggattgcctgag

SEQ ID NO: 12634 - DNA, 201 bp, Homo sapiens
gtgatgttcctagttcccaaaacagtacttgtatagcaattactgttaattatttcattgagttaatctcattcccataacggattaagttttagactaaraaataattttttttgtttgagacatgaactcactaccttcacccaggctggagtgcagtggcatgatcatggctcgatgcagccctgacatcctgggctc

SEQ ID NO: 12635 - DNA, 201 bp, Homo sapiens
tgaccgtgttcacactgctataaagaactgcctgagattaggtaatttataaaggaaagaggtttaactgactcacagttcatggctggagaggtctcagraaacttacaattatggcggaaggcaaagggaaagcaagacaccttccacacaacgcagcacaaggcaggaagaaatgtcaagcaaagcgaggaagagccc

SEQ ID NO: 12636 - DNA, 201 bp, Homo sapiens
atcgctataatatgaggtcactggctcctgagctagtgaggaaatccaagttctaaaaaacattccttccttatatttgttttttttgtgtgtgtgtgtgtgtgtgatctttttgataagaatagttgtcaaggctgggcgtggtggctcacgcctataatcccagcacttttgggaggcagaggtaggaggattgcctga

SEQ ID NO: 12637 - DNA, 201 bp, Homo sapiens
gaagttctgtgttgcttctgttttcttagtggaatggggagtgtggtcatcagtggggagcgagggtcggggagggagtgcggggccgggggtgcagtttkaggagagagatgtgaaacagtcacctggcagaaagggagcctgaatttagctggtgaaatgtacactcaggatctgcccatggtcaaattctgactctta

SEQ ID NO: 12638 - DNA, 201 bp, Homo sapiens
ctcaattactaatttagttttgcttttcagtttgatactctgcccccaatccatgttctttcattgaactgtaatgttttactacttgtcattatttttgraaaaacagtttctaactctcttgttactagtgctaatttgcataatttgaattaatggagaatttgccaacacttacgtagcttctacaaagtttgcagt

SEQ ID NO: 12639 - DNA, 201 bp, Homo sapiens
catttagtggcaaaaggaattcttaagtactgacattacatttcaacggggcacaaagagacaggatttacattccttcttggattaggttttgttttcayactcattctctttagataatcaaaagcatgtgtccccacaccttgccagttccaccaagggatcctcagcacccatctcagaggggtctgatgtgacatc

SEQ ID NO: 12640 - DNA, 201 bp, Homo sapiens
tttttatctcctgaaaaattacttggcttgagggagacacagttggatgagcaaagaaaaaaagaaacaatcaaatgattttctgatgctttcgaatgttyataggcttgctttgaaatccctctgtctatatcaccccatcctgtttttgacttctaatctcctttaccaaatactatgtagcaatattttgtgagtcat

SEQ ID NO: 12641 - DNA, 201 bp, Homo sapiens
tctttagataatcaaaagcatgtgtccccacaccttgccagttccaccaagggatcctcagcacccatctcagaggggtctgatgtgacatctgaaaggcracgttgctgcctccccagccaaggggggtgcttgtaatttctcctgcattatctttgaggtatcactcaccaaagcaatgaagggtaaccattccgaacc

SEQ ID NO: 12642 - DNA, 201 bp, Homo sapiens
ttaaaataaagggagaggggacagagtcagttctaataaactgtagagatatatatatatatatatatatatatatatagcattttaagcccaacttgaaraaagttgctgaattagcatcagaaagccacagaaaaatgcatagagggagagagataggcttgtgattcacattaatattttgggcaatggaatacagtg

SEQ ID NO: 12643 - DNA, 201 bp, Homo sapiens
atttaaaagctcgtggatccccaaggacccagggaacttttaccttgaatatccttttgaacagagaagagtaacagatgtgaaatgaggaagtggaacawtgtctgtactgtaagagcagacgagcaaaatgatgtatggtggtactttcattcactcatttccttcaagtgggtgatccccataatgaaaggtttcttc

SEQ ID NO: 12644 - DNA, 201 bp, Homo sapiens
ggtagcatggacgtacatgtgacatttcttcccaaatagacccctccaaagaatcacaatgtcaggtggacttgatggtatggccagaggggtccttgtawggatcctgaaacccccagggcccccagatcctacacaaagtagatgatccaggttgccaggtgcatcctgtaaaggttgactttcagtctcctttggggc

SEQ ID NO: 12645 - DNA, 201 bp, Homo sapiens
gtttagcgggtcctacaccatctggctgtcctgtctctctgacttcatatgacattctacatctcactttctctgtttcagccacattgtcccctttgctrttcctcaaacgtgctaggcatggtccctccttaaggcctttgcactagcttcttctgcctggatcaccatactctccaaataatcccaaagctcactgac

SEQ ID NO: 12646 - DNA, 201 bp, Homo sapiens
ccagcactttgggaggctgaggcgggtggatcacttaaggccaggagttcaagaccagcctggccaacatggcaaaaccccgtttctactaaaaatacaaraacttagctgggcatgggagcgggcacttgtagtcccaactacttgagaggctgaggctggtgaatcacttgaagccaggaggcagaggttgcagtggcc

SEQ ID NO: 12647 - DNA, 201 bp, Homo sapiens
tgaaccaaggggttttccatgactttctgtgaccatcaacattcaactgatgcctgtttcctatacacttcagagagagccagagcttcacaagccaattracacattcctaagaatcaaaacttagtttctgggctgggcgccatggctcacccctgtaatcccagcactttgggaggctgaggcgggtggatcacttaa

SEQ ID NO: 12648 - DNA, 201 bp, Homo sapiens
ccctgaaccaaggggttttccatgactttctgtgaccatcaacattcaactgatgcctgtttcctatacacttcagagagagccagagcttcacaagccawttaacacattcctaagaatcaaaacttagtttctgggctgggcgccatggctcacccctgtaatcccagcactttgggaggctgaggcgggtggatcact

SEQ ID NO: 12649 - DNA, 201 bp, Homo sapiens
agattattcaaacttctcttattatttttctaaccctttaaagaggatttccaaagcttagctttacttgaagtagagtggttcccatccattgatattcrggggaagtagttcatctgaaatgaggccagtattgagacttcaacatatataaacttaattatttcaggaggaatgtccgtgggaaaaaaaagagctacc

SEQ ID NO: 12650 - DNA, 201 bp, Homo sapiens
gccctgaaccaaggggttttccatgactttctgtgaccatcaacattcaactgatgcctgtttcctatacacttcagagagagccagagcttcacaagccwattaacacattcctaagaatcaaaacttagtttctgggctgggcgccatggctcacccctgtaatcccagcactttgggaggctgaggcgggtggatcac

SEQ ID NO: 12651 - DNA, 201 bp, Homo sapiens
tatctggaagtagtattgaagttttcttacaattgagcattttttctagaagggtgatggtactgcattggtaagactatctaaacctgtgctgtcagcayagtagccactaaccacatgtggctatttaaatttaagtaaaaattcagtttctctataactgtagccacacttcaattgctgaatacccagatgtggcca

SEQ ID NO: 12652 - DNA, 201 bp, Homo sapiens
agccctgaaccaaggggttttccatgactttctgtgaccatcaacattcaactgatgcctgtttcctatacacttcagagagagccagagcttcacaagccaattaacacattcctaagaatcaaaacttagtttctgggctgggcgccatggctcacccctgtaatcccagcactttgggaggctgaggcgggtggatca

SEQ ID NO: 12653 - DNA, 201 bp, Homo sapiens
ctatcatgggtcccaggacagtttctgctccagactgtctgaggagcttagggaactctgaaaggaaaccttttaagtctgcttttcttgagaatgctaamcctgcaaaacttggccagacatcacattgggtctccctctgtggtgactcagaaatctcaaggagagcaggaaaatctagaggaacactcataatgttga

SEQ ID NO: 12654 - DNA, 201 bp, Homo sapiens
agagtctcactatgtcacccaggctggtctcaaactcctggcctcaagcagtcctcttgctgtagccttccagtgcttcgggattataggcatgagccacygtcctccgccaaagaggtcctgctctaaacacttgctaagaatacattgacattgaatttttcagtcattaatgttatgatgcttatgaaatcgtgacat

SEQ ID NO: 12655 - DNA, 201 bp, Homo sapiens
tctgctctatcatgggtcccaggacagtttctgctccagactgtctgaggagcttagggaactctgaaaggaaaccttttaagtctgcttttcttgagaaygctaaccctgcaaaacttggccagacatcacattgggtctccctctgtggtgactcagaaatctcaaggagagcaggaaaatctagaggaacactcataa

SEQ ID NO: 12656 - DNA, 201 bp, Homo sapiens
tttatttaatttttgtacaggcagagtctcactatgtcacccaggctggtctcaaactcctggcctcaagcagtcctcttgctgtagccttccagtgcttygggattataggcatgagccaccgtcctccgccaaagaggtcctgctctaaacacttgctaagaatacattgacattgaatttttcagtcattaatgttat

SEQ ID NO: 12657 - DNA, 201 bp, Homo sapiens; identical to SEQ ID NO: 4349

SEQ ID NO: 12658 - DNA, 201 bp, Homo sapiens
gaggcagacaacagacaagttactggtctaagtggtagaataaaaatataaccccagctccagagcctctgcactcagccatcatcgtgtactgccccgckgtgaatttcatctaggatatgccaagacctgctgatttttcgtcacttgccttttcttattaatgtctgttccttggcgacaatggcatctgctgagccc

SEQ ID NO: 12659 - DNA, 201 bp, Homo sapiens; identical to SEQ ID NO: 4350

SEQ ID NO: 12660 - DNA, 201 bp, Homo sapiens
ggaagattttcttccccacccaacacacccctgaatcctgccaaatgtgaggtgtgggagtgataatatcaacgcaataataccaatagtaaccacaatasgttcttaagaaactggaaaagggtactgagaagttttttccaccttttttgtatgcctagtttgctacattgctcctaagttcctagacttctgggcagc

SEQ ID NO: 12661 - DNA, 201 bp, Homo sapiens; identical to SEQ ID NO: 4351

SEQ ID NO: 12662 - DNA, 201 bp, Homo sapiens
tcttatttgtcttcatcgctataatatgaggtcactggctcctgagctagtgaggaaatccaagttctaaaaaacattccttccttatatttgttttttttgtgtgtgtgtgtgtgtgtgatctttttgataagaatagttgtcaaggctgggcgtggtggctcacgcctataatcccagcacttttgggaggcagaggta

SEQ ID NO: 12663 - DNA, 201 bp, Homo sapiens
tatgcaggagaaaagaggagggatggataaaacttttccaactttaaaataaaaattattttctgaatgtgctttaaatgcatctgctacatgtactcaaraatgttgagtctgacccctcaaatttattcattaagttttgctacatcagactacacaaaggtcgggaaatcatgggtccaaaataaaatcagatttgag

SEQ ID NO: 12664 - DNA, 201 bp, Homo sapiens
attcttatttgtcttcatcgctataatatgaggtcactggctcctgagctagtgaggaaatccaagttctaaaaaacattccttccttatatttgttttttttgtgtgtgtgtgtgtgtgtgatctttttgataagaatagttgtcaaggctgggcgtggtggctcacgcctataatcccagcacttttgggaggcagagg

SEQ ID NO: 12665 - DNA, 201 bp, Homo sapiens
tggggacactacagatttggataaaagacattaatgatgatgtttcctgtcctatcactaggcagttctatgaaaaggcactccttttttcaaaattccarcttataatgtaagatttgatgggtttgttcaattcctactaagtgagcagtaccatgattttaggtctgtaagtagcttaaagttaaacttagaactttg

SEQ ID NO: 12666 - DNA, 201 bp, Homo sapiens
tattcttatttgtcttcatcgctataatatgaggtcactggctcctgagctagtgaggaaatccaagttctaaaaaacattccttccttatatttgttttttttgtgtgtgtgtgtgtgtgtgatctttttgataagaatagttgtcaaggctgggcgtggtggctcacgcctataatcccagcacttttgggaggcagag

SEQ ID NO: 12667 - DNA, 201 bp, Homo sapiens
tggctagaaggtcaaatgcctggtgctttgaggacctgaacagtttctgttccatgaacataccggactcaggagttcttttgctccagatactaagttaktagaacagtgtttcccaactatggtgaaagaaaatcaataatcagaattttttagtagttttcagtatttcaaaagatctagttcgtttcacagttcaac

SEQ ID NO: 12668 - DNA, 201 bp, Homo sapiens
ggagttggagaccaggctgggcaatataatgggactccatctctacaaaaaaatatttcgaaaaagccagacgtggcggtgcacacctgtagtcttatctrcttgagaggatggcttgggcccaggaggtcaagactgtgtgagccatgattataccatgtactccagcctggacaacagagtgagaccctgtctcaaata

SEQ ID NO: 12669 - DNA, 201 bp, Homo sapiens
gacttgtatctagcaagcgttaagaagagtccacaatgttcgataatttttattttgttttaatatgtgttctatctacttttcattttttatttttattyttttgagatgtaatctcactctgtcacccaggctggagtgcagtggtgagatcttgactcactgcaacctccgtctcccaggttcaagcaattctcctgc

SEQ ID NO: 12670 - DNA, 201 bp, Homo sapiens
aaagatggaaagttcttttgaaagatggaaaacattaatttaaaagagttcaagagtttaagccaaaagagccagtcaggttatggagcaaaaaaactctkcaagattaccacaactgtacttctctttgaatagattttctactgccagttatatgaaatggatataaatcctcccattccaacaactcaggaacttact

SEQ ID NO: 12671 - DNA, 201 bp, Homo sapiens
aatgtttattatcacaaacaaagaaaaaattaaaatgagacacagtgttatgcccacgaatagtcattttaatgaccaagctccatcctaccaatgcttcmctagttgacttttttttttttaagcaatttaacaatagatgtcaagagcagggaaaaaaggctgggtgtgctggctcacgcctgtaatcccagcactttg

SEQ ID NO: 12672 - DNA, 201 bp, Homo sapiens
attacagaaatgttttttgttgttgttgttggttttgttttatttttttgagacggagtctcgctcttttgccctggccggactgcagtgggtgctatctyggctcactgcaagctccgcctcccaggttcatgccattctcctgcctcagcctcctgagtagctgggactacaggcgcccgccaccgcacctggctaatt

SEQ ID NO: 12673 - DNA, 201 bp, Homo sapiens
tgctgaccagagacagcagcagctgtgaggctcatctgtttcccaacacattttctagactgtgaagtccccttggaggaggactgtccatgaattccaarcatggaaggaatctgaccattctttttcattttaaaaccacattacctttgtcctagccttcagctttcaaggccatttcacttggcatttttcattgat

SEQ ID NO: 12674 - DNA, 201 bp, Homo sapiens
aaatatagttagaaagaaagaataagacctagtatttgatagcacaacagggtgactgtagtcaataagaaattaattgtacattttaaaataactataasagtgtaattggattgtttaattggagtataattggattgaataactaaaaggataaatattataggggacagataccctgttctccatgatgtgattatt

SEQ ID NO: 12675 - DNA, 201 bp, Homo sapiens
atctgaaaacactcatgtatatacattctgaaaattttcttatttttaaatttcttctccattttccctgttctctctttgtgaaacttgtattattacawtaataaaactcctaattgatgttctcacttttttcttttgttgcctatttttattgtactttctttagacctcttcacctttgtcttccagaccttctgc

SEQ ID NO: 12676 - DNA, 201 bp, Homo sapiens
acctcaaactcctgggctcaagggatcctccaacctcagcctcctgagtagctgggactataggcatgcaccaccatacctggctaattttttttttttttagagacggggtcttgctatgttgcccaggctggtcttgaactcctgggctcaagcagtcttcctgccttggcatcccaaggtgctaggattacagatgta

SEQ ID NO: 12677 - DNA, 201 bp, Homo sapiens
aaaaagaaggtacacgttttaaattttgtccaatttcttggtctttttagtcagaacaaaggaggaagacaccagctgaattcagttctagggttttgctrggtactacatcatgggcaactactgtgcttttgctttggatctcaacctcaaactcctgggctcaagggatcctccaacctcagcctcctgagtagctgg

SEQ ID NO: 12678 - DNA, 201 bp, Homo sapiens
aacaacttcgcgttcattaagaggatgacagcttaagcacaagtttaaagaacatcaggatttgcttgtgagtgagataaaatatgaatatatataaatayataaatataaatataagataaaatataaaataagatgcagaaaaaatggacttaaatgtatgaggcccaaataaataggttactctcccttcatgaggaa

SEQ ID NO: 12679 - DNA, 201 bp, Homo sapiens
ggggtaatatctacagaatgtagacaaaacaacttcgcgttcattaagaggatgacagcttaagcacaagtttaaagaacatcaggatttgcttgtgagtkagataaaatatgaatatatataaatacataaatataaatataagataaaatataaaataagatgcagaaaaaatggacttaaatgtatgaggcccaaata

SEQ ID NO: 12680 - DNA, 201 bp, Homo sapiens
tgtgtgtgtgtgtgtgtctgtgtgtgtatttggagatggagtctcgctctgtcactcaggctggagtgtaatgccgcgatctcggctcactgcaacctccrcctcctgggttcaagtgattcttttgcctcagcctcccaagtagctgggactacagtcacgagccaccatgcctggctaatttttgtatttttagtaaag

SEQ ID NO: 12681 - DNA, 201 bp, Homo sapiens
attatttcaggaggaatgtccgtgggaaaaaaaagagctaccgtgacttttccctccactaatcaacagatatttccatatgataataatatttaaattayatgtatttgctcagcactttacactttacaaggcacttttacagacattgcctaaatatttattctcataacagctggattattatctacaggtgatgaa

SEQ ID NO: 12682 - DNA, 201 bp, Homo sapiens
agtagtctgccttcatcacccttctcccagccttcacccttcccagtctccattgtctgtccacatggaagaaaatctctctgggcttcattaggatgagragatgagagttttattctgagcctagctgtcctttactatgacattatcatagttcatagtatccaaatgtgactcacagggaattcactcaacagttac

SEQ ID NO: 12683 - DNA, 201 bp, Homo sapiens; identical to SEQ ID NO: 4364

SEQ ID NO: 12684 - DNA, 201 bp, Homo sapiens; identical to SEQ ID NO: 4365

SEQ ID NO: 12685 - DNA, 201 bp, Homo sapiens
tctcgctctgtcactcaggctggagtgtaatgccgcgatctcggctcactgcaacctccgcctcctgggttcaagtgattcttttgcctcagcctcccaartagctgggactacagtcacgagccaccatgcctggctaatttttgtatttttagtaaagatggggttttgccatggtggccaggctggtctcaaactcct

SEQ ID NO: 12686 - DNA, 201 bp, Homo sapiens
cgcgatctcggctcactgcaacctccgcctcctgggttcaagtgattcttttgcctcagcctcccaagtagctgggactacagtcacgagccaccatgccyggctaatttttgtatttttagtaaagatggggttttgccatggtggccaggctggtctcaaactcctgacctcaagtgatccgcccaccttggcctccca

SEQ ID NO: 12687 - DNA, 201 bp, Homo sapiens
ttttgcctcagcctcccaagtagctgggactacagtcacgagccaccatgcctggctaatttttgtatttttagtaaagatggggttttgccatggtggcyaggctggtctcaaactcctgacctcaagtgatccgcccaccttggcctcccaaagtgctagaattacaggcatgagccactgcgtccagcctgaacatgc

SEQ ID NO: 12688 - DNA, 201 bp, Homo sapiens
gtttcttgaaacttaggattttcaaacttcctggatcgtaagaaaaagaaaacgtccaagggggatgaatgagcaagtctgctgcattcctttgcacaccsctttcatcaaggaaactttgaatacctttactttttctattggctgcccaagagtttgtatctcctaaaacaaagtttgtaaaccagtatcctcgattga

SEQ ID NO: 12689 - DNA, 201 bp, Homo sapiens
ccttacctcattttttaaaaatgtagagggcaatcattattcaggtttaaaaataaatctgacaagttctttaagagataccaagtggaatctgcaaggcmcagacaagagctccacttcttaaacaatatgtgtgtggaggctgtcaaagggtattgcaattactgagctccagttagaaattcaggccatctagagtta

SEQ ID NO: 12690 - DNA, 201 bp, Homo sapiens
tgcattttctgcatcaaacataaaatttcataaaattttcgtgtttgacttttgccctaaaggaccctttgtagcaaaaaaaaaaaaaaaaaaaaaaaaarggaaggaagaaagaaagggagacggggaagaaggaagggagaagggagggaggaagggagggaggatgggagggaggatgggagggaggatgggagggag

SEQ ID NO: 12691 - DNA, 201 bp, Homo sapiens
gggagggaggaagggagggaggatgggagggaggatgggagggaggatgggagggaggaagggagggagacatggaagaagggggaagggaggcagaaggragggaggggggagggaggaagggagggactttattgatttagtctaggggggttgcctgtgattctgaagcatgaaaattaagtgttaaagcttttctaa

SEQ ID NO: 12692 - DNA, 201 bp, Homo sapiens
acaccatcacactcagctaagtttttgggtttttttctgtatttttgtagagatgaaatctaactatgttgcccaggctggtattgaactcctgggctcargcgatcttcctgcctcagcctccaaaagtgctgggagtacagatgtgagccaccatgcccagccccctataaatatttcttaactgacaacatagaggat

SEQ ID NO: 12693 - DNA, 201 bp, Homo sapiens
gcattgaattgaacaaacaaaagcctttatattttgcggaggacaataaatattccctagaacacccaattactgttgaactagaaagcaaaagaaattcrtaagagaatggcacctttcgccgggcacggtggctcatgcctgtaatcccagcattttgggaggccgaggcgggcggatcacgaggacagtagatggaga

SEQ ID NO: 12694 - DNA, 201 bp, Homo sapiens
acttgaccctaggagttcgaggctgcagtgagctatgatcataccactgcactctagcctgggcaacagagagaaaaaagaaaattttttaaaataaattwaaaaaaaaactgctgcaccctattaacaattattgtggcaggtttttagtggcaaagaattctgaagtactttgttgagtgctcccacctaggaaactag

SEQ ID NO: 12695 - DNA, 201 bp, Homo sapiens
aatttctaggaaattcagattccttctgagaaaagtgaggaggcaggggacaggacaatttaaagatgccaaagaatcctttattcttcaaaatttcaaartctttcaatgctacttactaaagtagaaccactttaatggcgttggtgtttacctcatttcctcttcactcattaacagcagtattagtgggtcttttta

SEQ ID NO: 12696 - DNA, 201 bp, Homo sapiens
tttcatcttctgtgtctatcacaccagcatagaattaccaagagcactgtttgacagaaaacatgaaatctcaggcaaatgatggagatgtttgtgattgygtttcattccttttgattttgaccttttcattttggagtgctgactgacatggaaatctctgaagcacaattttccagtgaacttggcccgcttggaaac

SEQ ID NO: 12697 - DNA, 201 bp, Homo sapiens
gtaaaagtgcaggtaaatattttagacttcatgtgccatatagtctctgttgcaactactcaactctgacattggttcaaaaaaacaaagacaatctctayattcaaactcctacccatgaattccaacccagcatatatgtcaaaggccacctattccttgaccatattttcagtggccttgcccacttccctcccattt

SEQ ID NO: 12698 - DNA, 201 bp, Homo sapiens
aaaagtgcaggtaaatattttagacttcatgtgccatatagtctctgttgcaactactcaactctgacattggttcaaaaaaacaaagacaatctctataytcaaactcctacccatgaattccaacccagcatatatgtcaaaggccacctattccttgaccatattttcagtggccttgcccacttccctcccatttta

SEQ ID NO: 12699 - DNA, 201 bp, Homo sapiens
gttcaaaaaaacaaagacaatctctatattcaaactcctacccatgaattccaacccagcatatatgtcaaaggccacctattccttgaccatattttcartggccttgcccacttccctcccattttacctgcatgtcaaactgggatcatctatctctgtaccttcacctggatggctgagctctggtggagagaattg

SEQ ID NO: 12700 - DNA, 201 bp, Homo sapiens
tattaagttccatgagggcaaaaaccttctctttttcaaggtcatatccccgtccctagcgcactaccaggcatgtggtagatagtccataaatacacttygagtgggtaattctggtccatgcagtacatctatcccagcttaggcttcacaatttcgtcatgtcaagaatcaaaggttttgttgcaattatttccttgg

SEQ ID NO: 12701 - DNA, 201 bp, Homo sapiens
gcatttatatgttatttatgtagattatttatacagatttatatacatgaagaatttgtttcttacattttacctttgacagaaatgaatgtttcagattytatttagattttttaacctatcaatcttgcaaataaataattttcattagacattcattctcatgtcactcaaaacagttccacaggttttcaaactaca

SEQ ID NO: 12702 - DNA, 201 bp, Homo sapiens
cattctcatgtcactcaaaacagttccacaggttttcaaactacatatggttccacctacatttacttccaaaataacccttgaagtatactacaaccttwaaaaaatgacagaaagcagtccatttagcattgaaggattaattcaggtgaacagaccataattactgtattaaaattcacttaaccatttggtgattct

SEQ ID NO: 12703 - DNA, 201 bp, Homo sapiens
tctgattctcctctcctccaaaaaccttctctttccaaatcttctccatgtcaacaaaagacaaccctccttccagctgttcaggaaaaaaaccttgaagycattctcgatccctctttttctcacaccccaaatccagttcatccagcaaatccagctggcaccaccttgaatgtctccaaatctgaccacttcacccca

SEQ ID NO: 12704 - DNA, 201 bp, Homo sapiens
cccatctcagcctcccgagtagctgggactacaggcatgcatcaccatgcccagctaattttttagttttctgtagagacagggtctcactttgttgccartgctggtctcaaccttctggactcaagtgatcctcccccttcggcctcccaaagtgctgggattacaggcatgagccaccatccctggcctgttgaagac

SEQ ID NO: 12705 - DNA, 201 bp, Homo sapiens
ccctcaaggtaggcctgggccccctggaacaggtgactctggtttccttgacttccacttaatgtttctttcatgggctttcctcttaaaaagtagtgcargctagggccaggcgcagtggcacacataagtgattaaaaatcttctggccactaaaaaacagaaattaattttagtaatatacttaacccaatatccaaa

SEQ ID NO: 12706 - DNA, 201 bp, Homo sapiens
caagataaattcgtctctagctaattgacatgtggccagtttgaatttgaacatgctataaatgtaagatacacatcagcttttgaagacttaagcaaaamcaaagaatataaaacatctttttgtgagagagtgtctcagtcacccaggctggagtgcagtggcgtgatgtcctgcttccaggttcaaacgattctcctg

SEQ ID NO: 12707 - DNA, 201 bp, Homo sapiens
ccttttttttttaattaattaatttttttagacagagtctcgctctgtcaccaagctggagtgcagtggcgcgatctgggctcactgcaacctccgcctcstgggttcaagcgattctcctacctcagcctccggagtaactgggactacaggcgcgtgccaccacaccaagctaatttttttgtgtatgtctttagtaga

SEQ ID NO: 12708 - DNA, 201 bp, Homo sapiens
tcctttggaagaaggacattgaggcccagagagagaacagaacgtccagccacacagcaaatccgtgatgaagttgggactggagtatgggtctcctgagyctcagcccaggactctatccctcttcccgagtcctcggagttcccggatggagtcacatttgttcacggccagggaggaaggtttgatggaggcctgcag

SEQ ID NO: 12709 - DNA, 201 bp, Homo sapiens; identical to SEQ ID NO: 866

SEQ ID NO: 12710 - DNA, 201 bp, Homo sapiens
acgcctgtaattgcagcactttgggaggccgaggcgggtggatcacctgagggtcaggagttcgagaacagcctggccaacatgatgaaatcccgtctctwctaaaaatacaaaaattagctggacatgctggcacacgcctgtaatcccagctacttgggaggctgaggcaggagaatggcttgaacccgggaggcagag

SEQ ID NO: 12711 - DNA, 201 bp, Homo sapiens
accaacgctcaattagcacaacagtttacaatcttctctacccacagcctgatgcgaggctctgggactagactatttagccaacagttcttgcaaaattmactgacttataagtaaatagtaatttcaacacctcactgctaatgctgtaacaactctgcagacctagggagcaagtacggtttgcagagcactgggaag

SEQ ID NO: 12712 - DNA, 201 bp, Homo sapiens
tcacgcctgtaattgcagcactttgggaggccgaggcgggtggatcacctgagggtcaggagttcgagaacagcctggccaacatgatgaaatcccgtctytactaaaaatacaaaaattagctggacatgctggcacacgcctgtaatcccagctacttgggaggctgaggcaggagaatggcttgaacccgggaggcag

SEQ ID NO: 12713 - DNA, 201 bp, Homo sapiens
gccaactccccgcgtgggccgggggctgtctggggatatgcgcatgcgcgggcgtgcctcgcggcttgagggcgcgcggggcgtgggtggctgcgcgcgcsgggggcgcacgtggggcctgaggggcgggggcggtgccgggagtcccgccacgtcagtctccggccctgagccaatcccgcgcccggcctgccgcgaggg

SEQ ID NO: 12714 - DNA, 201 bp, Homo sapiens
gggaagccatcggacgtcggcggtgaggtacgtgcagcggcggccggtgggcgagactatttgagagtgtgcgggccgggatgttctcggcctgtggggamatcacgccaactccccgcgtgggccgggggctgtctggggatatgcgcatgcgcgggcgtgcctcgcggcttgagggcgcgcggggcgtgggtggctgcg

SEQ ID NO: 12715 - DNA, 201 bp, Homo sapiens
cagaggtggggaagccatcggacgtcggcggtgaggtacgtgcagcggcggccggtgggcgagactatttgagagtgtgcgggccgggatgttctcggccygtggggaaatcacgccaactccccgcgtgggccgggggctgtctggggatatgcgcatgcgcgggcgtgcctcgcggcttgagggcgcgcggggcgtggg

SEQ ID NO: 12716 - DNA, 201 bp, Homo sapiens; identical to SEQ ID NO: 871

SEQ ID NO: 12717 - DNA, 201 bp, Homo sapiens
gggtaagggtcagggcagctcaggagaccctagacctgcatagtgatccccccaccaggaaggccccacaagatgctcacctgccctccctatccctgtcyccagctggaggagcaccggaattcacagaagcagatgaagctcctacagaaaaagcagagccagctggtgcaagagaaggaccacctgcgcggtgagcac

SEQ ID NO: 12718 - DNA, 201 bp, Homo sapiens
tggtgaggagagggagtttggacttgacgttctctgggccagtctgttctgccaggattcaaaggaaaacggtacttctcagagcagcaagtcactctagkctaatcaaagccagggatgtgggggccacggcatagagagatgcaggagttaccagcacaaagccttctgggttttggagcaactggagcttggcatggg

SEQ ID NO: 12719 - DNA, 201 bp, Homo sapiens
ggggtgcagtggcacgatctcggctcgctgcaagctccgccttctgggttcatgccattctcctgcctcagcctcccgagtagctgggtctacaggcgccygccaccatgctaggctatttttttttttttttttttttttagtagagacggggtttcaccgtgttagccaggatggtctcgatctcttgacctcgtgatc

SEQ ID NO: 12720 - DNA, 201 bp, Homo sapiens; identical to SEQ ID NO: 7714

SEQ ID NO: 12721 - DNA, 201 bp, Homo sapiens; identical to SEQ ID NO: 7715

SEQ ID NO: 12722 - DNA, 201 bp, Homo sapiens
caggcccaggagatgctaaaggaggcagaagagcggcaccagcgggagaaggattttgtgaggctcaggccccagggttggggtgggggtgtgggaggagrcaggctgggctctggctcagctcatagccgggttatatgggagaagtctggccagaccaggcacagattccttgagtaccagtctgagagcaggaagcct

SEQ ID NO: 12723 - DNA, 201 bp, Homo sapiens; identical to SEQ ID NO: 7716

SEQ ID NO: 12724 - DNA, 201 bp, Homo sapiens; identical to SEQ ID NO: 7717

SEQ ID NO: 12725 - DNA, 201 bp, Homo sapiens; identical to SEQ ID NO: 7718

SEQ ID NO: 12726 - DNA, 201 bp, Homo sapiens
ccaagctccagcaggcccaggagatgctaaaggaggcagaagagcggcaccagcgggagaaggattttgtgaggctcaggccccagggttggggtgggggkgtgggaggagacaggctgggctctggctcagctcatagccgggttatatgggagaagtctggccagaccaggcacagattccttgagtaccagtctgaga

SEQ ID NO: 12727 - DNA, 201 bp, Homo sapiens
taccggtcccggtgggagagcagcaacaaggccctgcttgagatggctgaggaggtgggctgtctgtgatctgcagccagggtgggggtgtgcacttagcrcatatcaggccctttcctgtatgttctacccatcagtgacacagctagcatgaggtagaggtgagatttgcacacaatgtccaagtccaaagttaatgct

SEQ ID NO: 12728 - DNA, 201 bp, Homo sapiens
gcagcagccaggctcctcggaagccggagggtgtgtgccagctctgcgttgccagcgggcagggggaggagctgtggggtcggcctcgcttctggacttasaggccgaggccaggttgtccgggaggaggagatgtagaatgagaggacagtgctgggggccgcggtcccccctgcgctctggcgagttggcggagctgcc

SEQ ID NO: 12729 - DNA, 201 bp, Homo sapiens
gggagtccatcatatcagattgagatggggggctgggcaaagtgccctggtctgtggctgtggggctaccctgagaaagggagcgcctgacaagccgactrctcccaccatctttgttgcagcatatcgacaaagtcttcaaacacaaggacctacaacagcagctggtggatgccaagctccagcaggcccaggagatgc

SEQ ID NO: 12730 - DNA, 201 bp, Homo sapiens
aagctccagcaggcccaggagatgctaaaggaggcagaagagcggcaccagcgggagaaggattttgtgaggctcaggccccagggttggggtgggggtgkgggaggagacaggctgggctctggctcagctcatagccgggttatatgggagaagtctggccagaccaggcacagattccttgagtaccagtctgagagc

SEQ ID NO: 12731 - DNA, 201 bp, Homo sapiens
tttttttttttttttttttttttaaataaagaaaagccagaaatctagagttatgtgagaactctagattttttcatagttagcagctaaaatggtaagakccaaacaaaacccatccgtgggttggatttggcacacatgcctgcgaattgcagtctccatgctgatctcttgggcccttctggggaggcagagggaagg

SEQ ID NO: 12732 - DNA, 201 bp, Homo sapiens; identical to SEQ ID NO: 865

SEQ ID NO: 12733 - DNA, 201 bp, Homo sapiens; identical to SEQ ID NO: 867

SEQ ID NO: 12734 - DNA, 201 bp, Homo sapiens
aggtagttaggtgggctcagaggacttcatttgtagctcagaaatgtattgcttttgaggaggtaggaacagaagagtttgaaaatcaacataaaggcaarataaaagtcaccctaagtctcctactttccaggcttagcattttggattatatccttccaaatatatagctttgctttgttttaaggaaaaatagtatct

SEQ ID NO: 12735 - DNA, 201 bp, Homo sapiens
ggaacagaagagtttgaaaatcaacataaaggcaaaataaaagtcaccctaagtctcctactttccaggcttagcattttggattatatccttccaaatayatagctttgctttgttttaaggaaaaatagtatctcaatagaattactggtcagagagtcaaggacgggtctgagtgtgttgaccagagtgcctcccaga

SEQ ID NO: 12736 - DNA, 201 bp, Homo sapiens
tagaaacggtttcaccatgttggccaggctggtcttgaactcctgacctcaagtgatctgcctgcctcagcctcccaaagtgctgggattacaggcatgakccaccactcccggcctcacttttttacattgattccgtgttgaaattgtaatgttttggatattaggttaaatacatatattactaaaattaatttcacc

SEQ ID NO: 12737 - DNA, 201 bp, Homo sapiens
taaagttgtacttgtttctagcaaactagaaggaaaagataggaaagcctggcactactaacctcacctctcatacacctctttgaaggccccagctcttytgttcaggcctctcttctcccctagactcactcagcttggtatccatcatcttgagcattcttcagtagattcatctagggttcagattccagactctca

SEQ ID NO: 12738 - DNA, 201 bp, Homo sapiens; identical to SEQ ID NO: 868

SEQ ID NO: 12739 - DNA, 201 bp, Homo sapiens; identical to SEQ ID NO: 878

SEQ ID NO: 12740 - DNA, 201 bp, Homo sapiens; identical to SEQ ID NO: 7726

SEQ ID NO: 12741 - DNA, 201 bp, Homo sapiens; identical to SEQ ID NO: 869

SEQ ID NO: 12742 - DNA, 201 bp, Homo sapiens; identical to SEQ ID NO: 7730

SEQ ID NO: 12743 - DNA, 201 bp, Homo sapiens
tccttggggatgcacatgtctagtctttgcctagatatggcaagtctttgccaactgagctaggctgttatgttcttagaggcattgtttttgcccattcytcccatttacaagagaatcagggacacagaagtgagggcttccagccccataggtgatcaatcctggggtcagagatttgagtgtgtttattgcttgcct

SEQ ID NO: 12744 - DNA, 201 bp, Homo sapiens; identical to SEQ ID NO: 7728

SEQ ID NO: 12745 - DNA, 201 bp, Homo sapiens; identical to SEQ ID NO: 7731

SEQ ID NO: 12746 - DNA, 201 bp, Homo sapiens
acctgtgatcagtgatggactccagagactgtgtccactgattccttgctgctcctgccactcaaaaggcagaatttatcaggctgggcgtggtggctcaygcctgtaatcccaacactttgggaggccaaagcgggcggatcacctgaggtcaggagttcaagaccagcctggccaacatggtgaaaccctgtctctact

SEQ ID NO: 12747 - DNA, 201 bp, Homo sapiens; identical to SEQ ID NO: 873

SEQ ID NO: 12748 - DNA, 201 bp, Homo sapiens
cccgcctcggcctcccaaagtgctgggattacaggcttgagccaccacgcctggcctatttatttatttattcagagtcagagtctcgctctgtcaccagrctggagtgcagtggcgcgatctcggctcattgcaacctccacctcccaggttcaagcgagtctcctgcctcagcctcccgagtagctgggattacaggtg

SEQ ID NO: 12749 - DNA, 201 bp, Homo sapiens; identical to SEQ ID NO: 872

SEQ ID NO: 12750 - DNA, 201 bp, Homo sapiens
gtctacaggcgcccgccaccatgctaggctatttttttttttttttttttttttagtagagacggggtttcaccgtgttagccaggatggtctcgatctcytgacctcgtgatccgcccgcctcggcctcccaaagtgctgggattacaggcttgagccaccacgcctggcctatttatttatttattcagagtcagagtc

SEQ ID NO: 12751 - DNA, 201 bp, Homo sapiens
agctccagcaggcccaggagatgctaaaggaggcagaagagcggcaccagcgggagaaggattttgtgaggctcaggccccagggttggggtgggggtgtgggaggagacaggctgggctctggctcagctcatagccgggttatatgggagaagtctggccagaccaggcacagattccttgagtaccagtctgagagca

SEQ ID NO: 12752 - DNA, 201 bp, Homo sapiens
tgggtgagcagagggcggctctttgtgaagctggtgaggagagggagtttggacttgacgttctctgggccagtctgttctgccaggattcaaaggaaaayggtacttctcagagcagcaagtcactctagtctaatcaaagccagggatgtgggggccacggcatagagagatgcaggagttaccagcacaaagccttct

SEQ ID NO: 12753 - DNA, 201 bp, Homo sapiens
acccaggaggcggaggttgcagtgagccaagatcatgccactgcactccagcttgggtgacagtgcgagactccatctcaaaaaaaaaaaaaaaaaaaaaatccacatcttcagctgggcgcggtggctcatgcctgtaatcctagcactttgggaggctgaggcgggcagatcacttgaggttaggggttcaaaaccagc

SEQ ID NO: 12754 - DNA, 201 bp, Homo sapiens; identical to SEQ ID NO: 7741

SEQ ID NO: 12755 - DNA, 201 bp, Homo sapiens
acacagagaagtttgaggagttccagaacacactttccaaaagcagcgaggtattcaccacattcaagcaggagatggaaaaggtaactgtggtccaggcyaggcatggctgctggggcataagctgcttcattcaaaattgttgggcctgccttcaggaagctcccatctggggtgtctcaagggcagggctgttaggaa

SEQ ID NO: 12756 - DNA, 201 bp, Homo sapiens
cagtatgttttctgtttgagctttttcattcttttgttaagccaacaagttgagaatttggccctgctgggatccatgtagtgggcactagctgctctttrgccaaggccttcataaatgattcagtctctcattatctgtcctctagccccacaccctgatttagaccgtggcaaaggaagaacttgaggtcaagaccaa

SEQ ID NO: 12757 - DNA, 201 bp, Homo sapiens
tggaagaataggccttaggagatccgacttgcttcagaatggcacttagcacttacatgtgtgcatgtgtgcctgcattttttcttccttttttttttttkggggacggagtcttgctctgtggcccatcgcccaggctggagtgcagtggcgcgatcatagctcaccacaacctccgcctcccaggttcaaatgactcct

SEQ ID NO: 12758 - DNA, 201 bp, Homo sapiens; identical to SEQ ID NO: 870

SEQ ID NO: 12759 - DNA, 201 bp, Homo sapiens
tggctgtgtcctggctgctatgacgccttggttgagcctttgttctctccggacctgcacagtacctatgtggtggtgaccaggtagttaggtgggctcasaggacttcatttgtagctcagaaatgtattgcttttgaggaggtaggaacagaagagtttgaaaatcaacataaaggcaaaataaaagtcaccctaagtc

SEQ ID NO: 12760 - DNA, 201 bp, Homo sapiens; identical to SEQ ID NO: 7745

SEQ ID NO: 12761 - DNA, 201 bp, Homo sapiens
ctgcgcgaggaggtaagggtatcacggacagcagtcatggcccagaaattgtgaggttttgagtgtgtgctaggcactgggacagtaccttttcaggcttyatcccattctccctttcttcctcctcctcctccttgggaggagagtaatgttattcctcatagataaaaaacaggtgtggagaagagactcacttacagc

SEQ ID NO: 12762 - DNA, 201 bp, Homo sapiens
agagactgacatgatatgatagtttaggtggatttctctgggggctgtgttgagggacagtggggaggagagctagaaggaagaaaaggacacatgcatarcagaagcaatatctgtctatgggatggtggaaagaatcagaaaagacttaataaaacatgtgacactttaactgaatcttgaaatagacaagtgttggag

SEQ ID NO: 12763 - DNA, 201 bp, Homo sapiens
tatttctccacatcctctccagcatctgttgtttccaaatgttttaatgattgccattccacctggcgtgagatggtatctcattgtggttttgattttcrtttctctaatgaccagtgatgataagctttttttcatatgtttgttggccacataaatgtcttcttttgacttttatgtggaaacaaatttaactgcaca

SEQ ID NO: 12764 - DNA, 201 bp, Homo sapiens
ttaaacctctttttctttatgaattacccagtctcgggtatgtctttaacagcagtgtgaaaacagactaatgcagcagacctaccttcatcggatccccyagtacaacccacaccatggggaagttccagaaaatttgtcttcaaggagtcaggtctttgacttaaaatcagtgagaacatggggaaaccttttctcttt

SEQ ID NO: 12765 - DNA, 201 bp, Homo sapiens
cacgaaaatgaacgagatcatgtcctttgcagggacatggatggagctggaagccattatcctcagcaaaccaacacgggaacagaaaaccaaacactacrtgttctcacttataagtgggagctgaacaatgagaacacatgaacacaaagagaggaacaatacacgtcggggcctgttgtaggggcagggagagagaga

SEQ ID NO: 12766 - DNA, 201 bp, Homo sapiens
aaacaataagggaatttgaacactgaatggttgtcagaagatagtaagagatcattattaattttactagacataatgatgttctgattttgttttttttwtaaaaaaaaacagtgttatttcctttatagatacatcatatagtattaactaatgaaatgctttgatatctggaacgtttaaaaaatattcccgatggag

SEQ ID NO: 12767 - DNA, 201 bp, Homo sapiens
atgtgcatcctctctgaacgtgcttcaaacatatcaaggggtcaatgagcagttttgaaacaataagggaatttgaacactgaatggttgtcagaagatastaagagatcattattaattttactagacataatgatgttctgattttgttttttttttaaaaaaaaacagtgttatttcctttatagatacatcatatag

SEQ ID NO: 12768 - DNA, 201 bp, Homo sapiens
gaaaataataaaagccagatattttgtggcacttatctcggggtaaaggctgcagccgcaagcaccaccggcaatcattctttttttttttttttttttttagtagagacggggtttcaccgtgttagccaggatggtcttgatatcctgacctcgtgatccgcccgccttggcttcccaaagtgctaggattacaggcgt

SEQ ID NO: 12769 - DNA, 201 bp, Homo sapiens
ccgtggtaatggctgacattgatactgcactttttttttatttaagatggagttcccctctgccacccagactggagtacagtggcgcgatcctggccatygcaacctccgcctcccaggttcaagcgattctcctgcctcagtctctcaagtagctgggatatgggcacctgtcaccatgcccagctaatttttttaaaa

SEQ ID NO: 12770 - DNA, 201 bp, Homo sapiens
ttgaattaaaaatgcttgagcatcacacatgtcgtcaatgaagtacatttcttggagaggctgtgttggaaatagatgctcgttatggatctcaaaatgtyttattttgtcagaattggagctggggtcacgtgaaaatcaccacaggcttcctcacgttatcacataggcccacaggtgtgctggtagcatcaatttccc

SEQ ID NO: 12771 - DNA, 201 bp, Homo sapiens
aataaaaaataaagatgagcaaaccatgggacccatgatttgaaatggtgaagtaatgacaagtggaggaaggagtctgaataactacaatgagattgatscatggatgagttcacaaggaatatggtccttgtctgtgtctcctactccccattattattaatattattatatgaattgatgacatgtctcttctcttcc

SEQ ID NO: 12772 - DNA, 201 bp, Homo sapiens
tattatttttgtattcttaaagtaatgctggattgcaagaataagtatatctccaaatttcagtgtctgaaacaaacagaagtttgtttctcgtccatgtraccaaggcaaatgctcctggttggcaggtggcttcctccaggcagtaaatctacagcccaggctccctgcatcttatggctccaatcactttggatctca

SEQ ID NO: 12773 - DNA, 201 bp, Homo sapiens
tagaaccagaaacactatttgacccagcaatcccattactgggtatatacccaaaggaatataaatcattctgttataaagatacatgcaagcatatgttmattgcagcaatattcacaatagcaaagacatggaatcaattcaaatccccatcaatgataaactggataaataaaatgtggtacatatacaccatggaat

SEQ ID NO: 12774 - DNA, 201 bp, Homo sapiens
gtggtttccaaccacagttacttgtgacatcattccatcactccccatacacattccctgtagatcaacttatctggccctacaattatagttacagggarttttacattcttcatcttccacaggcaactgaatcttctgggacaaaaagcatatgttctcccatagtaataaaatttcccttttttagcctggcatgtg

SEQ ID NO: 12775 - DNA, 201 bp, Homo sapiens
aaaaaaaaaaaaaaaaaaaaagaacaaaaactcctggacataaaacagaaagcaacccacagaaggctctgaaatgtggagattagaaggtgtagcggctrgggacctcagaattccagggaagaggaaggatgctgtttacttttgcatcctaaacaccctggccctccaacctaggaccaccaaggagcacaaagacaa

SEQ ID NO: 12776 - DNA, 201 bp, Homo sapiens
ctgacctaacaggtggtttccaaccacagttacttgtgacatcattccatcactccccatacacattccctgtagatcaacttatctggccctacaattayagttacagggaattttacattcttcatcttccacaggcaactgaatcttctgggacaaaaagcatatgttctcccatagtaataaaatttccctttttta

SEQ ID NO: 12777 - DNA, 201 bp, Homo sapiens
cagtctcgggtatttctttatagcagcatgaaaatggactaatacagcacctatctcccagtattgtattttcacaatggaagttttaatccagggatgtytaatcttgtggcttcctaggccacactggaagaagaattgtcttgggccacacataaaatacactaacactaatgatagctgagaagctaaagaaaaatc

SEQ ID NO: 12778 - DNA, 201 bp, Homo sapiens
aaaaaaaaaaaaaaaaagaacaaaaactcctggacataaaacagaaagcaacccacagaaggctctgaaatgtggagattagaaggtgtagcggctagggrcctcagaattccagggaagaggaaggatgctgtttacttttgcatcctaaacaccctggccctccaacctaggaccaccaaggagcacaaagacaaaaag

SEQ ID NO: 12779 - DNA, 201 bp, Homo sapiens
cgagtttccacggtagttttaagcaccattgcccgtggtaatggctgacattgatactgcactttttttttatttaagatggagttcccctctgccacccrgactggagtacagtggcgcgatcctggccatcgcaacctccgcctcccaggttcaagcgattctcctgcctcagtctctcaagtagctgggatatgggca

SEQ ID NO: 12780 - DNA, 201 bp, Homo sapiens
actaatgctaaattaacattacccaagtagtggcttttctcttttttaatataaatattgcctatatatggaataagctctagaaaagtgaatttcttttytttttttttttttttttgatatggagtcttgctctgtcacccaggctggagtgcagtggtgctatcttggctcactgcaacctccgcctcccaggttcaa

SEQ ID NO: 12781 - DNA, 201 bp, Homo sapiens
acaaaatatgagaaacaaggcagacaggcatttttttaaaattttcgcacccactgatagaccagtgatgcattcacatcgtctgcattcatgatcaacaraagtgctttcctagaacatgaacctcaacccaagtgtcgcctcaagtagtgtatgcatgaactcaagcattaaattagaattgattttttaaaaaactca

SEQ ID NO: 12782 - DNA, 201 bp, Homo sapiens
ccacagagctggatcagacagacttgtgcaaatatttcaggttttttttgtgggggggtcatatttatagataaataacagtaaagagtgacgggttcttwtgaaaatgcatacacagtgaagtagagggtgaaaaggagggatgtgttctatgaggaggaagagtgataagaaagtgtaaggggatgtgtctgtgtctag

SEQ ID NO: 12783 - DNA, 201 bp, Homo sapiens
tactggagccacagagctggatcagacagacttgtgcaaatatttcaggttttttttgtgggggggtcatatttatagataaataacagtaaagagtgacrggttcttatgaaaatgcatacacagtgaagtagagggtgaaaaggagggatgtgttctatgaggaggaagagtgataagaaagtgtaaggggatgtgtct

SEQ ID NO: 12784 - DNA, 201 bp, Homo sapiens
aaacaaatggcacaaggaaacggaggtaagaatgggatgctgttatagattttaaaagatttaagaaagtataaactaaatacactatgtgcatcctctckgaacgtgcttcaaacatatcaaggggtcaatgagcagttttgaaacaataagggaatttgaacactgaatggttgtcagaagatagtaagagatcattat

SEQ ID NO: 12785 - DNA, 201 bp, Homo sapiens
tgatggttcccgctaataggcaaacaccaggaacgtgcagcccctcccctccgcttcgcgctctttcggggaggagcctgggggggagggtcctgcccackggccccgccctgcactaggcggaagcccccaaagtatcagcgccgcttcttggagcctggcgactgctttgggaagtcctgctggcaggcactctgcccc

SEQ ID NO: 12786 - DNA, 201 bp, Homo sapiens
aaagaaagaaaaaataggaaagaagaaagaaagaaagataggaaggaaggaaggaaggaaagagagagagaaagaaaggacaaaagaaagaaagagaaagwaaaagaaagaagaaagaagaaaaaagaaagagaaagaaagaaaaaagaaagagaaagaaaggaggaaaggaaggaaggagggaaggaaagaaggaaggaa

SEQ ID NO: 12787 - DNA, 201 bp, Homo sapiens
atgcacttctctaaacacgtatgcattattttttctattttaaatttaaccacgttgttttatttttaatcacatctacactttgtaaatttggaaacggrgtgattttccatgttcagtaatgatagcaagcttccttttaaaatacgttttactttttatcttcttttttttttttttttgagatggggtctccctgtg

SEQ ID NO: 12788 - DNA, 201 bp, Homo sapiens
tgaagaacttgttttcaggtatgcacttctctaaacacgtatgcattattttttctattttaaatttaaccacgttgttttatttttaatcacatctacaytttgtaaatttggaaacggagtgattttccatgttcagtaatgatagcaagcttccttttaaaatacgttttactttttatcttcttttttttttttttt

SEQ ID NO: 12789 - DNA, 201 bp, Homo sapiens
gcaagactgtgtctcaaaaaaagaaaaagaagaaagagagagagaaagaagaaacaaaaggaaggaaggaaggaggaaggaaggaaggaaggaagaaggamggaaaaaggaaggaaggaggaaggaaaaaggaaggaaggaggaaggaaggaggaaggaagaaggaaaggaaaggaaggaaggaaggaaggaaggaaggaa

SEQ ID NO: 12790 - DNA, 201 bp, Homo sapiens
ctggttcctgtggctctgcccattatgccttgatgtttattggacatcactccaccccactcagtcacccaaagagctacttacctaatgctgaccaaacyggatttagtgacaaccctggggcaaaatatagaatgagagccctggaaattgagagctaaataccactttcccagagcttaagaaaagacagctagagcg

SEQ ID NO: 12791 - DNA, 201 bp, Homo sapiens
cgacccaccaggagcctctcctggtgtctcccagggattgtcaatagttccattttccttgaagaacttgttttcaggtatgcacttctctaaacacgtawgcattattttttctattttaaatttaaccacgttgttttatttttaatcacatctacactttgtaaatttggaaacggagtgattttccatgttcagtaa

SEQ ID NO: 12792 - DNA, 201 bp, Homo sapiens
cactgcaacctccgcctcccaggttcaagaaattctcctgcctcagcctcccaaaataggcactggccaccgcacctggctaatttttgtatttttagtaragatggggtttcaccatgttggccaggactgtctcgaactcctgactttgtgatccacccacctcggcctcccaaagtgctgggattacaggtgtaaacc

SEQ ID NO: 12793 - DNA, 201 bp, Homo sapiens
aagacagatatgttatcttcaaaacattaatcctcccaaaattgtaagcatcccttctaatttgattttaatttgattctagatgtaggcaaaacacactyccgtaaacattaagcagtaaaaaagcacaatgcattttaaaggactgggttttcacactggatagaggtggcatggaatcccagcccatcatcaccacag

SEQ ID NO: 12794 - DNA, 201 bp, Homo sapiens
ggtggtgccccgccccccgccaccccaccagatactgatcccaagggggctgaggggtgggaccttgtccagccaccaagctctacactaagccccccagkaaagggggcaggctccaccctttcctaaacagcacttcctgtagcccaggagattgtggggtccaaccctggcccctggccccaggggcaccaagagaaa

SEQ ID NO: 12795 - DNA, 201 bp, Homo sapiens
cttcctgtagcccaggagattgtggggtccaaccctggcccctggccccaggggcaccaagagaaagccagcaaagtgatggggacccgcctgggcagagyctgacagccagccctgcccagccctgagcaaaagttgcaaagagagggtttccccacaaagcccctcctacaggagctgccgcctgcagcccgtgaattg

SEQ ID NO: 12796 - DNA, 201 bp, Homo sapiens
cttactgtgggagaggtctctccgttggccacgcccatttctggtaaacgtcacaaagaagtgtgcccctcctcctccctagaagcctgtggggccgagaygcccggacctgcccggcccgaactaggcaaagtccagcgaataggtgaagaggtggtgcctcctcctctcacagggctctgcccctaggagtccaggaaa

SEQ ID NO: 12797 - DNA, 201 bp, Homo sapiens; identical to SEQ ID NO: 885

SEQ ID NO: 12798 - DNA, 201 bp, Homo sapiens
agggctctgcccctaggagtccaggaaacgggggtgtcttgtccgctgatggttcccgctaataggcaaacaccaggaacgtgcagcccctcccctccgcytcgcgctctttcggggaggagcctgggggggagggtcctgcccacgggccccgccctgcactaggcggaagcccccaaagtatcagcgccgcttcttgga

SEQ ID NO: 12799 - DNA, 201 bp, Homo sapiens
taggagtccaggaaacgggggtgtcttgtccgctgatggttcccgctaataggcaaacaccaggaacgtgcagcccctcccctccgcttcgcgctctttckgggaggagcctgggggggagggtcctgcccacgggccccgccctgcactaggcggaagcccccaaagtatcagcgccgcttcttggagcctggcgactgc

SEQ ID NO: 12800 - DNA, 201 bp, Homo sapiens
ccgcttcgcgctctttcggggaggagcctgggggggagggtcctgcccacgggccccgccctgcactaggcggaagcccccaaagtatcagcgccgcttcktggagcctggcgactgctttgggaagtcctgctggcaggcactctgcccctgggggtgtgcaaagagttgtccagttaccttgatcttctcacagcctcc

SEQ ID NO: 12801 - DNA, 201 bp, Homo sapiens
ctgctttgggaagtcctgctggcaggcactctgcccctgggggtgtgcaaagagttgtccagttaccttgatcttctcacagcctcctccccagggcaccrggagagaccaggattggaggacggtaaagaacacacttcccagaggattcttggaggtagagtcaacaggaaggggtggtgagacctgcacagacctgct

SEQ ID NO: 12802 - DNA, 201 bp, Homo sapiens
acaataagggaatttgaacactgaatggttgtcagaagatagtaagagatcattattaattttactagacataatgatgttctgattttgttttttttttwaaaaaaaacagtgttatttcctttatagatacatcatatagtattaactaatgaaatgctttgatatctggaacgtttaaaaaatattcccgatggagta

SEQ ID NO: 12803 - DNA, 201 bp, Homo sapiens
gagctacttacctaatgctgaccaaactggatttagtgacaaccctggggcaaaatatagaatgagagccctggaaattgagagctaaataccactttccyagagcttaagaaaagacagctagagcgagcaagagagaagccactggctctagcgccatcataaatgggggcacatccaggtcctcctccgtgtttctaa

SEQ ID NO: 12804 - DNA, 201 bp, Homo sapiens
acagaaggctctgaaatgtggagattagaaggtgtagcggctagggacctcagaattccagggaagaggaaggatgctgtttacttttgcatcctaaacascctggccctccaacctaggaccaccaaggagcacaaagacaaaaagctccaagaaaatgttgttctaggtagacagccgactgggaggagggaggcgctg

SEQ ID NO: 12805 - DNA, 201 bp, Homo sapiens
atgaggaactgctaggttaaggtgcattggtgagactgcaacatcaggacctgggttttcctgaaggttggagggagagaaaagccagttccctggcttartctctgtggttggccaccacccacttaagtttcaagccacataggatcaaatccacagagacgacgttcaggaatagaagcctgagctcaaccacagcag

SEQ ID NO: 12806 - DNA, 201 bp, Homo sapiens
tgcagcttttaggaaagatacctcaaggtcagggattgtgcacataaggctaaatctgccatgcctttcatcttgaacgatgaattttggtacaataacakaattacttcatcttcagtaaaattccagcacatagtcacttctcagctaagtaaaccttctctgttaactttcccttatgaaaacaaaggagcaaggaca

SEQ ID NO: 12807 - DNA, 201 bp, Homo sapiens
ctctgagcaccctgagaacaataggcttgtctttcctgttctctgattattttcagtatagccctataagggctgtcatattcatttcacctgttctcccrtttattgtcgacctctccactgcaccagaagcatcagaagttagaatatacgcctttctcactataggccttctagccaaggtgaggacacatatttcat

SEQ ID NO: 12808 - DNA, 201 bp, Homo sapiens
ggtccatgcacagacttgggtatcacacacgcactcactttagtgattcacagagaggtggaagaaagggaaaaagtctaagctcatgcagcatgggaggkgtgagctatgggctcactgcacccagggacaagctggtcctgggacccacaaactcatgggacctcagagaagtttctggtatacctgtaaggcctatta

SEQ ID NO: 12809 - DNA, 201 bp, Homo sapiens
gaggtccatgcacagacttgggtatcacacacgcactcactttagtgattcacagagaggtggaagaaagggaaaaagtctaagctcatgcagcatgggargtgtgagctatgggctcactgcacccagggacaagctggtcctgggacccacaaactcatgggacctcagagaagtttctggtatacctgtaaggcctat

SEQ ID NO: 12810 - DNA, 201 bp, Homo sapiens
tggtgattctaattttatctattataaatataacaaagtatttcgaatggacctgtgctgagagtcatagaggtccatgcacagacttgggtatcacacaygcactcactttagtgattcacagagaggtggaagaaagggaaaaagtctaagctcatgcagcatgggaggtgtgagctatgggctcactgcacccaggga

SEQ ID NO: 12811 - DNA, 201 bp, Homo sapiens
atcttggtgatgtgaaacctccctgactgcacgtccattcataggctctctgcaaggggaagcacatcacgcgctgttggctcattctggcgtccaacctsgcattgtctttacacaatcctgcatgcaattttgtatttacaataatcaggagcatttcatcttttacataacattccatagcaatagtttcagggggtc

SEQ ID NO: 12812 - DNA, 201 bp, Homo sapiens
ctgtgtctggcttttttcacttagtgtgatgttttcaaagttcattcatattctagcatgcatcagaattttattcctttctatggctaaataatatctcrttgtgtggatgattatccaggccatatgggttgtttgcactttctggctatcgtgaataatgctgctgtaaacatttgtgtacaagttttgtgtgaacac

SEQ ID NO: 12813 - DNA, 201 bp, Homo sapiens
taattccagatcattttcataactcccaaaagaaaccctgtacccagtagcagtcactgtccatttctgcagtcccccaagaccctgcaagcactaatctsttttctgtccgtatggatgcggttattctgaagtttacatataagtggaatcatacgatatcattctgtgtctggcttttttcacttagtgtgatgtttt

SEQ ID NO: 12814 - DNA, 201 bp, Homo sapiens
cacaaaccacagcctgattgccagctccaaatccaagaactgtcactgcctctgtgactttgaacacgtttctttcatttttgagtaatgactttattgakatataattcatgtgtcataaagctctcccccttgaagtatacaattcgatggtttttgttatatgcacagagttgtaaaaccatcaccactaattccaga

SEQ ID NO: 12815 - DNA, 201 bp, Homo sapiens
tctctgcacacaccagctccccttcaacttcccccatgaatagaagcagcctgaggccctttccagatgcaaatgcccaagctttaaccttccagtcatcrgaattgtgggccaaataaacctttttatcctttataaactacccagcctcaggcattcctttatagcaacactaaactaagagcaagtgagcgccagcca

SEQ ID NO: 12816 - DNA, 201 bp, Homo sapiens
atgaatgtcctccctgggtggtggtgagtgagttctcactctcttactttccgggagagtctgccttcctcagtttctctctcttgtcatgtggtctctgyacacaccagctccccttcaacttcccccatgaatagaagcagcctgaggccctttccagatgcaaatgcccaagctttaaccttccagtcatcagaattg

SEQ ID NO: 12817 - DNA, 201 bp, Homo sapiens
tggtttcgcccatactgttcttgtggtagtgaataagtctcacgagatctgatggttttacaaaggggaaccccattcacttggctcgcattctctctcgyctgccaccatgtaagatgtgacttttgccttccaccatgattgtgaggcctccccagccacgtggaactgtgagtccattaaacctctttttctttataa

SEQ ID NO: 12818 - DNA, 201 bp, Homo sapiens
gcaatgtccagcccagaatctctttgttctttgtaattagtgagctcccaggaaaaatttcctccccttttcaggcatatacatgatgagaacttgcacargggggagggagcttacctaaaacaaacccacagttatacaaacaagagaagctgtactttgtgcttgcctagagacatacccacggccgcataagagaag

SEQ ID NO: 12819 - DNA, 201 bp, Homo sapiens
gcctgagctcaaccacagcagtgtggtgataggaatgagagagtggggagatgccacaatatccagttatatgtagaaaaaggctattgtgtcagcagatkttatagaaagggctggaatgaacaggctgccacacactgtctctgcaggaacaagattcgcaaggatacaaacaaatgcatttataggaactcactaggc

SEQ ID NO: 12820 - DNA, 201 bp, Homo sapiens
aaggtgtagcatctcctgtaaccatgcacaaggcagaatgtggcagcttcattctctaccaccattctttaccctatttcaacaatttctaaggctggtgkgcctgtgaggaaaatataagatctggacagatgggatgaggacatctgggaggagccccaactctctgagattacccctatacctcactccgtgccccca

SEQ ID NO: 12821 - DNA, 201 bp, Homo sapiens
tgtagcatctcctgtaaccatgcacaaggcagaatgtggcagcttcattctctaccaccattctttaccctatttcaacaatttctaaggctggtgtgccygtgaggaaaatataagatctggacagatgggatgaggacatctgggaggagccccaactctctgagattacccctatacctcactccgtgcccccagcca

SEQ ID NO: 12822 - DNA, 201 bp, Homo sapiens; identical to SEQ ID NO: 889

SEQ ID NO: 12823 - DNA, 201 bp, Homo sapiens
caacaggaaggatgcatgtgtgtgatgtctctaagggtgtattttgaagaagtcaggattggagttccccaaccgctcttcctctttttaaaatgtccaartgcaatggccctgtcagtactggctaagtaaaggaaatttcccttgcaaggtgaagccagattagtgaacgcaacacttctaggaaatatgaacaaatgg

SEQ ID NO: 12824 - DNA, 201 bp, Homo sapiens
cgtgggcatctctctgggcaaagagctgtatctaacacaaaaggggcttccatcagggaaacagatgagcttgttaatgaaggggatgaaaatcggagccrtaatgagttactgtatcataaatgaatgcaaattacattgtcagtgctatttacaatttcacacggcacagagtcttgtaattatgtctattcaattatt

SEQ ID NO: 12825 - DNA, 201 bp, Homo sapiens
ctagaattgtatgttttttgctatatgcaaatgataatttactttgtttcatatttttactttcaaaattatttttaaaaggtagtatttcagatagatgwtatagtgtttaattactgtttaacaaacatcattgctgtgtgagatctcccaggaaacttgtaatcacgcaaacattgtttttgtaaacttttaaaaatc

SEQ ID NO: 12826 - DNA, 201 bp, Homo sapiens
cactcccttatagaactaaagtcacgagccctcagtggttaaactttgaggaacgtgatatctaattatcaaggtattagcattccaggtctctcttgtarctttaacaactacaaagtacagacacagacatggcccactattgtcatctgagagcaggtggtgcatgagtgtgaactggtaacttgggaagaggagcca

SEQ ID NO: 12827 - DNA, 201 bp, Homo sapiens
taaactttgaggaacgtgatatctaattatcaaggtattagcattccaggtctctcttgtagctttaacaactacaaagtacagacacagacatggcccastattgtcatctgagagcaggtggtgcatgagtgtgaactggtaacttgggaagaggagccaagtagaaccgtacatgaaaaggtgtagcatctcctgtaa

SEQ ID NO: 12828 - DNA, 201 bp, Homo sapiens
tgaggacatctgggaggagccccaactctctgagattacccctatacctcactccgtgcccccagccacatcagtgaggtgtttcttctcattttcaagcycatttaactaggacatagtttagatatcagggagagttttctaaaccagattaaagatcctctctgcctgttatttccaatctgtgctctgaggacccag

SEQ ID NO: 12829 - DNA, 201 bp, Homo sapiens
aatgacattcttgtggtttgtccaacattatttttgtgcagatttcaattcatgctgcactcatcctgggggcaaaagttaaaggttttctaaaaagctamttagtgaatgtcttagttaatggaaaagaaaataagtcaatccttttttttctaaccttgaagttgcaaagattgacaatgaactctgtaatggtgcatt

SEQ ID NO: 12830 - DNA, 201 bp, Homo sapiens; identical to SEQ ID NO: 888

SEQ ID NO: 12831 - DNA, 201 bp, Homo sapiens
cctactgttcataactggattttctgagagtggagaccaacccaactgcaccctatttaagactggaaccaacggacagtaaaaacaaagttaaatttgtmtcaaaagcaatacctttattgctgcctctgcagaattgaagaaacatgattggatctgaggtaaaaattgtcttcctgatacttcacacaaaaactcgaa

SEQ ID NO: 12832 - DNA, 201 bp, Homo sapiens
caaaccaacacgggaacagaaaaccaaacactacgtgttctcacttataagtgggagctgaacaatgagaacacatgaacacaaagagaggaacaatacaygtcggggcctgttgtaggggcagggagagagagagcatcaagataaatagctaatgcatacggggcttgatacctcggtgatgggctgatgggtgcagca

SEQ ID NO: 12833 - DNA, 201 bp, Homo sapiens
cgtggtttcgcccatactgttcttgtggtagtgaataagtctcacgagatctgatggttttacaaaggggaaccccattcacttggctcgcattctctctygtctgccaccatgtaagatgtgacttttgccttccaccatgattgtgaggcctccccagccacgtggaactgtgagtccattaaacctctttttctttat

SEQ ID NO: 12834 - DNA, 201 bp, Homo sapiens
ccccccccggccccaacaacctcatgttgaaatttgatccccagggttggagatggagcctgttggtgtttaggtcctgggagcatgatgtggtttggctstgtccccacccaaatctgatcttgaatactagctcccataattcccacatgttgtgggaggggcctggtgggagataactgaatcatgggcgtggtttcg

SEQ ID NO: 12835 - DNA, 201 bp, Homo sapiens
tccttcttccctttgaaacaaagattaattcacactgggcctatattactgcatgaaaacagctgactgcaagtgctgtggtttggatgttccccccaccsccccccccccggccccaacaacctcatgttgaaatttgatccccagggttggagatggagcctgttggtgtttaggtcctgggagcatgatgtggtttgg

SEQ ID NO: 12836 - DNA, 201 bp, Homo sapiens
cattttaaccgaatatcaacgttagagacaaatattaggtcagatatttgtcttctgtaaagtggcagcacagagtcaaatctatgtttccctagaacagkgagtacctcctaaaattgaatccatcatcaacatttaaatatcagaatattgcatgtaaaaatagtgtttccttcttccctttgaaacaaagattaattc

SEQ ID NO: 12837 - DNA, 201 bp, Homo sapiens
ttttcttctttcacttattaaatttttgctccaaccccaagtttgtgtccaagttccttaattttcttggatttaggacacagaacccaggatactagttyagacaatgaggaactgctaggttaaggtgcattggtgagactgcaacatcaggacctgggttttcctgaaggttggagggagagaaaagccagttccctg

SEQ ID NO: 12838 - DNA, 201 bp, Homo sapiens
cagggattgtcaatagttccattttccttgaagaacttgttttcaggtatgcacttctctaaacacgtatgcattattttttctattttaaatttaaccaygttgttttatttttaatcacatctacactttgtaaatttggaaacggagtgattttccatgttcagtaatgatagcaagcttccttttaaaatacgtttt

SEQ ID NO: 12839 - DNA, 201 bp, Homo sapiens
aagaggtggtgcctcctcctctcacagggctctgcccctaggagtccaggaaacgggggtgtcttgtccgctgatggttcccgctaataggcaaacaccakgaacgtgcagcccctcccctccgcttcgcgctctttcggggaggagcctgggggggagggtcctgcccacgggccccgccctgcactaggcggaagcccc

SEQ ID NO: 12840 - DNA, 201 bp, Homo sapiens
acctgcccggcccgaactaggcaaagtccagcgaataggtgaagaggtggtgcctcctcctctcacagggctctgcccctaggagtccaggaaacgggggygtcttgtccgctgatggttcccgctaataggcaaacaccaggaacgtgcagcccctcccctccgcttcgcgctctttcggggaggagcctgggggggagg

SEQ ID NO: 12841 - DNA, 201 bp, Homo sapiens
caggaggacaactagcctctcccagcagagcaaatgccccacagagagggtaccttcccctaccgcgccctgcccccggggagcctagtgaggacccctgrccagttttaagaaaaaggccacactggcgtggggcccctccccttcttactgtgggagaggtctctccgttggccacgcccatttctggtaaacgtcaca

SEQ ID NO: 12842 - DNA, 201 bp, Homo sapiens
cgtctcaaaaaaaaaaaaaaaaaaaaaaaaaagaacaaaaactcctggacataaaacagaaagcaacccacagaaggctctgaaatgtggagattagaagktgtagcggctagggacctcagaattccagggaagaggaaggatgctgtttacttttgcatcctaaacaccctggccctccaacctaggaccaccaaggag

SEQ ID NO: 12843 - DNA, 201 bp, Homo sapiens
gctcaaccacagcagtgtggtgataggaatgagagagtggggagatgccacaatatccagttatatgtagaaaaaggctattgtgtcagcagatgttataraaagggctggaatgaacaggctgccacacactgtctctgcaggaacaagattcgcaaggatacaaacaaatgcatttataggaactcactaggcaacagc

SEQ ID NO: 12844 - DNA, 201 bp, Homo sapiens
atcccttcaaaggtagattttttttttcataaaatctgtaagagggctgggtgcagtaactcatgcctaaaatccctgcgactctgggggctgagactggwggatcccttaagcccaggagttcaaggttagcctgggcaacacagtgagacaccttcttttaagaaaataaataaaagtagaaaacaatctgtaaatatt

SEQ ID NO: 12845 - DNA, 201 bp, Homo sapiens
aaaggctgcagccgcaagcaccaccggcaatcattctttttttttttttttttttttagtagagacggggtttcaccgtgttagccaggatggtcttgatmtcctgacctcgtgatccgcccgccttggcttcccaaagtgctaggattacaggcgtgagccaccgctcccggcctggcaggcattcttgaggcaaacggg

SEQ ID NO: 12846 - DNA, 201 bp, Homo sapiens
cttgtggtctgcaccaagaactgaatcgaatttccatgtgttattgaatgttcacaaagaccttgtacagcgagtgttactacctctggtcaatgattcawctcaaggctcagaaaagtcaagtgtcttgtccagggacacttagtcagaagtgaatccaaggtttaagctcaagtctgcctaactctgaatttcacagcc

SEQ ID NO: 12847 - DNA, 201 bp, Homo sapiens
tccagcatatgcaaatttctaccagataaatggtttagtttcttccccaaacaaatggcacaaggaaacggaggtaagaatgggatgctgttatagatttwaaaagatttaagaaagtataaactaaatacactatgtgcatcctctctgaacgtgcttcaaacatatcaaggggtcaatgagcagttttgaaacaataag

SEQ ID NO: 12848 - DNA, 201 bp, Homo sapiens
aacaataagggaatttgaacactgaatggttgtcagaagatagtaagagatcattattaattttactagacataatgatgttctgattttgtttttttttwaaaaaaaaacagtgttatttcctttatagatacatcatatagtattaactaatgaaatgctttgatatctggaacgtttaaaaaatattcccgatggagt

SEQ ID NO: 12849 - DNA, 201 bp, Homo sapiens
ttactatctcttcattttctattttgatatttgttggacattctcataaaaaggaaagttatgttttattttctcataagctagtaatgaaatagccctamgtaactgatattgtagagacaagaataggtgtaatagagcttaaggttttcatttaaaaaactatctgtagacttcaatggatcttaggtggcatccatg

SEQ ID NO: 12850 - DNA, 201 bp, Homo sapiens
caggacaggtgtggagctccatcttcacacagtgacattttttatgcttctgttttccctaagagtggagtgagaggatgattattttatatcatggactycttccctgctatactttttttaattattttactttcacttctgggatacatgtgctgagcatgcaggcttgtttacataggtatacatctgccatggtgg

SEQ ID NO: 12851 - DNA, 201 bp, Homo sapiens
ttgccatacacagggaaggagaagagatggagaaggcaaagactttctgaaagccgtggctaaaagctggcatgtgtcacatcagctcacattccattggkgagaacatagaatatgtaaggcaaagagaaacccaggaaactatcgcgtgccgttcttagatctctccatccctagctggtctgccttcttctctccaca

SEQ ID NO: 12852 - DNA, 201 bp, Homo sapiens
atagccgggcgtggcggcgggcgcctgtggtcccagctaccggggaggctgaggcaggagaatggcgggaacccgggaggcggagcttgcagtgatcgcgycactgcactccagcctgggggacagggcgagactccgtctcaaaaaaaaaaaaaaaaaaaaaaaaaagaacaaaaactcctggacataaaacagaaagca

SEQ ID NO: 12853 - DNA, 201 bp, Homo sapiens
gttgcagtgagccgagatcgcaccactgcactccatcctgggcgactgaacgagaccctgtctcaaaaaaaaaaatcccttcaaaggtagattttttttttcataaaatctgtaagagggctgggtgcagtaactcatgcctaaaatccctgcgactctgggggctgagactggaggatcccttaagcccaggagttcaag

SEQ ID NO: 12854 - DNA, 201 bp, Homo sapiens
gttggaccagatacttcatgcaaagggaagaaaagtgcacaaacaaaatatgagaaacaaggcagacaggcatttttttaaaattttcgcacccactgatrgaccagtgatgcattcacatcgtctgcattcatgatcaacagaagtgctttcctagaacatgaacctcaacccaagtgtcgcctcaagtagtgtatgcat

SEQ ID NO: 12855 - DNA, 201 bp, Homo sapiens
ctttggggggccgaggtgggcggatcacgaggtcaggagatagagaccatcctggctaacacggtgaaaccccgtctctactaaaatatacaaaaaaatasccgggcgtggcggcgggcgcctgtggtcccagctaccggggaggctgaggcaggagaatggcgggaacccgggaggcggagcttgcagtgatcgcgtcac

SEQ ID NO: 12856 - DNA, 201 bp, Homo sapiens
atcactttggctggctcaggtgggaggatcacttgaggccaggagtacaagaccaacttaggcaacatatcaagaccctgtctcttacaaaaaataaaackaaaaaagttatccaagtgtggtggtgccggcctgtagtcccagcaacttaggaggctggggcaggcggattgcttgagctcaggagttcaaggctgcagt

SEQ ID NO: 12857 - DNA, 201 bp, Homo sapiens
ctggacgtcctgcacatgtatcctggaacttaaaattaaagtaaatttaatttaatttaatttaaagaaagtttgagtttaaggcaaaaaaaaaaaaaaaagaagaggcagtcgatcccaacactcctgacagggaaaaacttcctattttcctggtccagacagaataagctggagctgctgttggggaggataaagcag

SEQ ID NO: 12858 - DNA, 201 bp, Homo sapiens
tcacgcctgtaatcccagcactttggggggccgaggtgggcggatcacgaggtcaggagatagagaccatcctggctaacacggtgaaaccccgtctctastaaaatatacaaaaaaatagccgggcgtggcggcgggcgcctgtggtcccagctaccggggaggctgaggcaggagaatggcgggaacccgggaggcgga

SEQ ID NO: 12859 - DNA, 201 bp, Homo sapiens
aaacaccaggaacgtgcagcccctcccctccgcttcgcgctctttcggggaggagcctgggggggagggtcctgcccacgggccccgccctgcactaggcrgaagcccccaaagtatcagcgccgcttcttggagcctggcgactgctttgggaagtcctgctggcaggcactctgcccctgggggtgtgcaaagagttgt

SEQ ID NO: 12860 - DNA, 201 bp, Homo sapiens
caggcttccagttaaggtgaagaaaataaaagctcactctcctcctcttctcccactaataagaaaaaaattccggccggtcgcggtggctcacgcctgtmatcccagcactttggggggccgaggtgggcggatcacgaggtcaggagatagagaccatcctggctaacacggtgaaaccccgtctctactaaaatatac

SEQ ID NO: 12861 - DNA, 201 bp, Homo sapiens
agagagagagcatcaagataaatagctaatgcatacggggcttgatacctcggtgatgggctgatgggtgcagcaaaccaccatggcacactttcacctgkgtaacaaacctggacgtcctgcacatgtatcctggaacttaaaattaaagtaaatttaatttaatttaatttaaagaaagtttgagtttaaggcaaaaaa

SEQ ID NO: 12862 - DNA, 201 bp, Homo sapiens
taatgattgccattccacctggcgtgagatggtatctcattgtggttttgattttcatttctctaatgaccagtgatgataagctttttttcatatgtttsttggccacataaatgtcttcttttgacttttatgtggaaacaaatttaactgcacagagaggtgaaaattaattaataacttttaaagtaattccctaag

SEQ ID NO: 12863 - DNA, 201 bp, Homo sapiens
gtgttatatgtgccacattttcttaatccagtctgtcattgatggacatttgggttgtttccaagtctttgctattgtaaatagtgctgcaataaacataygtgtgcatgtgtctttgtagtagaatgatttataatcctttgggtatatgcccagtaatgggactgatgggtcaaatggtatttctggttctagatcctt

SEQ ID NO: 12864 - DNA, 201 bp, Homo sapiens
gcatgcaggcttgtttacataggtatacatctgccatggtggtttgctgcacctatcaacccatcatacaggttttaagccctgcatgcattaggtattcrccctaatgctctccctcgcctttccccccaccccctgatagcccccagtgagtcatattcccctccctgtgtccatgtgttctcattgttcaactcccat

SEQ ID NO: 12865 - DNA, 201 bp, Homo sapiens
gaaatcataaacaaacccgaaatagcttagaaataaatgtaagcaattcatgactagaaataaataacatctctcacatttcttccctagaataaatatcrttgtttacccaaggatgccaactatttgcatggtggtgtttagtcaaattcatttgtttaatacatgtatattgggctagtgtctggagacacagtgggc

SEQ ID NO: 12866 - DNA, 201 bp, Homo sapiens
tggtttcacaacgggaaacccctttcatttggctctcattctctttgcctgccaccatgtaagacgtgccttggttttttccccaccttccactgtgattstgaggcctccccagccatgtggaactgtgagtccattaaacctctttttctttatgaattacccagtctcgggtatgtctttaacagcagtgtgaaaaca

SEQ ID NO: 12867 - DNA, 201 bp, Homo sapiens
acatgtttgcttccccttccaccatgattgtaagtttcctgaggcctccccagccatgccaaactgtgagttaattaaacctctttcctttataaattatycagtctcgggtatttctttatagcagcatgaaaatggactaatacagcacctatctcccagtattgtattttcacaatggaagttttaatccagggatgt

SEQ ID NO: 12868 - DNA, 201 bp, Homo sapiens
ggagcattctacacagctcccttaaagatgttccagaagtgctgactctgtgtcaggcaccatgttcaccacttagatgttcgtttaatccttacaaaagrgccatggagcatggactgttactgtggcagatgtgttagcctcctgtggttgccataacaaaatactacaaactgcgtggcttaaaacaccaggaattta

SEQ ID NO: 12869 - DNA, 201 bp, Homo sapiens
ttttttttttttttagtagagacggggtttcaccgtgttagccaggatggtcttgatatcctgacctcgtgatccgcccgccttggcttcccaaagtgctrggattacaggcgtgagccaccgctcccggcctggcaggcattcttgaggcaaacgggaaatggggtaagttacacaatcgatacagctccgtcatcgtgg

SEQ ID NO: 12870 - DNA, 201 bp, Homo sapiens
ttcataactggattttctgagagtggagaccaacccaactgcaccctatttaagactggaaccaacggacagtaaaaacaaagttaaatttgtatcaaaarcaatacctttattgctgcctctgcagaattgaagaaacatgattggatctgaggtaaaaattgtcttcctgatacttcacacaaaaactcgaactgtggg

SEQ ID NO: 12871 - DNA, 201 bp, Homo sapiens
tcattctttttttttttttttttttttagtagagacggggtttcaccgtgttagccaggatggtcttgatatcctgacctcgtgatccgcccgccttggcytcccaaagtgctaggattacaggcgtgagccaccgctcccggcctggcaggcattcttgaggcaaacgggaaatggggtaagttacacaatcgatacagc

SEQ ID NO: 12872 - DNA, 201 bp, Homo sapiens
ccaacacgggaacagaaaaccaaacactacgtgttctcacttataagtgggagctgaacaatgagaacacatgaacacaaagagaggaacaatacacgtcrgggcctgttgtaggggcagggagagagagagcatcaagataaatagctaatgcatacggggcttgatacctcggtgatgggctgatgggtgcagcaaacc

SEQ ID NO: 12873 - DNA, 201 bp, Homo sapiens
gcaatcattctttttttttttttttttttttagtagagacggggtttcaccgtgttagccaggatggtcttgatatcctgacctcgtgatccgcccgcctyggcttcccaaagtgctaggattacaggcgtgagccaccgctcccggcctggcaggcattcttgaggcaaacgggaaatggggtaagttacacaatcgata

SEQ ID NO: 12874 - DNA, 201 bp, Homo sapiens
tgaagctatttctaaacagaactaacatcagaatcgtctgaataatcagaatcgtctatttcagaaaactcggattcatcaaataatattcggccaacaactgttccagagtgatgttaacatcacgtgtagaattgctacattttctgggttttgatattttccgtgatcaagaattactatattttgtaaatggaaata

SEQ ID NO: 12875 - DNA, 201 bp, Homo sapiens
ttgaagctatttctaaacagaactaacatcagaatcgtctgaataatcagaatcgtctatttcagaaaactcggattcatcaaataatattcggccaacaactgttccagagtgatgttaacatcacgtgtagaattgctacattttctgggttttgatattttccgtgatcaagaattactatattttgtaaatggaaat

SEQ ID NO: 12876 - DNA, 201 bp, Homo sapiens
attgaagctatttctaaacagaactaacatcagaatcgtctgaataatcagaatcgtctatttcagaaaactcggattcatcaaataatattcggccaacaactgttccagagtgatgttaacatcacgtgtagaattgctacattttctgggttttgatattttccgtgatcaagaattactatattttgtaaatggaaa

SEQ ID NO: 12877 - DNA, 201 bp, Homo sapiens
agagaaaaaaagtcaaagagacagagatagagagaattagagctatataaatcaccaagatatttagtataattttttttattggagaggtaatttaaccyttttcccatttagaaaaaaaagaaaagtacagctcactgccagcactcatttaattttacataaacacattctttgaggctgaagccaatctgactgatt

SEQ ID NO: 12878 - DNA, 201 bp, Homo sapiens
agacaagtgttggaggagggagttggaccagatacttcatgcaaagggaagaaaagtgcacaaacaaaatatgagaaacaaggcagacaggcatttttttwaaattttcgcacccactgatagaccagtgatgcattcacatcgtctgcattcatgatcaacagaagtgctttcctagaacatgaacctcaacccaagtgt

SEQ ID NO: 12879 - DNA, 201 bp, Homo sapiens
caaaaattagccaggcatggtggcaggaacctgtaatcccagctactagggaggctgaggcaggagagtccttgaacccaggaggcggaggttgcagtgarcggagatcatgctactgcactgcagcctggacaacagagcaagactgtgtctcaaaaaaagaaaaagaagaaagagagagagaaagaagaaacaaaagga

SEQ ID NO: 12880 - DNA, 201 bp, Homo sapiens
cttgaacctgggaggcggaggttgcagtgagccaagatcgtgccactgcactccagcctgggcgacaaaagcaaaactccgtctccaaaaaaaaaaaaaaagaaaaacaaatctagtgactgcatattgcaggatctggccagcagcccgcaatgcaacagggctctctctttgttcccaggcggatcggcaggttgagaa

SEQ ID NO: 12881 - DNA, 201 bp, Homo sapiens
gcccacgggccccgccctgcactaggcggaagcccccaaagtatcagcgccgcttcttggagcctggcgactgctttgggaagtcctgctggcaggcactstgcccctgggggtgtgcaaagagttgtccagttaccttgatcttctcacagcctcctccccagggcaccgggagagaccaggattggaggacggtaaaga

SEQ ID NO: 12882 - DNA, 201 bp, Homo sapiens
cattaaacctctttttctttatgaattacccagtctcgggtatgtctttaacagcagtgtgaaaacagactaatgcagcagacctaccttcatcggatccmccagtacaacccacaccatggggaagttccagaaaatttgtcttcaaggagtcaggtctttgacttaaaatcagtgagaacatggggaaaccttttctct

SEQ ID NO: 12883 - DNA, 201 bp, Homo sapiens
ttctcatgagatctgatggttttataaggcagttttccctattcttgctcactcttctctctctttctgccatgtgaagaaggtccttgcttccccttcaycttctaccatgattgtaagtttcctgaggcctcccctcagccatgcacaactgtgagtcaattaaacctctttcctttataaattactcagtctcaggtc

SEQ ID NO: 12884 - DNA, 201 bp, Homo sapiens; identical to SEQ ID NO: 884

SEQ ID NO: 12885 - DNA, 201 bp, Homo sapiens
tcaggcaccatgttcaccacttagatgttcgtttaatccttacaaaagagccatggagcatggactgttactgtggcagatgtgttagcctcctgtggttrccataacaaaatactacaaactgcgtggcttaaaacaccaggaatttattctcactgttctaaaagacggaagtccgaaatccaggagtcaacagggctg

SEQ ID NO: 12886 - DNA, 201 bp, Homo sapiens
ggagggacctggtgtgaggtgattggattggggggtggttcccgccatgctgttctcatgatagtgagtgagttctcatgagatctgatggttttataagrcagttttccctattcttgctcactcttctctctctttctgccatgtgaagaaggtccttgcttccccttcaccttctaccatgattgtaagtttcctgag

SEQ ID NO: 12887 - DNA, 201 bp, Homo sapiens
taagctggagctgctgttggggaggataaagcagaaatgatgtctttaataaagatgaggccaggcaccatggttaacacctgtaatcccatcactttggstggctcaggtgggaggatcacttgaggccaggagtacaagaccaacttaggcaacatatcaagaccctgtctcttacaaaaaataaaactaaaaaagtta

SEQ ID NO: 12888 - DNA, 201 bp, Homo sapiens
gttatccaagtgtggtggtgccggcctgtagtcccagcaacttaggaggctggggcaggcggattgcttgagctcaggagttcaaggctgcagtgagctayggctgcaccactgcactccagcctgggcaacagaactagaccttgtctcttaaaagataacataaaataaaataaaaataaaaaataaagatgagcaaac

SEQ ID NO: 12889 - DNA, 201 bp, Homo sapiens
gtttcctaaaaaacaaaagtttgaacccagctctttacgtgttacatgttctgaatacaaaaataagacccagtttctgccccctagcaggacccaaaacycctcagtgaaggcatacaccataggaataatctcacaagtactttagccccctacctaatgcaaacctactgttcataactggattttctgagagtggag

SEQ ID NO: 12890 - DNA, 201 bp, Homo sapiens
gctgtgtggtcaccgagttgaagcactgagttgaactctaaatatcaacgtgggtcaggtcagcaaaagcttctgcagaagtaaaacattgcaaataaacygtgacgacaggtttctgcaaggtttaaaaatcccttcaggctgggcgcggtggctcacacctgtaattccagcactttgggaggctgaggcaggtggatc

SEQ ID NO: 12891 - DNA, 201 bp, Homo sapiens
ctcactgtctcaggcagctctgtcacttccattctagtctccctccatcaagccaccttgtttagtacctttatagcattttatcacaacttgaagtggtrtgtttattagttgccttgtgcgttgtctaacccctccattgtatgtggctatcctgaaggcaggaatttgattgtcatggtcaccatggtgccaccaggg

SEQ ID NO: 12892 - DNA, 201 bp, Homo sapiens
ccaaggtgaggacacatatttcatgctcaagaaatatttgtcgaatgagtgaattagtgaattaaaaattttaggtggccgggcacggtggctcacgcccrtaatcccagcactttgggagactgaggcaggcagatcacgaggtcagaagtttgagaccaacctgcccaacatggcgaaaccccgtctctactaaaaata

SEQ ID NO: 12893 - DNA, 201 bp, Homo sapiens
ttcttccctttgaaacaaagattaattcacactgggcctatattactgcatgaaaacagctgactgcaagtgctgtggtttggatgttccccccacccccvcccccccggccccaacaacctcatgttgaaatttgatccccagggttggagatggagcctgttggtgtttaggtcctgggagcatgatgtggtttggctg

SEQ ID NO: 12894 - DNA, 201 bp, Homo sapiens
aaccggggagatgaaggtggcagtgagccgagatgacgccactgcactctagcctgggagacagagcaagactccatgtcaaaaaaaaaaaaaaaaaaaaagcttttgaattcagctgtaaactggcagtccacttgcactcccctctccactgcagagagttttcttctttcacttattaaatttttgctccaaccccaa

SEQ ID NO: 12895 - DNA, 201 bp, Homo sapiens
agcaggactacaggcacacgccatcacgcctggctgatttgtgtatttttagtagagacagggtgtcaccacgttggccaggatggtctcgatctcctgayctcatgatccacccgcctcggcctcccaaagtgctgggattacaggcatgagccaccgcactgggcctaaaatatgttttttaaggaaacaaacaaaaag

SEQ ID NO: 12896 - DNA, 201 bp, Homo sapiens; identical to SEQ ID NO: 895

SEQ ID NO: 12897 - DNA, 201 bp, Homo sapiens
aagcaccattaatttttatatgataattttgtatcctgcaactgtactgaatttatcaattctaagagattttgtgtgtgtgtgtgtgtggaccttttagyttataaatttgtatgttttcttgtttaatgtctctttattttcattagactttaagtgtgatgatggcaggtatctgatacagagcatactgctagacac

SEQ ID NO: 12898 - DNA, 201 bp, Homo sapiens
ctcttaaaggtcccacttcttaaaactgtcaaaatggcaattattttcaacaagagttttggaggagagattcaaaccatagcaggtaatatttacctaakgtcacacctttagtaagtagcagaactgggatttgaacccagctgactctgggtggcatattattctgtttactaggcacagcagggagtttaagatcca

SEQ ID NO: 12899 - DNA, 201 bp, Homo sapiens
tccccccttaactgcagtttcaatttctgtgatttcagttacccaaggtcaacctggtctgaaaataagtacaataagatactttgtgtatgagacagaargaccatattcacataacttttattacaatataattgtcctattttgttgttaatctcttcctgtgcaaatttataaattaaactttatcataggtatatc

SEQ ID NO: 12900 - DNA, 201 bp, Homo sapiens
cccctttcttcgctaccagggagaaaacaaacttgtgtacgtatctgggaaaaataatcaacgtaggtgaacaaatatacggtaagattccccctcgcccsggaagggctcgtaagggcctaggtccttgagctgcaaccacgccaccctccctcctctgcagtagcccttcaactccaacctcggttactgcgtctaaaa

SEQ ID NO: 12901 - DNA, 201 bp, Homo sapiens
ggccaacagtgtcagatgttgcagagactagttcatttgatttggcaacacaaaagtattggtgaacaattgcattgttgagagttaaaagattaaatggyaagaatgggagcggggccacagttgcccatgacttttccaagaaatctgactctgctaggggaaaaaaaatagagtcctttttatatatttatttattta

SEQ ID NO: 12902 - DNA, 201 bp, Homo sapiens
cgcctccatctttgaaatcctcttgagggcggagtagagggggtggacagactccgaggattgggcggggcccgaaaaaggggagctccaggggcttctarggggtctgtactgcccgctgggaccagtcataggccgggacgaaggccatttccaagcggatggaggtggattgtaatggcggccccggacgactcgaag

SEQ ID NO: 12903 - DNA, 201 bp, Homo sapiens
ctattactttcatttcatgagttagatcagtatctttccaataaatcctcatttttaaaatgtaagttagccagaattggtttctattgcttgcaataaayagacttattaaatataataaattgttacataataaaaaatattatataaatgtgtttgatgttgcattatgtctatgtggaaataaattcaaaaataaat

SEQ ID NO: 12904 - DNA, 201 bp, Homo sapiens
atacaaaaaaaaaaaaaaaattagccgggtatggtggcacgtgcccgtagtcccagatactccagaggctgaggcaggagaatcacttgaacctgggaggyggaggttgcagtgagcggacaccgtaccactgcactccagccttggcaacagagtgaaactccatctcaaaaaaaaaaaaaaaagaatggcttatagata

SEQ ID NO: 12905 - DNA, 201 bp, Homo sapiens
ttgagaaatgtctattcagatcatttgcccattttcaaatgggattatttggaggatttttgctgttgagtttgagttccttatatattctggttattaawcccttatcagatggatagtttgcacatattttttcccattctgaaggttgtctcttcactctgttgattgtttcctttgctgtggcagaagccttttagc

SEQ ID NO: 12906 - DNA, 201 bp, Homo sapiens
gagagagaatagaggccagaatgtaccctttgtttgtttgtttgttttgaggcggagtctcgctctgtcgcccagactggagtgcagtagtgcaatcttgrctcactgcaagctcctcctcccgggttcacaccattctcctgcctcagcctcccaagtagctaggactacaggtgcccgccaccaagcctggctaatttt

SEQ ID NO: 12907 - DNA, 201 bp, Homo sapiens
cccttccctggtgtcgtgtggtgcgaccactggagagggagtttctcgccctcgtcgcgcctgccgcgcggagagataaggtgcggaccgcagatgtggabttcgtatttggctttagtcttaggcagccttaaaatctctccgtgccgtgaacctacgctagacttttctttagtgagacctgtgagtccctggaccgct

SEQ ID NO: 12908 - DNA, 201 bp, Homo sapiens
tgtttatgcctcagatgatctcatacaattgtctgagatgccatatgttgaaaatagctgtattgaggtggttacttttcatatgattctcccttctctargaatagctctaatccatagaggtaatactgtacctggccacaaccaatgaatccagtggtacacacctaatacaagctgagccagtgagagaggctctcc

SEQ ID NO: 12909 - DNA, 201 bp, Homo sapiens
aaccccgggagggcgggggaaaatgagcgtcaggagagcagagtccccttcccccagccagggatcaggccctggcccccaaaagtacaagcggccccgtytgggtggctgcagcatggagggcaatgacacagcaactttgcagaggccttttcccctccccctagcggcccaacctcccaaatctgcttttctccaccg

SEQ ID NO: 12910 - DNA, 201 bp, Homo sapiens; identical to SEQ ID NO: 891

SEQ ID NO: 12911 - DNA, 201 bp, Homo sapiens
gtcttctgaccccccgagtagggcaaaccccgggagggcgggggaaaatgagcgtcaggagagcagagtccccttcccccagccagggatcaggccctggmccccaaaagtacaagcggccccgtttgggtggctgcagcatggagggcaatgacacagcaactttgcagaggccttttcccctccccctagcggcccaac

SEQ ID NO: 12912 - DNA, 201 bp, Homo sapiens
cgcggaaacgtacttattgtggggagtcacgttttgcagcatcttgaccgcaaggaaccggcgctgccctcagccgcggaaagtccgggtggcctcggttyccctcaccgcccggtccagcataacccgctaagttggggggaggccgttcctcttgggcctccaggcgacaaaccccctgcctggccggcacgaaagcag

SEQ ID NO: 12913 - DNA, 201 bp, Homo sapiens
ggctcgcggaaacgtacttattgtggggagtcacgttttgcagcatcttgaccgcaaggaaccggcgctgccctcagccgcggaaagtccgggtggcctcrgttcccctcaccgcccggtccagcataacccgctaagttggggggaggccgttcctcttgggcctccaggcgacaaaccccctgcctggccggcacgaaa

SEQ ID NO: 12914 - DNA, 201 bp, Homo sapiens
ggcgtcccctcccccgtttcccctttcttcgctaccagggagaaaacaaacttgtgtacgtatctgggaaaaataatcaacgtaggtgaacaaatatacgrtaagattccccctcgcccgggaagggctcgtaagggcctaggtccttgagctgcaaccacgccaccctccctcctctgcagtagcccttcaactccaacc

SEQ ID NO: 12915 - DNA, 201 bp, Homo sapiens
gaacctacgctagacttttctttagtgagacctgtgagtccctggaccgctctaccttctacgatatttaccagctgataacttttccttctctatttatytcgtagtggaccgtttaaacctcttatactcttaaagttatgatctctcctctcccaagcttgagtgaattccccccaaaattttggaactggtaacata

SEQ ID NO: 12916 - DNA, 201 bp, Homo sapiens
ccctgaatcaaacttttaatgttaggaaaaaacaatccctgcaccaacaaacaccacacacaacccacccacccaaagaaagcaaaagatttaatgacatrccctgggcattaggaacctgcacacacgggagagtgatccctttacccttctctgggaatccccgttgccagtcccttaagcgctccgtcaccatggcaa

SEQ ID NO: 12917 - DNA, 201 bp, Homo sapiens
ttcaaatctactagctattttggaatatacagtaaattaatgttaactgtagtcacccagctgtgctatcaaacactatagaatttattccttcaatttarctatatttttgtaaccattaatgaatctctcttcatcccccctccaccccctccctttcccagtctctggtaaccatcattctaccctctacctccataa

SEQ ID NO: 12918 - DNA, 201 bp, Homo sapiens; identical to SEQ ID NO: 893

SEQ ID NO: 12919 - DNA, 201 bp, Homo sapiens; identical to SEQ ID NO: 894

SEQ ID NO: 12920 - DNA, 201 bp, Homo sapiens; identical to SEQ ID NO: 896

SEQ ID NO: 12921 - DNA, 201 bp, Homo sapiens
gagagagagagaccaattataaagaaagttgcaataatcagtgaaaaccaaccattgaaggcctggaccagtaggaatggaaggaaaagaaaggaagattyaagagctattagaaaggtagaattgttaggacaattgaatgggaaggtttgaggaagatggggtcatcaacgatgacccacatttgtagctcgggtggac

SEQ ID NO: 12922 - DNA, 201 bp, Homo sapiens
gagtcccaaagggactgaaaaggggacgccagaaaagtaggagggaaaactaggagagagtgccatcagggatgccagaaatttgaccaatttaggagatrgggtatggccaacagtgtcagatgttgcagagactagttcatttgatttggcaacacaaaagtattggtgaacaattgcattgttgagagttaaaagatt

SEQ ID NO: 12923 - DNA, 201 bp, Homo sapiens
ggtatggccaacagtgtcagatgttgcagagactagttcatttgatttggcaacacaaaagtattggtgaacaattgcattgttgagagttaaaagattamatggcaagaatgggagcggggccacagttgcccatgacttttccaagaaatctgactctgctaggggaaaaaaaatagagtcctttttatatatttattt

SEQ ID NO: 12924 - DNA, 201 bp, Homo sapiens
ctttttatatatttatttatttattttttgagatggagtcttgctctgtcacccaggctggagtgcaatggcacgatctcagctcactgcaacctccaccycccgaattcaagtgattctcctgcctcagcctcctgagtagcttggattacaggcacccgccatcacgcctggctaatttttttttttttttgtattttt

SEQ ID NO: 12925 - DNA, 201 bp, Homo sapiens; identical to SEQ ID NO: 892

SEQ ID NO: 12926 - DNA, 201 bp, Homo sapiens
ctgctactcagtaatttgggaaagtaactctttcctcctttccgttccctcccccgcagtacacaaggagagaactgttcaggactgggggaggggatgarggaggcgatggaagaggccaccctggagaaacccgaaaccttgggagctgtgaaatcattccaggtcccgagcctccctcgcatctcagaccatgctgtc

SEQ ID NO: 12927 - DNA, 201 bp, Homo sapiens
accccctccgcgcgcgcgcgctcgctcacgcgggtgaagaagctgagtcgaaggggaaggaacacctctccgcgggagctttttctattggccagccgcarcgatgacgtcataaacttcatttccaaggtgtcagtcaccaggcagaagagtgccgcagagacccacagggaagtggcaacccgccacatctccaagcca

SEQ ID NO: 12928 - DNA, 201 bp, Homo sapiens
tgaatatgggtatggagaaatgtactgaggtagaaataagagtaaatgtgggagctggatggctaggtttgctctctgaaacaggaggtggcagggagtargaagaaaatggtagttggcaaggagcttgggaagggcctagaatggaattggaagggtagtagagtatatagggaaggctgtggaggtgtaaaatggctc

SEQ ID NO: 12929 - DNA, 201 bp, Homo sapiens
gagtccccttcccccagccagggatcaggccctggcccccaaaagtacaagcggccccgtttgggtggctgcagcatggagggcaatgacacagcaacttkgcagaggccttttcccctccccctagcggcccaacctcccaaatctgcttttctccaccggggctctgcaggccaggacagaggcccatcagggggccgg

SEQ ID NO: 12930 - DNA, 201 bp, Homo sapiens
gagctcggacctttccccccacacgccacatcacccccaaaggcacacccgtatccgcctctcaggggccctccgccacgggggcgaaagaacccccccgsccccccaccagggtccggagtcctccccacggagcggctggtccatcggtcagcgccagggaggagggcgagcggaggaggcggcggctgcggctcagac

SEQ ID NO: 12931 - DNA, 201 bp, Homo sapiens
cgagctcggacctttccccccacacgccacatcacccccaaaggcacacccgtatccgcctctcaggggccctccgccacgggggcgaaagaacccccccscccccccaccagggtccggagtcctccccacggagcggctggtccatcggtcagcgccagggaggagggcgagcggaggaggcggcggctgcggctcaga

SEQ ID NO: 12932 - DNA, 201 bp, Homo sapiens
tgggcctcttggtggagatatatatatatatagtacaccctcccctaaggaccttgcagtagagatgaggtgactatgaaacagacatataaatggaagakaataatacaattaaaacagtgataatggccaacacagggtgctttggaaacgtactgaagaggctattaatctcaactctgggttcaaggaaggcttcct

SEQ ID NO: 12933 - DNA, 201 bp, Homo sapiens
caacacacctcacctcttcctcaaactccattccggcgtccggctcagagcagaaaaagcaagtcctgggagggatgacttaagggaaaaaccctccccckccaggcgagctcggacctttccccccacacgccacatcacccccaaaggcacacccgtatccgcctctcaggggccctccgccacgggggcgaaagaacc

SEQ ID NO: 12934 - DNA, 201 bp, Homo sapiens
ccgctcatgcgcgccaccctgcttgagattttccccaccccctccgcgcgcgcgcgctcgctcacgcgggtgaagaagctgagtcgaaggggaaggaacayctctccgcgggagctttttctattggccagccgcaacgatgacgtcataaacttcatttccaaggtgtcagtcaccaggcagaagagtgccgcagagacc

SEQ ID NO: 12935 - DNA, 201 bp, Homo sapiens
caggcgcaagggtgcgccctgactgggggagggggaaggagggccagaggctgcggggagagccgtagtgcgcaggcgtccggaccggaaccgcatctccsgcggcggggcttggagcgcgcgcttttcgtggggcgggagcccgcgcccgggtgctgacctcctgcctcagcgccccctcccccactacccgcggcctag

SEQ ID NO: 12936 - DNA, 201 bp, Homo sapiens
ggggccaagggggccgcatggcccaggcctatgtcccgaaacccagagcgctataacgctgctgcttgtccatatccccagcttcctatcccgcagtcctsgactctgtcccccccactcgcctctccatacgagttcagcatggctgccgcagaccaggaacacacacagcgcaggcgcaagggtgcgccctgactgggg

SEQ ID NO: 12937 - DNA, 201 bp, Homo sapiens
ttattgctggccccgccttccttttattaatatttttagtatactatctagatcccaccttcttaagtctgataggctctatctgttctttttcatatttwaaaaaactcccaaattgtttctgacaaggcacgacatctcagaactacagccctatggggatggggcttaagcaaaatgggtggagttaagaaactcaaa

SEQ ID NO: 12938 - DNA, 201 bp, Homo sapiens
tctaccctctacctccataagatcaacttttttagctcccacttatgagaacgtgatatttttttttctgtgtctgacttatttcattaacataatgactkccagttccatccatgttgctggaaatgacaggatttcattcttttttatggctgactagtatccattgtatatatatacaccacattttctttatccagt

SEQ ID NO: 12939 - DNA, 201 bp, Homo sapiens
attgacaacctgtattcccctccacgagcagtagccgagccgccaccaccgttccaaaaccgtcgctcaattccctccgcgcgaccgagtcgacagctgcrccgcaacagcagcgcgccggggccgctcagtactcccaacacggcgccccacacccctgtgccgccgccctgcaacatccccttcccacacgcggctcgc

SEQ ID NO: 12940 - DNA, 201 bp, Homo sapiens
ccactccagcacgaaatggcgccgccgagccccgcgccagccctttatatataggcggggaggaggagcttcgccgctcatgcgcgccaccctgcttgagmttttccccaccccctccgcgcgcgcgcgctcgctcacgcgggtgaagaagctgagtcgaaggggaaggaacacctctccgcgggagctttttctattggc

SEQ ID NO: 12941 - DNA, 201 bp, Homo sapiens
acctgtattcccctccacgagcagtagccgagccgccaccaccgttccaaaaccgtcgctcaattccctccgcgcgaccgagtcgacagctgcgccgcaasagcagcgcgccggggccgctcagtactcccaacacggcgccccacacccctgtgccgccgccctgcaacatccccttcccacacgcggctcgcggaaacg

SEQ ID NO: 12942 - DNA, 201 bp, Homo sapiens
ccagtcataggccgggacgaaggccatttccaagcggatggaggtggattgtaatggcggccccggacgactcgaaggctctgtatcggtaggcagaatcytccagctcgttctagaggctgctccactccagcacgaaatggcgccgccgagccccgcgccagccctttatatataggcggggaggaggagcttcgccgc

SEQ ID NO: 12943 - DNA, 201 bp, Homo sapiens
taaggagggactgactcttcaaaagacggtccccgatctcagacaccgtcgtcaatatagcccgctgttggtctgcagggattccctcttcttgtcgggcycctacggggccgacgaggtcccgtttcgatctcggatggaggcggatgaacacgaaaagtggtttagggagccgccgcctccatctttgaaatcctcttg

SEQ ID NO: 12944 - DNA, 201 bp, Homo sapiens
tctgataggctctatctgttctttttcatattttaaaaaactcccaaattgtttctgacaaggcacgacatctcagaactacagccctatggggatggggmttaagcaaaatgggtggagttaagaaactcaaaccccaagcttcctcctcactaggggtttggtggttgccatggtggttgagcgccggtaaggaggaaa

SEQ ID NO: 12945 - DNA, 201 bp, Homo sapiens
cgccaaggggccaagggggccgcatggcccaggcctatgtcccgaaacccagagcgctataacgctgctgcttgtccatatccccagcttcctatcccgcrgtcctggactctgtcccccccactcgcctctccatacgagttcagcatggctgccgcagaccaggaacacacacagcgcaggcgcaagggtgcgccctga

SEQ ID NO: 12946 - DNA, 201 bp, Homo sapiens
ccttttcccctccccctagcggcccaacctcccaaatctgcttttctccaccggggctctgcaggccaggacagaggcccatcagggggccggccatggartaaaaacttaggaggctgagaaaatactaggccttaggaaaagggcagccagacattgctctcgtttattccctgcattccggaaaatcactgcctcccg

SEQ ID NO: 12947 - DNA, 201 bp, Homo sapiens
gggggagggggaaggagggccagaggctgcggggagagccgtagtgcgcaggcgtccggaccggaaccgcatctccggcggcggggcttggagcgcgcgcwtttcgtggggcgggagcccgcgcccgggtgctgacctcctgcctcagcgccccctcccccactacccgcggcctagcggggtagcctcgggtggccaggc

SEQ ID NO: 12948 - DNA, 201 bp, Homo sapiens
ctgagacattagaattatgtgaggaaagacagacatagaacagcacaggttattgtcacagagagtagtctagtccagtctggccagaacataagctacargaagtagagcaggagaagagaaaatgggaggtaaatttatattagagaacacattatagaaggtttccagtgctgttaagtttggaatcagtggggaacc

SEQ ID NO: 12949 - DNA, 201 bp, Homo sapiens
gcaacacacctcacctcttcctcaaactccattccggcgtccggctcagagcagaaaaagcaagtcctgggagggatgacttaagggaaaaaccctccccytccaggcgagctcggacctttccccccacacgccacatcacccccaaaggcacacccgtatccgcctctcaggggccctccgccacgggggcgaaagaac

SEQ ID NO: 12950 - DNA, 201 bp, Homo sapiens
gcatctcagaccatgctgtctagaccccctactgccagcacccaccttgggcctggtttctgttcctaagcagacctcaagctttcagcttgtaagcaccmcagcctggagtagacacgtgctcagtaaagaccctacaggggcaaaaggccccacaggccgtgtccacgtgaatgcacacaaattcggtaagcgactcga

SEQ ID NO: 12951 - DNA, 201 bp, Homo sapiens
tatagcccgctgttggtctgcagggattccctcttcttgtcgggcccctacggggccgacgaggtcccgtttcgatctcggatggaggcggatgaacacgmaaagtggtttagggagccgccgcctccatctttgaaatcctcttgagggcggagtagagggggtggacagactccgaggattgggcggggcccgaaaaag

SEQ ID NO: 12952 - DNA, 201 bp, Homo sapiens
ccacccacccaaagaaagcaaaagatttaatgacatgccctgggcattaggaacctgcacacacgggagagtgatccctttacccttctctgggaatcccsgttgccagtcccttaagcgctccgtcaccatggcaaccctacagggcgctagaggtgtccgtgaatcccccctaaaaggctaacagaccgccgctagata

SEQ ID NO: 12953 - DNA, 201 bp, Homo sapiens
ggaaccttagctctaccctcctgccctgaatcaaacttttaatgttaggaaaaaacaatccctgcaccaacaaacaccacacacaacccacccacccaaakaaagcaaaagatttaatgacatgccctgggcattaggaacctgcacacacgggagagtgatccctttacccttctctgggaatccccgttgccagtccct

SEQ ID NO: 12954 - DNA, 201 bp, Homo sapiens
tggtgatggcattatagttatgttaagggaaaggttattatctattatagatatgcctaaaagtatttactggtgaaatgtaatgacagaatttgtttaamatactccaaaaaatgcagaacaatagatgaaacaagaatggaagaatgttaaatgttgaaaattgttgacattcatgagagtacattggagtttattaga

SEQ ID NO: 12955 - DNA, 201 bp, Homo sapiens
gatcaggccctggcccccaaaagtacaagcggccccgtttgggtggctgcagcatggagggcaatgacacagcaactttgcagaggccttttcccctcccmctagcggcccaacctcccaaatctgcttttctccaccggggctctgcaggccaggacagaggcccatcagggggccggccatggaataaaaacttaggag

SEQ ID NO: 12956 - DNA, 201 bp, Homo sapiens
tctgctaggggaaaaaaaatagagtcctttttatatatttatttatttattttttgagatggagtcttgctctgtcacccaggctggagtgcaatggcacratctcagctcactgcaacctccacctcccgaattcaagtgattctcctgcctcagcctcctgagtagcttggattacaggcacccgccatcacgcctggc

SEQ ID NO: 12957 - DNA, 201 bp, Homo sapiens
tgcttgtccatatccccagcttcctatcccgcagtcctggactctgtcccccccactcgcctctccatacgagttcagcatggctgccgcagaccaggaayacacacagcgcaggcgcaagggtgcgccctgactgggggagggggaaggagggccagaggctgcggggagagccgtagtgcgcaggcgtccggaccggaa

SEQ ID NO: 12958 - DNA, 201 bp, Homo sapiens
gtattcccctccacgagcagtagccgagccgccaccaccgttccaaaaccgtcgctcaattccctccgcgcgaccgagtcgacagctgcgccgcaacagcrgcgcgccggggccgctcagtactcccaacacggcgccccacacccctgtgccgccgccctgcaacatccccttcccacacgcggctcgcggaaacgtact

SEQ ID NO: 12959 - DNA, 201 bp, Homo sapiens
tctcctgcctcagcctcctgagtagcttggattacaggcacccgccatcacgcctggctaatttttttttttttttgtatttttagtagagatgggatttyaccattaaccaggatggccttgatctcctgacctcgtgatccacccccctcggcctcccaaagtgctgggattacaggcgtgaatcactgcgcctggcca

SEQ ID NO: 12960 - DNA, 201 bp, Homo sapiens
cctcgcccgggaagggctcgtaagggcctaggtccttgagctgcaaccacgccaccctccctcctctgcagtagcccttcaactccaacctcggttactgygtctaaaatggccgccaatctcctgtcttctgaccccccgagtagggcaaaccccgggagggcgggggaaaatgagcgtcaggagagcagagtccccttc

SEQ ID NO: 12961 - DNA, 201 bp, Homo sapiens
ctaaaaggctaacagaccgccgctagataccagacccaccaaacgccaaacctgctgttcaacctcactccactccaccgtcaaactagctctgcctgacycggttaagactgggccacggcggcattaatagcgtataaattgacaacctgtattcccctccacgagcagtagccgagccgccaccaccgttccaaaacc

SEQ ID NO: 12962 - DNA, 201 bp, Homo sapiens
aaagccttccagggggcctccaaagttgccctcggcttggtacggggtatgtaatccggggtgtcaacccccccccagaaaacgaagccgtgctgggggakggggcgtagcccccagcccctcccttcccgaacgggctgggggggtggggagagcatcggggccgcgcgcgtacgtcagcagcacccagattggctgacc

SEQ ID NO: 12963 - DNA, 201 bp, Homo sapiens
agtcgaaggggaaggaacacctctccgcgggagctttttctattggccagccgcaacgatgacgtcataaacttcatttccaaggtgtcagtcaccaggcrgaagagtgccgcagagacccacagggaagtggcaacccgccacatctccaagccaattggctgagctgtggtccgccgactccagggaaagagggtggtt

SEQ ID NO: 12964 - DNA, 201 bp, Homo sapiens
agaactagtgttcagtcttagagatgaagttgttaagttagataagaacaatgtacattacctgaatcatgtggtctggacaggaaagcagtcctgttaaraattccttcatgacatttttctagggaggcatagatgttacaagtgaaggtaataggctgttttgcctttcaaagcgtctttagcccaagtgcatgcatc

SEQ ID NO: 12965 - DNA, 201 bp, Homo sapiens
agtaatgctgacatccacttcctagcattgttaggagggataaatgaattaaatatgtaaagtccttaaatatttgcttgctaatacgagtattcattgcrtgtgactatttttgtatttatgtgaacttcatcggagcatttgtcaggttctttttttttgcaccaagtgagcgttgcctgcctgcctgccctgcctccc

SEQ ID NO: 12966 - DNA, 201 bp, Homo sapiens
aggtcatgggattattttagatttttgcctgccgtcttattttattaaaaaaaaatttatttttatttctgtgggtacatagtaggtgtatatatttatgrgatacatgagatattttgatacaagcatacaatgcataataatcacatcagggtaaatgagtatccatctcctcaagcacttttcatttctttgtgttat

SEQ ID NO: 12967 - DNA, 201 bp, Homo sapiens
atgctgttattttacctgtcttctattactcatgtgttattcatctttcttccagatttgcatatttctccatttatacatagggaattgggaacttttaraagtttttccctgtctctgatggattggacaatgtttgcaattctaggagacatctgattattctttcaaaataaatttatcagaaggagttttgttttc

SEQ ID NO: 12968 - DNA, 201 bp, Homo sapiens
aatcagatggaagaagtaagtctaacgttttaaaattgttaagttaatattttttaactcatttgaaaagcaatttggattatgtataagttaagtatgtrtaagtcatttttgaataactgttggttataaagtaaccttttggtttgggtagacaaggaataagtggatgggataaaatatttctcagtgacctacacc

SEQ ID NO: 12969 - DNA, 201 bp, Homo sapiens
ttctttcaaaataaatttatcagaaggagttttgttttctaaaattattgtgattccagaattatcttctgctcttctgctaataaatctcctatcattgkttggttaatttattgggaagaaacttgacatcctgatgtaatcttctttgtcctgtgttttcccaaccatggtcattatgggagagggtgacgggagaaa

SEQ ID NO: 12970 - DNA, 201 bp, Homo sapiens
ggagacatctgattattctttcaaaataaatttatcagaaggagttttgttttctaaaattattgtgattccagaattatcttctgctcttctgctaataratctcctatcattgtttggttaatttattgggaagaaacttgacatcctgatgtaatcttctttgtcctgtgttttcccaaccatggtcattatgggaga

SEQ ID NO: 12971 - DNA, 201 bp, Homo sapiens
aagacaaaagaaacataaaatgaacatatggccttttccatgatacatgctgttattttacctgtcttctattactcatgtgttattcatctttcttccaratttgcatatttctccatttatacatagggaattgggaacttttagaagtttttccctgtctctgatggattggacaatgtttgcaattctaggagacat

SEQ ID NO: 12972 - DNA, 201 bp, Homo sapiens
tcccgccctaatactgtggttttccaacaggcttaaaaaacagcgcaccaggagattatatcccgcacatggcttggagggtcgtacgcccacggagtctygctgattgctagcacagcactctgagatcaaactgcaaggcggcagcgaggctgggggaggggcgcccgccattgcccaggcttgcttaggtaaacaaag

SEQ ID NO: 12973 - DNA, 201 bp, Homo sapiens
gccttcatttcattatgtacccagtagtcattcaggagtaagttgttcagttttcatgtagttgtttggttttgagtaagtttcttaatcctgagttctartttgattgcactgtggtctgagagacttgtttgttatgatttctgttctcttgcatttgctgaggagtattttacttccaattttgtggtcaattttaga

SEQ ID NO: 12974 - DNA, 201 bp, Homo sapiens
taacctttccagtggcttgaattgtcctgaactctgtcctctggtggtttttaaatcagctactaggcaccttgaatggctcagatagggattgccctcaractaaaagccacaaaaatgagaatcttccctagagttcttcccttcctccaaatgtcaccttccgtcaagaatttacctatgagggagcagccaagatgg

SEQ ID NO: 12975 - DNA, 201 bp, Homo sapiens
taaataaacaatcatgtcatctgcaaagagagacaattgacttcctcttttcctaattgaatacactttatttctttctcttgcctgattgccctggccaraacttccaatactatgttgaataggagtggtgagagagggcatccttgtcttgtgccagttttcaaaggaatgcttccagtttttgcccattcagtatga

SEQ ID NO: 12976 - DNA, 201 bp, Homo sapiens
tgtttttggacatttgtcaaagatcagttgatcatatatatgtaaatttatttctgggctctctattctgttccattggctatgtctgttttttttttttyctttttctaaattatactttaagttctggggtacatgtacagaatgtgcaggtttgttacataggtatacatgtgccatgctggtttgctgcacccatca

SEQ ID NO: 12977 - DNA, 201 bp, Homo sapiens
tttttgtttcatttatcttttgtattgtttttatttcaatttcatttagttctgctctgatcttggttgtttcctttcttctgctgggtttgggtttggtktgttcttgtttctctagttccttgaggtgtgaccttagagtgtcagtttgtgctttttcagtgtttttgaggtacacttttagggctatgaactttcctg

SEQ ID NO: 12978 - DNA, 201 bp, Homo sapiens
gttatttgttttcttgtagttgagttgagctccttttacatcttggatattaaactcttatcagatgtatggtttgcaaatattttctcccattccatagkttgtatctttattccattgattgtttcctttgctctacagaaactatttagcttgatgcagtcccatttgtctatttttgcttttgttacctgtgctttt

SEQ ID NO: 12979 - DNA, 201 bp, Homo sapiens
tgcatctactgagatgattgtgtgatttttgtttttaattctttttatgttgtgtatcacatttattgacttgggtatattaaaccatccctgcatccctsgtatgaaacccagttgatcatggtggactatctttttgttatattgttggattcagttagctagtattttgttaaggattttagcatctatgttcatcag

SEQ ID NO: 12980 - DNA, 201 bp, Homo sapiens
tgaccctagctcactacagcctgaactcctgggctcaagccatcctcccgcctcaccctcccaggtatctaggactacaggcatgcaccatcacaccctgmtaagttttatgttttttaagttttttgtaacaccaagctcttgctatgttgcccaggctggtcttggattcctggcctcaaatgatcctcctgcctcagc

SEQ ID NO: 12981 - DNA, 201 bp, Homo sapiens
gtcctatgctgtaatcaacttatgctcaccaggctattatcaaagtgttggctgggctccattccattatatgtcttgagaatcctcttccaagctcaagyggatgtgataaacttcagttccttgcagtttagggctgaggcacttaacttctaggggcagtctgcagtttcctgccacatggtcttttccatagattgt

SEQ ID NO: 12982 - DNA, 201 bp, Homo sapiens
agcttagtttggctggatatgagattctgggttgaaaattcttttctttaagaatgttgaatattggcccccactctcttctggcttgtagagtttctgcygagagatcagctgttagtctgatgggcttccctttgttggtaactggacctttctctctggctgcccttaacattttatccttcatttcaactttggtga

SEQ ID NO: 12983 - DNA, 201 bp, Homo sapiens
caagagtaccacataaaatagtgaatataaaatgtactattttgtagcattagttttctattgctgcatagcaagttaccacaaatttagcagcttaaacratttatattatctcatagtttcagtgggttcggcatctgagcatggcttagctgtgtcctatgctgtaatcaacttatgctcaccaggctattatcaaag

SEQ ID NO: 12984 - DNA, 201 bp, Homo sapiens
cgagttaagtgtacaagtatgtgcaagcgtacaagtatgtatacacctgaatgacccaagaactagataacataaattttgtaaaaaacaagagtaccacrtaaaatagtgaatataaaatgtactattttgtagcattagttttctattgctgcatagcaagttaccacaaatttagcagcttaaacaatttatattatc

SEQ ID NO: 12985 - DNA, 201 bp, Homo sapiens; identical to SEQ ID NO: 8717

SEQ ID NO: 12986 - DNA, 201 bp, Homo sapiens
gttaatattgttatgtgtgaatttgatcctgtcattatgatgttagctggttattttgctcattagttgatgcagtttcttcctagccttgacggtctttrcaatttggcatgtttttgcagtggctggtaccagttgttcctttccatgtttagtgcttccttcaggagctcttttagggcaggcctgatggtgacaaaa

SEQ ID NO: 12987 - DNA, 201 bp, Homo sapiens
tttaaggttaatattgttatgtgtgaatttgatcctgtcattatgatgttagctggttattttgctcattagttgatgcagtttcttcctagccttgacgrtctttgcaatttggcatgtttttgcagtggctggtaccagttgttcctttccatgtttagtgcttccttcaggagctcttttagggcaggcctgatggtg

SEQ ID NO: 12988 - DNA, 201 bp, Homo sapiens
ttacatttaaggttaatattgttatgtgtgaatttgatcctgtcattatgatgttagctggttattttgctcattagttgatgcagtttcttcctagcctygacggtctttgcaatttggcatgtttttgcagtggctggtaccagttgttcctttccatgtttagtgcttccttcaggagctcttttagggcaggcctga

SEQ ID NO: 12989 - DNA, 201 bp, Homo sapiens
aggcaataccatggaggaaagagcatcatatcaggagtcagaacagcaacttactgattatatgactttggataattccctttaacctatttgaatttcaratttttcaaaattttcataacccaaatgtgtaaaacaatagctactctatttgtcttaaaaaggtgtaaacattttaagatgcaacgaaaaacttcttca

SEQ ID NO: 12990 - DNA, 201 bp, Homo sapiens
agcatttagcccatttacatttaaggttaatattgttatgtgtgaatttgatcctgtcattatgatgttagctggttattttgctcattagttgatgcagyttcttcctagccttgacggtctttgcaatttggcatgtttttgcagtggctggtaccagttgttcctttccatgtttagtgcttccttcaggagctcttt

SEQ ID NO: 12991 - DNA, 201 bp, Homo sapiens
tctcttagaaatatgaatttttttaaaaaaacttcattattttaaaatcgtttaaaaagtcctcctcaagaaagcaaagcagtgatgcatttaaaaatatsatgatgcattttaaaacattttatgttacaggaagatgtctccagaaaaagagtttaaaataaaagaagatttggatcaagtacaggtaacacacccact

SEQ ID NO: 12992 - DNA, 201 bp, Homo sapiens
tgtcttttaatgggagcatttagcccatttacatttaaggttaatattgttatgtgtgaatttgatcctgtcattatgatgttagctggttattttgctcrttagttgatgcagtttcttcctagccttgacggtctttgcaatttggcatgtttttgcagtggctggtaccagttgttcctttccatgtttagtgcttcc

SEQ ID NO: 12993 - DNA, 201 bp, Homo sapiens
tttagcctgtatgaattttatgtctcttagaaatatgaatttttttaaaaaaacttcattattttaaaatcgtttaaaaagtcctcctcaagaaagcaaascagtgatgcatttaaaaatatcatgatgcattttaaaacattttatgttacaggaagatgtctccagaaaaagagtttaaaataaaagaagatttggatc

SEQ ID NO: 12994 - DNA, 201 bp, Homo sapiens
gggtcttgagtctttatccaatttgccagtctgtgtcttttaatgggagcatttagcccatttacatttaaggttaatattgttatgtgtgaatttgatcmtgtcattatgatgttagctggttattttgctcattagttgatgcagtttcttcctagccttgacggtctttgcaatttggcatgtttttgcagtggctgg

SEQ ID NO: 12995 - DNA, 201 bp, Homo sapiens
tttcaggaaggcatataccacattataacataattgattgatattgtcagaaaaatttaaatgttttaatatgtattaggttatatacaacttacaccacrtaaagcactattacaaacagaccagatgtgtcattttattttgcttctatgcagataatttttcctgaaacgttgtatagtgactctcagagtaaaatgt

SEQ ID NO: 12996 - DNA, 201 bp, Homo sapiens
ccagttttcaaagggaatgcttccagtttttgcccattcagtatgatattggccgtgggtttgtcataaatagctcttattattttgagatatgtcccatyaattacctagtttattgagagtttttagcatgaagcgctgttgaattttgtcaaaggccttttctgcatctattgagataattgtgtggtttttgttgtt

SEQ ID NO: 12997 - DNA, 201 bp, Homo sapiens
tgtactatagtactgtttttcttaggtttttatttttaaaaatatatcaccaacaaggtttttgcaagatgtgcacctaacccatttcccccatacatcckacaggttttattgcatgtttttgcatagtgaggtgattttcaggaaggcatataccacattataacataattgattgatattgtcagaaaaatttaaatg

SEQ ID NO: 12998 - DNA, 201 bp, Homo sapiens
gttattggtatataggaatgctgtgatttttgcacattgattttgtatcctgagactttgctgaagttgctcatcagcttaaggagattttgggctgagaygatggggttttctaaatatacagtcatgtcatctgcaaacagggacaatttgactgcctcttttcctaattcaataccctttatttctttctcttgcctt

SEQ ID NO: 12999 - DNA, 201 bp, Homo sapiens
ctacatatggccagccagttttcccagcaccgtttattaactagggaatcctttccccatttcttgtttttctcaggtttgtcaaagatcagatggttttygatgtgtggtattatttccaagggctctattctgttccattggtctatatctctgttttgataccagtaccatgctgttttggttactgtagccttgtag

SEQ ID NO: 13000 - DNA, 201 bp, Homo sapiens
aacttgttccaacataattgaacgatttgagcatagtttgaatttcacatatgcttaagcaatttcatctgcaaaaacaatgagtgaaagcagaaaggccrggtgcagtgtctcgtgcctgtaatcccagcactttgggaggccgaggcgggcggatcaccagaggtcaggagttcaagaccagcctgatcaatatggtga

SEQ ID NO: 13001 - DNA, 201 bp, Homo sapiens
taatgatcaccattctaactgatgtgagatggtatgtcattgtggttttgatttgcatttctctgatggccagtgatgatgagcattttttcatgtgtctkttggctgcataaaagtcttcttttgagaagtgtctgttcatacctgttgcacactttttgatggggttgtttttttcttctaaatttgtttgagttcatt

SEQ ID NO: 13002 - DNA, 201 bp, Homo sapiens
gatttattttagagagccacaggggtggatagagttgctcgccctgccttctgggtgtttccagggtagcaggaggcaaattcaggcagaagtaggaccaytgagctagaagctctagcaggcatggctcacctggctaccagcagtgggggtgggcgaggatgcctgctctatagtctagatgcttcctggaacaacatg

SEQ ID NO: 13003 - DNA, 201 bp, Homo sapiens
gttgcctttatcattttttctttcatgttgacctttgaaaatctgacgattatgtgtcttggggattatcttcttatgtaatacctttcaggggctctgtrtatttcccggatttgaatgttgtcctctctagcgaggttgggtaagtgttcatcaatgatatagcaaaatatgttttccaggttgcttgctttttccccg

SEQ ID NO: 13004 - DNA, 201 bp, Homo sapiens
taatacagtatatcacatttatttgcatattttgaaccatctttgcaccccagggatcagtcccacttggtcatagtgaatgattcttttaatgtgctgtsaattcagtttgctagtattttgttaaagatatttgtatccatattcatcagagatattggactgtgttttcttttctcatagcgtctttgtctggctttg

SEQ ID NO: 13005 - DNA, 201 bp, Homo sapiens
tactgggattacaggcgtgagccactgtgcccagcccattttgagttaatttttgtgagaactgtaaagtctatgtctagagtcattgtttttttttttttgcatttggatgtccagttgtttcagcatcatttgttgagaagagtactatttcttcattgagttgcctttgttcctttgccaaagatcagttgcgtatat

SEQ ID NO: 13006 - DNA, 201 bp, Homo sapiens
gtctccaatctcatccaggtcactgcaaatgctattaattcattcctttttatggctgagtagtattccatcatataaatataccacagtttctttatccrcttgttgattgatgggcatttgggttggttccatgattttgcagttgtgaattgtgctgctataaacatgcatgtgcaagtatcttttttgaataatgac

SEQ ID NO: 13007 - DNA, 201 bp, Homo sapiens
aacccaggaggcagagcttgcagtgagccgagatcatgccactgcattccagcctggacaacagagtgagactcccatctcaaaaaaaaaaaaaaaaaaaagcagaaagcaactttctccatctaccttggttcacctgtatatagtgtgccacaccagctcacatctggtggtatgacattttaatttcagataatttcc

SEQ ID NO: 13008 - DNA, 201 bp, Homo sapiens
gtgcatgtgtctttatagcagcatgatttataatcctttgggtatatacccagtaatgggattgctgggtcaaatggtatttctagttctagatccttgakgaatcaccacactgccttccacaatggttgaactagtttacagtcccaccaacagtgtaaaagtgttcctatttctccacatcctctccagcacctgttg

SEQ ID NO: 13009 - DNA, 201 bp, Homo sapiens
gtccatgtgttctcattgttcagttcccacctatgagtgaggacatgcggtgtttggttttttgtccttgcgatagtttgctgagaatgatggtttccagyttcatccatgtccctacaaaggacatgaactcatccttttttatggctgcatagtattccatggtgtatacatgccacattttcttaatccagtctatca

SEQ ID NO: 13010 - DNA, 201 bp, Homo sapiens
actcgtcatttaacattaggtatatctccaaatgctatccctcccacctcccccaaccccacaacaggccccggtgtgtgatgttccctttcctgtgtccrtgtgttctcattgttcagttcccacctatgagtgaggacatgcggtgtttggttttttgtccttgcgatagtttgctgagaatgatggtttccagcttca

SEQ ID NO: 13011 - DNA, 201 bp, Homo sapiens
tgctgtagtctgagagtgtggttggtatgattttgatttttttttaacttgctaaggattattttattgccagttagattttttggagtatgtgctatgtmgtgatgagaagaatgtatattctgttgtttttgggtggagacttgtgtagtgtctatttgtccactagtcaagtgttgagtttaggtgctgaatatcttt

SEQ ID NO: 13012 - DNA, 201 bp, Homo sapiens
aatcttccttttaataactgcttttgctgcatcacataaattttggtatgtttccatttttgtgtgtcataagatattttttgatttctttttgattttcwttttgacccattgctcaggagtatgttagtttccacatatttgtaaatctttcaatttttcttcagttattgatttctagtttcatgccactgtgattgg

SEQ ID NO: 13013 - DNA, 201 bp, Homo sapiens
gccttttgcttgccttgaggttggtttactcttcttcttctagttgtgatgttaggttgttaattttagatctttctaactttttcatgttgggcatttartgttataaacttccctcttaacactgccttagttgtgtactagattttctgatatgttgtatctttgttctcattagtttcaaagaacttcctaacttct

SEQ ID NO: 13014 - DNA, 201 bp, Homo sapiens
tgttgacttctctgggtctattaaactttataaactttagaaacaatttgttggtatccaaaaaataccttgctgggattttgattgagattgcattgaawctatggattaaatggacaagaacttgtatcttaacaatattgtatctttcattctatgaacttgaaatatctctccatttatttagatcttatttgcttt

SEQ ID NO: 13015 - DNA, 201 bp, Homo sapiens
tggtctatcttattatttttttttataaaaccaatttctggatctgttgatcttttgtattttttttgtatctcaatttcttcagttcaattctgattttkgtacttcttgccttttgcttgccttgaggttggtttactcttcttcttctagttgtgatgttaggttgttaattttagatctttctaactttttcatgtt

SEQ ID NO: 13016 - DNA, 201 bp, Homo sapiens
tagctacatagtattccatggagtatacatatcacattttctttatccagcccaccgttgttgggcatttaggttgactccctgtatttgctattgtgaayagtgctgcaataaacatatatgtgcatgtgtcttcatggtagaatgatttatatattcctttgggtatatacccaacaatgagattgctgggtcaaatag

SEQ ID NO: 13017 - DNA, 201 bp, Homo sapiens
tggttgatgaaccaattttgatacattattattaactaaagtccatagtttacatctggtttgctttttgccttgtacagctcagtgggttttgacaaatrtatcatgtcttggatccaccattacagtgtcacagaatagtttaattgcccccaaaatcccctgtgtcccacctattcacctcttcctccatccacctga

SEQ ID NO: 13018 - DNA, 201 bp, Homo sapiens
taagacatcaatcaatacatgtgaagtatacattggtttcgtcaggaaaggtgggacaactttaaggaaggatgcgtgtgtggggtgcttacaggtcatakatggattcaaggttttctgactggcagttgattgaaagagtcaagttattattatccaaagatctggaatcaatagaaaggagtgtctaggtaaagagaa

SEQ ID NO: 13019 - DNA, 201 bp, Homo sapiens
ttgtaagtttaccttagtgtctgtgagtaaagattaaagatatgtttaatttttattctacaaacttcatatgtctggacttcacattttagttattttartgtaatttaaactcttactctttgatatattaaaaaatatttcatttatcgaactttaacagggataaagaaaatcgaccagaagcagtgaaaagttgtg

SEQ ID NO: 13020 - DNA, 201 bp, Homo sapiens; identical to SEQ ID NO: 8188

SEQ ID NO: 13021 - DNA, 201 bp, Homo sapiens; identical to SEQ ID NO: 8189

SEQ ID NO: 13022 - DNA, 201 bp, Homo sapiens
cttgttgttaaatttatctggtatatttctgaatttcttttttgtgctaccttggagatcactgagtttccttaaaactgttgttttgaattcttgttccragaactcatgaattaacatcttgttatggtcagtcatggtgtttttgctttgtccttttggggaggttatgatttcttgtttgctgttgtttcttgtggg

SEQ ID NO: 13023 - DNA, 201 bp, Homo sapiens
ttagagttgttaatggatttcctataataacccttaagagtttagccatggagcatgtgtcacccattcagagccacatttatttttatattcatttactmtacactatgctcttacttcccaaacatttctcaatctatccagactgaattctgtctccctaacaagtaaaacattctctccatatggttcccagtaagt

SEQ ID NO: 13024 - DNA, 201 bp, Homo sapiens
tactgcctcctggcctgtattattttcattgaaaagtctgttgctaggcaaattggagctttttaatatgttatttgcttcttttctcttgcttcttttargattctctttgtccttgacctttgagagcttcattattatatgtcttatgtagtcttacttgggttgaatctgtttggtgttctcagaatttcttttacc

SEQ ID NO: 13025 - DNA, 201 bp, Homo sapiens
ctaaggttattaagtaaaacagttagagttgttaatggatttcctataataacccttaagagtttagccatggagcatgtgtcacccattcagagccacayttatttttatattcatttactatacactatgctcttacttcccaaacatttctcaatctatccagactgaattctgtctccctaacaagtaaaacattct

SEQ ID NO: 13026 - DNA, 201 bp, Homo sapiens
ccttcaatttttccccattcagtataatgttagcttgggtttgttatagatgatctttataattttgagttatgttccatctatacctattttgatgaggrtttttatcgtaaaggatgttgaagtttatcaaatgctttttcagcagctattgaaataaacatggtttttcttcctgattctgttaatatgatatatcat

SEQ ID NO: 13027 - DNA, 201 bp, Homo sapiens
aatttggattccctttatttctttttgttacctaatttttctggccaggacttccagtgttatgtttaataaaagtggtgaaagttgacatccttgtcttkttccagtccttggaggaaagaccttcaatttttccccattcagtataatgttagcttgggtttgttatagatgatctttataattttgagttatgttcca

SEQ ID NO: 13028 - DNA, 201 bp, Homo sapiens
caacactgtttatgttttaaatgggatggttttcttgatttctttttcagttaagtgaaatggtatataattggtactgttttttgtatattgattttgtrtcctgcaactttattgaatttgttcatcagttctaacagttttcttgggggttgactctaggtttttctaggtataaggttatattatctgtgaacaagg

SEQ ID NO: 13029 - DNA, 201 bp, Homo sapiens
cgtgtcacaatcggcatgagaaaaatgtaaaagggagcagggcgcacagtggctcaggcgtgtaatcccagcactttgggaggctgaggtgggaggatcasctgaggtcagaagttcgagaccagcttggccaacgtggtgaaaccctgtcactattaaaaatacaaaaattagccggacgtggcagtgggcacctgtaat

SEQ ID NO: 13030 - DNA, 201 bp, Homo sapiens
gaatatctttgtttattttctgcctcaatggtctaatactgtcagtggggacttctgtttaatagcaatctcccactattattgtgtgtgggtctaagtcygtaggtccctaagaacttgcttaccctgggtatcaatctgggcggtcctatgttgggtgtgtatatgtttagaatagttaaatcttcttgcagaattgaa

SEQ ID NO: 13031 - DNA, 201 bp, Homo sapiens
taccctgagccaaatatgagtgaccaaggcaattgggttacagtttggttttatacattttagggagacataagacatcaatcaatacatgtgaagtatacattggtttcgtcaggaaaggtgggacaactttaaggaaggatgcgtgtgtggggtgcttacaggtcatagatggattcaaggttttctgactggcagttg

SEQ ID NO: 13032 - DNA, 201 bp, Homo sapiens
tgtggctgttattagaaagttatattggacattgctagctttgaaatatctggcttataaactcttctctcagtttgattaggaaactcctagtaataaawaggaaactaagatctaatgaaatacttcattgttcatgaacaccttcattaattatattaacagcttatcaagtaaaatttttacatttataagcaacca

SEQ ID NO: 13033 - DNA, 201 bp, Homo sapiens
tgcctactgtcaccacttttattaaacacaacactgtttatgttttaaatgggatggttttcttgatttctttttcagttaagtgaaatggtatataattrgtactgttttttgtatattgattttgtatcctgcaactttattgaatttgttcatcagttctaacagttttcttgggggttgactctaggtttttctagg

SEQ ID NO: 13034 - DNA, 201 bp, Homo sapiens
ctttaatattttattaatttggtgtaccagatatatgatctaaaggtttgtattatgtactgtttttcaaggagtgtttctctctttttttttttttttttgtaaacttttattttaagttcaggggtacatgtataggtttgttatttacgtaaactcatgtcacagatatttgttgtacagattatttcatcacccaca

SEQ ID NO: 13035 - DNA, 201 bp, Homo sapiens
ggcacctagtgaaaagattaatctgggcactctttccttgtaagagacaactaaggttattaagtaaaacagttagagttgttaatggatttcctataatmacccttaagagtttagccatggagcatgtgtcacccattcagagccacatttatttttatattcatttactatacactatgctcttacttcccaaacatt

SEQ ID NO: 13036 - DNA, 201 bp, Homo sapiens
ccctggctggactgcagtgatttgatctcggctcactgaagccttgacctcccgggctcaggtgattctccaaccttagcctctcaagtagctgggaccaygggcatgagccaccatgcctggctaattggtattttttttagtagagatggggttttgccatgttgcccaggctagtcttgaactcctggattcatgcaa

SEQ ID NO: 13037 - DNA, 201 bp, Homo sapiens
ccctttgccataccaggtggtatcttcgtaggtcacgtgccacccaagtttactggctttaagcccaaccctagccctacaaatagtctagaaattgcagyccatgtgtcctagactgcctttcaagtgtacctgggaccccagagcccttcagtccatgatgttgaggattgccaagaaactcaagctcggccactagta

SEQ ID NO: 13038 - DNA, 201 bp, Homo sapiens
ttgggggccacctaatatagatatattagggccaggcatgatggctcatgctcagtgttttgggagactgacatgggaggattgcttgtggccaggagttygagaccagcctgggcaacatggccaaactccatccctattaaaaacaaaattaaaaattagccaggcatgggggtgtgcccatgtagtcctagctactca

SEQ ID NO: 13039 - DNA, 201 bp, Homo sapiens
ctttttgttattgtacttgctgctgtatgaaaaaaatataatgctcctctgaaaggaatttaaattttattccttacatatatgtgtgtgtgtgtgtgtgygtatatatatatatatatatatatatatatatgcacatatgtacatttttttttttaagatggagtttcgctcttgttgcccaggctggagtgcaatggc

SEQ ID NO: 13040 - DNA, 201 bp, Homo sapiens
gctttttgttattgtacttgctgctgtatgaaaaaaatataatgctcctctgaaaggaatttaaattttattccttacatatatgtgtgtgtgtgtgtgtrtgtatatatatatatatatatatatatatatatgcacatatgtacatttttttttttaagatggagtttcgctcttgttgcccaggctggagtgcaatgg

SEQ ID NO: 13041 - DNA, 201 bp, Homo sapiens
tttttcattatcattctactagtttaaatttccaccaaaagtgtatatatgttcccttttctctgcatccttgtcagtatttattatcttttttctttttsataatagccattctaactgaggtgagatgatatctcattgtggttttgatttacatttccctgatgattagtgatgatgagcatttttttcatatacttt

SEQ ID NO: 13042 - DNA, 201 bp, Homo sapiens
gagactccatgctatttttcattatcattctactagtttaaatttccaccaaaagtgtatatatgttcccttttctctgcatccttgtcagtatttattaycttttttctttttgataatagccattctaactgaggtgagatgatatctcattgtggttttgatttacatttccctgatgattagtgatgatgagcattt

SEQ ID NO: 13043 - DNA, 201 bp, Homo sapiens
cttcttcattttccatgcaaaaacttgtcaacagcttgtatgtattgcctgtagatagtcccatagctgtcacttaggtattttgtggtggtggatgaaayaggataggaaagattggactgacttccatcatgtggtacctacaaaaacaaggacgctcaattattcaaactgaactgggaatcctaaggtgtattgttg

SEQ ID NO: 13044 - DNA, 201 bp, Homo sapiens; identical to SEQ ID NO: 8210

SEQ ID NO: 13045 - DNA, 201 bp, Homo sapiens
tttgaagaattacttatttattcccattttctcgttctggaaaaaaatggatgtatttgcttagcaagtatttatcactggtttgctgcttttttgggggygctcttggtggctccttaaatcctggttgacctcagctctagtaaatgatgagagtgctgcttgtctggaattggggaggtcccaaaaggtttatcccag

SEQ ID NO: 13046 - DNA, 201 bp, Homo sapiens
agagttttagaaaatagttgaaatctactaagtcaaatctaaggtctcctttaaacctcctggtttttagttttagttccatctttcctattcctttcatytacacacaggcattattaacagttaaattgtatcaattaatattttaaaatattaaaaacattttacttcgttcaacttaaagacaaaattaatatattt

SEQ ID NO: 13047 - DNA, 201 bp, Homo sapiens
gaatggctgaataatattccactgtgtatatgtagcacgtttcttttttttttaaattgtaataggtttttggggaacaggtttttggttacatgaatagkttctttagtggtgatttctgagattttggcgcatccatcacccaagcagtgtacactgtacccaatgtatatttatccctcacccccctcttatcctttc

SEQ ID NO: 13048 - DNA, 201 bp, Homo sapiens
ctttcttccgcttgatcaatttggctattgatacttgtgtatgcttcacaaagttctcgtcctgtgtttttcagctccatcaggtcatttatgttcttctytaaactgggtattctagttagcaattcctgtaaccttttttcaaggttcttagcttcctggcattgggttagaacatgctcctttagctcagaggagttt

SEQ ID NO: 13049 - DNA, 201 bp, Homo sapiens
ggatagaaaaaatataattaatgtttaggaactcttgtatgcttctatattatttaacattttctttgtgtcatgtcttgtttatctagcagaaaacttaktgcagggactgtcttctgtcatatactttttatgtcacaagattgaagagtcttgtggtattaccccaatagttcattgattattatggatcattattat

SEQ ID NO: 13050 - DNA, 201 bp, Homo sapiens
ttggctgggtgcagtggctcacgcctgtaatcccagcactttgggaggcccagacgggctgatcatgaggtcaggagattgagaccatcctggctaacacrgtgaaaccctgtctctactaaaaatacaaaaaaattacctgggtgtggtggtgggctcctgtagtcccagctactcgggaggctgaggcaggagaatggc

SEQ ID NO: 13051 - DNA, 201 bp, Homo sapiens
tgcttgaacctgggaggcagaggttgcagtgagccgagattgcactactgcacaccagcctgggtgacagagcaagacgctgtctccaaaaaaaaaaaaaaccgtagggtgtttaagtctccagctattattgtattgatatctatctttctctttagctctaataatatttgctttacatatctgggtgttccagtgttg

SEQ ID NO: 13052 - DNA, 201 bp, Homo sapiens
gtcaattttagaataagtgcaatgtggtgttgagaagaatgtatattctgttgatttgttgtggaaagttctgtagatgtctattagttctgcttggtctrgagctgagttcaagtcctggatatccttgttaattttctgtctcgttgatttgtctaatattgacagtggggtgttaaagtctcccacaataattgtgtg

SEQ ID NO: 13053 - DNA, 201 bp, Homo sapiens
ttaaatcaatatgtcagggggatatctgcactcccattttcattgcagtagccaaaatatggaaacaacttaagtatccataatggatgaatggatataaygtgcctatgcatacaacagaatattattcacccttaagaaattagaaaatccttccatttgtgacaacatggatggacctggaaggcattatgttaagtg

SEQ ID NO: 13054 - DNA, 201 bp, Homo sapiens
cagagttttagaaaatagttgaaatctactaagtcaaatctaaggtctcctttaaacctcctggtttttagttttagttccatctttcctattcctttcayttacacacaggcattattaacagttaaattgtatcaattaatattttaaaatattaaaaacattttacttcgttcaacttaaagacaaaattaatatatt

SEQ ID NO: 13055 - DNA, 201 bp, Homo sapiens
tgggactacaagtgcgcgccaccacacccagctaatttttgtatttttagtagagacggggtttcaccatgttggccaagatggtctcgatctcttgagcytgtgatccgcccaccatggcctcccaaagtgctgggattacaggcatgagccaccgcgcctggcctgtgtgttcttaaagtttttgtgagtctcttgtgg

SEQ ID NO: 13056 - DNA, 201 bp, Homo sapiens
gggaatacagctttatttctttcattgaaatcattatgcctttatttctttttcttgccttattgcacttgttaagacctccagtataatactgaatagayatagtgagagcaaatatccttgcctccttccaatcttaaggaaaaatcaatttttcactattgaaaatgatgttagctggagatagttcacagatgtcct

SEQ ID NO: 13057 - DNA, 201 bp, Homo sapiens
tgggaatacagctttatttctttcattgaaatcattatgcctttatttctttttcttgccttattgcacttgttaagacctccagtataatactgaatagwcatagtgagagcaaatatccttgcctccttccaatcttaaggaaaaatcaatttttcactattgaaaatgatgttagctggagatagttcacagatgtcc

SEQ ID NO: 13058 - DNA, 201 bp, Homo sapiens
cttcccagacggggcggccgggcagaggcgctcctcacatcccagacgatgggcggccaggcagagacgctcctcacttcctagatggggtggtggccggrcagaggcgctcttcacttccagacggggcagccgggcagaggggctcctcacatcccagacgatgggcagccaggcagagacgctgctcacttcctagac

SEQ ID NO: 13059 - DNA, 201 bp, Homo sapiens
ctcagttcctagatggggtggcggccgggcagaggtgctcctcacttcccagacagggcggccaggcagaggcgctgctcacttcccattcggggcagccrggcagaggcgctcctcacttcccattcggggcagccaggcagaggcactcctcacttcctcccagacggggtggccgggcagaggcgctactcacttccc

SEQ ID NO: 13060 - DNA, 201 bp, Homo sapiens
atttggggcggctgggcagagacgctcctcagttcctagatggggtggcggccgggcagaggtgctcctcacttcccagacagggcggccaggcagaggcrctgctcacttcccattcggggcagccgggcagaggcgctcctcacttcccattcggggcagccaggcagaggcactcctcacttcctcccagacggggtg

SEQ ID NO: 13061 - DNA, 201 bp, Homo sapiens
agaggcgctccttgcctcccagacagggtggcggccgggcagaggtgctcctcacatcccagacggggcggccgggcagaggcgctcctcacttcccagayggggtggccaggcagaggcgctcctcacttcccatttggggcggctgggcagagacgctcctcagttcctagatggggtggcggccgggcagaggtgctc

SEQ ID NO: 13062 - DNA, 201 bp, Homo sapiens
gctaatagtttctctttatatttgtgattagtaacactaatctgttcattttcctctctgctggatgatttagttttttttccccgtctcctgtatgattrtaggtctttattgtgacaagaagtatgtgagcctctcagcatatttatttatttatttatttatttattttattttatttttatttttttgagacagagt

SEQ ID NO: 13063 - DNA, 201 bp, Homo sapiens
tagctatcgggtactgtgctcagtacttgggtgacgggatcattggtaccccaaacctcagcatcacgcagtatatccaggtaacaaacctgcacatgtayccactaaatctaaaacaaaagttaaaaaaaaaaccaccaaaaaaataaaataaaatgaaattaagttcactttcctgtggtctccaatactgacaaaatt

SEQ ID NO: 13064 - DNA, 201 bp, Homo sapiens
ttctatcagtgaatggggagaaccctcctgaaatccaggatctcagatgccaggttaaggccaaccttgcaagcaggccttcctaagtcctgcatttctaytatgttaaactctgcatttcagaaactttagctcttttttcgtttcttgagatgaagtctcgctctttcgcccaggctggagtgccgtggcgtgatcttg

SEQ ID NO: 13065 - DNA, 201 bp, Homo sapiens
aagttactgtgactcaaaaaagcctgaagtgtaatcatagcttccagaagttgcttaatgtactctgagcaaattgctaaagccatcagaaaaagagaaaygtagtatgtgaatttaattagagcctggtgttttctctgaatctcttattttttttcacagggaggaataagtttttttcatctgtaatttggaagccaa

SEQ ID NO: 13066 - DNA, 201 bp, Homo sapiens
ttgacagtttatttctttttaattgctgataaataatcaatttatggatttactacaatttatccatttacctatgaaagggcatcttggttgtttccacrttttggcaattataaataaagctactatcaacacttttgttcaggtttttgtgtggatgtaagttttcagctcaattgggtaaacacaaaggagcatgac

SEQ ID NO: 13067 - DNA, 201 bp, Homo sapiens
tgcccatggacattattaaccttccggcaaatccccacagccgccaaactgcgtctcctcttccgctctcggcgcgcagctcacgctcgcagcgtcagcgwcgccggcggcgccaaggcgtcgtggcgtcgggcgcctgggacgtggcttcaacggccccatccggcgccggcggcgggtgcccggcggtctttgctgccg

SEQ ID NO: 13068 - DNA, 201 bp, Homo sapiens
ctgatcatttatatgtacattttctttgttactgacataaaacacacatactgaaaagtgcataaataagcatatgccttcatgtttttttttttttttcytttttagatggagtctcgctctgttgcccaggctggagcgcaatggcacaatctcggctcactgcaacctccacctcctgggttcaagtgattctcctgc

SEQ ID NO: 13069 - DNA, 201 bp, Homo sapiens
tctgatcatttatatgtacattttctttgttactgacataaaacacacatactgaaaagtgcataaataagcatatgccttcatgtttttttttttttttyttttttagatggagtctcgctctgttgcccaggctggagcgcaatggcacaatctcggctcactgcaacctccacctcctgggttcaagtgattctcctg

SEQ ID NO: 13070 - DNA, 201 bp, Homo sapiens
tcatacatgtatacagtgatcattacccagttgaagactaaaggggtcccctgaagatttatggagctctctttgttctttaatttcttctctcggattcwctcctttgaactctagcttccttggccttcctggacacctccttccctcaactcagagaccgctagaagctgcctgggttttctgttctttgtatcatga

SEQ ID NO: 13071 - DNA, 201 bp, Homo sapiens
catcttgctaatgtcattttgtgttcttcctttttttcccccaggaatgttttgtaatggctttttcttctttctggggactgaattttcaaattgtggckgaaataatagttgatgttccttgtagtcctttaccatatttagggcagaatttaaaatcgtctcatatgctatgatcagattactcttaaaatattgttt

SEQ ID NO: 13072 - DNA, 201 bp, Homo sapiens
atacacccagtagtggaattgctggatcatatggtagttctattggtagttttttgaggagactccatgctatttttcattatcattctactagtttaaayttccaccaaaagtgtatatatgttcccttttctctgcatccttgtcagtatttattatcttttttctttttgataatagccattctaactgaggtgagat

SEQ ID NO: 13073 - DNA, 201 bp, Homo sapiens
ttgaagcccaggcttttcaaagaaaagaggccagtttatttgggggtatttaaaggataaatatagatagaaccttaaatgcatgaactgtgactatatcytagcatcttctcattgtttttatctctggtcccagaacagaagactttcatggtctatatgctgtttgctttaggatacatttgactgacattggaaaag

SEQ ID NO: 13074 - DNA, 201 bp, Homo sapiens
ttctgcctatggatatccagttttcccagcaccatttattgaaaagactgtctttttcccaatgttcttggtgcttttgttgaaaatttgttggctataartaagtggatttattttttgggttctctattgggttccattggtctgtgtgtctgtttttgtgccagtaccatgctgttgtggctactatagctttgaaga

SEQ ID NO: 13075 - DNA, 201 bp, Homo sapiens
catttctactatgttaaactctgcatttcagaaactttagctcttttttcgtttcttgagatgaagtctcgctctttcgcccaggctggagtgccgtggcrtgatcttggctcactgcaaattctgcctccaggtttcaagcaattttcctgtctcagtctcccgagtagctgggactacaggagcatgccaccatgcctg

SEQ ID NO: 13076 - DNA, 201 bp, Homo sapiens
atctagatttagcagtatcagtaattgatgctgtgggtttcctcagtaattgagaaaggcactgttctcgttaaactaggagtggtttaaattattgtagmactatggctacaatgagtggttgaattgatatacgctaaagtttcccatcaggttccagtgcaggaagggaagttttgagaaccccggaatctttcttga

SEQ ID NO: 13077 - DNA, 201 bp, Homo sapiens
ccagaagatgaaatgatcggaaaaattatcaaacatctgaagatggtaagaggcttgttagtttctgtgttgcagggcccccatgatcaccccaggtttartgatgtgctaggaggactcacatgactccacatatagtcataccgatggctaagatttattacagtaggcacatgaggtgaaattaggagaaaaccagat

SEQ ID NO: 13078 - DNA, 201 bp, Homo sapiens
attaacaaatatataggcctttattttctcattttcagtagaattgctaattatttatatttttttcaaacctgatactagcttttaatacttatcactaktgatgtgtattttattaatgttcaggaatatgtgataaatgctgctgatctttgcattattttttattcttcagctggattattcctccactgattttat

SEQ ID NO: 13079 - DNA, 201 bp, Homo sapiens
aaacttttacccaatttgatagggtggggtttttgtttttgtagcaaatgtaatcactttaacattagatatttaaatggtaaatactgatattttgaackgtgtatggatgctcctcaacttatgagggagttacatactgataaacccatcataagttgaatttttcatatggtgaaagtgcatttaatacacctgacc

SEQ ID NO: 13080 - DNA, 201 bp, Homo sapiens
ttttaaaactttattcaaagtggttttatttataacatctgtaagttttattatttgtttttatattttattctctaaaatagtatgttatactatttggwattgatatttatgttttgcataaatgtgctaacaggataccatcaacttttgccatggtttctggcaaataaaaaaaatcctattattggtctcttcata

SEQ ID NO: 13081 - DNA, 201 bp, Homo sapiens
tttgttttcgaagtgctaaatatttcctgtggtctgaatgcttgtgtcatccccaaattcgcatgttgaaattgggacccaattcaacatatggtagaatkaggaggtggggcctttaggaggtgattaggttatgagtgcagcaccctcataaatgggactactgcccttataaaagaggtctgaaaaagctcccttgct

SEQ ID NO: 13082 - DNA, 201 bp, Homo sapiens
ttgcaggggctttggttcaagttctataatgtgtttatttactattatcatcagtaatttccaagagagcattgtgttcttccttcaaatggatttttagwgacaagttatttttgcaaagtcatatttgattatgatttaaaaattatgcttggcaactatgcattcagttaactatagtgttaactatagtgtttcatc

SEQ ID NO: 13083 - DNA, 201 bp, Homo sapiens
atttgccatcttcatagcaattgataatccttttatcattttaaatctgaaatgttttcatctacaaccctccttacttacaggaaatgctataagtcctrtaggtaaaataatccaacattttccttatggagagcaaagggtatagaaaagaagcaagatttgtagccaatttgacctatgttgtaattctgaaaaatt

SEQ ID NO: 13084 - DNA, 201 bp, Homo sapiens
aggtgaactaaaagcactgtctgtaaataaaaaattttaagtttcaactacagatttataaagttatattttaatacttagtacatttttgtgattgaaawttgcaaaagactgaactaaatattatattatacattgtgaagcattctaattttaaatgtgttaattaaaactttatttttcagattttggaatctcttt

SEQ ID NO: 13085 - DNA, 201 bp, Homo sapiens
cttccggcaaatccccacagccgccaaactgcgtctcctcttccgctctcggcgcgcagctcacgctcgcagcgtcagcgacgccggcggcgccaaggcgycgtggcgtcgggcgcctgggacgtggcttcaacggccccatccggcgccggcggcgggtgcccggcggtctttgctgccgcccgggggcgcagaggccgg

SEQ ID NO: 13086 - DNA, 201 bp, Homo sapiens
ttggttataaagtaaccttttggtttgggtagacaaggaataagtggatgggataaaatatttctcagtgacctacaccctatatccctgcatatatctgrtatactccaagtttgactgacacattttttttcctaaaattgaataatggaaactaagttattattttttccaatttacataaaagggtgatgagagaac

SEQ ID NO: 13087 - DNA, 201 bp, Homo sapiens
tttaagtttatggcactggaagaaataagtcttactggtaaaaaggtcctggcataattgattaaatattatttacatttaatataattaattttaaactrttaaagtatctaattggctttgattttttttttacaggttgtttccactttggaagaaacctatggacattgcgatcagaatggagaagaaccatttgta

SEQ ID NO: 13088 - DNA, 201 bp, Homo sapiens
aaaccacttaagtgtcacaactctgcttcaagttaattcctagtccatttgattttgttttgcttttaagatcacgaagctggtgtacacttccgtgcgarcttagagtggtaatgaactccacaatacactgaaaagagcttgaggagacagcagatgaaggactggggctctggttttgtagctgaagcccaggttctc

SEQ ID NO: 13089 - DNA, 201 bp, Homo sapiens
acttttgattcaggcactttgccattagtttgagaactactggtctctgtccttaggggcttttaattctactttggaaaatactttatatatgctgtcartatattagaatgatttccagggtagctttactgatttacagtattattttagttctcatttggtcacacttatggttcagtccaattaaacactcttgaa

SEQ ID NO: 13090 - DNA, 201 bp, Homo sapiens
aaataagtcttactggtaaaaaggtcctggcataattgattaaatattatttacatttaatataattaattttaaactattaaagtatctaattggctttkattttttttttacaggttgtttccactttggaagaaacctatggacattgcgatcagaatggagaagaaccatttgtaaagcatgaacatgaagaattat

SEQ ID NO: 13091 - DNA, 201 bp, Homo sapiens
aaacccagttgctgttactccatcttggctggaagcagaacccttcacataaacccagttgctgttactccatcttggctggaagcagaacccttcacatwatcccttgaaggataatatgtatggtatgtgtccatggcacaaagtctatgatttaatttaaattaactttcaggtatggcacgaggcaggggtcatgga

SEQ ID NO: 13092 - DNA, 201 bp, Homo sapiens
tcttgctcaaaatgtttccctgaactccaggctttgtatataattacttactagactattccacctcagatgcaatgggtcagaaatatgaatttttactsctaaactcatatctcttctagtgttccctatcttagtgaatgagtactatttatcaaattgggtaaatgtgaaatgtggaaaccattcctgacaactcac

SEQ ID NO: 13093 - DNA, 201 bp, Homo sapiens
ctcccaaagtgttgggattacaggcctgagccactgcacctggcccttactttctgatttcaaattatgttttaaagctacagtaattaatacagtatggyactggcataaaatcagacatatagacccatgaaacagattagcaagcgcagaaacaaacccaagcataggtacaagtgatcttcagcaatagtgtcagaa

SEQ ID NO: 13094 - DNA, 201 bp, Homo sapiens
aatggataagcaaattgtggtatagcatacaatgaaatactcttcacaataaagggaacaaactactgacacatagaacaatgtagatgaatctcaaaaayattaggatgtggggaagctaaataaataaggctacatatcatatgattctatttatatgaaattctgggaaagggaaaactgtagtaaaggaccagtgtt

SEQ ID NO: 13095 - DNA, 201 bp, Homo sapiens
ctgggaatacagctttatttctttcattgaaatcattatgcctttatttctttttcttgccttattgcacttgttaagacctccagtataatactgaatagacatagtgagagcaaatatccttgcctccttccaatcttaaggaaaaatcaatttttcactattgaaaatgatgttagctggagatagttcacagatgtc

SEQ ID NO: 13096 - DNA, 201 bp, Homo sapiens
ttctttgtcctgtgttttcccaaccatggtcattatgggagagggtgacgggagaaagggctgggaaagagggagccctaatgttgaatctttcttttttwtttttttatttttttttagtgtttattgatcattcttgggtgtttctctgagagggggatttggcagggtcataggacaatagtggagggaaggtcagca

SEQ ID NO: 13097 - DNA, 201 bp, Homo sapiens
ttggtctgtgtgtctgtttttgtgccagtaccatgctgttgtggctactatagctttgaagagtatgttgtgtgtgtgtttgcatgtgtgtgtgtgtgtgytttttttttttttttttaaagagacaaggtctcactttgttggccaggctggagtgcagtggcacaatcatagctcactgcagcctcgaactcctgggct

SEQ ID NO: 13098 - DNA, 201 bp, Homo sapiens
taccatgttggccaggctggttttgaactgctgacctcaagtgatcttcccgccttggcctcccaaagtgctaggattacaggcatgagccactgtgcctrgcattttttttttttttttttttgaaatggagtcttgttctgtcacccaggctggagtgcagtgccatgatcttggctcactgcaacctctgcctcctgg

SEQ ID NO: 13099 - DNA, 201 bp, Homo sapiens
atattctgagcactgagtatcatatcctatcatggcactgagtgtcatatcctatcatgcttccacgtggttctttccctggccatggatagttttcatayatgtatacagtgatcattacccagttgaagactaaaggggtcccctgaagatttatggagctctctttgttctttaatttcttctctcggattctctcct

SEQ ID NO: 13100 - DNA, 201 bp, Homo sapiens
tttgtttttcttttaaaaagtcattctggctattgcagatccttcctatttccaaatgaactttagcgtcaggttgcaaattgcttcacaaaagcctgatkgtagtttcaatggaattgcattggatttatagatcaatttggggagaactgacatcctaacattattaaatcttctgattcatgaacacagtgtatcttc

SEQ ID NO: 13101 - DNA, 201 bp, Homo sapiens
cattttttgtatgtttgttggctacatgtatgtcttcttttgaaaagtgtccattcatgtcctttgtcccctttttaatggagtcattttttccttgtaamtttgtttaagttccttatagattctggatataacacctttgtcagatgcatagtttacaaatattttctcccaatctctaggttgcctgtttactctgtt

SEQ ID NO: 13102 - DNA, 201 bp, Homo sapiens
gcatcagaatttctgtatggttcttctgtatgatttctatcactctgttaaacttctcattttgttcgtgtattgtttttctgatttttgttaagttgtcyatcagtgttttcttatagcttactgagcttccttaaaactattatttgaatatttcgtcagatattgatagagtcacttcttctagactttatggactag

SEQ ID NO: 13103 - DNA, 201 bp, Homo sapiens
ttttcaagaatgttgtatatttgatattattagtctttcttttacctaacaatgtacagttaaagttcctctgtgtctttcaatagtttgacagtttattwctttttaattgctgataaataatcaatttatggatttactacaatttatccatttacctatgaaagggcatcttggttgtttccacgttttggcaattat

SEQ ID NO: 13104 - DNA, 201 bp, Homo sapiens
gattctatttatatgaaattctgggaaagggaaaactgtagtaaaggaccagtgtttgtcttgagctaaggtaggaggggagaattgactgcaaaggagtrcagtgaagctttttgaaatgatggaaatgttttatatttttattgtggtggtgattacccaactattaaaaggactatgtaatcacaatccttatcctgc

SEQ ID NO: 13105 - DNA, 201 bp, Homo sapiens
atcacaatccttatcctgcatgaccttgtggttattatgttttgaagccctgccaggaatgaatcaaagaaccaaaactaaaatctgaaattgaagtccartagaaactgggatgactagaggtgggagggaggcggggtaagggttgaaaaactagctatcgggtactgtgctcagtacttgggtgacgggatcattggt

SEQ ID NO: 13106 - DNA, 201 bp, Homo sapiens
gataattgctcatataaatatatttgtaaaatattgtatcattacttggctatagctatagataagaaaaatataaaaattactttgatttaataaaggarataatgaaatttatttgaggtatgggaacaaaatgggtatttactaaataactggttaattttattattttagataagtaaagatcaaactcttttacaa

SEQ ID NO: 13107 - DNA, 201 bp, Homo sapiens
tacatttaatataattaattttaaactattaaagtatctaattggctttgattttttttttacaggttgtttccactttggaagaaacctatggacattgygatcagaatggagaagaaccatttgtaaagcatgaacatgaagaattatctttatctgtaagtatatgcaaccctaatatagagacattaacactgaaaa

SEQ ID NO: 13108 - DNA, 201 bp, Homo sapiens
agaagtaggctaatagtttctctttatatttgtgattagtaacactaatctgttcattttcctctctgctggatgatttagttttttttccccgtctcctrtatgattataggtctttattgtgacaagaagtatgtgagcctctcagcatatttatttatttatttatttatttattttattttatttttatttttttga

SEQ ID NO: 13109 - DNA, 201 bp, Homo sapiens
ttatccttaaaaattttattaaaaattttgttattatttttatcttttaaagagagggtctcactctgtcacccatgctggagtgtagtggcatgaatatmgctcactgcagcctcaaactcttgggctcaagtgatcctctctgctcagccttttgaggtagctaggaccacaggcacaggccactgaggccagctgatt

SEQ ID NO: 13110 - DNA, 201 bp, Homo sapiens
ggcttccacaaacactgaactttgtttcctaaactcaaggtgaccagtatgctctgagttccccttccctacactgtggactggcaattctagacagcaarctggggtcatcacagggcctttccactttatttccatatgtactgcattcactgttttccaatttctgaataccactgtttcatgtatttttgtccagta

SEQ ID NO: 13111 - DNA, 201 bp, Homo sapiens
aaaaagagaaatgtagtatgtgaatttaattagagcctggtgttttctctgaatctcttattttttttcacagggaggaataagtttttttcatctgtaayttggaagccaagtcagtaacaaaatgaaaccagtaaagcatctgttgaccaccagtaacaaatcggcaaatgttccagcattaactactaaaaaaggact

SEQ ID NO: 13112 - DNA, 201 bp, Homo sapiens
tatggagaaaatgctttgcaaattcgtaagatcttttttcagtggcagttgtttcaggttcttagctttactagtattgacctactgtctttctctgttgytgtatttcacttgtttaccataattttcttttaaaagtacctcctctcttcttctctggccacacttaatcctctcttcccttcctgttttctaaattct

SEQ ID NO: 13113 - DNA, 201 bp, Homo sapiens
attagtgcagtccccccattcccgcataaagcttcccctgttattaacattttgcattaatgtgatacatttgttatggttgatgaaccaattttgatacwttattattaactaaagtccatagtttacatctggtttgctttttgccttgtacagctcagtgggttttgacaaatgtatcatgtcttggatccaccatta

SEQ ID NO: 13114 - DNA, 201 bp, Homo sapiens
atgagccaccatgcccggcctatttctgctctttgtaattttcttccttctatgaactattggcttaatttgttatttttctcgttctttggtgtatcacmttaggttatttatttgagatcattatttcttttttaagtagacatctattgcaataaacttcccacttagaactgcttttgctgcatttcatgagtttta

SEQ ID NO: 13115 - DNA, 201 bp, Homo sapiens
ggggtttcaccatgttggtcaggctggtctcgaactcctgaactcgtgatccgcctgcctcagcctcccaaagtactgggattacaggcgtgagccactgygcccagcccattttgagttaatttttgtgagaactgtaaagtctatgtctagagtcattgtttttttttttttgcatttggatgtccagttgtttcagca

SEQ ID NO: 13116 - DNA, 201 bp, Homo sapiens; identical to SEQ ID NO: 8576

SEQ ID NO: 13117 - DNA, 201 bp, Homo sapiens; identical to SEQ ID NO: 8788

SEQ ID NO: 13118 - DNA, 201 bp, Homo sapiens
ctggagtgcagtggcgcgatctcaggtcactgcaacttctgcctcccgggttcaagtgattctcctgcgtcagcctcctgagtagctgggactacaagtgygcgccaccacacccagctaatttttgtatttttagtagagacggggtttcaccatgttggccaagatggtctcgatctcttgagcttgtgatccgcccac

SEQ ID NO: 13119 - DNA, 201 bp, Homo sapiens
actccagcctcccggaaagcggtcgggcaacgatgacgacaatgacgcgccagctctgcccgcgccaccagcggcgctttccgatgatctcaccaatgtayagctttttatacacaaattacataccaataaagtgatttaaaagtataggataaaatatagaaactaggattttattaaattattatgcataaatttata

SEQ ID NO: 13120 - DNA, 201 bp, Homo sapiens; identical to SEQ ID NO: 8585

SEQ ID NO: 13121 - DNA, 201 bp, Homo sapiens
tttatccctctagctctgctttagtaggggctatgtctttggattgttcaacttcctctctgaagttacttagtcccatcccatggtttattgcatttctstgcctgtttatggacatgtttcctcagcagctcattggtcatgtgttgaaatcgcttgtgcagttgttgtaaggtttacttttgttcccattatcacgtg

SEQ ID NO: 13122 - DNA, 201 bp, Homo sapiens
ttccgtctttttctattgattggaatagtttcagaaggagtggtaccagctcctccttgtacctctggtagaattcggctgtgaatccatctggtcctggrctttttttggttggtaagctattaattattgcctcaatttcagagcctgttattggtttattcagagattcaacttcttcctggtttagtcttgggacgg

SEQ ID NO: 13123 - DNA, 201 bp, Homo sapiens
gggcaggatgcggtggcttacgcctgtaataccagcacttcgggaggctgaggcggacagatcacttgaggtcaggagttcgagactagcctggccaacayggcaaaaccctgtctctaccaaaaatacaaaaattagctgggcatggtggcacgtgcctgcagtcccagccactccagagactgaggcagaagactggcg

SEQ ID NO: 13124 - DNA, 201 bp, Homo sapiens
tctgggcaggatgcggtggcttacgcctgtaataccagcacttcgggaggctgaggcggacagatcacttgaggtcaggagttcgagactagcctggccarcacggcaaaaccctgtctctaccaaaaatacaaaaattagctgggcatggtggcacgtgcctgcagtcccagccactccagagactgaggcagaagactg

SEQ ID NO: 13125 - DNA, 201 bp, Homo sapiens
tcctaaactcaaggtgaccagtatgctctgagttccccttccctacactgtggactggcaattctagacagcaaactggggtcatcacagggcctttccastttatttccatatgtactgcattcactgttttccaatttctgaataccactgtttcatgtatttttgtccagtatttaagtggtttaaagtagaaaagta

SEQ ID NO: 13126 - DNA, 201 bp, Homo sapiens
tgcgtatatttgtgagtctgtttttggactctttattctgtttgcttgtctgtctattttggcagtgctacatgtcttgattactttagcttttagtaagyattgaagttgggtagtgtcagtcctccaactttgttgttcttcaacattgtgttgacttctctgggtctattaaactttataaactttagaaacaatttg

SEQ ID NO: 13127 - DNA, 201 bp, Homo sapiens
gtcaaatacgttttctgcatttattgatatgatcatatgatttttcttctttagcatgtagattacattaattgatttttgaatattggactagccttacrtacctggaataacccatttggttgtgttgtatagttctttctatacatttatgtatgtgatttgctaatgttttgttgaggattttcacatatgtattca

SEQ ID NO: 13128 - DNA, 201 bp, Homo sapiens
cttcagatctattaatatttgttttatatatttaggtgttgcaatgttgggtgtgtatatatttgttatattctcttgagcttttttcattatataataakcttctttgtctcttgtgactgtttttgatttaaagtatctggtctgatgtccaagtatagccacagctgctcatttattggtttctaattgcatggagta

SEQ ID NO: 13129 - DNA, 201 bp, Homo sapiens
tttgtagctgaagcccaggttctcaaaggtcctaccaggcctgtactttatttctcctccgcgggcctctaggccaaatgcctggatgaatctgcgctcakggggcgtcctggaattacacttgggagagaataagaaaggaggaggccgatgtgcccatggacattattaaccttccggcaaatccccacagccgccaaa

SEQ ID NO: 13130 - DNA, 201 bp, Homo sapiens
taaaattcctttttattctttattctttttttcctaactgtatattttcaaataactttaagtttacagattctttcttctccttgatgaattatacagtkgacatattttttacttatcttttctaattttaattttattatattctttggcatcagaatttcttttttttattatactttaagttttagggtacatgtg

SEQ ID NO: 13131 - DNA, 201 bp, Homo sapiens
catcagaatttcttttttttattatactttaagttttagggtacatgtgcacaacgtgcaggttagttacatatgtatacatgtgccatgttggtgtgctscacccagtgactcgtcatttaacattaggtatatctccaaatgctatccctcccacctcccccaaccccacaacaggccccggtgtgtgatgttcccttt

SEQ ID NO: 13132 - DNA, 201 bp, Homo sapiens
acatgaatcaaatgtagatttagtcttttcacatagtcccatatttcttggaggttttgtttgtttctttttttttttttttttccaggaggaaaaaaaarcctatttaatgaactcagaaaaaatgaagacaaaagaaacataaaatgaacatatggccttttccatgatacatgctgttattttacctgtcttctatta

SEQ ID NO: 13133 - DNA, 201 bp, Homo sapiens
ccctgtcactttcaggtacatgaatcaaatgtagatttagtcttttcacatagtcccatatttcttggaggttttgtttgtttctttttttttttttttttccaggaggaaaaaaaagcctatttaatgaactcagaaaaaatgaagacaaaagaaacataaaatgaacatatggccttttccatgatacatgctgttatt

SEQ ID NO: 13134 - DNA, 201 bp, Homo sapiens
ttcctgtgttagtttgctgagaatgatggtttccagcttcatccatgtccctgcaaaggacatgatctcatccttttttatggctgcatagtattccatggtgtatatgtgccacatttgctttatccagtgtatcattgatgggcacttgggttggttccaagtctttgccattgtgaacagtgctgcaataacatatgt

SEQ ID NO: 13135 - DNA, 201 bp, Homo sapiens
tgcccagcattcacttctgctgttatatcctactctcattccagtcattacaaaaatgaagtctctgttctaaatccccagtgctagaatttatctttgckaagtccttgacttcattttttccccaacttttcctcctagcataaggattggagatgtctacatgggtggatctctgaatttagggcaagcaattatttt

SEQ ID NO: 13136 - DNA, 201 bp, Homo sapiens
tatcaaacttgtactggttgttgaaaattgaatctgctatccagtcagccaacattaatctagattcagtgtcttaagaaattataaatggcattggaaarcattatttatttattttttattctttttttttaatcatcatcaagggtttttactatgcccaaatgcaaagattatgccactgaaccaccacaaataaga

SEQ ID NO: 13137 - DNA, 201 bp, Homo sapiens
gagctgtaaatgatcaagttttgttagatgctgtaagtatagtactctcaatttgaaattacactttgtccttgagttcttaacagattctagaaattgtyaggatacataatcctatataaagatccaatccttacttagtttatttaagagatttgtatgcatatgtgaactttctggaaagccttgtctattttgttc

SEQ ID NO: 13138 - DNA, 201 bp, Homo sapiens
catggatagctgtctagtggttgtttctttgtggggagatgaagactgatatctcctactttctcatcttgctaatgtcattttgtgttcttcctttttttcccccaggaatgttttgtaatggctttttcttctttctggggactgaattttcaaattgtggctgaaataatagttgatgttccttgtagtcctttacca

SEQ ID NO: 13139 - DNA, 201 bp, Homo sapiens
agctgagtgacagaggcaaaaattaattcctaaagatccaaagggtacacaatacctgtcaaatttcgtatgtctgggcaggatgcggtggcttacgcctrtaataccagcacttcgggaggctgaggcggacagatcacttgaggtcaggagttcgagactagcctggccaacacggcaaaaccctgtctctaccaaaaa

SEQ ID NO: 13140 - DNA, 201 bp, Homo sapiens
tcagacagggacatttaagtcttcagaggattctgctgccttttgtttggcaatggcctgccctcagaggtggagtctacagaggcagacaggcctccttragctgtggttggctccacccagtttgagcttcctggctgctttatttacctattcaagcctcggcaatggcgggcgcccctccctcagccttgctgtggc

SEQ ID NO: 13141 - DNA, 201 bp, Homo sapiens
tggtgttttattttttttcagattgaagaactccctttagcattttttataagatgggtctggtagttgtgaattctctcagctttattttgtctggagawgactttatatctccttcatatttgaaggataattttgatggatacaatattcttgaatggaagttgtcttctttcaacactttgaaaatctcattctact

SEQ ID NO: 13142 - DNA, 201 bp, Homo sapiens
agcggaggctgcagaacagcagatattggtgaacagcaaatattgctgcctgatcgttcctctggaagttttgtctcagaggagtacctggccatgtgaartgtcagtctgccctttctggggggtgcctcccatttaggctactcaggggtcagggacccacttgaggaggcagtctgtccgttctcagatctccagctg

SEQ ID NO: 13143 - DNA, 201 bp, Homo sapiens
gccaaataggaatagaacattggtacaaaaaaactaaaaatagtaaattgtcatgttgaagaactgagtagtctgaccaagtgtgagaattttgcagcatmctaatcacacactgttagaaccacattgaaaaaacgctggagcttcttagatggcttgaggatgttgcagcagtttctggttttgcttccttgtgtttct

SEQ ID NO: 13144 - DNA, 201 bp, Homo sapiens
gctagtccagaagctggccttgagcctcatctggcaagaatacatggataaatcatacagctcccaggcactgcaactgtggtctttactgaggcagtgayattggtgctggtctgcccttgggcccaaggcttgtagaggtcaccgtggactcaagagttgcccccacaaaatgtcccagtggctcctacctcagtctag

SEQ ID NO: 13145 - DNA, 201 bp, Homo sapiens
gttgtattgctaggcattttattctctttgaagcaattgtgaatgggagttccctcatgatttggctccctgtttgtctgttattggtatataggaatgctgtgatttttgcacattgattttgtatcctgagactttgctgaagttgctcatcagcttaaggagattttgggctgagacgatggggttttctaaatatac

SEQ ID NO: 13146 - DNA, 201 bp, Homo sapiens
gattgtacctttttatgggagctattgtgaagaatttatggccatttgtagtctgccacagtggggtatatattttctctctccctgtgtataaaattcarttaagtctagatttgtttcattattttaattttctatcatctttattcgttagaatatagactaggctgctataaaaagagacgccatataattcaatgg

SEQ ID NO: 13147 - DNA, 201 bp, Homo sapiens
tggccattttcacaatattgattcttcctatccatgagcatggaacgttcttccatttatttgtgtcctcttttatttcactgagcagtggtttgtagttmtctttgaagaggtccttcacatgccctgtaagttgtattgctaggcattttattctctttgaagcaattgtgaatgggagttccctcatgatttggctcc

SEQ ID NO: 13148 - DNA, 201 bp, Homo sapiens
cttaggattgacttggcaatgtgggctcttttttggttccatatgaactttaaagtagttttttcgaattctatgaagaaagtcattggtagcttgatgcrgatggcattgaatctataaattaccttgggcagtatggccattttcacaatattgattcttcctatccatgagcatggaacgttcttccatttatttgtg

SEQ ID NO: 13149 - DNA, 201 bp, Homo sapiens
tccccatttcttgtttttctcaggtttgtcaaagatcagatggttttcgatgtgtggtattatttccaagggctctattctgttccattggtctatatctstgttttgataccagtaccatgctgttttggttactgtagccttgtagtatagttggaagtcaggtagcgtgatgcctccagctttgttcttttgacttag

SEQ ID NO: 13150 - DNA, 201 bp, Homo sapiens
ttcattttactctcattatcactcagaaactcttcacttctgaaatactaaactataatatcctacagtcatctgaatagttccagtccttgacacgtgtrgatcttttatgtctttcagctccaattattgtgtcactctacagactgatatcaatgtttcattcttttcatgagttaatgaagactttcttaccttaat

SEQ ID NO: 13151 - DNA, 201 bp, Homo sapiens
gtgacacctcttggttctggatttggctggtgggtgtgcttctagtgacagtggtactaatgtctgatgcatgatacctgtggagtggtcaaggagcttgkatctgggagcacaggcatgtatggattgacagtggctttggggtccagatgctagtgtgtgcaagtctactgctgctctgaggactgtgatatggatatc

SEQ ID NO: 13152 - DNA, 201 bp, Homo sapiens
ccgtttattaactagggaatcctttccccatttcttgtttttctcaggtttgtcaaagatcagatggttttcgatgtgtggtattatttccaagggctctrttctgttccattggtctatatctctgttttgataccagtaccatgctgttttggttactgtagccttgtagtatagttggaagtcaggtagcgtgatgcc

SEQ ID NO: 13153 - DNA, 201 bp, Homo sapiens
tgcttagcatgtacgaaaatttcagactctcacaaggaaaggaggttcagtataaacaatgttatacaaacagtttagggacagtgagctgcttctatcartgaatggggagaaccctcctgaaatccaggatctcagatgccaggttaaggccaaccttgcaagcaggccttcctaagtcctgcatttctactatgttaa

SEQ ID NO: 13154 - DNA, 201 bp, Homo sapiens
atagtttgctgagaatgatggtttccagcttcatccatgtccctacaaaggacatgaactcatccttttttatggctgcatagtattccatggtgtatacrtgccacattttcttaatccagtctatcattgttggacatttgggttggttccaagtctttgctattgtgaatagtgccgcaataaacatacgtgtgcatg

SEQ ID NO: 13155 - DNA, 201 bp, Homo sapiens
ggtctaacatttaagtctttaatccatcttgaattgatttttgtataaggtgtaaggaagggatccagtttcagctttctacatatggccagccagttttyccagcaccgtttattaactagggaatcctttccccatttcttgtttttctcaggtttgtcaaagatcagatggttttcgatgtgtggtattatttccaag

SEQ ID NO: 13156 - DNA, 201 bp, Homo sapiens
tttacacatttctactttttctgcctttgcttagggtgtttacttttcatttttttctctctaatgaaactctgtccattctttaaggcttagcttctttrtgtttttctactttaacttctcagctcctaaatatttattattcttctataccactcttttgacacgtgggatagaaaaaatataattaatgtttaggaa

SEQ ID NO: 13157 - DNA, 201 bp, Homo sapiens
aagttacctagatagtctcttctactgccttgtaaaagttttatagttttgcattttacatttataactatgatccattttgagttaatttttttttttttgagatggagtctcgctctgtcgctggagtacaatggtgcaatctcgacccactgcaacctccgcctccctgttcaagtgattctcctgcctcagcctccc

SEQ ID NO: 13158 - DNA, 201 bp, Homo sapiens
ttttctgcctttgcttagggtgtttacttttcatttttttctctctaatgaaactctgtccattctttaaggcttagcttctttatgtttttctactttawcttctcagctcctaaatatttattattcttctataccactcttttgacacgtgggatagaaaaaatataattaatgtttaggaactcttgtatgcttcta

SEQ ID NO: 13159 - DNA, 201 bp, Homo sapiens
tctgcctcctgggttcaagtgattctcgtccctcagcctcccaagtagctgggattacaggcatgcaccaccacacccagctaacttttgtatttttttttcttttttttttagtagagagagtttcaccatgttggccaggctggtcttgaactcctgacctcaggtaatctgcctgccttggcctcccaaagtgctggg

SEQ ID NO: 13160 - DNA, 201 bp, Homo sapiens
ttctcttttgggttctttgatacagttgtaaagcttaacaggttagctagatccttcccatagaccttattgacttagcaacagcaactaaagcagttctsttttagtatgctatagtccctctgatattccatatcataagaaggtcacatatgttggacattaatccagttttgtcttttactagatatatagtattga

SEQ ID NO: 13161 - DNA, 201 bp, Homo sapiens; identical to SEQ ID NO: 8275

SEQ ID NO: 13162 - DNA, 201 bp, Homo sapiens
agtaaaacattctctccatatggttcccagtaagttgtatgttgttaaattaaacagacttttttttttttttgcctcagctatagttaatattattgatygtgccctcatttttgaaacactagtcctttggcttctgtgaattacattttcctggctattgttttacctctttggctgtcttctttttagagtcccctc

SEQ ID NO: 13163 - DNA, 201 bp, Homo sapiens
tctttgatacagttgtaaagcttaacaggttagctagatccttcccatagaccttattgacttagcaacagcaactaaagcagttctcttttagtatgctrtagtccctctgatattccatatcataagaaggtcacatatgttggacattaatccagttttgtcttttactagatatatagtattgatcaagttatgtaa

SEQ ID NO: 13164 - DNA, 201 bp, Homo sapiens; identical to SEQ ID NO: 8280

SEQ ID NO: 13165 - DNA, 201 bp, Homo sapiens
gcttttttgtttttgcattttattatttttctatttttaaaaaaagacagataaaattgtatttttccatatgtaatatgttcattgaaaaaagttagtaygtgtttattgcagaaatattgaaaacataaagaagaaaataacacctctatcaacaaatttagaatttcttatatcaatttttatgattttatgtatgta

SEQ ID NO: 13166 - DNA, 201 bp, Homo sapiens
gggcgcccctccctcagccttgctgtggccttgcagtttgatctcagcctgctgtgctagcaatgagtgaggctccgtgggcgcaggaccctccaagccakgcgcgggatataatctcctggtgtgctgtttgctaagaccattggaaaagcgcagtattagggtgggagtgacctgtttttccaggtgccgtctgtcacc

SEQ ID NO: 13167 - DNA, 201 bp, Homo sapiens
tatacatataatgaaattattattgagtcttaaaggaaattctaatacatgctacaacatggatgaaccctgaggacattctgctaagtataataagccasccacaaaaaagacaaatgcaattattcctcttacatgaggtatctagagtagtgtcaacttcatagacacagaagatagaatgatggttgccagggggta

SEQ ID NO: 13168 - DNA, 201 bp, Homo sapiens; identical to SEQ ID NO: 8285

SEQ ID NO: 13169 - DNA, 201 bp, Homo sapiens
gtaaagttacgtaacactgctgaactatacacttaaaatgattaagatggtaaattttatgttatatgtatttttccatagttaaaaaagttaaaagttgygatgatacaaaatgtagtttgtgaatattttttcacctgtaaactcatttaatttctttttaaaataaatgttttattttttattgacaaaattatatat

SEQ ID NO: 13170 - DNA, 201 bp, Homo sapiens
ctgtgcttttggggtcatatcaaaaaaatcttttccaagaccaatgtcaagaagttttcaccctgttttcttcaagtagttttacagtttcaggttttacrtttaagtttttaattcattttgggtctatttttgtatatgagatgagataaggaccctatttcattcttctgtagtctcttcaacacaatttattgaaga

SEQ ID NO: 13171 - DNA, 201 bp, Homo sapiens
acatttggaaatgaggatctctttgtggccttgatgatgatgatattttcatgggtatattcatatccccaattcattgggatagatacaataaaaatgtrtagctttttgttttgttttgtttttatacaacattttcagcctttattgagagtacagtcatcatgccaaaattcatccatcaacatacaaccttatttc

SEQ ID NO: 13172 - DNA, 201 bp, Homo sapiens
cactgaggccagctgatttttttttttttgtacagatggaggtctcactatgtcgcccaggctggtcttgaacttctggcctcaagtgatcctcccacctygggctcctaaaatgttgggattacaggcatgagccgccatgcccggcatgtttgacttttgtggggtttcctaagtgtatgaacattttgagacttaaag

SEQ ID NO: 13173 - DNA, 201 bp, Homo sapiens
gaatgtttcttaaagtgtagttgatagaacacgtttaaatgtcagccaagatacctgttataagtgcacattactggattagatttcttttgtgagtctctgagttaggagtctactgcttcaacaggtaggaaacaagggattcttatgcacactaacatttgagaatcttgtgataatctttttactgctgacataatt

SEQ ID NO: 13174 - DNA, 201 bp, Homo sapiens
aagtaataattattaggttaacagtgcagactccttgccttggagtttggagccatatagttgagctggttgtcaagcaagtattgaaattcttagttaargatacgtgttactgaaactagattcttttttttttttttttttttttttttttggagacagagtcttgctctgttgcccaggctggagtgcagtggcatg

SEQ ID NO: 13175 - DNA, 201 bp, Homo sapiens
ttggggttttctagatataggattatgttgtctataaatgggaatagtttgacttccactcttcctatttggatgcctttatttctttctcttgtctgatwgctctgaccaggacttccaatactgtgttgaataggagtgctgggagagggcacctcaaggaatgtttcttaaagtgtagttgatagaacacgtttaaat

SEQ ID NO: 13176 - DNA, 201 bp, Homo sapiens
tatcattggatttataaattgctttggaaagtattgccattttaaccatattgattctttctatccatgcacatggaatgtttttccatttgtttgtgtcrtttctgatttctttgagcagtgttttgtagttccccttgtagagattgttcacctccctggttagctgtattcctaggtattctttttgtggcaattgtg

SEQ ID NO: 13177 - DNA, 201 bp, Homo sapiens; identical to SEQ ID NO: 8848

SEQ ID NO: 13178 - DNA, 201 bp, Homo sapiens; identical to SEQ ID NO: 8294

SEQ ID NO: 13179 - DNA, 201 bp, Homo sapiens
ctcaggcaatctgcccgcctcagcctcccaaagtgctaggattacaggcgtgagccactgcgcccggccttgtccactgtttaatggtgttgtttgtttgtgtcttataaatatgcttaagtttcttatagatgttggatattagacctttgtcaggtgaatggtttgcaaatgttttctcccaatttctaggttgcctgt

SEQ ID NO: 13180 - DNA, 201 bp, Homo sapiens; identical to SEQ ID NO: 8851

SEQ ID NO: 13181 - DNA, 201 bp, Homo sapiens; identical to SEQ ID NO: 8296

SEQ ID NO: 13182 - DNA, 201 bp, Homo sapiens
tctcaggcaatctgcccgcctcagcctcccaaagtgctaggattacaggcgtgagccactgcgcccggccttgtccactgtttaatggtgttgtttgtttgtgtcttataaatatgcttaagtttcttatagatgttggatattagacctttgtcaggtgaatggtttgcaaatgttttctcccaatttctaggttgcctg

SEQ ID NO: 13183 - DNA, 201 bp, Homo sapiens; identical to SEQ ID NO: 8852

SEQ ID NO: 13184 - DNA, 201 bp, Homo sapiens; identical to SEQ ID NO: 8619

SEQ ID NO: 13185 - DNA, 201 bp, Homo sapiens; identical to SEQ ID NO: 8297

SEQ ID NO: 13186 - DNA, 201 bp, Homo sapiens
atctcaggcaatctgcccgcctcagcctcccaaagtgctaggattacaggcgtgagccactgcgcccggccttgtccactgtttaatggtgttgtttgtttgtgtcttataaatatgcttaagtttcttatagatgttggatattagacctttgtcaggtgaatggtttgcaaatgttttctcccaatttctaggttgcct

SEQ ID NO: 13187 - DNA, 201 bp, Homo sapiens; identical to SEQ ID NO: 8855

SEQ ID NO: 13188 - DNA, 201 bp, Homo sapiens
ctctaggcccccacctgctgacaggccctggtgtgtgatgttcccctccctgtgtccatgtgttcttattgttccactcccacttatgagcgagaacatgyggtgtttggttttctgttcctgtgttagtttgctgagaatgatggtttccagcttcatccatgtccctgcaaaggacatgatctcatccttttttatggc

SEQ ID NO: 13189 - DNA, 201 bp, Homo sapiens; identical to SEQ ID NO: 8298

SEQ ID NO: 13190 - DNA, 201 bp, Homo sapiens
gatctcaggcaatctgcccgcctcagcctcccaaagtgctaggattacaggcgtgagccactgcgcccggccttgtccactgtttaatggtgttgtttgtttgtgtcttataaatatgcttaagtttcttatagatgttggatattagacctttgtcaggtgaatggtttgcaaatgttttctcccaatttctaggttgcc

SEQ ID NO: 13191 - DNA, 201 bp, Homo sapiens; identical to SEQ ID NO: 8858

SEQ ID NO: 13192 - DNA, 201 bp, Homo sapiens; identical to SEQ ID NO: 8300

SEQ ID NO: 13193 - DNA, 201 bp, Homo sapiens
ttgttctttcttatacatatgactaattatttcacttctgttttggatttcatatcctcttgccttctcaagactttgtgtttgtttgtttgtttgtttgkgtttttgagaacttgatctcattctggttgccctggctggactgcagtgatttgatctcggctcactgaagccttgacctcccgggctcaggtgattctc

SEQ ID NO: 13194 - DNA, 201 bp, Homo sapiens; identical to SEQ ID NO: 8860

SEQ ID NO: 13195 - DNA, 201 bp, Homo sapiens; identical to SEQ ID NO: 8304

SEQ ID NO: 13196 - DNA, 201 bp, Homo sapiens
tttgttattgtacttgctgctgtatgaaaaaaatataatgctcctctgaaaggaatttaaattttattccttacatatatgtgtgtgtgtgtgtgtgtgtrtatatatatatatatatatatatatatatgcacatatgtacatttttttttttaagatggagtttcgctcttgttgcccaggctggagtgcaatggcgtg

SEQ ID NO: 13197 - DNA, 201 bp, Homo sapiens; identical to SEQ ID NO: 8862

SEQ ID NO: 13198 - DNA, 201 bp, Homo sapiens; identical to SEQ ID NO: 8306

SEQ ID NO: 13199 - DNA, 201 bp, Homo sapiens; identical to SEQ ID NO: 8864

SEQ ID NO: 13200 - DNA, 201 bp, Homo sapiens; identical to SEQ ID NO: 8309

SEQ ID NO: 13201 - DNA, 201 bp, Homo sapiens
aatctctgggacacattcaacgcagtgtgtagagggaaatttatagcactaaatgcccacaagagaaagcaggaaagatctaaaatggacaccctaacatmacaattaaaagaactagaaaagcaagagcaaacacattcaaaagctagcagaaggcaagaaataagtaaaatcagagcagaactgaaggaaatagagaca

SEQ ID NO: 13202 - DNA, 201 bp, Homo sapiens; identical to SEQ ID NO: 8312

SEQ ID NO: 13203 - DNA, 201 bp, Homo sapiens
tgaatgactactgggtacataacgaaatgaaggcagagataaagatgttctttgaaaccaatgagaacaaagacacaacataccagaatctctgggacacrttcaacgcagtgtgtagagggaaatttatagcactaaatgcccacaagagaaagcaggaaagatctaaaatggacaccctaacatcacaattaaaagaac

SEQ ID NO: 13204 - DNA, 201 bp, Homo sapiens; identical to SEQ ID NO: 8867

SEQ ID NO: 13205 - DNA, 201 bp, Homo sapiens; identical to SEQ ID NO: 8314

SEQ ID NO: 13206 - DNA, 201 bp, Homo sapiens
ttattaaatcttctgattcatgaacacagtgtatcttcatttatttaggtctttttattttctctcagcaattttttgtagttatcactgtaactttttaycttattgagtgctggaaggttttgtatgcctataaatattcttgagctgtgttttgggtctcagctaagttactggaaacattcaatcctttcagatctt

SEQ ID NO: 13207 - DNA, 201 bp, Homo sapiens
tatatagcaaatctctttttatctaccctcgggaaaggagtacaatgtgctcaagaaagcatataaaaggaattttttttgcatcagtgcgatggtagcaraactagaaagaacctgtttttgttagtaggagtatggctcaataatctatggtaaatggataataagggaatactatgaataactatgtgaccacaaatt

SEQ ID NO: 13208 - DNA, 201 bp, Homo sapiens
tagtcccatagctgtcacttaggtattttgtggtggtggatgaaacaggataggaaagattggactgacttccatcatgtggtacctacaaaaacaaggaygctcaattattcaaactgaactgggaatcctaaggtgtattgttgattgggaggccatgttggaggcatggtcaacctgtgcctcatgagtaatatgagt

SEQ ID NO: 13209 - DNA, 201 bp, Homo sapiens
ttgcatatcttctgagcaattgtattcgtagcttttttctagactgtcttttcaagaatgtctgtatagcaaacagctttggaaaatatagtgtctccctytggggaagaaggcaggtttgttggctgttcatgataataaagacaatgtcttccactggaaaaaggttgaaaaggttttctagcaagggttttagaaaat

SEQ ID NO: 13210 - DNA, 201 bp, Homo sapiens
atattgtgtcgtggtgaagtctgggcttttagtgtacccatcacctgaatagtgaacattgtatccaataggtaatagcctttaaaattcctttttattcwttattctttttttcctaactgtatattttcaaataactttaagtttacagattctttcttctccttgatgaattatacagttgacatattttttacttat

SEQ ID NO: 13211 - DNA, 201 bp, Homo sapiens
attggcatgtaataattatacatatttatggggtacatagcgatattttgatacatacaatgggtagtggtcaaatcagagtaattagcatattcatcacstcaaacacctagcatttccttgtggtgggaacattcaaaatatataaaatatatatatatataataaaccgttgttagctgtggtcaccctatagtgctg

SEQ ID NO: 13212 - DNA, 201 bp, Homo sapiens
cttccctgctgcacatttttttttttttttttttttttttttgctgttagcactcttcaaataccctaatagtttttttccttgatacaaatttacaattractttgaattttatatgtatagcatttcagtagaccaagaataaccaagtgagtcctgaagaaaatgaacaaggccaaaggacctaccctaacagatatc

SEQ ID NO: 13213 - DNA, 201 bp, Homo sapiens
tgatgacagagccagcagtataataaatggctttgggacaactggttatttataaaggaaaaaactaatttgatatatgatcaaatatgatactgatgatrtaagtatatgacctggagcaagaaacaatcacaaaacaaatacaaatcataaaaggcaatattgataaattcacctatattaaatttataagctctgtat

SEQ ID NO: 13214 - DNA, 201 bp, Homo sapiens
tcactcatttttatcaacaatgatctagatttagcagtatcagtaattgatgctgtgggtttcctcagtaattgagaaaggcactgttctcgttaaactargagtggtttaaattattgtagaactatggctacaatgagtggttgaattgatatacgctaaagtttcccatcaggttccagtgcaggaagggaagttttg

SEQ ID NO: 13215 - DNA, 201 bp, Homo sapiens
ataagttgaatttttcatatggtgaaagtgcatttaatacacctgacctaccaaacattgtaacttagcctaccctaccttaaatgtgctgagaacactgracattagcctgcagttgggcaaaatcatctaacacaaaacctattttataaggaagtgttgaatagctcatgaaacttattgaatactgtactgaaagtg

SEQ ID NO: 13216 - DNA, 201 bp, Homo sapiens
ggtagtggtcaaatcagagtaattagcatattcatcacctcaaacacctagcatttccttgtggtgggaacattcaaaatatataaaatatatatatatawaataaaccgttgttagctgtggtcaccctatagtgctgtagaacactataacttatttctcctatctagctgtaattttttatcgtttaaccaacctctc

SEQ ID NO: 13217 - DNA, 201 bp, Homo sapiens
cagtctcccgagtagctgggactacaggagcatgccaccatgcctggctaatttttgtacttttagtagagatggggtttcaccatactggtcaggctggycttaaactcttgacctcaggtgatccacccgccttggcctcccaaagtgctgggattacaggcatgagcaccatgcctggctgaaactttagctcttgat

SEQ ID NO: 13218 - DNA, 201 bp, Homo sapiens
atcttaactttgtcatatctgcaaagaccctattttcaagtaaggtcacattcaaagtgctgggggcttaggacttgaacatatctttttcagggacacasttcaacacataacaatgggacaagccaaagtgtagagagcttcagataacagagtaccagtgttacattactctatcttaattttgccattgtacctgac

SEQ ID NO: 13219 - DNA, 201 bp, Homo sapiens
ctctcctcagcaaatgtaaaagaacagaaattataacaaactgtctctcagaccacagtgcaatcaaactagaactcaggattaacaaactcactcaaaamcgctcaactacatggaaactgaacaacctgctcctgaatgactactgggtacataacgaaatgaaggcagagataaagatgttctttgaaaccaatgaga

SEQ ID NO: 13220 - DNA, 201 bp, Homo sapiens
tggaggccagaaaactgaaatcaaggtttcagcaaaaccatgttccctgctaagggctctagggaagaatctttcattggtttttacaagcttctggtggwtgctagcaatccttgatattccttagcttgcagctgcatcactttaatttctgcctgtcgctatatggtcttcttatagtgacaccagtaattggattta

SEQ ID NO: 13221 - DNA, 201 bp, Homo sapiens
caagcaaatgcaaaacaaaaaaaaaggcagggattgcaatcctagtctctgataaaacagactttaaaccaacaaagatcaaaagagacaaggccattacrtaatggtaaagggatcaattcaacaagaagaggtaactatcctaaatatatatgcatccaatacaggaacacccagtttcataaagcaaggcctgagtga

SEQ ID NO: 13222 - DNA, 201 bp, Homo sapiens
tccatacttgctgctctatatatttaagaattttatgttcatttgtatagtgcattagccccattctgaatcccaagtgatgtttcggtcagggctgatayttgatggatgaagattcagagacacagacacacatttatatagatatttatttcatcagtgcaatttaaatagtcactatttctttttttgtccctcttt

SEQ ID NO: 13223 - DNA, 201 bp, Homo sapiens
cacagactggcaaactggataaagactcaagacccatcagtatgctgtattcaggaaaccatctcacatgcagagacacacaggctcaaaataaaaggatkgaggaagatctaccaagcaaatgcaaaacaaaaaaaaaggcagggattgcaatcctagtctctgataaaacagactttaaaccaacaaagatcaaaagag

SEQ ID NO: 13224 - DNA, 201 bp, Homo sapiens
aaatcctttacagacaagcaaatgctgagagattttgtcaccaccaggcctgccctaaaagagctcctgaaggaagcactaaacatggaaaggaacaactrgtaccagccactgcaaaaacatgccaaattgtaaagaccatcgatgctaggaagaaactgcatcaacgagcaaaataaccagctaacatcataatgacag

SEQ ID NO: 13225 - DNA, 201 bp, Homo sapiens
tcacgcccggctaatttttgtatttttagtagagatggggtttcaccatgttggccaggctagtctcgaactcctgacctcgagtgatgcactgcctcagsctcccaaagtgctgggattacaggtgcgagccaccacgcccagcctgccttcatgaatttttgaacacacccagaaagagcagaagacagaacatttctg

SEQ ID NO: 13226 - DNA, 201 bp, Homo sapiens
aaaatcctttacagacaagcaaatgctgagagattttgtcaccaccaggcctgccctaaaagagctcctgaaggaagcactaaacatggaaaggaacaacyggtaccagccactgcaaaaacatgccaaattgtaaagaccatcgatgctaggaagaaactgcatcaacgagcaaaataaccagctaacatcataatgaca

SEQ ID NO: 13227 - DNA, 201 bp, Homo sapiens
gaaaggtcgggttacccacaaagggaagcccatcagactaatagcggatctctcggcagaaactctgcaagccagaagagagtgggggccaatattcaacwttcttaaagaaaagaattttcacccagaatttcatatccagccaaactaagcttcataagtgaaggagaaataaaatcctttacagacaagcaaatgctg

SEQ ID NO: 13228 - DNA, 201 bp, Homo sapiens
tcaccaaagttgaaatgaaggaaaaaatgttaagggcagccagagagaaaggtcgggttacccacaaagggaagcccatcagactaatagcggatctctcrgcagaaactctgcaagccagaagagagtgggggccaatattcaacattcttaaagaaaagaattttcacccagaatttcatatccagccaaactaagctt

SEQ ID NO: 13229 - DNA, 201 bp, Homo sapiens
ttagataagaacaatgtacattacctgaatcatgtggtctggacaggaaagcagtcctgttaagaattccttcatgacatttttctagggaggcatagatrttacaagtgaaggtaataggctgttttgcctttcaaagcgtctttagcccaagtgcatgcatcacaaatagtcaccttatgtcagaattggaatcataat

SEQ ID NO: 13230 - DNA, 201 bp, Homo sapiens
gttttccaacaggcttaaaaaacagcgcaccaggagattatatcccgcacatggcttggagggtcgtacgcccacggagtctcgctgattgctagcacagmactctgagatcaaactgcaaggcggcagcgaggctgggggaggggcgcccgccattgcccaggcttgcttaggtaaacaaagcagccaggaagctcgaac

SEQ ID NO: 13231 - DNA, 201 bp, Homo sapiens
tgtcatcttcctcaggcaaatagtttttcaccttagagccagcaaggccaaaccgcccagtcacccgacttcccacagtctcagcaggtacacagggcggrgagcctcgggagcggctcccttagcaggacctgagggtttcgggagagtcctggctttgcacttagttttcccgctgcctggctgcctccgtggcggttg

SEQ ID NO: 13232 - DNA, 201 bp, Homo sapiens
cagcacctggaaatcaggtcactcccgccctaatactgtggttttccaacaggcttaaaaaacagcgcaccaggagattatatcccgcacatggcttggasggtcgtacgcccacggagtctcgctgattgctagcacagcactctgagatcaaactgcaaggcggcagcgaggctgggggaggggcgcccgccattgccc

SEQ ID NO: 13233 - DNA, 201 bp, Homo sapiens
tcttcagcaatagtgtcagaaataaacaatggggaaaggatagtatctccaacaaatgatactgggaaaagtggatctctatatgcaaaagaatgatgttsgaccttcatgccatgcataaaaataaattcaaaatgcattaaaaacttacctgtatgagctgaaaccgtaaaactcctcgatgaaaacataggaaataag

SEQ ID NO: 13234 - DNA, 201 bp, Homo sapiens
atattttttctatttttgcttggctttcatttttttctgctgagaagcaattattaaaatcatcatttccttttgtataatatgtcatttttctttggccrcttttattgctttttttttttccttttatttggttttcagcagtttggctttgttttacgtgagcatgattttctttgtaaatatcaacttgggcagcac

SEQ ID NO: 13235 - DNA, 201 bp, Homo sapiens
cttcaacactactggtgggaatgtaaattggtagagccattatggaaaacagtatggaagtgcataaaaatttaaaatagaactaccatatgacccataartgccacttctgggtatgtatccaaaggaacttaaatcaatatgtcagggggatatctgcactcccattttcattgcagtagccaaaatatggaaacaact

SEQ ID NO: 13236 - DNA, 201 bp, Homo sapiens
taatgcaacgttatttctcttgtctagaagctaaagacttaattgtctcagatatcttccatctccttatgggcattacttgaagacaacagtggagcaakctttttaatgaacttgccatggtaaaaaaccaatgacagatgccacactggaaagaggacaacaatgtaacctaaaagggagctactggcagaaataaaa

SEQ ID NO: 13237 - DNA, 201 bp, Homo sapiens
taaaaaaaaaaccaccaaaaaaataaaataaaatgaaattaagttcactttcctgtggtctccaatactgacaaaattgaagaaatcagcccttcggataycccctttattttactgaatttctttcctccaatgatcttgtattttatttcacatcaaccactaatggacaaagtgatatcctgtagtccttaccataac

SEQ ID NO: 13238 - DNA, 201 bp, Homo sapiens
tggagctttccctcacaaaggaaaatgccctgctgcagcttttgcaaactgtttcaagtccttgaatttaactggttcctgggtctgttatcctctgttasatggctttgaccacaatttgattactattctcttattctttctgagaagtctattagaaacagcagtgaatggtctcagcttcttcattttccatgcaaa

SEQ ID NO: 13239 - DNA, 201 bp, Homo sapiens
taactggacctttctctctggctgcccttaacattttatccttcatttcaactttggtgaatctgacaattatatgtcttggagttgctgttctcgaggartgtctttgtggtgttctctgtgtttcctgaatttgaatgttggcctgccttgctagattggggaagttctcctggataatatcctgaagagtgttttcca

SEQ ID NO: 13240 - DNA, 201 bp, Homo sapiens
gggagtagaaggaattccatacttgctgctctatatatttaagaattttatgttcatttgtatagtgcattagccccattctgaatcccaagtgatgtttyggtcagggctgatatttgatggatgaagattcagagacacagacacacatttatatagatatttatttcatcagtgcaatttaaatagtcactatttctt

SEQ ID NO: 13241 - DNA, 201 bp, Homo sapiens
tagtgacagtggtactaatgtctgatgcatgatacctgtggagtggtcaaggagcttggatctgggagcacaggcatgtatggattgacagtggctttggrgtccagatgctagtgtgtgcaagtctactgctgctctgaggactgtgatatggatatccctgctgcattgatggttctggtgtctagaatgcaggcactt

SEQ ID NO: 13242 - DNA, 201 bp, Homo sapiens
tttatttgagatcattatttcttttttaagtagacatctattgcaataaacttcccacttagaactgcttttgctgcatttcatgagttttagtatgttgyatttccatttttgtttgtctgaagatactttctgatttccctttggatttcttttttgactcatcatttgtttaggagtgtgttaatttctacatatttg

SEQ ID NO: 13243 - DNA, 201 bp, Homo sapiens; identical to SEQ ID NO: 8361

SEQ ID NO: 13244 - DNA, 201 bp, Homo sapiens
ggcatttattctgtaaagatattttttctatttttgcttggctttcatttttttctgctgagaagcaattattaaaatcatcatttccttttgtataatatgtcatttttctttggccacttttattgctttttttttttccttttatttggttttcagcagtttggctttgttttacgtgagcatgattttctttgtaaa

SEQ ID NO: 13245 - DNA, 201 bp, Homo sapiens
gggcatttattctgtaaagatattttttctatttttgcttggctttcatttttttctgctgagaagcaattattaaaatcatcatttccttttgtataatatgtcatttttctttggccacttttattgctttttttttttccttttatttggttttcagcagtttggctttgttttacgtgagcatgattttctttgtaa

SEQ ID NO: 13246 - DNA, 201 bp, Homo sapiens
cacttacattgcttctaaatcttagttatttttgaattgtggtgcaataaacatgggagtgcagatatctttttaatatactgatttcctttttttgtacrtacctaacagtaagattactggattatatgttagttctatttttaatttttttttttttttgagatggagtcttgctgtgtggccaggccagagtgcaat

SEQ ID NO: 13247 - DNA, 201 bp, Homo sapiens
agattttagaattctcttcttcctcaggaaaatcgtttattcttaggtttggtcatttaacataatctcagatttcttggagtctttttttttttttttaattctttttttttatctttgttgaattgggttaatttgacgactgtgtctttgagctctgaatttctttcttctacttgttcagttctattgctgagactt

SEQ ID NO: 13248 - DNA, 201 bp, Homo sapiens
taagattttagaattctcttcttcctcaggaaaatcgtttattcttaggtttggtcatttaacataatctcagatttcttggagtctttttttttttttttaattctttttttttatctttgttgaattgggttaatttgacgactgtgtctttgagctctgaatttctttcttctacttgttcagttctattgctgagac

SEQ ID NO: 13249 - DNA, 201 bp, Homo sapiens
ctaagattttagaattctcttcttcctcaggaaaatcgtttattcttaggtttggtcatttaacataatctcagatttcttggagtctttttttttttttttaattctttttttttatctttgttgaattgggttaatttgacgactgtgtctttgagctctgaatttctttcttctacttgttcagttctattgctgaga

SEQ ID NO: 13250 - DNA, 201 bp, Homo sapiens
acaaatactcgtgaatttctactggatagtcttcattaatttcttcacctgccgttatggctgactcacggccttcgactccagcctcccggaaagcggtygggcaacgatgacgacaatgacgcgccagctctgcccgcgccaccagcggcgctttccgatgatctcaccaatgtatagctttttatacacaaattacat

SEQ ID NO: 13251 - DNA, 201 bp, Homo sapiens
gtctgaaaaagactgtatctctccttcatatataatgcttagtttcgctagatacaaaattcttggctgatgattgttttgtttaaggaggctgaagatcrggccccaatcccttctagcttgtagagtttctgctgagaaatctgctgttaatctgataggttttcctttataggttacttggcgcttctgtctcacagc

SEQ ID NO: 13252 - DNA, 201 bp, Homo sapiens
ctactggatagtcttcattaatttcttcacctgccgttatggctgactcacggccttcgactccagcctcccggaaagcggtcgggcaacgatgacgacartgacgcgccagctctgcccgcgccaccagcggcgctttccgatgatctcaccaatgtatagctttttatacacaaattacataccaataaagtgatttaa

SEQ ID NO: 13253 - DNA, 201 bp, Homo sapiens
tttttaaattaccatttcaacctcactgcttgttattggtctgttcagagcatctaattcttcctgatttaagctaggagggttgtatttttccaggaatktatccatctcttctaggttttctagtttatgtgcataaaagtgttcatagtagccttgaattatcttttgtatttcagtggtgtcagttgtaatatctcc

SEQ ID NO: 13254 - DNA, 201 bp, Homo sapiens
cgttatggctgactcacggccttcgactccagcctcccggaaagcggtcgggcaacgatgacgacaatgacgcgccagctctgcccgcgccaccagcggcrctttccgatgatctcaccaatgtatagctttttatacacaaattacataccaataaagtgatttaaaagtataggataaaatatagaaactaggatttta

SEQ ID NO: 13255 - DNA, 201 bp, Homo sapiens
tgtctgatagctcttgctaggactttcagtactatgttgaggaggagtggtgagaatgggcatccttgtcttgttccagttctcagagggaatgctttcamcttttctccattcagtattatgttggcattgggttgtcatagatggcttttattacattatggtatgtcccttgtatgccgttttgctgagagttttaag

SEQ ID NO: 13256 - DNA, 201 bp, Homo sapiens
aacagtggctagaataggcatggtggtttccttccccagatatttcagagggagcatggctgtgccaacactttaattttggatttcaagtcatcaggctktgagaaaataaattcttgttgttttaaatcacccatatgtggtcttttattactacagccctaggaaacaaatacactaactatgaacatttcaaaagtg

SEQ ID NO: 13257 - DNA, 201 bp, Homo sapiens
aaatgattgtcagcaaacagtgacagtttgactacttctttactgatttgggtgtcttttatttctttctcttgtctgatagctcttgctaggactttcartactatgttgaggaggagtggtgagaatgggcatccttgtcttgttccagttctcagagggaatgctttcaacttttctccattcagtattatgttggca

SEQ ID NO: 13258 - DNA, 201 bp, Homo sapiens
agactcatacttaactgattttaaaacttaatacaaagctacagtaaccaaggcaaagtgttactggcataaggctagacatatagagcaatggaatagarttgaaagtccacaaataaacccttacatttatgaacaattgattttcaaggtaagatgattcaatgggggaaagaaaagtctttttaataaatggtactt

SEQ ID NO: 13259 - DNA, 201 bp, Homo sapiens; identical to SEQ ID NO: 9169

SEQ ID NO: 13260 - DNA, 201 bp, Homo sapiens
ggacatgaagaaatctcagacattaagttaagtgaaaaagtaagtttggaacaatatatacagtgatgtcatttatgtgaaaaagaaaactgaaatccaayccactaataaaaattacagaatggaaaagttacatgcagtattgtgtaaatgcctagaacaagtcctggaaaggtaacagtgatccaatatttctaggga

SEQ ID NO: 13261 - DNA, 201 bp, Homo sapiens
ttcatctgtattaaaatctttacaaagaaaatgtgtgtgttaggtgggaattgaacaatgagaacacatggacacaggaaggggaacatcacacaccgggractgttatggggtggggggaggggggagggatagcattaggagatatacctaatgctaaatgacgagttaatgggtgcagcacaccaacatggcacatgt

SEQ ID NO: 13262 - DNA, 201 bp, Homo sapiens
tgtttgaaaatggcatacacctaataaggcttattatgttaggatagaaatcaaagagctatttaaatgttatataatatgtttttactattaataattcrtagcagctatgctttaaaaataaaattatgccatattctaaattatcatattaggtgtcaaaaccaaaaggatgccatgaaaaaacagataaaatttaaa

SEQ ID NO: 13263 - DNA, 201 bp, Homo sapiens
agtctcctatgtctacttctttctacacagacacagtaacaatctgatctctctttcttttccccacatttcccccttttcttttcgacaaaaccgccatygtcatcatggcccgttctcgatggtcgctgtctcttcggagctgttgggtacacctcccagatggggcggctgggcagaggcgcttctcacttcccagac

SEQ ID NO: 13264 - DNA, 201 bp, Homo sapiens
tttgcttcttttctcttgcttcttttaggattctctttgtccttgacctttgagagcttcattattatatgtcttatgtagtcttacttgggttgaatctktttggtgttctcagaatttcttttacctggatattgacatctttcagaagttttggaaagttttctgttattatttctttgggtaagttttctacccctt

SEQ ID NO: 13265 - DNA, 201 bp, Homo sapiens
tcattatcactcagaaactcttcacttctgaaatactaaactataatatcctacagtcatctgaatagttccagtccttgacacgtgtagatcttttatgyctttcagctccaattattgtgtcactctacagactgatatcaatgtttcattcttttcatgagttaatgaagactttcttaccttaataattaaatatct

SEQ ID NO: 13266 - DNA, 201 bp, Homo sapiens
tattctgtgaatcttgctgtttctttccacggcttgttattttttagcttgatctattccaaaggtctcaagacagccaaatatgtcacagtcttccccawgcagactggaaaaatgctagttccatagatctttatattttaacttctgggagttagtaatagacagtattagcctttgagagaaaattactgtctttag

SEQ ID NO: 13267 - DNA, 201 bp, Homo sapiens
gagtgcagtggtgtgatcttggctcactggaactgctgcctcctggattcaagcgcttttcgtgcctcagccacccacgtagctgggattaccggtgtgcrgcgcctcgcccagctaatttttttgtctttttagtagagacgggattttgccatgctggccaggctggtcttgaactcctgacctcaagtgatccaactg

SEQ ID NO: 13268 - DNA, 201 bp, Homo sapiens
ctttgtttttgttgcatttgcttttgggttcttggttatgaagtctttgcctaagccaatgtctagaagggtttttccatgttatcttctagaatctttayggtttcaggccttagatttaagtctttgatccatcttgagttgatttttgtataaggtgaaagatgaggatccagttacattctcttacatgaggcttgc

SEQ ID NO: 13269 - DNA, 201 bp, Homo sapiens
ttgggttacagtttggttttatacattttagggagacataagacatcaatcaatacatgtgaagtatacattggtttcgtcaggaaaggtgggacaacttkaaggaaggatgcgtgtgtggggtgcttacaggtcatagatggattcaaggttttctgactggcagttgattgaaagagtcaagttattattatccaaaga

SEQ ID NO: 13270 - DNA, 201 bp, Homo sapiens
atttatctttgtttttgttgcatttgcttttgggttcttggttatgaagtctttgcctaagccaatgtctagaagggtttttccatgttatcttctagaakctttacggtttcaggccttagatttaagtctttgatccatcttgagttgatttttgtataaggtgaaagatgaggatccagttacattctcttacatgag

SEQ ID NO: 13271 - DNA, 201 bp, Homo sapiens
tgtctctttactctgttgattgtttcttttcctgtgcagaaggtttttagtttaattgagtcccatctatttatctttgtttttgttgcatttgcttttgrgttcttggttatgaagtctttgcctaagccaatgtctagaagggtttttccatgttatcttctagaatctttacggtttcaggccttagatttaagtctt

SEQ ID NO: 13272 - DNA, 201 bp, Homo sapiens
gcagttgtactagtttacattcccaccagtagtgtaaaagtgtaccctttttactatatccacaccaacatctattattttttgattctttgattatggcsattcttgcaggagtaaggtggtattgcattgtggttttgtatcatatttccctgatcattagtgatgttgagcatttttttatgtttattggccatttgt

SEQ ID NO: 13273 - DNA, 201 bp, Homo sapiens
cgtgccacccaagtttactggctttaagcccaaccctagccctacaaatagtctagaaattgcagtccatgtgtcctagactgcctttcaagtgtacctgrgaccccagagcccttcagtccatgatgttgaggattgccaagaaactcaagctcggccactagtatggtcacttcccctctggcaagggctggtgcaaat

SEQ ID NO: 13274 - DNA, 201 bp, Homo sapiens
tttttcagagttgattttgggatttgccatcttcatagcaattgataatccttttatcattttaaatctgaaatgttttcatctacaaccctccttacttrcaggaaatgctataagtcctataggtaaaataatccaacattttccttatggagagcaaagggtatagaaaagaagcaagatttgtagccaatttgacct

SEQ ID NO: 13275 - DNA, 201 bp, Homo sapiens
cactaatgataccttgggccaaggctactgctcctgtgggaataaagatgtatattaaggacatatattagctcaaatatgggggaaagataggaagaaawtgtaatttttctttttcctgaatgtattctctcgttgcttctggcttcttcagtccgtatattcccattctaaatgccccataaacaaatgagcctttgt

SEQ ID NO: 13276 - DNA, 201 bp, Homo sapiens
aataaactatctaccccatctctttctcctgttcaaggccaataactcttaaagtgccctcatgaggctgttttctagatcttgtacgtgtgcttcattgkgtgttttttttttcttttgtctcctctgtctgtgtattttcaaatagggggatgggggagggatagcattggacaaatacctaatgtaaatgacgagtta

SEQ ID NO: 13277 - DNA, 201 bp, Homo sapiens
tgaacggtaagtcagatatttacctcgatcattctactgaaattgttgccgttcttcaggttacaaatgacctacctccatgttgccaaatccagtgtcascttagtcttcattttacttgattcagcatttgacgtagttcatcactcggtccttggtgatattttcttttccttgctttctatgtatatataacctttt

SEQ ID NO: 13278 - DNA, 201 bp, Homo sapiens
ggaatatctttttccattcctatattttctgtctatgtgtctctttataggtaaagtatgtttcttgtaggcaacaaattattggttcttgtttttttttyaatccattcagccatcacatatcttttgattagaaagtttagtccatttacattcagtgttattattcataagtagggacttgctcctgccattttttaa

SEQ ID NO: 13279 - DNA, 201 bp, Homo sapiens
ttccttgtagatgtctttcaactccttggctaggtatattcttaagttttttttttttttcagctattgtaaaaggagttgagtacttgatttgattttcygcttggttgctgttggtgtatagaagagttactgatttgtgtacattaatcttgtatccagaaactttgctgaattcttttatcagttctaggagctttc

SEQ ID NO: 13280 - DNA, 201 bp, Homo sapiens
tttgattttttgattatgggcattcgtgcaggagcaaggtggtatggcattgtggttttgatttgcatttccctgatcattcatgatgttgagcatttttycatatgtttgttagccatttgtatatcttcttttgagaattgtctattcacgttcttagcccactttttgatgggatactttgtttttttcttattgatt

SEQ ID NO: 13281 - DNA, 201 bp, Homo sapiens
gtccttgagttcttaacagattctagaaattgtcaggatacataatcctatataaagatccaatccttacttagtttatttaagagatttgtatgcatatrtgaactttctggaaagccttgtctattttgttcattttactctcattatcactcagaaactcttcacttctgaaatactaaactataatatcctacagtc

SEQ ID NO: 13282 - DNA, 201 bp, Homo sapiens
aatttaattttctcagcaaggtaattttacttctatagaagggtgtgacttgcggatggagcaatggcaggagcacacctgaacaagggaggggaaggggytcttattcctggtgcaggtagcccctactgctgtgttattcccctattggctagggttggaccgcacagtctaagctaattccgattggctattttaaag

SEQ ID NO: 13283 - DNA, 201 bp, Homo sapiens
tgcaaagctgagtgacagaggcaaaaattaattcctaaagatccaaagggtacacaatacctgtcaaatttcgtatgtctgggcaggatgcggtggcttaygcctgtaataccagcacttcgggaggctgaggcggacagatcacttgaggtcaggagttcgagactagcctggccaacacggcaaaaccctgtctctacc

SEQ ID NO: 13284 - DNA, 201 bp, Homo sapiens
aaaagcccccataaattagagtggctagacacattcaagtctagcagaaagaaacttggaatttaatgcaacgttatttctcttgtctagaagctaaagayttaattgtctcagatatcttccatctccttatgggcattacttgaagacaacagtggagcaagctttttaatgaacttgccatggtaaaaaaccaatgac

SEQ ID NO: 13285 - DNA, 201 bp, Homo sapiens
agttttatttgaatgttttaagacttgttttgtgacctaacatatggtatatccttgaaaatgattcatgcactgcagagaaaaatatgtattctgcaacygttggatgaaatgttctataaatatctgttagttccatttgttctgtagtacagattaagtttgatgtttctttgttgattttctatctcagagatcttt

SEQ ID NO: 13286 - DNA, 201 bp, Homo sapiens
ttttaatcataccagtgagaagttagtttgagaaatgttattcagttgtttgtaatttagcctgtatgaattttatgtctcttagaaatatgaattttttwaaaaaaacttcattattttaaaatcgtttaaaaagtcctcctcaagaaagcaaagcagtgatgcatttaaaaatatcatgatgcattttaaaacatttta

SEQ ID NO: 13287 - DNA, 201 bp, Homo sapiens
ttgtcttgtgctggttttcaagggaaatgctttcagcttttgcctattcaatatgatgttggctgtggttttgtcatagatagcttttattattttgatgyatgttccttcaatgcctagtttattgaaggtttttaacatgaagagagttgaattttattgaaagtcttttctgcctctgttgagataatactatggttt

SEQ ID NO: 13288 - DNA, 201 bp, Homo sapiens
attgtattgatatctatctttctctttagctctaataatatttgctttacatatctgggtgttccagtgttgactgcatatatatttacaatcattatatyctcttgctgaattgacctctttgtcattatataatgaccttttttgtctcttcttacagtttttgtgttgaaatctattttgtctggtataagtagagtt

SEQ ID NO: 13289 - DNA, 201 bp, Homo sapiens
attctttttgtggcagttgagaatgggattgtattcctgatttggctcttggcttggatgttgttgtataggagtgctactaattttgtatatggacttcrtaccctgaaactttgctgacgttgttcatcagctgaaggagattttgggccaagcctatggagttttctagatatagaatcatgccatcaaacaggggta

SEQ ID NO: 13290 - DNA, 201 bp, Homo sapiens
atctatctttctctttagctctaataatatttgctttacatatctgggtgttccagtgttgactgcatatatatttacaatcattatatcctcttgctgarttgacctctttgtcattatataatgaccttttttgtctcttcttacagtttttgtgttgaaatctattttgtctggtataagtagagttactcctgcttt

SEQ ID NO: 13291 - DNA, 201 bp, Homo sapiens
aacaagttgttttaaagagatgataatttatctttaatcccaaataaaagaatagaaacaaaggaaacacacacacacacacacacacacacacacacacacacacacacaattctacactttaacttctcccccacattttgactaagttgtctcaatttatgtattttatattaccaatctcttaacaggttgctgtaa

SEQ ID NO: 13292 - DNA, 201 bp, Homo sapiens
tgggggagggatagcattggacaaatacctaatgtaaatgacgagttaatgggtgcagcaaatcaacatggcacatgtgtacatatgtaacaaacctgcaygttgtgcacatgtaccctagaacttaaagcataataaaaaaaaaagaaaagaaaaaaaaacccaaatagcctgtctttaagctcaataattgtttctctt

SEQ ID NO: 13293 - DNA, 201 bp, Homo sapiens
taacaagttgttttaaagagatgataatttatctttaatcccaaataaaagaatagaaacaaaggaaacacacacacacacacacacacacacacacacacacacacacacaattctacactttaacttctcccccacattttgactaagttgtctcaatttatgtattttatattaccaatctcttaacaggttgctgta

SEQ ID NO: 13294 - DNA, 201 bp, Homo sapiens
tatgaagttaaaacgaggaactgcgattgctcacctgatttttggttcttctgatggtgctttcctgtgtgtagatagttgttaaaatttggtgttccaayagaggggacgaacagtgtagacttctattttgccatcttgccaccaccatttttgtctcagcccgtgcacatcatttctgcttcactcttcacttaagct

SEQ ID NO: 13295 - DNA, 201 bp, Homo sapiens
aagactttatatctccttcatatttgaaggataattttgatggatacaatattcttgaatggaagttgtcttctttcaacactttgaaaatctcattctaytgcctcctggcctgtattattttcattgaaaagtctgttgctaggcaaattggagctttttaatatgttatttgcttcttttctcttgcttcttttagga

SEQ ID NO: 13296 - DNA, 201 bp, Homo sapiens; identical to SEQ ID NO: 8658

SEQ ID NO: 13297 - DNA, 201 bp, Homo sapiens
gggtaacccgacctttctctctggctgcccttaacatttttttttttttcatttctaccttggtgaatctgacaattatgtgtcttggggttgctcttctygaggaatatctttgtcgtgttctctgtatttcctgaatttgaatgttggcctgccttgctagattggggtagttctcctgtataatatcctgaagagtgt

SEQ ID NO: 13298 - DNA, 201 bp, Homo sapiens
tctattaaactttataaactttagaaacaatttgttggtatccaaaaaataccttgctgggattttgattgagattgcattgaatctatggattaaatggrcaagaacttgtatcttaacaatattgtatctttcattctatgaacttgaaatatctctccatttatttagatcttatttgctttctttcatcagagtaat

SEQ ID NO: 13299 - DNA, 201 bp, Homo sapiens
aggtaaaaccacctactcaagcctcagcaatggtggatgcccctccccctaccaaggtcgagtatcccaggttgaccttagactgctgtgctagcagagakaatttcaagccagcggatcttagtttgctggactctgtgggggtgggacccattaagccaggcaccaagagaatttcctggtctgccggtggtgaagacc

SEQ ID NO: 13300 - DNA, 201 bp, Homo sapiens
agttgtttcaggttcttagctttactagtattgacctactgtctttctctgttgctgtatttcacttgtttaccataattttcttttaaaagtacctcctstcttcttctctggccacacttaatcctctcttcccttcctgttttctaaattctattaaatcttatagcctggccagcaagacaaaagctacctttgtat

SEQ ID NO: 13301 - DNA, 201 bp, Homo sapiens
tgtatatactgtcaagtataaaatatcaaacttgtactggttgttgaaaattgaatctgctatccagtcagccaacattaatctagattcagtgtcttaaraaattataaatggcattggaaagcattatttatttattttttattctttttttttaatcatcatcaagggtttttactatgcccaaatgcaaagattatg

SEQ ID NO: 13302 - DNA, 201 bp, Homo sapiens
catgatctcagctcactgcaacctccacctcctgggttcaagcaattcttgtgcctcagcctcccaagttgctgggactacaggcacctgccaccacaccyggctaatttttgtatttttcgtagagatggggtttcaccatgttggccaggctggtctcaaactcctgacctcagttgatcttcctgcctcggtctccca

SEQ ID NO: 13303 - DNA, 201 bp, Homo sapiens
ataaataattcaattaaaaataggcaaaggatctgaatagatatttccccaaagaagatatagaaatgcccaataagcacatgaaaagatacttaacattrttagttactagattttttttgttttttttttgagatggagtctcgctctgttgtccaggctggagtgcagtgacatgatctcagctcactgcaacctcca

SEQ ID NO: 13304 - DNA, 201 bp, Homo sapiens
aactgaagccaatagaggttaagtaatatacctggctgaggtcatataattagtaaatggatgaaacaggttttgacccaaaggtcaggtagtctcactcyggaacttatgtccttcatcattatacgattgataataatacttcgacaaaaagatacctcatgtttctaacaatttatttttgctgtttttgttgtgaat

SEQ ID NO: 13305 - DNA, 201 bp, Homo sapiens
agacatatagagcaatggaatagagttgaaagtccacaaataaacccttacatttatgaacaattgattttcaaggtaagatgattcaatgggggaaagaraagtctttttaataaatggtacttgggcagctggttatccccatgcaaaagaacgaggctggattacttatttttatttttatttttttttgaggtgaag

SEQ ID NO: 13306 - DNA, 201 bp, Homo sapiens
atgtgtccacttttctctgtgtctacaccttattgttggttactatcatatccattttgcctgaaatcccaaccagtgcattcataatcaccaggaggaayccccactgcacagtatacttctgatctggaatttcaagtttttcaatgtttaaacccataattacttatctttaatattttattaatttggtgtaccaga

SEQ ID NO: 13307 - DNA, 201 bp, Homo sapiens
atagatatctcatcttcatagactgttaaacttaatattttttattttctttttaagaaacagggtctcactctgtcacccaggctggtgtgcagtgatgyaatcatagctcacttcagctgctaactcctaggcccaaggcatcttcctgcctcagccttctaagcagctaggactacaggcatgaaccaccatgcctgg

SEQ ID NO: 13308 - DNA, 201 bp, Homo sapiens
ctggagtaggatgggcccttaatccaacgtgactaatgtccttataggaattggaaaagacagataaacatggaggaaatactgctaatgtaaagatagaracagagactggatttattctgccacaatccaaagaatgccagggactaacagtggctagaataggcatggtggtttccttccccagatatttcagaggga

SEQ ID NO: 13309 - DNA, 201 bp, Homo sapiens
ggagctagcctacaccagctcttgggagctgataaattttcaggaatctcttgtgaggcattcagattttactggaaaattagaaataattagatataatsaattttcagagttttagaaaatagttgaaatctactaagtcaaatctaaggtctcctttaaacctcctggtttttagttttagttccatctttcctattc

SEQ ID NO: 13310 - DNA, 201 bp, Homo sapiens
ttttatgatacaaagttccacaaaccaggaatagaaggaaacttccttaacctgatgaaggccatctacaaaccccatggtcaacatcatactcagtggtsagaatgaataatttctccctatgatcaggaacaagacaagacattcacttctattcatcattatagtggaggttctagcaagggcaattatggaagaaaa

SEQ ID NO: 13311 - DNA, 201 bp, Homo sapiens
agactgggagaaaagatttgtgctcatacagtagaaaaaaggagtactaataagaatctataactccctaaaaacacataagaaaaataggcaaagtatayaaagaggaggtaactaagggaaagacaaaaaaattggccaataaacattttaagagatgctcaatctcaccgtgatcagggaagatataagacaaagcca

SEQ ID NO: 13312 - DNA, 201 bp, Homo sapiens
attcttttgtcttttagaactgatcctggagctttccctcacaaaggaaaatgccctgctgcagcttttgcaaactgtttcaagtccttgaatttaactgrttcctgggtctgttatcctctgttagatggctttgaccacaatttgattactattctcttattctttctgagaagtctattagaaacagcagtgaatggt

SEQ ID NO: 13313 - DNA, 201 bp, Homo sapiens
atttagctttacatatttactgtgaatttacatattaataagaaacacatttaaaccttgtcctgccacagaattattctgtggggggcgggggggggggsggggaaatgtactttttgaatatgtgtacaccaaaaccaaaaagttaacttttactttttcctttattggcaacttttgatgcatttttcggttttggtt

SEQ ID NO: 13314 - DNA, 201 bp, Homo sapiens; identical to SEQ ID NO: 8948

SEQ ID NO: 13315 - DNA, 201 bp, Homo sapiens
atttcattcctttttatggctgagtagtattccatggtattccatggtatatgtatgtgtgtgtgtgtgtgtatatatatatacacacacatatatatatrcatatatatacacacacatatatatgtatatatacatatatacgtatttacgtatatatgtatatatacatatatacgtatttacatatacacacacatt

SEQ ID NO: 13316 - DNA, 201 bp, Homo sapiens
agtatggaagtgcataaaaatttaaaatagaactaccatatgacccataagtgccacttctgggtatgtatccaaaggaacttaaatcaatatgtcagggkgatatctgcactcccattttcattgcagtagccaaaatatggaaacaacttaagtatccataatggatgaatggatataatgtgcctatgcatacaacag

SEQ ID NO: 13317 - DNA, 201 bp, Homo sapiens
atgatctaggatacaacaaggttttcttgtttaatgcgtagaaactttggtgctcatttggtaggttagactcttacccattctttaaaacatttaaaaaatttttatttttgtgggtacatagtaggtgtatatatttatggggtacatgagatattttggtacaggcatacaatgtgtaataatcatatcatggaaaat

SEQ ID NO: 13318 - DNA, 201 bp, Homo sapiens
gagtctcctatgtctacttctttctacacagacacagtaacaatctgatctctctttcttttccccacatttcccccttttcttttcgacaaaaccgccaytgtcatcatggcccgttctcgatggtcgctgtctcttcggagctgttgggtacacctcccagatggggcggctgggcagaggcgcttctcacttcccaga

SEQ ID NO: 13319 - DNA, 201 bp, Homo sapiens; identical to SEQ ID NO: 8955

SEQ ID NO: 13320 - DNA, 201 bp, Homo sapiens; identical to SEQ ID NO: 8960

SEQ ID NO: 13321 - DNA, 201 bp, Homo sapiens; identical to SEQ ID NO: 8964

SEQ ID NO: 13322 - DNA, 201 bp, Homo sapiens
aaagccatgacttttttgtctacaaaatttagaagttttctaatatcaactattggcagagaggtagtggaatgaatactcttaccatgctaatataataraaatttccccctttcgaggacaatttagcacagtttagtaataacaaaagtgtatgccatgttatatagcaaatctctttttatctaccctcgggaaagg

SEQ ID NO: 13323 - DNA, 201 bp, Homo sapiens
tgaatatacctgttttctcccagcaaacctcacacttcggttaacttttattttaggtttaggggtacatgagcaggtttgttatataggtaaactgcatrtcatgggtgtttggtgtacagataattttatcacctgggtaataagcatagtaccagataggtattttttctaatccccttcctcctaccactctccact

SEQ ID NO: 13324 - DNA, 201 bp, Homo sapiens; identical to SEQ ID NO: 8965

SEQ ID NO: 13325 - DNA, 201 bp, Homo sapiens
acaaaaaaattggccaataaacattttaagagatgctcaatctcaccgtgatcagggaagatataagacaaagccatgacttttttgtctacaaaatttaraagttttctaatatcaactattggcagagaggtagtggaatgaatactcttaccatgctaatataatagaaatttccccctttcgaggacaatttagcac

SEQ ID NO: 13326 - DNA, 201 bp, Homo sapiens
tcattttttgaatggggagtcctttcttcattgcttgtttttgtcaggtttattgaagatcagatagttttaggtgtgcagccttatttctggcttctctrttctgttccattggcctaggtgtctgtttttgcacctgtaccatgctgttttggttactgtagccctttagtatagttttaagttgggtatgtgatgcct

SEQ ID NO: 13327 - DNA, 201 bp, Homo sapiens
tgtgtgtcccagttcattataccaaatagagtaaatagaaatagaaatgcaaggataaaggaaaatttgtttcctcttgtattttattattctctttgccrttgttagagagcttacaaattcaaactacagacaataaagtcaaatacattagaagtgaacttttattaaccacttaagaaattaagatatatgattgag

SEQ ID NO: 13328 - DNA, 201 bp, Homo sapiens
cccctttttcttttctttttttttaattcctataatgtaaatgataacactcttgatgctgtcccataaatcctgtaggctttatttattttatttttcaraattaaaaaatttaaatttttacatatttagaggagataactgcagatttcttacatgtatatattgtgtcgtggtgaagtctgggcttttagtgtaccc

SEQ ID NO: 13329 - DNA, 201 bp, Homo sapiens
gaattctcaaacgctgacaaatactcgtgaatttctactggatagtcttcattaatttcttcacctgccgttatggctgactcacggccttcgactccagyctcccggaaagcggtcgggcaacgatgacgacaatgacgcgccagctctgcccgcgccaccagcggcgctttccgatgatctcaccaatgtatagctttt

SEQ ID NO: 13330 - DNA, 201 bp, Homo sapiens
gaaagcaactttctccatctaccttggttcacctgtatatagtgtgccacaccagctcacatctggtggtatgacattttaatttcagataatttccttcyactgtgcaataactcacaagttgcaacctattcaatgctcactttcacaaacaagtttcaggtctttctcaaaataaaagtctatatttctcatggtatt

SEQ ID NO: 13331 - DNA, 201 bp, Homo sapiens
agtatttagctttacatatttactgtgaatttacatattaataagaaacacatttaaaccttgtcctgccacagaattattctgtggggggcggggggggsgggggggaaatgtactttttgaatatgtgtacaccaaaaccaaaaagttaacttttactttttcctttattggcaacttttgatgcatttttcggttttg

SEQ ID NO: 13332 - DNA, 201 bp, Homo sapiens
tcccattttcattgcagtagccaaaatatggaaacaacttaagtatccataatggatgaatggatataatgtgcctatgcatacaacagaatattattcamccttaagaaattagaaaatccttccatttgtgacaacatggatggacctggaaggcattatgttaagtgaaagaatccaggcacagaaagcaaaataatt

SEQ ID NO: 13333 - DNA, 201 bp, Homo sapiens
tttcttaggtttttatttttaaaaatatatcaccaacaaggtttttgcaagatgtgcacctaacccatttcccccatacatcctacaggttttattgcatktttttgcatagtgaggtgattttcaggaaggcatataccacattataacataattgattgatattgtcagaaaaatttaaatgttttaatatgtattagg

SEQ ID NO: 13334 - DNA, 201 bp, Homo sapiens
tgagactccgtctgcaatcccagcacctcgggaggccgaggggggcagatcactcaaggccaggagctggagaccagcccagtcaacacggcgaaaccccrtctccaccaaaaatacaaaaatcagtcagtagtggcggtgtgtgcctggaatcccaggcactcggcgggccaaggcaggagaatcacgggagcccgaggc

SEQ ID NO: 13335 - DNA, 201 bp, Homo sapiens
gtaataaataggaaactaagatctaatgaaatacttcattgttcatgaacaccttcattaattatattaacagcttatcaagtaaaatttttacatttatragcaaccatgtttttgcattagacagataaaacattctttttttgtgttaaaatagaatatacatacccatagttgggaggggccactagttatgcagtt

SEQ ID NO: 13336 - DNA, 201 bp, Homo sapiens
atcaagtcacttaaaaattttaatcattgcataccctgtaaacttcctataaacaacatgtgattgcaaaatgtttaaaaagatgtgagaaaatatctgtsgagtgtggtatcagaaaaggcagagcctttgttttatctaacgattatttcccaaactgggaaattggggtagagacagctagatgttaatttcttaaca

SEQ ID NO: 13337 - DNA, 201 bp, Homo sapiens
cttgctatgttgcccaggctggtcttggattcctggcctcaaatgatcctcctgcctcagcctctcaaatttttgggattataggcataagccaccatgcytggctagctcacaagagtctctcttgtctgctaagacagagttctaatataatgtaacttgatcataggagtgacatcctctcactcttgctatataatg

SEQ ID NO: 13338 - DNA, 201 bp, Homo sapiens; identical to SEQ ID NO: 8967

SEQ ID NO: 13339 - DNA, 201 bp, Homo sapiens
cgttgcgctgcacccagtgtcctgcacccactttccgacactccccagtgagatgaacccggtacctcagttggaaatgcagaaatcacccgtcttctgcrtcgctcacgctgggagctgtagactggagctgttcctatttggccatcttggctccaaccccccagcatcagaatttctgtatggttcttctgtatgatt

SEQ ID NO: 13340 - DNA, 201 bp, Homo sapiens
tcccaagtgatgtttcggtcagggctgatatttgatggatgaagattcagagacacagacacacatttatatagatatttatttcatcagtgcaatttaartagtcactatttctttttttgtccctcttttgttttcttaaagtggtttcagtggcaggtcaatcagatggaagaagtaagtctaacgttttaaaattgt

SEQ ID NO: 13341 - DNA, 201 bp, Homo sapiens; identical to SEQ ID NO: 8672

SEQ ID NO: 13342 - DNA, 201 bp, Homo sapiens
tgggctcaaatgatcctcctgcctcagcttcccaaggagctaggattataagtgtgtaccaccatggatggctaattcaaaatgtgttttatagacatagygtcttgctatgttgcccaggctggtcttgaattcctggcctcaagcaatcctcccaccttggcctcctgaaatgctgggattataggtgtgggcatgcat

SEQ ID NO: 13343 - DNA, 201 bp, Homo sapiens
attttctgtttgtgcttgtcagacatatttaagggcatgtatccctggccccatatatattatatatttttaattttaattttttatgagtagtctcttamacatatatatgattcttttccagcggggtgtcatctacttgttaaaatcctaataaatgttcacatattgaaatatctgcattttggaaatccataatta

SEQ ID NO: 13344 - DNA, 201 bp, Homo sapiens
atggcacaatctcggctcactgcaacctccacctcctgggttcaagtgattctcctgcctcagcctcctaagtagctgggattacaggcacccgccatcaygcccggctaatttttgtatttttagtagagatggggtttcaccatgttggccaggctagtctcgaactcctgacctcgagtgatgcactgcctcagcctc

SEQ ID NO: 13345 - DNA, 201 bp, Homo sapiens
cctcgatcattctactgaaattgttgccgttcttcaggttacaaatgacctacctccatgttgccaaatccagtgtcaccttagtcttcattttacttgaytcagcatttgacgtagttcatcactcggtccttggtgatattttcttttccttgctttctatgtatatataaccttttggttttacttattggctcattg

SEQ ID NO: 13346 - DNA, 201 bp, Homo sapiens
gttttcaaagaataatcgattcatgtcacagactcaaaccactgcaaaatttgatattacatgcttaaatttattaactttttaaacttctttgctttacmttgtcagcactgataacttttctgtggttcttagctgtgctattaaggccacagatatgaatggtgaacttttggctagactcatgctgagagttttgct

SEQ ID NO: 13347 - DNA, 201 bp, Homo sapiens
aaacacgtgaacaaaggtctctggttttcctaggcagaggtccctgcggccttccacagtgtccctgggtacttgagattagggagtggtgatgactcttmacgagcatgctgccttcaagcatctgtttaacaaagcacatcttgcaccacccttaatccatttaaccctgagttgacacagcacatgtttcagagagca

SEQ ID NO: 13348 - DNA, 201 bp, Homo sapiens
tctagtactatgttgaatagaagtggtgagagtgggtatccttgtttttgatcttagaagaaaagctttcaacttttcactgttgagtataataatgttarctatggggttctgatatatggattttattatattaaggtacattccttctatacctatttattgatgggtcttattatgaaaggatgttgaattttgtca

SEQ ID NO: 13349 - DNA, 201 bp, Homo sapiens
cgttgtatagtgactctcagagtaaaatgtacattaataatgtatattatcatatctttctataacttattgtgtttttaaccctttatttctggcttatrtaaaattatacagaaaactaagcctacaaataatcgaacaaagaaagctgtgaaaacagtgaagaaaaaagacaaaggaaaatctgaggattcagaaaag

SEQ ID NO: 13350 - DNA, 201 bp, Homo sapiens
ttgactaattgccctggcttggacttctagtactatgttgaatagaagtggtgagagtgggtatccttgtttttgatcttagaagaaaagctttcaacttytcactgttgagtataataatgttagctatggggttctgatatatggattttattatattaaggtacattccttctatacctatttattgatgggtcttat

SEQ ID NO: 13351 - DNA, 201 bp, Homo sapiens
gatctgatggtcagtgtcactcccatcccattgtaacaacgagaactaagatccattctgggttagagtaaggttctgatccttttcagaaaatagttacrgagatatgcacctctaaatgcaaaaggagaggatttgggactgctatggacagaaattttgcaaatcttaagaactttggcttgttagcttgggagatga

SEQ ID NO: 13352 - DNA, 201 bp, Homo sapiens
tttcaactcatgaatatgggatgtattttcaattctttgtgtgttcttcaatttatttcatcaacatcttatagttttcagtgcaaaagatctttcacttytttgattaagtgtattcccaagtattttatttctttttatgctattataaatgggattgttttcttgccttcttttttagatagtttgttgttaatttat

SEQ ID NO: 13353 - DNA, 201 bp, Homo sapiens; identical to SEQ ID NO: 8972

SEQ ID NO: 13354 - DNA, 201 bp, Homo sapiens
tctgtgggggtgggacccattaagccaggcaccaagagaatttcctggtctgccggtggtgaagaccatgggaaaagtgcagtgtctgggccagaatgcaycatttctcccagtacagtctctcatggcttcccttggctagggaagggaaatcccctgaccccttgcacttcccaggtgagacaacaccccaccctgctt

SEQ ID NO: 13355 - DNA, 201 bp, Homo sapiens; identical to SEQ ID NO: 8975

SEQ ID NO: 13356 - DNA, 201 bp, Homo sapiens
gtgctagcagagataatttcaagccagcggatcttagtttgctggactctgtgggggtgggacccattaagccaggcaccaagagaatttcctggtctgcyggtggtgaagaccatgggaaaagtgcagtgtctgggccagaatgcaccatttctcccagtacagtctctcatggcttcccttggctagggaagggaaatc

SEQ ID NO: 13357 - DNA, 201 bp, Homo sapiens; identical to SEQ ID NO: 8979

SEQ ID NO: 13358 - DNA, 201 bp, Homo sapiens
gccccttcccccaggtgctctgtcccagggagctgcggtgggctccaaccagttcgaacttcctggcggctttgtttacactgtaaggtaaaaccacctaytcaagcctcagcaatggtggatgcccctccccctaccaaggtcgagtatcccaggttgaccttagactgctgtgctagcagagataatttcaagccagcg

SEQ ID NO: 13359 - DNA, 201 bp, Homo sapiens; identical to SEQ ID NO: 8984

SEQ ID NO: 13360 - DNA, 201 bp, Homo sapiens
tccccatctttgtggatttatctacatttggtctgtgaggttggtgatgttgatactattcctttctgtttgttagtgttctttctaacagacccctctgytgcaggtctgctggagtttgctggaggtccactccagaccctgtttgcctgggtatcaccagcagaggctgtagaacaacaaagattgctgcctgttcct

SEQ ID NO: 13361 - DNA, 201 bp, Homo sapiens
ggccgggcagaggcgctcttcacttccagacggggcagccgggcagaggggctcctcacatcccagacgatgggcagccaggcagagacgctgctcacttmctagacggggtggcaggcgggcagaagctgtaatcttagcactttgggaggccaaggcaggtggctgggaggtggaggttgtagcgagccgagatcacgc

SEQ ID NO: 13362 - DNA, 201 bp, Homo sapiens
aaactcattctccatccagttttattcccttgctggtgagcagctgtgatcctttgcagtagaagagatgttctggtttttggaattttcagcctttttgygctggtttctccccatctttgtggatttatctacatttggtctgtgaggttggtgatgttgatactattcctttctgtttgttagtgttctttctaacag

SEQ ID NO: 13363 - DNA, 201 bp, Homo sapiens; identical to SEQ ID NO: 8988

SEQ ID NO: 13364 - DNA, 201 bp, Homo sapiens
gctactcacttcccagacggggcggccgggcagaggcgctcctcacatcccagacgatgggcggccaggcagagacgctcctcacttcctagatggggtgrtggccgggcagaggcgctcttcacttccagacggggcagccgggcagaggggctcctcacatcccagacgatgggcagccaggcagagacgctgctcact

SEQ ID NO: 13365 - DNA, 201 bp, Homo sapiens
gcacttggcaggctgaggcaggagaatcaggcagggaggttgcagtgagtcgagatggcggcagtacagtccagcctccgctcggcatcagagggagaccrtgcaaaggggagagggagagggagagggagaggtgtttctttcttttcactctttttttgtctaatcttgtcttcttgctttatttcattgagttgatct

SEQ ID NO: 13366 - DNA, 201 bp, Homo sapiens; identical to SEQ ID NO: 8990

SEQ ID NO: 13367 - DNA, 201 bp, Homo sapiens
cagatggggcggctgggcagaggcgcttctcacttcccagacggggcggccgggcagaggcgctcctcacatcccagatgatgggtggctgggcagaggckctcctcacttcccagatgatgggtgggcgggcagaggtgctcctcagttcccagacggggctgccagtcagaggcgctccttgcctcccagacagggtgg

SEQ ID NO: 13368 - DNA, 201 bp, Homo sapiens; identical to SEQ ID NO: 8991

SEQ ID NO: 13369 - DNA, 201 bp, Homo sapiens
gagttttctatataggaaagtatatcatctggaaacaaatatgattttacttattctttttctattttgatgcattttatttgtttttcttgactaattgycctggcttggacttctagtactatgttgaatagaagtggtgagagtgggtatccttgtttttgatcttagaagaaaagctttcaacttttcactgttgag

SEQ ID NO: 13370 - DNA, 201 bp, Homo sapiens
actcagaggggctggattattatatataacatgaccctaagggtgaaggtcatgggattattttagatttttgcctgccgtcttattttattaaaaaaaawtttatttttatttctgtgggtacatagtaggtgtatatatttatgggatacatgagatattttgatacaagcatacaatgcataataatcacatcagggt

SEQ ID NO: 13371 - DNA, 201 bp, Homo sapiens; identical to SEQ ID NO: 8993

SEQ ID NO: 13372 - DNA, 201 bp, Homo sapiens
tccccacatcccagacgatgggcggcggggcagagacgctcctcacttcctagacagggtgatggctaggaagaggtgctcctcacttcccagactgggckgccgggcagaggggctcctcacatcccagacgatgggcggccaggcagagacgctcctcacttccaagatggggtggcggccgggcagaggctgcaatct

SEQ ID NO: 13373 - DNA, 201 bp, Homo sapiens; identical to SEQ ID NO: 8995

SEQ ID NO: 13374 - DNA, 201 bp, Homo sapiens
tcacctcccagacggggcagctgctgggcggaggggctcctcacttctcggacggggcggccggtcagagacgctcctcacctcccagatggggtggtggyggggcagagacactcctcagatcccagacggggtcacggccaggcagaggcgctcttcacatctcggagggggcggcggggcagaggtgctccccacatc

SEQ ID NO: 13375 - DNA, 201 bp, Homo sapiens
tggtgtatatgtgccacatttgctttatccagtgtatcattgatgggcacttgggttggttccaagtctttgccattgtgaacagtgctgcaataacataygtgtgcatgtgtttttatagtagaataatttataattctttgggtatatacccagtaatgggattgctgggtcaaatggtatttctagttctagattctt

SEQ ID NO: 13376 - DNA, 201 bp, Homo sapiens
atttcccaggtgttccttgtgcttcttgtatttagatgtctagatctttagcaaggctggggaagttttccttgatgattcctccaaatattttttctaakattttagaattctcttcttcctcaggaaaatcgtttattcttaggtttggtcatttaacataatctcagatttcttggagtctttttttttttttttaat

SEQ ID NO: 13377 - DNA, 201 bp, Homo sapiens
ctgtttttatcttttttgaagaatctccatactgttttccataaagctgaactaatttacattctcactaacagtgtataagagttcccttttctccacaktcttgccagtacttaaatgttttttctttttgataatagccattttttttgataacagatgtgaggtaatattacatggtggtttaaatttacttttcct

SEQ ID NO: 13378 - DNA, 201 bp, Homo sapiens
ggcaatgccttgctgtgcttcggctgatgctcgttgcgctgcacccagtgtcctgcacccactttccgacactccccagtgagatgaacccggtacctcakttggaaatgcagaaatcacccgtcttctgcgtcgctcacgctgggagctgtagactggagctgttcctatttggccatcttggctccaaccccccagcat

SEQ ID NO: 13379 - DNA, 201 bp, Homo sapiens
tggaatcagaatatgaatatccccaatcattccctcccagcaacgcagggctaagatgcagaacttctgaagagggagcagctttcatcactacatggcaragaagtctgctgggctgcaaggctggtggagctcgaactcactgggaaggtgtccatgagggtggtacacttaggaatctgccctctgtgatgctaggaa

SEQ ID NO: 13380 - DNA, 201 bp, Homo sapiens
ttggaaaagcgcagtattagggtgggagtgacctgtttttccaggtgccgtctgtcacccctttctttgactaggaaagggaattccctgatcccttgtgyttcccaggtgaggcaatgccttgctgtgcttcggctgatgctcgttgcgctgcacccagtgtcctgcacccactttccgacactccccagtgagatgaac

SEQ ID NO: 13381 - DNA, 201 bp, Homo sapiens
cacttgttgtatcattttttggatttccttgcattgagcttcacctttctctggtgcctcccttaataactaacctccggaattctttttcaggtaaagcygggatttcttcttggtttgggtccattgctgatgaagtattatgatttttgtggggaatgttaaagagccttgttttgtcatatttccagggttggtttt

SEQ ID NO: 13382 - DNA, 201 bp, Homo sapiens
ccactcagtctgtccaatattctgtctccaaaaatcctttgatttcacagggaaacataatccattggtcttgctgcctttttagtgtccgaaatcctccytgtgcccttacttacccagcttaaatagcatggtccactattatcatcactccctttcacacgtacttaactctcttgccctgttctgctttattggtct

SEQ ID NO: 13383 - DNA, 201 bp, Homo sapiens
acttaatgtagtgacctccagttgcaaatgacaggatctcattctttttgtatggctgaatagtactccattatgtatgtgtactacattttctttattcrtttgtctgttgatggacacttacattgcttctaaatcttagttatttttgaattgtggtgcaataaacatgggagtgcagatatctttttaatatactga

SEQ ID NO: 13384 - DNA, 201 bp, Homo sapiens
aaattattccaaaacgtagtaacttaaaacagtagaatcattatttctcatagttgctgggcagctcagcttagtttggatgtgcaagataagttttattsctatgtctgacgttccagctgggacatctgggacaggtgggacttctttctagtctcttatcttccaggatgatagctctgggtagtttaaagaaggatc

SEQ ID NO: 13385 - DNA, 201 bp, Homo sapiens
ttccaaaacgtagtaacttaaaacagtagaatcattatttctcatagttgctgggcagctcagcttagtttggatgtgcaagataagttttattcctatgyctgacgttccagctgggacatctgggacaggtgggacttctttctagtctcttatcttccaggatgatagctctgggtagtttaaagaaggatccctagt

SEQ ID NO: 13386 - DNA, 201 bp, Homo sapiens
gtgagagcaaatatccttgcctccttccaatcttaaggaaaaatcaatttttcactattgaaaatgatgttagctggagatagttcacagatgtccttcaycagatgaaaaagttcctctctattcataagtattgtttgttttcaaagaataatcgattcatgtcacagactcaaaccactgcaaaatttgatattacat

SEQ ID NO: 13387 - DNA, 201 bp, Homo sapiens
atgtctgtatagcaaacagctttggaaaatatagtgtctccctctggggaagaaggcaggtttgttggctgttcatgataataaagacaatgtcttccacyggaaaaaggttgaaaaggttttctagcaagggttttagaaaatattggggtttcctaaatagggttgctcttgggtaatgcaactcactgagtgtgctct

SEQ ID NO: 13388 - DNA, 201 bp, Homo sapiens
atttccttttgtataatatgtcatttttctttggccacttttattgctttttttttttccttttatttggttttcagcagtttggctttgttttacgtgarcatgattttctttgtaaatatcaacttgggcagcactgaacatgttgagtatgttaatttcaccaagtttgggacattttcaatgtattattattttaaa

SEQ ID NO: 13389 - DNA, 201 bp, Homo sapiens
caagctacccgccttcacagctgcgaaagaaaagggcttggttcttcccagacctatggagtctgcacaccagatttgtgccctcccctgagttctggccrggaggtttcttgccctgttcaaattgttacaaagttcagctagaactgcttttccctgtggagttttaccccctggtcctctgtctgtcctcccaatgga

SEQ ID NO: 13390 - DNA, 201 bp, Homo sapiens
tgctagcaatgagtgaggctccgtgggcgcaggaccctccaagccaggcgcgggatataatctcctggtgtgctgtttgctaagaccattggaaaagcgcrgtattagggtgggagtgacctgtttttccaggtgccgtctgtcacccctttctttgactaggaaagggaattccctgatcccttgtgcttcccaggtgag

SEQ ID NO: 13391 - DNA, 201 bp, Homo sapiens
cttctttgtctcctttggctgctgttgctttaaagtttgtttgtctgatgtaagaatagctatccctgcttgcttttggtgtccatttgcatgaaatgccyttttccacccatttactttaagtttatgcgagtccttatgtgttagcgagtctcctgaaggcatcagatagttggttagtgagttcttatccattctgca

SEQ ID NO: 13392 - DNA, 201 bp, Homo sapiens
ctccaagcctctggtaaccatccttctattctctatctccatgagttcaattgttttgatttttaacccccacgaataagtgaaaacatgcaatgtttgtstttctatgcctggcctatttcatttaacataatgacttccagttccatctatgttgttgcaaatgacacaatctccttttttatgactaaatagtactcc

SEQ ID NO: 13393 - DNA, 201 bp, Homo sapiens
ggcggcgcgtgcctgcaatcccaggcacttggcaggctgaggcaggagaatcaggcagggaggttgcagtgagtcgagatggcggcagtacagtccagccyccgctcggcatcagagggagaccatgcaaaggggagagggagagggagagggagaggtgtttctttcttttcactctttttttgtctaatcttgtcttct

SEQ ID NO: 13394 - DNA, 201 bp, Homo sapiens
agtcaggcgtggcggcgcgtgcctgcaatcccaggcacttggcaggctgaggcaggagaatcaggcagggaggttgcagtgagtcgagatggcggcagtasagtccagcctccgctcggcatcagagggagaccatgcaaaggggagagggagagggagagggagaggtgtttctttcttttcactctttttttgtctaat

SEQ ID NO: 13395 - DNA, 201 bp, Homo sapiens
cgaaaaccagtcaggcgtggcggcgcgtgcctgcaatcccaggcacttggcaggctgaggcaggagaatcaggcagggaggttgcagtgagtcgagatggyggcagtacagtccagcctccgctcggcatcagagggagaccatgcaaaggggagagggagagggagagggagaggtgtttctttcttttcactctttttt

SEQ ID NO: 13396 - DNA, 201 bp, Homo sapiens
tgagcgagactccgtctgcaatcctggcacctcgggaggccgaggcaggcagatcactcgcggtcaggagctggagaccagcccggccaacacggcgaaascccgtctccaccaaaaaatacgaaaaccagtcaggcgtggcggcgcgtgcctgcaatcccaggcacttggcaggctgaggcaggagaatcaggcagggag

SEQ ID NO: 13397 - DNA, 201 bp, Homo sapiens; identical to SEQ ID NO: 9009

SEQ ID NO: 13398 - DNA, 201 bp, Homo sapiens
ccagacgatgggcggccaggcagagacgctcctcacttccaagatggggtggcggccgggcagaggctgcaatctcggcactttgggaggccaaggcaggyggctgggaggtggaggttgtagccagccaagatcacaccactgcactccagcctgggcaacattgagccctgagtgagcgagactccgtctgcaatcctg

SEQ ID NO: 13399 - DNA, 201 bp, Homo sapiens
caacaaaaccgccactgtcatcatggcccgttctccatgagctgttgggtacacctcccagatggggtggtggccgggcagaggggctccccacttcccakacggggcggctgggcagaggcgccccccacctcccggatggggcggccggcctggcgggggctgccccccgacctcctggacggggcggctgcccggtgg

SEQ ID NO: 13400 - DNA, 201 bp, Homo sapiens
cctgtgttttcccaaccatggtcattatgggagagggtgacgggagaaagggctgggaaagagggagccctaatgttgaatctttcttttttttttttttwtttttttttagtgtttattgatcattcttgggtgtttctctgagagggggatttggcagggtcataggacaatagtggagggaaggtcagcagataaaca

SEQ ID NO: 13401 - DNA, 201 bp, Homo sapiens; identical to SEQ ID NO: 9017

SEQ ID NO: 13402 - DNA, 201 bp, Homo sapiens
tcctgtgttttcccaaccatggtcattatgggagagggtgacgggagaaagggctgggaaagagggagccctaatgttgaatctttctttttttttttttwatttttttttagtgtttattgatcattcttgggtgtttctctgagagggggatttggcagggtcataggacaatagtggagggaaggtcagcagataaac

SEQ ID NO: 13403 - DNA, 201 bp, Homo sapiens; identical to SEQ ID NO: 9019

SEQ ID NO: 13404 - DNA, 201 bp, Homo sapiens
ttctgctcttctgctaataaatctcctatcattgtttggttaatttattgggaagaaacttgacatcctgatgtaatcttctttgtcctgtgttttcccarccatggtcattatgggagagggtgacgggagaaagggctgggaaagagggagccctaatgttgaatctttcttttttttttttttatttttttttagtgt

SEQ ID NO: 13405 - DNA, 201 bp, Homo sapiens; identical to SEQ ID NO: 9022

SEQ ID NO: 13406 - DNA, 201 bp, Homo sapiens
ataaatttatcagaaggagttttgttttctaaaattattgtgattccagaattatcttctgctcttctgctaataaatctcctatcattgtttggttaatktattgggaagaaacttgacatcctgatgtaatcttctttgtcctgtgttttcccaaccatggtcattatgggagagggtgacgggagaaagggctgggaa

SEQ ID NO: 13407 - DNA, 201 bp, Homo sapiens; identical to SEQ ID NO: 9024

SEQ ID NO: 13408 - DNA, 201 bp, Homo sapiens
gtctttttattttctctcagcaattttttgtagttatcactgtaactttttaccttattgagtgctggaaggttttgtatgcctataaatattcttgagcwgtgttttgggtctcagctaagttactggaaacattcaatcctttcagatcttacttttaagctttgtttgacaggtccagaggagtgtttagtgtaagac

SEQ ID NO: 13409 - DNA, 201 bp, Homo sapiens; identical to SEQ ID NO: 9027

SEQ ID NO: 13410 - DNA, 201 bp, Homo sapiens; identical to SEQ ID NO: 9029

SEQ ID NO: 13411 - DNA, 201 bp, Homo sapiens
caatggcgggcgcccctcccccagcctcgctgctgccttgcagtttgatctcagactgctgtgctagcaatcagcgagactctgtggtcataggaccctcygagccaggtgtgggatataatctcgtggtgcgccgtttcttaagcccatcggaaaagcgcaatattcgggtgggagtgacccgattttccaggtgcgtcc

SEQ ID NO: 13412 - DNA, 201 bp, Homo sapiens
acagatgggtttttggtgtggatgtcctttctgtttgttttccttctaacagagaggaccctcagctgcaggtctgttggagtaccctgccgtgtgaggtrtcagtgtgcccctgctggggggtgcctcccagttaggctgctcgggggtcaggggtcagggactcacttgaggaggcagtctgccagttctcagatctcc

SEQ ID NO: 13413 - DNA, 201 bp, Homo sapiens
ataggtgaaaggtggagacagcccagatactcacaacagatgagcagataaacaaaccgtggtgcatccacgcatcaggcgctccatgacagtcaaaaatyaactcttcgggcaggcagtgaagggtcgtcacacagcagctgtgggtgcagaaggtggtggattccatggtggagagtctggacagagagaacatccaga

SEQ ID NO: 13414 - DNA, 201 bp, Homo sapiens
catagaggtgtttgtagtattccctgatggtagtttgtatttctgtgggatcggtggtgatatcccctttatcattttttattgcatctatttgattcttytctctttttttctttattagtcttgctagcggtctatcaattttgttgatcctttcaaaaaaccagctcctggattcattaattttttgaagggtttttt

SEQ ID NO: 13415 - DNA, 201 bp, Homo sapiens
gacacatggatgaacatggaggacattatgttaagtaaaataagccagacataaaaatgatctcacttatatgtgtaatctaaaatcatcagtcatagaakcatagagcataactgtgattgccagggaatgaggggagggaaaaatgggaaggtgatattcaaaaggtataaaaaagtttcatttgtgcaagatgaagaa

SEQ ID NO: 13416 - DNA, 201 bp, Homo sapiens
tttctagtttatttgcatagaggtgtttgtagtattccctgatggtagtttgtatttctgtgggatcggtggtgatatcccctttatcattttttattgcrtctatttgattcttctctctttttttctttattagtcttgctagcggtctatcaattttgttgatcctttcaaaaaaccagctcctggattcattaattt

SEQ ID NO: 13417 - DNA, 201 bp, Homo sapiens
ctaatttatccctactgtcacagttaaaagacaaaattattaaaagcacctataactaaaataaattgtaaagaaatacaaattacaaaacatgtaaattktgacatcaaaatcataagaagtggaaaggagtgaaagtgtagagtttttgtatgtgattaaagttatcagaataaaatagcctgttaaaaggatattttg

SEQ ID NO: 13418 - DNA, 201 bp, Homo sapiens
cctagcggaaaccaaagacaaggttagactatggcactatgaaaagtcataggccaacaaactggataacctagcagaaaccaaagacaaggttagactayggcactatgaaaaatcataggccaacaaactggataacctagcagaaaccaaagacaaggttagactacggcactatgaaaaatcataggccaacaaact

SEQ ID NO: 13419 - DNA, 201 bp, Homo sapiens
aacctagcggaaaccaaagacaaggttagactatggcactatgaaaagtcataggccaacaaactggataacctagcagaaaccaaagacaaggttagacyacggcactatgaaaaatcataggccaacaaactggataacctagcagaaaccaaagacaaggttagactacggcactatgaaaaatcataggccaacaaa

SEQ ID NO: 13420 - DNA, 201 bp, Homo sapiens
cttttgaaaaatacatcttgggctagaccttaggaaagactgaacacttaatcatgggccgccaagttgcaatgtgacttgaatcagtaagaatatagaayacttgaactaaaaattaacaaacccaatttaatagatattcttagaaggctgcacccaccacaaagcattggaagcacacacagaccataaattaactct

SEQ ID NO: 13421 - DNA, 201 bp, Homo sapiens
gattaaccctgcattgcccaaagaaactgtaatggcctctttcctgaggcagtcaccatgcaagacaatgctgatgctacgcaggacccacccctaccatycctctttgcttctagatctgtacctaggctcaagtttcagcaggaccctaaagttggaaacaatgcatgactcattagaaagtgtactacactccaaaag

SEQ ID NO: 13422 - DNA, 201 bp, Homo sapiens
ttttcaaacatgtgtgtcgacctagtgaataagatgagattggctggttgctcctattcttgctagaaaaagtgaggaaagtgatgaaaggaaatatgagyggaggaatttgaattctgagtttcttggtgttgcataaataacctgaaagcttccatgagtgccctgaaagagacccttattttctgtagccacagggct

SEQ ID NO: 13423 - DNA, 201 bp, Homo sapiens
atgttgtgatctagcaatacagatatgcaaaatttcaccatttgcgacccataattaagcatgggttgactggtatatgatattttcaaacatgtgtgtcracctagtgaataagatgagattggctggttgctcctattcttgctagaaaaagtgaggaaagtgatgaaaggaaatatgagcggaggaatttgaattctg

SEQ ID NO: 13424 - DNA, 201 bp, Homo sapiens
aaaaaaaaaaaagcagtggtagctatacttatatgagacaaaatagactttaagtatgtaactataaaaagagaaaaaggtcattatgtaataatagaggsttcaatttaccaagaacatataacaatataaatatatatgcacaaaacatcaaagcagttagtaaatattttaaggagagataaactgcaacacaataga

SEQ ID NO: 13425 - DNA, 201 bp, Homo sapiens
accaaaaaaaaaaaaagcagtggtagctatacttatatgagacaaaatagactttaagtatgtaactataaaaagagaaaaaggtcattatgtaataataragggttcaatttaccaagaacatataacaatataaatatatatgcacaaaacatcaaagcagttagtaaatattttaaggagagataaactgcaacacaa

SEQ ID NO: 13426 - DNA, 201 bp, Homo sapiens
ctagtttgattgcactgtggtctgagagatagtttgttataatttctgttcttttacatttgctgaggagagctttacttccagtatgtggtcaattttgkaacaggtgtggtgtggtgctgaaaaaaatgtatattctgttgatttgcggtggagagttctgtagatgtctattaggtccgcttggtgcagagctgagtt

SEQ ID NO: 13427 - DNA, 201 bp, Homo sapiens
ggtgaggaactgcgttcctttggaggaggagaggcgctctgctttttagagtttccagtttttctgttctgttttttccccatctttgtggttttgtctayttttggtctttgatgatggtgatgtacagatgggtttttggtgtggatgtcctttctgtttgttttccttctaacagagaggaccctcagctgcaggtct

SEQ ID NO: 13428 - DNA, 201 bp, Homo sapiens
ttgtggggaacaaggtgactccttaaagaagaattgaattgtgtcttttgttcaccaataactaaaatgtctgtgggattgtttttcagatacctttttcragcctatatcgtggcacctggctaccaaagtactgggaatactctgctgtggcctattttttggcattgttggactgaagattttcttctccaaattcca

SEQ ID NO: 13429 - DNA, 201 bp, Homo sapiens
tcaggagatcgagaccatcctggctaacacggtgaaaccctgtctctactaaaaatacaaaagaattagccgggcatggtggcgggtgtgtgtagtcccakctacttgggaggctgaggcaggagaatggcgtgaacccgggaggtggagcttgcagtgagctgagatggcgccactgcactccagcctgggtgacagagt

SEQ ID NO: 13430 - DNA, 201 bp, Homo sapiens
ctctgggaggccgaggtgggtggatcacgaggtcaggagatcgagaccatcctggctaacacggtgaaaccctgtctctactaaaaatacaaaagaattakccgggcatggtggcgggtgtgtgtagtcccagctacttgggaggctgaggcaggagaatggcgtgaacccgggaggtggagcttgcagtgagctgagatg

SEQ ID NO: 13431 - DNA, 201 bp, Homo sapiens
acggcactatgaaaaatcataggccaacaaactggataacctagcagaaaccaaagacaaggttagactacggcactatgaaaaatcataggccaacaaaytggataacctagcagaaaccaaagacaaggttagactacggcactatgaaaaattacaggccaacaaattggataacctagcagaaatggatacattcct

SEQ ID NO: 13432 - DNA, 201 bp, Homo sapiens
atccttggtaaatctgtatttctgagacagcatgagatcaataattttctattctactctcttgcttacaacattcaacaactcatttcctttttttttttatcacagagtaatattccattgtatagatgtaccatagtttgtgtatacattctatgtatcattattgaatgatatctggttgcaaacatttttggcaat

SEQ ID NO: 13433 - DNA, 201 bp, Homo sapiens
tatccttggtaaatctgtatttctgagacagcatgagatcaataattttctattctactctcttgcttacaacattcaacaactcatttcctttttttttttatcacagagtaatattccattgtatagatgtaccatagtttgtgtatacattctatgtatcattattgaatgatatctggttgcaaacatttttggcaa

SEQ ID NO: 13434 - DNA, 201 bp, Homo sapiens
ggagccgagggtctaggagcacgtggtgagtggcagagatgctggtaggctccctgtgtgtttttcagggagtaataaatacaagcccagaaactaccagragccaggcattagagatatgaggatggactgctgtgaactgtctaggaacaaaatagctgaaagggcactgtggaagaaggtgtcagaaaattaacttct

SEQ ID NO: 13435 - DNA, 201 bp, Homo sapiens
gagaggaagcagagagggttgtagtcgatgagctgagtctggaggccagagggagccgagggtctaggagcacgtggtgagtggcagagatgctggtaggytccctgtgtgtttttcagggagtaataaatacaagcccagaaactaccaggagccaggcattagagatatgaggatggactgctgtgaactgtctaggaa

SEQ ID NO: 13436 - DNA, 201 bp, Homo sapiens
ccacatgcatgtgcacacacacacacacacacacacacacacacaaatgaatgcatgtaaaaactgctaacatgtgaatcaggcctggagtctagttaacrtatttatatcaatatcaatctcctggtttcaatattgtgccatagcaaagctacataagatgttgccattgccttaattttaaaaaattgttaccattgg

SEQ ID NO: 13437 - DNA, 201 bp, Homo sapiens
gattcgttgagcaggtgattctgggaaacaaagtgagggagtggagagagtgaagccagtagggggaaagccatagagggtgcgctaatgagcgttgctgyggtggcaactgggacccagtcccactgggacctttggaggaactttatagatggtggctcagagtcattccaacatctactgtctcctttccccactggg

SEQ ID NO: 13438 - DNA, 201 bp, Homo sapiens
atttttggcaattatgaataaagctgctataaacattcatgtgcaatttttcatgtggacatatgttttcaagtcatttaggtgaataaaaagcagtgcarttgctggattaggtgataaaagtatgtttaattttgcaggaaattgctgaactgtcttctagaacaaccgtaccgtcttgcattcctgtcagcaatcagt

SEQ ID NO: 13439 - DNA, 201 bp, Homo sapiens
cttaagtattcaccaagagaaaaggaactgcatgtcttgacaaagccttgtacctcaatattcatagaagcctcattcagaataggtgaaaggtggagacmgcccagatactcacaacagatgagcagataaacaaaccgtggtgcatccacgcatcaggcgctccatgacagtcaaaaatcaactcttcgggcaggcagt

SEQ ID NO: 13440 - DNA, 201 bp, Homo sapiens
ttgccaaaggtcgtggttttagtgtttgtgtgtgtaagagagagaatgggtggggggtggactgaatgcacctgactcagaattgctgtggctttgggatrtgatctttgctttcaaccgttccctgttttctccccagcactgggctcagttcctctcatttccatcacgggatatgttgatagagacatccagctactc

SEQ ID NO: 13441 - DNA, 201 bp, Homo sapiens
aacagtatcttgtttatgatggtggttacttgaatttatatatctaataaaattgcacagaaccacatgcatgtgcacacacacacacacacacacacacacacacaaatgaatgcatgtaaaaactgctaacatgtgaatcaggcctggagtctagttaacatatttatatcaatatcaatctcctggtttcaatattgt

SEQ ID NO: 13442 - DNA, 201 bp, Homo sapiens
tagtttgatgggtgcagcaaaccaccatggcacatatatacctaaacctgcacttcctgcacatgtatcccagaacttaaaatataataataataataatraaggggtattgaaattccccagtatttttgttttgctatgttttcctcatgtccactaatatttgctttatatgtttacacaccttgatgttggttgcat

SEQ ID NO: 13443 - DNA, 201 bp, Homo sapiens
gaacagtatcttgtttatgatggtggttacttgaatttatatatctaataaaattgcacagaaccacatgcatgtgcacacacacacacacacacacacacacacacaaatgaatgcatgtaaaaactgctaacatgtgaatcaggcctggagtctagttaacatatttatatcaatatcaatctcctggtttcaatattg

SEQ ID NO: 13444 - DNA, 201 bp, Homo sapiens
gaatggtgatcattaaaaagtcaggaaatgacagatgctggagaggatgtgaagaaataggaatgcttttagcctgttggtaggagtgtaaattagttcawccattgtggaagacagtgtggcgattcctcaaggatctagaacaagaaacaccatttgactcagcaatcccattactgtatatacccaaaggattacaaa

SEQ ID NO: 13445 - DNA, 201 bp, Homo sapiens
ctgccgtgtgaggtgtcagtgtgcccctgctggggggtgcctcccagttaggctgctcgggggtcaggggtcagggactcacttgaggaggcagtctgccrgttctcagatctccagctgcgtgctgggagaaccactgctctcttcaaagctgtcagacagggacatttaagtctgcagaggttactgctgtctttttgt

SEQ ID NO: 13446 - DNA, 201 bp, Homo sapiens
caagaaaaaaaaatctgatcaaaaagtgggtgaaggatatgaacagacacctctcaaaagaacacatttatatggccaacaaacatgaaaaaaagctcatyatcactggtcattagagaaatgtaaatcaaaaccacaatgagataccatcttgtgccagtgagaatggtgatcattaaaaagtcaggaaatgacagatgc

SEQ ID NO: 13447 - DNA, 201 bp, Homo sapiens
gggaattgccctagggataaataaatgcaaggctctcagcagccagcctgctttgcaggactgagaaaagaaaatcccaagacttcctctcaccaagaagsaacgagaaaagtaaagcaggtacatccataaaaaagatctgagagacttccagagtatctagccaggctgactggtcaaggtctttgtctaccaaagtct

SEQ ID NO: 13448 - DNA, 201 bp, Homo sapiens
atgtaatggcctcactaatcagagatcctgcatttaatgttgcagctcagagtgttagaaaggcctctatcgtttggttggctgaagcatggatcaaaatrtggcccacagagagtgacaggtgggcatgctgttaggagcctttgccaggcccctgtaagtgaatcatggcacaggccctcaggattgagaagcagagcc

SEQ ID NO: 13449 - DNA, 201 bp, Homo sapiens
gcccctcccccagcctcgctgctgccttgcagtttgatctcagactgctgtgctagcaatcagcgagactctgtggtcataggaccctctgagccaggtgygggatataatctcgtggtgcgccgtttcttaagcccatcggaaaagcgcaatattcgggtgggagtgacccgattttccaggtgcgtccgtcaccccttt

SEQ ID NO: 13450 - DNA, 201 bp, Homo sapiens
atttgcggtggagagttctgtagatgtctattaggtccgcttggtgcagagctgagttcaattcctgggtatcctttttgactttctgtctcgttgatctrtctaatgttgacagtggggtgttaaagtctcccattattaatgtgtgggagtctaagtctctttgtaggtcactcaggacttgctttacgaatcttggtg

SEQ ID NO: 13451 - DNA, 201 bp, Homo sapiens
actctttttggttggtaagctattgattattgccacaatttcagctcctgttattggtcgattcagagattcaacttcttcctggtttagtcttgggagastgtatgtgtcgaggaatttatccatttcttctagattttctagtttatttgcatagaggtgtttgtagtattccctgatggtagtttgtatttctgtggg

SEQ ID NO: 13452 - DNA, 201 bp, Homo sapiens
aactcacaccctgctgataggaatgtaaaagagtgtaaaaatgtaaaaactattttggaaaactgtatggcagtttctttaaaagtaaacagtcacctaaygtatggtccagccatcccactcttaagtattcaccaagagaaaaggaactgcatgtcttgacaaagccttgtacctcaatattcatagaagcctcattca

SEQ ID NO: 13453 - DNA, 201 bp, Homo sapiens
acggagctgtcagcaggcagggaaatgcccatcccactgcagggggactcagggttgggtggtgaggagcagggcctcaacatctgctacaccaggtcagmagctggtcagacaccaggctgcaaagtcatgcctcatttaataatactcttaaagatgcatgagtgaaatacatttcagcaagatttataaaatgtaatt

SEQ ID NO: 13454 - DNA, 201 bp, Homo sapiens
atcccactgcagggggactcagggttgggtggtgaggagcagggcctcaacatctgctacaccaggtcagaagctggtcagacaccaggctgcaaagtcaygcctcatttaataatactcttaaagatgcatgagtgaaatacatttcagcaagatttataaaatgtaattaaactaaaaaattagtgctaaaatgaaaaa

SEQ ID NO: 13455 - DNA, 201 bp, Homo sapiens
agtgggcctccatagtctgtggtctctaagaagcagtgtaatccttacagggtagtaagagtgatttacaccaggaaaattactcaaatgattgttaaacwgatgagcaagtaagaaaggaaatggggctcaccgttcacatgcataactgtggagcctgttctgtgtgactggctctgtgctgatcaagtgggtactatg

SEQ ID NO: 13456 - DNA, 201 bp, Homo sapiens
taagcctataggagaatttatagaaacctatttcttccattgtggggaacaaggtgactccttaaagaagaattgaattgtgtcttttgttcaccaataamtaaaatgtctgtgggattgtttttcagatacctttttcgagcctatatcgtggcacctggctaccaaagtactgggaatactctgctgtggcctattttt

SEQ ID NO: 13457 - DNA, 201 bp, Homo sapiens
aaggcagtgtctgcgggaggctcaggtccggggcctcacctatgccacccagagccagtctgcagtgggagggtcgacctcttgctccagcccagatttcstcttcagtaactcatgcttcctctctcccccaccgcaccccagtggaggtgactctggatccagagacggctcacccgaagctctgcgtttctgatctga

SEQ ID NO: 13458 - DNA, 201 bp, Homo sapiens
ctatagtgataaaatttgattcctttcaaatttatacaggagataaatcagaagaaagaatttctgaacttgaagacaggtattttgaaataacccagtcygatgaaaaaaagaaagagaaaaaagaatgaagaaagtatacaggacttatgaaataccattaagtgaaaaaattttcatattatgtgagtttcagaagaa

SEQ ID NO: 13459 - DNA, 201 bp, Homo sapiens
gggtgtcacagtcctggcatgggaagcccctaggtctgggctcctggaagggctgcagctcttctctccttctcattgtctgcaacattgcaaacagggcrgtgtgtatcagccctgtttgtgttacagctttttcagtcccacctttcagtggttcccaagttcttgtcccatatccaggaagaatgtggtacacagaca

SEQ ID NO: 13460 - DNA, 201 bp, Homo sapiens
ggagactgacttagtaataaaaattctcccatcaaagaaaagcccaggacccagtgacatcactgatgaattctaccaaacatttaaagaaaaactgccarcatttctcaaactcttccaaaaaatgacagaggacatacttccaaacttattttacaaggtcaacattaccctgataccaatatcagacaaggacactga

SEQ ID NO: 13461 - DNA, 201 bp, Homo sapiens
gccactgcgcctggccaattttaagtataatttttaaaaagccacagcaattgcacaaacaataaaaaacaaaggattcaaagcatgcaactgtgagaaawcatcaaatttcaaaggaagacagccagagaagaattaaaaataaaagatctacaaaaccaacataaaacaaattataaaatggaagtctgtacctataaa

SEQ ID NO: 13462 - DNA, 201 bp, Homo sapiens
aggaagtcaaattgtctctgtttgcagatgataggattgcatgtttagaaaaccccggtgtctcagccccaaatctccttaagctgataagcaactttagsaaagtctcgggatacaaaatcaatgtgcaaaaatcacaagcatttctatacactaataatagacaaacagaaagccaaatcatgaatggactcccattca

SEQ ID NO: 13463 - DNA, 201 bp, Homo sapiens
tgcaaggctggttcaacatacgcaaattaataaacgtaatccatcacataaacagaaccaatgacaaaaacattatctcaatagatgcagaaaaggccttygataaaattaaacaccccttcatgctaaaaactctcaataaattagatgtcaatggaatgtatctcaaaataataagagctacttatgacaaacccacag

SEQ ID NO: 13464 - DNA, 201 bp, Homo sapiens
aaagcaaatccagcagcacatcaaaaaccgtatccaccacgatcaagttggcttcatccttgggatgcaaggctggttcaacatacgcaaattaataaacrtaatccatcacataaacagaaccaatgacaaaaacattatctcaatagatgcagaaaaggccttcgataaaattaaacaccccttcatgctaaaaactct

SEQ ID NO: 13465 - DNA, 201 bp, Homo sapiens
ctattccttcagaaactattccaaacaatagaaagagagaaactccttccctaactcattttatgaggccaccatcatcctgataccaaaacctggcagaracacaacaaaaaaggaaaatttcaggccaatattcctgataaacatcaatgtgaaaatcctcaataaaatactggcaaagcaaatccagcagcacatcaa

SEQ ID NO: 13466 - DNA, 201 bp, Homo sapiens
gacaagatggattcacagctgaattctaccagaggtacaaagaggagctggtactattccttcagaaactattccaaacaatagaaagagagaaactccttccctaactcattttatgaggccaccatcatcctgataccaaaacctggcagaaacacaacaaaaaaggaaaatttcaggccaatattcctgataaacatc

SEQ ID NO: 13467 - DNA, 201 bp, Homo sapiens
ttcttttacatttgctgaggagagctttacttccagtatgtggtcaattttgtaacaggtgtggtgtggtgctgaaaaaaatgtatattctgttgatttgyggtggagagttctgtagatgtctattaggtccgcttggtgcagagctgagttcaattcctgggtatcctttttgactttctgtctcgttgatctatctaa

SEQ ID NO: 13468 - DNA, 201 bp, Homo sapiens
tgtattgggtgcatatatatttaggagagttagctcttcttgttgaattgatccctttaccattatgtaatggccttctttgtctcttttgatctttgttkgtttaaagtctgttttatcagagactaggattgcaacccctgcctttttttgttttccattggcttggtagatcttcctccatccttttattttgagcct

SEQ ID NO: 13469 - DNA, 201 bp, Homo sapiens
cagcattctcctgtttcctgtctcctaagaccaatgcagaggccatggaagtgcggttcttcaggggccagttctctagcgtggtccacctctacagggaygggaaggaccagccatttatgcagatgccacagtatcaaggcaggacaaaactggtgaaggattctattgcggaggggcgcatctctctgaggctggaaa

SEQ ID NO: 13470 - DNA, 201 bp, Homo sapiens
gctgcaggtctgttggagtaccctgccgtgtgaggtgtcagtgtgcccctgctggggggtgcctcccagttaggctgctcgggggtcaggggtcagggacycacttgaggaggcagtctgccagttctcagatctccagctgcgtgctgggagaaccactgctctcttcaaagctgtcagacagggacatttaagtctgca

SEQ ID NO: 13471 - DNA, 201 bp, Homo sapiens
ctaacacaagaacagaaaaccaaacagtgcatgttctcactcataagtgggagttgaacaatgagaacacatggacacagggaggggaacatcacacaccrgggcctgtcggagggtagggagctaggggagggaggggtagcattaggagaattacataatgttgatgatagtttgatgggtgcagcaaaccaccatggc

SEQ ID NO: 13472 - DNA, 201 bp, Homo sapiens
ctcactcataagtgggagttgaacaatgagaacacatggacacagggaggggaacatcacacaccagggcctgtcggagggtagggagctaggggagggargggtagcattaggagaattacataatgttgatgatagtttgatgggtgcagcaaaccaccatggcacatatatacctaaacctgcacttcctgcacatgt

SEQ ID NO: 13473 - DNA, 201 bp, Homo sapiens
acaatgagaacacatggacacagggaggggaacatcacacaccagggcctgtcggagggtagggagctaggggagggaggggtagcattaggagaattacrtaatgttgatgatagtttgatgggtgcagcaaaccaccatggcacatatatacctaaacctgcacttcctgcacatgtatcccagaacttaaaatataat

SEQ ID NO: 13474 - DNA, 201 bp, Homo sapiens
ataccattaagtgaaaaaattttcatattatgtgagtttcagaagaagagatgagagatggtgtaaataacctatttaataaaataatagctgaaaacttygcaagtcctggaagagatgtggacatccagttccaggaagcttaaaagtttccaaaatattcaacacaaaaaggtcctctacatggcacattttagtcaa

SEQ ID NO: 13475 - DNA, 201 bp, Homo sapiens
tctcctagcctcagcctggggaaggatcaggcgctgtggaaacaattatagtagcccccaaataatggaaacacgggtgttgaagacgcaccgtgatcgtwgacggggacacacctaacgtgttaaggtgaataaattcagtgtttctcccagatgggctgagtggtgtaggcagggttattggagcaccaaggttgctga

SEQ ID NO: 13476 - DNA, 201 bp, Homo sapiens
acatatgtgtcaacaaaaagagtcaaactctataaaacatttaaagaggtttattctgggccaaatgtgagtgaccaaagcccaaggcatagtctcaacargtcctgagaacatgtgcccaaggtggttgagttacagcttgattttatgttttaaggggacagaaattacagacagacatcaatcaatatatgtaaggtg

SEQ ID NO: 13477 - DNA, 201 bp, Homo sapiens
gttctcccgggtccctccctgatccacagtttgagcctctggacgaccctggctgcaggctggacaggaagcaccggcaggtggaggagagcagctgctcrctctctccatccactgctcatgagttacccctcggacatctggagggcttaggataggccccggggcctggaagtccccacaaattgtctgtgcctgttg

SEQ ID NO: 13478 - DNA, 201 bp, Homo sapiens
agttctttagctacaatggttgcagcataatggaatgaaggcatctttgtcgtttccattcctttggcttctcctagcctcagcctggggaaggatcaggygctgtggaaacaattatagtagcccccaaataatggaaacacgggtgttgaagacgcaccgtgatcgttgacggggacacacctaacgtgttaaggtgaa

SEQ ID NO: 13479 - DNA, 201 bp, Homo sapiens
tcaataaaactaaatgttgtttatttgaaaagataagtaaaattgacaagcctttacctagattaaccaagaaaaaaagagctgactcaaataaatagaaytataaataaaagatgatacattacaactggtaccacagaaataaatataaaatgtcatgagactatcgtagttctcccttatccacaggggttacattcc

SEQ ID NO: 13480 - DNA, 201 bp, Homo sapiens
aaggtgactccttaaagaagaattgaattgtgtcttttgttcaccaataactaaaatgtctgtgggattgtttttcagatacctttttcgagcctatatcrtggcacctggctaccaaagtactgggaatactctgctgtggcctattttttggcattgttggactgaagattttcttctccaaattccagtgtaagcgag

SEQ ID NO: 13481 - DNA, 201 bp, Homo sapiens
tgtccctgtgttgatatatgtgcatctggtagaacatttgcctctcctaacttataaagtagcttttctaagaaaaaactttcacttgttgataggtcctygggtgctgagtagggtgtatcggctctgcttctggctggcacagtagcgtagtctctgtgaagcttctcagctataatcaatgtcagtgacaagtggatg

SEQ ID NO: 13482 - DNA, 201 bp, Homo sapiens
agaaaaaactaagccaaaatttagcagaaggaaggaaaaaataataattagagcagaaataaatgaaatagaaaaacaataaaaagatcaataaaactaartgttgtttatttgaaaagataagtaaaattgacaagcctttacctagattaaccaagaaaaaaagagctgactcaaataaatagaattataaataaaaga

SEQ ID NO: 13483 - DNA, 201 bp, Homo sapiens
aggtttttcaggactagatcccatggccatacagccctgcctgccagattggacgtgaaaagtatttccgcatctgacattcctgtttcacccacacaggscatcgttttgcccaggacaaagttcacctccaatcttatccacactatttctatctttgcttccttgataagatatagacatttatgcagtggttcaaag

SEQ ID NO: 13484 - DNA, 201 bp, Homo sapiens
acactaacagaatgaaagacaaaaacaatatgatcatctcaatagatgcagaaaaagcatttgacaacattcaacaccctttcatgacaaaaccaactttyaataaattaggtatagaagcaatgtagctcaacacaataaaggccatacgtaacatgcccacagagcatatacccagtggttgtcttagtccactttatg

SEQ ID NO: 13485 - DNA, 201 bp, Homo sapiens
gctttatccttggaacataaggatggttcaacatatgcaaatcaataaatattacactaacagaatgaaagacaaaaacaatatgatcatctcaatagatkcagaaaaagcatttgacaacattcaacaccctttcatgacaaaaccaactttcaataaattaggtatagaagcaatgtagctcaacacaataaaggccat

SEQ ID NO: 13486 - DNA, 201 bp, Homo sapiens
gccagtacagactagaggaggaggagtgacagaaagacaaaatatactgtcaaacagattcacagcacattaaaagattcatttaccatgattaagtgagytttatccttggaacataaggatggttcaacatatgcaaatcaataaatattacactaacagaatgaaagacaaaaacaatatgatcatctcaatagatgc

SEQ ID NO: 13487 - DNA, 201 bp, Homo sapiens
aagcaggtacatccataaaaaagatctgagagacttccagagtatctagccaggctgactggtcaaggtctttgtctaccaaagtctgccagtacagactrgaggaggaggagtgacagaaagacaaaatatactgtcaaacagattcacagcacattaaaagattcatttaccatgattaagtgagctttatccttggaa

SEQ ID NO: 13488 - DNA, 201 bp, Homo sapiens
aagaaggaacgagaaaagtaaagcaggtacatccataaaaaagatctgagagacttccagagtatctagccaggctgactggtcaaggtctttgtctaccraagtctgccagtacagactagaggaggaggagtgacagaaagacaaaatatactgtcaaacagattcacagcacattaaaagattcatttaccatgatta

SEQ ID NO: 13489 - DNA, 201 bp, Homo sapiens
gcttgtgggatgctgcccaggaaacccatttctgtctcacttaatgcagaacactgaggggaccatgtggctgaatcatctgggggcagctaggagtaggraaagaggagggggcttatggcagccagtgcatggacctgaacaacaagcagcagaacctactggccagcccctgcactctactagaggcccacctcacaa

SEQ ID NO: 13490 - DNA, 201 bp, Homo sapiens
attttaacaactaccatgaacaaaagtatttttgtaggagtctaggaagccacttgagaggttccaactggttggtcaggcaaaaaagccaagaacagatrcatggaggaaggtaagaactgtttccttctacccgcctcactgctcttccgaggtaactcagtgccaagagagactccctcagcccacaatttttgccat

SEQ ID NO: 13491 - DNA, 201 bp, Homo sapiens
tagtttgtatttctgtgggatcggtggtgatatcccctttatcattttttattgcatctatttgattcttctctctttttttctttattagtcttgctagyggtctatcaattttgttgatcctttcaaaaaaccagctcctggattcattaattttttgaagggttttttgtgtctctatttccttcagttctgctctga

SEQ ID NO: 13492 - DNA, 201 bp, Homo sapiens
tttgcagagacatgggtgaagctggacaccatcattctcagcaaactaacacaagaacagaaaaccaaacagtgcatgttctcactcataagtgggagttraacaatgagaacacatggacacagggaggggaacatcacacaccagggcctgtcggagggtagggagctaggggagggaggggtagcattaggagaatta

SEQ ID NO: 13493 - DNA, 201 bp, Homo sapiens
aactacaaaacattgatgaaaagaactgaagggaacacaaacaaatgaaaagataccccatgttcctgatgtaagagaattaagattggtaaaatgaccayactacccaaagtgatctacagagtcaatgcaatccttatcaaaataccaatgacattctttaaagaaataaaaaccaaaatcctaaaattcatatggagc

SEQ ID NO: 13494 - DNA, 201 bp, Homo sapiens
ggtgggcagatcacgaggtcaaggggtcaagaccagcctgaccaacatggtgaagcaccatctctactaaaaatacaaaaaattggctgagcatggtggcrctaatcccagctactcgggaggctgaggcaggagaatctcttgaaccagggaggcagaggttgcagtgagctgagatcatgctgctgcacttcagcctgg

SEQ ID NO: 13495 - DNA, 201 bp, Homo sapiens
aatacccttgaatgtaaatagtttaaattccctaattaaaatatatagattggctgaatgaatgaatgaatgaataaatgaaaaaagatcccattatatgstgcccagaagaaactcacttcacttgtaaagacacacaaagactgaaattgagggatgatgaatggtattccacacaaaaggaaaaaaaaacaagcaaga

SEQ ID NO: 13496 - DNA, 201 bp, Homo sapiens
ctcggacatctggagggcttaggataggccccggggcctggaagtccccacaaattgtctgtgcctgttgcccgttggtttgctgtgtgtgtggtgggggraggtgttgatcatgagctctgagggtgtctgggccacagtgaggaacctgagaaaaatttgtgggtgatcctcgacctcccctggcctgatgctttgaga

SEQ ID NO: 13497 - DNA, 201 bp, Homo sapiens
ctttgctttgcactggagtggacaccaggagcagggagagggtaggaagcagaagcaggcacttctgagcctgcaggggcagagagggtttccagggcccygagagcacagtgatgcctgggtctggagctgcggctgggtgactgcagttgtgccccagagcacaggactcctgccccgtggacttggtagagagtgggg

SEQ ID NO: 13498 - DNA, 201 bp, Homo sapiens
cctcccacacatggttctcccgggtccctccctgatccacagtttgagcctctggacgaccctggctgcaggctggacaggaagcaccggcaggtggaggrgagcagctgctcgctctctccatccactgctcatgagttacccctcggacatctggagggcttaggataggccccggggcctggaagtccccacaaattg

SEQ ID NO: 13499 - DNA, 201 bp, Homo sapiens
gctcactggtgctcaaagtccagaaggagctgaggaggcagaagctgtcatgtcagcactgcctccagcacatgcatacctggctgggcacaacagtgccyggactcggctacaactttgctttgcactggagtggacaccaggagcagggagagggtaggaagcagaagcaggcacttctgagcctgcaggggcagagag

SEQ ID NO: 13500 - DNA, 201 bp, Homo sapiens
gcaacatgtggaatgggagaatattttcaaagtatatacctgataaagagttaatgtccaaaatatgtaagacactcatacaactcaataaccaaaaataytccaatttttacaatgggcaaagtacatgaataaacattttccccaaaagacatataaatattaatagccaagagatttatgaaaagtgactcactatca

SEQ ID NO: 13501 - DNA, 201 bp, Homo sapiens
ctctctggctgcccttaacattttttccttcatttcaactttggtgaatctgacaattatgtgtcttggagttgctcttctcgaggagtatctttgtggcrttctctgtatttcctgaatctgaacgttgtcctgccttgctagattggggaagttctcctggataatatactgcagagtgttttccaacttggttccatt

SEQ ID NO: 13502 - DNA, 201 bp, Homo sapiens
cctgcacttcctgcacatgtatcccagaacttaaaatataataataataataataaaggggtattgaaattccccagtatttttgttttgctatgttttcytcatgtccactaatatttgctttatatgtttacacaccttgatgttggttgcatatttataattgttacagtctgattaacttatttgcttattattact

SEQ ID NO: 13503 - DNA, 201 bp, Homo sapiens
cccggggcctggaagtccccacaaattgtctgtgcctgttgcccgttggtttgctgtgtgtgtggtgggggaaggtgttgatcatgagctctgagggtgtstgggccacagtgaggaacctgagaaaaatttgtgggtgatcctcgacctcccctggcctgatgctttgagactttatccagttctgtatcaaccactaaa

SEQ ID NO: 13504 - DNA, 201 bp, Homo sapiens
atacaaactatcacacaactataccttttaagaagtgacatgattaggatggtgaaatggagttttcagttctcaaactcccacagaaacactaattttawcaactaccatgaacaaaagtatttttgtaggagtctaggaagccacttgagaggttccaactggttggtcaggcaaaaaagccaagaacagatgcatgga

SEQ ID NO: 13505 - DNA, 201 bp, Homo sapiens
tcaatgagaaaaagaaaaacaatttaatattcatatatgtttgaaactttcaaaacatacttcaaaaataactaagtggtcattgaaaaagtcataatgakaattaaaagtgtcttaggactgaatgataatgaaactatacatacaaactatcacacaactataccttttaagaagtgacatgattaggatggtgaaatg

SEQ ID NO: 13506 - DNA, 201 bp, Homo sapiens
tcagtctcaataagacttttcacccccaaaaccaatttcctcctccttgggagtgacacttccccttgggggtgaggccacccccgcctcccctcccagcygccttctcccatctccatccccacctccacagcatcccagctgttgtccctctccttagcatgcaccttcctgatctcttgctccaccccagagagccac

SEQ ID NO: 13507 - DNA, 201 bp, Homo sapiens
tcttggagctaaggaattcaatgaatgaaataaaaacattgccatttgatggattactatagtgataaaatttgattcctttcaaatttatacaggagatraatcagaagaaagaatttctgaacttgaagacaggtattttgaaataacccagtctgatgaaaaaaagaaagagaaaaaagaatgaagaaagtatacagg

SEQ ID NO: 13508 - DNA, 201 bp, Homo sapiens
catcaggctcaagcacataaaatgctttacaaaaactttgaagaaaatggtattgcgatatggttttagtgttgtgtcttctccaaaattcatgttgaaaygaaatccccaatgcagcactattaagaggtgggctttttaggaggtgattaagtcctgaggactatgcccatatgaatgggttagtgccttataaaagga

SEQ ID NO: 13509 - DNA, 201 bp, Homo sapiens
caaagcattggaagcacacacagaccataaattaactctcatcaggctcaagcacataaaatgctttacaaaaactttgaagaaaatggtattgcgatatrgttttagtgttgtgtcttctccaaaattcatgttgaaacgaaatccccaatgcagcactattaagaggtgggctttttaggaggtgattaagtcctgagg

SEQ ID NO: 13510 - DNA, 201 bp, Homo sapiens
gaaatatcaactacgacagccccttgctacttcatttaggtcaaataataaggggatgaatgattttcagtacctatagagagagcttggataattttccrtgaacaccaccaagactcctattaaaaagttttaatgtggtgaacaaattcataaaggaggaagcaaaagtgactgacaataagataaaattatattcag

SEQ ID NO: 13511 - DNA, 201 bp, Homo sapiens
ctgtagaccggagctgttcctattcggccatcttggctcctccccctcactacaaagggttttgatgatttatcttttgtatgtcttcccacagggcagtkgcaggtgtttgggccagacaagcctgtccaggccttggtgggggaggacgcagcattctcctgtttcctgtctcctaagaccaatgcagaggccatggaa

SEQ ID NO: 13512 - DNA, 201 bp, Homo sapiens
ggtggtggtacaaggacgtaaggttggctcaaaccacatgtaatggcctcactaatcagagatcctgcatttaatgttgcagctcagagtgttagaaaggmctctatcgtttggttggctgaagcatggatcaaaatgtggcccacagagagtgacaggtgggcatgctgttaggagcctttgccaggcccctgtaagtga

SEQ ID NO: 13513 - DNA, 201 bp, Homo sapiens
tgtccattcaataaatgttggcacagtcgttatctgttgagaagaaaattaaatagaaccactacctcattttataacaaaagtacaatcaaagtattaarcctataggagaatttatagaaacctatttcttccattgtggggaacaaggtgactccttaaagaagaattgaattgtgtcttttgttcaccaataactaa

SEQ ID NO: 13514 - DNA, 201 bp, Homo sapiens
atcaaacacctcaatttatcaaatatcccagctgacaaaagaatataagttaggctccctgctaccttggcattatcgatcagcccaagctccattctatraaatccctgagacttttttttcttgcagttagcttccctcatgctaacttgcctattgccttccttgcaaagtactttcctactttctctaataaatctg

SEQ ID NO: 13515 - DNA, 201 bp, Homo sapiens
gcctgcatcccccagggttccaaggactggcgcactcagcacctgctgccatgacttcatatccttgattggcagagtgactacatgctgcacgcagcccyccaggagtctcaggaacagcccatttggtgtccaccactgatggtggccatatctcatttacttgcagagctgctgcatgctacgtgcatcgtctaggac

SEQ ID NO: 13516 - DNA, 201 bp, Homo sapiens
tcatcaaacacctcaatttatcaaatatcccagctgacaaaagaatataagttaggctccctgctaccttggcattatcgatcagcccaagctccattctrtaaaatccctgagacttttttttcttgcagttagcttccctcatgctaacttgcctattgccttccttgcaaagtactttcctactttctctaataaatc

SEQ ID NO: 13517 - DNA, 201 bp, Homo sapiens
gataagagcagaactgaaggaaatagagacacaaaaaacccttcaaaacatcaatgaatccaggaggtggttttttgaaaagattaacaaaatagatagamcgttagtgagactaataaagaagaaaagagagaggaatcaaatagacacaataaaaaatgataaaggggatatcaccactgatcccacagaaatacaaac

SEQ ID NO: 13518 - DNA, 201 bp, Homo sapiens
aaaaacagaaatttattgtttacagttgttgccgtgtgcagtcagtgagttgtgaataatctgtgtcctgattaaaaacctgtgagtggggctgctctgayggtagtggattatccgaacttagtagtgtcactacaattggcatacgactccccactgctaaatttgactaacttaaatttttttaaaaaccactatgag

SEQ ID NO: 13519 - DNA, 201 bp, Homo sapiens
tatgtcttcccacagggcagtggcaggtgtttgggccagacaagcctgtccaggccttggtgggggaggacgcagcattctcctgtttcctgtctcctaaraccaatgcagaggccatggaagtgcggttcttcaggggccagttctctagcgtggtccacctctacagggacgggaaggaccagccatttatgcagatgc

SEQ ID NO: 13520 - DNA, 201 bp, Homo sapiens
gcgtcttccccaggaccccacctacaaaaataggggtcttcctggactatgagtgtgggaccatctccttcttcaacataaatgaccagtcccttatttayaccctgacatgtcggtttgaaggcttattgaggccctacattgagtatccgtcctataatgagcaaaatggaactcccatagtcatctgcccagtcaccc

SEQ ID NO: 13521 - DNA, 201 bp, Homo sapiens
ggattacaggcatgagccaccgtgcctggccaggatgatagaccttatatacatttcttaaaagaaaacatacaaatgaacaacagatatataaaaatctrttcagtatcactagtcatcagggaaatgcaaatcaaaactacaatgagataaaacattactcaagttaaaattgctattatcaaaaagacaaaagataac

SEQ ID NO: 13522 - DNA, 201 bp, Homo sapiens
aaaattaacttctgaaaggaaaggagagagggctaggaaggccttgggcagccaagttcatacagagacgtgtgtgtgtgcatgtgtgtgtgtgtgtgtgygcgtgatgtaaggagaaaggaggaaagaagtgggggtaaaagtgaaattttctgagctattctgtggtttttttctctgacatgaccaaaataggaagaa

SEQ ID NO: 13523 - DNA, 201 bp, Homo sapiens
acctcattatcacccaaagtctgcagctgacattagcgttcactcttggtgttgtacattccatgggttttggcaaatggataatgacatggatctatcaycactgcatcacacagatgctttctttgccctaaaaatcctctgtgctctgctattattcatgcttccctcaccactaacctctggcaaccactggtcttt

SEQ ID NO: 13524 - DNA, 201 bp, Homo sapiens
gatccagagacggctcacccgaagctctgcgtttctgatctgaaaactgtaacccatagaaaagctccccaggaggtgcctcactctgagaagagatttamaaggaagagtgtggtggcttctcagagtttccaagcagggaaacattactgggaggtggacggaggacacaataaaaggtggcgcgtgggagtgtgccgg

SEQ ID NO: 13525 - DNA, 201 bp, Homo sapiens
atgtctcatcataaaaatgataagtaagggagatgatggatgtcttaattagcttgatttaatcattccacattgtaggcatgtatcaaagagtcacaccrtacccattaatatgtatgtgatttgtcaatttaaataatagtaataaaaggagggaagagatagtttttcagacaagatgcaaatattttaagacatcag

SEQ ID NO: 13526 - DNA, 201 bp, Homo sapiens
ccgcaaactggagactttatggcccatactcttctctgggccattagaaagacgtcaactttggttttcagcaaggacgatggaaatggggatgtttgggktttttttttaattgaagcaaatgggcagatgggagagaatgtggcaatagaacctcctggaatcaaagggtctacattcagaaagagactttttcctctg

SEQ ID NO: 13527 - DNA, 201 bp, Homo sapiens
ctgatctcatagaagtagaaagtggaatagtggttactagaggctggtaagggtagagggattgcaggggatgaggagaggttgatcaggtacaaaattayatttaaatagcagcaataagttccagtcttctattgcacagtagggtaactataattaccaataacatattacatatctcaaaatagctagaaaagagga

SEQ ID NO: 13528 - DNA, 201 bp, Homo sapiens
gccagaaaccatacaggcccaaagagggtgtcacagtcctggcatgggaagcccctaggtctgggctcctggaagggctgcagctcttctctccttctcaytgtctgcaacattgcaaacagggcggtgtgtatcagccctgtttgtgttacagctttttcagtcccacctttcagtggttcccaagttcttgtcccatat

SEQ ID NO: 13529 - DNA, 201 bp, Homo sapiens
gaggtgaggacatacatgtaccaagaattttttttaaaaaaaatgaaggcaagacatgttgacaaagcactaggcgaaccacctttcagtgctaaaataargtggaaaaaattactacacaagcgtaaaaggcacatgctatggaaaatataagtcacacgtgaacgtgctaaagaacaaatttacagaaaacagactgca

SEQ ID NO: 13530 - DNA, 201 bp, Homo sapiens
accatacccagctaattttgttgtatttttaggagagacaggttttcaccatgttggccaggatggtctcgatctcttgaccttgtgatctgcttgccttktcctccgaaagtgctggggttacaggcgtgagccaccgccccggcacttctttctaacatagtactggatgtcctaaccagcacagttaggcaaaagaaa

SEQ ID NO: 13531 - DNA, 201 bp, Homo sapiens
ataagcaaagtgaaggataaaaatcatatgataatctcaattgatacagagaaaatatttgataaattcagcaccctttcatgattaaaaatctctgaacwtattaggtatacagggaatgtacttcaatacaataaaagccatatatgacaacccatagctaacattgccatggcatcctttgggtgttgcttttcctct

SEQ ID NO: 13532 - DNA, 201 bp, Homo sapiens
ccgtcttctgggttcaagtgattctcctgcctcagcctcccgagtagctgggactacaggcacacaccaccatacccagctaattttgttgtatttttagkagagacaggttttcaccatgttggccaggatggtctcgatctcttgaccttgtgatctgcttgccttgtcctccgaaagtgctggggttacaggcgtgag

SEQ ID NO: 13533 - DNA, 201 bp, Homo sapiens
ggtggagcaggcagctctaggcaccagcacaggtgccagctccatgtaaacctctgtgtggctagatcagatgcactgcaagtagcttccactgtaggcasctgtgtctggacgaggggaatgtggtggtgcctggaagcttggaaatgccagaaaccatacaggcccaaagagggtgtcacagtcctggcatgggaagcc

SEQ ID NO: 13534 - DNA, 201 bp, Homo sapiens
atatattagagaaaagagtctcttcaaaaaatagtgctgcatttgctagtatcaatatgcagaagaatgaactaacccctatctctcaccatatataaaawtaaactcttgatgaattaaaggctaaaatgtaaaacctgaaactataaagctactagaagaaaacataggaaaaatgcttcaggacattggactgggcaa

SEQ ID NO: 13535 - DNA, 201 bp, Homo sapiens
agtataattatttttttcagatggagtcttgctctgtcgcccaggctggagtgcagtggcacaatcttggctcactgcaagctccccctcccgggttgacrccattctcctgcctcagtctcccaagtagctgggactacaggtgcccgccaccatgcctggctaatttttttttgtatttttagtagagacagggtttca

SEQ ID NO: 13536 - DNA, 201 bp, Homo sapiens
ttttattgaggatttttgcatcaatgttcatcaaggatattggtctaaaattctctttttttgttgtgtctctgcctggctttggtatcagaatgatgctrgcctcataaaatgagttagggaggattccctctttttctattgaatggaatggtttcagaaggaatggtaccagttcctccttgtacctctggtagaatt

SEQ ID NO: 13537 - DNA, 201 bp, Homo sapiens
ctgggtaaacaatgaaattaaagcagaaataaataagctctttgaaaccaatgagaacaaagacacaatgtaccagaacctctgggacacagctaaagcastgtttagagagaaatttatagcactacatgcccacaggagaaagcaggaaagatctaaaatcgacaccctaacatcacaaataaaagaactacagaagca

SEQ ID NO: 13538 - DNA, 201 bp, Homo sapiens
tctacaaccatctgatttttgacaaacttgacaaaaataagcaatgggggaaggattccctatttaataaatggtgttgggaaaactggctagccatacgyggaaaactgaaactggactccttccttacaccttatacaaaattaactcaagatggattatagacttaaacataaaacctaaaactgtaaaaaccctaga

SEQ ID NO: 13539 - DNA, 201 bp, Homo sapiens
attcaggacttgaactcagctctggaacaagtggaccctataggcagctacagaactctccaccccaaatcaacataatatatattcttctcaggaccacrtcacacttattctacagttgatcacataattcgaaacagaacactcctcagcaaatgcaaaagaatgtaaatcataacaaacagcctctcggaccacagt

SEQ ID NO: 13540 - DNA, 201 bp, Homo sapiens
gaaagtgtagagtttttgtatgtgattaaagttatcagaataaaatagcctgttaaaaggatattttgtgtatgcctcatggtaaccacaacacaaaaaaaccacagcaggcggtggctggcaagatggccaaataggaacagctgcggtctgcagcccccagcaagatcaatgcagaagggaggtgatttctgcatttcc

SEQ ID NO: 13541 - DNA, 201 bp, Homo sapiens
cacctgactcagaattgctgtggctttgggatgtgatctttgctttcaaccgttccctgttttctccccagcactgggctcagttcctctcatttccatcrcgggatatgttgatagagacatccagctactctgtcagtcctcgggctggttcccccggcccacagcgaagtggaaaggtccacaaggacaggatttgtc

SEQ ID NO: 13542 - DNA, 201 bp, Homo sapiens
gagaacagcagctctcccagcacagtgcttgagctctgctaagggacagactgcctcttcaagtgggtccctgacccctgtgccttttgactgaaagacamctcccagcaggggtcgacagacgcctcatacaggagagctccggctggcatatggtggatgcccccctgggacgaaccttacagaggaaggagcaggcag

SEQ ID NO: 13543 - DNA, 201 bp, Homo sapiens
gggagagggtaggaagcagaagcaggcacttctgagcctgcaggggcagagagggtttccagggccccgagagcacagtgatgcctgggtctggagctgcrgctgggtgactgcagttgtgccccagagcacaggactcctgccccgtggacttggtagagagtggggctccccccattcccagccccctcccagccccac

SEQ ID NO: 13544 - DNA, 201 bp, Homo sapiens
tatgtgtcgaggaatttatccatttcttctagattttctagtttatttgcatagaggtgtttgtagtattccctgatggtagtttgtatttctgtgggatyggtggtgatatcccctttatcattttttattgcatctatttgattcttctctctttttttctttattagtcttgctagcggtctatcaattttgttgatc

SEQ ID NO: 13545 - DNA, 201 bp, Homo sapiens
cctcataaaatgagttagggaggattccctctttttctattgaatggaatggtttcagaaggaatggtaccagttcctccttgtacctctggtagaattcrgctgtgaatccatctggtcctggactctttttggttggtaagctattgattattgccacaatttcagctcctgttattggtcgattcagagattcaactt

SEQ ID NO: 13546 - DNA, 201 bp, Homo sapiens
cacttgagaggttccaactggttggtcaggcaaaaaagccaagaacagatgcatggaggaaggtaagaactgtttccttctacccgcctcactgctcttcygaggtaactcagtgccaagagagactccctcagcccacaatttttgccatggggaaagtgagagcaaagtgaatgtccagattccccaggcttgtgggat

SEQ ID NO: 13547 - DNA, 201 bp, Homo sapiens
atacaaatataaatgtcatataacatataagcaaagtgaaggataaaaatcatatgataatctcaattgatacagagaaaatatttgataaattcagcacmctttcatgattaaaaatctctgaacatattaggtatacagggaatgtacttcaatacaataaaagccatatatgacaacccatagctaacattgccatgg

SEQ ID NO: 13548 - DNA, 201 bp, Homo sapiens
atgcttcctctctcccccaccgcaccccagtggaggtgactctggatccagagacggctcacccgaagctctgcgtttctgatctgaaaactgtaacccakagaaaagctccccaggaggtgcctcactctgagaagagatttacaaggaagagtgtggtggcttctcagagtttccaagcagggaaacattactgggagg

SEQ ID NO: 13549 - DNA, 201 bp, Homo sapiens
tgaccaactacagattccaaacaacagtaccatctagcaagaaagacaacctctaaccctggacaatcaggcaactgcagagcccaatcagcagcaccacstgtcacaggagcacagccagcagttccatttaatgtcagagcacaggtagtggcccagcccaactagagaacccaacacccacatctgcctgtctgaggt

SEQ ID NO: 13550 - DNA, 201 bp, Homo sapiens
gcaaagttgtaggatacaaaatcaacatataaaattagtagtgtttctatacactaacaataaattgtctgaaaagaaatcaaggaaacaacttcatttamaatagcatcaaaaaattagaagtaaatttagccaatgaggtcaaagatctgtacactgaaaactataagacactggtgaaagaaatggactataacacaa

SEQ ID NO: 13551 - DNA, 201 bp, Homo sapiens
agttgttcctgaactccaaagggaagaggacataatgaggcatgtccaacctcaccttcccatcatggcctggactagtccttcaggtttacttgggaatyccctttcttgagaagagggggtccattcagttgactgggaagcttagaattttatttttggtttacatattataagctcatagctaacattatcctcaac

SEQ ID NO: 13552 - DNA, 201 bp, Homo sapiens
tcatgcttcctctctcccccaccgcaccccagtggaggtgactctggatccagagacggctcacccgaagctctgcgtttctgatctgaaaactgtaaccsatagaaaagctccccaggaggtgcctcactctgagaagagatttacaaggaagagtgtggtggcttctcagagtttccaagcagggaaacattactggga

SEQ ID NO: 13553 - DNA, 201 bp, Homo sapiens
gttcagtatcactagtcatcagggaaatgcaaatcaaaactacaatgagataaaacattactcaagttaaaattgctattatcaaaaagacaaaagataamaattgttgatgtggagaagaggaacacttacacaccattggtgggattttcaattagtgtgttcattatggaaaacactatggagatttctcaaaacatt

SEQ ID NO: 13554 - DNA, 201 bp, Homo sapiens
gctaaatgaagctaagaaaacagaaataagggcaatcaaaacatagagcatgtttccttaaaacaaaaacccatatgtgttactaacaggagacgctctcrtttcagtttgttttcatttattttctgacgagcttctttgtttcccttctgtttccgggtgaggcagcaggacatcctggaaatgatcttggagacagaa

SEQ ID NO: 13555 - DNA, 201 bp, Homo sapiens
actccaaaagagctagttggtttttctaatctatacagaccagaaatccagagaatccatgtcaaatgatattaagggtgtaaggtggtggtacaaggacrtaaggttggctcaaaccacatgtaatggcctcactaatcagagatcctgcatttaatgttgcagctcagagtgttagaaaggcctctatcgtttggttgg

SEQ ID NO: 13556 - DNA, 201 bp, Homo sapiens
caccttgagaggctgagacaggaggattgcttgagtccaggagctcgagaccagcctgggcatatggtaagacctcatctctattaaaaaaaaaaaaaaaagaagatgaaagaaggaaaaaacagaaatttattgtttacagttgttgccgtgtgcagtcagtgagttgtgaataatctgtgtcctgattaaaaacctgtg

SEQ ID NO: 13557 - DNA, 201 bp, Homo sapiens
ctaaaatcgcaaaccttctgagctgccttgtgccagggctaagtaggttccaagggtggcaggaagccctcagcagagaggcagaggccaggctccagggrcggagctgtcagcaggcagggaaatgcccatcccactgcagggggactcagggttgggtggtgaggagcagggcctcaacatctgctacaccaggtcaga

SEQ ID NO: 13558 - DNA, 201 bp, Homo sapiens
  misc_feature (1)...(201): n = A,T,C or G, or insertion/deletion polymorphism (see Tables 1-2)
tttcaaacatgtgtgtcgacctagtgaataagatgagattggctggttgctcctattcttgctagaaaaagtgaggaaagtgatgaaaggaaatatgagcngaggaatttgaattctgagtttcttggtgttgcataaataacctgaaagcttccatgagtgccctgaaagagacccttattttctgtagccacagggcta

SEQ ID NO: 13559 - DNA, 201 bp, Homo sapiens
tagaagaaaatatatgggcaaagctccatgacattgatcttggcaataatttttttgaatatgacataaaaagcacagacaaaaaagcaaaaatagacaaatgggattacatcaaactaaaaagcttctgtacagcaaagaaaacagttaacaaggtgaaggactacccacagagtgagagaaaatatttgcaaaccaaac

SEQ ID NO: 13560 - DNA, 201 bp, Homo sapiens
aatcagagatcctgcatttaatgttgcagctcagagtgttagaaaggcctctatcgtttggttggctgaagcatggatcaaaatgtggcccacagagagtracaggtgggcatgctgttaggagcctttgccaggcccctgtaagtgaatcatggcacaggccctcaggattgagaagcagagccctgccattctctacga

SEQ ID NO: 13561 - DNA, 201 bp, Homo sapiens
ctaccagaaggccatctgggagctacaggtgtcaggtcagtttcatatttcataacttagttgtcccaaagaaccatcctggactttataagtgttttttkcaataaggaaattttaaaattttaggtcatttagttagaaggcagcattctatactctacgttccttctgtcttgtgtgtatagttctatgtgttttgtc

SEQ ID NO: 13562 - DNA, 201 bp, Homo sapiens
aaatgatattgaaacaagtggatatccacatgcacatgtgtgaaattgaacccttatctcacaccatgtacaaaaacgaactcagattaaaaagttaaacrtaagacctgcaactataaaactgctagaagaaaatatatgggcaaagctccatgacattgatcttggcaataatttttttgaatatgacataaaaagcac

SEQ ID NO: 13563 - DNA, 201 bp, Homo sapiens
tgctaaaatcgcaaaccttctgagctgccttgtgccagggctaagtaggttccaagggtggcaggaagccctcagcagagaggcagaggccaggctccagrgacggagctgtcagcaggcagggaaatgcccatcccactgcagggggactcagggttgggtggtgaggagcagggcctcaacatctgctacaccaggtca

SEQ ID NO: 13564 - DNA, 201 bp, Homo sapiens
gatggaaagtttggaagtacgcccatgtgtttatgaacaattgatttttgaaaaaggtgccaagaacacaggatgaagaaaggacagtctcttcaataaaygatattgaaacaagtggatatccacatgcacatgtgtgaaattgaacccttatctcacaccatgtacaaaaacgaactcagattaaaaagttaaacataa

SEQ ID NO: 13565 - DNA, 201 bp, Homo sapiens
catatccaggatataaggaactcaaacaactcaagagtgaaaaaacccaaataatccaatcacaaaagggaagatagacttttttttttttttttttttttgaggcagagtctcgctctgtcgcccagactgcagtgcaatggcgcaatcttggctcactacaacctcagcttcctgggttcaagtgattctcctgcctca

SEQ ID NO: 13566 - DNA, 201 bp, Homo sapiens
gacatatctagacattgatgagtcctccaggctgcactggtgatgagaggacctgaaaggcagtgtctgcgggaggctcaggtccggggcctcacctatgmcacccagagccagtctgcagtgggagggtcgacctcttgctccagcccagatttcgtcttcagtaactcatgcttcctctctcccccaccgcaccccagt

SEQ ID NO: 13567 - DNA, 201 bp, Homo sapiens
accacagaaataaatataaaatgtcatgagactatcgtagttctcccttatccacaggggttacattccaagatccccagtgaatgccacaaaccacgtayagtaccaaaccctatatatgctatttttcatgtctcaaatggaacagagcaggatgatagagatttcatcatgctactcagaatggtgtgcaatttaaaa

SEQ ID NO: 13568 - DNA, 201 bp, Homo sapiens
ttctgttgatttgcggtggagagttctgtagatgtctattaggtccgcttggtgcagagctgagttcaattcctgggtatcctttttgactttctgtctcrttgatctatctaatgttgacagtggggtgttaaagtctcccattattaatgtgtgggagtctaagtctctttgtaggtcactcaggacttgctttacgaa

SEQ ID NO: 13569 - DNA, 201 bp, Homo sapiens
ttttttgctaaatgaagctaagaaaacagaaataagggcaatcaaaacatagagcatgtttccttaaaacaaaaacccatatgtgttactaacaggagacrctctcgtttcagtttgttttcatttattttctgacgagcttctttgtttcccttctgtttccgggtgaggcagcaggacatcctggaaatgatcttggag

SEQ ID NO: 13570 - DNA, 201 bp, Homo sapiens
tatagtagcccccaaataatggaaacacgggtgttgaagacgcaccgtgatcgttgacggggacacacctaacgtgttaaggtgaataaattcagtgtttstcccagatgggctgagtggtgtaggcagggttattggagcaccaaggttgctgacatggatgtccatctgggaagagacacagttaggatttttggggaa

SEQ ID NO: 13571 - DNA, 201 bp, Homo sapiens
caactgcttcaccaggccaggcttggcttccttgctgggttggactgtttggtccttgggggccagagcagcctgtaggttcagaagcctgggtcatgacygttccactgggcctaggcctaggcttcgaatggccatgggtggggcatagctgccactggaatggagaggatactgtgccttctcagcagcttcataaaa

SEQ ID NO: 13572 - DNA, 201 bp, Homo sapiens
tgggagtggtggtagcaaagtagattacactgagctcaggcaccaagagagcacaactactccaccagctcaggtacagcttccctcgggtgggatgcagrgctggtttgtgtgctgagggaataagaccagtgttctggcttgggcatagcttttctggaggtggggcaccaggccgctttatgtgccaagggagcacag

SEQ ID NO: 13573 - DNA, 201 bp, Homo sapiens
ggggaaaatattagcaaagcgtattgtctgataaaggacttttatctagaacacataaagatcacttagagtctcaagaataagaagacccccctagaagwtttaaactggacaaaatatttgaacagatgttccaccagagaagatgaatggcaaaaaaaacaagcaaatggaaagacaaaatcatgagatgccattaga

SEQ ID NO: 13574 - DNA, 201 bp, Homo sapiens
acaagttttgagttaaaaaaaatcctcatttcttactgaagaatttaaaactggttatgtatttacatatatattttaaaattacctacactatgaaaagktacctttagtatttatgcattgttttatgaacataaaacaagcgaaactgagtatgttgaatgaaaatttagaattgaaacatcccattcctgatgaata

SEQ ID NO: 13575 - DNA, 201 bp, Homo sapiens
tttctggagttttattcccaacagttctaagtcgtaagttaaagtgccagtttttggcctgagtatttgttgaaaaatgttatgcaaagggagatttattkgggggataaagtgaaaggaatgtttagagagaagatttttttttttttttttttttttttggagatggagtctcgctctgttgcctaggctggagtgcag

SEQ ID NO: 13576 - DNA, 201 bp, Homo sapiens
tttagaaaatactgtaagaatgttagatattttgtaggaatgtgagattaaattctctaacacaagttttgagttaaaaaaaatcctcatttcttactgargaatttaaaactggttatgtatttacatatatattttaaaattacctacactatgaaaaggtacctttagtatttatgcattgttttatgaacataaaac

SEQ ID NO: 13577 - DNA, 201 bp, Homo sapiens
cagcaaagcaactgtttaaagtacaggtctttttcaaaatggagtctcttatgtcttccctttctacatagacacagtgacagtctgatctctctttcttttccctacagagatggtcacataacattgtgaatgtaattaatgccactgaaacaaagtggctttaattgcaaaaaagaaaatgaaaaggcaagacatagt

SEQ ID NO: 13578 - DNA, 201 bp, Homo sapiens
tcagcaaagcaactgtttaaagtacaggtctttttcaaaatggagtctcttatgtcttccctttctacatagacacagtgacagtctgatctctctttcttttccctacagagatggtcacataacattgtgaatgtaattaatgccactgaaacaaagtggctttaattgcaaaaaagaaaatgaaaaggcaagacatag

SEQ ID NO: 13579 - DNA, 201 bp, Homo sapiens
tctgtggcttggtaacaagaaaacttaatgtgttcacatttatctcttcatagcaagtgtctatgacatagtttggtggggaagaaatgaaaacccaagcwcagaaataagggcttggtgaggttcaaaaactccaaaattttcattctaactaaatgagttgggtatatatttccattgtcaatgagaggggaagggata

SEQ ID NO: 13580 - DNA, 201 bp, Homo sapiens
aaagtaagacaaattgtcacataaaaagaggcatatgattagagatgatggtgactataatgaaaattcatcagtctcagggccaaaagagaaaataagayaatatgaagatactggattcctaacatttaatatttacaagaaatttttcacataatacttttcaatgttcctcttaactagtgtcagtgaagtaattat

SEQ ID NO: 13581 - DNA, 201 bp, Homo sapiens
cgttttcaaaaatcagttgagcatatttgtttgagactgttctgtcccattgattaataagtctatccctttgccaataccatatggaatttattaggtakgcagtaagtgttagagttggcattcttgtttttcaaaattgcattagctgtcctagttcccttgctgtccatatacatttttattacaagataaacatgc

SEQ ID NO: 13582 - DNA, 201 bp, Homo sapiens
tctgtgggatccacaactactgtctgagctcctctaatatactgagctcctctaataacatgtgaaacagttaaactattaaacacaaaaactgaaatacytactgatttttttttcactgaagcagtagcctaccaatataagcaggctttgaaatggtgtgataatttttggattctgaataagatctaatataaatat

SEQ ID NO: 13583 - DNA, 201 bp, Homo sapiens
ccgggctttatctattattgtgcttttttttttcttaaatcttgtccccatccggtgagggctggaagccaggttgaggaggtgtcctgtcctggggctcrttaaccacagattgtcctgcaggccaggcagctgctcattggatatggaacacattttgggtgatggcagagccctcaggaatgggattaatgcccttat

SEQ ID NO: 13584 - DNA, 201 bp, Homo sapiens
tgctaactctaaaggtaaccagatacaaataagagtttacaacccagctcataatccacatccattaatcaggaccgtgccctatttggtgtttttctctrtatatcttttaacccctttaatttctgctttgaacaactttctgaacttacatctgtgtggtgcattcttcctttgccagtaagcagtaaattcagtttt

SEQ ID NO: 13585 - DNA, 201 bp, Homo sapiens
taatgtttattttaggtttgggggtacaggtgaagttttgtgacataggtaaacaggtaacatgtgggtttgtttcatcacccaggtattaatcttagtasccgatagttattttttctgcccctctccctcctcccaccctcccccctcaagtagacccctagaaattgaaagccttctaatcgactccaaagttaaaaa

SEQ ID NO: 13586 - DNA, 201 bp, Homo sapiens
tagaactttcatgtccctgataggtcccaagtaactagtttaattgaaagatgtaatgatgtcctcaactccttgaaattccagtaccacagataaactcytgaagttttctagtttgtcccgggctttatctattattgtgcttttttttttcttaaatcttgtccccatccggtgagggctggaagccaggttgaggag

SEQ ID NO: 13587 - DNA, 201 bp, Homo sapiens
ttaagcaagttagatgaacttgtgtcgtgatcctcgatgatgaatgtgtgctctgaactgatagacttaactatgagaagatgagatctcacaggcgagaytgtatccacacatacattttaccactgtgacctctgcccaaactgaagggtttgagaattctgtgctctttgcaagcaaagtatgcctgtaattgtgggg

SEQ ID NO: 13588 - DNA, 201 bp, Homo sapiens
tgggaatccccttggggttaatggagtgaacagtaatgggagtcgtagaccatgcaaacgtcactgctaatcatccctggtgaagcttacggaaagctgtygctttccatcccttagccaggatatccctaaaaaaggacaggaccccaaaaccaccgctggccaaaacttaaggcagtcagcacgggatgtcctggtcaa

SEQ ID NO: 13589 - DNA, 201 bp, Homo sapiens
ctcaactaggcctcatccttggcctgccttaagcaaaaatcctactaagtcagtttagcgagaatctctcatgcttgatatctaaccaagtttctcacccytcgccgttaatgtctaagtccttaatctgcctctaagaagaatcttgttaggccggttaagcaagaatccctctacacttgatatctcctcttaacaatt

SEQ ID NO: 13590 - DNA, 201 bp, Homo sapiens
gaaatttgttaactgtcttctaatttgaaatttgttaagcatgagcatatgcttaagtgctgatatctttcatttgaaatttgtaaaattataactgggaygaggaggtctttagaaaatactgtaagaatgttagatattttgtaggaatgtgagattaaattctctaacacaagttttgagttaaaaaaaatcctcatt

SEQ ID NO: 13591 - DNA, 201 bp, Homo sapiens
agagaattgaatgggaaactaaaaccatttaagccttttctataaaaaaccatcagctttatgaatcaccaaattaaagaataaatatactaagataaaastttccccattatattacagagaaaaccatgttctgagctatggacttttatacctggatgtctaatctgaggccatcaaaagaactcactcatagatcag

SEQ ID NO: 13592 - DNA, 201 bp, Homo sapiens
atgcagttaacatctgcacacttcactatattttaagtttttgttaatataaaagaataagaaaacagaaaagtattactgttaaacaataatagagaaaygtatactttatttacaaatttctccctctagctgatcatacagttgaccagttcagggtgcccgctgctggttggatgccaggcggaatgtcagggtgtt

SEQ ID NO: 13593 - DNA, 201 bp, Homo sapiens
ttaataaagtcttccttaccatgtttatcaagtgtcaaaaatttttctttagcattatgagactggctcttatggactttgtccttgtgatggagtatatrctagaggttaaactcattgtctgtagagtccaatcatctagttacccaccctttatctgttgcttatgagctttatgtccttaagcaagttagatgaact

SEQ ID NO: 13594 - DNA, 201 bp, Homo sapiens
ttactctccaattgatcttctaactggtggttataataatgctttttccaagacctttaagcttaattttccttccccgaggagacaaatacagtatgttytacccactttggaaatagaaaacctaacctggcagtacaatggttaaattataaaatccaacatatagcctcaaaacagaagctgttcttctgtccacat

SEQ ID NO: 13595 - DNA, 201 bp, Homo sapiens
tcaaaaatcaatgatctttcaatcctaaaatattctttttagctgaacattgacaatgactccctccgtgttcaaactttagctaggcttctctacgcccycttctcaactaggcctcatccttggcctgccttaagcaaaaatcctactaagtcagtttagcgagaatctctcatgcttgatatctaaccaagtttctca

SEQ ID NO: 13596 - DNA, 201 bp, Homo sapiens
attcttgtttttcaaaattgcattagctgtcctagttcccttgctgtccatatacatttttattacaagataaacatgcacttcttattatttcaaagtayagtagtaagaaaacctcagagtagcttcatcacaaatactgagctacagttactgggaaatccaaacagtcctgcatcagaacctgttttcctgattaac

SEQ ID NO: 13597 - DNA, 201 bp, Homo sapiens
cagtcaatattatgttgttaaaacatttgaggattattcttaattaagcagagtattgatataatattaggaatatattctataatggaataagatataaygtatccctattctgtctttgagtctgagtagaactttccttaatgatcccactcagcaacaccactttcaaatatactatttaatcttcacagccataga

SEQ ID NO: 13598 - DNA, 201 bp, Homo sapiens
gattttactaataacacccaaggcatgtgttttacttcttagaatacaccacccttggctcttgaaaaagacattgaatagaactttcatgtccctgatargtcccaagtaactagtttaattgaaagatgtaatgatgtcctcaactccttgaaattccagtaccacagataaactcctgaagttttctagtttgtcccg

SEQ ID NO: 13599 - DNA, 201 bp, Homo sapiens
taggctctctgaaaattttctctcttctttccagacctatttgaaaccttgtttctccatactagtgatgctaactctaaaggtaaccagatacaaataaragtttacaacccagctcataatccacatccattaatcaggaccgtgccctatttggtgtttttctctatatatcttttaacccctttaatttctgctttg

SEQ ID NO: 13600 - DNA, 201 bp, Homo sapiens
aatttctctcatatagacggctgcttagatgtcttaattttccaaagagtctcaccccagctgctttttgggcctcacatgttctattatatccttctgcycataatttctgtgcctagacatacatatatctgctttccccctgcagtttccatgtggcatggtgcctaccactgccttccactgtttctacagcttaag

SEQ ID NO: 13601 - DNA, 201 bp, Homo sapiens
tgcagccttccagacagcctaggaggtctccctggctctgttattgcacatgacctttgcggacaagatcttagcaacatcccccttctccaggagcgggrggaggatgtcctcctccaggagattcatgtaatactttaaagtactttagtacttttgagtactggtggaaatgtattcctcatttacaaattttacttt

SEQ ID NO: 13602 - DNA, 201 bp, Homo sapiens
gtcctcctccaggagattcatgtaatactttaaagtactttagtacttttgagtactggtggaaatgtattcctcatttacaaattttactttaaagtcaytagacactcctgtgaatggcgtcaaaaaactcccctggagaagctttggcagccttttgcaatgcctcctggaggctttggaccatttaggatggccatt

SEQ ID NO: 13603 - DNA, 201 bp, Homo sapiens
ttgtggtattcatttgaaaactgggcatgtgagaaaacaaacacctctctcagtctttgcagatcggtgtaaaagatcttcactaatcagcaggcccttgrgttttaggatcagcttgtcttcatgggtattttctgggaatgtgtccttccagggccttagtgtgccttttcctccccaatttctctcatatagacggct

SEQ ID NO: 13604 - DNA, 201 bp, Homo sapiens
cagtgcagccttccagacagcctaggaggtctccctggctctgttattgcacatgacctttgcggacaagatcttagcaacatcccccttctccaggagcrgggggaggatgtcctcctccaggagattcatgtaatactttaaagtactttagtacttttgagtactggtggaaatgtattcctcatttacaaattttac

SEQ ID NO: 13605 - DNA, 201 bp, Homo sapiens
taatgccagtgtagcaaacataatgctagcctcagatcacctattgacttatgaacaaacctctggatacaggagaaagtaaaagataaataatatgtttrtagataatattttgatgtaaatatataattaaatattaggtattttccataatcaaatccagttagaaattaaaacttcatatatttatatactgaagaa

SEQ ID NO: 13606 - DNA, 201 bp, Homo sapiens
tttataaaataaataaagaggtgattatcctcactgctgctttcaacagcccaatttttctgtgtttccaaatctgaaaaaaaaaaaatttataaatacayacacacacacacacacacacacacacacacacacacacacacacacacatatagaaagggcacctcatgatgatggattactacaaccttaatgctgtgg

SEQ ID NO: 13607 - DNA, 201 bp, Homo sapiens
ctcactttaactgtagccttgcccaagtttctcatagtcatgtatctgttgctgtaaaatatactatattgggcctagatggaagctctgacacaataaayaattaaagtaagtctttggcacttaaaaacttggtaaaatgcaaccccgtgaacctccagttaagataatttatgtgatccaatataagttgaaacaaga

SEQ ID NO: 13608 - DNA, 201 bp, Homo sapiens
tagctacaagtcaaaagtgggaaaaaaagaggaacttcaaggactaagctaatgccagtgtagcaaacataatgctagcctcagatcacctattgacttaygaacaaacctctggatacaggagaaagtaaaagataaataatatgtttatagataatattttgatgtaaatatataattaaatattaggtattttccata

SEQ ID NO: 13609 - DNA, 201 bp, Homo sapiens
acaatctgaaaggacaaagccacagggcactacttggtccagcaggggcttgtcaggtaaaacgtccaaagagaggaaagggaacaaaagtttttttcttyagttacctagaattacaatttattctaaagattttacttaaaaggaaaaaaagggactgattatcttggggcggagcagccatactagagagtgcccgct

SEQ ID NO: 13610 - DNA, 201 bp, Homo sapiens
acaaaatcatgagatgccattagacacccactagaatggctgtaatttaaatggtttccaaggatgtggaacaactggcactgtgatttagtgttagtgasaatgtgaactagtgcaaccactttggaaaacaagttggcagttcttaaaaagttaaaacatacgacttaacatttgagtcagccattctacttttgagca

SEQ ID NO: 13611 - DNA, 201 bp, Homo sapiens
gcaagacatagtggggaaaatattagcaaagcgtattgtctgataaaggacttttatctagaacacataaagatcacttagagtctcaagaataagaagamccccctagaagatttaaactggacaaaatatttgaacagatgttccaccagagaagatgaatggcaaaaaaaacaagcaaatggaaagacaaaatcatga

SEQ ID NO: 13612 - DNA, 201 bp, Homo sapiens; identical to SEQ ID NO: 913

SEQ ID NO: 13613 - DNA, 201 bp, Homo sapiens
agttaaaagttatgagttccctgaattttagtgatcaacaccacttattccttggcccaatggctcaataattttgttgaaaattcatatcctatatcctwtaagttataattaatgcccacaacctattaaaatttaattttatttgccaccccagtgctcattgacatagataagaacacaacacactgagaaccattt

SEQ ID NO: 13614 - DNA, 201 bp, Homo sapiens
acagattttctgtgttaatggacatgagccatacattgagagggctgctggctactgaaagaaatataaaattttaaaatttctgaaatcatgcagttaayatctgcacacttcactatattttaagtttttgttaatataaaagaataagaaaacagaaaagtattactgttaaacaataatagagaaatgtatacttta

SEQ ID NO: 13615 - DNA, 201 bp, Homo sapiens
acctaaatctggtaaatcgctttgtagcctcactaggtttaataaatgttatataaataaatactttgttctgatctcttccacacatttctagttttaayatgaaaaaaggtaaagcaagatactctcttttttaaattaaattcctttaactggaagtgtaagaaatgtatggaggtgacttttctctattagaggatc

SEQ ID NO: 13616 - DNA, 201 bp, Homo sapiens
agttttgttttaaaactgctgtttggccaccctttttatgttgcttcttacatgcctcatatcttcatggcacttttacaattactctccaattgatcttytaactggtggttataataatgctttttccaagacctttaagcttaattttccttccccgaggagacaaatacagtatgttctacccactttggaaataga

SEQ ID NO: 13617 - DNA, 201 bp, Homo sapiens
ctactgaaagaaatataaaattttaaaatttctgaaatcatgcagttaacatctgcacacttcactatattttaagtttttgttaatataaaagaataagwaaacagaaaagtattactgttaaacaataatagagaaatgtatactttatttacaaatttctccctctagctgatcatacagttgaccagttcagggtgc

SEQ ID NO: 13618 - DNA, 201 bp, Homo sapiens
gcacacttcactatattttaagtttttgttaatataaaagaataagaaaacagaaaagtattactgttaaacaataatagagaaatgtatactttatttayaaatttctccctctagctgatcatacagttgaccagttcagggtgcccgctgctggttggatgccaggcggaatgtcagggtgttctctggtgtctgttg

SEQ ID NO: 13619 - DNA, 201 bp, Homo sapiens
cattgattaataagtctatccctttgccaataccatatggaatttattaggtatgcagtaagtgttagagttggcattcttgtttttcaaaattgcattarctgtcctagttcccttgctgtccatatacatttttattacaagataaacatgcacttcttattatttcaaagtacagtagtaagaaaacctcagagtagc

SEQ ID NO: 13620 - DNA, 201 bp, Homo sapiens
catactagtgatgctaactctaaaggtaaccagatacaaataagagtttacaacccagctcataatccacatccattaatcaggaccgtgccctatttggkgtttttctctatatatcttttaacccctttaatttctgctttgaacaactttctgaacttacatctgtgtggtgcattcttcctttgccagtaagcagta

SEQ ID NO: 13621 - DNA, 201 bp, Homo sapiens
tcttggaaataatatttttatatacaaagaatcaggatcatcaaatcaccatcttcatcacttcaattttcttaagcatgatgacagcctcgtcactgtcytttaatttgaaatttgttaactgtcttctaatttgaaatttgttaagcatgagcatatgcttaagtgctgatatctttcatttgaaatttgtaaaattat

SEQ ID NO: 13622 - DNA, 201 bp, Homo sapiens
ggaaggtacctctataaattccttagctttatttcttgcttctaagtaagactgtacatgataatgacacctgttaagttaaaatcttggaaatctttgascaagggtatacaagcatgaccctaggctctctgaaaattttctctcttctttccagacctatttgaaaccttgtttctccatactagtgatgctaactct

SEQ ID NO: 13623 - DNA, 201 bp, Homo sapiens
cactgcctagtacatcatgagaaattaatctatggtaagcactacttttcctatcacggcaaagatattggaaggggatctaagcaatgaaaatgacacaygcaaatgctctaaagtgtgaaactgcactgtgagttctgtacaactaaaattctataaagagtttctatgaagaaactatggaaagatgcagcacagaat

SEQ ID NO: 13624 - DNA, 201 bp, Homo sapiens
ggattttttttttttttttttttttttttttttgagacggagtctcactctgttgcccaggctggagtgcagtggcgcaatctctgctcactgcaagctcygcctcccgggttcacgccattctcctgcctcagcctcccgagtagctgggactacaggcgcccgccaccacgcccggctatttttttttttttgtatttt

SEQ ID NO: 13625 - DNA, 201 bp, Homo sapiens
tgagttcatgtcctttgcaggggcatggatgaagctggaaaccatcattctcagcaaactatcacaaggacagaaaaccaaacacctcatgttctcactcmtaggtgggagttgaacagtgagaacacatggacacagggcgggaaacatcacaccctgaagcgtgttgcgggggtgggagcctgggggagggttagcatt

SEQ ID NO: 13626 - DNA, 201 bp, Homo sapiens
gaagctatatcctcatgattgtgtgactaattaagtgatgatgttgagaaagataaaagatttaaggagcattcaaagatgattcaagaatattatccagrcaactgtataaatggtgctactgttcactaacatcaagaaagcagagaacagcacagtctaggaagtgaaaacatgttgtttggacaagttgactttgag

SEQ ID NO: 13627 - DNA, 201 bp, Homo sapiens
cccaggattgcaaaggtcccttttagaaactgtgtatcctcttggggggtctcactcaccctttctccttgttagagagctcctgctggctccaggccagrcctcagtgggctgttgcttggcttcactctcctctgttctccatgtccctttattcccttgatggatctcaacctggtttcttagataatcttcctgtac

SEQ ID NO: 13628 - DNA, 201 bp, Homo sapiens
aattacgtgttcattcttattaggttgtactacttttaaagtggcttctcatattttgctatatctcacatcattgttcatctgataatatatgaaaactmcaatgtgtttcttattccagaaaggggagtaattcttattcatgaataaacactgaaggagaaagattatggatcatagtgggaaaagccacaataccat

SEQ ID NO: 13629 - DNA, 201 bp, Homo sapiens
aaggtcccttttagaaactgtgtatcctcttggggggtctcactcaccctttctccttgttagagagctcctgctggctccaggccaggcctcagtgggcygttgcttggcttcactctcctctgttctccatgtccctttattcccttgatggatctcaacctggtttcttagataatcttcctgtacagtcagtttact

SEQ ID NO: 13630 - DNA, 201 bp, Homo sapiens
ccaacaataattgagagagcatcttaatgagagctgattagggaaaagccaaatgagcaagtcagtacctcaacaagactttcttgtgctgtggcagaacrtttcttctaaaatgtaagaagctacagcctattttgtgcataggccacataaatcatagtaggtggaggaagagtcaggtatcaatatgcagatatccag

SEQ ID NO: 13631 - DNA, 201 bp, Homo sapiens
gagctgattagggaaaagccaaatgagcaagtcagtacctcaacaagactttcttgtgctgtggcagaacatttcttctaaaatgtaagaagctacagccyattttgtgcataggccacataaatcatagtaggtggaggaagagtcaggtatcaatatgcagatatccagaaaaaggttccagcctcctaaaagatggca

SEQ ID NO: 13632 - DNA, 201 bp, Homo sapiens
agttatgcatttgtacatttagagatacatgttaaaattatgggtttagatgatattatctaaaataattgtataattctacatttatactaatagaaaaytgagcactcactatgtttggggaagtgagacaataatgaagctataataattattcccatatcatagataaagataccgatgctcagaaaatgtaagcaa

SEQ ID NO: 13633 - DNA, 201 bp, Homo sapiens
tctaaacactggaacagttacctatttccagacacacttccaccacatccaccctaacccaactcaactatcataatatagggaaaaaaatttttagatcrtcttgatgcaacaattcataatcaatattccaaatgatgtaactggtgattacagtccatcttcatcacacacacccaagagcaacactttgacatcggc

SEQ ID NO: 13634 - DNA, 201 bp, Homo sapiens
gaaactatgtacacagagaggtcaaagataaagtggaaatatgtataatatgcatcaaaaataagtttaacaaggaagagggtcaacacagctcatgtcasactcaaataaacaaggaagtcttggaataacttcatcttagaccaaaaattgctatactttagtgaaaggcaattgctgattcacagaagaaaacatggc

SEQ ID NO: 13635 - DNA, 201 bp, Homo sapiens
attcacagaagaaaacatggctggctctccataacatcatactaaatatctcattctccaaaagcacactaacgacaagcacaaaggttcacaataggagycttgataacactaaccaaagttaaatttaagtacaaatgattaaaatggaaatagtgacataatcaggcacacagacatatatatgcacgtaaatcgttc

SEQ ID NO: 13636 - DNA, 201 bp, Homo sapiens
ttgagaacagatcttcataactcactccaccaactcgcatgccaacctcctctagaaacaccctcacagacacacccatgataatgctttaccagttttcwtgggtattccttaattcaatcaagttgacacctaaaattaaagataacacctgtgctatgataaattggcaacattgattaaatgtccatgaacaccaag

SEQ ID NO: 13637 - DNA, 201 bp, Homo sapiens
agcatgaggaatttatcttactggattttttttttttttttttttttttttttttgagacggagtctcactctgttgcccaggctggagtgcagtggcgcratctctgctcactgcaagctccgcctcccgggttcacgccattctcctgcctcagcctcccgagtagctgggactacaggcgcccgccaccacgcccggc

SEQ ID NO: 13638 - DNA, 201 bp, Homo sapiens
atacgatttcagacccccagaggttctttcaacgtgtctagtgtccagcacagcgcacctggtcagagtttcgttgtaacttacagcaccatgttttcttyggagtgttgttcaggggtctcttgcatcagaatggcctgaactgcttgttaggaatgcagcttcctgatcttaccgtccagtttctgattcagtaggtct

SEQ ID NO: 13639 - DNA, 201 bp, Homo sapiens
aaaatccctccacgaaattgatcttaaaaagactagctgagtcaaatcctaacagatctgtcctgtatctggctgccacctttcaaaattgctgaccttaygcttacatattcgaatgcttcctggaagtcaaaacatattttcaaaagtttctaatggaaaagaactaagcctgtcacttggttttaaaaggtggaaatt

SEQ ID NO: 13640 - DNA, 201 bp, Homo sapiens
gagcctgggggagggttagcattaggagaaacacttaatgtaaatgacgagttaatgggtgcagcaaaccaacatggcacatgtatacctatgtaacaaamctgcacgttgcacatgtgtaccctagaacttaatgtataattttaaaaaaatctcaaagaattagattccctagcatgaggaatttatcttactggattt

SEQ ID NO: 13641 - DNA, 201 bp, Homo sapiens
taaaaaaatctcaaagaattagattccctagcatgaggaatttatcttactggattttttttttttttttttttttttttttttgagacggagtctcactstgttgcccaggctggagtgcagtggcgcaatctctgctcactgcaagctccgcctcccgggttcacgccattctcctgcctcagcctcccgagtagctgg

SEQ ID NO: 13642 - DNA, 201 bp, Homo sapiens
tcagctctcaccagaacacttattgctaagtatttggggattttatgaactgtttgtaaaatctttggaagtttgaaattagccatagtggaaatatttakgccagcaaaatatgcaaaggctacaaatagatattttctaaaattgggcagctagtttaccaggacaccacgaaaggtttcttcagatttctatttaaga

SEQ ID NO: 13643 - DNA, 201 bp, Homo sapiens
agataaggcgacattctatctttctgaattgccagagttcttatgctgattctttctcatgtgtgagggctggtgttcctttaactgtaatgtaagtttastatagacagttggcttcatttctaggtgctttcttagggccaacactctgcattgataaaagaaaaacttcagccaaattaaatttaaatgagtttaatt

SEQ ID NO: 13644 - DNA, 201 bp, Homo sapiens
cagacacacttccaccacatccaccctaacccaactcaactatcataatatagggaaaaaaatttttagatcgtcttgatgcaacaattcataatcaataytccaaatgatgtaactggtgattacagtccatcttcatcacacacacccaagagcaacactttgacatcggccactcactcacataggcatagccagtct

SEQ ID NO: 13645 - DNA, 201 bp, Homo sapiens
caatgaaagcctacctgtcagagagacaaactacctttttaaaaaaacacagatttaattttttttcaaaaggcaaagttcagaatcaccatatagtcacytcataaacctatatcatatttcatttcactggtttctgtaatttgaatagattatctctggagcatgtccaagaagttagacttgtgaaaatatgacagt

SEQ ID NO: 13646 - DNA, 201 bp, Homo sapiens
tttccaagctggcaaatctgccaggctaggagcagcagggatgggttgagttgcccaatctgccatccaggtgcttttcaggggaacatggagatgtatascctagcagaggtcaggtaggggtagagctggaagctggtactgagcctggtctggtagagaggagtgtagcaatttgacttctccccagcaccatgactg

SEQ ID NO: 13647 - DNA, 201 bp, Homo sapiens
ttttctatttttagtagagatggggtttctccacattggtcaggctggtcttgaactcctgacctgaggtgatctgcccacctcagcctcccagagtgccrggattacaggtgtgagccaccacacccggtcgaatgtgggtgttttaagagtgtgggctcccccaactgcttgaatgctttccaagctggcaaatctgcc

SEQ ID NO: 13648 - DNA, 201 bp, Homo sapiens
tggaaaactgcattttatttagcataatcccctgggggattgggggctccccaaagtttgagaaccaccgctaagggctattatgtttctgcaggcaaacrtatttttctttttttgttttatgtaatacaaagtaggagtttaaaaatttatttttggtaaaactagaacactgtcttcaaattagtaagagccttgtgt

SEQ ID NO: 13649 - DNA, 201 bp, Homo sapiens
ttcaagcaattctgcctcagcctcctgagtagctgattacaggcatgcgccaccatgcccagctaattttctatttttagtagagatggggtttctccacrttggtcaggctggtcttgaactcctgacctgaggtgatctgcccacctcagcctcccagagtgccaggattacaggtgtgagccaccacacccggtcgaa

SEQ ID NO: 13650 - DNA, 201 bp, Homo sapiens
ttatattaatttcttatagaaatataaagagtataaccttcaaaaactgggtattgttaaattatacattggattctgttaaatgataacaaataaatatraatataaatagttaaattaaaaatatatagatattacttaataggtataagacactcaaatttatgaatgtacttaagtttctttgttttacaatgagaa

SEQ ID NO: 13651 - DNA, 201 bp, Homo sapiens
caatggcgtgatctcagctccccgcaacctgtgcctcccgggttcaagcaattctgcctcagcctcctgagtagctgattacaggcatgcgccaccatgcscagctaattttctatttttagtagagatggggtttctccacattggtcaggctggtcttgaactcctgacctgaggtgatctgcccacctcagcctccca

SEQ ID NO: 13652 - DNA, 201 bp, Homo sapiens
ctgtcctattatgttcccccaagtagttttataatttctttcatatgagtcctctatctttcttcagtctacattccactgttactattgttactctcgtrtataactctattgctactgattaacttgttttggtggaagtgtttccctgttgtattagatagggttctccagagagataaaaccaatagaatggatgga

SEQ ID NO: 13653 - DNA, 201 bp, Homo sapiens
ggatttttttttttccagatggagttttcgctcttgttgcccaggctagaatccaatggcgtgatctcagctccccgcaacctgtgcctcccgggttcaakcaattctgcctcagcctcctgagtagctgattacaggcatgcgccaccatgcccagctaattttctatttttagtagagatggggtttctccacattggt

SEQ ID NO: 13654 - DNA, 201 bp, Homo sapiens
agagcatatctctattcagactccagaccacagctgggagcaagcagactcaaaagatggtaatacgtcaaaggagattgctgagagagaagcaatgaccrttgagattggagtaaaagaataatgtagccgaggaggaggagccaagatggccgaataggaacagatcgggtctacagctcccagcatgagcgacgcaga

SEQ ID NO: 13655 - DNA, 201 bp, Homo sapiens
tggcaccatgctctcattttccttactcgggtgttctgggccacagggctccctcaggcaggggacatggctgacaagctgtactctttccagactagccytgcagaaagagcaacattctgctcctccaccagcccagatgtctcatccttctcagtgttctgagagtgtggatttttttttttccagatggagttttcg

SEQ ID NO: 13656 - DNA, 201 bp, Homo sapiens
gctattccctgtcacctgtggtactgccttactgcctttgtttaactcctgctctgtttaaatgtacccataatgggcatgagagcatatctctattcagrctccagaccacagctgggagcaagcagactcaaaagatggtaatacgtcaaaggagattgctgagagagaagcaatgaccattgagattggagtaaaaga

SEQ ID NO: 13657 - DNA, 201 bp, Homo sapiens
cataccattaagttaggttttcaattttgtctcacaaggttagggttcatccacaaggactcaaatatagaagtatggagtatggagttcttctaaggccrtgtttagtttgctttaacagtacagaatctttatttgtggctgaaatttttgccttaggtttcacaggcactgtatactggcaaaatatttttggtgttg

SEQ ID NO: 13658 - DNA, 201 bp, Homo sapiens
taggtggagccatagaaaagttggatatatatttgggggtgactacaagtaaaggatgctacaaatgaggatgaaactatgtacacagagaggtcaaagawaaagtggaaatatgtataatatgcatcaaaaataagtttaacaaggaagagggtcaacacagctcatgtcagactcaaataaacaaggaagtcttggaat

SEQ ID NO: 13659 - DNA, 201 bp, Homo sapiens
tagaagcaatgatgtgcccaagtcagctctcaccagaacacttattgctaagtatttggggattttatgaactgtttgtaaaatctttggaagtttgaaaytagccatagtggaaatatttatgccagcaaaatatgcaaaggctacaaatagatattttctaaaattgggcagctagtttaccaggacaccacgaaaggt

SEQ ID NO: 13660 - DNA, 201 bp, Homo sapiens
ctttcatatgagtcctctatctttcttcagtctacattccactgttactattgttactctcgtatataactctattgctactgattaacttgttttggtgraagtgtttccctgttgtattagatagggttctccagagagataaaaccaatagaatggatggatggatggatggatggatggatggatggatggatggat

SEQ ID NO: 13661 - DNA, 201 bp, Homo sapiens
gtgttcaagagaaagggttttgaataagacaaatctgatttgaatcctgaattcaacactcattagttgattgatattggagaaatagtttcactgatccyctaaaataatggaagtctccacttcatcagcatggttaaaatattaagtgagacaatgcatatttatgcatataagtttacatatatgtaaaatttatat

SEQ ID NO: 13662 - DNA, 201 bp, Homo sapiens
aaccaatagaatggatggatggatggatggatggatggatggatggatggatggatggacagatgaatggacatacagacagacagttcagaaggaatttrttagaggaattggctcactgggttatggaaactgagaaggtccaggacagggcaattgtaagctggagaccctgggattccattggtgttgctcagccca

SEQ ID NO: 13663 - DNA, 201 bp, Homo sapiens
cagggaagtaatttcatatagtgttcaagagaaagggttttgaataagacaaatctgatttgaatcctgaattcaacactcattagttgattgatattggrgaaatagtttcactgatcccctaaaataatggaagtctccacttcatcagcatggttaaaatattaagtgagacaatgcatatttatgcatataagttta

SEQ ID NO: 13664 - DNA, 201 bp, Homo sapiens
agggcaattgtaagctggagaccctgggattccattggtgttgctcagcccaaatctgaaagcttcagaatcagggaatctgatggcataattctcaataygaggccaaaagcctaggaacctggggaccactggtgttaagtcctggagtccaaaggccagagagcctggagttctgatgtccaagggcaggagaagaag

SEQ ID NO: 13665 - DNA, 201 bp, Homo sapiens
catgattgactgctttgtaaccctacatacataccttctaagttagccccttaaatttacctccagattttcctacacactctataagagatctcgcaaakaaatggaattatacagttgatgaataatagcttctgtgtgtaagatactacaatacaggaaccatggatgtagtcaggaatgaaaaatggcacaatatca

SEQ ID NO: 13666 - DNA, 201 bp, Homo sapiens
cacatgattgactgctttgtaaccctacatacataccttctaagttagccccttaaatttacctccagattttcctacacactctataagagatctcgcawagaaatggaattatacagttgatgaataatagcttctgtgtgtaagatactacaatacaggaaccatggatgtagtcaggaatgaaaaatggcacaatat

SEQ ID NO: 13667 - DNA, 201 bp, Homo sapiens
aaaaccacaaagatggggaaaaaacagaacagaaaaactggaaactctaaaaagcagagtgcctctcctcctccaaaggatagcagttcctcaccagcaasggaacaaagctggatggagaatgactttgacgagctgagaaaagaaggcttcagacgatcaaattactctgagctacgggaggacattcaaaccaaaggc

SEQ ID NO: 13668 - DNA, 201 bp, Homo sapiens
tgaggctccctgtggagtaaagtgttgcctccatcaaaacttctgggggctctctgaattcatctagaggcctgggagggccaagggaattctcctcttcycaggattgcaaaggtcccttttagaaactgtgtatcctcttggggggtctcactcaccctttctccttgttagagagctcctgctggctccaggccaggc

SEQ ID NO: 13669 - DNA, 201 bp, Homo sapiens
aggaatttgttagaggaattggctcactgggttatggaaactgagaaggtccaggacagggcaattgtaagctggagaccctgggattccattggtgttgytcagcccaaatctgaaagcttcagaatcagggaatctgatggcataattctcaatacgaggccaaaagcctaggaacctggggaccactggtgttaagtc

SEQ ID NO: 13670 - DNA, 201 bp, Homo sapiens
ttggaaaactgcattttatttagcataatcccctgggggattgggggctccccaaagtttgagaaccaccgctaagggctattatgtttctgcaggcaaayatatttttctttttttgttttatgtaatacaaagtaggagtttaaaaatttatttttggtaaaactagaacactgtcttcaaattagtaagagccttgtg

SEQ ID NO: 13671 - DNA, 201 bp, Homo sapiens
gtgtgacactgtacgccacttttctcttgtaggttctacccatcacctacagataatggtgagtaaatacaagaacaatgttctgctgaaaggattagaarccatcaatgactatcacttcagcataattaattccttactgatcaatgatttaaaacttaattcaacaaggagagacgaatatgacaaaattcagattgc

SEQ ID NO: 13672 - DNA, 201 bp, Homo sapiens
tgctctgtttaaatgtacccataatgggcatgagagcatatctctattcagactccagaccacagctgggagcaagcagactcaaaagatggtaatacgtyaaaggagattgctgagagagaagcaatgaccattgagattggagtaaaagaataatgtagccgaggaggaggagccaagatggccgaataggaacagatc

SEQ ID NO: 13673 - DNA, 201 bp, Homo sapiens
ccaggctgtgtagatttagaatgcagattcttaagcaaggtgaatgagaagatcaaactgccataggtggagccatagaaaagttggatatatatttgggrgtgactacaagtaaaggatgctacaaatgaggatgaaactatgtacacagagaggtcaaagataaagtggaaatatgtataatatgcatcaaaaataagt

SEQ ID NO: 13674 - DNA, 201 bp, Homo sapiens
tttctcctaaatcttgatgagcttccttacctccagagtctgaattctatgtcagtcatttccgtctgcttaattatcattactgtggggttggggtattygtttggagataaggcgacattctatctttctgaattgccagagttcttatgctgattctttctcatgtgtgagggctggtgttcctttaactgtaatgta

SEQ ID NO: 13675 - DNA, 201 bp, Homo sapiens
gatctctttgcataatcccatatttcaaagaagttttgttcatttttaaaattcttttctctttacttctgtctgactgagttaattggaagactctcaasctctgagagtctttcctcaatttggtctattctgttgttaatgcttctgagtgtacgatgaaattcttaaagtaaatttttcaattctagaagttcagtt

SEQ ID NO: 13676 - DNA, 201 bp, Homo sapiens
tggggtttttcaaagattatagacttttgccacctcacattagatatttttctaacaaattttgttaccaaattttcacaaatgcacaagcttttatttcmatttggagggtgtttcaaaagtatatatataagatttagcgtgaacagtataaaattacttcaggtatttttatttgattttgatccctccttcttttct

SEQ ID NO: 13677 - DNA, 201 bp, Homo sapiens
tctgcagcaagacatataaacattcttgctaaaatggggtttttcaaagattatagacttttgccacctcacattagatatttttctaacaaattttgttrccaaattttcacaaatgcacaagcttttatttccatttggagggtgtttcaaaagtatatatataagatttagcgtgaacagtataaaattacttcaggt

SEQ ID NO: 13678 - DNA, 201 bp, Homo sapiens
tcatcttctttctcactactttcagcctaccgtgtttatctaattcctatttcatttcgatcagggctttacacatttttataagttgaaagacttaatcraattacttctttactcttactttttagactgtatttttaaaaaaaatctcatgtgtttatttgattttggaatactctttttccaaaagagggctggtag

SEQ ID NO: 13679 - DNA, 201 bp, Homo sapiens
aaaacctagttttttaattgcaagtcagtacatccccaaacactagtacttagaggaatgatgtgtataactttctagtgtctctttttttttttttttttaatgaagccatctatgccctgtcttacaataggccaggaaatgtgcaccaatcctttgtttccagaaagacaattgacatataacaaacctactacccag

SEQ ID NO: 13680 - DNA, 201 bp, Homo sapiens
tctttaaggatatgtaacttagtgaacactcatcttctttctcactactttcagcctaccgtgtttatctaattcctatttcatttcgatcagggctttayacatttttataagttgaaagacttaatcgaattacttctttactcttactttttagactgtatttttaaaaaaaatctcatgtgtttatttgattttgga

SEQ ID NO: 13681 - DNA, 201 bp, Homo sapiens
ctccagcaggcagtttttcttcattagtttctcatcaagcttcagatttatcaaattgcataataattaatcttgtttgtaaaaagcaatgagctaaacamtttagtaaatatatatcgcacaaatatagtatcttcaccccccaatagagaagagtgttaacttcaggttcagaggggaaaatgctttgtccatatttat

SEQ ID NO: 13682 - DNA, 201 bp, Homo sapiens
gtatgtgttttgtatcccaagtcagacaagtctaagctcttctggtttgaggaggtagctagtgtgggtcaatgtacctatttctatgaagcccatggtcyacgcttgcctgtcacacttcctcacttagcatactgggagccagagccctgatattttgaaatgctgtttattaataacaagtccatgggtctagctaga

SEQ ID NO: 13683 - DNA, 201 bp, Homo sapiens
acaaagaggagacaatacttcaatgaaagcctacctgtcagagagacaaactacctttttaaaaaaacacagatttaattttttttcaaaaggcaaagttyagaatcaccatatagtcacctcataaacctatatcatatttcatttcactggtttctgtaatttgaatagattatctctggagcatgtccaagaagttag

SEQ ID NO: 13684 - DNA, 201 bp, Homo sapiens
ctggtactgagcctggtctggtagagaggagtgtagcaatttgacttctccccagcaccatgactgcaggctctattgggactatggcagctggtactgggctgctctggggttcaagacctgtgaggctccctgtggagtaaagtgttgcctccatcaaaacttctgggggctctctgaattcatctagaggcctgggag

SEQ ID NO: 13685 - DNA, 201 bp, Homo sapiens
gagaacagatcttcataactcactccaccaactcgcatgccaacctcctctagaaacaccctcacagacacacccatgataatgctttaccagttttcatrggtattccttaattcaatcaagttgacacctaaaattaaagataacacctgtgctatgataaattggcaacattgattaaatgtccatgaacaccaagta

SEQ ID NO: 13686 - DNA, 201 bp, Homo sapiens
gatcagaacgaatttatagacaaaaaaggtaaagtgaggtacaagaatcggaagtgcggtacagaaagagtgagattggttacagctcggcgtttgccttrttttaacacaatttgaacattccgcagtctacgagtagttgaagtatggctgctgggactagccaacactcagccattgttacaggtgcataccattaag

SEQ ID NO: 13687 - DNA, 201 bp, Homo sapiens
cccggctatttttttttttttgtatttttagtagagacggggtttcaccgtgttagccaggatggtctcgatctcctaacctcgtgatccgcccgcctcgrccacccaaagtgctgggattacaggcgtgagccaccgcgcccggcctcttactggattttttaatgccactatccggcagtgattaaatagcaagttcaa

SEQ ID NO: 13688 - DNA, 201 bp, Homo sapiens
ctcagaatcacagcagtttcagagatactccaggggtgccttgtgatcagaacgaatttatagacaaaaaaggtaaagtgaggtacaagaatcggaagtgmggtacagaaagagtgagattggttacagctcggcgtttgccttattttaacacaatttgaacattccgcagtctacgagtagttgaagtatggctgctgg

SEQ ID NO: 13689 - DNA, 201 bp, Homo sapiens
cagacagttcagaaggaatttgttagaggaattggctcactgggttatggaaactgagaaggtccaggacagggcaattgtaagctggagaccctgggatkccattggtgttgctcagcccaaatctgaaagcttcagaatcagggaatctgatggcataattctcaatacgaggccaaaagcctaggaacctggggacca

SEQ ID NO: 13690 - DNA, 201 bp, Homo sapiens
caatcactacacttttcctttaaaattgctattaggttttgtaagtaaggaagtggaggcatttttgtaagtgcattaactctcaaaggccacaaaagtaygtttttaaacttatggatcaagttgtgtggatacgatttcagacccccagaggttctttcaacgtgtctagtgtccagcacagcgcacctggtcagagtt

SEQ ID NO: 13691 - DNA, 201 bp, Homo sapiens
ccaacatggcacatgtatacctatgtaacaaacctgcacgttgcacatgtgtaccctagaacttaatgtataattttaaaaaaatctcaaagaattagatyccctagcatgaggaatttatcttactggattttttttttttttttttttttttttttttgagacggagtctcactctgttgcccaggctggagtgcagtg

SEQ ID NO: 13692 - DNA, 201 bp, Homo sapiens
taattaattgaaaccttcccaagcagatattaataaatttttctctgtatttttagatatactctttataagcttgcattttttgcaatatagtatcctayaatgattactattttagtacttgttttattcatttaactatcagatcgatcttttcaagtctatgaattaaaatacaaattattatttagtggcaatgta

SEQ ID NO: 13693 - DNA, 201 bp, Homo sapiens
tgaacagtgagaacacatggacacagggcgggaaacatcacaccctgaagcgtgttgcgggggtgggagcctgggggagggttagcattaggagaaacacytaatgtaaatgacgagttaatgggtgcagcaaaccaacatggcacatgtatacctatgtaacaaacctgcacgttgcacatgtgtaccctagaacttaat

SEQ ID NO: 13694 - DNA, 201 bp, Homo sapiens
taggtaaaacatgattactttagaacttgaggaaatggttaaaacccacaagtcaaacaaaaagtaattaatttttaattaattgaaaccttcccaagcaratattaataaatttttctctgtatttttagatatactctttataagcttgcattttttgcaatatagtatcctataatgattactattttagtacttgtt

SEQ ID NO: 13695 - DNA, 201 bp, Homo sapiens
ccattactgggtatatacccaaaggattataaatcatgctactataaagacacatgcatatgtatgtttattgcagcactattcacagtaacaaagacttsgaaccaacccaaatgtccagcaatgatagaatggattaaaaaaatgtggcacatatacaccatggaatactatacaaccaaaaaaaaggatgagttcatg

SEQ ID NO: 13696 - DNA, 201 bp, Homo sapiens
caaaaccgcaatcagataccatctcacgccagttagaatggcaatcattaaaaagtcaggaaacaacagaagctggagaggatggggagaaacaggaatgyttttacactgttggtgccagtgtaaattagttcaatcattgtggaagacagtatggcaatttctcagggatctagaactagaaataccatttgacccagc

SEQ ID NO: 13697 - DNA, 201 bp, Homo sapiens
cagtaacaaagacttcgaaccaacccaaatgtccagcaatgatagaatggattaaaaaaatgtggcacatatacaccatggaatactatacaaccaaaaawaaggatgagttcatgtcctttgcaggggcatggatgaagctggaaaccatcattctcagcaaactatcacaaggacagaaaaccaaacacctcatgttct

SEQ ID NO: 13698 - DNA, 201 bp, Homo sapiens
aagggctattatgtttctgcaggcaaacatatttttctttttttgttttatgtaatacaaagtaggagtttaaaaatttatttttggtaaaactagaacaytgtcttcaaattagtaagagccttgtgtaggagaaatattctcttcaaaaatccctccacgaaattgatcttaaaaagactagctgagtcaaatcctaac

SEQ ID NO: 13699 - DNA, 201 bp, Homo sapiens
gaaattgatcttaaaaagactagctgagtcaaatcctaacagatctgtcctgtatctggctgccacctttcaaaattgctgaccttatgcttacatattcraatgcttcctggaagtcaaaacatattttcaaaagtttctaatggaaaagaactaagcctgtcacttggttttaaaaggtggaaattgaaataagacaaa

SEQ ID NO: 13700 - DNA, 201 bp, Homo sapiens
cccaaccaacaatgaagatgattgatacagccatcatactgaaggattcctactgtgtcagcaattatattaatttcttatagaaatataaagagtataaycttcaaaaactgggtattgttaaattatacattggattctgttaaatgataacaaataaatatgaatataaatagttaaattaaaaatatatagatatta

SEQ ID NO: 13701 - DNA, 201 bp, Homo sapiens
gcccggctatttttttttttttgtatttttagtagagacggggtttcaccgtgttagccaggatggtctcgatctcctaacctcgtgatccgcccgcctcrgccacccaaagtgctgggattacaggcgtgagccaccgcgcccggcctcttactggattttttaatgccactatccggcagtgattaaatagcaagttca

SEQ ID NO: 13702 - DNA, 201 bp, Homo sapiens
agaaactatcatcagagtgaacaggcaacctacagaatgggagaaaatctttgcaatctacccatcagacaaacaatcccatcaaaaagtgggcaaaggayatgaacagacacttctcaaaggaagacatttatgccaccaacagacatatgaaacaatgctcatcatcactggtcatcagagaaattcaaatcaaaaccg

SEQ ID NO: 13703 - DNA, 201 bp, Homo sapiens
aaaactaataaacagaaaggacatccacaccaaaaacccatctgtacatcaccatcatcaaagaccaaaagtagataaaaccacaaagatggggaaaaaayagaacagaaaaactggaaactctaaaaagcagagtgcctctcctcctccaaaggatagcagttcctcaccagcaacggaacaaagctggatggagaatga

SEQ ID NO: 13704 - DNA, 201 bp, Homo sapiens
cacctggctcggagggtcctacgcccacggagtctcgctgattgtgagcacagcagtctgagatcaaactgcaaggtggcagtgaggctgggggaggggcwcccgccattgcccaggcttgcttaggtaaacaaagcagctgggaagctccaactgggtggagcccaccacagctcaaggaggcctgcctgcctctgtagg

SEQ ID NO: 13705 - DNA, 201 bp, Homo sapiens
aatactgtgcttttccgaccggtttaaaaaatggcgcaccatgagattatatcccgcacctggctcggagggtcctacgcccacggagtctcgctgattgygagcacagcagtctgagatcaaactgcaaggtggcagtgaggctgggggaggggcacccgccattgcccaggcttgcttaggtaaacaaagcagctggga

SEQ ID NO: 13706 - DNA, 201 bp, Homo sapiens
aatgaccattgagattggagtaaaagaataatgtagccgaggaggaggagccaagatggccgaataggaacagatcgggtctacagctcccagcatgagcracgcagaagacgggtgatttctgcatttccatctgagataccgggttcatctcactagggagtgccagacagtgggcgcaggtcagtgggtgtgtgctcc

SEQ ID NO: 13707 - DNA, 201 bp, Homo sapiens
tgtactgtgaaaaaccttacctaatatcctcctgccaacattctgcctaattaaaatcttccctgaatgttttgcactgagtaaataagctattccctgtmacctgtggtactgccttactgcctttgtttaactcctgctctgtttaaatgtacccataatgggcatgagagcatatctctattcagactccagaccaca

SEQ ID NO: 13708 - DNA, 201 bp, Homo sapiens
tcttaaagtaaatttttcaattctagaagttcagtttttttctttcttaaaatggctattttgtctttcagctcctggattattttattgaattcattgtrttgggttttgactttctcctaaatcttgatgagcttccttacctccagagtctgaattctatgtcagtcatttccgtctgcttaattatcattactgtgg

SEQ ID NO: 13709 - DNA, 201 bp, Homo sapiens
acagacacttctcaaaggaagacatttatgccaccaacagacatatgaaacaatgctcatcatcactggtcatcagagaaattcaaatcaaaaccgcaatsagataccatctcacgccagttagaatggcaatcattaaaaagtcaggaaacaacagaagctggagaggatggggagaaacaggaatgtttttacactgtt

SEQ ID NO: 13710 - DNA, 201 bp, Homo sapiens
aaaggattataaatcatgctactataaagacacatgcatatgtatgtttattgcagcactattcacagtaacaaagacttcgaaccaacccaaatgtccarcaatgatagaatggattaaaaaaatgtggcacatatacaccatggaatactatacaaccaaaaaaaaggatgagttcatgtcctttgcaggggcatggat

SEQ ID NO: 13711 - DNA, 201 bp, Homo sapiens
gctatatctcacatcattgttcatctgataatatatgaaaactacaatgtgtttcttattccagaaaggggagtaattcttattcatgaataaacactgamggagaaagattatggatcatagtgggaaaagccacaataccatctacattctctctctctcattttttctacttaggtaaaacatgattactttagaact

SEQ ID NO: 13712 - DNA, 201 bp, Homo sapiens
ggaataggatggagagttgaaattgtggaaatccaggcagaaggaagactatacaccacgtcttggaaaataaaggaagtgggttgcaatttataattacrtgttcattcttattaggttgtactacttttaaagtggcttctcatattttgctatatctcacatcattgttcatctgataatatatgaaaactacaatgt

SEQ ID NO: 13713 - DNA, 201 bp, Homo sapiens
aaatatgaatataaatagttaaattaaaaatatatagatattacttaataggtataagacactcaaatttatgaatgtacttaagtttctttgttttacartgagaacacttggacacaagaagggtaacatcacacaccagggcctgttgtgcagtgggggggagggggaagggatagcgttaggagatatacctaatgt

SEQ ID NO: 13714 - DNA, 201 bp, Homo sapiens
aggcatgggcaaagacttcatgactaaaacactaaaagcaatggcaacaaaagctaaaatagacaaatgggatctaattaaattaaagagcttctgcaccrcaaaagaaactatcatcagagtgaacaggcaacctacagaatgggagaaaatctttgcaatctacccatcagacaaacaatcccatcaaaaagtgggcaa

SEQ ID NO: 13715 - DNA, 201 bp, Homo sapiens
atcaaagaccaaaagtagataaaaccacaaagatggggaaaaaacagaacagaaaaactggaaactctaaaaagcagagtgcctctcctcctccaaaggawagcagttcctcaccagcaacggaacaaagctggatggagaatgactttgacgagctgagaaaagaaggcttcagacgatcaaattactctgagctacggg

SEQ ID NO: 13716 - DNA, 201 bp, Homo sapiens
ttgttaaattatacattggattctgttaaatgataacaaataaatatgaatataaatagttaaattaaaaatatatagatattacttaataggtataagayactcaaatttatgaatgtacttaagtttctttgttttacaatgagaacacttggacacaagaagggtaacatcacacaccagggcctgttgtgcagtggg

SEQ ID NO: 13717 - DNA, 201 bp, Homo sapiens
tcactgtcctattatgttcccccaagtagttttataatttctttcatatgagtcctctatctttcttcagtctacattccactgttactattgttactctygtatataactctattgctactgattaacttgttttggtggaagtgtttccctgttgtattagatagggttctccagagagataaaaccaatagaatggat

SEQ ID NO: 13718 - DNA, 201 bp, Homo sapiens
gacagggcaattgtaagctggagaccctgggattccattggtgttgctcagcccaaatctgaaagcttcagaatcagggaatctgatggcataattctcartacgaggccaaaagcctaggaacctggggaccactggtgttaagtcctggagtccaaaggccagagagcctggagttctgatgtccaagggcaggagaag

SEQ ID NO: 13719 - DNA, 201 bp, Homo sapiens
ctatccacaagcaatctctctgtatgtgttttgtatcccaagtcagacaagtctaagctcttctggtttgaggaggtagctagtgtgggtcaatgtacctwtttctatgaagcccatggtccacgcttgcctgtcacacttcctcacttagcatactgggagccagagccctgatattttgaaatgctgtttattaataac

SEQ ID NO: 13720 - DNA, 201 bp, Homo sapiens
gacataatcaggcacacagacatatatatgcacgtaaatcgttccacatctcagattccctaattcaataatcctttcatttcaattgaaacaaccatagwtgtactgtgaaaaaccttacctaatatcctcctgccaacattctgcctaattaaaatcttccctgaatgttttgcactgagtaaataagctattccctgt

SEQ ID NO: 13721 - DNA, 201 bp, Homo sapiens
gagccttgataacactaaccaaagttaaatttaagtacaaatgattaaaatggaaatagtgacataatcaggcacacagacatatatatgcacgtaaatcrttccacatctcagattccctaattcaataatcctttcatttcaattgaaacaaccatagttgtactgtgaaaaaccttacctaatatcctcctgccaaca

SEQ ID NO: 13722 - DNA, 201 bp, Homo sapiens
gagctacctgttggatatctaagaaatatctctctatcaatctgaagatatatagatctgtataaacagatctggaacaaaaaaagtaattttgtactggygagttatgcatttgtacatttagagatacatgttaaaattatgggtttagatgatattatctaaaataattgtataattctacatttatactaatagaaa

SEQ ID NO: 13723 - DNA, 201 bp, Homo sapiens
agtgaaaacatgttgtttggacaagttgactttgagctacctgttggatatctaagaaatatctctctatcaatctgaagatatatagatctgtataaacmgatctggaacaaaaaaagtaattttgtactggcgagttatgcatttgtacatttagagatacatgttaaaattatgggtttagatgatattatctaaaat

SEQ ID NO: 13724 - DNA, 201 bp, Homo sapiens
attccagcaaaaggaaaaacctcatcaaagaagaggaagcagagaaaagtaggtccaactacacctttagcaaccacagacaagaagttcacagctgaagraggagaggagactcctatagctcaggtaagcttgagtaagaggagcaggcttcaattcccacagaagaaactgccatggctcttccactctgtctctcca

SEQ ID NO: 13725 - DNA, 201 bp, Homo sapiens
gtaaaatattttttgaagctatatcctcatgattgtgtgactaattaagtgatgatgttgagaaagataaaagatttaaggagcattcaaagatgattcawgaatattatccaggcaactgtataaatggtgctactgttcactaacatcaagaaagcagagaacagcacagtctaggaagtgaaaacatgttgtttggac

SEQ ID NO: 13726 - DNA, 201 bp, Homo sapiens
agtaaaatattttttgaagctatatcctcatgattgtgtgactaattaagtgatgatgttgagaaagataaaagatttaaggagcattcaaagatgattcwagaatattatccaggcaactgtataaatggtgctactgttcactaacatcaagaaagcagagaacagcacagtctaggaagtgaaaacatgttgtttgga

SEQ ID NO: 13727 - DNA, 201 bp, Homo sapiens
accacgaaaggtttcttcagatttctatttaagaaggagaaagacaaacagggctgtgatgaatggagtaaaatattttttgaagctatatcctcatgatygtgtgactaattaagtgatgatgttgagaaagataaaagatttaaggagcattcaaagatgattcaagaatattatccaggcaactgtataaatggtgct

SEQ ID NO: 13728 - DNA, 201 bp, Homo sapiens
aggttagagcagagatatcaattagaagcaatgatgtgcccaagtcagctctcaccagaacacttattgctaagtatttggggattttatgaactgtttgyaaaatctttggaagtttgaaattagccatagtggaaatatttatgccagcaaaatatgcaaaggctacaaatagatattttctaaaattgggcagctagt

SEQ ID NO: 13729 - DNA, 201 bp, Homo sapiens
aaggttatatttttgtgaggcctaaaacagtacaaaaacaaacaaagtggtggaataggatggagagttgaaattgtggaaatccaggcagaaggaagacyatacaccacgtcttggaaaataaaggaagtgggttgcaatttataattacgtgttcattcttattaggttgtactacttttaaagtggcttctcatattt

SEQ ID NO: 13730 - DNA, 201 bp, Homo sapiens
tagctagagtttaatcttttgcttccataggatactcgataaatttgatattatctctgacatcaggaggttttctgtcctgtgttgtttgggagaaatayagagaggtatggagttcagaatagtacaggtagatacagcagtgtgttcacagtttactgcttcagtctcttttacgcctcttccctctgctcaataacc

SEQ ID NO: 13731 - DNA, 201 bp, Homo sapiens
ctaggtgctttcttagggccaacactctgcattgataaaagaaaaacttcagccaaattaaatttaaatgagtttaattgagcaatgaatgatcgtgaatyggggagccctcagaatcacagcagtttcagagatactccaggggtgccttgtgatcagaacgaatttatagacaaaaaaggtaaagtgaggtacaagaat

SEQ ID NO: 13732 - DNA, 201 bp, Homo sapiens
tactttggattttgatatatttactttgtataatgaattgtactaccaaggttgaattctagttgtgacgtgcaataagtataataaatggattggctaaytttctcctaagtgcaaatactttcagcagctatgcatatgatctaaacatttgtgctgtctcccttctgtcttatttacttatttatttatgaagatagt

SEQ ID NO: 13733 - DNA, 201 bp, Homo sapiens
aaaatctcaaagaattagattccctagcatgaggaatttatcttactggattttttttttttttttttttttttttttttgagacggagtctcactctgtygcccaggctggagtgcagtggcgcaatctctgctcactgcaagctccgcctcccgggttcacgccattctcctgcctcagcctcccgagtagctgggact

SEQ ID NO: 13734 - DNA, 201 bp, Homo sapiens
agctaaacactttagtaaatatatatcgcacaaatatagtatcttcaccccccaatagagaagagtgttaacttcaggttcagaggggaaaatgctttgtycatatttataaaaacctagttttttaattgcaagtcagtacatccccaaacactagtacttagaggaatgatgtgtataactttctagtgtctctttttt

SEQ ID NO: 13735 - DNA, 201 bp, Homo sapiens
ttttgtgaggcctaaaacagtacaaaaacaaacaaagtggtggaataggatggagagttgaaattgtggaaatccaggcagaaggaagactatacaccacrtcttggaaaataaaggaagtgggttgcaatttataattacgtgttcattcttattaggttgtactacttttaaagtggcttctcatattttgctatatct

SEQ ID NO: 13736 - DNA, 201 bp, Homo sapiens
atttttagatatactctttataagcttgcattttttgcaatatagtatcctataatgattactattttagtacttgttttattcatttaactatcagatckatcttttcaagtctatgaattaaaatacaaattattatttagtggcaatgtaatgttgaattgcacaaatattggaatttattttaaaaataattctcta

SEQ ID NO: 13737 - DNA, 201 bp, Homo sapiens
tcatttgtcactgaaaacaaataacaggaaaatcaaaccactttcagaaaagaaaaaacccaaccaaagaaaaggctggaaccaaaaggagtaagatatcygaggagcagactcagcctccctgtcctgcaggagccggcatgtccacagccatgggcattccccacctccccagacctcatcatcagctccacccaacac

SEQ ID NO: 13738 - DNA, 201 bp, Homo sapiens
ttcagtttcaaaattatcttttcttcaagttagattggcggcacctctctgaaacccttggagtcacataaagtttcagaatctgaatgacttaagaaagsctccttaatacacacaccatatgtagagtgttacatagctagaccaattaggtccaggttatgactctcaaatcaaatacaccaatatatctgcagcaag

SEQ ID NO: 13739 - DNA, 201 bp, Homo sapiens
cccaagtagttttataatttctttcatatgagtcctctatctttcttcagtctacattccactgttactattgttactctcgtatataactctattgctaytgattaacttgttttggtggaagtgtttccctgttgtattagatagggttctccagagagataaaaccaatagaatggatggatggatggatggatggat

SEQ ID NO: 13740 - DNA, 201 bp, Homo sapiens
gtttctgattcagtaggtctggagtgagccttggaaaactgcattttatttagcataatcccctgggggattgggggctccccaaagtttgagaaccaccrctaagggctattatgtttctgcaggcaaacatatttttctttttttgttttatgtaatacaaagtaggagtttaaaaatttatttttggtaaaactagaa

SEQ ID NO: 13741 - DNA, 201 bp, Homo sapiens
gcgtgttgcgggggtgggagcctgggggagggttagcattaggagaaacacttaatgtaaatgacgagttaatgggtgcagcaaaccaacatggcacatgwatacctatgtaacaaacctgcacgttgcacatgtgtaccctagaacttaatgtataattttaaaaaaatctcaaagaattagattccctagcatgaggaa

SEQ ID NO: 13742 - DNA, 201 bp, Homo sapiens
catgtaccctagaacttaaagtataattttaaagaaagtttatttgctttaaaatttcatacattatgaatttactatgtcccctattacaatggtctccrcaatgaagagaccctcactgtcctattatgttcccccaagtagttttataatttctttcatatgagtcctctatctttcttcagtctacattccactgtt

SEQ ID NO: 13743 - DNA, 201 bp, Homo sapiens
agatgttgattgtgttcagtgtgacaggacagatcatttgcctcacttctggtgcacagagacaactagcatatttctatacaatacagggtctaaataaktaggttacgtgccaataatttcatctctttgtactctatcccaactggagctcataattttactttggattttgatatatttactttgtataatgaattg

SEQ ID NO: 13744 - DNA, 201 bp, Homo sapiens
cacttttcctttaaaattgctattaggttttgtaagtaaggaagtggaggcatttttgtaagtgcattaactctcaaaggccacaaaagtacgtttttaamcttatggatcaagttgtgtggatacgatttcagacccccagaggttctttcaacgtgtctagtgtccagcacagcgcacctggtcagagtttcgttgtaa

SEQ ID NO: 13745 - DNA, 201 bp, Homo sapiens
tgtcttatttacttatttatttatgaagatagtattgaataaaaattttgaattccatgatacttagaagataaggtaatcgaatcctctcatttacaaartaataataataataataattaaaaggcacagttttactgatatgtccatgtccaaattcaaggtgacagcatgacacattcaattcctccctaacagtcc

SEQ ID NO: 13746 - DNA, 201 bp, Homo sapiens
ggctggagtgcagtggcgcaatctctgctcactgcaagctccgcctcccgggttcacgccattctcctgcctcagcctcccgagtagctgggactacaggsgcccgccaccacgcccggctatttttttttttttgtatttttagtagagacggggtttcaccgtgttagccaggatggtctcgatctcctaacctcgtga

SEQ ID NO: 13747 - DNA, 201 bp, Homo sapiens
ggagaaaatctttgcaatctacccatcagacaaacaatcccatcaaaaagtgggcaaaggacatgaacagacacttctcaaaggaagacatttatgccacmaacagacatatgaaacaatgctcatcatcactggtcatcagagaaattcaaatcaaaaccgcaatcagataccatctcacgccagttagaatggcaatca

SEQ ID NO: 13748 - DNA, 201 bp, Homo sapiens
tacgtcaaaggagattgctgagagagaagcaatgaccattgagattggagtaaaagaataatgtagccgaggaggaggagccaagatggccgaataggaasagatcgggtctacagctcccagcatgagcgacgcagaagacgggtgatttctgcatttccatctgagataccgggttcatctcactagggagtgccagac

SEQ ID NO: 13749 - DNA, 201 bp, Homo sapiens
aaaacactaaaagcaatggcaacaaaagctaaaatagacaaatgggatctaattaaattaaagagcttctgcaccgcaaaagaaactatcatcagagtgarcaggcaacctacagaatgggagaaaatctttgcaatctacccatcagacaaacaatcccatcaaaaagtgggcaaaggacatgaacagacacttctcaaa

SEQ ID NO: 13750 - DNA, 201 bp, Homo sapiens
ttaggtaaaacatgattactttagaacttgaggaaatggttaaaacccacaagtcaaacaaaaagtaattaatttttaattaattgaaaccttcccaagcmgatattaataaatttttctctgtatttttagatatactctttataagcttgcattttttgcaatatagtatcctataatgattactattttagtacttgt

SEQ ID NO: 13751 - DNA, 201 bp, Homo sapiens
tgatcaatgatttaaaacttaattcaacaaggagagacgaatatgacaaaattcagattgccgacttgatggaagaaaagttcccaggtgatgctggtttkggcaaactgagaactcttcaaagaaataccaacactgggagaggagaccttgctgaaactcttagaaaagtcaaaaggtaattgggaaaagggaattctc

SEQ ID NO: 13752 - DNA, 201 bp, Homo sapiens
ttaactatcagatcgatcttttcaagtctatgaattaaaatacaaattattatttagtggcaatgtaatgttgaattgcacaaatattggaatttattttmaaaataattctctatttacttccaatatcccaacctcaatgcctgtcctaggaacattcatgcacctgtgccctttgaggctcctattatgtcctttaga

SEQ ID NO: 13753 - DNA, 201 bp, Homo sapiens
tatgtgtactgtaactttcttgtcaacttgaaatttgttgttactagtgttttagaaaagtgttccttgtgttatgttatttggcaatattaatataatcmattaaagttaaatcctagtaaagtccaaacacccacagatgttgattgtgttcagtgtgacaggacagatcatttgcctcacttctggtgcacagagaca

SEQ ID NO: 13754 - DNA, 201 bp, Homo sapiens
acattcaattcctccctaacagtcctcaaaaaaattacaaactgctatgaattcaactaacatttcacatgattgactgctttgtaaccctacatacataycttctaagttagccccttaaatttacctccagattttcctacacactctataagagatctcgcaaagaaatggaattatacagttgatgaataatagctt

SEQ ID NO: 13755 - DNA, 201 bp, Homo sapiens
ccaaagaagtaaatgattttgtttaggcttcaggaacactagattcctatcctgttactcagacagtccagcaggtgggaggaaaatccaaacaatgtccytgcactcacttctacgtagaagagtttttaatgatattaaggaaatagtattcttataagcttcaaaggaacattcaaaaggattataatacttgtgcta

SEQ ID NO: 13756 - DNA, 201 bp, Homo sapiens
taaatgattttgtttaggcttcaggaacactagattcctatcctgttactcagacagtccagcaggtgggaggaaaatccaaacaatgtccctgcactcayttctacgtagaagagtttttaatgatattaaggaaatagtattcttataagcttcaaaggaacattcaaaaggattataatacttgtgctaagtaataaa

SEQ ID NO: 13757 - DNA, 201 bp, Homo sapiens
ggaaaatgctttgtccatatttataaaaacctagttttttaattgcaagtcagtacatccccaaacactagtacttagaggaatgatgtgtataactttcyagtgtctctttttttttttttttttaatgaagccatctatgccctgtcttacaataggccaggaaatgtgcaccaatcctttgtttccagaaagacaatt

SEQ ID NO: 13758 - DNA, 201 bp, Homo sapiens
cctagttttttaattgcaagtcagtacatccccaaacactagtacttagaggaatgatgtgtataactttctagtgtctctttttttttttttttttaatkaagccatctatgccctgtcttacaataggccaggaaatgtgcaccaatcctttgtttccagaaagacaattgacatataacaaacctactacccagtaat

SEQ ID NO: 13759 - DNA, 201 bp, Homo sapiens
taataataataataattaaaaggcacagttttactgatatgtccatgtccaaattcaaggtgacagcatgacacattcaattcctccctaacagtcctcaraaaaattacaaactgctatgaattcaactaacatttcacatgattgactgctttgtaaccctacatacataccttctaagttagccccttaaatttacct

SEQ ID NO: 13760 - DNA, 201 bp, Homo sapiens
cattagttgattgatattggagaaatagtttcactgatcccctaaaataatggaagtctccacttcatcagcatggttaaaatattaagtgagacaatgcrtatttatgcatataagtttacatatatgtaaaatttatataacatatctcactgcctagtacatcatgagaaattaatctatggtaagcactacttttcc

SEQ ID NO: 13761 - DNA, 201 bp, Homo sapiens
gtaaccctacatacataccttctaagttagccccttaaatttacctccagattttcctacacactctataagagatctcgcaaagaaatggaattatacarttgatgaataatagcttctgtgtgtaagatactacaatacaggaaccatggatgtagtcaggaatgaaaaatggcacaatatcaagtgtgaggaaggaga

SEQ ID NO: 13762 - DNA, 201 bp, Homo sapiens
acattcaaaaggattataatacttgtgctaagtaataaagtatttaaagaaattaggatgacagggaagtaatttcatatagtgttcaagagaaagggttwtgaataagacaaatctgatttgaatcctgaattcaacactcattagttgattgatattggagaaatagtttcactgatcccctaaaataatggaagtctc

SEQ ID NO: 13763 - DNA, 201 bp, Homo sapiens
tcaaagaccaaaagtagataaaaccacaaagatggggaaaaaacagaacagaaaaactggaaactctaaaaagcagagtgcctctcctcctccaaaggatmgcagttcctcaccagcaacggaacaaagctggatggagaatgactttgacgagctgagaaaagaaggcttcagacgatcaaattactctgagctacggga

SEQ ID NO: 13764 - DNA, 201 bp, Homo sapiens
tggctgacaagctgtactctttccagactagccctgcagaaagagcaacattctgctcctccaccagcccagatgtctcatccttctcagtgttctgagaktgtggatttttttttttccagatggagttttcgctcttgttgcccaggctagaatccaatggcgtgatctcagctccccgcaacctgtgcctcccgggtt

SEQ ID NO: 13765 - DNA, 201 bp, Homo sapiens
gcattagagaggcattaggttagagcagagatatcaattagaagcaatgatgtgcccaagtcagctctcaccagaacacttattgctaagtatttggggaktttatgaactgtttgtaaaatctttggaagtttgaaattagccatagtggaaatatttatgccagcaaaatatgcaaaggctacaaatagatattttcta

SEQ ID NO: 13766 - DNA, 201 bp, Homo sapiens
aggagaaagacaaacagggctgtgatgaatggagtaaaatattttttgaagctatatcctcatgattgtgtgactaattaagtgatgatgttgagaaagakaaaagatttaaggagcattcaaagatgattcaagaatattatccaggcaactgtataaatggtgctactgttcactaacatcaagaaagcagagaacagc

SEQ ID NO: 13767 - DNA, 201 bp, Homo sapiens
gacgagttaatgggtgcagcaaaccaacatggcacatgtatacctatgtaacaaacctgcacgttgcacatgtgtaccctagaacttaatgtataattttwaaaaaatctcaaagaattagattccctagcatgaggaatttatcttactggattttttttttttttttttttttttttttttgagacggagtctcactct

SEQ ID NO: 13768 - DNA, 201 bp, Homo sapiens
aacaaggaagagggtcaacacagctcatgtcagactcaaataaacaaggaagtcttggaataacttcatcttagaccaaaaattgctatactttagtgaarggcaattgctgattcacagaagaaaacatggctggctctccataacatcatactaaatatctcattctccaaaagcacactaacgacaagcacaaaggtt

SEQ ID NO: 13769 - DNA, 201 bp, Homo sapiens
tcctgccaacattctgcctaattaaaatcttccctgaatgttttgcactgagtaaataagctattccctgtcacctgtggtactgccttactgcctttgtktaactcctgctctgtttaaatgtacccataatgggcatgagagcatatctctattcagactccagaccacagctgggagcaagcagactcaaaagatggt

SEQ ID NO: 13770 - DNA, 201 bp, Homo sapiens
tgctgaaactcttagaaaagtcaaaaggtaattgggaaaagggaattctcccctccctgccactgtccctaaacccttcccaaccttgaatagaacctcakcttcattatggttaatatatccatttcccaatttatgcctcagcggtcatgatattgttggtactttgcatgtcaacaagttgacagcatagagcattcc

SEQ ID NO: 13771 - DNA, 201 bp, Homo sapiens
aggtgggaggaaaatccaaacaatgtccctgcactcacttctacgtagaagagtttttaatgatattaaggaaatagtattcttataagcttcaaaggaayattcaaaaggattataatacttgtgctaagtaataaagtatttaaagaaattaggatgacagggaagtaatttcatatagtgttcaagagaaagggtttt

SEQ ID NO: 13772 - DNA, 201 bp, Homo sapiens
cctgccaacattctgcctaattaaaatcttccctgaatgttttgcactgagtaaataagctattccctgtcacctgtggtactgccttactgcctttgttkaactcctgctctgtttaaatgtacccataatgggcatgagagcatatctctattcagactccagaccacagctgggagcaagcagactcaaaagatggta

SEQ ID NO: 13773 - DNA, 201 bp, Homo sapiens
aagatatgctatataattctgggtcttaaatatgcaaaataaaaaaaaaacgaggtaaaacagagaaattattgagggctttccatgccagagtgaggagyaatgcacttttcccaaagaaaatggagaagtattcaatgatttcaagtagggtagaaatatgaattatagagagagctggctcaatgaaaacaactgatt

SEQ ID NO: 13774 - DNA, 201 bp, Homo sapiens
ttgacatcggccactcactcacataggcatagccagtctttccaattgtctgtataaatgtgtgacactgtacgccacttttctcttgtaggttctacccrtcacctacagataatggtgagtaaatacaagaacaatgttctgctgaaaggattagaagccatcaatgactatcacttcagcataattaattccttactg

SEQ ID NO: 13775 - DNA, 201 bp, Homo sapiens
gtaaaatatttacggtgttcactttagtagaatctcattttttcctaccaattatgttaactacaactaataaatgtttgtccattcaatttattctgtgwtgtaagattacaagctgcttgttgatctggtgaatccctgtaacccagagatttctttgagtgacagaaagtactgaaatgtgaatctgcacagctaatg

SEQ ID NO: 13776 - DNA, 201 bp, Homo sapiens; identical to SEQ ID NO: 12762

SEQ ID NO: 13777 - DNA, 201 bp, Homo sapiens; identical to SEQ ID NO: 12763

SEQ ID NO: 13778 - DNA, 201 bp, Homo sapiens; identical to SEQ ID NO: 12764

SEQ ID NO: 13779 - DNA, 201 bp, Homo sapiens; identical to SEQ ID NO: 12765

SEQ ID NO: 13780 - DNA, 201 bp, Homo sapiens; identical to SEQ ID NO: 12766

SEQ ID NO: 13781 - DNA, 201 bp, Homo sapiens; identical to SEQ ID NO: 12767

SEQ ID NO: 13782 - DNA, 201 bp, Homo sapiens; identical to SEQ ID NO: 12768

SEQ ID NO: 13783 - DNA, 201 bp, Homo sapiens; identical to SEQ ID NO: 12769

SEQ ID NO: 13784 - DNA, 201 bp, Homo sapiens; identical to SEQ ID NO: 12770

SEQ ID NO: 13785 - DNA, 201 bp, Homo sapiens; identical to SEQ ID NO: 12771

SEQ ID NO: 13786 - DNA, 201 bp, Homo sapiens; identical to SEQ ID NO: 12772

SEQ ID NO: 13787 - DNA, 201 bp, Homo sapiens; identical to SEQ ID NO: 12773

SEQ ID NO: 13788 - DNA, 201 bp, Homo sapiens; identical to SEQ ID NO: 12774

SEQ ID NO: 13789 - DNA, 201 bp, Homo sapiens; identical to SEQ ID NO: 12775

SEQ ID NO: 13790 - DNA, 201 bp, Homo sapiens; identical to SEQ ID NO: 12776

SEQ ID NO: 13791 - DNA, 201 bp, Homo sapiens; identical to SEQ ID NO: 12777

SEQ ID NO: 13792 - DNA, 201 bp, Homo sapiens; identical to SEQ ID NO: 12778

SEQ ID NO: 13793 - DNA, 201 bp, Homo sapiens; identical to SEQ ID NO: 12779

SEQ ID NO: 13794 - DNA, 201 bp, Homo sapiens; identical to SEQ ID NO: 12780

SEQ ID NO: 13795 - DNA, 201 bp, Homo sapiens; identical to SEQ ID NO: 12781

SEQ ID NO: 13796 - DNA, 201 bp, Homo sapiens; identical to SEQ ID NO: 12782

SEQ ID NO: 13797 - DNA, 201 bp, Homo sapiens; identical to SEQ ID NO: 12783

SEQ ID NO: 13798 - DNA, 201 bp, Homo sapiens; identical to SEQ ID NO: 12784

SEQ ID NO: 13799 - DNA, 201 bp, Homo sapiens; identical to SEQ ID NO: 12785

SEQ ID NO: 13800 - DNA, 201 bp, Homo sapiens; identical to SEQ ID NO: 12786

SEQ ID NO: 13801 - DNA, 201 bp, Homo sapiens; identical to SEQ ID NO: 12787

SEQ ID NO: 13802 - DNA, 201 bp, Homo sapiens; identical to SEQ ID NO: 12788

SEQ ID NO: 13803 - DNA, 201 bp, Homo sapiens; identical to SEQ ID NO: 12789

SEQ ID NO: 13804 - DNA, 201 bp, Homo sapiens; identical to SEQ ID NO: 12790

SEQ ID NO: 13805 - DNA, 201 bp, Homo sapiens; identical to SEQ ID NO: 12791

SEQ ID NO: 13806 - DNA, 201 bp, Homo sapiens; identical to SEQ ID NO: 12792

SEQ ID NO: 13807 - DNA, 201 bp, Homo sapiens; identical to SEQ ID NO: 12793

SEQ ID NO: 13808 - DNA, 201 bp, Homo sapiens; identical to SEQ ID NO: 12794

SEQ ID NO: 13809 - DNA, 201 bp, Homo sapiens; identical to SEQ ID NO: 12795

SEQ ID NO: 13810 - DNA, 201 bp, Homo sapiens; identical to SEQ ID NO: 12796

SEQ ID NO: 13811 - DNA, 201 bp, Homo sapiens; identical to SEQ ID NO: 885

SEQ ID NO: 13812 - DNA, 201 bp, Homo sapiens; identical to SEQ ID NO: 12798

SEQ ID NO: 13813 - DNA, 201 bp, Homo sapiens; identical to SEQ ID NO: 12799

SEQ ID NO: 13814 - DNA, 201 bp, Homo sapiens; identical to SEQ ID NO: 12800

SEQ ID NO: 13815 - DNA, 201 bp, Homo sapiens; identical to SEQ ID NO: 12801

SEQ ID NO: 13816 - DNA, 201 bp, Homo sapiens; identical to SEQ ID NO: 12802

SEQ ID NO: 13817 - DNA, 201 bp, Homo sapiens; identical to SEQ ID NO: 12803

SEQ ID NO: 13818 - DNA, 201 bp, Homo sapiens; identical to SEQ ID NO: 12804

SEQ ID NO: 13819 - DNA, 201 bp, Homo sapiens; identical to SEQ ID NO: 12805

SEQ ID NO: 13820 - DNA, 201 bp, Homo sapiens; identical to SEQ ID NO: 12806

SEQ ID NO: 13821 - DNA, 201 bp, Homo sapiens; identical to SEQ ID NO: 12807

SEQ ID NO: 13822 - DNA, 201 bp, Homo sapiens; identical to SEQ ID NO: 12808

SEQ ID NO: 13823 - DNA, 201 bp, Homo sapiens; identical to SEQ ID NO: 12809

SEQ ID NO: 13824 - DNA, 201 bp, Homo sapiens; identical to SEQ ID NO: 12810

SEQ ID NO: 13825 - DNA, 201 bp, Homo sapiens; identical to SEQ ID NO: 12811

SEQ ID NO: 13826 - DNA, 201 bp, Homo sapiens; identical to SEQ ID NO: 12812

SEQ ID NO: 13827 - DNA, 201 bp, Homo sapiens; identical to SEQ ID NO: 12813

SEQ ID NO: 13828 - DNA, 201 bp, Homo sapiens; identical to SEQ ID NO: 12814

SEQ ID NO: 13829 - DNA, 201 bp, Homo sapiens; identical to SEQ ID NO: 12815

SEQ ID NO: 13830 - DNA, 201 bp, Homo sapiens; identical to SEQ ID NO: 12816

SEQ ID NO: 13831 - DNA, 201 bp, Homo sapiens; identical to SEQ ID NO: 12817

SEQ ID NO: 13832 - DNA, 201 bp, Homo sapiens; identical to SEQ ID NO: 12818

SEQ ID NO: 13833 - DNA, 201 bp, Homo sapiens; identical to SEQ ID NO: 12819

SEQ ID NO: 13834 - DNA, 201 bp, Homo sapiens; identical to SEQ ID NO: 12820

SEQ ID NO: 13835 - DNA, 201 bp, Homo sapiens; identical to SEQ ID NO: 12821

SEQ ID NO: 13836 - DNA, 201 bp, Homo sapiens; identical to SEQ ID NO: 889

SEQ ID NO: 13837 - DNA, 201 bp, Homo sapiens; identical to SEQ ID NO: 12823

SEQ ID NO: 13838 - DNA, 201 bp, Homo sapiens; identical to SEQ ID NO: 12824

SEQ ID NO: 13839 - DNA, 201 bp, Homo sapiens; identical to SEQ ID NO: 12825

SEQ ID NO: 13840 - DNA, 201 bp, Homo sapiens; identical to SEQ ID NO: 12826

SEQ ID NO: 13841 - DNA, 201 bp, Homo sapiens; identical to SEQ ID NO: 12827

SEQ ID NO: 13842 - DNA, 201 bp, Homo sapiens; identical to SEQ ID NO: 12828

SEQ ID NO: 13843 - DNA, 201 bp, Homo sapiens; identical to SEQ ID NO: 12829

SEQ ID NO: 13844 - DNA, 201 bp, Homo sapiens; identical to SEQ ID NO: 888

SEQ ID NO: 13845 - DNA, 201 bp, Homo sapiens; identical to SEQ ID NO: 12831

SEQ ID NO: 13846 - DNA, 201 bp, Homo sapiens; identical to SEQ ID NO: 12832

SEQ ID NO: 13847 - DNA, 201 bp, Homo sapiens; identical to SEQ ID NO: 12833

SEQ ID NO: 13848 - DNA, 201 bp, Homo sapiens; identical to SEQ ID NO: 12834

SEQ ID NO: 13849 - DNA, 201 bp, Homo sapiens; identical to SEQ ID NO: 12835

SEQ ID NO: 13850 - DNA, 201 bp, Homo sapiens; identical to SEQ ID NO: 12836

SEQ ID NO: 13851 - DNA, 201 bp, Homo sapiens; identical to SEQ ID NO: 12837

SEQ ID NO: 13852 - DNA, 201 bp, Homo sapiens; identical to SEQ ID NO: 12838

SEQ ID NO: 13853 - DNA, 201 bp, Homo sapiens; identical to SEQ ID NO: 12839

SEQ ID NO: 13854 - DNA, 201 bp, Homo sapiens; identical to SEQ ID NO: 12840

SEQ ID NO: 13855 - DNA, 201 bp, Homo sapiens; identical to SEQ ID NO: 12841

SEQ ID NO: 13856 - DNA, 201 bp, Homo sapiens; identical to SEQ ID NO: 12842

SEQ ID NO: 13857 - DNA, 201 bp, Homo sapiens; identical to SEQ ID NO: 12843

SEQ ID NO: 13858 - DNA, 201 bp, Homo sapiens; identical to SEQ ID NO: 12844

SEQ ID NO: 13859 - DNA, 201 bp, Homo sapiens; identical to SEQ ID NO: 12845

SEQ ID NO: 13860 - DNA, 201 bp, Homo sapiens; identical to SEQ ID NO: 12846

SEQ ID NO: 13861 - DNA, 201 bp, Homo sapiens; identical to SEQ ID NO: 12847

SEQ ID NO: 13862 - DNA, 201 bp, Homo sapiens; identical to SEQ ID NO: 12848

SEQ ID NO: 13863 - DNA, 201 bp, Homo sapiens; identical to SEQ ID NO: 12849

SEQ ID NO: 13864 - DNA, 201 bp, Homo sapiens; identical to SEQ ID NO: 12850

SEQ ID NO: 13865 - DNA, 201 bp, Homo sapiens; identical to SEQ ID NO: 12851

SEQ ID NO: 13866 - DNA, 201 bp, Homo sapiens; identical to SEQ ID NO: 12852

SEQ ID NO: 13867 - DNA, 201 bp, Homo sapiens; identical to SEQ ID NO: 12853

SEQ ID NO: 13868 - DNA, 201 bp, Homo sapiens; identical to SEQ ID NO: 12854

SEQ ID NO: 13869 - DNA, 201 bp, Homo sapiens; identical to SEQ ID NO: 12855

SEQ ID NO: 13870 - DNA, 201 bp, Homo sapiens; identical to SEQ ID NO: 12856

SEQ ID NO: 13871 - DNA, 201 bp, Homo sapiens; identical to SEQ ID NO: 12857

SEQ ID NO: 13872 - DNA, 201 bp, Homo sapiens; identical to SEQ ID NO: 12858

SEQ ID NO: 13873 - DNA, 201 bp, Homo sapiens; identical to SEQ ID NO: 12859

SEQ ID NO: 13874 - DNA, 201 bp, Homo sapiens; identical to SEQ ID NO: 12860

SEQ ID NO: 13875 - DNA, 201 bp, Homo sapiens; identical to SEQ ID NO: 12861

SEQ ID NO: 13876 - DNA, 201 bp, Homo sapiens; identical to SEQ ID NO: 12862

SEQ ID NO: 13877 - DNA, 201 bp, Homo sapiens; identical to SEQ ID NO: 12863

SEQ ID NO: 13878 - DNA, 201 bp, Homo sapiens; identical to SEQ ID NO: 12864

SEQ ID NO: 13879 - DNA, 201 bp, Homo sapiens; identical to SEQ ID NO: 12865

SEQ ID NO: 13880 - DNA, 201 bp, Homo sapiens; identical to SEQ ID NO: 12866

SEQ ID NO: 13881 - DNA, 201 bp, Homo sapiens; identical to SEQ ID NO: 12867

SEQ ID NO: 13882 - DNA, 201 bp, Homo sapiens; identical to SEQ ID NO: 12868

SEQ ID NO: 13883 - DNA, 201 bp, Homo sapiens; identical to SEQ ID NO: 12869

SEQ ID NO: 13884 - DNA, 201 bp, Homo sapiens; identical to SEQ ID NO: 12870

SEQ ID NO: 13885 - DNA, 201 bp, Homo sapiens; identical to SEQ ID NO: 12871

SEQ ID NO: 13886 - DNA, 201 bp, Homo sapiens; identical to SEQ ID NO: 12872

SEQ ID NO: 13887 - DNA, 201 bp, Homo sapiens; identical to SEQ ID NO: 12873

SEQ ID NO: 13888 - DNA, 201 bp, Homo sapiens; identical to SEQ ID NO: 12874

SEQ ID NO: 13889 - DNA, 201 bp, Homo sapiens; identical to SEQ ID NO: 12875

SEQ ID NO: 13890 - DNA, 201 bp, Homo sapiens; identical to SEQ ID NO: 12876

SEQ ID NO: 13891 - DNA, 201 bp, Homo sapiens; identical to SEQ ID NO: 12877

SEQ ID NO: 13892 - DNA, 201 bp, Homo sapiens; identical to SEQ ID NO: 12878

SEQ ID NO: 13893 - DNA, 201 bp, Homo sapiens; identical to SEQ ID NO: 12879

SEQ ID NO: 13894 - DNA, 201 bp, Homo sapiens; identical to SEQ ID NO: 12880

SEQ ID NO: 13895 - DNA, 201 bp, Homo sapiens; identical to SEQ ID NO: 12881

SEQ ID NO: 13896 - DNA, 201 bp, Homo sapiens; identical to SEQ ID NO: 12882

SEQ ID NO: 13897 - DNA, 201 bp, Homo sapiens; identical to SEQ ID NO: 12883

SEQ ID NO: 13898 - DNA, 201 bp, Homo sapiens; identical to SEQ ID NO: 884

SEQ ID NO: 13899 - DNA, 201 bp, Homo sapiens; identical to SEQ ID NO: 12885

SEQ ID NO: 13900 - DNA, 201 bp, Homo sapiens; identical to SEQ ID NO: 12886

SEQ ID NO: 13901 - DNA, 201 bp, Homo sapiens; identical to SEQ ID NO: 12887

SEQ ID NO: 13902 - DNA, 201 bp, Homo sapiens; identical to SEQ ID NO: 12888

SEQ ID NO: 13903 - DNA, 201 bp, Homo sapiens; identical to SEQ ID NO: 12889

SEQ ID NO: 13904 - DNA, 201 bp, Homo sapiens; identical to SEQ ID NO: 12890

SEQ ID NO: 13905 - DNA, 201 bp, Homo sapiens; identical to SEQ ID NO: 12891

SEQ ID NO: 13906 - DNA, 201 bp, Homo sapiens; identical to SEQ ID NO: 12892

SEQ ID NO: 13907 - DNA, 201 bp, Homo sapiens; identical to SEQ ID NO: 12893

SEQ ID NO: 13908 - DNA, 201 bp, Homo sapiens; identical to SEQ ID NO: 12894

SEQ ID NO: 13909 - DNA, 201 bp, Homo sapiens; identical to SEQ ID NO: 12895

SEQ ID NO: 13910 - DNA, 201 bp, Homo sapiens
ttcatagcaccttagcttccaggccctccatcccggctgcctctctggcacttgcccttttactgtgcgggtccaaagagacacctatgttcagtttgtcraagtctgaaataagcctgtcttttaatttcactgactcccagtagtaatttttttagaagacaaactgcttctctggcagttacactccagggccaattc

SEQ ID NO: 13911 - DNA, 201 bp, Homo sapiens
cacccctagggcccagtccctcagcctaggggtgggagtggggcatcccccacccatatcacataccgcttcctgcatcgtctgagccggctgacttcagsggggccaggtgggtaactgtgtcctttggtcttggttgtccggcgcaacttggagaaagactcaaatatggtggggactgccccctcctttagcctgtga

SEQ ID NO: 13912 - DNA, 201 bp, Homo sapiens
gctggcgctgggccttgtcaagggcatcaagggctgcctcggctcgccgcttccagagtaaggcgctgcccacctggtagctgtgttcattctggatgtargctccggcgggtgggggcaggcgcagcatatacgctgagggggagactggccgtggttcgagaggggagggctgccgctctggtgaaggctgggcgctgc

SEQ ID NO: 13913 - DNA, 201 bp, Homo sapiens; identical to SEQ ID NO: 933

SEQ ID NO: 13914 - DNA, 201 bp, Homo sapiens
gaatctgcctgggctgctcctgtcccacccaccctcactgagatccatgtaaggggctcctcttcccacctggaacttgtgagtggggacccatgatgtaygggtctcacctgacttgaggtgaattttggagtgaagggccctgaggtcagctcccaggtcggtcgtgctgggccaggcctggttttcacaggggctgaa

SEQ ID NO: 13915 - DNA, 201 bp, Homo sapiens; identical to SEQ ID NO: 947

SEQ ID NO: 13916 - DNA, 201 bp, Homo sapiens
gccggctagacttcccgtcctccccttcccgactgcattcagtcccgccgggaccgttccgcttcacctcccacccacaggttcaagcctcctcagtatcygagaaaggcgcgaagcctctacgcagttgcgacccgaggcgagcaacaactagcgcatgcgcacgtgagcccgcggcgcacgcgcgctgacctgtggaag

SEQ ID NO: 13917 - DNA, 201 bp, Homo sapiens
caaatgtaacactaattgaaagaaaaattcctctactcaagttgagaggcttaataattagacacagaatggagggtttcacctcctacctgtaacatctwacaactaaggtctgtaatcctcctatgtaacatgtaatgaacattccaggttggtgtaactgttgtagattttacccttctttttcctcttttttttttt

SEQ ID NO: 13918 - DNA, 201 bp, Homo sapiens
gggaacttcgcagagccaggtcaccctctcactctgtgcctcttagttatcttgcatgctctggtctttgcatacgctgctccctgcaccaggaacctccwtccccatctttgtctgcttgtcgaacttcagaaatctgcaagggtcagcttagaggtcacttcttccggaagctttcctcaacaccctccccgccctgct

SEQ ID NO: 13919 - DNA, 201 bp, Homo sapiens
tgcaaccctgctctatgctgacccttgtcactgaaccctgatctagacttatatgaataaatgaaattacatgccaagggccctaaaaagcaaattttacraaattgtgtggcagtttctgggactagaatgaatttcatttgtgctcctcggcagggagaggccatacttgcagtgagtcaccccaagacggagctgttt

SEQ ID NO: 13920 - DNA, 201 bp, Homo sapiens
gtacagacactatttttctcgggaggggattcatggttttctttggatcctgaatggggcctttgacccactaagtagttcagaatccatttggagagcaygctggcgtgggggcttggggctccagctgcgcccttccctgtccttccctgggagggtgcgggcggaccagcttcctttagtcagctccttaaccaggcc

SEQ ID NO: 13921 - DNA, 201 bp, Homo sapiens
cagtagctgggactacaagcgcccgccaccacgcccggctaatttgcaatacggaaattttaataggtaattagctctcctagcgttatggtggggaatayagagggatggttgcctgccgcaccctcccctcactattcttcgccttcttcagcctcagcttccacggaatccatgcccacatcttcataatcctccaga

SEQ ID NO: 13922 - DNA, 201 bp, Homo sapiens
atatgacagataagaacatcgaggctaaggcaacgcaaatcttttccttaaagtcatacagctgtcaaaagaaagctggacaacctgggcaacatagcgasataaaaaattatttaaattagccagatgtggtagccccctgtagtctcagcgactcaggaggctgaggcaggaggctcaccagagtgcagagttcaagga

SEQ ID NO: 13923 - DNA, 201 bp, Homo sapiens
tcataatcctccagagctgccagatcctcgcgggcctcggagaattcccccactgccatgccctcccccacgtaccagtgcactaaggcgcacttggccgmacttatggtccaggcaggcccaggcctccgtgatggccgtggtgttgctcagcatgcacaccgcccgctgcactttggccaggtctcccacagggaccac

SEQ ID NO: 13924 - DNA, 201 bp, Homo sapiens
tcaggcactggggcctgtcaccaaggctcctccaacatgcgggaggaggcttagcagacttgcgctgcaccagcgaatctgcctgggctgctcctgtcccwcccaccctcactgagatccatgtaaggggctcctcttcccacctggaacttgtgagtggggacccatgatgtatgggtctcacctgacttgaggtgaatt

SEQ ID NO: 13925 - DNA, 201 bp, Homo sapiens
gcactggggcctgtcaccaaggctcctccaacatgcgggaggaggcttagcagacttgcgctgcaccagcgaatctgcctgggctgctcctgtcccacccwccctcactgagatccatgtaaggggctcctcttcccacctggaacttgtgagtggggacccatgatgtatgggtctcacctgacttgaggtgaattttgg

SEQ ID NO: 13926 - DNA, 201 bp, Homo sapiens; identical to SEQ ID NO: 939

SEQ ID NO: 13927 - DNA, 201 bp, Homo sapiens
ccaacatgcgggaggaggcttagcagacttgcgctgcaccagcgaatctgcctgggctgctcctgtcccacccaccctcactgagatccatgtaaggggcwcctcttcccacctggaacttgtgagtggggacccatgatgtatgggtctcacctgacttgaggtgaattttggagtgaagggccctgaggtcagctccca

SEQ ID NO: 13928 - DNA, 201 bp, Homo sapiens
gcccgcatatgacagataagaacatcgaggctaaggcaacgcaaatcttttccttaaagtcatacagctgtcaaaagaaagctggacaacctgggcaacayagcgagataaaaaattatttaaattagccagatgtggtagccccctgtagtctcagcgactcaggaggctgaggcaggaggctcaccagagtgcagagtt

SEQ ID NO: 13929 - DNA, 201 bp, Homo sapiens; identical to SEQ ID NO: 945

SEQ ID NO: 13930 - DNA, 201 bp, Homo sapiens
aatcccagcactttgggaggccgaggcgggcggatcactaggtcaggagatcaagaccatcctggctaacacggtgaaaccccggctctactaaaaaattwaaaaaaaaaaaaaaaaaacgttagccaggcgcgatggcgggcacctgtagtcccagctactcgggaggctgaagcaggagaatggcatgaaccccggagg

SEQ ID NO: 13931 - DNA, 201 bp, Homo sapiens
ggatgaatgtgaacccctgcatggctatagccacctgcctcctcccctgccctgcatcactacctggcctattttttgcctctagaagcactgcttcctaygctccttaggaccactgcccgcatatgacagataagaacatcgaggctaaggcaacgcaaatcttttccttaaagtcatacagctgtcaaaagaaagctg

SEQ ID NO: 13932 - DNA, 201 bp, Homo sapiens
gggtttcacctcctacctgtaacatcttacaactaaggtctgtaatcctcctatgtaacatgtaatgaacattccaggttggtgtaactgttgtagatttwacccttctttttcctctttttttttttttttttttttttttgagacagtcacgctctgttgcccaggttggagtacagtggtgatcttggctcactgcaa

SEQ ID NO: 13933 - DNA, 201 bp, Homo sapiens
acacatgaaaaagaatgagaaccctgtcttgggatataaatacatccaaggtatattgtatactttgtaaaaagaaaagtgagttgaagtctatgtatttrtgtgtaaaaaaatccatgtaataacatacacaggctagaaccttgggcagctagggtagcatcatgccggaggaggacaaacgcctgctgaggtggtgac

SEQ ID NO: 13934 - DNA, 201 bp, Homo sapiens
gggtgggtttcactgtgcagagctgggaacaggaaacagcccccttggacgcaggctgctcaagggacttccatgacctgcagctgtcccagtccgccggragccccacatcctaccccagcgtcggccggcagggaggcccacctgattcccaccagctcaaagcagtcctcctcaaagtgtttggagcagaagtagatg

SEQ ID NO: 13935 - DNA, 201 bp, Homo sapiens
gacgtccacaggccgccgtcgcctcttcctcctgctttttatcctccccagacctctggcaggaaccgctcatcgttacgcccctttcgcagcctcagacmctgaggcggagaccgcttggcgcctcacttagagcgcgacccggggatgtgggcggagtctgcggctgcgctgaccaatcgagtgtggcgtccatcgact

SEQ ID NO: 13936 - DNA, 201 bp, Homo sapiens
cagacccagcacctaccgcagatgctgctgcttttgctcagggcacctgccagggcctctgtacctgccccatagagcccactgtcccaaaagttcagccrcttgacatatggattggagctcaatgaggaagccagagaccggcgccctgggacagacagagcaaacacactggccactatcctggctcatgctccaggg

SEQ ID NO: 13937 - DNA, 201 bp, Homo sapiens
ttggcctcccaaagtgctgggattacaggcatgagccaccgtgcccagcctcagcctctgttttctaaagtgtaagatactggtaatattgccccatgaaytttaaagggtagtggttaaggtatgagggaacataaagtatttggtaaagtataaggcggtaggaaataaattactaaaattattatccttgcaacctag

SEQ ID NO: 13938 - DNA, 201 bp, Homo sapiens
ctatgaatcactttaaatctgtcaacttaaagatggtttgcatcaacgtgagatgaaaaagagagatgatctgtgtcaaggtgttgtaaagtggctgagaragggccagacagattcaagaagttgtgtgcgttcagaggcaagttatggccattccacatgggaaaaagaagacacatacctgtgactttctcatatcat

SEQ ID NO: 13939 - DNA, 201 bp, Homo sapiens
catggccatggtgccctgcgcaggcgttacctgcttggtcattcagctggttgtagctcaggtccagggacttcaggtctgtgtgggccagcaggagttcrgcaaggtgctgggccgcctgctcctccaggccattccctgacagctgcatcttccgcatggcctggttcactgtgagggcggcacagagggcctgggctc

SEQ ID NO: 13940 - DNA, 201 bp, Homo sapiens
acatgcgggaggaggcttagcagacttgcgctgcaccagcgaatctgcctgggctgctcctgtcccacccaccctcactgagatccatgtaaggggctccwcttcccacctggaacttgtgagtggggacccatgatgtatgggtctcacctgacttgaggtgaattttggagtgaagggccctgaggtcagctcccaggt

SEQ ID NO: 13941 - DNA, 201 bp, Homo sapiens
atgcgggaggaggcttagcagacttgcgctgcaccagcgaatctgcctgggctgctcctgtcccacccaccctcactgagatccatgtaaggggctcctcwtcccacctggaacttgtgagtggggacccatgatgtatgggtctcacctgacttgaggtgaattttggagtgaagggccctgaggtcagctcccaggtcg

SEQ ID NO: 13942 - DNA, 201 bp, Homo sapiens
atctgtctctcagatgtcgagggtagggcatgcctggcacaggcagaagctggggagtacaggggacagactcaggggcactcccatggctgttgtctccyggggcctctccctgtaagcctggacccagtgtccttccagtggtacctggggccccaggccaccgtgcagcaggttcagctctggggcactcccttggca

SEQ ID NO: 13943 - DNA, 201 bp, Homo sapiens
ttgagacagggtctcactctgtcacccagccttgagtgcagtggtgtgatcttggctcactgcaacctctgcctcctgggttcaagcgattttcccacttkaagtgatccgcctgcatcagcctcccaaagtattgggattacaggtgtgagccaccgcgcccggcccatatcaagttttttttttttttttttttttttt

SEQ ID NO: 13944 - DNA, 201 bp, Homo sapiens
aggtgacatggcccagctttcaggggtggaggcacatccctgaggaaagggaggactcacgcctgcccacctgccccagacccagcacctaccgcagatgytgctgcttttgctcagggcacctgccagggcctctgtacctgccccatagagcccactgtcccaaaagttcagccacttgacatatggattggagctcaa

SEQ ID NO: 13945 - DNA, 201 bp, Homo sapiens
ccactaagtagttcagaatccatttggagagcatgctggcgtgggggcttggggctccagctgcgcccttccctgtccttccctgggagggtgcgggcggrccagcttcctttagtcagctccttaaccaggccccagctacttgtttgcggccccctactactacggcttctacaacaaccggctgcaggcgtactgcaa

SEQ ID NO: 13946 - DNA, 201 bp, Homo sapiens
cctggactcaagcttttttttttttttttggtgagagagggtctcacttggtcacccagcctggagtgcagtggtgcaatcttggctcactgcaacctccrcctcctaggctcaagtgatcctcccacctcagccttccaagtagctataagtgcgtggcatcatgcccggctaattttttgtatttttggtagagatgag

SEQ ID NO: 13947 - DNA, 201 bp, Homo sapiens
caccacctccactcccaccccaggaagtgaggccagagggcagggacagagctgctgctgttctctgtgtgccagggcccagcaaagggaatgtagggagrgtgggaggtgcagggcagctgggattaggggttgagggctgggtgttggaggctggatctggatcctgctttagtggaagtgtccctttaacagcaactg

SEQ ID NO: 13948 - DNA, 201 bp, Homo sapiens
gtctcccatgtgcagggcagggcaggagaatgggtgccagccaacaaggaaggagagtggtggggtagggtggatgaggaagggacttgtatccagcatcdgctgcacagcagagggtctaactccaccccacataccccctcctgtgatgaggcccctcctctatccaccagcaacaccagcaggacccaggtgacatgg

SEQ ID NO: 13949 - DNA, 201 bp, Homo sapiens
gctatgcgcatgcctatggcagtgggtgcacctgccaggccaagggtcagggtgcccagagcctccaaagagagctgaggggatgtggggccccaaactcmttaattcactgaagacacaggtcccacagggagcggatgatgaagcagaccccctcctgtcatcaccctctcctggtgtagtgtggatgcgaggccacgg

SEQ ID NO: 13950 - DNA, 201 bp, Homo sapiens
tgtgcatggagcacttacatgggtcacacactctgctgatcacttcaggagtgcatttcacttcatgctcaccacagccccaagcctatgaggtcttgtgrgggccatttcacagattggaaactgagctgctttcataggtcaccccgttttctcagtggcagagacagcatttggattcagcttcaatgaactcccacc

SEQ ID NO: 13951 - DNA, 201 bp, Homo sapiens
gggttgcatggtggctctggctcccaatggctgggtcccctctgcccctgacctccccctccctgtgtgcccaccagcttctgtgtcaagcggttaaaacygcctacctcctggtactgtagagactgctgtggtggggggcagccaccccatcgatgattatgtctggcagtgatatcaccacccacttcagaagccctc

SEQ ID NO: 13952 - DNA, 201 bp, Homo sapiens
tggcctggttcactgtgagggcggcacagagggcctgggctcctgccactcccagctggttctccaacaggtccacatctgggggacggagccactcctcrgccagtgggatgcaaagccaggtaccacccccctcccccctcttctgccatcccccaaacctccaggtctgaggcagaggaaaaggacttacaggttaac

SEQ ID NO: 13953 - DNA, 201 bp, Homo sapiens
gccctccgtctagaatccgctttattatggcacctggtgggtctggtgggatctgagggaggaagaggctgcagtcttgctgggcagcccctcggtcagtscagcagcccctcaggccatgctgctgctcagctgcatggcaaagtcctgcacatgctccttcagagtctggcgggcatctgcctgtgcccgcttctcccg

SEQ ID NO: 13954 - DNA, 201 bp, Homo sapiens
gctgcatcttccgcatggcctggttcactgtgagggcggcacagagggcctgggctcctgccactcccagctggttctccaacaggtccacatctgggggwcggagccactcctcagccagtgggatgcaaagccaggtaccacccccctcccccctcttctgccatcccccaaacctccaggtctgaggcagaggaaaag

SEQ ID NO: 13955 - DNA, 201 bp, Homo sapiens
ctccaggccattccctgacagctgcatcttccgcatggcctggttcactgtgagggcggcacagagggcctgggctcctgccactcccagctggttctccracaggtccacatctgggggacggagccactcctcagccagtgggatgcaaagccaggtaccacccccctcccccctcttctgccatcccccaaacctcca

SEQ ID NO: 13956 - DNA, 201 bp, Homo sapiens
atggccatggtgccctgcgcaggcgttacctgcttggtcattcagctggttgtagctcaggtccagggacttcaggtctgtgtgggccagcaggagttcgkcaaggtgctgggccgcctgctcctccaggccattccctgacagctgcatcttccgcatggcctggttcactgtgagggcggcacagagggcctgggctcc

SEQ ID NO: 13957 - DNA, 201 bp, Homo sapiens
ctgactccttcccaccctgcacatttcagcttaaatgtcacctcacagaggcctccccagccacctctttaaagcagggggtccccattcttctctagaakcataaactatttgtttcttttgcagtgccaataattactcagaatgatgttgttaacattgtcccttgaggtcaggaacttggttttgttcaaggtggat

SEQ ID NO: 13958 - DNA, 201 bp, Homo sapiens
gtgatgaggcccctcctctatccaccagcaacaccagcaggacccaggtgacatggcccagctttcaggggtggaggcacatccctgaggaaagggaggastcacgcctgcccacctgccccagacccagcacctaccgcagatgctgctgcttttgctcagggcacctgccagggcctctgtacctgccccatagagccc

SEQ ID NO: 13959 - DNA, 201 bp, Homo sapiens
accatggctggggaggatatgtcagcacctggaagtggagtgcaggctgcagcgcccagccatgtgggccaggtgcattcactcagagtggggccacacasccatctacccagtttccacaagatgtggctcctgccacacccacagggcagcctcctccaaatccctcctggaggggcctacccagaagcctccttgaac

SEQ ID NO: 13960 - DNA, 201 bp, Homo sapiens
gtgctgggattacaggcatgagccaccgtgcccagcctcagcctctgttttctaaagtgtaagatactggtaatattgccccatgaactttaaagggtagyggttaaggtatgagggaacataaagtatttggtaaagtataaggcggtaggaaataaattactaaaattattatccttgcaacctagctgacgtgaaaag

SEQ ID NO: 13961 - DNA, 201 bp, Homo sapiens
agaccaccagctgtatctcgggtcaggagagtctgtaagggggaagctggatctagtcaggctgggggtgggtgctggctagtgaaggtgattgtctgagrgcattggctctctgatgcatggctggagcttctgtctcattcagggggtctggagtgggaagtggggccagagaggaggtggggccttcgatgttgggcc

SEQ ID NO: 13962 - DNA, 201 bp, Homo sapiens
cttccaggttcctgggagttgaaggaaaaggatgctgaggccaggacctgagtgcttgtctccatgttctggccacctcttcctagatttccagggactarcttgttggggctttactacctgctgacatgacccaggaggttgatgattgtcatcatcatccccgtttttcaaatagagatggtagtgaagggggcgggg

SEQ ID NO: 13963 - DNA, 201 bp, Homo sapiens
cacctggaacttgtgagtggggacccatgatgtatgggtctcacctgacttgaggtgaattttggagtgaagggccctgaggtcagctcccaggtcggtcrtgctgggccaggcctggttttcacaggggctgaaggatcccagtccacctgtgtgcatgtcagggctcggccgggaagaagccagcaaagtcccccgtgt

SEQ ID NO: 13964 - DNA, 201 bp, Homo sapiens
aggacttgtgttgtcctcactgcactggggaaggtggcgggggcagcttttcaggagggcctggggaacttcgcagagccaggtcaccctctcactctgtrcctcttagttatcttgcatgctctggtctttgcatacgctgctccctgcaccaggaacctccatccccatctttgtctgcttgtcgaacttcagaaatct

SEQ ID NO: 13965 - DNA, 201 bp, Homo sapiens
tgatcttgccatggctgactccttcccaccctgcacatttcagcttaaatgtcacctcacagaggcctccccagccacctctttaaagcagggggtccccrttcttctctagaagcataaactatttgtttcttttgcagtgccaataattactcagaatgatgttgttaacattgtcccttgaggtcaggaacttggttt

SEQ ID NO: 13966 - DNA, 201 bp, Homo sapiens
ctgatcttgccatggctgactccttcccaccctgcacatttcagcttaaatgtcacctcacagaggcctccccagccacctctttaaagcagggggtcccyattcttctctagaagcataaactatttgtttcttttgcagtgccaataattactcagaatgatgttgttaacattgtcccttgaggtcaggaacttggtt

SEQ ID NO: 13967 - DNA, 201 bp, Homo sapiens
atgctctccctctgatcttgccatggctgactccttcccaccctgcacatttcagcttaaatgtcacctcacagaggcctccccagccacctctttaaagyagggggtccccattcttctctagaagcataaactatttgtttcttttgcagtgccaataattactcagaatgatgttgttaacattgtcccttgaggtca

SEQ ID NO: 13968 - DNA, 201 bp, Homo sapiens
ggaaacaggcccgcatgctcactgttcctctgcttgaaatgctctccctctgatcttgccatggctgactccttcccaccctgcacatttcagcttaaatrtcacctcacagaggcctccccagccacctctttaaagcagggggtccccattcttctctagaagcataaactatttgtttcttttgcagtgccaataatt

SEQ ID NO: 13969 - DNA, 201 bp, Homo sapiens
ctagcaggagctggcagcatgggctccccaggggctacgacaggctgggggcttctggattataagacggagaagtatgtgatgaccaggaactggcgggkgggcgccctgcagaggctgctgcagtttgggatcgtggtctatgtggtagggtaagagagaagagcttttggccaggctggaggggcaagggaagaggtg

SEQ ID NO: 13970 - DNA, 201 bp, Homo sapiens
agcctggccacgcttccctggctccctagcctaggcacactgctgtctgccagtctgggaaacaggcccgcatgctcactgttcctctgcttgaaatgctstccctctgatcttgccatggctgactccttcccaccctgcacatttcagcttaaatgtcacctcacagaggcctccccagccacctctttaaagcagggg

SEQ ID NO: 13971 - DNA, 201 bp, Homo sapiens
gcagctagcaggagctggcagcatgggctccccaggggctacgacaggctgggggcttctggattataagacggagaagtatgtgatgaccaggaactggygggtgggcgccctgcagaggctgctgcagtttgggatcgtggtctatgtggtagggtaagagagaagagcttttggccaggctggaggggcaagggaaga

SEQ ID NO: 13972 - DNA, 201 bp, Homo sapiens
taagctgcttgagccagatgagagcttctgaaatgctgcagaaaagagctctcctggggcatccattaaaatgcagattcaccggcattcccctaagagtwtggttcagcaggtccagggtcaacatctgcatgcctcacccagggtcacaggtgattgttactattattggaccatttgaggagaggcaggtagaagtgc

SEQ ID NO: 13973 - DNA, 201 bp, Homo sapiens
ggctgcagctgccatgctgactcatgtgcccgcagctagcaggagctggcagcatgggctccccaggggctacgacaggctgggggcttctggattataaracggagaagtatgtgatgaccaggaactggcgggtgggcgccctgcagaggctgctgcagtttgggatcgtggtctatgtggtagggtaagagagaagag

SEQ ID NO: 13974 - DNA, 201 bp, Homo sapiens
gtgccaccccactccctctaagctgcttgagccagatgagagcttctgaaatgctgcagaaaagagctctcctggggcatccattaaaatgcagattcacyggcattcccctaagagtttggttcagcaggtccagggtcaacatctgcatgcctcacccagggtcacaggtgattgttactattattggaccatttgagg

SEQ ID NO: 13975 - DNA, 201 bp, Homo sapiens; identical to SEQ ID NO: 946

SEQ ID NO: 13976 - DNA, 201 bp, Homo sapiens; identical to SEQ ID NO: 948

SEQ ID NO: 13977 - DNA, 201 bp, Homo sapiens
ttctatgaatcactttaaatctgtcaacttaaagatggtttgcatcaacgtgagatgaaaaagagagatgatctgtgtcaaggtgttgtaaagtggctgaragagggccagacagattcaagaagttgtgtgcgttcagaggcaagttatggccattccacatgggaaaaagaagacacatacctgtgactttctcatatc

SEQ ID NO: 13978 - DNA, 201 bp, Homo sapiens; identical to SEQ ID NO: 927

SEQ ID NO: 13979 - DNA, 201 bp, Homo sapiens
gtagctgtgttcattctggatgtaggctccggcgggtgggggcaggcgcagcatatacgctgagggggagactggccgtggttcgagaggggagggctgcygctctggtgaaggctgggcgctgcagcctgcttcatctgcctgggcacccaaggggcccagtaggtctgaaaaggggctgctaaggccaggctccagcct

SEQ ID NO: 13980 - DNA, 201 bp, Homo sapiens
ctgctttcataggtcaccccgttttctcagtggcagagacagcatttggattcagcttcaatgaactcccaccttgcccacccctttcttgaacttccccrcccccaactctctgtgttgcaggactttccactctgcattcaggcactggggagtctcccatgtgcagggcagggcaggagaatgggtgccagccaacaa

SEQ ID NO: 13981 - DNA, 201 bp, Homo sapiens
aaaccgcctacctcctggtactgtagagactgctgtggtggggggcagccaccccatcgatgattatgtctggcagtgatatcaccacccacttcagaagycctcactgccccattgccaggattggcaataatagcccaggtgactgtgcatggagcacttacatgggtcacacactctgctgatcacttcaggagtgca

SEQ ID NO: 13982 - DNA, 201 bp, Homo sapiens; identical to SEQ ID NO: 941

SEQ ID NO: 13983 - DNA, 201 bp, Homo sapiens; identical to SEQ ID NO: 943

SEQ ID NO: 13984 - DNA, 201 bp, Homo sapiens; identical to SEQ ID NO: 944

SEQ ID NO: 13985 - DNA, 201 bp, Homo sapiens
tcagcctcccgaatagctgggaccacaggtgtctgccaccacacccggctaattttttgtattttttagtagagccggggtttcaccgtgttagccaggayggtctcaatctcctgacctcgtgatctgcctgccttggcctcccaaagtgctgggattacaggcatgagccaccgtgcccagcctcagcctctgttttct

SEQ ID NO: 13986 - DNA, 201 bp, Homo sapiens
ctgcatcacttgctgcctgtgaggctccagacacctaaagctatctcagcctttgttttcttttcttttttctttttctttcttttttttttttttgagakgtagtctcgctctgttgcccaggctggagtgcagtggtgcaatctcgactcactgcaagctctgcctcccgggttcacgccatcctcctgcctcagcctc

SEQ ID NO: 13987 - DNA, 201 bp, Homo sapiens
ctcggatgccgggtcccacaggccctggccgctggggtccagccgctggcagttggccagccacaagcctcgcctcgggttgtccttcttgggaagtctgyggagccacaaacccgtgagcaccaggctgtccacagccctgggctcatgctgcccaagcaccccagaggggaaacgcagacccaacacgcgccgccacga

SEQ ID NO: 13988 - DNA, 201 bp, Homo sapiens
gtggaggacagaccaggacctgcagtcagataatctctgatttctctctgcatcacttgctgcctgtgaggctccagacacctaaagctatctcagccttkgttttcttttcttttttctttttctttcttttttttttttttgagatgtagtctcgctctgttgcccaggctggagtgcagtggtgcaatctcgactcac

SEQ ID NO: 13989 - DNA, 201 bp, Homo sapiens
gtctcaagcgatcctcccacctccacctccccattagctatgactgcaggcatgcacaaccatacctggataatttttatatcttttgtagagacagggtygcactatgttgcccaggctggtcttgaactcctgggttcaagcaatcttctcacctgggcttctcaaagtgctgggattacaggcatgtgtcactgagcc

SEQ ID NO: 13990 - DNA, 201 bp, Homo sapiens
gccctgcagaggctgctgcagtttgggatcgtggtctatgtggtagggtaagagagaagagcttttggccaggctggaggggcaagggaagaggtgggggrtggggcttggtcctgctgggttgaagttgagggttgggctgtttaggggctggagtggaagggggcagattgggacggggttggggagagctaggcgata

SEQ ID NO: 13991 - DNA, 201 bp, Homo sapiens; identical to SEQ ID NO: 949

SEQ ID NO: 13992 - DNA, 201 bp, Homo sapiens
ggaggcggagcttgcagtgagctgagatcgtgccactgcactccagcctgggcgacagagcaagactctgtctcaaaaaaaaaaaaaaaaatagccaggcrtggtggcgggcgcctgtaatcccagctactcaggaggctgagtcaggagaattgcttgaaccggggaggcagaggctgcagtgagccgagatcacatcac

SEQ ID NO: 13993 - DNA, 201 bp, Homo sapiens
catgaaccccggaggcggagcttgcagtgagctgagatcgtgccactgcactccagcctgggcgacagagcaagactctgtctcaaaaaaaaaaaaaaaaatagccaggcatggtggcgggcgcctgtaatcccagctactcaggaggctgagtcaggagaattgcttgaaccggggaggcagaggctgcagtgagccgag

SEQ ID NO: 13994 - DNA, 201 bp, Homo sapiens
gccaggcgcgatggcgggcacctgtagtcccagctactcgggaggctgaagcaggagaatggcatgaaccccggaggcggagcttgcagtgagctgagatygtgccactgcactccagcctgggcgacagagcaagactctgtctcaaaaaaaaaaaaaaaaatagccaggcatggtggcgggcgcctgtaatcccagcta

SEQ ID NO: 13995 - DNA, 201 bp, Homo sapiens
aatgtgggaaaccactgtagacaggggctcttaactaaccatagggcacaaagttgaccaacacaggtgtggtgaggcatttagcctagtcatcacaacakatcttcgagcctgacattctgttatttggcttccaaatacatggtacttttcttttggtagacaactgactgtaagcatagctaaaggagcaccaaatca

SEQ ID NO: 13996 - DNA, 201 bp, Homo sapiens
catcagtctgattgtgtgtgaggcagaggtctctgcttggtttggagaaagggcaaagacctgcctttggtcttcacagtaaacactgcacaatatatttwaaaatctttacagaaatattagtgttgcccaaaattcagtgacaacaggtgaccaagatgatgtaaagtgtaaaaaccactatttataacacaaaaaatg

SEQ ID NO: 13997 - DNA, 201 bp, Homo sapiens
ggggggagaactgagcatgtagggctcagctccgcccctgtcactacacgctggggacacaccacactgcccgacttctcctccccaggtgggctctcctsgccaaaaaaggctaccaggagcgggacctggaaccccagttttccatcatcaccaaactcaaaggggtttccgtcactcagatcaaggagcttggaaacc

SEQ ID NO: 13998 - DNA, 201 bp, Homo sapiens
tcagtctgattgtgtgtgaggcagaggtctctgcttggtttggagaaagggcaaagacctgcctttggtcttcacagtaaacactgcacaatatatttaawaatctttacagaaatattagtgttgcccaaaattcagtgacaacaggtgaccaagatgatgtaaagtgtaaaaaccactatttataacacaaaaaatgat

SEQ ID NO: 13999 - DNA, 201 bp, Homo sapiens
tgaggcatttagcctagtcatcacaacagatcttcgagcctgacattctgttatttggcttccaaatacatggtacttttcttttggtagacaactgactrtaagcatagctaaaggagcaccaaatcatcagtctgattgtgtgtgaggcagaggtctctgcttggtttggagaaagggcaaagacctgcctttggtctt

SEQ ID NO: 14000 - DNA, 201 bp, Homo sapiens
agtcaggcctctacctgtctgatgacaaatggcacactatgtcttttaacctgattgcagaccacaaatgttttgtgaatattttccccagggaaaaaacyggaagtagttctaaattctatacatccattatattagttttacctgtggattgggaaaacccagctctgattgcatttcagggcgggacagcctttggtg

SEQ ID NO: 14001 - DNA, 201 bp, Homo sapiens
cactttgggaggccgaggcgggcggatcactaggtcaggagatcaagaccatcctggctaacacggtgaaaccccggctctactaaaaaattaaaaaaaawaaaaaaaaaacgttagccaggcgcgatggcgggcacctgtagtcccagctactcgggaggctgaagcaggagaatggcatgaaccccggaggcggagctt

SEQ ID NO: 14002 - DNA, 201 bp, Homo sapiens
tgtaatcccagcactttgggaggccgaggcgggcggatcactaggtcaggagatcaagaccatcctggctaacacggtgaaaccccggctctactaaaaawttaaaaaaaaaaaaaaaaaaacgttagccaggcgcgatggcgggcacctgtagtcccagctactcgggaggctgaagcaggagaatggcatgaaccccgg

SEQ ID NO: 14003 - DNA, 201 bp, Homo sapiens
gcgggtggatcacctgaggtcaggagttcaagaccagcctgcccaacacggtgaaacctcatctctactaaaaatacaaaaaattggtcaggcgtggtggytcatgcctgtaatcccagcactttgggaggccgaggcgggcggatcactaggtcaggagatcaagaccatcctggctaacacggtgaaaccccggctcta

SEQ ID NO: 14004 - DNA, 201 bp, Homo sapiens
tccgcctcctaggctcaagtgatcctcccacctcagccttccaagtagctataagtgcgtggcatcatgcccggctaattttttgtatttttggtagagawgaggtttcaccatgttgcctaggctggtctcgaactcctaagctcaggtgatccaccgacctcagcctcccaaagtgttgggattacaggcatgagccac

SEQ ID NO: 14005 - DNA, 201 bp, Homo sapiens
gggtgtggggggagaactgagcatgtagggctcagctccgcccctgtcactacacgctggggacacaccacactgcccgacttctcctccccaggtgggckctcctcgccaaaaaaggctaccaggagcgggacctggaaccccagttttccatcatcaccaaactcaaaggggtttccgtcactcagatcaaggagcttg

SEQ ID NO: 14006 - DNA, 201 bp, Homo sapiens
tttgtatttttagtagagatagggtttcaccatgttggccaggctggtcttgaactcctgacctccggtgatccgcctaccttggcctcccagaatgctgrgattataggcgtgagccactgaccgcacccagctttttttttttttttttttttgagatgggttttgctctgtcgcccaggttagagtgaagtacaatgg

SEQ ID NO: 14007 - DNA, 201 bp, Homo sapiens
ggcaaccgccaccatgcctgactaatttttgtatttttagtagagatagggtttcaccatgttggccaggctggtcttgaactcctgacctccggtgatcygcctaccttggcctcccagaatgctgggattataggcgtgagccactgaccgcacccagctttttttttttttttttttttgagatgggttttgctctgt

SEQ ID NO: 14008 - DNA, 201 bp, Homo sapiens
ctgcaacctccacctcctgggttcaagcaattctcctgcctcagcctccagagtagctggaattacaggcaaccgccaccatgcctgactaatttttgtakttttagtagagatagggtttcaccatgttggccaggctggtcttgaactcctgacctccggtgatccgcctaccttggcctcccagaatgctgggattat

SEQ ID NO: 14009 - DNA, 201 bp, Homo sapiens
tgggcgccctgcagaggctgctgcagtttgggatcgtggtctatgtggtagggtaagagagaagagcttttggccaggctggaggggcaagggaagaggtsgggggtggggcttggtcctgctgggttgaagttgagggttgggctgtttaggggctggagtggaagggggcagattgggacggggttggggagagctagg

SEQ ID NO: 14010 - DNA, 201 bp, Homo sapiens
atctggatcctgctttagtggaagtgtccctttaacagcaactggcctggcctggctcgggccctgctttgcctcctgttcagctgcggctgcagctgccrtgctgactcatgtgcccgcagctagcaggagctggcagcatgggctccccaggggctacgacaggctgggggcttctggattataagacggagaagtatg

SEQ ID NO: 14011 - DNA, 201 bp, Homo sapiens
ccaacaaggaaggagagtggtggggtagggtggatgaggaagggacttgtatccagcatcagctgcacagcagagggtctaactccaccccacataccccstcctgtgatgaggcccctcctctatccaccagcaacaccagcaggacccaggtgacatggcccagctttcaggggtggaggcacatccctgaggaaaggg

SEQ ID NO: 14012 - DNA, 201 bp, Homo sapiens
ccccctccctgtgtgcccaccagcttctgtgtcaagcggttaaaaccgcctacctcctggtactgtagagactgctgtggtggggggcagccaccccatcratgattatgtctggcagtgatatcaccacccacttcagaagccctcactgccccattgccaggattggcaataatagcccaggtgactgtgcatggagca

SEQ ID NO: 14013 - DNA, 201 bp, Homo sapiens
taatcccagcactttgggaggccgaggcgggcggatcactaggtcaggagatcaagaccatcctggctaacacggtgaaaccccggctctactaaaaaatwaaaaaaaaaaaaaaaaaaacgttagccaggcgcgatggcgggcacctgtagtcccagctactcgggaggctgaagcaggagaatggcatgaaccccggag

SEQ ID NO: 14014 - DNA, 201 bp, Homo sapiens
aaaaaaaaagcaaatggttgttaaagaatgtatggttggctgggtgcggtggctcacacctgtaatcccagcattttgggaggccaaggcgggtggatcamctgaggtcaggagttcaagaccagcctgcccaacacggtgaaacctcatctctactaaaaatacaaaaaattggtcaggcgtggtggctcatgcctgtaa

SEQ ID NO: 14015 - DNA, 201 bp, Homo sapiens
tggggagtacaggggacagactcaggggcactcccatggctgttgtctcccggggcctctccctgtaagcctggacccagtgtccttccagtggtacctgsggccccaggccaccgtgcagcaggttcagctctggggcactcccttggcacagaaagcagaagatgggcacaatgctatggatccagcaagacctcaggt

SEQ ID NO: 14016 - DNA, 201 bp, Homo sapiens
aaacaaacaaaaaaaaagcaaatggttgttaaagaatgtatggttggctgggtgcggtggctcacacctgtaatcccagcattttgggaggccaaggcggrtggatcacctgaggtcaggagttcaagaccagcctgcccaacacggtgaaacctcatctctactaaaaatacaaaaaattggtcaggcgtggtggctcat

SEQ ID NO: 14017 - DNA, 201 bp, Homo sapiens
gtgtgttccattgtactccagcctgggtgacagggcgagactccatctcaaacaaacaaacaaaaaaaaagcaaatggttgttaaagaatgtatggttggstgggtgcggtggctcacacctgtaatcccagcattttgggaggccaaggcgggtggatcacctgaggtcaggagttcaagaccagcctgcccaacacggt

SEQ ID NO: 14018 - DNA, 201 bp, Homo sapiens
ggaaaagactcttcgaaaatagcatatccgaagctgggtgcagtgactcacgcctgtgattccagcacttcgggaggccaaggcggttggatcacttgagktcaggagctcgagaccagcttagccaacatggtgaaaccctgtgtctaccaaaaatacaaaaattagccaggcttggtggcgcatgcctgtaattccagc

SEQ ID NO: 14019 - DNA, 201 bp, Homo sapiens
aaaaaccagagcccgcactcactctcgtactggggaggtggacttcagggagggttatctggaggaggaatctctcaaagtacaacacaggagaaagacagtatcgcaatacagaaattttattttttattttattattattttcctgagaccggagtctcgctctgtcgcccaggctggagtgcagtggcgcgatctcgg

SEQ ID NO: 14020 - DNA, 201 bp, Homo sapiens
caaaaaccagagcccgcactcactctcgtactggggaggtggacttcagggagggttatctggaggaggaatctctcaaagtacaacacaggagaaagacagtatcgcaatacagaaattttattttttattttattattattttcctgagaccggagtctcgctctgtcgcccaggctggagtgcagtggcgcgatctcg

SEQ ID NO: 14021 - DNA, 201 bp, Homo sapiens
gacaaaaaccagagcccgcactcactctcgtactggggaggtggacttcagggagggttatctggaggaggaatctctcaaagtacaacacaggagaaagacagtatcgcaatacagaaattttattttttattttattattattttcctgagaccggagtctcgctctgtcgcccaggctggagtgcagtggcgcgatct

SEQ ID NO: 14022 - DNA, 201 bp, Homo sapiens; identical to SEQ ID NO: 951

SEQ ID NO: 14023 - DNA, 201 bp, Homo sapiens; identical to SEQ ID NO: 952

SEQ ID NO: 14024 - DNA, 201 bp, Homo sapiens
cctgtcaccaaggctcctccaacatgcgggaggaggcttagcagacttgcgctgcaccagcgaatctgcctgggctgctcctgtcccacccaccctcactragatccatgtaaggggctcctcttcccacctggaacttgtgagtggggacccatgatgtatgggtctcacctgacttgaggtgaattttggagtgaaggg

SEQ ID NO: 14025 - DNA, 201 bp, Homo sapiens
tgagccaccgcgcccggcccatatcaagttttttttttttttttttttttttttttttttttgagatggagtcttgctctgtcattcaggctggagtgcartggcacaatctcggctcactgcaacctccacctcctgggttcaagcaattctcctgcctcagcctccagagtagctggaattacaggcaaccgccaccat

SEQ ID NO: 14026 - DNA, 201 bp, Homo sapiens
aggtgtgagccaccgcgcccggcccatatcaagttttttttttttttttttttttttttttttttttgagatggagtcttgctctgtcattcaggctggartgcagtggcacaatctcggctcactgcaacctccacctcctgggttcaagcaattctcctgcctcagcctccagagtagctggaattacaggcaaccgcc

SEQ ID NO: 14027 - DNA, 201 bp, Homo sapiens
gcatcagcctcccaaagtattgggattacaggtgtgagccaccgcgcccggcccatatcaagttttttttttttttttttttttttttttttttttgagawggagtcttgctctgtcattcaggctggagtgcagtggcacaatctcggctcactgcaacctccacctcctgggttcaagcaattctcctgcctcagcctc

SEQ ID NO: 14028 - DNA, 201 bp, Homo sapiens
gggcctttgacccactaagtagttcagaatccatttggagagcatgctggcgtgggggcttggggctccagctgcgcccttccctgtccttccctgggagrgtgcgggcggaccagcttcctttagtcagctccttaaccaggccccagctacttgtttgcggccccctactactacggcttctacaacaaccggctgcag

SEQ ID NO: 14029 - DNA, 201 bp, Homo sapiens
gactgtgcatggagcacttacatgggtcacacactctgctgatcacttcaggagtgcatttcacttcatgctcaccacagccccaagcctatgaggtcttktgggggccatttcacagattggaaactgagctgctttcataggtcaccccgttttctcagtggcagagacagcatttggattcagcttcaatgaactccc

SEQ ID NO: 14030 - DNA, 201 bp, Homo sapiens
ctgcatcagcctcccaaagtattgggattacaggtgtgagccaccgcgcccggcccatatcaagttttttttttttttttttttttttttttttttttgaratggagtcttgctctgtcattcaggctggagtgcagtggcacaatctcggctcactgcaacctccacctcctgggttcaagcaattctcctgcctcagcc

SEQ ID NO: 14031 - DNA, 201 bp, Homo sapiens
ggcctccccagccacctctttaaagcagggggtccccattcttctctagaagcataaactatttgtttcttttgcagtgccaataattactcagaatgatrttgttaacattgtcccttgaggtcaggaacttggttttgttcaaggtggatccctggtggctaagtcagtgcccagcacatacagcagcgcgcaatgaga

SEQ ID NO: 14032 - DNA, 201 bp, Homo sapiens
ttaagaattgcttctatattttttggcattatctgttatctatcgacaattaatatcctttgacgacttttttttttcttttcttctccttcttcctcctyctcctccttctttgttgttgttgttgagacagggtctagctctgttgcccaggctggagtgcagtggtgcaatctcggctcactgcaacctttgtctccc

SEQ ID NO: 14033 - DNA, 201 bp, Homo sapiens
ccaacactgtgttttaagaattgcttctatattttttggcattatctgttatctatcgacaattaatatcctttgacgacttttttttttcttttcttctycttcttcctccttctcctccttctttgttgttgttgttgagacagggtctagctctgttgcccaggctggagtgcagtggtgcaatctcggctcactgca

SEQ ID NO: 14034 - DNA, 201 bp, Homo sapiens; identical to SEQ ID NO: 929
  misc_feature (1)...(201): n = A,T,C or G, or insertion/deletion polymorphism (see Tables 1-2)

SEQ ID NO: 14035 - DNA, 201 bp, Homo sapiens
tgcctgccgcaccctcccctcactattcttcgccttcttcagcctcagcttccacggaatccatgcccacatcttcataatcctccagagctgccagatcytcgcgggcctcggagaattcccccactgccatgccctcccccacgtaccagtgcactaaggcgcacttggccgaacttatggtccaggcaggcccaggcc

SEQ ID NO: 14036 - DNA, 201 bp, Homo sapiens
ataccctttttgccacggcctacagccctgcagccctctgccctctccaccccacagcctggccacgcttccctggctccctagcctaggcacactgctgyctgccagtctgggaaacaggcccgcatgctcactgttcctctgcttgaaatgctctccctctgatcttgccatggctgactccttcccaccctgcacatt

SEQ ID NO: 14037 - DNA, 201 bp, Homo sapiens; identical to SEQ ID NO: 930

SEQ ID NO: 14038 - DNA, 201 bp, Homo sapiens; identical to SEQ ID NO: 931

SEQ ID NO: 14039 - DNA, 201 bp, Homo sapiens; identical to SEQ ID NO: 932

SEQ ID NO: 14040 - DNA, 201 bp, Homo sapiens
cctgccttggcctcccaaagtgctgggattacaggcatgagccaccgtgcccagcctcagcctctgttttctaaagtgtaagatactggtaatattgcccmatgaactttaaagggtagtggttaaggtatgagggaacataaagtatttggtaaagtataaggcggtaggaaataaattactaaaattattatccttgca

SEQ ID NO: 14041 - DNA, 201 bp, Homo sapiens
tgtgcgttcagaggcaagttatggccattccacatgggaaaaagaagacacatacctgtgactttctcatatcatttcaatctggaatgatcctggaactkgcaactcctcaaacaccttcagaactcattgagacttataaatgtgggatctatagctttgcctaatgtgggaaaccactgtagacaggggctcttaact

SEQ ID NO: 14042 - DNA, 201 bp, Homo sapiens
cagcctcccgaatagctgggaccacaggtgtctgccaccacacccggctaattttttgtattttttagtagagccggggtttcaccgtgttagccaggacsgtctcaatctcctgacctcgtgatctgcctgccttggcctcccaaagtgctgggattacaggcatgagccaccgtgcccagcctcagcctctgttttcta

SEQ ID NO: 14043 - DNA, 201 bp, Homo sapiens
tgtaacactaattgaaagaaaaattcctctactcaagttgagaggcttaataattagacacagaatggagggtttcacctcctacctgtaacatcttacawctaaggtctgtaatcctcctatgtaacatgtaatgaacattccaggttggtgtaactgttgtagattttacccttctttttcctcttttttttttttttt

SEQ ID NO: 14044 - DNA, 201 bp, Homo sapiens
agtaatgtggaggacagaccaggacctgcagtcagataatctctgatttctctctgcatcacttgctgcctgtgaggctccagacacctaaagctatctcmgcctttgttttcttttcttttttctttttctttcttttttttttttttgagatgtagtctcgctctgttgcccaggctggagtgcagtggtgcaatctcg

SEQ ID NO: 14045 - DNA, 201 bp, Homo sapiens
ctctggggcactcccttggcacagaaagcagaagatgggcacaatgctatggatccagcaagacctcaggtacagggtgtccccgaccagttctccaagtscatgggtgcctggtaggagacagggggatgaatgtgaacccctgcatggctatagccacctgcctcctcccctgccctgcatcactacctggcctatttt

SEQ ID NO: 14046 - DNA, 201 bp, Homo sapiens; identical to SEQ ID NO: 928

SEQ ID NO: 14047 - DNA, 201 bp, Homo sapiens
gcctcctccaaatccctcctggaggggcctacccagaagcctccttgaaccagtctgcaaccctgctctatgctgacccttgtcactgaaccctgatctakacttatatgaataaatgaaattacatgccaagggccctaaaaagcaaattttacgaaattgtgtggcagtttctgggactagaatgaatttcatttgtgc

SEQ ID NO: 14048 - DNA, 201 bp, Homo sapiens
aatgtaacactaattgaaagaaaaattcctctactcaagttgagaggcttaataattagacacagaatggagggtttcacctcctacctgtaacatcttayaactaaggtctgtaatcctcctatgtaacatgtaatgaacattccaggttggtgtaactgttgtagattttacccttctttttcctcttttttttttttt

SEQ ID NO: 14049 - DNA, 201 bp, Homo sapiens
attaattcaacaaggtccatctaaggctggactatcttctggggggaggagaggctgtgactttatctccccacagactagcctccctactgtctcacaakacttagttacaataggaaacctctgcacagcatagcatctcccacagtgcctgccagctaaggatgtcttcaccttccaaatgtaacactaattgaaaga

SEQ ID NO: 14050 - DNA, 201 bp, Homo sapiens
tgttctgtcacccaggctggagtgcagtggcgcagtcatggctcactgcaacatctgcctcccagtctcaggtgatcctcctacctcagcctcccaagtarctggaactataggtgtgtgccatcacacccggctaattttttgtattttgtgtagagatggggtttcaccatgttcccccaatggatcctgaactcctgg

SEQ ID NO: 14051 - DNA, 201 bp, Homo sapiens
agatggtttgcatcaacgtgagatgaaaaagagagatgatctgtgtcaaggtgttgtaaagtggctgagagagggccagacagattcaagaagttgtgtgygttcagaggcaagttatggccattccacatgggaaaaagaagacacatacctgtgactttctcatatcatttcaatctggaatgatcctggaacttgcaa

SEQ ID NO: 14052 - DNA, 201 bp, Homo sapiens
gagattaatatgccttgaatatgtacagaatgtttttcaaaggacagaagcagctctggggaagaagaggacttcagcttttcagtcttctgcattctttyagtattttgccacatatcaggttttgttttgtttttgagacagggtctcactctgtcacccagccttgagtgcagtggtgtgatcttggctcactgcaac

SEQ ID NO: 14053 - DNA, 201 bp, Homo sapiens
gatcacatcactgcactccagcctgagtgacaagagtgaaactccgtctcaaaacaaacaaacaaacaagaatgtatggtaaatcacactaagactgacaraaaggaacttaagagcaaagagaattaattcaacaaggtccatctaaggctggactatcttctggggggaggagaggctgtgactttatctccccacaga

SEQ ID NO: 14054 - DNA, 201 bp, Homo sapiens
agggtagcatcatgccggaggaggacaaacgcctgctgaggtggtgaccctgccttgccctgccaagcacgtagcagttagcaccaactagatacagacayactccacaggagttggaaggggcagagagaagggttcgtaccctgatcagggagtgtcctcccacaactctaaggccaagcctatcagcccttccaagtg

SEQ ID NO: 14055 - DNA, 201 bp, Homo sapiens
tctccatgttctggccacctcttcctagatttccagggactagcttgttggggctttactacctgctgacatgacccaggaggttgatgattgtcatcatyatccccgtttttcaaatagagatggtagtgaagggggcggggagagggttgtccagcttacccaccaggctgatggggcctgtggacagaagcctgtcat

SEQ ID NO: 14056 - DNA, 201 bp, Homo sapiens; identical to SEQ ID NO: 934

SEQ ID NO: 14057 - DNA, 201 bp, Homo sapiens; identical to SEQ ID NO: 935

SEQ ID NO: 14058 - DNA, 201 bp, Homo sapiens; identical to SEQ ID NO: 936

SEQ ID NO: 14059 - DNA, 201 bp, Homo sapiens
ttggcctcagaaatgggagctcattaaaaatcagagctgtggaccagttccaacactgtgttttaagaattgcttctatattttttggcattatctgttayctatcgacaattaatatcctttgacgacttttttttttcttttcttctccttcttcctccttctcctccttctttgttgttgttgttgagacagggtcta

SEQ ID NO: 14060 - DNA, 201 bp, Homo sapiens; identical to SEQ ID NO: 937

SEQ ID NO: 14061 - DNA, 201 bp, Homo sapiens
ccgggttcacgccattcggctgcctcaccctccacagtagctgggactacaagcgcccgccaccacgcccggctaatttgcaatacggaaattttaatagrtaattagctctcctagcgttatggtggggaatacagagggatggttgcctgccgcaccctcccctcactattcttcgccttcttcagcctcagcttccac

SEQ ID NO: 14062 - DNA, 201 bp, Homo sapiens
ctgccccagacccagcacctaccgcagatgctgctgcttttgctcagggcacctgccagggcctctgtacctgccccatagagcccactgtcccaaaagtycagccacttgacatatggattggagctcaatgaggaagccagagaccggcgccctgggacagacagagcaaacacactggccactatcctggctcatgct

SEQ ID NO: 14063 - DNA, 201 bp, Homo sapiens
atacagaaattttattttttattttattattattttcctgagaccggagtctcgctctgtcgcccaggctggagtgcagtggcgcgatctcggctcactgyaaactccgcctcccgggttcacgccattcggctgcctcaccctccacagtagctgggactacaagcgcccgccaccacgcccggctaatttgcaatacgg

SEQ ID NO: 14064 - DNA, 201 bp, Homo sapiens
gagttaagtcgcaagcggctctccgggcatccggaggagcctcgcgcctccagccgccgctcctccccaaggggctctggcctgtcgggtcccccccggcscgttgtcgccccaaccccgtcccagccgattctcttgacttctgtcagcggcactcacgctctggccattgctgcgccgccgaagtctcgcgaggggtag

SEQ ID NO: 14065 - DNA, 201 bp, Homo sapiens; identical to SEQ ID NO: 940

SEQ ID NO: 14066 - DNA, 201 bp, Homo sapiens; identical to SEQ ID NO: 942

SEQ ID NO: 14067 - DNA, 201 bp, Homo sapiens
cccatattacccatacagtaaaacacatgaaaaagaatgagaaccctgtcttgggatataaatacatccaaggtatattgtatactttgtaaaaagaaaartgagttgaagtctatgtatttatgtgtaaaaaaatccatgtaataacatacacaggctagaaccttgggcagctagggtagcatcatgccggaggaggac

SEQ ID NO: 14068 - DNA, 201 bp, Homo sapiens
cctggcccctactcacaccatcctgccccttcagagaaccctgtggggcacggagctgcgctagcagggctgactgccacctgtctaccagtagctctgargggtgagagccaggctccctgttctccttggcaaagagcttggactgagccctctaggagctgcagccactgtctggggcagcaagcttagtactcagag

SEQ ID NO: 14069 - DNA, 201 bp, Homo sapiens; identical to SEQ ID NO: 950

SEQ ID NO: 14070 - DNA, 201 bp, Homo sapiens; identical to SEQ ID NO: 953

SEQ ID NO: 14071 - DNA, 201 bp, Homo sapiens; identical to SEQ ID NO: 10142

SEQ ID NO: 14072 - DNA, 201 bp, Homo sapiens; identical to SEQ ID NO: 10691

SEQ ID NO: 14073 - DNA, 201 bp, Homo sapiens; identical to SEQ ID NO: 10144

SEQ ID NO: 14074 - DNA, 201 bp, Homo sapiens; identical to SEQ ID NO: 10145

SEQ ID NO: 14075 - DNA, 201 bp, Homo sapiens; identical to SEQ ID NO: 9805

SEQ ID NO: 14076 - DNA, 201 bp, Homo sapiens; identical to SEQ ID NO: 9808

SEQ ID NO: 14077 - DNA, 201 bp, Homo sapiens; identical to SEQ ID NO: 9809

SEQ ID NO: 14078 - DNA, 201 bp, Homo sapiens; identical to SEQ ID NO: 9810

SEQ ID NO: 14079 - DNA, 201 bp, Homo sapiens; identical to SEQ ID NO: 9529

SEQ ID NO: 14080 - DNA, 201 bp, Homo sapiens; identical to SEQ ID NO: 9603

SEQ ID NO: 14081 - DNA, 201 bp, Homo sapiens; identical to SEQ ID NO: 954

SEQ ID NO: 14082 - DNA, 201 bp, Homo sapiens; identical to SEQ ID NO: 9708

SEQ ID NO: 14083 - DNA, 201 bp, Homo sapiens; identical to SEQ ID NO: 10697

SEQ ID NO: 14084 - DNA, 201 bp, Homo sapiens; identical to SEQ ID NO: 9710

SEQ ID NO: 14085 - DNA, 201 bp, Homo sapiens; identical to SEQ ID NO: 9711

SEQ ID NO: 14086 - DNA, 201 bp, Homo sapiens; identical to SEQ ID NO: 9605

SEQ ID NO: 14087 - DNA, 201 bp, Homo sapiens; identical to SEQ ID NO: 9546

SEQ ID NO: 14088 - DNA, 201 bp, Homo sapiens; identical to SEQ ID NO: 9551

SEQ ID NO: 14089 - DNA, 201 bp, Homo sapiens; identical to SEQ ID NO: 9555

SEQ ID NO: 14090 - DNA, 201 bp, Homo sapiens; identical to SEQ ID NO: 959

SEQ ID NO: 14091 - DNA, 201 bp, Homo sapiens; identical to SEQ ID NO: 10126

SEQ ID NO: 14092 - DNA, 201 bp, Homo sapiens; identical to SEQ ID NO: 961

SEQ ID NO: 14093 - DNA, 201 bp, Homo sapiens; identical to SEQ ID NO: 9535

SEQ ID NO: 14094 - DNA, 201 bp, Homo sapiens; identical to SEQ ID NO: 9537

SEQ ID NO: 14095 - DNA, 201 bp, Homo sapiens; identical to SEQ ID NO: 956

SEQ ID NO: 14096 - DNA, 201 bp, Homo sapiens; identical to SEQ ID NO: 958

SEQ ID NO: 14097 - DNA, 201 bp, Homo sapiens; identical to SEQ ID NO: 9694

SEQ ID NO: 14098 - DNA, 201 bp, Homo sapiens; identical to SEQ ID NO: 9695

SEQ ID NO: 14099 - DNA, 201 bp, Homo sapiens; identical to SEQ ID NO: 9842

SEQ ID NO: 14100 - DNA, 201 bp, Homo sapiens; identical to SEQ ID NO: 10578

SEQ ID NO: 14101 - DNA, 201 bp, Homo sapiens; identical to SEQ ID NO: 9438

SEQ ID NO: 14102 - DNA, 201 bp, Homo sapiens; identical to SEQ ID NO: 960

SEQ ID NO: 14103 - DNA, 201 bp, Homo sapiens; identical to SEQ ID NO: 9891

SEQ ID NO: 14104 - DNA, 201 bp, Homo sapiens; identical to SEQ ID NO: 9892

SEQ ID NO: 14105 - DNA, 201 bp, Homo sapiens; identical to SEQ ID NO: 10588

SEQ ID NO: 14106 - DNA, 201 bp, Homo sapiens; identical to SEQ ID NO: 10590

SEQ ID NO: 14107 - DNA, 201 bp, Homo sapiens; identical to SEQ ID NO: 9589

SEQ ID NO: 14108 - DNA, 201 bp, Homo sapiens; identical to SEQ ID NO: 10593

SEQ ID NO: 14109 - DNA, 201 bp, Homo sapiens; identical to SEQ ID NO: 9590

SEQ ID NO: 14110 - DNA, 201 bp, Homo sapiens; identical to SEQ ID NO: 10595

SEQ ID NO: 14111 - DNA, 201 bp, Homo sapiens; identical to SEQ ID NO: 10596

SEQ ID NO: 14112 - DNA, 201 bp, Homo sapiens; identical to SEQ ID NO: 10598

SEQ ID NO: 14113 - DNA, 201 bp, Homo sapiens; identical to SEQ ID NO: 10383

SEQ ID NO: 14114 - DNA, 201 bp, Homo sapiens; identical to SEQ ID NO: 10384

SEQ ID NO: 14115 - DNA, 201 bp, Homo sapiens; identical to SEQ ID NO: 10385

SEQ ID NO: 14116 - DNA, 201 bp, Homo sapiens; identical to SEQ ID NO: 10386

SEQ ID NO: 14117 - DNA, 201 bp, Homo sapiens; identical to SEQ ID NO: 10387

SEQ ID NO: 14118 - DNA, 201 bp, Homo sapiens; identical to SEQ ID NO: 10389

SEQ ID NO: 14119 - DNA, 201 bp, Homo sapiens; identical to SEQ ID NO: 10391

SEQ ID NO: 14120 - DNA, 201 bp, Homo sapiens; identical to SEQ ID NO: 10393

SEQ ID NO: 14121 - DNA, 201 bp, Homo sapiens; identical to SEQ ID NO: 10395

SEQ ID NO: 14122 - DNA, 201 bp, Homo sapiens; identical to SEQ ID NO: 10397

SEQ ID NO: 14123 - DNA, 201 bp, Homo sapiens; identical to SEQ ID NO: 9606

SEQ ID NO: 14124 - DNA, 201 bp, Homo sapiens; identical to SEQ ID NO: 9607

SEQ ID NO: 14125 - DNA, 201 bp, Homo sapiens; identical to SEQ ID NO: 9474

SEQ ID NO: 14126 - DNA, 201 bp, Homo sapiens; identical to SEQ ID NO: 9608

SEQ ID NO: 14127 - DNA, 201 bp, Homo sapiens; identical to SEQ ID NO: 10413

SEQ ID NO: 14128 - DNA, 201 bp, Homo sapiens; identical to SEQ ID NO: 10083

SEQ ID NO: 14129 - DNA, 201 bp, Homo sapiens; identical to SEQ ID NO: 9492

SEQ ID NO: 14130 - DNA, 201 bp, Homo sapiens; identical to SEQ ID NO: 9494

SEQ ID NO: 14131 - DNA, 201 bp, Homo sapiens; identical to SEQ ID NO: 9496

SEQ ID NO: 14132 - DNA, 201 bp, Homo sapiens; identical to SEQ ID NO: 10425

SEQ ID NO: 14133 - DNA, 201 bp, Homo sapiens; identical to SEQ ID NO: 10427

SEQ ID NO: 14134 - DNA, 201 bp, Homo sapiens; identical to SEQ ID NO: 9497

SEQ ID NO: 14135 - DNA, 201 bp, Homo sapiens; identical to SEQ ID NO: 10428

SEQ ID NO: 14136 - DNA, 201 bp, Homo sapiens; identical to SEQ ID NO: 10429

SEQ ID NO: 14137 - DNA, 201 bp, Homo sapiens; identical to SEQ ID NO: 10535

SEQ ID NO: 14138 - DNA, 201 bp, Homo sapiens; identical to SEQ ID NO: 10537

SEQ ID NO: 14139 - DNA, 201 bp, Homo sapiens; identical to SEQ ID NO: 10430

SEQ ID NO: 14140 - DNA, 201 bp, Homo sapiens; identical to SEQ ID NO: 10539

SEQ ID NO: 14141 - DNA, 201 bp, Homo sapiens; identical to SEQ ID NO: 10431

SEQ ID NO: 14142 - DNA, 201 bp, Homo sapiens; identical to SEQ ID NO: 9789

SEQ ID NO: 14143 - DNA, 201 bp, Homo sapiens; identical to SEQ ID NO: 10433

SEQ ID NO: 14144 - DNA, 201 bp, Homo sapiens; identical to SEQ ID NO: 9500

SEQ ID NO: 14145 - DNA, 201 bp, Homo sapiens; identical to SEQ ID NO: 965

SEQ ID NO: 14146 - DNA, 201 bp, Homo sapiens; identical to SEQ ID NO: 10543

SEQ ID NO: 14147 - DNA, 201 bp, Homo sapiens; identical to SEQ ID NO: 10544

SEQ ID NO: 14148 - DNA, 201 bp, Homo sapiens; identical to SEQ ID NO: 10328

SEQ ID NO: 14149 - DNA, 201 bp, Homo sapiens; identical to SEQ ID NO: 10329

SEQ ID NO: 14150 - DNA, 201 bp, Homo sapiens; identical to SEQ ID NO: 10558

SEQ ID NO: 14151 - DNA, 201 bp, Homo sapiens; identical to SEQ ID NO: 9913

SEQ ID NO: 14152 - DNA, 201 bp, Homo sapiens; identical to SEQ ID NO: 10560

SEQ ID NO: 14153 - DNA, 201 bp, Homo sapiens; identical to SEQ ID NO: 9917

SEQ ID NO: 14154 - DNA, 201 bp, Homo sapiens; identical to SEQ ID NO: 964

SEQ ID NO: 14155 - DNA, 201 bp, Homo sapiens; identical to SEQ ID NO: 9562

SEQ ID NO: 14156 - DNA, 201 bp, Homo sapiens; identical to SEQ ID NO: 9563

SEQ ID NO: 14157 - DNA, 201 bp, Homo sapiens; identical to SEQ ID NO: 10473

SEQ ID NO: 14158 - DNA, 201 bp, Homo sapiens; identical to SEQ ID NO: 9564

SEQ ID NO: 14159 - DNA, 201 bp, Homo sapiens; identical to SEQ ID NO: 10347

SEQ ID NO: 14160 - DNA, 201 bp, Homo sapiens; identical to SEQ ID NO: 9565

SEQ ID NO: 14161 - DNA, 201 bp, Homo sapiens; identical to SEQ ID NO: 10348

SEQ ID NO: 14162 - DNA, 201 bp, Homo sapiens; identical to SEQ ID NO: 9567

SEQ ID NO: 14163 - DNA, 201 bp, Homo sapiens; identical to SEQ ID NO: 10349

SEQ ID NO: 14164 - DNA, 201 bp, Homo sapiens; identical to SEQ ID NO: 9568

SEQ ID NO: 14165 - DNA, 201 bp, Homo sapiens; identical to SEQ ID NO: 9569

SEQ ID NO: 14166 - DNA, 201 bp, Homo sapiens; identical to SEQ ID NO: 9570

SEQ ID NO: 14167 - DNA, 201 bp, Homo sapiens; identical to SEQ ID NO: 10350

SEQ ID NO: 14168 - DNA, 201 bp, Homo sapiens; identical to SEQ ID NO: 10351

SEQ ID NO: 14169 - DNA, 201 bp, Homo sapiens; identical to SEQ ID NO: 10644

SEQ ID NO: 14170 - DNA, 201 bp, Homo sapiens; identical to SEQ ID NO: 10352

SEQ ID NO: 14171 - DNA, 201 bp, Homo sapiens; identical to SEQ ID NO: 9571

SEQ ID NO: 14172 - DNA, 201 bp, Homo sapiens; identical to SEQ ID NO: 10354

SEQ ID NO: 14173 - DNA, 201 bp, Homo sapiens; identical to SEQ ID NO: 10356

SEQ ID NO: 14174 - DNA, 201 bp, Homo sapiens; identical to SEQ ID NO: 962

SEQ ID NO: 14175 - DNA, 201 bp, Homo sapiens; identical to SEQ ID NO: 10360

SEQ ID NO: 14176 - DNA, 201 bp, Homo sapiens; identical to SEQ ID NO: 9576

SEQ ID NO: 14177 - DNA, 201 bp, Homo sapiens; identical to SEQ ID NO: 9577

SEQ ID NO: 14178 - DNA, 201 bp, Homo sapiens; identical to SEQ ID NO: 9578

SEQ ID NO: 14179 - DNA, 201 bp, Homo sapiens; identical to SEQ ID NO: 9579

SEQ ID NO: 14180 - DNA, 201 bp, Homo sapiens; identical to SEQ ID NO: 9580

SEQ ID NO: 14181 - DNA, 201 bp, Homo sapiens; identical to SEQ ID NO: 10377

SEQ ID NO: 14182 - DNA, 201 bp, Homo sapiens; identical to SEQ ID NO: 9847

SEQ ID NO: 14183 - DNA, 201 bp, Homo sapiens; identical to SEQ ID NO: 10653

SEQ ID NO: 14184 - DNA, 201 bp, Homo sapiens; identical to SEQ ID NO: 9848

SEQ ID NO: 14185 - DNA, 201 bp, Homo sapiens; identical to SEQ ID NO: 10045

SEQ ID NO: 14186 - DNA, 201 bp, Homo sapiens; identical to SEQ ID NO: 9849

SEQ ID NO: 14187 - DNA, 201 bp, Homo sapiens; identical to SEQ ID NO: 10048

SEQ ID NO: 14188 - DNA, 201 bp, Homo sapiens; identical to SEQ ID NO: 9850

SEQ ID NO: 14189 - DNA, 201 bp, Homo sapiens; identical to SEQ ID NO: 10051

SEQ ID NO: 14190 - DNA, 201 bp, Homo sapiens; identical to SEQ ID NO: 9851

SEQ ID NO: 14191 - DNA, 201 bp, Homo sapiens; identical to SEQ ID NO: 9852

SEQ ID NO: 14192 - DNA, 201 bp, Homo sapiens; identical to SEQ ID NO: 9408

SEQ ID NO: 14193 - DNA, 201 bp, Homo sapiens; identical to SEQ ID NO: 10295

SEQ ID NO: 14194 - DNA, 201 bp, Homo sapiens; identical to SEQ ID NO: 9761

SEQ ID NO: 14195 - DNA, 201 bp, Homo sapiens; identical to SEQ ID NO: 9763

SEQ ID NO: 14196 - DNA, 201 bp, Homo sapiens; identical to SEQ ID NO: 9764

SEQ ID NO: 14197 - DNA, 201 bp, Homo sapiens; identical to SEQ ID NO: 970

SEQ ID NO: 14198 - DNA, 201 bp, Homo sapiens; identical to SEQ ID NO: 9765

SEQ ID NO: 14199 - DNA, 201 bp, Homo sapiens; identical to SEQ ID NO: 9767

SEQ ID NO: 14200 - DNA, 201 bp, Homo sapiens; identical to SEQ ID NO: 9768

SEQ ID NO: 14201 - DNA, 201 bp, Homo sapiens; identical to SEQ ID NO: 10060

SEQ ID NO: 14202 - DNA, 201 bp, Homo sapiens; identical to SEQ ID NO: 10298

SEQ ID NO: 14203 - DNA, 201 bp, Homo sapiens; identical to SEQ ID NO: 10299

SEQ ID NO: 14204 - DNA, 201 bp, Homo sapiens; identical to SEQ ID NO: 9870

SEQ ID NO: 14205 - DNA, 201 bp, Homo sapiens; identical to SEQ ID NO: 10300

SEQ ID NO: 14206 - DNA, 201 bp, Homo sapiens; identical to SEQ ID NO: 10301

SEQ ID NO: 14207 - DNA, 201 bp, Homo sapiens; identical to SEQ ID NO: 10302

SEQ ID NO: 14208 - DNA, 201 bp, Homo sapiens; identical to SEQ ID NO: 10304

SEQ ID NO: 14209 - DNA, 201 bp, Homo sapiens; identical to SEQ ID NO: 9432

SEQ ID NO: 14210 - DNA, 201 bp, Homo sapiens; identical to SEQ ID NO: 10305

SEQ ID NO: 14211 - DNA, 201 bp, Homo sapiens; identical to SEQ ID NO: 10306

SEQ ID NO: 14212 - DNA, 201 bp, Homo sapiens; identical to SEQ ID NO: 10307

SEQ ID NO: 14213 - DNA, 201 bp, Homo sapiens; identical to SEQ ID NO: 10308

SEQ ID NO: 14214 - DNA, 201 bp, Homo sapiens; identical to SEQ ID NO: 10309

SEQ ID NO: 14215 - DNA, 201 bp, Homo sapiens; identical to SEQ ID NO: 10234

SEQ ID NO: 14216 - DNA, 201 bp, Homo sapiens; identical to SEQ ID NO: 10311

SEQ ID NO: 14217 - DNA, 201 bp, Homo sapiens; identical to SEQ ID NO: 9886

SEQ ID NO: 14218 - DNA, 201 bp, Homo sapiens; identical to SEQ ID NO: 10680

SEQ ID NO: 14219 - DNA, 201 bp, Homo sapiens; identical to SEQ ID NO: 969

SEQ ID NO: 14220 - DNA, 201 bp, Homo sapiens; identical to SEQ ID NO: 9790

SEQ ID NO: 14221 - DNA, 201 bp, Homo sapiens; identical to SEQ ID NO: 10681

SEQ ID NO: 14222 - DNA, 201 bp, Homo sapiens; identical to SEQ ID NO: 9791

SEQ ID NO: 14223 - DNA, 201 bp, Homo sapiens; identical to SEQ ID NO: 10682

SEQ ID NO: 14224 - DNA, 201 bp, Homo sapiens; identical to SEQ ID NO: 9792

SEQ ID NO: 14225 - DNA, 201 bp, Homo sapiens; identical to SEQ ID NO: 10315

SEQ ID NO: 14226 - DNA, 201 bp, Homo sapiens; identical to SEQ ID NO: 9793

SEQ ID NO: 14227 - DNA, 201 bp, Homo sapiens; identical to SEQ ID NO: 10683

SEQ ID NO: 14228 - DNA, 201 bp, Homo sapiens; identical to SEQ ID NO: 9794

SEQ ID NO: 14229 - DNA, 201 bp, Homo sapiens; identical to SEQ ID NO: 9795

SEQ ID NO: 14230 - DNA, 201 bp, Homo sapiens; identical to SEQ ID NO: 9797

SEQ ID NO: 14231 - DNA, 201 bp, Homo sapiens; identical to SEQ ID NO: 9508

SEQ ID NO: 14232 - DNA, 201 bp, Homo sapiens; identical to SEQ ID NO: 10324

SEQ ID NO: 14233 - DNA, 201 bp, Homo sapiens; identical to SEQ ID NO: 9509

SEQ ID NO: 14234 - DNA, 201 bp, Homo sapiens; identical to SEQ ID NO: 10327

SEQ ID NO: 14235 - DNA, 201 bp, Homo sapiens; identical to SEQ ID NO: 10330

SEQ ID NO: 14236 - DNA, 201 bp, Homo sapiens; identical to SEQ ID NO: 10331

SEQ ID NO: 14237 - DNA, 201 bp, Homo sapiens; identical to SEQ ID NO: 10332

SEQ ID NO: 14238 - DNA, 201 bp, Homo sapiens; identical to SEQ ID NO: 967

SEQ ID NO: 14239 - DNA, 201 bp, Homo sapiens; identical to SEQ ID NO: 968

SEQ ID NO: 14240 - DNA, 201 bp, Homo sapiens; identical to SEQ ID NO: 10336

SEQ ID NO: 14241 - DNA, 201 bp, Homo sapiens; identical to SEQ ID NO: 10259

SEQ ID NO: 14242 - DNA, 201 bp, Homo sapiens; identical to SEQ ID NO: 9821

SEQ ID NO: 14243 - DNA, 201 bp, Homo sapiens; identical to SEQ ID NO: 971

SEQ ID NO: 14244 - DNA, 201 bp, Homo sapiens; identical to SEQ ID NO: 974

SEQ ID NO: 14245 - DNA, 201 bp, Homo sapiens; identical to SEQ ID NO: 9822

SEQ ID NO: 14246 - DNA, 201 bp, Homo sapiens; identical to SEQ ID NO: 9558

SEQ ID NO: 14247 - DNA, 201 bp, Homo sapiens; identical to SEQ ID NO: 975

SEQ ID NO: 14248 - DNA, 201 bp, Homo sapiens; identical to SEQ ID NO: 9823

SEQ ID NO: 14249 - DNA, 201 bp, Homo sapiens; identical to SEQ ID NO: 9824

SEQ ID NO: 14250 - DNA, 201 bp, Homo sapiens; identical to SEQ ID NO: 9825

SEQ ID NO: 14251 - DNA, 201 bp, Homo sapiens; identical to SEQ ID NO: 10345

SEQ ID NO: 14252 - DNA, 201 bp, Homo sapiens; identical to SEQ ID NO: 9827

SEQ ID NO: 14253 - DNA, 201 bp, Homo sapiens; identical to SEQ ID NO: 9828

SEQ ID NO: 14254 - DNA, 201 bp, Homo sapiens; identical to SEQ ID NO: 9830

SEQ ID NO: 14255 - DNA, 201 bp, Homo sapiens; identical to SEQ ID NO: 10353

SEQ ID NO: 14256 - DNA, 201 bp, Homo sapiens; identical to SEQ ID NO: 973

SEQ ID NO: 14257 - DNA, 201 bp, Homo sapiens; identical to SEQ ID NO: 10355

SEQ ID NO: 14258 - DNA, 201 bp, Homo sapiens; identical to SEQ ID NO: 10358

SEQ ID NO: 14259 - DNA, 201 bp, Homo sapiens; identical to SEQ ID NO: 10361

SEQ ID NO: 14260 - DNA, 201 bp, Homo sapiens; identical to SEQ ID NO: 10362

SEQ ID NO: 14261 - DNA, 201 bp, Homo sapiens; identical to SEQ ID NO: 10275

SEQ ID NO: 14262 - DNA, 201 bp, Homo sapiens; identical to SEQ ID NO: 10276

SEQ ID NO: 14263 - DNA, 201 bp, Homo sapiens; identical to SEQ ID NO: 10277

SEQ ID NO: 14264 - DNA, 201 bp, Homo sapiens; identical to SEQ ID NO: 972

SEQ ID NO: 14265 - DNA, 201 bp, Homo sapiens; identical to SEQ ID NO: 10204

SEQ ID NO: 14266 - DNA, 201 bp, Homo sapiens; identical to SEQ ID NO: 10206

SEQ ID NO: 14267 - DNA, 201 bp, Homo sapiens; identical to SEQ ID NO: 10207

SEQ ID NO: 14268 - DNA, 201 bp, Homo sapiens; identical to SEQ ID NO: 10208

SEQ ID NO: 14269 - DNA, 201 bp, Homo sapiens; identical to SEQ ID NO: 10209

SEQ ID NO: 14270 - DNA, 201 bp, Homo sapiens; identical to SEQ ID NO: 10210

SEQ ID NO: 14271 - DNA, 201 bp, Homo sapiens; identical to SEQ ID NO: 10211

SEQ ID NO: 14272 - DNA, 201 bp, Homo sapiens; identical to SEQ ID NO: 10212

SEQ ID NO: 14273 - DNA, 201 bp, Homo sapiens; identical to SEQ ID NO: 10213

SEQ ID NO: 14274 - DNA, 201 bp, Homo sapiens; identical to SEQ ID NO: 10214

SEQ ID NO: 14275 - DNA, 201 bp, Homo sapiens; identical to SEQ ID NO: 980

SEQ ID NO: 14276 - DNA, 201 bp, Homo sapiens; identical to SEQ ID NO: 9531

SEQ ID NO: 14277 - DNA, 201 bp, Homo sapiens; identical to SEQ ID NO: 9860

SEQ ID NO: 14278 - DNA, 201 bp, Homo sapiens; identical to SEQ ID NO: 9861

SEQ ID NO: 14279 - DNA, 201 bp, Homo sapiens; identical to SEQ ID NO: 9862

SEQ ID NO: 14280 - DNA, 201 bp, Homo sapiens; identical to SEQ ID NO: 9863

SEQ ID NO: 14281 - DNA, 201 bp, Homo sapiens; identical to SEQ ID NO: 9864

SEQ ID NO: 14282 - DNA, 201 bp, Homo sapiens; identical to SEQ ID NO: 9865

SEQ ID NO: 14283 - DNA, 201 bp, Homo sapiens; identical to SEQ ID NO: 9481

SEQ ID NO: 14284 - DNA, 201 bp, Homo sapiens; identical to SEQ ID NO: 10217

SEQ ID NO: 14285 - DNA, 201 bp, Homo sapiens; identical to SEQ ID NO: 10218

SEQ ID NO: 14286 - DNA, 201 bp, Homo sapiens; identical to SEQ ID NO: 10219

SEQ ID NO: 14287 - DNA, 201 bp, Homo sapiens; identical to SEQ ID NO: 10220

SEQ ID NO: 14288 - DNA, 201 bp, Homo sapiens; identical to SEQ ID NO: 10221

SEQ ID NO: 14289 - DNA, 201 bp, Homo sapiens; identical to SEQ ID NO: 10223

SEQ ID NO: 14290 - DNA, 201 bp, Homo sapiens; identical to SEQ ID NO: 10224

SEQ ID NO: 14291 - DNA, 201 bp, Homo sapiens; identical to SEQ ID NO: 10225

SEQ ID NO: 14292 - DNA, 201 bp, Homo sapiens; identical to SEQ ID NO: 10166

SEQ ID NO: 14293 - DNA, 201 bp, Homo sapiens; identical to SEQ ID NO: 10226

SEQ ID NO: 14294 - DNA, 201 bp, Homo sapiens; identical to SEQ ID NO: 10229

SEQ ID NO: 14295 - DNA, 201 bp, Homo sapiens; identical to SEQ ID NO: 10167

SEQ ID NO: 14296 - DNA, 201 bp, Homo sapiens; identical to SEQ ID NO: 10168

SEQ ID NO: 14297 - DNA, 201 bp, Homo sapiens; identical to SEQ ID NO: 10169

SEQ ID NO: 14298 - DNA, 201 bp, Homo sapiens; identical to SEQ ID NO: 10170

SEQ ID NO: 14299 - DNA, 201 bp, Homo sapiens; identical to SEQ ID NO: 10238

SEQ ID NO: 14300 - DNA, 201 bp, Homo sapiens; identical to SEQ ID NO: 9803

SEQ ID NO: 14301 - DNA, 201 bp, Homo sapiens; identical to SEQ ID NO: 10176

SEQ ID NO: 14302 - DNA, 201 bp, Homo sapiens; identical to SEQ ID NO: 10177

SEQ ID NO: 14303 - DNA, 201 bp, Homo sapiens; identical to SEQ ID NO: 10178

SEQ ID NO: 14304 - DNA, 201 bp, Homo sapiens; identical to SEQ ID NO: 10179

SEQ ID NO: 14305 - DNA, 201 bp, Homo sapiens; identical to SEQ ID NO: 10180

SEQ ID NO: 14306 - DNA, 201 bp, Homo sapiens; identical to SEQ ID NO: 10181

SEQ ID NO: 14307 - DNA, 201 bp, Homo sapiens; identical to SEQ ID NO: 981

SEQ ID NO: 14308 - DNA, 201 bp, Homo sapiens; identical to SEQ ID NO: 982

SEQ ID NO: 14309 - DNA, 201 bp, Homo sapiens; identical to SEQ ID NO: 976

SEQ ID NO: 14310 - DNA, 201 bp, Homo sapiens; identical to SEQ ID NO: 977

SEQ ID NO: 14311 - DNA, 201 bp, Homo sapiens; identical to SEQ ID NO: 10710

SEQ ID NO: 14312 - DNA, 201 bp, Homo sapiens; identical to SEQ ID NO: 9717

SEQ ID NO: 14313 - DNA, 201 bp, Homo sapiens; identical to SEQ ID NO: 10713

SEQ ID NO: 14314 - DNA, 201 bp, Homo sapiens; identical to SEQ ID NO: 9718

SEQ ID NO: 14315 - DNA, 201 bp, Homo sapiens; identical to SEQ ID NO: 10714

SEQ ID NO: 14316 - DNA, 201 bp, Homo sapiens; identical to SEQ ID NO: 978

SEQ ID NO: 14317 - DNA, 201 bp, Homo sapiens; identical to SEQ ID NO: 10195

SEQ ID NO: 14318 - DNA, 201 bp, Homo sapiens; identical to SEQ ID NO: 10196

SEQ ID NO: 14319 - DNA, 201 bp, Homo sapiens; identical to SEQ ID NO: 10197

SEQ ID NO: 14320 - DNA, 201 bp, Homo sapiens; identical to SEQ ID NO: 10198

SEQ ID NO: 14321 - DNA, 201 bp, Homo sapiens; identical to SEQ ID NO: 9518

SEQ ID NO: 14322 - DNA, 201 bp, Homo sapiens; identical to SEQ ID NO: 10199

SEQ ID NO: 14323 - DNA, 201 bp, Homo sapiens; identical to SEQ ID NO: 9519

SEQ ID NO: 14324 - DNA, 201 bp, Homo sapiens; identical to SEQ ID NO: 10200

SEQ ID NO: 14325 - DNA, 201 bp, Homo sapiens; identical to SEQ ID NO: 10201

SEQ ID NO: 14326 - DNA, 201 bp, Homo sapiens; identical to SEQ ID NO: 10202

SEQ ID NO: 14327 - DNA, 201 bp, Homo sapiens; identical to SEQ ID NO: 10203

SEQ ID NO: 14328 - DNA, 201 bp, Homo sapiens; identical to SEQ ID NO: 10733

SEQ ID NO: 14329 - DNA, 201 bp, Homo sapiens; identical to SEQ ID NO: 10734

SEQ ID NO: 14330 - DNA, 201 bp, Homo sapiens; identical to SEQ ID NO: 9735

SEQ ID NO: 14331 - DNA, 201 bp, Homo sapiens; identical to SEQ ID NO: 10735

SEQ ID NO: 14332 - DNA, 201 bp, Homo sapiens; identical to SEQ ID NO: 9736

SEQ ID NO: 14333 - DNA, 201 bp, Homo sapiens; identical to SEQ ID NO: 10736

SEQ ID NO: 14334 - DNA, 201 bp, Homo sapiens; identical to SEQ ID NO: 9737

SEQ ID NO: 14335 - DNA, 201 bp, Homo sapiens; identical to SEQ ID NO: 9738

SEQ ID NO: 14336 - DNA, 201 bp, Homo sapiens; identical to SEQ ID NO: 10737

SEQ ID NO: 14337 - DNA, 201 bp, Homo sapiens; identical to SEQ ID NO: 9739

SEQ ID NO: 14338 - DNA, 201 bp, Homo sapiens; identical to SEQ ID NO: 10738

SEQ ID NO: 14339 - DNA, 201 bp, Homo sapiens; identical to SEQ ID NO: 10740

SEQ ID NO: 14340 - DNA, 201 bp, Homo sapiens; identical to SEQ ID NO: 10741

SEQ ID NO: 14341 - DNA, 201 bp, Homo sapiens; identical to SEQ ID NO: 9584

SEQ ID NO: 14342 - DNA, 201 bp, Homo sapiens; identical to SEQ ID NO: 10017

SEQ ID NO: 14343 - DNA, 201 bp, Homo sapiens; identical to SEQ ID NO: 9990

SEQ ID NO: 14344 - DNA, 201 bp, Homo sapiens; identical to SEQ ID NO: 10019

SEQ ID NO: 14345 - DNA, 201 bp, Homo sapiens; identical to SEQ ID NO: 9993

SEQ ID NO: 14346 - DNA, 201 bp, Homo sapiens; identical to SEQ ID NO: 10022

SEQ ID NO: 14347 - DNA, 201 bp, Homo sapiens; identical to SEQ ID NO: 10025

SEQ ID NO: 14348 - DNA, 201 bp, Homo sapiens; identical to SEQ ID NO: 9745

SEQ ID NO: 14349 - DNA, 201 bp, Homo sapiens; identical to SEQ ID NO: 9748

SEQ ID NO: 14350 - DNA, 201 bp, Homo sapiens; identical to SEQ ID NO: 9593

SEQ ID NO: 14351 - DNA, 201 bp, Homo sapiens; identical to SEQ ID NO: 10143

SEQ ID NO: 14352 - DNA, 201 bp, Homo sapiens; identical to SEQ ID NO: 10288

SEQ ID NO: 14353 - DNA, 201 bp, Homo sapiens; identical to SEQ ID NO: 9597

SEQ ID NO: 14354 - DNA, 201 bp, Homo sapiens; identical to SEQ ID NO: 9658

SEQ ID NO: 14355 - DNA, 201 bp, Homo sapiens; identical to SEQ ID NO: 9659

SEQ ID NO: 14356 - DNA, 201 bp, Homo sapiens; identical to SEQ ID NO: 9626

SEQ ID NO: 14357 - DNA, 201 bp, Homo sapiens; identical to SEQ ID NO: 10731

SEQ ID NO: 14358 - DNA, 201 bp, Homo sapiens; identical to SEQ ID NO: 9628

SEQ ID NO: 14359 - DNA, 201 bp, Homo sapiens; identical to SEQ ID NO: 9972

SEQ ID NO: 14360 - DNA, 201 bp, Homo sapiens; identical to SEQ ID NO: 10172

SEQ ID NO: 14361 - DNA, 201 bp, Homo sapiens; identical to SEQ ID NO: 9973

SEQ ID NO: 14362 - DNA, 201 bp, Homo sapiens; identical to SEQ ID NO: 9912

SEQ ID NO: 14363 - DNA, 201 bp, Homo sapiens; identical to SEQ ID NO: 10008

SEQ ID NO: 14364 - DNA, 201 bp, Homo sapiens; identical to SEQ ID NO: 9975

SEQ ID NO: 14365 - DNA, 201 bp, Homo sapiens; identical to SEQ ID NO: 10059

SEQ ID NO: 14366 - DNA, 201 bp, Homo sapiens; identical to SEQ ID NO: 9977

SEQ ID NO: 14367 - DNA, 201 bp, Homo sapiens; identical to SEQ ID NO: 10009

SEQ ID NO: 14368 - DNA, 201 bp, Homo sapiens; identical to SEQ ID NO: 9979

SEQ ID NO: 14369 - DNA, 201 bp, Homo sapiens; identical to SEQ ID NO: 10237

SEQ ID NO: 14370 - DNA, 201 bp, Homo sapiens; identical to SEQ ID NO: 10010

SEQ ID NO: 14371 - DNA, 201 bp, Homo sapiens; identical to SEQ ID NO: 9981

SEQ ID NO: 14372 - DNA, 201 bp, Homo sapiens; identical to SEQ ID NO: 9634

SEQ ID NO: 14373 - DNA, 201 bp, Homo sapiens; identical to SEQ ID NO: 10011

SEQ ID NO: 14374 - DNA, 201 bp, Homo sapiens; identical to SEQ ID NO: 9984

SEQ ID NO: 14375 - DNA, 201 bp, Homo sapiens; identical to SEQ ID NO: 10012

SEQ ID NO: 14376 - DNA, 201 bp, Homo sapiens; identical to SEQ ID NO: 10516

SEQ ID NO: 14377 - DNA, 201 bp, Homo sapiens; identical to SEQ ID NO: 9557

SEQ ID NO: 14378 - DNA, 201 bp, Homo sapiens; identical to SEQ ID NO: 9987

SEQ ID NO: 14379 - DNA, 201 bp, Homo sapiens; identical to SEQ ID NO: 10518

SEQ ID NO: 14380 - DNA, 201 bp, Homo sapiens; identical to SEQ ID NO: 10014

SEQ ID NO: 14381 - DNA, 201 bp, Homo sapiens; identical to SEQ ID NO: 9588

SEQ ID NO: 14382 - DNA, 201 bp, Homo sapiens; identical to SEQ ID NO: 9941

SEQ ID NO: 14383 - DNA, 201 bp, Homo sapiens; identical to SEQ ID NO: 9942

SEQ ID NO: 14384 - DNA, 201 bp, Homo sapiens; identical to SEQ ID NO: 10592

SEQ ID NO: 14385 - DNA, 201 bp, Homo sapiens; identical to SEQ ID NO: 10654

SEQ ID NO: 14386 - DNA, 201 bp, Homo sapiens; identical to SEQ ID NO: 10597

SEQ ID NO: 14387 - DNA, 201 bp, Homo sapiens; identical to SEQ ID NO: 10655

SEQ ID NO: 14388 - DNA, 201 bp, Homo sapiens; identical to SEQ ID NO: 10656

SEQ ID NO: 14389 - DNA, 201 bp, Homo sapiens; identical to SEQ ID NO: 9855

SEQ ID NO: 14390 - DNA, 201 bp, Homo sapiens; identical to SEQ ID NO: 10058

SEQ ID NO: 14391 - DNA, 201 bp, Homo sapiens; identical to SEQ ID NO: 9856

SEQ ID NO: 14392 - DNA, 201 bp, Homo sapiens; identical to SEQ ID NO: 9858

SEQ ID NO: 14393 - DNA, 201 bp, Homo sapiens; identical to SEQ ID NO: 9475

SEQ ID NO: 14394 - DNA, 201 bp, Homo sapiens; identical to SEQ ID NO: 9477

SEQ ID NO: 14395 - DNA, 201 bp, Homo sapiens; identical to SEQ ID NO: 9479

SEQ ID NO: 14396 - DNA, 201 bp, Homo sapiens; identical to SEQ ID NO: 9609

SEQ ID NO: 14397 - DNA, 201 bp, Homo sapiens; identical to SEQ ID NO: 9480

SEQ ID NO: 14398 - DNA, 201 bp, Homo sapiens; identical to SEQ ID NO: 9610

SEQ ID NO: 14399 - DNA, 201 bp, Homo sapiens; identical to SEQ ID NO: 9482

SEQ ID NO: 14400 - DNA, 201 bp, Homo sapiens; identical to SEQ ID NO: 9483

SEQ ID NO: 14401 - DNA, 201 bp, Homo sapiens; identical to SEQ ID NO: 9484

SEQ ID NO: 14402 - DNA, 201 bp, Homo sapiens; identical to SEQ ID NO: 10158

SEQ ID NO: 14403 - DNA, 201 bp, Homo sapiens; identical to SEQ ID NO: 9485

SEQ ID NO: 14404 - DNA, 201 bp, Homo sapiens; identical to SEQ ID NO: 10611

SEQ ID NO: 14405 - DNA, 201 bp, Homo sapiens; identical to SEQ ID NO: 10068

SEQ ID NO: 14406 - DNA, 201 bp, Homo sapiens; identical to SEQ ID NO: 9486

SEQ ID NO: 14407 - DNA, 201 bp, Homo sapiens; identical to SEQ ID NO: 985

SEQ ID NO: 14408 - DNA, 201 bp, Homo sapiens; identical to SEQ ID NO: 9776

SEQ ID NO: 14409 - DNA, 201 bp, Homo sapiens; identical to SEQ ID NO: 9424

SEQ ID NO: 14410 - DNA, 201 bp, Homo sapiens; identical to SEQ ID NO: 10080

SEQ ID NO: 14411 - DNA, 201 bp, Homo sapiens; identical to SEQ ID NO: 10662

SEQ ID NO: 14412 - DNA, 201 bp, Homo sapiens; identical to SEQ ID NO: 9427

SEQ ID NO: 14413 - DNA, 201 bp, Homo sapiens; identical to SEQ ID NO: 10618

SEQ ID NO: 14414 - DNA, 201 bp, Homo sapiens; identical to SEQ ID NO: 10527

SEQ ID NO: 14415 - DNA, 201 bp, Homo sapiens; identical to SEQ ID NO: 9536

SEQ ID NO: 14416 - DNA, 201 bp, Homo sapiens; identical to SEQ ID NO: 9498

SEQ ID NO: 14417 - DNA, 201 bp, Homo sapiens; identical to SEQ ID NO: 9499

SEQ ID NO: 14418 - DNA, 201 bp, Homo sapiens; identical to SEQ ID NO: 9890

SEQ ID NO: 14419 - DNA, 201 bp, Homo sapiens; identical to SEQ ID NO: 10086

SEQ ID NO: 14420 - DNA, 201 bp, Homo sapiens; identical to SEQ ID NO: 9501

SEQ ID NO: 14421 - DNA, 201 bp, Homo sapiens; identical to SEQ ID NO: 9502

SEQ ID NO: 14422 - DNA, 201 bp, Homo sapiens; identical to SEQ ID NO: 10088

SEQ ID NO: 14423 - DNA, 201 bp, Homo sapiens; identical to SEQ ID NO: 10089

SEQ ID NO: 14424 - DNA, 201 bp, Homo sapiens; identical to SEQ ID NO: 9896

SEQ ID NO: 14425 - DNA, 201 bp, Homo sapiens; identical to SEQ ID NO: 9504

SEQ ID NO: 14426 - DNA, 201 bp, Homo sapiens; identical to SEQ ID NO: 10092

SEQ ID NO: 14427 - DNA, 201 bp, Homo sapiens; identical to SEQ ID NO: 10001

SEQ ID NO: 14428 - DNA, 201 bp, Homo sapiens; identical to SEQ ID NO: 10632

SEQ ID NO: 14429 - DNA, 201 bp, Homo sapiens; identical to SEQ ID NO: 9806

SEQ ID NO: 14430 - DNA, 201 bp, Homo sapiens; identical to SEQ ID NO: 10634

SEQ ID NO: 14431 - DNA, 201 bp, Homo sapiens; identical to SEQ ID NO: 9807

SEQ ID NO: 14432 - DNA, 201 bp, Homo sapiens; identical to SEQ ID NO: 9510

SEQ ID NO: 14433 - DNA, 201 bp, Homo sapiens; identical to SEQ ID NO: 10005

SEQ ID NO: 14434 - DNA, 201 bp, Homo sapiens; identical to SEQ ID NO: 10701

SEQ ID NO: 14435 - DNA, 201 bp, Homo sapiens; identical to SEQ ID NO: 10006

SEQ ID NO: 14436 - DNA, 201 bp, Homo sapiens; identical to SEQ ID NO: 9554

SEQ ID NO: 14437 - DNA, 201 bp, Homo sapiens; identical to SEQ ID NO: 10105

SEQ ID NO: 14438 - DNA, 201 bp, Homo sapiens; identical to SEQ ID NO: 10563

SEQ ID NO: 14439 - DNA, 201 bp, Homo sapiens; identical to SEQ ID NO: 10013

SEQ ID NO: 14440 - DNA, 201 bp, Homo sapiens; identical to SEQ ID NO: 9646

SEQ ID NO: 14441 - DNA, 201 bp, Homo sapiens; identical to SEQ ID NO: 10015

SEQ ID NO: 14442 - DNA, 201 bp, Homo sapiens; identical to SEQ ID NO: 10470

SEQ ID NO: 14443 - DNA, 201 bp, Homo sapiens; identical to SEQ ID NO: 9647

SEQ ID NO: 14444 - DNA, 201 bp, Homo sapiens; identical to SEQ ID NO: 10110

SEQ ID NO: 14445 - DNA, 201 bp, Homo sapiens; identical to SEQ ID NO: 9648

SEQ ID NO: 14446 - DNA, 201 bp, Homo sapiens; identical to SEQ ID NO: 10020

SEQ ID NO: 14447 - DNA, 201 bp, Homo sapiens; identical to SEQ ID NO: 9829

SEQ ID NO: 14448 - DNA, 201 bp, Homo sapiens; identical to SEQ ID NO: 10568

SEQ ID NO: 14449 - DNA, 201 bp, Homo sapiens; identical to SEQ ID NO: 9834

SEQ ID NO: 14450 - DNA, 201 bp, Homo sapiens; identical to SEQ ID NO: 9832

SEQ ID NO: 14451 - DNA, 201 bp, Homo sapiens; identical to SEQ ID NO: 10641

SEQ ID NO: 14452 - DNA, 201 bp, Homo sapiens; identical to SEQ ID NO: 9836

SEQ ID NO: 14453 - DNA, 201 bp, Homo sapiens; identical to SEQ ID NO: 9835

SEQ ID NO: 14454 - DNA, 201 bp, Homo sapiens; identical to SEQ ID NO: 9447

SEQ ID NO: 14455 - DNA, 201 bp, Homo sapiens; identical to SEQ ID NO: 9449

SEQ ID NO: 14456 - DNA, 201 bp, Homo sapiens; identical to SEQ ID NO: 9451

SEQ ID NO: 14457 - DNA, 201 bp, Homo sapiens; identical to SEQ ID NO: 10727

SEQ ID NO: 14458 - DNA, 201 bp, Homo sapiens; identical to SEQ ID NO: 10033

SEQ ID NO: 14459 - DNA, 201 bp, Homo sapiens; identical to SEQ ID NO: 10729

SEQ ID NO: 14460 - DNA, 201 bp, Homo sapiens; identical to SEQ ID NO: 10648

SEQ ID NO: 14461 - DNA, 201 bp, Homo sapiens; identical to SEQ ID NO: 984

SEQ ID NO: 14462 - DNA, 201 bp, Homo sapiens; identical to SEQ ID NO: 10572

SEQ ID NO: 14463 - DNA, 201 bp, Homo sapiens; identical to SEQ ID NO: 10573

SEQ ID NO: 14464 - DNA, 201 bp, Homo sapiens; identical to SEQ ID NO: 10574

SEQ ID NO: 14465 - DNA, 201 bp, Homo sapiens; identical to SEQ ID NO: 9843

SEQ ID NO: 14466 - DNA, 201 bp, Homo sapiens; identical to SEQ ID NO: 9636

SEQ ID NO: 14467 - DNA, 201 bp, Homo sapiens; identical to SEQ ID NO: 9793

SEQ ID NO: 14468 - DNA, 201 bp, Homo sapiens; identical to SEQ ID NO: 9794

SEQ ID NO: 14469 - DNA, 201 bp, Homo sapiens; identical to SEQ ID NO: 10587

SEQ ID NO: 14470 - DNA, 201 bp, Homo sapiens; identical to SEQ ID NO: 9795

SEQ ID NO: 14471 - DNA, 201 bp, Homo sapiens; identical to SEQ ID NO: 9797

SEQ ID NO: 14472 - DNA, 201 bp, Homo sapiens; identical to SEQ ID NO: 10284

SEQ ID NO: 14473 - DNA, 201 bp, Homo sapiens; identical to SEQ ID NO: 10285

SEQ ID NO: 14474 - DNA, 201 bp, Homo sapiens; identical to SEQ ID NO: 10286

SEQ ID NO: 14475 - DNA, 201 bp, Homo sapiens; identical to SEQ ID NO: 10287

SEQ ID NO: 14476 - DNA, 201 bp, Homo sapiens; identical to SEQ ID NO: 10289

SEQ ID NO: 14477 - DNA, 201 bp, Homo sapiens; identical to SEQ ID NO: 10148

SEQ ID NO: 14478 - DNA, 201 bp, Homo sapiens; identical to SEQ ID NO: 10290

SEQ ID NO: 14479 - DNA, 201 bp, Homo sapiens; identical to SEQ ID NO: 988

SEQ ID NO: 14480 - DNA, 201 bp, Homo sapiens; identical to SEQ ID NO: 10291

SEQ ID NO: 14481 - DNA, 201 bp, Homo sapiens; identical to SEQ ID NO: 10152

SEQ ID NO: 14482 - DNA, 201 bp, Homo sapiens; identical to SEQ ID NO: 10292

SEQ ID NO: 14483 - DNA, 201 bp, Homo sapiens; identical to SEQ ID NO: 10153

SEQ ID NO: 14484 - DNA, 201 bp, Homo sapiens; identical to SEQ ID NO: 10293

SEQ ID NO: 14485 - DNA, 201 bp, Homo sapiens; identical to SEQ ID NO: 10154

SEQ ID NO: 14486 - DNA, 201 bp, Homo sapiens; identical to SEQ ID NO: 10295

SEQ ID NO: 14487 - DNA, 201 bp, Homo sapiens; identical to SEQ ID NO: 10155

SEQ ID NO: 14488 - DNA, 201 bp, Homo sapiens; identical to SEQ ID NO: 9759

SEQ ID NO: 14489 - DNA, 201 bp, Homo sapiens; identical to SEQ ID NO: 9761

SEQ ID NO: 14490 - DNA, 201 bp, Homo sapiens; identical to SEQ ID NO: 9763

SEQ ID NO: 14491 - DNA, 201 bp, Homo sapiens; identical to SEQ ID NO: 9764

SEQ ID NO: 14492 - DNA, 201 bp, Homo sapiens; identical to SEQ ID NO: 10259

SEQ ID NO: 14493 - DNA, 201 bp, Homo sapiens; identical to SEQ ID NO: 9821

SEQ ID NO: 14494 - DNA, 201 bp, Homo sapiens; identical to SEQ ID NO: 9614

SEQ ID NO: 14495 - DNA, 201 bp, Homo sapiens; identical to SEQ ID NO: 9615

SEQ ID NO: 14496 - DNA, 201 bp, Homo sapiens; identical to SEQ ID NO: 9869

SEQ ID NO: 14497 - DNA, 201 bp, Homo sapiens; identical to SEQ ID NO: 986

SEQ ID NO: 14498 - DNA, 201 bp, Homo sapiens; identical to SEQ ID NO: 9617

SEQ ID NO: 14499 - DNA, 201 bp, Homo sapiens; identical to SEQ ID NO: 9619

SEQ ID NO: 14500 - DNA, 201 bp, Homo sapiens; identical to SEQ ID NO: 9620

SEQ ID NO: 14501 - DNA, 201 bp, Homo sapiens; identical to SEQ ID NO: 9873

SEQ ID NO: 14502 - DNA, 201 bp, Homo sapiens; identical to SEQ ID NO: 10261

SEQ ID NO: 14503 - DNA, 201 bp, Homo sapiens; identical to SEQ ID NO: 10262

SEQ ID NO: 14504 - DNA, 201 bp, Homo sapiens; identical to SEQ ID NO: 10264

SEQ ID NO: 14505 - DNA, 201 bp, Homo sapiens; identical to SEQ ID NO: 10265

SEQ ID NO: 14506 - DNA, 201 bp, Homo sapiens; identical to SEQ ID NO: 10300

SEQ ID NO: 14507 - DNA, 201 bp, Homo sapiens; identical to SEQ ID NO: 10266

SEQ ID NO: 14508 - DNA, 201 bp, Homo sapiens; identical to SEQ ID NO: 10301

SEQ ID NO: 14509 - DNA, 201 bp, Homo sapiens; identical to SEQ ID NO: 10268

SEQ ID NO: 14510 - DNA, 201 bp, Homo sapiens; identical to SEQ ID NO: 10302

SEQ ID NO: 14511 - DNA, 201 bp, Homo sapiens; identical to SEQ ID NO: 10304

SEQ ID NO: 14512 - DNA, 201 bp, Homo sapiens; identical to SEQ ID NO: 10269

SEQ ID NO: 14513 - DNA, 201 bp, Homo sapiens; identical to SEQ ID NO: 10305

SEQ ID NO: 14514 - DNA, 201 bp, Homo sapiens; identical to SEQ ID NO: 9432

SEQ ID NO: 14515 - DNA, 201 bp, Homo sapiens; identical to SEQ ID NO: 10133

SEQ ID NO: 14516 - DNA, 201 bp, Homo sapiens; identical to SEQ ID NO: 10306

SEQ ID NO: 14517 - DNA, 201 bp, Homo sapiens; identical to SEQ ID NO: 987

SEQ ID NO: 14518 - DNA, 201 bp, Homo sapiens; identical to SEQ ID NO: 10135

SEQ ID NO: 14519 - DNA, 201 bp, Homo sapiens; identical to SEQ ID NO: 10307

SEQ ID NO: 14520 - DNA, 201 bp, Homo sapiens; identical to SEQ ID NO: 10308

SEQ ID NO: 14521 - DNA, 201 bp, Homo sapiens; identical to SEQ ID NO: 10233
  misc_feature (1)...(201): n = A,T,C or G, or insertion/deletion polymorphism (see Tables 1-2)

SEQ ID NO: 14522 - DNA, 201 bp, Homo sapiens; identical to SEQ ID NO: 10368

SEQ ID NO: 14523 - DNA, 201 bp, Homo sapiens; identical to SEQ ID NO: 9522

SEQ ID NO: 14524 - DNA, 201 bp, Homo sapiens; identical to SEQ ID NO: 9884

SEQ ID NO: 14525 - DNA, 201 bp, Homo sapiens; identical to SEQ ID NO: 9524

SEQ ID NO: 14526 - DNA, 201 bp, Homo sapiens; identical to SEQ ID NO: 9790

SEQ ID NO: 14527 - DNA, 201 bp, Homo sapiens; identical to SEQ ID NO: 9791

SEQ ID NO: 14528 - DNA, 201 bp, Homo sapiens; identical to SEQ ID NO: 9792

SEQ ID NO: 14529 - DNA, 201 bp, Homo sapiens; identical to SEQ ID NO: 9635

SEQ ID NO: 14530 - DNA, 201 bp, Homo sapiens; identical to SEQ ID NO: 10376

SEQ ID NO: 14531 - DNA, 201 bp, Homo sapiens; identical to SEQ ID NO: 9989

SEQ ID NO: 14532 - DNA, 201 bp, Homo sapiens; identical to SEQ ID NO: 10685

SEQ ID NO: 14533 - DNA, 201 bp, Homo sapiens; identical to SEQ ID NO: 10449

SEQ ID NO: 14534 - DNA, 201 bp, Homo sapiens; identical to SEQ ID NO: 10454

SEQ ID NO: 14535 - DNA, 201 bp, Homo sapiens; identical to SEQ ID NO: 9749

SEQ ID NO: 14536 - DNA, 201 bp, Homo sapiens; identical to SEQ ID NO: 9812

SEQ ID NO: 14537 - DNA, 201 bp, Homo sapiens; identical to SEQ ID NO: 9750

SEQ ID NO: 14538 - DNA, 201 bp, Homo sapiens; identical to SEQ ID NO: 9751

SEQ ID NO: 14539 - DNA, 201 bp, Homo sapiens; identical to SEQ ID NO: 991

SEQ ID NO: 14540 - DNA, 201 bp, Homo sapiens; identical to SEQ ID NO: 10699

SEQ ID NO: 14541 - DNA, 201 bp, Homo sapiens; identical to SEQ ID NO: 9754

SEQ ID NO: 14542 - DNA, 201 bp, Homo sapiens; identical to SEQ ID NO: 9755

SEQ ID NO: 14543 - DNA, 201 bp, Homo sapiens; identical to SEQ ID NO: 10703

SEQ ID NO: 14544 - DNA, 201 bp, Homo sapiens; identical to SEQ ID NO: 9756

SEQ ID NO: 14545 - DNA, 201 bp, Homo sapiens; identical to SEQ ID NO: 9758

SEQ ID NO: 14546 - DNA, 201 bp, Homo sapiens; identical to SEQ ID NO: 9760

SEQ ID NO: 14547 - DNA, 201 bp, Homo sapiens; identical to SEQ ID NO: 10709

SEQ ID NO: 14548 - DNA, 201 bp, Homo sapiens; identical to SEQ ID NO: 9762

SEQ ID NO: 14549 - DNA, 201 bp, Homo sapiens; identical to SEQ ID NO: 10404

SEQ ID NO: 14550 - DNA, 201 bp, Homo sapiens; identical to SEQ ID NO: 10406

SEQ ID NO: 14551 - DNA, 201 bp, Homo sapiens; identical to SEQ ID NO: 10407

SEQ ID NO: 14552 - DNA, 201 bp, Homo sapiens; identical to SEQ ID NO: 9952

SEQ ID NO: 14553 - DNA, 201 bp, Homo sapiens; identical to SEQ ID NO: 10408

SEQ ID NO: 14554 - DNA, 201 bp, Homo sapiens; identical to SEQ ID NO: 9954

SEQ ID NO: 14555 - DNA, 201 bp, Homo sapiens; identical to SEQ ID NO: 9955

SEQ ID NO: 14556 - DNA, 201 bp, Homo sapiens; identical to SEQ ID NO: 9957

SEQ ID NO: 14557 - DNA, 201 bp, Homo sapiens; identical to SEQ ID NO: 990

SEQ ID NO: 14558 - DNA, 201 bp, Homo sapiens; identical to SEQ ID NO: 9959

SEQ ID NO: 14559 - DNA, 201 bp, Homo sapiens; identical to SEQ ID NO: 10613

SEQ ID NO: 14560 - DNA, 201 bp, Homo sapiens; identical to SEQ ID NO: 9927

SEQ ID NO: 14561 - DNA, 201 bp, Homo sapiens; identical to SEQ ID NO: 9960

SEQ ID NO: 14562 - DNA, 201 bp, Homo sapiens; identical to SEQ ID NO: 9961

SEQ ID NO: 14563 - DNA, 201 bp, Homo sapiens; identical to SEQ ID NO: 10476

SEQ ID NO: 14564 - DNA, 201 bp, Homo sapiens; identical to SEQ ID NO: 9963

SEQ ID NO: 14565 - DNA, 201 bp, Homo sapiens; identical to SEQ ID NO: 9785

SEQ ID NO: 14566 - DNA, 201 bp, Homo sapiens; identical to SEQ ID NO: 9730

SEQ ID NO: 14567 - DNA, 201 bp, Homo sapiens; identical to SEQ ID NO: 9786

SEQ ID NO: 14568 - DNA, 201 bp, Homo sapiens; identical to SEQ ID NO: 9731

SEQ ID NO: 14569 - DNA, 201 bp, Homo sapiens; identical to SEQ ID NO: 9787

SEQ ID NO: 14570 - DNA, 201 bp, Homo sapiens; identical to SEQ ID NO: 9732

SEQ ID NO: 14571 - DNA, 201 bp, Homo sapiens; identical to SEQ ID NO: 9788

SEQ ID NO: 14572 - DNA, 201 bp, Homo sapiens; identical to SEQ ID NO: 9733

SEQ ID NO: 14573 - DNA, 201 bp, Homo sapiens; identical to SEQ ID NO: 9734

SEQ ID NO: 14574 - DNA, 201 bp, Homo sapiens; identical to SEQ ID NO: 992

SEQ ID NO: 14575 - DNA, 201 bp, Homo sapiens; identical to SEQ ID NO: 10438

SEQ ID NO: 14576 - DNA, 201 bp, Homo sapiens; identical to SEQ ID NO: 9983

SEQ ID NO: 14577 - DNA, 201 bp, Homo sapiens; identical to SEQ ID NO: 9986

SEQ ID NO: 14578 - DNA, 201 bp, Homo sapiens; identical to SEQ ID NO: 10584

SEQ ID NO: 14579 - DNA, 201 bp, Homo sapiens; identical to SEQ ID NO: 10585

SEQ ID NO: 14580 - DNA, 201 bp, Homo sapiens; identical to SEQ ID NO: 10056

SEQ ID NO: 14581 - DNA, 201 bp, Homo sapiens; identical to SEQ ID NO: 10388

SEQ ID NO: 14582 - DNA, 201 bp, Homo sapiens; identical to SEQ ID NO: 9611

SEQ ID NO: 14583 - DNA, 201 bp, Homo sapiens; identical to SEQ ID NO: 9612

SEQ ID NO: 14584 - DNA, 201 bp, Homo sapiens; identical to SEQ ID NO: 9676

SEQ ID NO: 14585 - DNA, 201 bp, Homo sapiens; identical to SEQ ID NO: 9677

SEQ ID NO: 14586 - DNA, 201 bp, Homo sapiens; identical to SEQ ID NO: 994

SEQ ID NO: 14587 - DNA, 201 bp, Homo sapiens; identical to SEQ ID NO: 995

SEQ ID NO: 14588 - DNA, 201 bp, Homo sapiens; identical to SEQ ID NO: 996

SEQ ID NO: 14589 - DNA, 201 bp, Homo sapiens; identical to SEQ ID NO: 997

SEQ ID NO: 14590 - DNA, 201 bp, Homo sapiens; identical to SEQ ID NO: 9784

SEQ ID NO: 14591 - DNA, 201 bp, Homo sapiens; identical to SEQ ID NO: 9682

SEQ ID NO: 14592 - DNA, 201 bp, Homo sapiens; identical to SEQ ID NO: 9684

SEQ ID NO: 14593 - DNA, 201 bp, Homo sapiens; identical to SEQ ID NO: 9686

SEQ ID NO: 14594 - DNA, 201 bp, Homo sapiens; identical to SEQ ID NO: 9688

SEQ ID NO: 14595 - DNA, 201 bp, Homo sapiens; identical to SEQ ID NO: 9627

SEQ ID NO: 14596 - DNA, 201 bp, Homo sapiens; identical to SEQ ID NO: 10674

SEQ ID NO: 14597 - DNA, 201 bp, Homo sapiens; identical to SEQ ID NO: 9994

SEQ ID NO: 14598 - DNA, 201 bp, Homo sapiens; identical to SEQ ID NO: 9996

SEQ ID NO: 14599 - DNA, 201 bp, Homo sapiens; identical to SEQ ID NO: 9998

SEQ ID NO: 14600 - DNA, 201 bp, Homo sapiens; identical to SEQ ID NO: 9507

SEQ ID NO: 14601 - DNA, 201 bp, Homo sapiens; identical to SEQ ID NO: 9999

SEQ ID NO: 14602 - DNA, 201 bp, Homo sapiens; identical to SEQ ID NO: 9699

SEQ ID NO: 14603 - DNA, 201 bp, Homo sapiens; identical to SEQ ID NO: 10696

SEQ ID NO: 14604 - DNA, 201 bp, Homo sapiens; identical to SEQ ID NO: 9701

SEQ ID NO: 14605 - DNA, 201 bp, Homo sapiens; identical to SEQ ID NO: 9702

SEQ ID NO: 14606 - DNA, 201 bp, Homo sapiens; identical to SEQ ID NO: 9704

SEQ ID NO: 14607 - DNA, 201 bp, Homo sapiens; identical to SEQ ID NO: 9705

SEQ ID NO: 14608 - DNA, 201 bp, Homo sapiens; identical to SEQ ID NO: 9706

SEQ ID NO: 14609 - DNA, 201 bp, Homo sapiens; identical to SEQ ID NO: 9707

SEQ ID NO: 14610 - DNA, 201 bp, Homo sapiens; identical to SEQ ID NO: 9709

SEQ ID NO: 14611 - DNA, 201 bp, Homo sapiens; identical to SEQ ID NO: 10337

SEQ ID NO: 14612 - DNA, 201 bp, Homo sapiens; identical to SEQ ID NO: 10706

SEQ ID NO: 14613 - DNA, 201 bp, Homo sapiens; identical to SEQ ID NO: 10553

SEQ ID NO: 14614 - DNA, 201 bp, Homo sapiens; identical to SEQ ID NO: 10339

SEQ ID NO: 14615 - DNA, 201 bp, Homo sapiens; identical to SEQ ID NO: 9549

SEQ ID NO: 14616 - DNA, 201 bp, Homo sapiens; identical to SEQ ID NO: 10555

SEQ ID NO: 14617 - DNA, 201 bp, Homo sapiens; identical to SEQ ID NO: 10340

SEQ ID NO: 14618 - DNA, 201 bp, Homo sapiens; identical to SEQ ID NO: 10556

SEQ ID NO: 14619 - DNA, 201 bp, Homo sapiens; identical to SEQ ID NO: 10341

SEQ ID NO: 14620 - DNA, 201 bp, Homo sapiens; identical to SEQ ID NO: 10557

SEQ ID NO: 14621 - DNA, 201 bp, Homo sapiens; identical to SEQ ID NO: 10342

SEQ ID NO: 14622 - DNA, 201 bp, Homo sapiens; identical to SEQ ID NO: 10559

SEQ ID NO: 14623 - DNA, 201 bp, Homo sapiens; identical to SEQ ID NO: 10343

SEQ ID NO: 14624 - DNA, 201 bp, Homo sapiens; identical to SEQ ID NO: 10561

SEQ ID NO: 14625 - DNA, 201 bp, Homo sapiens; identical to SEQ ID NO: 10469

SEQ ID NO: 14626 - DNA, 201 bp, Homo sapiens; identical to SEQ ID NO: 9644

SEQ ID NO: 14627 - DNA, 201 bp, Homo sapiens; identical to SEQ ID NO: 10562

SEQ ID NO: 14628 - DNA, 201 bp, Homo sapiens; identical to SEQ ID NO: 10564

SEQ ID NO: 14629 - DNA, 201 bp, Homo sapiens; identical to SEQ ID NO: 10016

SEQ ID NO: 14630 - DNA, 201 bp, Homo sapiens; identical to SEQ ID NO: 10018

SEQ ID NO: 14631 - DNA, 201 bp, Homo sapiens; identical to SEQ ID NO: 10021

SEQ ID NO: 14632 - DNA, 201 bp, Homo sapiens; identical to SEQ ID NO: 9925

SEQ ID NO: 14633 - DNA, 201 bp, Homo sapiens; identical to SEQ ID NO: 10024

SEQ ID NO: 14634 - DNA, 201 bp, Homo sapiens; identical to SEQ ID NO: 10028

SEQ ID NO: 14635 - DNA, 201 bp, Homo sapiens; identical to SEQ ID NO: 999

SEQ ID NO: 14636 - DNA, 201 bp, Homo sapiens; identical to SEQ ID NO: 10032

SEQ ID NO: 14637 - DNA, 201 bp, Homo sapiens; identical to SEQ ID NO: 9726

SEQ ID NO: 14638 - DNA, 201 bp, Homo sapiens; identical to SEQ ID NO: 9728

SEQ ID NO: 14639 - DNA, 201 bp, Homo sapiens; identical to SEQ ID NO: 998

SEQ ID NO: 14640 - DNA, 201 bp, Homo sapiens; identical to SEQ ID NO: 10370

SEQ ID NO: 14641 - DNA, 201 bp, Homo sapiens; identical to SEQ ID NO: 10575

SEQ ID NO: 14642 - DNA, 201 bp, Homo sapiens; identical to SEQ ID NO: 10576

SEQ ID NO: 14643 - DNA, 201 bp, Homo sapiens; identical to SEQ ID NO: 10577

SEQ ID NO: 14644 - DNA, 201 bp, Homo sapiens; identical to SEQ ID NO: 10579

SEQ ID NO: 14645 - DNA, 201 bp, Homo sapiens; identical to SEQ ID NO: 10580

SEQ ID NO: 14646 - DNA, 201 bp, Homo sapiens; identical to SEQ ID NO: 10371

SEQ ID NO: 14647 - DNA, 201 bp, Homo sapiens; identical to SEQ ID NO: 10581

SEQ ID NO: 14648 - DNA, 201 bp, Homo sapiens; identical to SEQ ID NO: 10373

SEQ ID NO: 14649 - DNA, 201 bp, Homo sapiens; identical to SEQ ID NO: 10582

SEQ ID NO: 14650 - DNA, 201 bp, Homo sapiens; identical to SEQ ID NO: 10583

SEQ ID NO: 14651 - DNA, 201 bp, Homo sapiens; identical to SEQ ID NO: 10588

SEQ ID NO: 14652 - DNA, 201 bp, Homo sapiens; identical to SEQ ID NO: 10590

SEQ ID NO: 14653 - DNA, 201 bp, Homo sapiens; identical to SEQ ID NO: 9589

SEQ ID NO: 14654 - DNA, 201 bp, Homo sapiens; identical to SEQ ID NO: 10593

SEQ ID NO: 14655 - DNA, 201 bp, Homo sapiens; identical to SEQ ID NO: 9590

SEQ ID NO: 14656 - DNA, 201 bp, Homo sapiens; identical to SEQ ID NO: 10595

SEQ ID NO: 14657 - DNA, 201 bp, Homo sapiens; identical to SEQ ID NO: 9591

SEQ ID NO: 14658 - DNA, 201 bp, Homo sapiens; identical to SEQ ID NO: 10596

SEQ ID NO: 14659 - DNA, 201 bp, Homo sapiens; identical to SEQ ID NO: 9592

SEQ ID NO: 14660 - DNA, 201 bp, Homo sapiens; identical to SEQ ID NO: 10598

SEQ ID NO: 14661 - DNA, 201 bp, Homo sapiens; identical to SEQ ID NO: 10383

SEQ ID NO: 14662 - DNA, 201 bp, Homo sapiens; identical to SEQ ID NO: 1005

SEQ ID NO: 14663 - DNA, 201 bp, Homo sapiens; identical to SEQ ID NO: 10600

SEQ ID NO: 14664 - DNA, 201 bp, Homo sapiens; identical to SEQ ID NO: 10384

SEQ ID NO: 14665 - DNA, 201 bp, Homo sapiens; identical to SEQ ID NO: 1006

SEQ ID NO: 14666 - DNA, 201 bp, Homo sapiens; identical to SEQ ID NO: 10603

SEQ ID NO: 14667 - DNA, 201 bp, Homo sapiens; identical to SEQ ID NO: 9596

SEQ ID NO: 14668 - DNA, 201 bp, Homo sapiens; identical to SEQ ID NO: 10385

SEQ ID NO: 14669 - DNA, 201 bp, Homo sapiens; identical to SEQ ID NO: 9598

SEQ ID NO: 14670 - DNA, 201 bp, Homo sapiens; identical to SEQ ID NO: 10386

SEQ ID NO: 14671 - DNA, 201 bp, Homo sapiens; identical to SEQ ID NO: 10387

SEQ ID NO: 14672 - DNA, 201 bp, Homo sapiens; identical to SEQ ID NO: 9600

SEQ ID NO: 14673 - DNA, 201 bp, Homo sapiens; identical to SEQ ID NO: 10389

SEQ ID NO: 14674 - DNA, 201 bp, Homo sapiens; identical to SEQ ID NO: 9601

SEQ ID NO: 14675 - DNA, 201 bp, Homo sapiens; identical to SEQ ID NO: 10391

SEQ ID NO: 14676 - DNA, 201 bp, Homo sapiens; identical to SEQ ID NO: 10393

SEQ ID NO: 14677 - DNA, 201 bp, Homo sapiens; identical to SEQ ID NO: 10395

SEQ ID NO: 14678 - DNA, 201 bp, Homo sapiens; identical to SEQ ID NO: 10501

SEQ ID NO: 14679 - DNA, 201 bp, Homo sapiens; identical to SEQ ID NO: 10397

SEQ ID NO: 14680 - DNA, 201 bp, Homo sapiens; identical to SEQ ID NO: 10502

SEQ ID NO: 14681 - DNA, 201 bp, Homo sapiens; identical to SEQ ID NO: 10503

SEQ ID NO: 14682 - DNA, 201 bp, Homo sapiens; identical to SEQ ID NO: 9606

SEQ ID NO: 14683 - DNA, 201 bp, Homo sapiens; identical to SEQ ID NO: 10505

SEQ ID NO: 14684 - DNA, 201 bp, Homo sapiens; identical to SEQ ID NO: 9607

SEQ ID NO: 14685 - DNA, 201 bp, Homo sapiens; identical to SEQ ID NO: 9608

SEQ ID NO: 14686 - DNA, 201 bp, Homo sapiens; identical to SEQ ID NO: 9422

SEQ ID NO: 14687 - DNA, 201 bp, Homo sapiens; identical to SEQ ID NO: 9621

SEQ ID NO: 14688 - DNA, 201 bp, Homo sapiens; identical to SEQ ID NO: 9622

SEQ ID NO: 14689 - DNA, 201 bp, Homo sapiens; identical to SEQ ID NO: 10413

SEQ ID NO: 14690 - DNA, 201 bp, Homo sapiens; identical to SEQ ID NO: 10414

SEQ ID NO: 14691 - DNA, 201 bp, Homo sapiens; identical to SEQ ID NO: 10415

SEQ ID NO: 14692 - DNA, 201 bp, Homo sapiens; identical to SEQ ID NO: 10416

SEQ ID NO: 14693 - DNA, 201 bp, Homo sapiens; identical to SEQ ID NO: 10417

SEQ ID NO: 14694 - DNA, 201 bp, Homo sapiens; identical to SEQ ID NO: 10418

SEQ ID NO: 14695 - DNA, 201 bp, Homo sapiens; identical to SEQ ID NO: 10419

SEQ ID NO: 14696 - DNA, 201 bp, Homo sapiens; identical to SEQ ID NO: 10421

SEQ ID NO: 14697 - DNA, 201 bp, Homo sapiens; identical to SEQ ID NO: 10422

SEQ ID NO: 14698 - DNA, 201 bp, Homo sapiens; identical to SEQ ID NO: 10424

SEQ ID NO: 14699 - DNA, 201 bp, Homo sapiens; identical to SEQ ID NO: 10426

SEQ ID NO: 14700 - DNA, 201 bp, Homo sapiens; identical to SEQ ID NO: 9497

SEQ ID NO: 14701 - DNA, 201 bp, Homo sapiens; identical to SEQ ID NO: 9632

SEQ ID NO: 14702 - DNA, 201 bp, Homo sapiens; identical to SEQ ID NO: 9633

SEQ ID NO: 14703 - DNA, 201 bp, Homo sapiens; identical to SEQ ID NO: 9500

SEQ ID NO: 14704 - DNA, 201 bp, Homo sapiens; identical to SEQ ID NO: 10684

SEQ ID NO: 14705 - DNA, 201 bp, Homo sapiens; identical to SEQ ID NO: 10686

SEQ ID NO: 14706 - DNA, 201 bp, Homo sapiens; identical to SEQ ID NO: 10633

SEQ ID NO: 14707 - DNA, 201 bp, Homo sapiens; identical to SEQ ID NO: 10455

SEQ ID NO: 14708 - DNA, 201 bp, Homo sapiens; identical to SEQ ID NO: 10456

SEQ ID NO: 14709 - DNA, 201 bp, Homo sapiens; identical to SEQ ID NO: 10457

SEQ ID NO: 14710 - DNA, 201 bp, Homo sapiens; identical to SEQ ID NO: 10458

SEQ ID NO: 14711 - DNA, 201 bp, Homo sapiens; identical to SEQ ID NO: 10459

SEQ ID NO: 14712 - DNA, 201 bp, Homo sapiens; identical to SEQ ID NO: 10460

SEQ ID NO: 14713 - DNA, 201 bp, Homo sapiens; identical to SEQ ID NO: 10462

SEQ ID NO: 14714 - DNA, 201 bp, Homo sapiens; identical to SEQ ID NO: 10461

SEQ ID NO: 14715 - DNA, 201 bp, Homo sapiens; identical to SEQ ID NO: 1001

SEQ ID NO: 14716 - DNA, 201 bp, Homo sapiens; identical to SEQ ID NO: 1003

SEQ ID NO: 14717 - DNA, 201 bp, Homo sapiens; identical to SEQ ID NO: 1004

SEQ ID NO: 14718 - DNA, 201 bp, Homo sapiens; identical to SEQ ID NO: 10558

SEQ ID NO: 14719 - DNA, 201 bp, Homo sapiens; identical to SEQ ID NO: 1007

SEQ ID NO: 14720 - DNA, 201 bp, Homo sapiens; identical to SEQ ID NO: 9913

SEQ ID NO: 14721 - DNA, 201 bp, Homo sapiens; identical to SEQ ID NO: 10560

SEQ ID NO: 14722 - DNA, 201 bp, Homo sapiens; identical to SEQ ID NO: 9919

SEQ ID NO: 14723 - DNA, 201 bp, Homo sapiens; identical to SEQ ID NO: 9920

SEQ ID NO: 14724 - DNA, 201 bp, Homo sapiens; identical to SEQ ID NO: 9921

SEQ ID NO: 14725 - DNA, 201 bp, Homo sapiens; identical to SEQ ID NO: 9923

SEQ ID NO: 14726 - DNA, 201 bp, Homo sapiens; identical to SEQ ID NO: 10346

SEQ ID NO: 14727 - DNA, 201 bp, Homo sapiens; identical to SEQ ID NO: 10720

SEQ ID NO: 14728 - DNA, 201 bp, Homo sapiens; identical to SEQ ID NO: 10473

SEQ ID NO: 14729 - DNA, 201 bp, Homo sapiens; identical to SEQ ID NO: 1002

SEQ ID NO: 14730 - DNA, 201 bp, Homo sapiens; identical to SEQ ID NO: 9564

SEQ ID NO: 14731 - DNA, 201 bp, Homo sapiens; identical to SEQ ID NO: 9565

SEQ ID NO: 14732 - DNA, 201 bp, Homo sapiens; identical to SEQ ID NO: 9567

SEQ ID NO: 14733 - DNA, 201 bp, Homo sapiens; identical to SEQ ID NO: 9568

SEQ ID NO: 14734 - DNA, 201 bp, Homo sapiens; identical to SEQ ID NO: 9569

SEQ ID NO: 14735 - DNA, 201 bp, Homo sapiens; identical to SEQ ID NO: 9570

SEQ ID NO: 14736 - DNA, 201 bp, Homo sapiens; identical to SEQ ID NO: 10644

SEQ ID NO: 14737 - DNA, 201 bp, Homo sapiens; identical to SEQ ID NO: 9571

SEQ ID NO: 14738 - DNA, 201 bp, Homo sapiens; identical to SEQ ID NO: 10477

SEQ ID NO: 14739 - DNA, 201 bp, Homo sapiens; identical to SEQ ID NO: 10478

SEQ ID NO: 14740 - DNA, 201 bp, Homo sapiens; identical to SEQ ID NO: 10360

SEQ ID NO: 14741 - DNA, 201 bp, Homo sapiens; identical to SEQ ID NO: 10479

SEQ ID NO: 14742 - DNA, 201 bp, Homo sapiens; identical to SEQ ID NO: 10480

SEQ ID NO: 14743 - DNA, 201 bp, Homo sapiens; identical to SEQ ID NO: 10481

SEQ ID NO: 14744 - DNA, 201 bp, Homo sapiens; identical to SEQ ID NO: 10483

SEQ ID NO: 14745 - DNA, 201 bp, Homo sapiens; identical to SEQ ID NO: 10485

SEQ ID NO: 14746 - DNA, 201 bp, Homo sapiens; identical to SEQ ID NO: 10488

SEQ ID NO: 14747 - DNA, 201 bp, Homo sapiens; identical to SEQ ID NO: 10490

SEQ ID NO: 14748 - DNA, 201 bp, Homo sapiens; identical to SEQ ID NO: 10492

SEQ ID NO: 14749 - DNA, 201 bp, Homo sapiens
gcacgcccctcacgcccagtgcctcccctccctgttccccaccaggcactgcaacatggtgctggagaacgtgaaggagatgtggactgaggtacccaagrgtggcaagggcaagaagaagtccaagccagtcaacaaagaccgctacatctccaagatgttcctgcgcggggactcagtcatcgtggtcctgcggaaccc

SEQ ID NO: 14750 - DNA, 201 bp, Homo sapiens
agcctctctcacttattggttccatgtttgtccatgcaggagcctcctcaacaagcccaagagtgagatgaccccagaggagctgcagaagcgagaggagkaggaatttaacaccggtccactctctgtgctcacacagtcagtcaagaacaatacccaagtgctcatcaactgccgcaacaataagaaactcctgggccg

SEQ ID NO: 14751 - DNA, 201 bp, Homo sapiens
ttgggaggtggaggcgggcagatcacctgaggtcaggaattcgagaccagcctggccaacatggtaaaacgctgtctctactaaaaatacaaaaactggcygggcgtggtgtctcacacctgtaatcccaacactttgggaggccaaggcgggtggatcacctgaggtcaggagtttgagatcagcctggccaacatggtg

SEQ ID NO: 14752 - DNA, 201 bp, Homo sapiens
agggcaaggctatggccagggaaggggtcccagaggtttgagaggggtacggaaggtttagcaagggccaaggagtgtgggctttgttatagggacactgrggaggcacagagaggggttaagcagggcaggagcatgattaaatctgtgtttttcttttcttttcttttttttctttctttttttttttttttgagacgg

SEQ ID NO: 14753 - DNA, 201 bp, Homo sapiens
caggacccctgagcaagtggagaggccctggctctgccccatcgaggcctcactttctccatctgcaaagcaaacagtttgcatggaaatgagcgcccagytgtggctctggagaacattttagctctcctgctttaatcttcctgagcttctccttgtcactctgttgctctcttctctacctcttataatgaattggcc

SEQ ID NO: 14754 - DNA, 201 bp, Homo sapiens
agcttggtcatcccggcctagcacctgcacccttccccaagccatgctgctggagggggcgagcagcaggcagtagggggcactgtcagaggcacgccccycacgcccagtgcctcccctccctgttccccaccaggcactgcaacatggtgctggagaacgtgaaggagatgtggactgaggtacccaagagtggcaagg

SEQ ID NO: 14755 - DNA, 201 bp, Homo sapiens
aagccagtcaacaaagaccgctacatctccaagatgttcctgcgcggggactcagtcatcgtggtcctgcggaacccgctcatcgccggcaagtaggggcmgcctgtctgttgacagaactcactcctctgtcctatgaagaccgctgccattggtgttgagaataataaagctctgtgtttttttctagtggtatctgtt

SEQ ID NO: 14756 - DNA, 201 bp, Homo sapiens
ggccaggctggtctcgaactcctgacctcaaatgatccacctacctcagcctcccaaagtgctgggattacagatgtgagccaccgcgcccggcaataacmgttcttttcaaagggtaaggtttgaatccaggtcttagaacagtgcctggcatataactaaataagggttatctctgattattattcctcaagctcagtt

SEQ ID NO: 14757 - DNA, 201 bp, Homo sapiens
ggttggggagacactgaagccaaggccctgatcacccatcctcacagctccagcctctcaactccagcctctctcacttattggttccatgtttgtccatrcaggagcctcctcaacaagcccaagagtgagatgaccccagaggagctgcagaagcgagaggaggaggaatttaacaccggtccactctctgtgctcaca

SEQ ID NO: 14758 - DNA, 201 bp, Homo sapiens
ctgaaatcgcaccactgcattgcagcctgggcaacagagtgagattctgtctcaaaaaagaaaatgataattttcaatggccctgtgaggaaggtaacgtsattatcttccctcttaaaaaggagcaaactggcacagagaggtgcagtcctttgcctcagcctcaacctaaggactggcagagttgctttggcagcttgg

SEQ ID NO: 14759 - DNA, 201 bp, Homo sapiens
agctgcagaagcgagaggaggaggaatttaacaccggtccactctctgtgctcacacagtcagtcaagaacaatacccaagtgctcatcaactgccgcaayaataagaaactcctgggccgcgtgaaggccttcgataggtgagtgctgggtcctgggaggtgttctccgcaggcctggagaggccactccagctccagtc

SEQ ID NO: 14760 - DNA, 201 bp, Homo sapiens
ccttcctgcccaagggcctttgcctatgctatcgcttccgcctagaatcctgttctccagctctccccaaagtgatctctttcacctctttcggggatggyttaagtgtcacctccttggagacgcctcccagaccaccctaggcccccttctcgcttcccttcataaccattccatagcgtgtgtggaacttgatgtttt

SEQ ID NO: 14761 - DNA, 201 bp, Homo sapiens
gtggaggtggtgcatgcctgtagtcccagctcctcaggaggctgaggcaggagaatcgcttgaacccaggaggcagaggttgcagtgagccgagatcacaycactgcgctccagcctgggcaacagatcaagactccgtctcaaaaaaaaaaaaaatgtctgttaggcatctagctgatgatactcagaaggctgaacagg

SEQ ID NO: 14762 - DNA, 201 bp, Homo sapiens
gagagacccgtggtgggaggattgcttgagcccaggagttcaagaccaacctgggtaagagtgacatcctcattttttaaaaaataaaatattacccccargagacactcctaagaatctccaatgcacctgaaatgaaatcccaacttgggtgcccctgcccacttctctgtctctccccacctgttggctctgacttaa

SEQ ID NO: 14763 - DNA, 201 bp, Homo sapiens
cccctcagtggcctccatcctggtccagccaccatcacttcccacctgcagtcccctcctttctgggctccagcttccacccctgcccctgataatttgtmctcctacagggcagacaagaaggatctgtttaaaacattagcccatttgggccgggcatggtggcttatgcctgtaatcccagcactttgggaggctgag

SEQ ID NO: 14764 - DNA, 201 bp, Homo sapiens
tgctggaattacaggtgtgagccactgtgttgggccctccccccatatctttgtctctgcctatgtctctgtcctctggatataggcaaacacctgaaagktgcaagagtttgcaggcctgaggtcagtgcacactcagtgagatgtgtgccctgctctgagctgtgaaaggcacagcctggggccgggcgtggtgcctca

SEQ ID NO: 14765 - DNA, 201 bp, Homo sapiens
gtggatccagttgtcccaccaccctccgcagccgggcttcggggaggcttccgatcaatgggaccttgggaaggaggtgggatagggaagggaagaatgasagcaacccccccatttcaaccctaccccgggcgccgtcacccgcgaggagccccgggttctcttcctaatctgccgcctccagcatcggagacttctagg

SEQ ID NO: 14766 - DNA, 201 bp, Homo sapiens
tgtgtttttcttttctgtttgttttgagacagaatctcgctctgtcatccaggctggagtgcagtggtgcgatctcggctcactgcaacctccgcctctcrgtttcaagtgatcctcctgtctcaacctcccaagtagtaggattacaggtatgtaccaccatacccagctaatttttgtatttttagtagagatgaggtt

SEQ ID NO: 14767 - DNA, 201 bp, Homo sapiens
agaagggcagggaccttttttctgtttccttcaccatttccccagcgtcctccgtactgggcctggcacgcagttggcactcaataaatccatgctaactkaacagacacggggatcccgccccctagcagtaactttccaactcccggctggcctcattcccaggccctgggagggtccccgaggacaagccgcggctgg

SEQ ID NO: 14768 - DNA, 201 bp, Homo sapiens
tttctttatgtttgttccttcagcaaacatcccccaaatgccccctgtgtgtccagccctgtgttgcagtgcaggggcaccaggtacccaggagcctctgrtctgccctgaaagacaggaggattagacaggtgatgaacgcagtcagtgccaccagcacagcggctgaggtgagagcattgcttaagcccagaagtttag

SEQ ID NO: 14769 - DNA, 201 bp, Homo sapiens
gagtgaagagtgggagccagccaggaagatatctatgaaaagcatattcttttttttttttttaagagacaaggtctctgtcacccaggctagaatacagkggcacgatcatggctcactgcagtctcaaactcctagactcaagccatcctcccctctcagcctcccaagtagcatgccactactcccagataatttttt

SEQ ID NO: 14770 - DNA, 201 bp, Homo sapiens
tttccctgttggacaagctgggctcgaacttctgacctcaaatgatctgcctgcctcggcctcccaaagtgctgggattacaggtgcgagttaccacgccyggccgggaaggcctctttgaaggggtgacattggagtggacacctgagtgaagagtgggagccagccaggaagatatctatgaaaagcatattctttttt

SEQ ID NO: 14771 - DNA, 201 bp, Homo sapiens
gggactacgggtacccaccaccacgcctggctaattttgtatttttagtagagatgaggtttcaccatgttggccaggctggtctcaaactcctgatctcragggatctgcctgtctcggcctcccaaagtgctgggattagaggtgtgaaccactgcgcctggcctttaaatgactcttcatgctttctggaagacaaca

SEQ ID NO: 14772 - DNA, 201 bp, Homo sapiens
ggccgcgcccccgaagtcacggccggcgggcatttggaaatagcttgtcatttccctccttcaacctgtaccattcttcaagaaacggtttgaatcagacygcctttccttttgtcttcattgtcataaacatctgcccccgtgtggttctgactggccgcgaacccctacccgaagcttttattccatcattgtgcaccg

SEQ ID NO: 14773 - DNA, 201 bp, Homo sapiens
gtccgattaactccagtcagagccccagttcctcctcttagcttctttgggatcttgaacaggattcttatttcccattccctggagggctagggggtcarggactggaggtgggtccctttacctttctgacttggagatttcccgggctgcccggggttcgcacaaccagcagggggcgcagataagtgctccagagac

SEQ ID NO: 14774 - DNA, 201 bp, Homo sapiens
ccagcccaccccacagcgagcagcgaaaccaataagaactacggtcctgaggacacgcctcccagcctcccttaggtattggggttggttcccctgagaakggcacgacccaaatgggagcgcaagagaagtaggctccgccttagcggaggagggaaagccaatgaacagcgtttgatcatggaaaatattcgatctccc

SEQ ID NO: 14775 - DNA, 201 bp, Homo sapiens
tccccagcgtcctccgtactgggcctggcacgcagttggcactcaataaatccatgctaactgaacagacacggggatcccgccccctagcagtaactttscaactcccggctggcctcattcccaggccctgggagggtccccgaggacaagccgcggctggtggggacctcgcccgggccggagccggagggcagggcc

SEQ ID NO: 14776 - DNA, 201 bp, Homo sapiens
actccagtcagagccccagttcctcctcttagcttctttgggatcttgaacaggattcttatttcccattccctggagggctagggggtcagggactggargtgggtccctttacctttctgacttggagatttcccgggctgcccggggttcgcacaaccagcagggggcgcagataagtgctccagagacgctgtggat

SEQ ID NO: 14777 - DNA, 201 bp, Homo sapiens
caaccatctgtggggtggatactagagctatttttttttttttttttttttttgagaaggagtctcaccctgttgcccacaggctggagtgcagtggcacmatctctgctcactgcaacctccacctcccgggttcaaacagttcttcctcagcctcccaagtagctgggattacaggcgcccgccaccacgcccagctaa

SEQ ID NO: 14778 - DNA, 201 bp, Homo sapiens
tcgcccggctaattttttgtattttcagtagagacggggtttcaccgtgttagccaggatggtctcgatctcctgacctcgtgatccgcccgcctcggccycccaaagtgctgggattacaggcgtgagccaccgcgcccggcctaattttttttttgagatggagtctcactctgtagcccaagctggagtgcagtggcg

SEQ ID NO: 14779 - DNA, 201 bp, Homo sapiens
ctcgaacttctgacctcaaatgatctgcctgcctcggcctcccaaagtgctgggattacaggtgcgagttaccacgcccggccgggaaggcctctttgaargggtgacattggagtggacacctgagtgaagagtgggagccagccaggaagatatctatgaaaagcatattcttttttttttttttaagagacaaggtct

SEQ ID NO: 14780 - DNA, 201 bp, Homo sapiens
ttcactatgttgtccaggctggtctcaaactcttgacctcaggtgatccgcccgcctcggcctcccaaagtgttgggattacaggcatgagccactgtgtytggcctctcttcttgtctttatctgcctcccactctagatctttcttggtccttgatttctttttttttttttttttttttttttttttgagacaggatc

SEQ ID NO: 14781 - DNA, 201 bp, Homo sapiens
cctttgctgccccaacaacagtcaggggaggccggggaatcacttaaggggccccgcccaccaccggagttccacccactccgcgtgcctctccctccccmcagatcatcacgcctgggagttgcgggagcgggtgcgctgcctcggagtcccgcgtgtatacggctccccagccgtctgcccctgtgtgtgaatccctga

SEQ ID NO: 14782 - DNA, 201 bp, Homo sapiens
caccatgttggccaggctgatctcaaactcctgacctcaggtgatccacccgccttggcctcccaaagtgttgggattacaggtgtgagacaccacgcccrgccagtttttgtatttttagtagagacagcgttttaccatgttggccaggctggtctcgaattcctgacctcaggtgatctgcccgcctccacctcccaa

SEQ ID NO: 14783 - DNA, 201 bp, Homo sapiens
ggccaattcattataagaggtagagaagagagcaacagagtgacaaggagaagctcaggaagattaaagcaggagagctaaaatgttctccagagccacarctgggcgctcatttccatgcaaactgtttgctttgcagatggagaaagtgaggcctcgatggggcagagccagggcctctccacttgctcaggggtcctg

SEQ ID NO: 14784 - DNA, 201 bp, Homo sapiens
ccttgccactcttgggtacctcagtccacatctccttcacgttctccagcaccatgttgcagtgcctggtggggaacagggaggggaggcactgggcgtgrggggcgtgcctctgacagtgccccctactgcctgctgctcgccccctccagcagcatggcttggggaagggtgcaggtgctaggccgggatgaccaagct

SEQ ID NO: 14785 - DNA, 201 bp, Homo sapiens
cttgcttcaaagagagaaagatgtactgccttctgtgatggaaaagaataagatggccgggtggtgtggctcacgcctgtaatcccagcactttgggaggycaaggagggtggatcacttgaggtcaggagtttgagaccagcctggccaacatgtcaaaaccccgtctttactaaaaatacaaaaattagctgggcatgg

SEQ ID NO: 14786 - DNA, 201 bp, Homo sapiens
ccaagctgccaaagcaactctgccagtccttaggttgaggctgaggcaaaggactgcacctctctgtgccagtttgctcctttttaagagggaagataatsacgttaccttcctcacagggccattgaaaattatcattttcttttttgagacagaatctcactctgttgcccaggctgcaatgcagtggtgcgatttcag

SEQ ID NO: 14787 - DNA, 201 bp, Homo sapiens
ctgggaggcgaggcttgcagtgagctgagatcacgccactgcactccagcctgagtgacacagcaagactctgtctcaaaaaaaaaaaagagtcgggcacrgtggctcatgcctgtgattccagcactttgggaggctgaggcaggcagatcacctgaagtcaggaatttgagaccagcctggccaacatagtgaaacccc

SEQ ID NO: 14788 - DNA, 201 bp, Homo sapiens
tctctggttggctggtcacatgcctcgtgccctggagctgaagggtggagtcagcccttctcaaataagggtaagcagttccccaagataaaatagggtayttgggcagaaacaaagagcagaggtccttccagtctctctctgggcctggggcttcgagccaagccttgttcccttccccttcttgccccgaccaggacc

SEQ ID NO: 14789 - DNA, 201 bp, Homo sapiens
aacttccgcctcccgggttcaagcgattctccagcctcagcctcccgagaagccgggattacagaagccgggattacaggcgcgcgccaccacacccggctttttttttatatatatatttttagtacagacagggtttcaccatgttggccaggctggtctcgaactcctaacctcaagtgatccgccggccttggcttc

SEQ ID NO: 14790 - DNA, 201 bp, Homo sapiens
agcgtagctctagggcaaccgcccgctcagcaaacaccccccccttccacctttgctgccccaacaacagtcaggggaggccggggaatcacttaaggggycccgcccaccaccggagttccacccactccgcgtgcctctccctccccccagatcatcacgcctgggagttgcgggagcgggtgcgctgcctcggagtcc

SEQ ID NO: 14791 - DNA, 201 bp, Homo sapiens
gcctcatgtctgtaatctcagcactttggaggccaaggaggccagtccagcgtgaccaacatggagaaaccctgtctctacttaaaatacaaaaattagcsaggctaggtggcacgtgcctgtaatcccagctattcaggaggctgaggcaggaacatcgcttgaacctgggaggcagaggttgcactgagctgagattgt

SEQ ID NO: 14792 - DNA, 201 bp, Homo sapiens
gctacattgcactagaaactatatccacatcaacctgttcacgtctttcatgctgcgagctgcggccattctcagccgagaccgtctgctacctcgacctkgcccctaccttggggaccaggcccttgcgctgtggaaccaggtgggcatcctccttccgttcctccaaatgggaatcttgcttctctggtgggaccagga

SEQ ID NO: 14793 - DNA, 201 bp, Homo sapiens
ctgcagcctgggaactcctgggttgaagcgatcctcccgcctcagcctcccaaatagcagggactacaggcgcacgctaacacacccagctaatttttttwaaaaaattggcagtgacagagtcttgccatgttacccaggctggtcttaaactcctggcctcaagggatcctctcacctcagcctcccaaagcgctggga

SEQ ID NO: 14794 - DNA, 201 bp, Homo sapiens
cggtctgggggggtcctcccttctttcttttcctagacaggctctaaggggcagacggcgggggagctgtaccagcgctgggaacggtaccgcagggagtsccaggagaccttggcagccgcggaaccgccttcaggtgtgaccaggagggctggggacgcggggaggacctgaggctgagaggggtgggcttgggatggg

SEQ ID NO: 14795 - DNA, 201 bp, Homo sapiens
ggacgatctggggcggggacttgtttggtgggaggagcccagagtggggccgggaggaggggcggagctttgaggctggtgggaggagcttgtggccgagycgggacggaacgccctccgagtgggcggggctagagccgggcttggtgtggccggcggagaagcacttggcccactgcggagaagcacttggcccactgc

SEQ ID NO: 14796 - DNA, 201 bp, Homo sapiens
gacgatctggggcggggacttgtttggtgggaggagcccagagtggggccgggaggaggggcggagctttgaggctggtgggaggagcttgtggccgagcmgggacggaacgccctccgagtgggcggggctagagccgggcttggtgtggccggcggagaagcacttggcccactgcggagaagcacttggcccactgcg

SEQ ID NO: 14797 - DNA, 201 bp, Homo sapiens
gcagaggtccttccagtctctctctgggcctggggcttcgagccaagccttgttcccttccccttcttgccccgaccaggaccaaaggctcatcttggagyggttgcaggtcatgtacactgtcggctactccctgtctctcgccacactgctgctagccctgctcatcttgagtttgttcaggtgggaccttaaccctga

SEQ ID NO: 14798 - DNA, 201 bp, Homo sapiens
tggaagataccaattattttttgttttgtttttgtttgttttgtttctttgagatggagtctcaaaaaagaagctgatttttttttttttttttttttttytgagacggagtctccctctgtcgctcaggctggagtgcagtggtgcaatctcggctcaccgcaacctccacctcccgggttcaagcgattctcctgcatc

SEQ ID NO: 14799 - DNA, 201 bp, Homo sapiens
aaagaagctgatttttttttttttttttttttttttgagacggagtctccctctgtcgctcaggctggagtgcagtggtgcaatctcggctcaccgcaacytccacctcccgggttcaagcgattctcctgcatcagcttcccgagtagctgggattacaggcgcctgccaccacacctggctaatttttgtatttttagc

SEQ ID NO: 14800 - DNA, 201 bp, Homo sapiens
aagctgatttttttttttttttttttttttttgagacggagtctccctctgtcgctcaggctggagtgcagtggtgcaatctcggctcaccgcaacctccrcctcccgggttcaagcgattctcctgcatcagcttcccgagtagctgggattacaggcgcctgccaccacacctggctaatttttgtatttttagcagag

SEQ ID NO: 14801 - DNA, 201 bp, Homo sapiens
ggacacagagtggaagaacctttgatggcaagagacggggtggaagggcgatcaaagctgggggaggctgggagacacccgggcagcgctgactacccctytaccggtctggcccctccctaggccctcgctgcctgccgcacggcccagatcgtgacccagtactgcgtgggtgccaactacacgtggctgctggtggag

SEQ ID NO: 14802 - DNA, 201 bp, Homo sapiens
gggttccgcaggaccacgatgactgagtccccgcgcaggaacatcttggagatgtagcggtctttgttgactggcttggacttcttcttgcccttgccacycttgggtacctcagtccacatctccttcacgttctccagcaccatgttgcagtgcctggtggggaacagggaggggaggcactgggcgtgaggggcgtgc

SEQ ID NO: 14803 - DNA, 201 bp, Homo sapiens
ctgggaagtgggctgccacctcctcctgccccttcagaatgggatcgcggctggctcagcccttatctctccccacagattaatttcctcatttttatcckcattcttggcattctcctgtccaagctgaggacacggcaaatgcgctgccgggattaccggctgaggtgagggcatgcgttggggaccgaggggaagggg

SEQ ID NO: 14804 - DNA, 201 bp, Homo sapiens
aattttgtatttttagtagaggcggggtttcaccatgttggccaggctggtctccaactcctaaccttgggtagtccacccgcctcggcctcccaaagtgmtgggattacaggcgtgagccatggcgcccagcccgttcattcattcgatacaaaatactgagctaggactgtcctgggctgtggggagcagcagggacca

SEQ ID NO: 14805 - DNA, 201 bp, Homo sapiens
cgtgggaggctccgaggagggccacttccgctactacctgctcctcggctggggtgagctccgatcccgtcccccgcccaacccagcgcgcctctcctcgkctcccccaactgccctgctggttggcctctgcgggtctcctcccgtctctaggcttctgccttccccaccccgacagaggaattccgcgggtcttgggcc

SEQ ID NO: 14806 - DNA, 201 bp, Homo sapiens
aacagataccactagaaaaaaacacagagctttattattctcaacaccaatggcagcggtcttcataggacagaggagtgagttctgtcaacagacaggckgcccctacttgccggcgatgagcgggttccgcaggaccacgatgactgagtccccgcgcaggaacatcttggagatgtagcggtctttgttgactggctt

SEQ ID NO: 14807 - DNA, 201 bp, Homo sapiens
tgcgagatggggaaccagggctgcgggatcactgctgccgccctctctccccaggctggctcgctccacgctgacgctggtgcccctgctgggtgtccacsaggtggtgtttgctcccgtgacagaggaacaggcccggggcgccctgcgcttcgccaagctcggctttgagatcttcctcagctccttccaggtgctcag

SEQ ID NO: 14808 - DNA, 201 bp, Homo sapiens
atcaacctgttcacgtctttcatgctgcgagctgcggccattctcagccgagaccgtctgctacctcgacctggcccctaccttggggaccaggcccttgygctgtggaaccaggtgggcatcctccttccgttcctccaaatgggaatcttgcttctctggtgggaccaggaagttctcagtccatttcctatctcctac

SEQ ID NO: 14809 - DNA, 201 bp, Homo sapiens
acagtggctcacatctgtaatcccagcactttgggaggccaagacgggcagatcacgaggccaggagttcaagatcagcctggccaatatggtgaaacccygtctctactaaaaatacaaaaattagctgggtgtggtggcggacacctgtaatcccagctactcaggaggctgaggcagaagaattgcttgaacccagga

SEQ ID NO: 14810 - DNA, 201 bp, Homo sapiens
attctgtctctactaaaaacacaaaaaattagctaggcgtggtggcgcatgcctgtaatcccaggtacttgggaggctgattcaggagaatcgcttgaacstgggaggccaagtttgcagtgagctgagatcgtgccactgcactccagcctgggcaacagagcaagactctgtctccctgtctccaaaaaaaaaaaaaaa

SEQ ID NO: 14811 - DNA, 201 bp, Homo sapiens
tgcctgtaatcccaggtacttgggaggctgattcaggagaatcgcttgaacctgggaggccaagtttgcagtgagctgagatcgtgccactgcactccagmctgggcaacagagcaagactctgtctccctgtctccaaaaaaaaaaaaaaaaaagcaaaaaacaaaacggcaacacaatcaccctaaattttcacaacta

SEQ ID NO: 14812 - DNA, 201 bp, Homo sapiens
tgaggcagaagaattgcttgaacccaggagacagaggttgcagtgagctgagattgcgccactgcactccagcctgggtgacagagcaagactccatcgcaaaaaaaaaaaaaaaaaaaaaagccatagcgtggcccggcagtggctcatgcctgtaatcccagcactttgggaggctgaggtgggcagatcgctttttgc

SEQ ID NO: 14813 - DNA, 201 bp, Homo sapiens
agaatcgcttgaacctgggaggccaagtttgcagtgagctgagatcgtgccactgcactccagcctgggcaacagagcaagactctgtctccctgtctccaaaaaaaaaaaaaaaaaagcaaaaaacaaaacggcaacacaatcaccctaaattttcacaactactactatattactgctccattttccagatgaagaaac

SEQ ID NO: 14814 - DNA, 201 bp, Homo sapiens; identical to SEQ ID NO: 1026

SEQ ID NO: 14815 - DNA, 201 bp, Homo sapiens
tgcgccactgcactccagcctgggtgacagagcaagactccatcgcaaaaaaaaaaaaaaaaaaaaaagccatagcgtggcccggcagtggctcatgcctrtaatcccagcactttgggaggctgaggtgggcagatcgctttttgcccaggagttcaagaccagcctgggtaacatagcaaaaccccacctctacaaaaa

SEQ ID NO: 14816 - DNA, 201 bp, Homo sapiens
aagaccagcctgggtaacatagcaaaaccccacctctacaaaaacatacaaaaattagccaggcatggcggccctcgcctgtactcccagctacttgggargctgagatggtaggatcacttgagtccatcaggtcgaggctgcagtgagctgtgatgctgtgatagtgccagtgcaatctggcgaaagattgagaccctg

SEQ ID NO: 14817 - DNA, 201 bp, Homo sapiens
gcggccctcgcctgtactcccagctacttgggaggctgagatggtaggatcacttgagtccatcaggtcgaggctgcagtgagctgtgatgctgtgatagygccagtgcaatctggcgaaagattgagaccctgtttcaaaaaaataaaatgaaataaaataaaataagaggggccaggcacagtggctcatgcctgtaat

SEQ ID NO: 14818 - DNA, 201 bp, Homo sapiens
cacccatgtggtggcagcatcatagttcactgcagcctgggaactcctgggttgaagcgatcctcccgcctcagcctcccaaatagcagggactacaggcrcacgctaacacacccagctaatttttttaaaaaaattggcagtgacagagtcttgccatgttacccaggctggtcttaaactcctggcctcaagggatcc

SEQ ID NO: 14819 - DNA, 201 bp, Homo sapiens
gaggcgggcgtattgcctgagctcaggagtttgagacagcctgggcaacatggcaaaaattctgtctctactaaaaacacaaaaaattagctaggcgtggkggcgcatgcctgtaatcccaggtacttgggaggctgattcaggagaatcgcttgaacctgggaggccaagtttgcagtgagctgagatcgtgccactgca

SEQ ID NO: 14820 - DNA, 201 bp, Homo sapiens; identical to SEQ ID NO: 1020

SEQ ID NO: 14821 - DNA, 201 bp, Homo sapiens
ttagctgggcgtggtggcgggcgcctgtaatcccagctacttgggaggctgaggaagaactgtttgaacccgggaggtggaggttgcagtgagcagagatkgtgccactgcactccagcctgtgggcaacagggtgagactccttctcaaaaaaaaaaaaaaaaaaaaaaatagctctagtatccaccccacagatggttg

SEQ ID NO: 14822 - DNA, 201 bp, Homo sapiens; identical to SEQ ID NO: 1024

SEQ ID NO: 14823 - DNA, 201 bp, Homo sapiens
ttaagtcagagccaacaggtggggagagacagagaagtgggcaggggcacccaagttgggatttcatttcaggtgcattggagattcttaggagtgtctcytgggggtaatattttattttttaaaaaatgaggatgtcactcttacccaggttggtcttgaactcctgggctcaagcaatcctcccaccacgggtctctc

SEQ ID NO: 14824 - DNA, 201 bp, Homo sapiens
atgcctgtaatcccagctctttgggatgccaaggcaggaggatcgcttgagcccaggagtttgagatcaggctgggcaatatagtgaaaccttgtctctaygacaaataaaattagctaggcatactggtggtgcacctgtggtaccagctataggggggcgctgagacaggaggattgcttgagctcaggaggttgaggc

SEQ ID NO: 14825 - DNA, 201 bp, Homo sapiens
tttgagatcaggctgggcaatatagtgaaaccttgtctctacgacaaataaaattagctaggcatactggtggtgcacctgtggtaccagctatagggggscgctgagacaggaggattgcttgagctcaggaggttgaggctgcagtgagccctgattgtgtcactgcattctagcctgggtgacagagtgagaccctgt

SEQ ID NO: 14826 - DNA, 201 bp, Homo sapiens
aggccctcattggggccaaggagagactcccttccaacctaaacttctcccaaggtgctgggcaatctcagacccccttccctctccactccaggacaggrgcctttcccaggacccggagggcaccaggaatgtggggcagagagcggggaggcagcctaagtccaggaagcgagaaccctcgcctcccccgagacttgt

SEQ ID NO: 14827 - DNA, 201 bp, Homo sapiens
ctgtgtctgtgttgtctgtttgtctctgtgtgtgtttctctctgtcgctgtctctctctgtctctctctccccctctctctctctctctctgtttcttctmgtctctctcttgtagtctctctctcttggtctttctcttcttgcttttttttttttttttgagacagagtcttgctctgtcgcccaggctggagtttagt

SEQ ID NO: 14828 - DNA, 201 bp, Homo sapiens
tgacgctggggttggagtaggagggcagaggtgctgaccttgccctgggaccctccaggcctgatcgcccctgcacgaaccagacccttcgccgccctcasgatgactacctctccgatcctgcagctgctgctgcggctctcactgtgcgggctgctgctccagagggcggaggtgaggaagcgaggagccagaggagct

SEQ ID NO: 14829 - DNA, 201 bp, Homo sapiens
gctgggcatggtggtgcgcacctgtaatcccagctacttgggaggcggaggcaggagaatcacttgaacccaggaggcagatgttgccgtgagccgagatygtgccattgcactccagcttgggcaacaagagcaaaactccatctcaaaaaaaaaaaaaaattggccaggcgcagtggctcatgcctataatcccagcac

SEQ ID NO: 14830 - DNA, 201 bp, Homo sapiens
aatcccagcactgtgggaggctgaggcaggccaatcacctgaagtcaggagttcaagaccagcctgaccaatttggtgaaaacccaactctgctaaaagtrcaaaaaaaaaaaaatagccaggcatggtggcaggtgcctgtaatcccagcctctcgggaggctgaggcaggagaatcacttgaacctggctcactgcaat

SEQ ID NO: 14831 - DNA, 201 bp, Homo sapiens
tcccagcactgtgggaggctgaggcaggccaatcacctgaagtcaggagttcaagaccagcctgaccaatttggtgaaaacccaactctgctaaaagtacaaaaaaaaaaaaatagccaggcatggtggcaggtgcctgtaatcccagcctctcgggaggctgaggcaggagaatcacttgaacctggctcactgcaatct

SEQ ID NO: 14832 - DNA, 201 bp, Homo sapiens
aaggagagactcccttccaacctaaacttctcccaaggtgctgggcaatctcagacccccttccctctccactccaggacaggagcctttcccaggacccrgagggcaccaggaatgtggggcagagagcggggaggcagcctaagtccaggaagcgagaaccctcgcctcccccgagacttgtctccttccagcctctgg

SEQ ID NO: 14833 - DNA, 201 bp, Homo sapiens
tttaaaaaaaaaaatagaactctgtgtggctgaggacagctctccaggggcccccacactgccttccaaattcccctaggcggctacattgcactagaaaytatatccacatcaacctgttcacgtctttcatgctgcgagctgcggccattctcagccgagaccgtctgctacctcgacctggcccctaccttggggacc

SEQ ID NO: 14834 - DNA, 201 bp, Homo sapiens
gtgagagaaaccaatcacagataccattcactggggacacagagtggaagaacctttgatggcaagagacggggtggaagggcgatcaaagctgggggagrctgggagacacccgggcagcgctgactacccctttaccggtctggcccctccctaggccctcgctgcctgccgcacggcccagatcgtgacccagtactg

SEQ ID NO: 14835 - DNA, 201 bp, Homo sapiens
tgccaactacacgtggctgctggtggagggcgtctacctgcacagtctcctggtgctcgtgggaggctccgaggagggccacttccgctactacctgctcstcggctggggtgagctccgatcccgtcccccgcccaacccagcgcgcctctcctcggctcccccaactgccctgctggttggcctctgcgggtctcctcc

SEQ ID NO: 14836 - DNA, 201 bp, Homo sapiens
tgtgtgcacctgtgtgactgtgcgtgactgtgggaggtgggattgcagggtgtgacaagtcactgtgacgtgcacagctatgggacagtgaggttgtgtgygtgacatgtatatgactgtatgtgacttgtgaatatgggtgagactaagggagagttgtgagtctgtatgaccatgtcactcagtgtgaccgtgggggtg

SEQ ID NO: 14837 - DNA, 201 bp, Homo sapiens
ggtgggattgcagggtgtgacaagtcactgtgacgtgcacagctatgggacagtgaggttgtgtgcgtgacatgtatatgactgtatgtgacttgtgaatrtgggtgagactaagggagagttgtgagtctgtatgaccatgtcactcagtgtgaccgtgggggtgagggtgacggtgtgagagtgtttgcctcatgacag

SEQ ID NO: 14838 - DNA, 201 bp, Homo sapiens
ttgtctctactaaaaatacaaaaattagctgggcatggtggcgcgtgcctgtaatcccagctacccgggaggctgaggcaggataattgcttgaaccaggmcccgggaggtggagattgcagtgagccaagatcacgccactgtactccagcctgggctacagagggagactcggccaaaaaaaaaaaaaaaattattagc

SEQ ID NO: 14839 - DNA, 201 bp, Homo sapiens
ctcagcctcccaaagtgctgggattacaggcataagccaccatgcccggcccaaatgggctaatgttttaaacagatccttcttgtctgccctgtaggagkacaaattatcaggggcaggggtggaagctggagcccagaaaggaggggactgcaggtgggaagtgatggtggctggaccaggatggaggccactgagggg

SEQ ID NO: 14840 - DNA, 201 bp, Homo sapiens
tgtggtggtgtgtgcctggaatcccagctacttgggaggctgcggtgggagaattgcttgaacccaggaggcggaggttgcagtgagctgagatcatgctwctgtactccagcctcagcaacagaggaagactctgtctcaaaaaaaaaaaattctatgtctgcgagtaaccacacaactgcatactgcgtatatttattt

SEQ ID NO: 14841 - DNA, 201 bp, Homo sapiens
tgaggcaccacgcccggccccaggctgtgcctttcacagctcagagcagggcacacatctcactgagtgtgcactgacctcaggcctgcaaactcttgcamctttcaggtgtttgcctatatccagaggacagagacataggcagagacaaagatatggggggagggcccaacacagtggctcacacctgtaattccagca

SEQ ID NO: 14842 - DNA, 201 bp, Homo sapiens
ctaaacttctgggcttaagcaatgctctcacctcagccgctgtgctggtggcactgactgcgttcatcacctgtctaatcctcctgtctttcagggcagaycagaggctcctgggtacctggtgcccctgcactgcaacacagggctggacacacagggggcatttgggggatgtttgctgaaggaacaaacataaagaaa

SEQ ID NO: 14843 - DNA, 201 bp, Homo sapiens
gtggcacaatctcagttcactgcaacctccgcctcctaggttcaagcaattatcctgcctcagtctccccaacagctgggattacaggtgtgcaccaccayacccagttaatttttgtattttagtagagacatggtttcactatgttgtccaggctggtctcaaactcttgacctcaggtgatccgcccgcctcggcctc

SEQ ID NO: 14844 - DNA, 201 bp, Homo sapiens
ctcactgcagcctcaatttcctgagctcaagcaaatcctcctgcctcagccatccaagtagctgggaccacaggcgcaccaccaccatgcctggctaattwaaaaaaaaaatgttgagaggccgggcgcggtggctcacgcctgtaatcccagcactttggaaagccgagatgggcagatcacctgcagtcaggagttcga

SEQ ID NO: 14845 - DNA, 201 bp, Homo sapiens
caaaccaccatggcatatgcatacctatgtaacaaacctgtacgttcagcacatgtatcccagaacttaaggtaaatttttttttttaattggaaaactgaaaaaaaaaaatattttttttttagagacgggatctggctatgttgcccaggctggtctccaactcctgggcttaagtgatcctcccatgttggcctccca

SEQ ID NO: 14846 - DNA, 201 bp, Homo sapiens
acacttgcttggtttacctgagtccccaacctgcttcacctcattcggcctgttttctcatctctaaagtggggaaaatactagtctcagtggacaaggcwgttcattcattaaattcagcaaaaaattactgagcatgtgtatatgctaagcactcctccaggcttatcacaggaatacagccaagaaccaaatggtccc

SEQ ID NO: 14847 - DNA, 201 bp, Homo sapiens
acggtgtgagagtgtttgcctcatgacagttggggaatgtgtgttgttggaatgtgactgaggactctgtgggtgactgtgaagtgtgtgagtgtgtgacrgtgttaatgggtgtggttgcatgacattgtgtgtgactttcagcttgtgtcataaaaagactgtataataagacattaaaaaaaaaaaaggccaggcgcg

SEQ ID NO: 14848 - DNA, 201 bp, Homo sapiens
gagttggagaacaatatggccaacatggtgaaacctcatctctactaaaaatataaaaatcagccaggcgtggtggcatacacctgtagtcccagctactstggtggttgaggcatgagaatcgcctgaacccaagaggcagaggttgccaagttggcgccactgcactccagcctgggtgacagagtgagaccctgtcta

SEQ ID NO: 14849 - DNA, 201 bp, Homo sapiens
ctcccgggttcaagcgattctccagcctcagcctcccgagaagccgggattacagaagccgggattacaggcgcgcgccaccacacccggctttttttttwtatatatatttttagtacagacagggtttcaccatgttggccaggctggtctcgaactcctaacctcaagtgatccgccggccttggcttcccaaagttc

SEQ ID NO: 14850 - DNA, 201 bp, Homo sapiens
tgagacatgagaattgcttgaacccaggaggcagaggttgcagtgagccaagatcgtgccactgcactccagcctgagtaacagagcgagactccatctcaaaaaaaaaaaaaaaaaaaaaagaatgctgtagttgggccaaggtcaatggctcatgcctataattccaacactttgagaagatgattgcttgaacgcagg

SEQ ID NO: 14851 - DNA, 201 bp, Homo sapiens
gagacatgagaattgcttgaacccaggaggcagaggttgcagtgagccaagatcgtgccactgcactccagcctgagtaacagagcgagactccatctcaaaaaaaaaaaaaaaaaaaaaagaatgctgtagttgggccaaggtcaatggctcatgcctataattccaacactttgagaagatgattgcttgaacgcagga

SEQ ID NO: 14852 - DNA, 201 bp, Homo sapiens
ccaccacacccagttaatttttgtattttagtagagacatggtttcactatgttgtccaggctggtctcaaactcttgacctcaggtgatccgcccgcctyggcctcccaaagtgttgggattacaggcatgagccactgtgtctggcctctcttcttgtctttatctgcctcccactctagatctttcttggtccttgat

SEQ ID NO: 14853 - DNA, 201 bp, Homo sapiens
gtccccgggttcccaggagtctgtaggtccagacttgcggtgacactgacacttccgcccagcgtagctctagggcaaccgcccgctcagcaaacaccccscccttccacctttgctgccccaacaacagtcaggggaggccggggaatcacttaaggggccccgcccaccaccggagttccacccactccgcgtgcctct

SEQ ID NO: 14854 - DNA, 201 bp, Homo sapiens
gttgtgtgcgtgacatgtatatgactgtatgtgacttgtgaatatgggtgagactaagggagagttgtgagtctgtatgaccatgtcactcagtgtgaccrtgggggtgagggtgacggtgtgagagtgtttgcctcatgacagttggggaatgtgtgttgttggaatgtgactgaggactctgtgggtgactgtgaagtg

SEQ ID NO: 14855 - DNA, 201 bp, Homo sapiens
ggctcatgcctgtaatcccagcactttgggaggccgagacgggtggatcacgagatcaggagatcgagaccatcctggctaacacggtgaaaccccgtctytactaaaaatacaaaaaattagccgggcatggtggcgggcacctgtactcccagctactcgggaggctgaagcaggagaatggcgtgaacctgggaggcg

SEQ ID NO: 14856 - DNA, 201 bp, Homo sapiens
atcccttgagcccaggaagtggaggctgcagtgagctataattgttccagtgcactccactctcataaataaataaataaataaaatgtaaaaaggattgyatgggccgggtgtggtggctgtcgcctgtaatcccaccactttggaaggccaagacatgtggaacacctgaggtcaggagtttgagaccagcctgggcaa

SEQ ID NO: 14857 - DNA, 201 bp, Homo sapiens
cagcggtggcaggggctgcaggagcaagtgaccaggagcaggactggggacaggtgagggctccccaatcccagcccattctccctgcccccccttgaccyctcaagtctctggcactctccctctctgcttctctgccctgcctttgtctctctgtctctgtgcccaccaccatctctgctcatctctgtctcttgatgt

SEQ ID NO: 14858 - DNA, 201 bp, Homo sapiens
aaaaccctttgggcttggagagtgggagctcggatgggcgtttcaagttctccaccaggctgtgggaactcagatgggcgtttcaagtaccccactagggrgtactgaaaaccttcaagtttttcagttccccatagaaaaggggtctaggctgacggtttctaccccctcctctccaaggcggtccccgggttcccagga

SEQ ID NO: 14859 - DNA, 201 bp, Homo sapiens; identical to SEQ ID NO: 8109

SEQ ID NO: 14860 - DNA, 201 bp, Homo sapiens
taacctgggttcctgaagggtaaattgcaggagccagaacccaggctgctttctggatcaggcatttgccactgcctgctcctcggtccccatggtgagcrccccctctgctgcacagagctggtatgacagcccctcagcctgctaaatgccttcttagattggctcagcagccctctggggtgggcgtcagctctgcgt

SEQ ID NO: 14861 - DNA, 201 bp, Homo sapiens
tcctctctgcctctgcccacgtgtcctcctgcctggaatgcctgctgtctcttccgtgctcagtgaactcttacctcctggtccagcccagatgtcacccmctccgtgagacttcctgagccttctccagccgaaaggactattcctgcctctgtttccccagagcatgttgttcctgcatcagttacagctcagattgca

SEQ ID NO: 14862 - DNA, 201 bp, Homo sapiens
aatgaacccaggatcacacagcccttagtgtcctcctggctgcagaacatggacctcctctgcagcatcttgctgcctagccccccgttgcccgctccccrtagtcttggaatgcagcctgttcccagccgccatccccgacttggctcccacctcctgctgggctgcccccggcaatgctcctccctgggcttttccgcc

SEQ ID NO: 14863 - DNA, 201 bp, Homo sapiens
ggccccgagcacctcagatggcattggcctaagaagcccccatgcttggagtttatccatccagaaactggcatgcactttacgtgggccaggaaactcayaggtctgtgatttgagggagaataaaaggtcagcccttttgcaaacagggcaagcacattctggctctgtccggctgaaaccctgggcagacgtgtgcag

SEQ ID NO: 14864 - DNA, 201 bp, Homo sapiens; identical to SEQ ID NO: 760

SEQ ID NO: 14865 - DNA, 201 bp, Homo sapiens; identical to SEQ ID NO: 8121

SEQ ID NO: 14866 - DNA, 201 bp, Homo sapiens
cctggccattatgaaagaggagggaggtagaggggatccagccacaagtcaggtggatgaaccatttcaggcaccagcactgcccagtagaactttttgtsatgagggatgcgtccagtaccttcactctccaatatgcagccaccagccacacatggccatggagcccttgaagggtggcctgtgcgactgaggaactgc

SEQ ID NO: 14867 - DNA, 201 bp, Homo sapiens
acacatggccatggagcccttgaagggtggcctgtgcgactgaggaactgcattatctagttttctttcattttaattaagttaaatcttagtagccagtygtggctggtggctgccgtgtcgggcattgcagctgtaagcggaggcaagtgcaaatgcagagaccagaagtgggaatgaacttgtatttgaagaaacaaa

SEQ ID NO: 14868 - DNA, 201 bp, Homo sapiens; identical to SEQ ID NO: 8124

SEQ ID NO: 14869 - DNA, 201 bp, Homo sapiens; identical to SEQ ID NO: 8126

SEQ ID NO: 14870 - DNA, 201 bp, Homo sapiens
cagtttctaagtcatttaccaaaaatttatattaaaataatataagctaccggctgggcacagtggctcacgcctgtaatcccagcactttgggaggccarggcgggtggatcacttgaggtcaggagttcgagaccagcctggccaacatggtgaaaccccatctctactaaaaatacaaaaaatgagctgggtgtggtg

SEQ ID NO: 14871 - DNA, 201 bp, Homo sapiens
agcccggaaggttgaagctacagtgagccatgatcacgccactgcactccagcttgggcaacagagcaagagagcaagatctttctcttaaaaaaaaaaargtcaattcccagggactttggacaagccacttaacctcctgagccctggtttcttcatctgtacaatggtgatacaaaatccttcacggagttctggaga

SEQ ID NO: 14872 - DNA, 201 bp, Homo sapiens
gcctcttagacctccctcctccctgcccaccccagtcctttgcccgtatcaagaagtggctggagcacgcacgctcctcacccagcctcaccatcctggcygggggcaagtgtgatgactccgtgggctactttgtggagccctgcatcgtggagagcaaggaccctcaggagcccatcatgaaggaggtgactggggtgg

SEQ ID NO: 14873 - DNA, 201 bp, Homo sapiens
tgccgcagggatgccttcccagcctcttagacctccctcctccctgcccaccccagtcctttgcccgtatcaagaagtggctggagcacgcacgctcctcrcccagcctcaccatcctggccgggggcaagtgtgatgactccgtgggctactttgtggagccctgcatcgtggagagcaaggaccctcaggagcccatca

SEQ ID NO: 14874 - DNA, 201 bp, Homo sapiens; identical to SEQ ID NO: 8132

SEQ ID NO: 14875 - DNA, 201 bp, Homo sapiens
tgtgggggctgccgcagggatgccttcccagcctcttagacctccctcctccctgcccaccccagtcctttgcccgtatcaagaagtggctggagcacgcrcgctcctcacccagcctcaccatcctggccgggggcaagtgtgatgactccgtgggctactttgtggagccctgcatcgtggagagcaaggaccctcagg

SEQ ID NO: 14876 - DNA, 201 bp, Homo sapiens; identical to SEQ ID NO: 1128

SEQ ID NO: 14877 - DNA, 201 bp, Homo sapiens; identical to SEQ ID NO: 8135

SEQ ID NO: 14878 - DNA, 201 bp, Homo sapiens; identical to SEQ ID NO: 8136

SEQ ID NO: 14879 - DNA, 201 bp, Homo sapiens; identical to SEQ ID NO: 8138

SEQ ID NO: 14880 - DNA, 201 bp, Homo sapiens
ccaacaccaggttgtgtttataaatgtttgttgaggatcttcctatttagattagtaaatctggggcttaggaaacaattgctctgtccatgatggcttcsgggcagggcggaagtcccaagcatgtcacaacaccggtgcattcttttgggcctcacctggttttgttgcccatagtcgcagcctcatactggaccaaag

SEQ ID NO: 14881 - DNA, 201 bp, Homo sapiens
tgaatgtgttcatatagggctccgtgtggctccacatgtaggtctttccatataaacatgtacatatccatttgcacataagcacacacacgcatatgtcrataagtccacccacacgcatgtacatggagaaggcatgcagatccctacatgcttagacatgtgaccatgcatatgcctatatatgcattgattgatgtg

SEQ ID NO: 14882 - DNA, 201 bp, Homo sapiens
ctcctaatagcatttgcatgagtgcatgtacacgtgtgtttgtgaatgtgttcatatagggctccgtgtggctccacatgtaggtctttccatataaacaygtacatatccatttgcacataagcacacacacgcatatgtcgataagtccacccacacgcatgtacatggagaaggcatgcagatccctacatgcttaga

SEQ ID NO: 14883 - DNA, 201 bp, Homo sapiens; identical to SEQ ID NO: 761

SEQ ID NO: 14884 - DNA, 201 bp, Homo sapiens
cctgtaatcccagctacacaggaggctgaggcaggagaatctcttgaacccgggagacagaggttgcagtgatctgagattgtgccattgcactccagcckgggtgacagagtaagactccgtctcaaaaataaaaattaaaaaaaattgagggtcccttgccagtaccatgccaggcacaaagccatcggcactggaggg

SEQ ID NO: 14885 - DNA, 201 bp, Homo sapiens
gaaagaacttccacttcgtgcaccgctcggccgacgtggagagcgtggtgagcgggaccctccgctcagccttcgagtacggtggccagaagtgttccgcstgctcgcgtctctacgtgccgcactcgctgtggccgcagatcaaagggcggctgctggaggagcacagtcggatcaaagtgggcgacgtgagtggcaccg

SEQ ID NO: 14886 - DNA, 201 bp, Homo sapiens
ggcagttgccctcatccccgaagcatctggtccatagaggttggagggagctgacgttcagttgggcacctgctccaggatgtgcatcggggcaggcgtcrctggagggagagtgagcctcagcgagggaaatgcccggaagaggccacacagcaagtggcagagccagaattggaaccccagtgagtcagattagagtgt

SEQ ID NO: 14887 - DNA, 201 bp, Homo sapiens
aaatgcgtgaatggatgaggaatgctgtcctgccaagaaggtcctcatggatcctcagagaggccccaagtcctgtgactgattcatctctgccttcaccygagcagccagtggatggatactcctgttagcccaaaattgttcatgaaccaaaaaaaaaaaaaaaaaaaaagaaagaaagaaagaaaaaagaaagcactg

SEQ ID NO: 14888 - DNA, 201 bp, Homo sapiens
cctgtgactgattcatctctgccttcacccgagcagccagtggatggatactcctgttagcccaaaattgttcatgaaccaaaaaaaaaaaaaaaaaaaaagaaagaaagaaagaaaaaagaaagcactgatgggtgggagtccttaggttatttttagctgcagtcgactcaggctgaactttgaactagtgtctgttct

SEQ ID NO: 14889 - DNA, 201 bp, Homo sapiens
gccaccgacctggcctggcccccttctcatttctgtattgcctgggcacctccgtctgtggactctgcgttagggttttagatgggaggaagcgaggaagkcggtgaccatacccactcttgtccctctccccaggccttgaaggacctgaagggccggatggaagccatcccatgcgtggtgggggatgaggaggtgtgg

SEQ ID NO: 14890 - DNA, 201 bp, Homo sapiens
attggcctaagaagcccccatgcttggagtttatccatccagaaactggcatgcactttacgtgggccaggaaactcataggtctgtgatttgagggagartaaaaggtcagcccttttgcaaacagggcaagcacattctggctctgtccggctgaaaccctgggcagacgtgtgcagggggaggggtgactgaggggga

SEQ ID NO: 14891 - DNA, 201 bp, Homo sapiens; identical to SEQ ID NO: 8141

SEQ ID NO: 14892 - DNA, 201 bp, Homo sapiens
tcagatcccagtacttgcaaccctgacatctggtgcaggaggtgaaatggtgcatgtcctttgtagatcatatctcagtacttgtagccctgacatctccygccacaggaggtgaaatggtgcatggccttcatggatcggatcccagtacttgcagccctgacatgtcccgctgcaggaggtgaaacggtacatggcctt

SEQ ID NO: 14893 - DNA, 201 bp, Homo sapiens
taacctgaccgaaggcccacagccaacagctggccagcatccctcatccctgactcggcctcgtgttgaacctggaaagccagtgtgggctggagcagggstgttgaggctggagctggggctggaggggagatgagctggttgctctgtcaccactgctctgctttgtagggacgtcgtgcaggaggccacaaaggtgct

SEQ ID NO: 14894 - DNA, 201 bp, Homo sapiens
ggaaagcagaggttgcagtgagctgagatcacgccactgtactccagcctgggtgacaaagtgagactctgcctcaaaaaaaaaaaaaaaaatacccgttrcccattttcgttgtaagaaccactatcctgtgtggtgatggttaattttatgtgtcactttggctgggcatggtgcccaggtatttggtcaaacattctg

SEQ ID NO: 14895 - DNA, 201 bp, Homo sapiens
agtacctcggacgaggtgtcttgggcaaggtggagtctgggccctctgtgtcttttcagtttttccctctatagatttctgaagctgcattggctggcccrcagctccttgcaaccctgacatctcctggtgcagaaggtgaaatggtgcctggcctttgtagatcagatcccagtacttgcaaccctgacatctggtgca

SEQ ID NO: 14896 - DNA, 201 bp, Homo sapiens; identical to SEQ ID NO: 8142

SEQ ID NO: 14897 - DNA, 201 bp, Homo sapiens; identical to SEQ ID NO: 8143

SEQ ID NO: 14898 - DNA, 201 bp, Homo sapiens
cttgaacctggaaagcagaggttgcagtgagctgagatcacgccactgtactccagcctgggtgacaaagtgagactctgcctcaaaaaaaaaaaaaaaaatacccgttacccattttcgttgtaagaaccactatcctgtgtggtgatggttaattttatgtgtcactttggctgggcatggtgcccaggtatttggtca

SEQ ID NO: 14899 - DNA, 201 bp, Homo sapiens
aacttccacttcgtgcaccgctcggccgacgtggagagcgtggtgagcgggaccctccgctcagccttcgagtacggtggccagaagtgttccgcctgctygcgtctctacgtgccgcactcgctgtggccgcagatcaaagggcggctgctggaggagcacagtcggatcaaagtgggcgacgtgagtggcaccgtcacc

SEQ ID NO: 14900 - DNA, 201 bp, Homo sapiens
tgcccccccgccagccagatgattgccacaaagttatgcaacctctctgaccttccatctcttcatccataagatggggtaaccgccccctctccccgccrtgggtcatcatgagaattgaatgagttaacacttccacatgcttagaatagtgccagacacatgatgattcaaaaatattacccataaggccgggtgcgg

SEQ ID NO: 14901 - DNA, 201 bp, Homo sapiens
cacccaataaaatgcctgttacttaatcacagtggtggatggtctttctggaggggatggtgggggcagccaacatcttttaagtctggtgtcattgccartgtgtcacctggtcatgggcacagtgctctcagtgtgacagaaggaacagtaggtgctgatgtttgaaattgtctgttggaggcggtggggctgggttca

SEQ ID NO: 14902 - DNA, 201 bp, Homo sapiens
cctgtaatcccagctacttggggaggctgagacaggagaatctcttgaacctggaaagcagaggttgcagtgagctgagatcacgccactgtactccagcmtgggtgacaaagtgagactctgcctcaaaaaaaaaaaaaaaaatacccgttacccattttcgttgtaagaaccactatcctgtgtggtgatggttaattt

SEQ ID NO: 14903 - DNA, 201 bp, Homo sapiens
gggggctccccctgtgccccatcctccatccaaccgcagggcagggggaggaaggacgttcagggcagtcccttccagccgacatgcccatttcctttccstgcacctcaggggaagcagatgccaaggcaaatgggcagctcctggctggctgtttccatggctcacccctctctccttcccccgtggactttgcataag

SEQ ID NO: 14904 - DNA, 201 bp, Homo sapiens; identical to SEQ ID NO: 8151

SEQ ID NO: 14905 - DNA, 201 bp, Homo sapiens
agagggtttcaccatgttagccaggatggtctcgatctcctgaccttgtgatccgcccgccttggcctcccaaagtgctgggatcacaggtgtgagccacygcgcccggccaacagggaagtttctttaggtgggccttcgtccgccttgcggtcaggcggctgagccggatggttctcatggcctgagctcctgtgaaat

SEQ ID NO: 14906 - DNA, 201 bp, Homo sapiens; identical to SEQ ID NO: 1076

SEQ ID NO: 14907 - DNA, 201 bp, Homo sapiens
gggggacagcaggcgtgtccaggactttcctggaaaaccggctctgagtccagtcctcttcatccttatcctggcacctccctcccgggcaaggacctcaytcttctctcctttcagccttttaaccatggacataaggtggccaagttctgttatgcagacaaggtgagtgagcctgtgtgcctggtgacccggggttag

SEQ ID NO: 14908 - DNA, 201 bp, Homo sapiens
gaggttgttgtgaggctttggtcagacaaagcacagcgtacttcgtccagagttgggcagctgttaagtgctttcagctgctgttagctgctgcttcccayggagggaggaaactgaggccgggagagtgaagtgacctgtctgaagctccctcccactggggaaatgggggagcggtttccagcacgcgtggggaggagg

SEQ ID NO: 14909 - DNA, 201 bp, Homo sapiens
gaacttctcagagccttgaatgctctaatacgcatggcacatcttcaaggacaaggtctgccatgtagtgtttcccacacgcattgggccatggaaccccrtttctgcaaagacccccatggaccaagtgttttgtggagcacattttgggaatgtgctgaggcctagagggagggagagttgcagccagcacgtgaccag

SEQ ID NO: 14910 - DNA, 201 bp, Homo sapiens
aggagaagacgggctgagacgtaggcagggctggaccttgttggcatattaaagttttcccacaaagaaacagtttcatggtcaaggaaatttggcatgtrtggtgttaaagcaaaatggactcctcccgtgcagaacttctcagagccttgaatgctctaatacgcatggcacatcttcaaggacaaggtctgccatgta

SEQ ID NO: 14911 - DNA, 201 bp, Homo sapiens
gccaagttctgttatgcagacaaggtgagtgagcctgtgtgcctggtgacccggggttagggttgctgcccctgctctgccctgccagctgctgatatggygggggcagggggcatcagttgctgtgtccttctttggccatggtgggtaggtgggcagggggtggctgacactgagggagtccctgggtgatgtctttga

SEQ ID NO: 14912 - DNA, 201 bp, Homo sapiens
tatgcagccaccagccacacatggccatggagcccttgaagggtggcctgtgcgactgaggaactgcattatctagttttctttcattttaattaagttawatcttagtagccagtcgtggctggtggctgccgtgtcgggcattgcagctgtaagcggaggcaagtgcaaatgcagagaccagaagtgggaatgaacttg

SEQ ID NO: 14913 - DNA, 201 bp, Homo sapiens
cctcccgtgtggccccagggacccctcccctggccattatgaaagaggagggaggtagaggggatccagccacaagtcaggtggatgaaccatttcaggcmccagcactgcccagtagaactttttgtgatgagggatgcgtccagtaccttcactctccaatatgcagccaccagccacacatggccatggagcccttga

SEQ ID NO: 14914 - DNA, 201 bp, Homo sapiens
cactgggtgtgtgtgcaggtgccagctgacagcagcacctgccacccagctccctggttgtctctgtagctgcctagagcttgccctcacctgtagctccrcaggcgtctgaggctgcatggcagctgggatttttccaggcagcgaggctccggcattctgataagcccctgggtggatactgctgattttcatttccca

SEQ ID NO: 14915 - DNA, 201 bp, Homo sapiens
gcttcccatggagggaggaaactgaggccgggagagtgaagtgacctgtctgaagctccctcccactggggaaatgggggagcggtttccagcacgcgtgrggaggaggggcccaaccctggcagccgacatagggtaggctccaatgtccctcgtggacgagggctcaggagaacctcacaaaaagctgtgcccacttct

SEQ ID NO: 14916 - DNA, 201 bp, Homo sapiens
gcgatctcggctcactgcaagctccgcctcccaggttcatgccattctcctgcctcagcctccccagtagctgggattacaggcatccgccaccacgcccrgctaattttttgtatttttagtagagagagggtttcaccatgttagccaggatggtctcgatctcctgaccttgtgatccgcccgccttggcctcccaaa

SEQ ID NO: 14917 - DNA, 201 bp, Homo sapiens
tcccaggttcatgccattctcctgcctcagcctccccagtagctgggattacaggcatccgccaccacgcccagctaattttttgtatttttagtagagasagggtttcaccatgttagccaggatggtctcgatctcctgaccttgtgatccgcccgccttggcctcccaaagtgctgggatcacaggtgtgagccaccg

SEQ ID NO: 14918 - DNA, 201 bp, Homo sapiens; identical to SEQ ID NO: 8106

SEQ ID NO: 14919 - DNA, 201 bp, Homo sapiens
ggctcagggccctggtccctggtcccgtggagggtctgacgccggggcctctctcctaggagatcttcgggcctgtactgtctgtgtacgtctacccggaygacaagtacaaggagacgctgcagctggttgacagcaccaccagctatggcctcacgggggcagtgttctcccaggataagtgagtggccaggccgcagc

SEQ ID NO: 14920 - DNA, 201 bp, Homo sapiens
tggagagcgtggtgagcgggaccctccgctcagccttcgagtacggtggccagaagtgttccgcctgctcgcgtctctacgtgccgcactcgctgtggccrcagatcaaagggcggctgctggaggagcacagtcggatcaaagtgggcgacgtgagtggcaccgtcacccccgccgcggcccagcggggggctgatggga

SEQ ID NO: 14921 - DNA, 201 bp, Homo sapiens
ggagggtctgacgccggggcctctctcctaggagatcttcgggcctgtactgtctgtgtacgtctacccggatgacaagtacaaggagacgctgcagctgrttgacagcaccaccagctatggcctcacgggggcagtgttctcccaggataagtgagtggccaggccgcagccctggtgctgtgctccgggtgtcctgtc

SEQ ID NO: 14922 - DNA, 201 bp, Homo sapiens; identical to SEQ ID NO: 1049

SEQ ID NO: 14923 - DNA, 201 bp, Homo sapiens; identical to SEQ ID NO: 8115

SEQ ID NO: 14924 - DNA, 201 bp, Homo sapiens; identical to SEQ ID NO: 8119

SEQ ID NO: 14925 - DNA, 201 bp, Homo sapiens; identical to SEQ ID NO: 8130

SEQ ID NO: 14926 - DNA, 201 bp, Homo sapiens; identical to SEQ ID NO: 8131

SEQ ID NO: 14927 - DNA, 201 bp, Homo sapiens
gttgagcatgtgaaatgtggctcgtggctactcttttagacaggaaagctccaataacccaccagaagacggataggtagcaaaagtgtcagctattacgmtataaactatcttgccagccctaggaaggaaagaagtgaaatttctccctgcttcattggtcatgctagcgttcaccactgccgggcattaggttttgaa

SEQ ID NO: 14928 - DNA, 201 bp, Homo sapiens
aggtcagaggatttgagcaaggagttcttgagactcagtgtcctggaatcaggcacctcacccccagggccagccctcccggggctgtgagctgagctcarggcagctctccaagttcatggtccacatcttggacattcctgcccagccagagctctcagccctttgtgccaaggggatctcagctggttcacattctga

SEQ ID NO: 14929 - DNA, 201 bp, Homo sapiens
ggatcctcagagaggccccaagtcctgtgactgattcatctctgccttcacccgagcagccagtggatggatactcctgttagcccaaaattgttcatgamccaaaaaaaaaaaaaaaaaaaaagaaagaaagaaagaaaaaagaaagcactgatgggtgggagtccttaggttatttttagctgcagtcgactcaggctg

SEQ ID NO: 14930 - DNA, 201 bp, Homo sapiens
caggcggctgagccggatggttctcatggcctgagctcctgtgaaatgtttcacttggcccgaggtctgcaaaatagcggggagctgacaaaatggtgcgstttggaccaacaccaggttgtgtttataaatgtttgttgaggatcttcctatttagattagtaaatctggggcttaggaaacaattgctctgtccatgat

SEQ ID NO: 14931 - DNA, 201 bp, Homo sapiens
aatgccaagtatgcggtggagctggaggggcagcagcccatcagcgtgcccccgagcaccaacagcacggtgtaccggggtctggaggtacctgcaggagrcagtgggcgagcaggcggggcagcccaatgccatgggcctgatctcaccgctgcctccttccccagggcttcgtggcggccatctcgccctttaacttca

SEQ ID NO: 14932 - DNA, 201 bp, Homo sapiens
ggagaatggtcactttctactcaagcctagaccagcgccggccagtagaatttcctgcagtgaggacagaaatgttccagatctgcattgtccgttccagyggccatgagccgccacgtgtggttgttgagcatgtgaaatgtggctcgtggctactcttttagacaggaaagctccaataacccaccagaagacggatag

SEQ ID NO: 14933 - DNA, 201 bp, Homo sapiens
gattacaggcatccgccaccacgcccagctaattttttgtatttttagtagagagagggtttcaccatgttagccaggatggtctcgatctcctgaccttrtgatccgcccgccttggcctcccaaagtgctgggatcacaggtgtgagccaccgcgcccggccaacagggaagtttctttaggtgggccttcgtccgcct

SEQ ID NO: 14934 - DNA, 201 bp, Homo sapiens; identical to SEQ ID NO: 8140

SEQ ID NO: 14935 - DNA, 201 bp, Homo sapiens
caggcctgggcgctgggcttgggggggatccttcgcagaccacagcggggtctgttccctgccaggtacctgcagtgtgcccagcatgtcttaagcacatrcctcacacttgaactcatcacaaaacaaccctgccaggtcaggattgttctccctgtttcccagatgaggtgcagaattcgaggctcagagaggttaagt

SEQ ID NO: 14936 - DNA, 201 bp, Homo sapiens; identical to SEQ ID NO: 1066

SEQ ID NO: 14937 - DNA, 201 bp, Homo sapiens
catcctcatgcatcactgaaacacctcccgggcagggcaacgtggtcctatggaagcccagtgacactgccatgctggccagctatgctgtctaccgcatycttcgggaggctggcctgccccccaacatcatccagtttgtgccagctgatgggcccctatttggggacactgtcaccagctcagagcacctctgtggca

SEQ ID NO: 14938 - DNA, 201 bp, Homo sapiens; identical to SEQ ID NO: 1070

SEQ ID NO: 14939 - DNA, 201 bp, Homo sapiens
ctctgctttgtagggacgtcgtgcaggaggccacaaaggtgctgaggaatgctgccggcaacttctacatcaacgacaagtccactggctcgatagtgggycagcagccctttgggggggcccgagcctctggtgagtgggtcccccttcccacaggggagctgagttcctggtgggagaccctagatgttacgtctcgag

SEQ ID NO: 14940 - DNA, 201 bp, Homo sapiens
tagaccagcgccggccagtagaatttcctgcagtgaggacagaaatgttccagatctgcattgtccgttccagcggccatgagccgccacgtgtggttgtygagcatgtgaaatgtggctcgtggctactcttttagacaggaaagctccaataacccaccagaagacggataggtagcaaaagtgtcagctattacgata

SEQ ID NO: 14941 - DNA, 201 bp, Homo sapiens; identical to SEQ ID NO: 8147

SEQ ID NO: 14942 - DNA, 201 bp, Homo sapiens
gatcttcctatttagattagtaaatctggggcttaggaaacaattgctctgtccatgatggcttcggggcagggcggaagtcccaagcatgtcacaacacyggtgcattcttttgggcctcacctggttttgttgcccatagtcgcagcctcatactggaccaaagaattttcatccatgatcccctttggttctcctgtc

SEQ ID NO: 14943 - DNA, 201 bp, Homo sapiens
acaaaatccttcacggagttctggagagcagatgcggtgatgtttgaaagcattgcagaggctccataaaagctgcttcctttcctttaggctttagtcaytattacccttttggctcttattgagcttgtggtcatttgagacctccagctctttttctggttgagaggcaaactgctcaccgtcactcagcaaagtttg

SEQ ID NO: 14944 - DNA, 201 bp, Homo sapiens
ctgggcctcagtctactctgctgtcaaatggggacataatgttgatagtactcatcccttacaattgttaggaggactgaatggtctgaaatgtgaaaacrgattttgtgctgggcctggtggccaggaacaggtcagtcaacatgagccagtactgttaaggtcatgcacccgtgtgaggtctgatcacaacatcacacg

SEQ ID NO: 14945 - DNA, 201 bp, Homo sapiens
ccaccgacctggcctggcccccttctcatttctgtattgcctgggcacctccgtctgtggactctgcgttagggttttagatgggaggaagcgaggaaggsggtgaccatacccactcttgtccctctccccaggccttgaaggacctgaagggccggatggaagccatcccatgcgtggtgggggatgaggaggtgtgga

SEQ ID NO: 14946 - DNA, 201 bp, Homo sapiens
agcgccggccagtagaatttcctgcagtgaggacagaaatgttccagatctgcattgtccgttccagcggccatgagccgccacgtgtggttgttgagcaygtgaaatgtggctcgtggctactcttttagacaggaaagctccaataacccaccagaagacggataggtagcaaaagtgtcagctattacgatataaact

SEQ ID NO: 14947 - DNA, 201 bp, Homo sapiens
cctcctgcctcagcctcccaaagtgctgggattataggcgtgagccactgcgtccgaccttctgttagggttttgaccctgctcacctcaggggatggaaragacttctccctttcttgcagcctccttaatccccaaaccttccctttcctggcagaggtcatggcatggagtgaagagtccctgggctgagctgctgtg

SEQ ID NO: 14948 - DNA, 201 bp, Homo sapiens; identical to SEQ ID NO: 8156

SEQ ID NO: 14949 - DNA, 201 bp, Homo sapiens; identical to SEQ ID NO: 8110

SEQ ID NO: 14950 - DNA, 201 bp, Homo sapiens; identical to SEQ ID NO: 8111

SEQ ID NO: 14951 - DNA, 201 bp, Homo sapiens
gaaataattgccatcgggtgtggatgcaaagggcatgactcaggtcccatattcgtgtctccctgggcctgatacattttgcatacttcacatagctcacrctgctctgagctatttttctcttttcggtagtattgtacccattttccaggtgaggaaactgaggctcgcagactttctaagaatgcactgaggtcatgg

SEQ ID NO: 14952 - DNA, 201 bp, Homo sapiens
agcttagctgaggtccctgtcagaagcttccagatggtcccaggggattgacactgccttgtcccttcctgagggactgtggagactcgtggctgcctctycattcttctcatgatggtagatggaagagggccgtgcagattttaatgtatttatcgttatcaaatctccatattaaccccatgagggggtgtcagtgtt

SEQ ID NO: 14953 - DNA, 201 bp, Homo sapiens; identical to SEQ ID NO: 8112

SEQ ID NO: 14954 - DNA, 201 bp, Homo sapiens; identical to SEQ ID NO: 8117

SEQ ID NO: 14955 - DNA, 201 bp, Homo sapiens; identical to SEQ ID NO: 8129

SEQ ID NO: 14956 - DNA, 201 bp, Homo sapiens
gatttttttttttttccttgagatggaatcttgctctgtcatccaggctggagtgcagtggcgtgatctcagctcactgcaacctctgcctcccgggttcrtgtgattcttctgcctcagcctcccaagtagctgggagtacaggagtgggccactacgcccagctaatttttgtatttttagtagagacggggttttacc

SEQ ID NO: 14957 - DNA, 201 bp, Homo sapiens
ggtgagcgggaccctccgctcagccttcgagtacggtggccagaagtgttccgcctgctcgcgtctctacgtgccgcactcgctgtggccgcagatcaaarggcggctgctggaggagcacagtcggatcaaagtgggcgacgtgagtggcaccgtcacccccgccgcggcccagcggggggctgatgggattgggtccct

SEQ ID NO: 14958 - DNA, 201 bp, Homo sapiens; identical to SEQ ID NO: 764

SEQ ID NO: 14959 - DNA, 201 bp, Homo sapiens
tcttctcatgatggtagatggaagagggccgtgcagattttaatgtatttatcgttatcaaatctccatattaaccccatgagggggtgtcagtgttttakggagggagggaaactggcttcaagacatgtgacttgcccaaggtcacacagctagtgggaggcagagtgggggtggggagtgcagagctaccggctcagg

SEQ ID NO: 14960 - DNA, 201 bp, Homo sapiens; identical to SEQ ID NO: 8144

SEQ ID NO: 14961 - DNA, 201 bp, Homo sapiens
ccctctcccaggactctccttggtttggcctctcaggcctgggcgctgggcttgggggggatccttcgcagaccacagcggggtctgttccctgccaggtrcctgcagtgtgcccagcatgtcttaagcacatgcctcacacttgaactcatcacaaaacaaccctgccaggtcaggattgttctccctgtttcccagatg

SEQ ID NO: 14962 - DNA, 201 bp, Homo sapiens; identical to SEQ ID NO: 1072

SEQ ID NO: 14963 - DNA, 201 bp, Homo sapiens; identical to SEQ ID NO: 8145

SEQ ID NO: 14964 - DNA, 201 bp, Homo sapiens; identical to SEQ ID NO: 8148

SEQ ID NO: 14965 - DNA, 201 bp, Homo sapiens; identical to SEQ ID NO: 759

SEQ ID NO: 14966 - DNA, 201 bp, Homo sapiens
tcagacaaagcacagcgtacttcgtccagagttgggcagctgttaagtgctttcagctgctgttagctgctgcttcccatggagggaggaaactgaggccrggagagtgaagtgacctgtctgaagctccctcccactggggaaatgggggagcggtttccagcacgcgtggggaggaggggcccaaccctggcagccgac

SEQ ID NO: 14967 - DNA, 201 bp, Homo sapiens
aagggtgtgggcctgggagctggagtttccgctgctcctgagggacaggaacattggaccaggacaggccactcccttcaacttcgcagtagccctgtaaygaggcgtgccaagcccctccccagaggaggaagctgggctcagagactgggtaacctgaccgaaggcccacagccaacagctggccagcatccctcatcc

SEQ ID NO: 14968 - DNA, 201 bp, Homo sapiens; identical to SEQ ID NO: 762

SEQ ID NO: 14969 - DNA, 201 bp, Homo sapiens
caaaaggcctgctctgccagccacgggcccctgggctccccgcctatcagcgggcggagcgggcctggaccccattctccacgctctgatgagcagcgggsttaaaggtgggaaggccataaattagtattagctactgtgtcgctggctcccgggtgattagcatttttattgttttgtggtgctgaggttggtcacact

SEQ ID NO: 14970 - DNA, 201 bp, Homo sapiens
gcatgtcacaacaccggtgcattcttttgggcctcacctggttttgttgcccatagtcgcagcctcatactggaccaaagaattttcatccatgatccccyttggttctcctgtccatgctaagagacagggagggcagtccccatttcctagatgaagagacttagggaaggaagtgagcttacctggggccccacagct

SEQ ID NO: 14971 - DNA, 201 bp, Homo sapiens; identical to SEQ ID NO: 1077

SEQ ID NO: 14972 - DNA, 201 bp, Homo sapiens; identical to SEQ ID NO: 1080

SEQ ID NO: 14973 - DNA, 201 bp, Homo sapiens
cagagtaagactccgactcaaaaaagaaaaaaaaaagctactgatttgctgtgcattgttctttgtgtgacgctttccaggatcatgaagttaatggatgmggcagctagtcagaaacaaaatgccttgaaataattgccatcgggtgtggatgcaaagggcatgactcaggtcccatattcgtgtctccctgggcctgat

SEQ ID NO: 14974 - DNA, 201 bp, Homo sapiens; identical to SEQ ID NO: 8158

SEQ ID NO: 14975 - DNA, 201 bp, Homo sapiens; identical to SEQ ID NO: 8157

SEQ ID NO: 14976 - DNA, 201 bp, Homo sapiens
gaggcggaggttgcagtgagctgagatcgcaccactgcacttcagcctgggtgacagagtaagactccgactcaaaaaagaaaaaaaaaagctactgattkgctgtgcattgttctttgtgtgacgctttccaggatcatgaagttaatggatgaggcagctagtcagaaacaaaatgccttgaaataattgccatcgggt

SEQ ID NO: 14977 - DNA, 201 bp, Homo sapiens
catgccaggcacaaagccatcggcactggagggcatcatttattggtgatcatttactaagcaggtgcttgatatattaacctcatttaatcaccatttgrgggtgcctgtggccgttttacaggtggggaagcttcgaggagtcaaagcctgcttgttgtcccctgtcccttgggccaggctggggcctcaggagcccca

SEQ ID NO: 14978 - DNA, 201 bp, Homo sapiens
ccagtaccatgccaggcacaaagccatcggcactggagggcatcatttattggtgatcatttactaagcaggtgcttgatatattaacctcatttaatcamcatttgggggtgcctgtggccgttttacaggtggggaagcttcgaggagtcaaagcctgcttgttgtcccctgtcccttgggccaggctggggcctcagg

SEQ ID NO: 14979 - DNA, 201 bp, Homo sapiens; identical to SEQ ID NO: 8105

SEQ ID NO: 14980 - DNA, 201 bp, Homo sapiens
taaccggatgtggtggtgagcacctgtaatcccagctacacaggaggctgaggcaggagaatctcttgaacccgggagacagaggttgcagtgatctgagrttgtgccattgcactccagcctgggtgacagagtaagactccgtctcaaaaataaaaattaaaaaaaattgagggtcccttgccagtaccatgccaggca

SEQ ID NO: 14981 - DNA, 201 bp, Homo sapiens
gcacccaaggtaaagcagaaggctgttccaggcctctgccatgctttccctcagccctatgtgcccaggcagttgccctcatccccgaagcatctggtccmtagaggttggagggagctgacgttcagttgggcacctgctccaggatgtgcatcggggcaggcgtcgctggagggagagtgagcctcagcgagggaaatg

SEQ ID NO: 14982 - DNA, 201 bp, Homo sapiens
agagacctgcttagtaagggacgggggcaagagaagaacttgtttctgatgaacataccagcaaccccttgtcattgtccctcacaggaatccatccttcygggtgttctgtgcatgggtgggaggaggcactgctgctgtcatggctctgaacacaaccagccagccttgtcctgtgtccggggggctgccagcccccct

SEQ ID NO: 14983 - DNA, 201 bp, Homo sapiens
gatttaaatgagcacctatcaataggccaatcgttcctacaaattctcttggaccacaccggcctgtgagatagtattttagcaccatttcacagatgagsactgaggcttaaagaggtgaagagagacctgcttagtaagggacgggggcaagagaagaacttgtttctgatgaacataccagcaaccccttgtcattgt

SEQ ID NO: 14984 - DNA, 201 bp, Homo sapiens
ttttaattttcaacctcaacacttcttcatcctagatatgtgtgttccccaggaaagaggagaagccagatttaaatgagcacctatcaataggccaatcrttcctacaaattctcttggaccacaccggcctgtgagatagtattttagcaccatttcacagatgaggactgaggcttaaagaggtgaagagagacctgc

SEQ ID NO: 14985 - DNA, 201 bp, Homo sapiens
gaaactgacaccaatgggttaagtaactaacatgccagtaggaaatgaacaaactgggttttagtcccacacctctgactcccaagcccctggccataacyaccactgcacagtgccctggagctggacaggcgctgggctcagatcccaaccttagcgtcttgttcctgtgccttgacctcccagcttcagactcctcca

SEQ ID NO: 14986 - DNA, 201 bp, Homo sapiens
cccaggctgctttctggatcaggcatttgccactgcctgctcctcggtccccatggtgagcaccccctctgctgcacagagctggtatgacagcccctcakcctgctaaatgccttcttagattggctcagcagccctctggggtgggcgtcagctctgcgtgttcctggtgagccgcacgttgctgggaagacagtctag

SEQ ID NO: 14987 - DNA, 201 bp, Homo sapiens
gctactttgtggagccctgcatcgtggagagcaaggaccctcaggagcccatcatgaaggaggtgactggggtgggcagcctggggtccagaggaggacartcccaccggagcacagcacacacacagttctcctggagacattctcccatttcacagatgaggccctaaagggagaccctaaaagggaatgcctccgacc

SEQ ID NO: 14988 - DNA, 201 bp, Homo sapiens
ttgacagcaccaccagctatggcctcacgggggcagtgttctcccaggataagtgagtggccaggccgcagccctggtgctgtgctccgggtgtcctgtcygtgtccccatccccacctcctggacgtggttcccagtaataatgctgcccctaccttctctctgtcccctcccctcagcccagacaggcagccagggctc

SEQ ID NO: 14989 - DNA, 201 bp, Homo sapiens
gacactgaagtgtaaactgaggcccagggactggggagagggtgagccagagcaggggcactgggagggctcagggccctggtccctggtcccgtggaggrtctgacgccggggcctctctcctaggagatcttcgggcctgtactgtctgtgtacgtctacccggatgacaagtacaaggagacgctgcagctggttgac

SEQ ID NO: 14990 - DNA, 201 bp, Homo sapiens; identical to SEQ ID NO: 763

SEQ ID NO: 14991 - DNA, 201 bp, Homo sapiens
ttgaccctggctggggtctgagcatttccagtgccctcagcaaccacgtccactgcagccatcataatggctgacactgatagacttttactgtggggccrgctgtggctgagcacttggctgagatgacgtgggtgttactgttcccattttacagatgagaaactgaggtcaaggcacttgcccaagttggtagtgcag

SEQ ID NO: 14992 - DNA, 201 bp, Homo sapiens; identical to SEQ ID NO: 1039

SEQ ID NO: 14993 - DNA, 201 bp, Homo sapiens; identical to SEQ ID NO: 8120

SEQ ID NO: 14994 - DNA, 201 bp, Homo sapiens; identical to SEQ ID NO: 8123

SEQ ID NO: 14995 - DNA, 201 bp, Homo sapiens; identical to SEQ ID NO: 8122

SEQ ID NO: 14996 - DNA, 201 bp, Homo sapiens
taagaaccactatcctgtgtggtgatggttaattttatgtgtcactttggctgggcatggtgcccaggtatttggtcaaacattctgggtgtttctgtgarggtgtatttggatgagattaacatttaaatcagtggagttttaaaagtaaaaagcaaggcaggtgaccgttcatcctgtgggtgggcgtggtctaatcag

SEQ ID NO: 14997 - DNA, 201 bp, Homo sapiens
gggtctctgggatgttggccagcgctcactctgagcctccgcccgctctgggctgctccgtgctcgtgttggtcccgggccatggatggcgtaggtggtgytttgggcccctgggcaactgggggagccagctcctctggtcatttccccacccccgacccctgtagagtgcggcggaaagaacttccacttcgtgcaccg

SEQ ID NO: 14998 - DNA, 201 bp, Homo sapiens; identical to SEQ ID NO: 8125

SEQ ID NO: 14999 - DNA, 201 bp, Homo sapiens
tggcagcaggctcgctgctggccgctacactgctggtccgttgattccatcatctcctcccttccccttctgcccaggctgttgcatcttttcagagaaawacagaagtgtcttttccgcaggaaccaatgacaagccagggggcccacactacatcctgcgctggacgtcgccgcaggtcatcaaggagacacataagcc

SEQ ID NO: 15000 - DNA, 201 bp, Homo sapiens
gtggtgttccttgtacctttacccagcaagatatgatagggatggtttttttttttctgagacggagtctcgctctgtcgcccaggctggagtgcagtggygcgatctcggctcactgcaagctccgcctcccaggttcatgccattctcctgcctcagcctccccagtagctgggattacaggcatccgccaccacgccc

SEQ ID NO: 15001 - DNA, 201 bp, Homo sapiens
gcatgccccaagcttggcagcaggctcgctgctggccgctacactgctggtccgttgattccatcatctcctcccttccccttctgcccaggctgttgcaycttttcagagaaaaacagaagtgtcttttccgcaggaaccaatgacaagccagggggcccacactacatcctgcgctggacgtcgccgcaggtcatcaag

SEQ ID NO: 15002 - DNA, 201 bp, Homo sapiens
gaattctggctaggaaccaggggtgaaggctagatatgtacctcttatggcaccccaggaccatgccaagtccctgcctctcagtctagtgttctctccaygccacaccctgcctcttagacatcctcgcatcccagcaaggatgcaaggctgggtgcgactggagagaacaatggaggctccccacagactggagactgg

SEQ ID NO: 15003 - DNA, 201 bp, Homo sapiens
ttacctcctcttccaggccccaggctctgccacccccttccccgcagctttgctgggggtgggagtgggtggtggcagcgttagaactgctgagaagggcygttttccaaaaggcctgctctgccagccacgggcccctgggctccccgcctatcagcgggcggagcgggcctggaccccattctccacgctctgatgagc

SEQ ID NO: 15004 - DNA, 201 bp, Homo sapiens
gcttactattacccatgtattgcagagggtattttaaaggatacagatgaacagccagatgcgcagacacatagggcaaagactggaagggtccccggcakgggcaccgccgtccccctggagttcgggctgtgccacccccttggcatgtggacgtgttcaccaatctggaagctctcccgaccctgtccttttaggttt

SEQ ID NO: 15005 - DNA, 201 bp, Homo sapiens
ggtgctgaggttggtcacacttggagcctggggaggaggcgaggccctccagggtggtggcttcgggcggggcctgagctccctctcccaggactctcctyggtttggcctctcaggcctgggcgctgggcttgggggggatccttcgcagaccacagcggggtctgttccctgccaggtacctgcagtgtgcccagcatg

SEQ ID NO: 15006 - DNA, 201 bp, Homo sapiens
agcgtgcttactattacccatgtattgcagagggtattttaaaggatacagatgaacagccagatgcgcagacacatagggcaaagactggaagggtcccyggcatgggcaccgccgtccccctggagttcgggctgtgccacccccttggcatgtggacgtgttcaccaatctggaagctctcccgaccctgtcctttta

SEQ ID NO: 15007 - DNA, 201 bp, Homo sapiens
caggttaagaactcagtcccgtaagactgaccccccaacttcagatgccaatcacaagtactgggaccccaggttacccacaccttgtctgactttgcgaygcattagaagctcccatgatgccctcttgagttttgatacgttgttagaacagctcacggaaccgaggggaagcgtgcttactattacccatgtattgca

SEQ ID NO: 15008 - DNA, 201 bp, Homo sapiens
ttgatggatgctggctgggtgtcctacagtttaacttgatgctcactgcctggggttagtgcagaccccacaggttaagaactcagtcccgtaagactgaycccccaacttcagatgccaatcacaagtactgggaccccaggttacccacaccttgtctgactttgcgacgcattagaagctcccatgatgccctcttga

SEQ ID NO: 15009 - DNA, 201 bp, Homo sapiens
gaagggccggatggaagccatcccatgcgtggtgggggatgaggaggtgtggacgtcggacgtgcagtaccaagtgtcggtatgtccagcgggtgggcagrgctcagcccctcccctgaatatgtgacctctttctctgacagctcgtaagcttataatgtgtgggctctgacttcaaggcctttatagtgcccctcccca

SEQ ID NO: 15010 - DNA, 201 bp, Homo sapiens
tagtgggccagcagccctttgggggggcccgagcctctggtgagtgggtcccccttcccacaggggagctgagttcctggtgggagaccctagatgttacrtctcgaggggcttcagagtaataggaaggataccatttactgagcacttattgtgggccaagcaagtgcactagctcagggtcctttcagcaaactcgtg

SEQ ID NO: 15011 - DNA, 201 bp, Homo sapiens; identical to SEQ ID NO: 1060

SEQ ID NO: 15012 - DNA, 201 bp, Homo sapiens
gtcccctagacttggggctggtggctcttgagggcccagtgcctgctcggggacctgaggcctctttgcatggtcaccacaataagtccctgtgtctgcgktggcccaaggagccccttcatttccctgctgtggccagggccagggcttggagcgtgaaccatttgactgaggccggatgtccctgccaccactgtccca

SEQ ID NO: 15013 - DNA, 201 bp, Homo sapiens
gctcaagctcacgcagctggttaggaggaaggctcgggcttgcacccgggtctgcagctgcccacggcccacgctcttcgccacctgctccattgggctcytgacttccaagctcctcctctcctaatattattttatccaaccttcctcaacctgtcacctttgcctccttttggactaggggtgactcaaagctgttgc

SEQ ID NO: 15014 - DNA, 201 bp, Homo sapiens
gctgggctgccatgcagattttggacttagtaagcctccataatcacatgagcaaattcttaaaacctctctcttgctcctgttctgtgtctctggaggaycctgatgaatatgtgtgctgaaggcccagtatgtttccttacaacagcctttggaaggaattctgccaccctcccattttggagagaaggaaatttaggt

SEQ ID NO: 15015 - DNA, 201 bp, Homo sapiens
cagcgctcactctgagcctccgcccgctctgggctgctccgtgctcgtgttggtcccgggccatggatggcgtaggtggtgctttgggcccctgggcaacygggggagccagctcctctggtcatttccccacccccgacccctgtagagtgcggcggaaagaacttccacttcgtgcaccgctcggccgacgtggagagc

SEQ ID NO: 15016 - DNA, 201 bp, Homo sapiens
acctggcgggggcaccggccctgatggtgagatgtgggcacaggtgggacagcggcagctggttgtcctcctggtcccaacagacagacagaggccacccygagccccttgggtctcagcctagtcatggggagaggcacagaaggtggaggcagcttggggctgtgggtaggctttgggaccagagacccagtttgaatc

SEQ ID NO: 15017 - DNA, 201 bp, Homo sapiens
caggaggtgctagctcaggggcttgagaatcctttccccctcagcccctgggatgggacctggtgagccctccaaatgtttcctggtccctcctggggccyggctcagtgctcgctttgggcacagcgtcagatgtgagaagaggatggacaggaggctgttggctgctcctgacccccggccctctgccttgcagggtaa

SEQ ID NO: 15018 - DNA, 201 bp, Homo sapiens; identical to SEQ ID NO: 8150

SEQ ID NO: 15019 - DNA, 201 bp, Homo sapiens
ctgagcgagatgccctgcaaaaggtaatgggagggtgggaggcacccgagaggtgcagggcatggagcagaggccatccccagcagccctgagatagcgcyccgtgcctgcagccatcacccgcttctacccttgctcccagccttgggtggaagcctgggagggctgtgggtctggagtgtgggaacagctgggaggacc

SEQ ID NO: 15020 - DNA, 201 bp, Homo sapiens
tccacccacacgcatgtacatggagaaggcatgcagatccctacatgcttagacatgtgaccatgcatatgcctatatatgcattgattgatgtgtgtctrtgtttatatgcgagtgcacctgtagtactaacacacgtacacttgtgtgtgtacacacacacacacacacacacacacacacagtgttcatgtctgtcct

SEQ ID NO: 15021 - DNA, 201 bp, Homo sapiens
tccactggctcgatagtgggccagcagccctttgggggggcccgagcctctggtgagtgggtcccccttcccacaggggagctgagttcctggtgggagascctagatgttacgtctcgaggggcttcagagtaataggaaggataccatttactgagcacttattgtgggccaagcaagtgcactagctcagggtccttt

SEQ ID NO: 15022 - DNA, 201 bp, Homo sapiens
cccctccccagaggaggaagctgggctcagagactgggtaacctgaccgaaggcccacagccaacagctggccagcatccctcatccctgactcggcctcstgttgaacctggaaagccagtgtgggctggagcaggggtgttgaggctggagctggggctggaggggagatgagctggttgctctgtcaccactgctctg

SEQ ID NO: 15023 - DNA, 201 bp, Homo sapiens; identical to SEQ ID NO: 1044

SEQ ID NO: 15024 - DNA, 201 bp, Homo sapiens
agagccagaaaatgtttgcatcttttgccggcttgtggtgggatggacaggacagggagctgggcacgttgctgtcctggagggaacccaggaggaggcgrcacctgacccttcttgcagacactgaagtgtaaactgaggcccagggactggggagagggtgagccagagcaggggcactgggagggctcagggccctgg

SEQ ID NO: 15025 - DNA, 201 bp, Homo sapiens
ttcctccgtggcactggttgcccccatgtctgcctctatgagaaagtggaggtgagcttggagagggaggaagggtgtgggcctgggagctggagtttccsctgctcctgagggacaggaacattggaccaggacaggccactcccttcaacttcgcagtagccctgtaacgaggcgtgccaagcccctccccagaggagg

SEQ ID NO: 15026 - DNA, 201 bp, Homo sapiens
ggattacaggcatccgccaccacgcccagctaattttttgtatttttagtagagagagggtttcaccatgttagccaggatggtctcgatctcctgacctygtgatccgcccgccttggcctcccaaagtgctgggatcacaggtgtgagccaccgcgcccggccaacagggaagtttctttaggtgggccttcgtccgcc

SEQ ID NO: 15027 - DNA, 201 bp, Homo sapiens
atgcgagtgcacctgtagtactaacacacgtacacttgtgtgtgtacacacacacacacacacacacacacacacagtgttcatgtctgtccttgtctctkctgtggctcagccagaccctggcttttgcccttggcgtcccctacccctgcccctgtttcaggagttgggcccttcaggtgcaggtgtttcggggtgagt

SEQ ID NO: 15028 - DNA, 201 bp, Homo sapiens; identical to SEQ ID NO: 1047

SEQ ID NO: 15029 - DNA, 201 bp, Homo sapiens; identical to SEQ ID NO: 1078

SEQ ID NO: 15030 - DNA, 201 bp, Homo sapiens
tctgcaggcattggccaggtcactctgtctgtcactgggtgtgtgtgcaggtgccagctgacagcagcacctgccacccagctccctggttgtctctgtakctgcctagagcttgccctcacctgtagctccgcaggcgtctgaggctgcatggcagctgggatttttccaggcagcgaggctccggcattctgataagcc

SEQ ID NO: 15031 - DNA, 201 bp, Homo sapiens; identical to SEQ ID NO: 1082

SEQ ID NO: 15032 - DNA, 201 bp, Homo sapiens
cagctgggctgggtgtgggttctgtgtccttccaggatatgtgtcatttcccatgaggggccggggcaggtggctgggtgggggcacaggctggagtattyttagttctactggttctacactgtgaggtggcaatgggatttgctcagatgccacccaataaaatgcctgttacttaatcacagtggtggatggtctttc

SEQ ID NO: 15033 - DNA, 201 bp, Homo sapiens; identical to SEQ ID NO: 1116

SEQ ID NO: 15034 - DNA, 201 bp, Homo sapiens
gacgccggggcctctctcctaggagatcttcgggcctgtactgtctgtgtacgtctacccggatgacaagtacaaggagacgctgcagctggttgacagcrccaccagctatggcctcacgggggcagtgttctcccaggataagtgagtggccaggccgcagccctggtgctgtgctccgggtgtcctgtccgtgtcccc

SEQ ID NO: 15035 - DNA, 201 bp, Homo sapiens; identical to SEQ ID NO: 1087

SEQ ID NO: 15036 - DNA, 201 bp, Homo sapiens; identical to SEQ ID NO: 1090

SEQ ID NO: 15037 - DNA, 201 bp, Homo sapiens
atgccattctcctgcctcagcctccccagtagctgggattacaggcatccgccaccacgcccagctaattttttgtatttttagtagagagagggtttcaycatgttagccaggatggtctcgatctcctgaccttgtgatccgcccgccttggcctcccaaagtgctgggatcacaggtgtgagccaccgcgcccggcca

SEQ ID NO: 15038 - DNA, 201 bp, Homo sapiens
cttgacatctcccaggctttgaattcaaatctcatttccagcatgtattggtctagaaggccactgaatccctctgagcctctgtttcctcacctgcaaawtgggaacgatagttatgcttacctcataggattgttttgagggtggaattgttttgagggcgttgcattttgctgcatgcttagtggctggtccagtgcc

SEQ ID NO: 15039 - DNA, 201 bp, Homo sapiens
aattgttttgagggcgttgcattttgctgcatgcttagtggctggtccagtgcccagcacctaatgggtgcttggggagtgtcttgatggggaggaaaaarctgtaggaaacagaaacattcggcattctagcctatttctgctacatgctagctgtgtggctttagacagttgagttatcctttctgagccaccatttct

SEQ ID NO: 15040 - DNA, 201 bp, Homo sapiens
gctagctgtgtggctttagacagttgagttatcctttctgagccaccatttcttcatctgtaaaataggtataataccaacctttccaaattgcagagaaratgatattatattgaacatctcactcaaactagaggctcaagaaatagctgttaaatgaatgaggaaaattgcaagattggacttggaggaaaatatctt

SEQ ID NO: 15041 - DNA, 201 bp, Homo sapiens; identical to SEQ ID NO: 8107

SEQ ID NO: 15042 - DNA, 201 bp, Homo sapiens; identical to SEQ ID NO: 8108

SEQ ID NO: 15043 - DNA, 201 bp, Homo sapiens
gctctgtaaaatgggggtgtggtttcttacgagttctgcttcccagggttgaggtaaaagtcaattaaaacagtgcagtaggaaaacattttgcaaaaggrtttgaaaataaatcaatatggcttaatgcttccgtttattgagcacctactttgtgctaggtgcagtgatgacttctttaaatatgtgataattatggga

SEQ ID NO: 15044 - DNA, 201 bp, Homo sapiens
cagcctaggcgacagaatgagactccatctcaaaaaaaaaaaaaaaagaaataatataaaataaaacatcaggacttatctgacttggagactgatggccygaactcagcaagctactgctggcagagccagaattaacctgatgccaagttgagggacctccaacttgtaggttattccttttctgagccctaagacata

SEQ ID NO: 15045 - DNA, 201 bp, Homo sapiens
ctagaggctcaagaaatagctgttaaatgaatgaggaaaattgcaagattggacttggaggaaaatatctttagtcccaattaattaaagcctgacattamaaaaaaaatacacatttttaattgtacaagcaatacataaatacattctgcattttaaaagagttaaactccttttggataaggcgaatgtcccctttgg

SEQ ID NO: 15046 - DNA, 201 bp, Homo sapiens; identical to SEQ ID NO: 8109

SEQ ID NO: 15047 - DNA, 201 bp, Homo sapiens
gagttcagaagaggagctgttggcctttgactatttttcattccaccccaaagaggctctcgatacccccccgacctaacgtgcaagtgtgggtgcccccragagacggcgatcaggttagcgccagtgaggctgtcttccagagagggcttggggggccagtccagccgaatgaggcacatgtcattctccgaaggctgc

SEQ ID NO: 15048 - DNA, 201 bp, Homo sapiens
gtctgagtagagatgcattaatctgccgcttaacctatcccgccctcccccgggctcccctgatggtctgtgtgtgtttgctcccactccttcccagctcrccttgatgagggcaggcctcggtgtctgggcgtagcagggcgtctggcaggttgggccaggtgccgtctggtctgtgcgggcctgagagactcgcaggcc

SEQ ID NO: 15049 - DNA, 201 bp, Homo sapiens
ttctgtcctgggggaagaagatgaaatgtaagccggcagccagcctgagttgggctgtgggagatattctgggctgccgggcctgggtgtctccagaaacmcccaacgctcgctcatgaaggctctcttggtgccaggtcttgtgccaggcactgggatatggtgccgaattggatacaagggagatgggacgtcctcctg

SEQ ID NO: 15050 - DNA, 201 bp, Homo sapiens; identical to SEQ ID NO: 760

SEQ ID NO: 15051 - DNA, 201 bp, Homo sapiens
gatgttcgcttggagggggcttcacaaatgtcactttgctcactccagacgcccatcctaggagatggggtatcactccccttttgtagacagggaaactgagactctgagaggagaagggacttgggtaacaccactcagctagtatgtggctgagctgggattcagagccaggctgcctcccacgctagtacgctgtca

SEQ ID NO: 15052 - DNA, 201 bp, Homo sapiens
tgatgttcgcttggagggggcttcacaaatgtcactttgctcactccagacgcccatcctaggagatggggtatcactccccttttgtagacagggaaactgagactctgagaggagaagggacttgggtaacaccactcagctagtatgtggctgagctgggattcagagccaggctgcctcccacgctagtacgctgtc

SEQ ID NO: 15053 - DNA, 201 bp, Homo sapiens
aaggctgctgcctcgttgcctgaaggggtgtgtggctggggggccggagcccagttaggggcttgccgttctttcccactcacctctcaagtcctgttggstcaccacagagagcccagagaccagctagctgccctgcaaagggccccttggtcaccaggaaacaagtggggggaatgtcaggtgaggggaatgtcaggt

SEQ ID NO: 15054 - DNA, 201 bp, Homo sapiens; identical to SEQ ID NO: 8126

SEQ ID NO: 15055 - DNA, 201 bp, Homo sapiens
caaggctgctgcctcgttgcctgaaggggtgtgtggctggggggccggagcccagttaggggcttgccgttctttcccactcacctctcaagtcctgttgrctcaccacagagagcccagagaccagctagctgccctgcaaagggccccttggtcaccaggaaacaagtggggggaatgtcaggtgaggggaatgtcagg

SEQ ID NO: 15056 - DNA, 201 bp, Homo sapiens
cgtttccccggattgcttgcacaggggcggtgaatgggaggcttgggctgagagtagcctgcagcactggaagaatttgaattcatttcctttttttttttgagacagggtctcactttgtcacccaggctggaggctggagtgcggcggcatggtcacagctcactgcagcctcaacctcttgggtttagggatcctttc

SEQ ID NO: 15057 - DNA, 201 bp, Homo sapiens
tcgtagaagagtggagtctgatgagagagacagggaagtgaaaattcacagcccctggatgccagtgctgaaggagtgggttcaggactgggaacatcagwatgggcatagtgacttattctggggaagtcatgaaaagctccctggaggaggtgatgaaggggtacccaagcctggaagaggctggcagtggtactccag

SEQ ID NO: 15058 - DNA, 201 bp, Homo sapiens
cacacctatgacttcctctcatcccctggatgccccagaggacttgaggtacccttcaagctcatctcatccatcctcctgcttccaggcaaaatcattcsctgacatcccaaccaagttagctatgccttctgtctttcaaagcgaccttcagccattctgtagtggtttctatttctctctcacccctatttgcatatt

SEQ ID NO: 15059 - DNA, 201 bp, Homo sapiens
tttgggaggccgaggcaggcggatcacgaggtcaggagatcgagaccatcctggctaacacagtgaaacgctgtctctactaaaaatacaaaaaattagcygggcgtggtggcgggcgcctgtagtcccagctacgcaggaggctgaggcaggagaatggcgtgaaccccagggggcggagcctgcagtgagccgagatcg

SEQ ID NO: 15060 - DNA, 201 bp, Homo sapiens; identical to SEQ ID NO: 8128

SEQ ID NO: 15061 - DNA, 201 bp, Homo sapiens; identical to SEQ ID NO: 8132

SEQ ID NO: 15062 - DNA, 201 bp, Homo sapiens; identical to SEQ ID NO: 1128

SEQ ID NO: 15063 - DNA, 201 bp, Homo sapiens; identical to SEQ ID NO: 8135

SEQ ID NO: 15064 - DNA, 201 bp, Homo sapiens; identical to SEQ ID NO: 8136

SEQ ID NO: 15065 - DNA, 201 bp, Homo sapiens; identical to SEQ ID NO: 8137

SEQ ID NO: 15066 - DNA, 201 bp, Homo sapiens; identical to SEQ ID NO: 8138

SEQ ID NO: 15067 - DNA, 201 bp, Homo sapiens; identical to SEQ ID NO: 761

SEQ ID NO: 15068 - DNA, 201 bp, Homo sapiens
cattttacaaatgagaggttcagagaggtgaagacttctgtcccagatctcgccacgagtccgtctgggtctctggaccccaaggtcagtgctcctcccakgaggtggccttgtcccatgcccctggaggttgccaaaggctggctcagggtgaggaggcaggcaggaggcacggggtctccccagcacctgtcacaatat

SEQ ID NO: 15069 - DNA, 201 bp, Homo sapiens
caagcagtgggaagtgattatgctcattttacaaatgagaggttcagagaggtgaagacttctgtcccagatctcgccacgagtccgtctgggtctctggmccccaaggtcagtgctcctcccaggaggtggccttgtcccatgcccctggaggttgccaaaggctggctcagggtgaggaggcaggcaggaggcacgggg

SEQ ID NO: 15070 - DNA, 201 bp, Homo sapiens
gtgtttagaaaattccaggccagatgggagactgctgaaggtttgtgatgttgccgccgcctgcccacgaggggagtgtcctcccacccacactgggcacygggtgcttggcttcctgagcaggatgtggtttctcattctagacctggtacaagagagggtagttttcacccaacagtaaacctggcaaatggcaatgcc

SEQ ID NO: 15071 - DNA, 201 bp, Homo sapiens; identical to SEQ ID NO: 8143

SEQ ID NO: 15072 - DNA, 201 bp, Homo sapiens
atgcattaatctgccgcttaacctatcccgccctcccccgggctcccctgatggtctgtgtgtgtttgctcccactccttcccagctcgccttgatgaggrcaggcctcggtgtctgggcgtagcagggcgtctggcaggttgggccaggtgccgtctggtctgtgcgggcctgagagactcgcaggcccagcggcctttg

SEQ ID NO: 15073 - DNA, 201 bp, Homo sapiens
ccccgggctcccctgatggtctgtgtgtgtttgctcccactccttcccagctcgccttgatgagggcaggcctcggtgtctgggcgtagcagggcgtctgkcaggttgggccaggtgccgtctggtctgtgcgggcctgagagactcgcaggcccagcggcctttggcagggttgctccatgaggtcaggaaaggccagtg

SEQ ID NO: 15074 - DNA, 201 bp, Homo sapiens
acaaggctgctgcctcgttgcctgaaggggtgtgtggctggggggccggagcccagttaggggcttgccgttctttcccactcacctctcaagtcctgttrgctcaccacagagagcccagagaccagctagctgccctgcaaagggccccttggtcaccaggaaacaagtggggggaatgtcaggtgaggggaatgtcag

SEQ ID NO: 15075 - DNA, 201 bp, Homo sapiens
catccctgttatttttctacagcccccaccacacagctaaactgtcccctttgggccaggcgcagtggctcatgcctgtaatcccagcactttgggaggcygaggtgggcggatcacctgaggttgggagttcgagaccagcctggccaatatggcgaaatctcatctctactaaaaatataaaaattagccaggcctggt

SEQ ID NO: 15076 - DNA, 201 bp, Homo sapiens
cccctgatggtctgtgtgtgtttgctcccactccttcccagctcgccttgatgagggcaggcctcggtgtctgggcgtagcagggcgtctggcaggttggsccaggtgccgtctggtctgtgcgggcctgagagactcgcaggcccagcggcctttggcagggttgctccatgaggtcaggaaaggccagtgcgcgtgtct

SEQ ID NO: 15077 - DNA, 201 bp, Homo sapiens
agtatagcggccagatctcggctcactgcaacctctgcctcccgggttccagtgtttctcctgcctcagcctcccaagtagctggaatcacaggcatgcamcatgatgcccggctaatttttgcatgtttagtagaggcagggttttaccacgttggccaggctggtctcgaactcctgacctccagtgatctgcctacct

SEQ ID NO: 15078 - DNA, 201 bp, Homo sapiens
cacaaggctgctgcctcgttgcctgaaggggtgtgtggctggggggccggagcccagttaggggcttgccgttctttcccactcacctctcaagtcctgtyggctcaccacagagagcccagagaccagctagctgccctgcaaagggccccttggtcaccaggaaacaagtggggggaatgtcaggtgaggggaatgtca

SEQ ID NO: 15079 - DNA, 201 bp, Homo sapiens
agcacaaggctgctgcctcgttgcctgaaggggtgtgtggctggggggccggagcccagttaggggcttgccgttctttcccactcacctctcaagtcctsttggctcaccacagagagcccagagaccagctagctgccctgcaaagggccccttggtcaccaggaaacaagtggggggaatgtcaggtgaggggaatgt

SEQ ID NO: 15080 - DNA, 201 bp, Homo sapiens
ttccagcacaaggctgctgcctcgttgcctgaaggggtgtgtggctggggggccggagcccagttaggggcttgccgttctttcccactcacctctcaagtcctgttggctcaccacagagagcccagagaccagctagctgccctgcaaagggccccttggtcaccaggaaacaagtggggggaatgtcaggtgagggga

SEQ ID NO: 15081 - DNA, 201 bp, Homo sapiens
ggctccggggctcggcttctagttagaatcctggctggctgtgtttgaccatgaggatgacggatgcattggatgcatcggagaccaggcaccctcctccygccccctccccacttctgcttccctcggtctgagtagagatgcattaatctgccgcttaacctatcccgccctcccccgggctcccctgatggtctgtgt

SEQ ID NO: 15082 - DNA, 201 bp, Homo sapiens
cttccagcacaaggctgctgcctcgttgcctgaaggggtgtgtggctggggggccggagcccagttaggggcttgccgttctttcccactcacctctcaagtcctgttggctcaccacagagagcccagagaccagctagctgccctgcaaagggccccttggtcaccaggaaacaagtggggggaatgtcaggtgagggg

SEQ ID NO: 15083 - DNA, 201 bp, Homo sapiens
acttccagcacaaggctgctgcctcgttgcctgaaggggtgtgtggctggggggccggagcccagttaggggcttgccgttctttcccactcacctctcaagtcctgttggctcaccacagagagcccagagaccagctagctgccctgcaaagggccccttggtcaccaggaaacaagtggggggaatgtcaggtgaggg

SEQ ID NO: 15084 - DNA, 201 bp, Homo sapiens; identical to SEQ ID NO: 8151

SEQ ID NO: 15085 - DNA, 201 bp, Homo sapiens; identical to SEQ ID NO: 8155

SEQ ID NO: 15086 - DNA, 201 bp, Homo sapiens; identical to SEQ ID NO: 8106

SEQ ID NO: 15087 - DNA, 201 bp, Homo sapiens
caggccgggcgcggtggctcacgcctgtaatcccagcactttgggaggccgaggcaggcggatcacgaggtcaggagatcgagaccatcctggctaacacrgtgaaacgctgtctctactaaaaatacaaaaaattagccgggcgtggtggcgggcgcctgtagtcccagctacgcaggaggctgaggcaggagaatggcg

SEQ ID NO: 15088 - DNA, 201 bp, Homo sapiens
ccagtcccagggaactgctcccaccccttcctgcagttaagggcgggggtccactgaaccctcctttgccttctcccctcccgcccgcgtttcctattcarcttcgggcagtactcgtgtcaaagtagtggtgtggaagcccttggaacaacagggcttggcacatagtaaacgctaaatcagtgggaactgtatttattg

SEQ ID NO: 15089 - DNA, 201 bp, Homo sapiens; identical to SEQ ID NO: 8113

SEQ ID NO: 15090 - DNA, 201 bp, Homo sapiens
actttctgctgtcaggcggtcctaagcacccaccacctcccgatcacagccccccacacccggagttgtaactacctggcatgtgtctgcccctgcatcgwctggaagctctgtgggggcctgctccaactctggcttcgtctcccactggcagatcccagccaggacctggccaaggtccatgctgagtaaatactcatg

SEQ ID NO: 15091 - DNA, 201 bp, Homo sapiens
ggctagatgatctcaaagggtcttcccagccttggcaatatataaatctgagtttgagctcccagcccgcttctgatcccctggccataagagaagtcacygtctaagggatgagacccaggtgtctgcctggactgttgtggccatgaagggctttaaatcatcccaggatatctattacagaactccaagcaatgatgc

SEQ ID NO: 15092 - DNA, 201 bp, Homo sapiens
ttgtggctaaatcaaaaacacagcagactaacatcacagccacatcactccagggcaagcccgtgtctcctttgtcaccaagaacaccaaggcattgtccrtgtaagacagtgtgcctgtcctcaagcttacatacaaagagacaaaacaaacacaaaagttaataacaagacaaaaattaaactgctagtaaaaaatgca

SEQ ID NO: 15093 - DNA, 201 bp, Homo sapiens
cggtctaatatgactttaatttcacagttctcgtagcttagatgatatcttgagatgtttacaataactgtagtgtgttacgtaaatacctgtgatttctrctagtgacaaaatcacagggacatctacttgctgcctacattcataatcaaaggatatgttaaaaaccattggctgggcacggtggcttacgtctgtaat

SEQ ID NO: 15094 - DNA, 201 bp, Homo sapiens
tggtctgtgtgtgtttgctcccactccttcccagctcgccttgatgagggcaggcctcggtgtctgggcgtagcagggcgtctggcaggttgggccaggtsccgtctggtctgtgcgggcctgagagactcgcaggcccagcggcctttggcagggttgctccatgaggtcaggaaaggccagtgcgcgtgtctttttgac

SEQ ID NO: 15095 - DNA, 201 bp, Homo sapiens; identical to SEQ ID NO: 8118

SEQ ID NO: 15096 - DNA, 201 bp, Homo sapiens; identical to SEQ ID NO: 8130

SEQ ID NO: 15097 - DNA, 201 bp, Homo sapiens; identical to SEQ ID NO: 8131

SEQ ID NO: 15098 - DNA, 201 bp, Homo sapiens
ctgcaggagtgggcgcctctgtgttgatagagctaaattgggttcagtatggaattcgatttagctggttgtaaagttacctaagttaaaacaaacaggcygggcgcggtggctcacgcctgtaatcccagcactttgggaggccgaggcaggcggatcacgaggtcaggagatcgagaccatcctggctaacacagtgaa

SEQ ID NO: 15099 - DNA, 201 bp, Homo sapiens
gggctggatgacaagctgcagcctccccgcaaccccacgatttccatagcgcagtggagccagaaagaaacagaccattttacagaccagagaaacaaggktgctgctctctcagaccctggagccagtgacagggaaggcggagaagggacgagagcctccgtttattcggagcctgtgtataccctccttttcacaaac

SEQ ID NO: 15100 - DNA, 201 bp, Homo sapiens
ccatttacagaaaattccaattccaagcccagcccaggtaatcactgacctgctctgtctctagaaactagccttttccggacatttcatagaaatagaawcatacactctgcagtcttttgtgtttggcttttttcacttagagaattttttttgaagttcatccatgtcgtagcatgtatttgtaggctgttccttttt

SEQ ID NO: 15101 - DNA, 201 bp, Homo sapiens
cccagggggcggagcctgcagtgagccgagatcgcaccactgcactccagcctgggcgacagcgagactccgtctcaaacaaacaaacaaacaaacaaaamaacaacaacaacaacaaacaacgaaacctctgatcactttgatcaccccccacccccattctgcagttctgtgtgggccgccctgaccccaccccaggcg

SEQ ID NO: 15102 - DNA, 201 bp, Homo sapiens
cccctccctcccccaggtgggtagagccagggtgacaccggtgaagagcatgggcatcatctgtcaagggcatctgtgtgcctcacttgagcctgctctcytgatccatccatgagccctacaaggtgggattgctatccccgttttacagaagtggagactgaggctcctagcttgaggtaggcaggccctcaggggatc

SEQ ID NO: 15103 - DNA, 201 bp, Homo sapiens
tttccagagttgacgtcagggcagctggtttagggtttcatctgtgagacaaaggctgctttgtagcttctgcccggtttaagtccaagcacatcaccccscaaggtgggaaacgaggtggaagggattgcagggcccaaacagagaagccttgggaggcttggcttgcgctcagcccctccaagaagggagccaagatct

SEQ ID NO: 15104 - DNA, 201 bp, Homo sapiens; identical to SEQ ID NO: 8140

SEQ ID NO: 15105 - DNA, 201 bp, Homo sapiens
tattttttgtgcccttctttgctactcctgctcttgctgcaagatgtgttagcaggttcgctctagactccaggctgcagccagaggcttgccggggctcrcccttgcacctgccctgctcagcggctttggaattgagtcgccttccccgctctgagccgtgtggccaggagagatgattcagctcgggacctgtgctcc

SEQ ID NO: 15106 - DNA, 201 bp, Homo sapiens
agcaggttcgctctagactccaggctgcagccagaggcttgccggggctcgcccttgcacctgccctgctcagcggctttggaattgagtcgccttccccrctctgagccgtgtggccaggagagatgattcagctcgggacctgtgctccagcctttaccccccagagaagccccagatgccctgtgctcctgggcaggg

SEQ ID NO: 15107 - DNA, 201 bp, Homo sapiens; identical to SEQ ID NO: 8147

SEQ ID NO: 15108 - DNA, 201 bp, Homo sapiens
ggcttgcccagcaaccctgtgaagactacgttctctctgtaatgtagcacaactctgtgcatgccatttaatctcttgcacctcagtttgtcgctctgtamaatgggggtgtggtttcttacgagttctgcttcccagggttgaggtaaaagtcaattaaaacagtgcagtaggaaaacattttgcaaaagggtttgaaaa

SEQ ID NO: 15109 - DNA, 201 bp, Homo sapiens
tcttccactgagggctccagcccagcctcacctgagctcatttcccttcacctgagtgagtcggcctaggcgtgccggccgctcgccttcccgcaaggtgkgggccatttccacacctccctcccaactctggaggtgggaggcagccatgcgctgtgccgttgacgtggagctgctgaacacccatggtctgctggatgc

SEQ ID NO: 15110 - DNA, 201 bp, Homo sapiens
cccccattgtgattcctgtccccaacatggggcctgctcttctcggtgagaggtggcctgggaccggactcctagccttgctcctgatatactgggtgatstgggcaaatggcttgaccactcggcttcagttgccccatctgtacaatgaggggaggttcagtgagatggtcctggctggattaggcccttaggttccct

SEQ ID NO: 15111 - DNA, 201 bp, Homo sapiens
catggggcctgctcttctcggtgagaggtggcctgggaccggactcctagccttgctcctgatatactgggtgatctgggcaaatggcttgaccactcggsttcagttgccccatctgtacaatgaggggaggttcagtgagatggtcctggctggattaggcccttaggttccctccctgccccctcttagctttctctg

SEQ ID NO: 15112 - DNA, 201 bp, Homo sapiens
ggctggattaggcccttaggttccctccctgccccctcttagctttctctgtgccctccagccctggaaggaatcccagccccttgccctccaggtccggrcccgggagcccacgcagatctcagcctagcagctaatgctggggctgggaaaggctggagaaaagggggagagggagagagtgtgtgtcctccaggagcc

SEQ ID NO: 15113 - DNA, 201 bp, Homo sapiens
cctgcttcttagaggacctgcacctttcctggcactggccggccccagtcacgctcatcatcctgtgagatgccggctcccttcccagttcacccctaccytccatcctagccgagccccccagttaccttgattgcttcctttccggttcaggtggtccccaaaaagaaagagcgtaaggtggcttccgatgatgacatc

SEQ ID NO: 15114 - DNA, 201 bp, Homo sapiens
aagtcaattaaaacagtgcagtaggaaaacattttgcaaaagggtttgaaaataaatcaatatggcttaatgcttccgtttattgagcacctactttgtgctaggtgcagtgatgacttctttaaatatgtgataattatgggagcagtcccaagcagtgggaagtgattatgctcattttacaaatgagaggttcagaga

SEQ ID NO: 15115 - DNA, 201 bp, Homo sapiens
cctggacccacctgctgccacagtggcccttgttaggacagacctcaaagggctgggcatgcccattagttcctggggtatgtctatggggtgtggacggygaaagcagggttttcagtgggttttgctgacgggggttctgtggcattagcatctggcttctttccttctgccaccctgtccccttgtactgccagccac

SEQ ID NO: 15116 - DNA, 201 bp, Homo sapiens
tacagccgtgagccaccatgttcagcctctccaaagttgtgttcaataagcaataccaagtggcagtgatgctgggaacctgggcaaatatagacaggagrgaattggacaggtggctcagaaaacaactgaaacctcagattggcattggggcaggtgacccgggggttccctgggccccatgttgcccaaaagagccag

SEQ ID NO: 15117 - DNA, 201 bp, Homo sapiens
acctgctgggcagctgcccctttctgtcccctgtatgggtccctggagcctgccttctgttcagtcatgccctctggtgtcacccccacaggcgggagacstttgactttgacgacgactgtgacagcctgacgtgggaagagaatgaagacacgctgctgctctgggaggatttcaccaactgcaatccgaccatcgacc

SEQ ID NO: 15118 - DNA, 201 bp, Homo sapiens
tgcttgcctggcacaaggcagccagtgcccagaacttcccacacttcttgggttgaagggattgaggatctgaggctggaggagccagaggtcctgccccrgcgagagctccggaactcgcctcccctctctcagcaggaagagaatactcttaatccacttctgtgtccccagcacttggctcctgggtgagcacttggg

SEQ ID NO: 15119 - DNA, 201 bp, Homo sapiens
tccctggagcctgccttctgttcagtcatgccctctggtgtcacccccacaggcgggagacctttgactttgacgacgactgtgacagcctgacgtgggargagaatgaagacacgctgctgctctgggaggatttcaccaactgcaatccgaccatcgacctgcagggcgaggtaagcccagcgcctggcttcccaaagg

SEQ ID NO: 15120 - DNA, 201 bp, Homo sapiens
ggcaacttggatggggccccttcactcatggacggaggaagatgccccctgtcccagggtgagcattcccttccatccctgcttgcctggcacaaggcagycagtgcccagaacttcccacacttcttgggttgaagggattgaggatctgaggctggaggagccagaggtcctgccccagcgagagctccggaactcgcc

SEQ ID NO: 15121 - DNA, 201 bp, Homo sapiens
gtccctcccacctctgtcttcacgaagtgctgggctcataccttaacgtggcacttgtcaccaccacctgatactctggttatatgtcagcctggctgtcytctcacaccacctcccctaggctgggagctcccagagggcaggcagggatggatgccccaatgcaccttccttgcccagctcaagatagtccctgggtgg

SEQ ID NO: 15122 - DNA, 201 bp, Homo sapiens
atacaaagtacccagaagtcgaatccacagagacagaaagtagaagggtggttgccaggggctgcggggagaggggtacggggtactactgcttaacaggyacagttgcagttttgcaagatgaaagagttctggagatggatggaggtgatggttgcacagcagtgtgaatgcacttaatgccactttaaaaatggttaa

SEQ ID NO: 15123 - DNA, 201 bp, Homo sapiens
aggatattatgctaaatgaaatcagccaggctgggcgcggtggctcacacctgtcatctcaatactttgggaggccaaggtgggagaattgcttgagcccrggagttcgagacctgctggacagcatggtgaaaccccgtctctacaaaaaataatttttaaaaattaactgggcatggtggctcatgcctatagtcccag

SEQ ID NO: 15124 - DNA, 201 bp, Homo sapiens
gtggccctgcagccacctgctgtgtcacctgctcgggaggatgctgccgtatattgttaggtggaaaaaatgcatttgaaaaccacatatggtcgcatccygttgtcgttaaaaaccaatctcataagaagagaaaatctcataagaaaaagttgggaaggatatagagccgatgttaaccgtaattctctcagggagggg

SEQ ID NO: 15125 - DNA, 201 bp, Homo sapiens
gttgctgcaggaactggagtaagggcccaggaccctgcttttccttggctccctgggcaactgggagcctgtggtagagaatgccagagagcgttctctcyaacacgtcacacatggctctttagaggggcacaaaagccttttctacatctgcacacttgatccagaaacccaatctgggtatcccagagggatacctgg

SEQ ID NO: 15126 - DNA, 201 bp, Homo sapiens
aggggcacaaaagccttttctacatctgcacacttgatccagaaacccaatctgggtatcccagagggatacctggacacatatgcaaatgtgagggtacraaggtgttcacagtcttgtttagattgcaaggactctgcgctgacagtggaggacccatcaaaccagtggccctgcagccacctgctgtgtcacctgctc

SEQ ID NO: 15127 - DNA, 201 bp, Homo sapiens
tgaggaagaacagtatttatagcggagtcttcctgcacccaacggaggcaatcttttgactaatgaggaaactaaggcacaaaacattgttgctgcaggarctggagtaagggcccaggaccctgcttttccttggctccctgggcaactgggagcctgtggtagagaatgccagagagcgttctctctaacacgtcacac

SEQ ID NO: 15128 - DNA, 201 bp, Homo sapiens
gcttcagacttctcatttatgaatgacctggacttccccgtctgatgtcctaggatcctgtgttctgtgctttttttttttttttgccccacctgcagccwgtttgtgtttgcacatcctcattgaatccaggtggggtcattctcacccattttacaggtgaggagactgagccctagagaagtgacttggcttaaggcc

SEQ ID NO: 15129 - DNA, 201 bp, Homo sapiens
cgcaccactccagcaaggtggctgtgggtatgtccattgtacagatgagaaaactttgagtcgtgccaggtgaaatgacttgttccttgtcaaagctagakagtggcagagtgggcatgtgacctcaggtctctttggcttccaagatcaccactgggttccaccactagagtctcgtgttgcacccagctttggaaaggg

SEQ ID NO: 15130 - DNA, 201 bp, Homo sapiens; identical to SEQ ID NO: 8111

SEQ ID NO: 15131 - DNA, 201 bp, Homo sapiens; identical to SEQ ID NO: 8117

SEQ ID NO: 15132 - DNA, 201 bp, Homo sapiens
cctaagacataattcaattgtggggaattaaaaagaaattgcttcatttgctcttgcttcatgtttcctgttggcccgtgatttgggccttctcttgggtrggaactctggctctgaggtgacactgcttggagttgtgttactgctctgagcctcagttctctcatctgtaaaatggggatgacaatcttagctgatgag

SEQ ID NO: 15133 - DNA, 201 bp, Homo sapiens
tggattaggcccttaggttccctccctgccccctcttagctttctctgtgccctccagccctggaaggaatcccagccccttgccctccaggtccgggccygggagcccacgcagatctcagcctagcagctaatgctggggctgggaaaggctggagaaaagggggagagggagagagtgtgtgtcctccaggagccctg

SEQ ID NO: 15134 - DNA, 201 bp, Homo sapiens; identical to SEQ ID NO: 1122

SEQ ID NO: 15135 - DNA, 201 bp, Homo sapiens
ggaggagctcgccaagcgcatgaaccttcagaccatggtggacacgctgcaggaggtaagagccctccgatatcccgaccaggagaggcacgccagagagycatgtggccaaggggcacagtcttcatgcggcaaagccaggaaattcttgcacagcccctactctgttacctcctaccacctcagtctctcctttatgga

SEQ ID NO: 15136 - DNA, 201 bp, Homo sapiens
cctgctaacgccgcctgcttcttagaggacctgcacctttcctggcactggccggccccagtcacgctcatcatcctgtgagatgccggctcccttcccarttcacccctaccttccatcctagccgagccccccagttaccttgattgcttcctttccggttcaggtggtccccaaaaagaaagagcgtaaggtggcttc

SEQ ID NO: 15137 - DNA, 201 bp, Homo sapiens
tccatccccttgagctgtatttagtcactaattcttttggtgcgcgtgtttgcagtctaattacctgcctcagctgcgctggaacctgccccttcccagcyagtgaggaccatgacggctctgcacagacaggtgaccgttgccctgttacccatccttggttgcacaagccccacgtgtcttttgttagctgggtccttg

SEQ ID NO: 15138 - DNA, 201 bp, Homo sapiens
cctgggggaagaagatgaaatgtaagccggcagccagcctgagttgggctgtgggagatattctgggctgccgggcctgggtgtctccagaaacccccaaygctcgctcatgaaggctctcttggtgccaggtcttgtgccaggcactgggatatggtgccgaattggatacaagggagatgggacgtcctcctgtgtgtc

SEQ ID NO: 15139 - DNA, 201 bp, Homo sapiens
gggccctggacgctgtagcagccctcccagtagcctccctcccagccttcccagcagctggaggtggggcttgctcactaggaggagcaaaataatgttasgcactggtgtttatgatcttatggggtcttcaccatccagggaggtgtaggtactattgttattcccattttacagatgaggaaactgaggctcagagag

SEQ ID NO: 15140 - DNA, 201 bp, Homo sapiens
gaacccagagacagagcctctaaggggaagcatggtgcagctcagccaagcccggggccctggacgctgtagcagccctcccagtagcctccctcccagcyttcccagcagctggaggtggggcttgctcactaggaggagcaaaataatgttaggcactggtgtttatgatcttatggggtcttcaccatccagggaggt

SEQ ID NO: 15141 - DNA, 201 bp, Homo sapiens; identical to SEQ ID NO: 764

SEQ ID NO: 15142 - DNA, 201 bp, Homo sapiens
ttgggaggcagaggcaggagaatggcttgaacccgcaaggtggaggttgcagtgagccaagatcttgccactgcactccagcctaggcgacagaatgagamtccatctcaaaaaaaaaaaaaaaagaaataatataaaataaaacatcaggacttatctgacttggagactgatggcctgaactcagcaagctactgctgg

SEQ ID NO: 15143 - DNA, 201 bp, Homo sapiens
gccagatgggagactgctgaaggtttgtgatgttgccgccgcctgcccacgaggggagtgtcctcccacccacactgggcaccgggtgcttggcttcctgrgcaggatgtggtttctcattctagacctggtacaagagagggtagttttcacccaacagtaaacctggcaaatggcaatgcctggttctctggagggtcc

SEQ ID NO: 15144 - DNA, 201 bp, Homo sapiens
gcatctgtgggttgcacagccctttgagcattgccagactgtgaggtgtttagaaaattccaggccagatgggagactgctgaaggtttgtgatgttgcckccgcctgcccacgaggggagtgtcctcccacccacactgggcaccgggtgcttggcttcctgagcaggatgtggtttctcattctagacctggtacaaga

SEQ ID NO: 15145 - DNA, 201 bp, Homo sapiens
tggaagaagtagacaggctcgcctagctacagcacagggcgtgtaaacagtcaagttcagaatgatttcacagggcagagagtgggtgccctacagaggcrgatctgtgctggccctgtggggtgggcagaggttgagaaccaagctggaaactgggagagggtgtcccgtgccctttgctggcagcatctgtgggttgca

SEQ ID NO: 15146 - DNA, 201 bp, Homo sapiens
agccccttgccctccaggtccgggcccgggagcccacgcagatctcagcctagcagctaatgctggggctgggaaaggctggagaaaagggggagagggaragagtgtgtgtcctccaggagccctggctgggctgtctcctgtgggagagaggaggaattttcctctgtgtgtgcaaacagtatccgttttctcttgttt

SEQ ID NO: 15147 - DNA, 201 bp, Homo sapiens
ccagggattcggctgtttgtggaggggagggcctgcacttggaatcagaaggcctgggccaaagttcaaagtttgaatgaacccccaagcctggcagtgcrgggtgctggggccccagggcaggagttaaaagccgagtgagcttgggctagtcactgcctctcgagcctcagtttcttcatctgtaaaacagggatgcta

SEQ ID NO: 15148 - DNA, 201 bp, Homo sapiens
tgatcatcataaccagctctctgggcctgcagaaggactggacccccgacctgagacccggctcctgtgcctgttttcccacctagaccagggaacttgcytcttgcttcctctttgccccatctctgtgcctgagacctcccgagatgagtgccagcccccggtggcggtggggaaggtggaagtggcggtgaccacaca

SEQ ID NO: 15149 - DNA, 201 bp, Homo sapiens
cgagatgcgttgccttccaggagaattgatttaaactgtgccatgtgtcagtgacaccggaggctgtgggctttgcatttgcagtcctggcttttgatcgyattgagaggtgaaggccggctggcattccatttatttcctatgtcgcggatggctgaaggcccgggacgggaaggaggcagccctgtcatgtccctgtgc

SEQ ID NO: 15150 - DNA, 201 bp, Homo sapiens
cagagcctcaagctagagggaggggaatgaggtcccagaaaagaaaaggaagcagggagacagctgacgctgaagattccttctcagaggaatgcgaggcrgggctttgccttggcaaacgagaccggatgcgggtccctgggtcccccttccccccacgtgtatgcacactcacactcacacacatgtacgtgcacacac

SEQ ID NO: 15151 - DNA, 201 bp, Homo sapiens
ggcccggctggctctgcggcggttccagctaacccggtccctggtgcagctctgcggtccgggtcccccagcagagaatcggcacccggcggggaggcagsaccagacgcaggagagggcgtggccccgccggggagctgggcggagtctatgctgcggagaaagcgggagaacccggaggtgggcggagccgagggtctg

SEQ ID NO: 15152 - DNA, 201 bp, Homo sapiens
gctgctctctgcccccacctgccctctgccagaggccaggcccacgcttggcccagaatgaagtcttccactgagggctccagcccagcctcacctgagckcatttcccttcacctgagtgagtcggcctaggcgtgccggccgctcgccttcccgcaaggtgtgggccatttccacacctccctcccaactctggaggtg

SEQ ID NO: 15153 - DNA, 201 bp, Homo sapiens; identical to SEQ ID NO: 1126

SEQ ID NO: 15154 - DNA, 201 bp, Homo sapiens; identical to SEQ ID NO: 8144

SEQ ID NO: 15155 - DNA, 201 bp, Homo sapiens; identical to SEQ ID NO: 8145

SEQ ID NO: 15156 - DNA, 201 bp, Homo sapiens
tccggttcaggtggtccccaaaaagaaagagcgtaaggtggcttccgatgatgacatctctgagcaggacggggaggtgaaccggttctcggacgatgagrtcggctccatgaacatcaccgatgagatgaagcgcatgtttaaccagctgtgagtatccccgtggcccgcacactctccgtttccccggattgcttgcac

SEQ ID NO: 15157 - DNA, 201 bp, Homo sapiens; identical to SEQ ID NO: 8146

SEQ ID NO: 15158 - DNA, 201 bp, Homo sapiens
gttcagctgaaaaccctctcaggtccagctaccacttccctcaattccttcagatcttctgggctctgcttggccatctccttttcccccctctgcacccmctcccatgcctcaggatggtcttttttggttgtctccatcagctcccctggagcccctttagctccttcctctgcatttaatgcaggatttgtgccgaag

SEQ ID NO: 15159 - DNA, 201 bp, Homo sapiens; identical to SEQ ID NO: 8148

SEQ ID NO: 15160 - DNA, 201 bp, Homo sapiens
tgtgtgtgcaaacagtatccgttttctcttgtttccaaaagccggtgacgtaaccggctctccacccctccctcccctctggcctatttttagctggcccygacagcatcctaaaagggttccagactgccctgctccgaggccatgtagggagggtagcagtggggtgaggaaggagagaaactcctctgtctgtcccag

SEQ ID NO: 15161 - DNA, 201 bp, Homo sapiens
atgggcaaaggctccagtgtgtagaaagagcattcagatccaagtcaggcgagactggctgcaggagtgggcgcctctgtgttgatagagctaaattgggwtcagtatggaattcgatttagctggttgtaaagttacctaagttaaaacaaacaggccgggcgcggtggctcacgcctgtaatcccagcactttgggagg

SEQ ID NO: 15162 - DNA, 201 bp, Homo sapiens; identical to SEQ ID NO: 759

SEQ ID NO: 15163 - DNA, 201 bp, Homo sapiens
acccgtttgcctccacatcccactcactccctccccttccccgagaggtagcactacctgaccctgtggcctccccaggaaaacgtagaatcaggcacccrtggactcataggctcgtctgactgcttcatcctatggctggggagaccgaggcccagagggtgatgtgctgtgctcacggaaggaagtggcagaaatcag

SEQ ID NO: 15164 - DNA, 201 bp, Homo sapiens
atttgtgaagtggaggcctcttccgagtcccttctcttgcccgtctttctgtcctttccagcttcctgtccctcggctggggtttccttcagatcccagaygctgggaaggaagtgaagtcaggaattgagtgtgtgatgcagtgaccactggaccctggcggctccgggccacacggccctctccagcacccacccccta

SEQ ID NO: 15165 - DNA, 201 bp, Homo sapiens; identical to SEQ ID NO: 8152

SEQ ID NO: 15166 - DNA, 201 bp, Homo sapiens; identical to SEQ ID NO: 8153

SEQ ID NO: 15167 - DNA, 201 bp, Homo sapiens; identical to SEQ ID NO: 762

SEQ ID NO: 15168 - DNA, 201 bp, Homo sapiens
gaaactggggagggatgggccgggccctcctgtctgccactgttgattgtgttgtcatgcctcaggcttgtgttgtgtttgttttattgtgtgtgtgcttyttggacctggctactaaggtgatggaaaaaccgtgcccagtcttggagggagatgggttggcattgagcaacgatctattcaagttgcacccagggcgtg

SEQ ID NO: 15169 - DNA, 201 bp, Homo sapiens
cacctcccacctctgagcttcagacttctcatttatgaatgacctggacttccccgtctgatgtcctaggatcctgtgttctgtgctttttttttttttttgccccacctgcagccagtttgtgtttgcacatcctcattgaatccaggtggggtcattctcacccattttacaggtgaggagactgagccctagagaagt

SEQ ID NO: 15170 - DNA, 201 bp, Homo sapiens
tcacctcccacctctgagcttcagacttctcatttatgaatgacctggacttccccgtctgatgtcctaggatcctgtgttctgtgctttttttttttttttgccccacctgcagccagtttgtgtttgcacatcctcattgaatccaggtggggtcattctcacccattttacaggtgaggagactgagccctagagaag

SEQ ID NO: 15171 - DNA, 201 bp, Homo sapiens
gactttccatgtatgaactcacttaacccttacaaccaccttttttttttttttttttggaggcagtctcactctgtcacccaggctggagtgcagtggcragattatagctcattgcagactctacctcccaggcttacatgatcctcccacctcagcctcccaagtagctaggaccccataggcatgtgccaccatgct

SEQ ID NO: 15172 - DNA, 201 bp, Homo sapiens
tgtgtgaacatgggcaagtggcttggcctctctgagctgcccgtggagctccccgcttcgtcctctgtaaaagagggatcatcttgttgctctcccagggwttgagaaggaacaaatgaggtctggtgttaaggtacctggggcttggcagattttgggcatacctacctccaccccagcccagcccccttcccctggcaa

SEQ ID NO: 15173 - DNA, 201 bp, Homo sapiens
actcccattgacactttcgttatttctgaagctggcaccgatacggattctttatttctgattttccagtgaggcagccttcgatggtggaaaagggtttygcatcctggctctgccactgtctgtgtgaacatgggcaagtggcttggcctctctgagctgcccgtggagctccccgcttcgtcctctgtaaaagaggga

SEQ ID NO: 15174 - DNA, 201 bp, Homo sapiens; identical to SEQ ID NO: 8158

SEQ ID NO: 15175 - DNA, 201 bp, Homo sapiens; identical to SEQ ID NO: 8157

SEQ ID NO: 15176 - DNA, 201 bp, Homo sapiens
tattgagccctaacaaactcagccttaaaagcccccaggagaagataatgttgggctggagactggacattgaatggactgagaccacaatctctggctakaactggggtccagactctgcaagactggccagtgcattcctgcctagcccagattccccagctgggaaactgtcattgcttcctgtctgcagtctggccg

SEQ ID NO: 15177 - DNA, 201 bp, Homo sapiens
aacctctgcttcaaggcaaaggggttttgattccttaggttagataaacaagaacatcatcaagagacgagagaacgaagagtaaagggcagtgtccagaytgggttgggttaagcagagaaaggtttctagatgagtgagtttcagagctgggtgtttaaggtgagtccgtgttggcaggaagcaaggaactgtggttga

SEQ ID NO: 15178 - DNA, 201 bp, Homo sapiens
gtggggcaaacaatggaagtggatgtgaggcttggggaagagatgacatttgagacaagcctgggagaatggctagggtttcaggaggctgaggaggagasaggaagaggggaaatgagttacctgacctctgagcctcatctgcaacatggggatgatccccaggggagggctcagcgggattttatagagggaagtatg

SEQ ID NO: 15179 - DNA, 201 bp, Homo sapiens
accattgcactctagcctgggcaacaagagtgaaactctgtttcaaacaaacaaataaacaaacagacaacaaagcctttagagattagtgaggctaaagrtataacttttgtccacccctgtgtcatggaccccccagaattctatcctcagtcctcttgggggtccatgaacctctgcttcaaggcaaaggggttttga

SEQ ID NO: 15180 - DNA, 201 bp, Homo sapiens
agagaaacccccatctctactaagaatacaaaaaaattagccgggtgtggtggcgcatgcctgtaatcccagctacttgggaggctgaggcaggataatckcttgaaccccggaggtggaggttgtgatgagccaagatcgcaccattgcactctagcctgggcaacaagagtgaaactctgtttcaaacaaacaaataaa

SEQ ID NO: 15181 - DNA, 201 bp, Homo sapiens; identical to SEQ ID NO: 8105

SEQ ID NO: 15182 - DNA, 201 bp, Homo sapiens
ttaaataagatttagtggtcggtctaatatgactttaatttcacagttctcgtagcttagatgatatcttgagatgtttacaataactgtagtgtgttacrtaaatacctgtgatttctactagtgacaaaatcacagggacatctacttgctgcctacattcataatcaaaggatatgttaaaaaccattggctgggcac

SEQ ID NO: 15183 - DNA, 201 bp, Homo sapiens
attccagggcaactttgttggaaggacagatccttcctggaagaggttgcagggagccactccccaggtgtgacttcttaaccctttctcttccatgggamcactcaggcattgggtggagcctgtggaccccttctgagaataatttttttaaaaaggcattaggattactatgaaaagtcattttactaaaaatagata

SEQ ID NO: 15184 - DNA, 201 bp, Homo sapiens
tcaagtgcttctgctctaatagagaatatgggttagcaagtgttagaaggctgggctagaaggggtggagatgcagatgagaaatccagcaatgacaagarcgtatacttggggctgccacagggtgggcagtgctggcagagcctggaggaagcaccctccacccagacctggcaggtacttgagaaggttccgagaaga

SEQ ID NO: 15185 - DNA, 201 bp, Homo sapiens
cgttctgcaaatataacatttcctaagcagccatgatccactttacaggaatttctccagtaactaacagctcattcatttgttcacctgaactcatcttygttgagcacctattatgtgccaggtaccatgccaggatatgggttccagggtgaatctgatcaagtgcttctgctctaatagagaatatgggttagcaag

SEQ ID NO: 15186 - DNA, 201 bp, Homo sapiens
agccgagatcatacctctgcactccagcctgggtgacagagcgagactccgtctcaagaataaataaataaataaataaataaataaataaataaataaawaaaataaactgtcccgtttgttctatttccccagcaagaggaaaacttgggcaacttgatccatgagaccgaatccttcttcaagacgagagacaaggag

SEQ ID NO: 15187 - DNA, 201 bp, Homo sapiens; identical to SEQ ID NO: 763

SEQ ID NO: 15188 - DNA, 201 bp, Homo sapiens
cagtctcctgcccctccagggcttggttcaccagcccacactgtacccattgtcccgcttcctgccccttcctctgggtgccagaactgggcatcatcccyacggttggggaaccctggccaggttatggggagaagtgggggagctggcctgagctctggtagaggggcctcagagttcagaagaggagctgttggcctt

SEQ ID NO: 15189 - DNA, 201 bp, Homo sapiens
gcttgaacccgcaaggtggaggttgcagtgagccaagatcttgccactgcactccagcctaggcgacagaatgagactccatctcaaaaaaaaaaaaaaaagaaataatataaaataaaacatcaggacttatctgacttggagactgatggcctgaactcagcaagctactgctggcagagccagaattaacctgatgcc

SEQ ID NO: 15190 - DNA, 201 bp, Homo sapiens; identical to SEQ ID NO: 8120

SEQ ID NO: 15191 - DNA, 201 bp, Homo sapiens; identical to SEQ ID NO: 8123

SEQ ID NO: 15192 - DNA, 201 bp, Homo sapiens; identical to SEQ ID NO: 8122

SEQ ID NO: 15193 - DNA, 201 bp, Homo sapiens
aggagtgggcgcctctgtgttgatagagctaaattgggttcagtatggaattcgatttagctggttgtaaagttacctaagttaaaacaaacaggccgggygcggtggctcacgcctgtaatcccagcactttgggaggccgaggcaggcggatcacgaggtcaggagatcgagaccatcctggctaacacagtgaaacgc

SEQ ID NO: 15194 - DNA, 201 bp, Homo sapiens
agggttttaccacgttggccaggctggtctcgaactcctgacctccagtgatctgcctacctctgcctcccaaagtgctgggattactggcatgagctacmattcctagcctgtgggccgttcttgagcagaccttaaccagacccacctgcactagtttcccttggtgggctggctgtgttgaccgcacggcttgcagaa

SEQ ID NO: 15195 - DNA, 201 bp, Homo sapiens; identical to SEQ ID NO: 8127

SEQ ID NO: 15196 - DNA, 201 bp, Homo sapiens
agaggtaaagtcgctttagcagatcaccagctgcggagcggctgagttggacgcccatcccagctctgcctgacgtcaaagtgttttgggataagggacagggggtggctgcaagtggcctcccactttgccccaagccggcttcttctcgccatgctggcctggaccatctcctttttggctttttgctgagtccgggct

SEQ ID NO: 15197 - DNA, 201 bp, Homo sapiens
gaagggagaggtgaggtggaggggctgggttgtgtggtcttcagagcctggccactcagtgccatctgtagcccagcatcactggggagctgtctgccccmgccctcgcctgcggaaccagcttctgcatgttaataagatgcccaggtgattggtatgcacattctaggctgagacacgctgctttagagactggactag

SEQ ID NO: 15198 - DNA, 201 bp, Homo sapiens
gagaggtaaagtcgctttagcagatcaccagctgcggagcggctgagttggacgcccatcccagctctgcctgacgtcaaagtgttttgggataagggacagggggtggctgcaagtggcctcccactttgccccaagccggcttcttctcgccatgctggcctggaccatctcctttttggctttttgctgagtccgggc

SEQ ID NO: 15199 - DNA, 201 bp, Homo sapiens
tcactggggagctgtctgccccagccctcgcctgcggaaccagcttctgcatgttaataagatgcccaggtgattggtatgcacattctaggctgagacaygctgctttagagactggactagctttgagtcccagctccctgcttgctagctctgtgaccttagacaagttactttacctctttgaacctcagctccctc

SEQ ID NO: 15200 - DNA, 201 bp, Homo sapiens
attggtaatatcatccagtcccagggaactgctcccaccccttcctgcagttaagggcgggggtccactgaaccctcctttgccttctcccctcccgcccrcgtttcctattcagcttcgggcagtactcgtgtcaaagtagtggtgtggaagcccttggaacaacagggcttggcacatagtaaacgctaaatcagtggg

SEQ ID NO: 15201 - DNA, 201 bp, Homo sapiens
gagcaggacggggaggtgaaccggttctcggacgatgaggtcggctccatgaacatcaccgatgagatgaagcgcatgtttaaccagctgtgagtatcccsgtggcccgcacactctccgtttccccggattgcttgcacaggggcggtgaatgggaggcttgggctgagagtagcctgcagcactggaagaatttgaatt

SEQ ID NO: 15202 - DNA, 201 bp, Homo sapiens
ctggccccaggtcagatagtcctatagtcttatttccagatgaagaactgagtacagaaaaggaaaaattaaaactattgaaatttaaaaagagatcattwataaagaggaacaaactactgatacatgctaccacatggatgagcctcaaagacattgtgctcaatgaaagtggccagacacaagagatcacatattgta

SEQ ID NO: 15203 - DNA, 201 bp, Homo sapiens
ccagatctcggctcactgcaacctctgcctcccgggttccagtgtttctcctgcctcagcctcccaagtagctggaatcacaggcatgcaccatgatgccyggctaatttttgcatgtttagtagaggcagggttttaccacgttggccaggctggtctcgaactcctgacctccagtgatctgcctacctctgcctccca

SEQ ID NO: 15204 - DNA, 201 bp, Homo sapiens
ctcgaactcctgggctcaagcgatcctcccacttcggcctcccaaagtcctgggattataggtgtgagccactgcaccaggtcagatattcttttttttakaccaggtctcactctcacccaggctggcctggagtgtagtggtgcaatcttggcctctgggggttcaagtgattcttgtgcctcagcctcctgagtagct

SEQ ID NO: 15205 - DNA, 201 bp, Homo sapiens
caggctgcctcccacgctagtacgctgtcagtaggaaacactgcttggggtggtggcagggtctgggctgggtatgatcagtggtgggcgagcctgctggygccagctcttagaagctgctatacccactccaggctcagtgatgtcatattagtaccttaaaatttgccattgcaggaaatcagcaaatgctaccaatca

SEQ ID NO: 15206 - DNA, 201 bp, Homo sapiens
gctctccacccctccctcccctctggcctatttttagctggccctgacagcatcctaaaagggttccagactgccctgctccgaggccatgtagggagggwagcagtggggtgaggaaggagagaaactcctctgtctgtcccaggatggacagacatccgaggagggaaagaacctgcccccagcttcctccagggaggg

SEQ ID NO: 15207 - DNA, 201 bp, Homo sapiens
ctcacagccactccctatcctctgtaccatcatgttttactgttctctttaattccaccatgaagagacttgataggaatgttctggaaactgcagcctargggtggggacgggggatgcgaggagtggggagcagtttattctccctggcagcaggactgaactttggtgccagagggccactgggtgtgagactgtggg

SEQ ID NO: 15208 - DNA, 201 bp, Homo sapiens
tacccactccaggctcagtgatgtcatattagtaccttaaaatttgccattgcaggaaatcagcaaatgctaccaatcagagctctgggaggctctgccayctcccggaagccccccagagagggcatgctccttctagcagatgcctttgacatcatttgtttcaaaagcccagggcacgggctctcctaacctccctgc

SEQ ID NO: 15209 - DNA, 201 bp, Homo sapiens
gaaggcaaacccacccagaataattgttgagccaacaagcagcttaagccgctcataagccctgaggtgcctgtgaaggctgaggcccagcaatgagctgycactgccaaaaccagtaagagtcactgtttttgccaagctttttttttttttttttttcttagctgttgtcattgttttttgggaggagagatgggacat

SEQ ID NO: 15210 - DNA, 201 bp, Homo sapiens
tctggcctatttttagctggccctgacagcatcctaaaagggttccagactgccctgctccgaggccatgtagggagggtagcagtggggtgaggaaggaragaaactcctctgtctgtcccaggatggacagacatccgaggagggaaagaacctgcccccagcttcctccagggagggaggaactctgttggaggagct

SEQ ID NO: 15211 - DNA, 201 bp, Homo sapiens
aggctcagtgatgtcatattagtaccttaaaatttgccattgcaggaaatcagcaaatgctaccaatcagagctctgggaggctctgccacctcccggaasccccccagagagggcatgctccttctagcagatgcctttgacatcatttgtttcaaaagcccagggcacgggctctcctaacctccctgcagagctctga

SEQ ID NO: 15212 - DNA, 201 bp, Homo sapiens
gtgctaggtgcagtgatgacttctttaaatatgtgataattatgggagcagtcccaagcagtgggaagtgattatgctcattttacaaatgagaggttcaragaggtgaagacttctgtcccagatctcgccacgagtccgtctgggtctctggaccccaaggtcagtgctcctcccaggaggtggccttgtcccatgccc

SEQ ID NO: 15213 - DNA, 201 bp, Homo sapiens
cacttgagcctgctctcctgatccatccatgagccctacaaggtgggattgctatccccgttttacagaagtggagactgaggctcctagcttgaggtagrcaggccctcaggggatcacacagaggcagatgactttctcagctcacctgcccttccttctgcagaattgcctacaacctttgactctctaaggcctgcg

SEQ ID NO: 15214 - DNA, 201 bp, Homo sapiens
aggatccaggaaggagttgagggagggcaggcaatggggagagccctgggatggcagcctggagacagggtccacattgtcctgtgctaccgatgcactgrgtcaagtgatttcactcctacagactcagccttccccttggaaataggggtatgttggatgagctgatctttaggtctcctccagttggggtaaccaagg

SEQ ID NO: 15215 - DNA, 201 bp, Homo sapiens
cagggggcggagcctgcagtgagccgagatcgcaccactgcactccagcctgggcgacagcgagactccgtctcaaacaaacaaacaaacaaacaaaaaaacaacaacaacaacaaacaacgaaacctctgatcactttgatcaccccccacccccattctgcagttctgtgtgggccgccctgaccccaccccaggcggg

SEQ ID NO: 15216 - DNA, 201 bp, Homo sapiens; identical to SEQ ID NO: 8150

SEQ ID NO: 15217 - DNA, 201 bp, Homo sapiens
ttttttttttttttttttgagatggagccttgttctgttgcccaggctggagtgtggtggtgcgatctcagctcactgcagcttccacctcctgggttcargcaattctcctgcctcagtctccgaagtagctgagactacaggcacacaccaccacacccagctaatttttttttgtatttttttagtagagactgggtt

SEQ ID NO: 15218 - DNA, 201 bp, Homo sapiens
tgccccctcttagctttctctgtgccctccagccctggaaggaatcccagccccttgccctccaggtccgggcccgggagcccacgcagatctcagcctarcagctaatgctggggctgggaaaggctggagaaaagggggagagggagagagtgtgtgtcctccaggagccctggctgggctgtctcctgtgggagagag

SEQ ID NO: 15219 - DNA, 201 bp, Homo sapiens
gccccatgggcaaaggctccagtgtgtagaaagagcattcagatccaagtcaggcgagactggctgcaggagtgggcgcctctgtgttgatagagctaaaktgggttcagtatggaattcgatttagctggttgtaaagttacctaagttaaaacaaacaggccgggcgcggtggctcacgcctgtaatcccagcactttg

SEQ ID NO: 15220 - DNA, 201 bp, Homo sapiens
gacatcatttgtttcaaaagcccagggcacgggctctcctaacctccctgcagagctctgaggctggctcagaattccatagtccagagctcactctgccyagccacttcattgtacaaatgagagaatggactcagaggggcacacagagccaggcccccaactcttggtccagtgctttgtcccccacgccatgcctgg

SEQ ID NO: 15221 - DNA, 201 bp, Homo sapiens
gaatggactcagaggggcacacagagccaggcccccaactcttggtccagtgctttgtcccccacgccatgcctggaagagaattctctcttctgtccctmttctaggctgacttttaaggtagacaggaggcagaggcagggttggaactgggtggggacaggaactcttttgcctgatacttcctggacctgccattcc

SEQ ID NO: 15222 - DNA, 201 bp, Homo sapiens
taagttaaaacaaacaggccgggcgcggtggctcacgcctgtaatcccagcactttgggaggccgaggcaggcggatcacgaggtcaggagatcgagaccrtcctggctaacacagtgaaacgctgtctctactaaaaatacaaaaaattagccgggcgtggtggcgggcgcctgtagtcccagctacgcaggaggctgag

SEQ ID NO: 15223 - DNA, 201 bp, Homo sapiens
aacctctgatcactttgatcaccccccacccccattctgcagttctgtgtgggccgccctgaccccaccccaggcggggccctgggcctttcccatggacrtctccaccagctgtgggcaggaccctagccaggctgcccctggccagatctgatgaagtgtttgaataatgcagccgtgttacagttgtgttttgttttg

SEQ ID NO: 15224 - DNA, 201 bp, Homo sapiens
gagtcaagtgatttcactcctacagactcagccttccccttggaaataggggtatgttggatgagctgatctttaggtctcctccagttggggtaaccaakgcatcttgggaaccccttagtcccaggcaaacctgcctggttggtcaacctacttctagttctagccaatagggaggtcttgacatctcccaggctttga

SEQ ID NO: 15225 - DNA, 201 bp, Homo sapiens
ggttttgccatgttgcccaggttggtcatgaactcctggactcaaaagatccacccgcctctgccttccaaagtgctgggattacaggtgtgagccactgygcccagccacaactttcctattcttgatcacattttatctgtactataacctagaaaggtgaaacacagtgtattatccccatttatagctagggatcca

SEQ ID NO: 15226 - DNA, 201 bp, Homo sapiens
gccacttttagtaatttttttctctttttcattacctccctcccaccctgtcttcttactcattctctgtgttgatatatccatttgaatgggataagacmtgaagaaggaaaaattattttaggtgaatatttgcattgtgtaagaaattattctaggaaagaaactgaaaaaatattctgctctcaataatatacaaca

SEQ ID NO: 15227 - DNA, 201 bp, Homo sapiens
ctcaaatctggaaaggatattgaggatattgacatcctgtatccaaaaagtttattcctgaataagtgcgtctgactactttataatgatttccaaggacygaaagtttatgagctctcttagtgacctcttccagtgtctgatcaccccgtcagttcaagtacagaatggtatttttaaattttaattagcttactctct

SEQ ID NO: 15228 - DNA, 201 bp, Homo sapiens
cctcttaatggcccttcaaatgtataaagctttctcattcagggaagaaagacataaagatgtagcccaggcgcgatgactcaggtctgtaatcccaacaytttgggaggccgaggcagctggacctcttgagcccaggagttcaagaccagcctaggcaacatggcaaaaccccatctctactaaaaatacaaaaattag

SEQ ID NO: 15229 - DNA, 201 bp, Homo sapiens
aaaaatacaaaaattagccaggcacatgcctagggtcccagctactccaactgaggtgagaggattgcttgagccagggatgtcaaggctgcagtgagccrcattcatgccattgcactccagcctgcaagaccctatgtcaaaaaaaaaaaaaaaaaaaaaaaaagcaagagcagaagtagaacaggctgctgttccttt

SEQ ID NO: 15230 - DNA, 201 bp, Homo sapiens
agtggcatgatcttggctcactgagacctccgctcccaggttcaagcaattttcctgcctcagcctcccaagtagctgggattgcaggcatgtgccaccaygcccagctaattttgtatttttagtagagatggggtttctccatcttggtcaagctggtctcgaattcctaacctcaggtgatccacctgcctcagcttc

SEQ ID NO: 15231 - DNA, 201 bp, Homo sapiens
atatgtgagccatcgtacctgactgtggatacagtcttaaaacctattctcagatagtcattaaattgttactgtttttattaaaatctcattttccccamtctgaaaatagctttgttgtttttttctgactgtataacatatatatatatgtatatatatatatgtgtgtgtatatatatatatatatataaagcctgt

SEQ ID NO: 15232 - DNA, 201 bp, Homo sapiens
cccaggagttcaagaccagcctaggcaacatggcaaaaccccatctctactaaaaatacaaaaattagcctggcgtggtggcgggcgccgtatgggcaccrtggttgtcccagctactcaggaggctgaagtgggaggatcacctgagcccgggaggtcggggctgcagtaagccgtgttcgcaccatggcactctagcct

SEQ ID NO: 15233 - DNA, 201 bp, Homo sapiens
aaaaagaaaaaagaaataaaggtataaaagaaaaaaaagaaaagtaaacagcttcttccaggggatgaagtaggtttatttcggtgagattgctgctcagracttaggagagccatcaaaggcagaagaccgctcctggggcccggtcacctgaacactacaagtcccagcaagcgccgcgcgggggcggggcttgctgac

SEQ ID NO: 15234 - DNA, 201 bp, Homo sapiens
ttgtgggggggggcaggtgcacacacagtttgcaaaacaaagggaaagatttggtatttggaagctttgttaagaactgtaggccgggtgctgtggctcaygcctgtaatcccagcactttgggaggccgaggcgggtggatcacgaggtcaggagttcaagaccagcctggtgaaacctcatctctactaaaaatacaaa

SEQ ID NO: 15235 - DNA, 201 bp, Homo sapiens
cgctcctggggcccggtcacctgaacactacaagtcccagcaagcgccgcgcgggggcggggcttgctgaccgttgtgacgtgtgggcggggcaggcgggwcgggctctcccttgggtgcttagccccgcccccgtcccactctgccctgttgctgtcgcgccgctgctggttgctgtccctggtgagtgcctcaagtgga

SEQ ID NO: 15236 - DNA, 201 bp, Homo sapiens
aggcaggaaaatggcgtgaacccaggaggtggagcttgcagtgagccaagatcgtgccactgcactccagcctgggctgacagagcaagactacatcaatwgaatagaatagaatagaatagaatagaatagaatagaatagaatagaatagaatagaatagaatagaaaatagaatagaatagaatagaatagaatttta

SEQ ID NO: 15237 - DNA, 201 bp, Homo sapiens
gtctttgcttttgctacctgtttcagggccatctacacacacccatagtatccactgctggtattctttaaggctggttatgtgtaagcatttctgccatrgccagggagaaacgggattcaaatcaattcatccatttttgctaattgctaatcgtttagaaagaaaagtaagcagaaggccgggcacagtggctcacgc

SEQ ID NO: 15238 - DNA, 201 bp, Homo sapiens
ttcctaaagtcatagggcttgttgggatgaaaaatctagaatttaacagttcccagctcaggctattttatctaggctgccttgcttatttaagtcatttrgagaaaggggaactaaagtagctataagcctctgttcatgtgagggttgtggtgcctgtggtgaagaagttaaagatattgtcagaaaattctcgtagca

SEQ ID NO: 15239 - DNA, 201 bp, Homo sapiens
cttcctcatatgtagcaaagcgtataggtcacattgcctggtaagagttttctgcaatggagctgtagcttcactgtctagtacagctgctactagccacrtgtggctgttaagcacttgaaatgtggttagtgtgactaagtaactggatttaatttaatttaatttatttatttagagacagagtttcgttctgttgcc

SEQ ID NO: 15240 - DNA, 201 bp, Homo sapiens
ccttgaacccaggaggcggaggttgcagtgagccaagatcatgccattgcactccagcctgggcaacagagcgagactccatctcaaaaaaaaaaaaaaaagaaaagaaaagaaagaaaaattctcacagtgcagtagccccctgaggtgggtagtagtatctcttgggcataagtaagtaacatgaatatccctgagaga

SEQ ID NO: 15241 - DNA, 201 bp, Homo sapiens
tccacaaatactcatttctagactactttgtcagaaaggtaatttcccaagccattgttggagcccatttctcccaggaattttatcactgggaggaaggraagactaaagattactgacctgaaaactcagtagatgccctccctccaggaaaagctggaatacttcctcactgaccaagttcgggttggcatggttatg

SEQ ID NO: 15242 - DNA, 201 bp, Homo sapiens
tgcagtgaatgggaatcagccagtccctcaccatcctaacctatgggaattttctgctagagggacttggaatatagtttatggaatgttcttttgtaggragaggtggaagagattgagcagcacaacaaggagctttgcaaagaaaaccaggagctgaaggacagctgtatcagcctccagaagcagaactcagacatg

SEQ ID NO: 15243 - DNA, 201 bp, Homo sapiens
ctactttgtcagaaaggtaatttcccaagccattgttggagcccatttctcccaggaattttatcactgggaggaagggaagactaaagattactgacctkaaaactcagtagatgccctccctccaggaaaagctggaatacttcctcactgaccaagttcgggttggcatggttatgttctagtttactcatggccctt

SEQ ID NO: 15244 - DNA, 201 bp, Homo sapiens
tcacaatgttggccagattggtctcgaactcctgacctcaggtgatccacctgcctcagcctcccaaagtgttgagattacaggtgtaagccacagtgccyggccttttttctttgctttgctttgcttttttttttttttttttttttttagacggagtttcactcttcttgcccaggctagagtgcagtggcatgatct

SEQ ID NO: 15245 - DNA, 201 bp, Homo sapiens
gtgtattatccccatttatagctagggatccaaacttgtttgctgtcttccaaatgtgggttgcatttttctgtttctttgttgttactcatgctgtttcsttcacctagaatgccctcactcaaaaactcacttgtcgaaatcctaatcctctttgagggctaatctaagattcttctcattccttgaagttttctttat

SEQ ID NO: 15246 - DNA, 201 bp, Homo sapiens
agctgggattgcaggcatgtgccaccacgcccagctaattttgtatttttagtagagatggggtttctccatcttggtcaagctggtctcgaattcctaamctcaggtgatccacctgcctcagcttcccaaagtgctgggattacaggtgtgagccaccatgcctggctttttttgcttgtttgttttaatagagacagt

SEQ ID NO: 15247 - DNA, 201 bp, Homo sapiens
tttttattaaaatctcattttccccactctgaaaatagctttgttgtttttttctgactgtataacatatatatatatgtatatatatatatgtgtgtgtrtatatatatatatatataaagcctgtgtgtgtgtgtgtgtgtgtgtgaaatgaaaatacaattttcatttgtaattttattttgaaataatgaaaataca

SEQ ID NO: 15248 - DNA, 201 bp, Homo sapiens
ctccgctcccaggttcaagcaattttcctgcctcagcctcccaagtagctgggattgcaggcatgtgccaccacgcccagctaattttgtatttttagtaragatggggtttctccatcttggtcaagctggtctcgaattcctaacctcaggtgatccacctgcctcagcttcccaaagtgctgggattacaggtgtgag

SEQ ID NO: 15249 - DNA, 201 bp, Homo sapiens
gtattcctttccaattccgtccagaaaatgaggaagacatcctggttgttaccactcaggtttgtaaaacttctcacctcaatcccttactgccattacgrgtagcaatataggataggatggaatttgagttaataaggctttattgaatatctaacgggtatcattggaaaaaatgtatgtagtactcacacagactca

SEQ ID NO: 15250 - DNA, 201 bp, Homo sapiens
cagagcaagactctgtctcaaaaaaaaaaaaaaaaaaaaaaaaaaaagaactgtagtaaagccctcttaagatgataagggaattttgcttattttctttytcctaagaacttgaaatgctgtctgtgccacttttagtaatttttttctctttttcattacctccctcccaccctgtcttcttactcattctctgtgttg

SEQ ID NO: 15251 - DNA, 201 bp, Homo sapiens
aggaaggtcacttgaagccaggagtttgaaaccagcctgggcaacaaagcaagagcctttcatctctacaaaaaatttaaaaatcagccaggcacggtgtygtgtgcctgtagtcccagctactaaggaggctgaggtgggagggttgcttgagcccatgagttcaaggctgcagtaagctatgatctcaccccgcactcc

SEQ ID NO: 15252 - DNA, 201 bp, Homo sapiens
gagcccacattcctgtgcagcagcaatagctagagctgagtagctgctgtccctatagattctccatctagctgcagtctgcactgttttattgcattcarttccttcgtttgattacatttcttgcctgctctctataggcacattccagtttgtgacctctgatgtagcaaataaattactgttttaaatgatctatag

SEQ ID NO: 15253 - DNA, 201 bp, Homo sapiens
catgcctgtaatcccagcactttgggaggctgaggtgggtggatcacctgaggtcaggagttcaagaccagcctggccaacatggtgaaaccccctctgtwctaaaaatacaaaaaattagctgggcatggtggcgtgcacctgtagtcccagttactcaggaggctgaagcaggagaattgcttgaaccccagaggcgga

SEQ ID NO: 15254 - DNA, 201 bp, Homo sapiens
tactctgctgaattcctttgagcaacagatagtaaattagagaatgaagagttggctgtaaagtttcgtcctttgcagctcacctcaaatgctctccccartgttctttcagtgtagtcttaatcagactattcaactcctcatcaccccagacactggtagtatctggcaccaggtaggtactcagtaactctttttatt

SEQ ID NO: 15255 - DNA, 201 bp, Homo sapiens
agctccttgtatccttggacaaatgccttcctgtgttccctcttccttcatgtaacttgagccgagatgcctattctcacactgtaggaaggaatcacacyaacccaaacctaagtgcttcaggcttcgctgagtgagacgtttattcaaaacaaagattattgttttcatggttaggtgggattcaacaaggtttcattt

SEQ ID NO: 15256 - DNA, 201 bp, Homo sapiens; identical to SEQ ID NO: 1143

SEQ ID NO: 15257 - DNA, 201 bp, Homo sapiens
tgaaggacagctgtatcagcctccagaagcagaactcagacatgcaggctgagctccaaaagaagcaggtatggctgctggttataggtgaccttggagcrtggagatcagaattggatggtgcctcttatccagcaccatattctgttttgcctgtgatctcaccttcttataccagtatctttgaacaggcattagttt

SEQ ID NO: 15258 - DNA, 201 bp, Homo sapiens
aattaatatattagcaattatcatcattatcaattatgtaggaatgaaaggctaattgactaataatttcctgtaatatattgttgaaaaagagtccccakggcgttgacaggtgcctggaagccccgtttacttagttgatccaaggacatgagtaatcctgatgtctgagggatatccagtcatctgattataattcac

SEQ ID NO: 15259 - DNA, 201 bp, Homo sapiens
tcattttgataactccagaagtcagctggatcagtttgttttgggcccaaggctgagccagcctgttgtggaagggagatgaaagcacagttcatccatcagcattttgcttaggatctatacctttgaattatttggtagcataagtagggaggagatctgaaccaggcagctagccaaacaagttctgtccaatgcccc

SEQ ID NO: 15260 - DNA, 201 bp, Homo sapiens
taattgactaataatttcctgtaatatattgttgaaaaagagtccccatggcgttgacaggtgcctggaagccccgtttacttagttgatccaaggacatragtaatcctgatgtctgagggatatccagtcatctgattataattcacatcatatatgcatcatccagtcaaccattgagtacctactgtatctaagata

SEQ ID NO: 15261 - DNA, 201 bp, Homo sapiens
tttccccactctgaaaatagctttgttgtttttttctgactgtataacatatatatatatgtatatatatatatgtgtgtgtatatatatatatatatataaagcctgtgtgtgtgtgtgtgtgtgtgtgaaatgaaaatacaattttcatttgtaattttattttgaaataatgaaaatacaatttcaggctgggtgtcg

SEQ ID NO: 15262 - DNA, 201 bp, Homo sapiens
ctaagtctgtttctgggtggggagtcacaggaccagttaagagtcctgggttctggtggagccatctgattgtcagaaatgccaaagtctgaaaggatctrtcaagaggccaatcttaggttctacaatagtgatgttatttatgggagtaattgggaaagttgtaaatcttgtgacctccagaataatggctggtaatca

SEQ ID NO: 15263 - DNA, 201 bp, Homo sapiens
ggtcagaccacagaaatgttttagaaagtagttaccaacatttaaaaataggaatatttcccataaaaatttgtatttccaacttcctttgggaaatgaarggacctagcaacattgagcccacattcctgtgcagcagcaatagctagagctgagtagctgctgtccctatagattctccatctagctgcagtctgcact

SEQ ID NO: 15264 - DNA, 201 bp, Homo sapiens
ttttccccactctgaaaatagctttgttgtttttttctgactgtataacatatatatatatgtatatatatatatgtgtgtgtatatatatatatatatataaagcctgtgtgtgtgtgtgtgtgtgtgtgaaatgaaaatacaattttcatttgtaattttattttgaaataatgaaaatacaatttcaggctgggtgtc

SEQ ID NO: 15265 - DNA, 201 bp, Homo sapiens
gatcgcaccactacactccagcctgggcgacagagcaagactctgtctcaaaaaaaaaaaaaaaaaaaaaaaaaaaagaactgtagtaaagccctcttaaratgataagggaattttgcttattttctttttcctaagaacttgaaatgctgtctgtgccacttttagtaatttttttctctttttcattacctccctccc

SEQ ID NO: 15266 - DNA, 201 bp, Homo sapiens
attttccccactctgaaaatagctttgttgtttttttctgactgtataacatatatatatatgtatatatatatatgtgtgtgtatatatatatatatatataaagcctgtgtgtgtgtgtgtgtgtgtgtgaaatgaaaatacaattttcatttgtaattttattttgaaataatgaaaatacaatttcaggctgggtgt

SEQ ID NO: 15267 - DNA, 201 bp, Homo sapiens
agactctgtctcaaaaaaaaaaaaaaaaaaaaaaaaaaaagaactgtagtaaagccctcttaagatgataagggaattttgcttattttctttttcctaaraacttgaaatgctgtctgtgccacttttagtaatttttttctctttttcattacctccctcccaccctgtcttcttactcattctctgtgttgatatatc

SEQ ID NO: 15268 - DNA, 201 bp, Homo sapiens
tttcagcaatattaggccatttcaattctggggttagacgaagcctggtaagcatcttcaaatgtgcattctcttcattcattcactatttcttgagtgcmtaaccatgtgccagtcattatgctaggcactgaggatacagtggaagacaggatggccacatctgtgccacatatagcttacatttgtactgacctcttt

SEQ ID NO: 15269 - DNA, 201 bp, Homo sapiens
tcctctcacctcagtgcaacctccgcctcctgggctcacctgatcctctcacctcagcctaccaagtagcagagactaaggcgccagccaccacacccagmtaatttttgtattttatgtagagatggggttttgccatgttgcccaggccggtttcgaactcctgagcttaagcagtccacccacctcagcctcccaaag

SEQ ID NO: 15270 - DNA, 201 bp, Homo sapiens
caaggcgggcggatcacttgtggtcaggagttcgagaccagcccggccaacatggtgaaacccgtctctactaaaaatacagaaattagctaggcgtggtrgtgggtgcctgtaatcccagctacttgggaggctgaggcacaagaatcacttgaacctgggagacggaggttgcagtgagccgagatggtgccactgcac

SEQ ID NO: 15271 - DNA, 201 bp, Homo sapiens
tagaagatatacacatacaaagctgaggaagctaattaaggttttgaaatggtagcaagagaggcaagttatgccgcccaggaactagcagttacagcagycaccctgatggctaaccaaggatgacagaaacgtgctccacagagactcctcgatggtaggacaggaaatgggggtgaaaaggacttggggtaacatgtc

SEQ ID NO: 15272 - DNA, 201 bp, Homo sapiens
tggctaacgtggtgaaaccctgtctctactaaaaatacaaaaattagctgggcatagtagtggacttggctcactgcaacctccgtctcctgggctcaacygatcctctcacctcagtgcaacctccgcctcctgggctcacctgatcctctcacctcagcctaccaagtagcagagactaaggcgccagccaccacaccc

SEQ ID NO: 15273 - DNA, 201 bp, Homo sapiens
gcctaaagcaggaagcagtctgctttccttccctcagtgtataatcctatgcttcatactctccttgacttaggcatttaaatgtttccaagacaaattgraacaagaactactcaaatggaggagccaaggacagaaattgcaggtggctagaagttgtttccctgttccaaggcagcaataattcttaggccttcccaa

SEQ ID NO: 15274 - DNA, 201 bp, Homo sapiens
ggaaatatctgccagaacacagttggagaagctagggatggtattttctcattgaatgagatcttttttattcttttcaggtatccaagaaagttcttccsccagcccggtaagtatttgattcatgagaatattcccacaaagcacttgaaaatttcccttcctgctccagttcatgggagaaccatagggagacaggtt

SEQ ID NO: 15275 - DNA, 201 bp, Homo sapiens
gaagttgtgactgagatggctcgaagtgaaacagaaagcaagttgtgtaatctcagtatttgtcaggattttgcttttcctgacttgctttgcacagaatrttccctggatgaaagcccagaaatcaccaacatttcagacaatgctttctgagccttactctgttccacatttcataacaggacccctaccatggaggag

SEQ ID NO: 15276 - DNA, 201 bp, Homo sapiens; identical to SEQ ID NO: 1140

SEQ ID NO: 15277 - DNA, 201 bp, Homo sapiens; identical to SEQ ID NO: 1139

SEQ ID NO: 15278 - DNA, 201 bp, Homo sapiens; identical to SEQ ID NO: 1142

SEQ ID NO: 15279 - DNA, 201 bp, Homo sapiens
acttcttattcgattcatttggcagtcatttgtatactcctctatcctctctattggattgggaccctttttaaggttgtaccaggaaaaaaaaacccacractacaacagtaataactatataactaactataactaacgtctcttaaaccctttatgcagactctgtgctaagtactttgtcattcaacatgcatcaac

SEQ ID NO: 15280 - DNA, 201 bp, Homo sapiens; identical to SEQ ID NO: 1144

SEQ ID NO: 15281 - DNA, 201 bp, Homo sapiens
attataggataaatgggattgaatatagaagatgaaatccagagagatggactttcctaaagtcatagggcttgttgggatgaaaaatctagaatttaacrgttcccagctcaggctattttatctaggctgccttgcttatttaagtcatttagagaaaggggaactaaagtagctataagcctctgttcatgtgagggt

SEQ ID NO: 15282 - DNA, 201 bp, Homo sapiens
gagctctttcgtgttgtctatatatgtgctgtcctttcttaagcgttctgcttatgagctaacttagattggttgtttttcttttcttttcttttcttttytttttttttgagacagagttttttgctcttgttgcccaggctggagtgcaatggcataatctcggctcactgcaacctccgcctcctgggttcaagcgat

SEQ ID NO: 15283 - DNA, 201 bp, Homo sapiens; identical to SEQ ID NO: 1146

SEQ ID NO: 15284 - DNA, 201 bp, Homo sapiens
ctattgaatttaggtgctgaaaatatcaacaaaataacctgttgataaaacaaagtctagtttatccttactgcagtgagaagagcactactttgacagarttgtggaggctcaaagtagggagcacatagtggtatatactgagtctttgaaatttggtttaagtgtaggctctttcaatgcgggttgggggttgattag

SEQ ID NO: 15285 - DNA, 201 bp, Homo sapiens
aacatgagctctttcgtgttgtctatatatgtgctgtcctttcttaagcgttctgcttatgagctaacttagattggttgtttttcttttcttttcttttyttttctttttttttgagacagagttttttgctcttgttgcccaggctggagtgcaatggcataatctcggctcactgcaacctccgcctcctgggttcaa

SEQ ID NO: 15286 - DNA, 201 bp, Homo sapiens; identical to SEQ ID NO: 1147

SEQ ID NO: 15287 - DNA, 201 bp, Homo sapiens
tattaggccgggggcatcagcaagactcctgtctcaagagctgagctccccgagtgagcaattcctgtcccttttaagggctaacaactctaagggggtaygcgtgagagggtcgtgatcaattgagcaagcagggggtacatgactgggggctgcatgtgtcggtaattagatcgtcacaaaacaggatagggattttca

SEQ ID NO: 15288 - DNA, 201 bp, Homo sapiens
ttgcttagacttcaaagtaaaaccagtaaatagataggatggggctagaataagtattatggttgtttgggaggtcttgtttttttggttattgtacttayttatttttaaaaattatatgtgtgccagccgggcgcggtggcttacattgaagcaggaagagccacagacaaaactcctcagacaccgagttaacgaagg

SEQ ID NO: 15289 - DNA, 201 bp, Homo sapiens
ccataaaattcctgcttcctgtaccaccgcaggctgcagtggctctgagatgcttacagcaatggggtgtgtattaatgagactctaaaacatgccctagratgttctgatgagtttttggtatagacttttcaaccctgctttgattccttaatatataaaaatggaatttatttttagttctcttcttactgagctcag

SEQ ID NO: 15290 - DNA, 201 bp, Homo sapiens
cctaggaacaagaaagcggcactaactgtggaggagcagttagcacaagaggtggaacgccttaaggcaaaggtagaggccaggaaagcctatttcttagrgaagtacaaagagtgtcaatgacttcacaaacagatcagccaactcggggcggctgcactggtaggtgacagagataagggggcccaggaaagcaagagg

SEQ ID NO: 15291 - DNA, 201 bp, Homo sapiens
acaactttttcctttttctctgctgccaaaccaggagcagaagtggtggtctgtaccagtgctggacccatggtaggcccctaataaatgctgtgcattcmttcattcattcattcattcattcattggttcattcattcatccaaccaacatttattattgattgaagatgatatggcaaaaaataaagtggttgtactt

SEQ ID NO: 15292 - DNA, 201 bp, Homo sapiens
ggttgaggctgcagtgagccatggctgtgccactgtactccagcctgggtgacagagtgagaccctgccccccccgcaaaaaaaataattctctttacatrtcttccctcccctgtccacaaatactcatttctagactactttgtcagaaaggtaatttcccaagccattgttggagcccatttctcccaggaattttat

SEQ ID NO: 15293 - DNA, 201 bp, Homo sapiens
gctacttgggaggttgaggtggagggtcacttgagcctgggaggttgaggctgcagtgagccatggctgtgccactgtactccagcctgggtgacagagtragaccctgccccccccgcaaaaaaaataattctctttacatatcttccctcccctgtccacaaatactcatttctagactactttgtcagaaaggtaatt

SEQ ID NO: 15294 - DNA, 201 bp, Homo sapiens
cattttccccactctgaaaatagctttgttgtttttttctgactgtataacatatatatatatgtatatatatatatgtgtgtgtatatatatatatatatataaagcctgtgtgtgtgtgtgtgtgtgtgtgaaatgaaaatacaattttcatttgtaattttattttgaaataatgaaaatacaatttcaggctgggtg

SEQ ID NO: 15295 - DNA, 201 bp, Homo sapiens
tcattttccccactctgaaaatagctttgttgtttttttctgactgtataacatatatatatatgtatatatatatatgtgtgtgtatatatatatatatwtataaagcctgtgtgtgtgtgtgtgtgtgtgtgaaatgaaaatacaattttcatttgtaattttattttgaaataatgaaaatacaatttcaggctgggt

SEQ ID NO: 15296 - DNA, 201 bp, Homo sapiens
gtttccaagacaaattggaacaagaactactcaaatggaggagccaaggacagaaattgcaggtggctagaagttgtttccctgttccaaggcagcaataattcttaggccttcccaatgatattttggtcacagtgcattaagaaactccaggatgtgaatgaggactccataaaattcctgcttcctgtaccaccgcag

SEQ ID NO: 15297 - DNA, 201 bp, Homo sapiens
tccttactgcagtgagaagagcactactttgacagagttgtggaggctcaaagtagggagcacatagtggtatatactgagtctttgaaatttggtttaartgtaggctctttcaatgcgggttgggggttgattaggatggggtaaggatcatgatacaatcatttaggactggtagacacaacagagtattttgaggcc

SEQ ID NO: 15298 - DNA, 201 bp, Homo sapiens
ggagaattgcttgaacccaggaggcagaggatgcagtgagctgagatcatgccactgcactccagcctgggcaacagagggagactccgtgaaagaaaaasagacagagagagggagagagagagaaaaatcagactaactgttttattttgtgctattgaatttaggtgctgaaaatatcaacaaaataacctgttgata

SEQ ID NO: 15299 - DNA, 201 bp, Homo sapiens
gtgtgtgtgtgtgtgtgtgtgtgtgtgtgtgtgtattgcctaattaaatcctcacagtgggccaggtgctgtggctcatgcctgtaatcccagcactttargaggccgaggcaggtggatcacctgagctagggagttcaagaccagccggaccaacatggagaaaccctgtctctactaaaaatacaaaattagccaggc

SEQ ID NO: 15300 - DNA, 201 bp, Homo sapiens
ccgagtttaaaatggaagatattattttggtaactcagaaggtgatttgaactttagacggatgacccacttcctggcttactcatcatttcccaccatcygttcatctcagttgaatgccaccagtcttgtgaggaagcagattaggaatgctcattcccgctgggtgtggtggctcatgcctgtaatcccagcactttg

SEQ ID NO: 15301 - DNA, 201 bp, Homo sapiens
gctagggatccaaacttgtttgctgtcttccaaatgtgggttgcatttttctgtttctttgttgttactcatgctgtttccttcacctagaatgccctcaytcaaaaactcacttgtcgaaatcctaatcctctttgagggctaatctaagattcttctcattccttgaagttttctttattttcctaaccagttgcatct

SEQ ID NO: 15302 - DNA, 201 bp, Homo sapiens
gcctcagcctcccaaagtgttgagattacaggtgtaagccacagtgcccggccttttttctttgctttgctttgcttttttttttttttttttttttttaracggagtttcactcttcttgcccaggctagagtgcagtggcatgatcttggctcactgagacctccgctcccaggttcaagcaattttcctgcctcagcc

SEQ ID NO: 15303 - DNA, 201 bp, Homo sapiens
tttgctcttcctcccagctctccatcaagaaatgccctatctgcaaagcagatgatatttgtgatcacaccttggagcaacagcagatgcagcccctttgyttcaattgtccaatttgtgacaagatcttcccagctacagagaagcagatctttgaagaccacgtgttctgccactctctctgagtatcccaacctcttg

SEQ ID NO: 15304 - DNA, 201 bp, Homo sapiens
acctcctgagtagctgggattacaggcgcacaccaccgtgccaacttattttttgtattttaatggagacgggttttcaccatgttgcccaggctggtctsaaactactgagctcaggcaatccacccaccttggcctcccaaagtgctaggattacaggcatgagccactgcacccggcctatattttcaatatatacaa

SEQ ID NO: 15305 - DNA, 201 bp, Homo sapiens
tcttcagaaactgacgagagaagacttgcctctccctatgcatcctgcttgctcattagcttagcaggcccttccatggtgtgtgtgtgcatgtgtgtgtyttcccagcaatggtactgaaatctctttttgtgcagaggaaggaccagaagaagctcgagcagacagtggagcaaatgaagcagaatgaaactactgcaa

SEQ ID NO: 15306 - DNA, 201 bp, Homo sapiens
tttgctttgctttgcttttttttttttttttttttttttagacggagtttcactcttcttgcccaggctagagtgcagtggcatgatcttggctcactgaracctccgctcccaggttcaagcaattttcctgcctcagcctcccaagtagctgggattgcaggcatgtgccaccacgcccagctaattttgtatttttag

SEQ ID NO: 15307 - DNA, 201 bp, Homo sapiens
aaaataaaataaaaaattaaaaaaggtttgagccctggcgtgagaatcttgtcataatgaactcattctattatattttcttttttctttttttggagacrgagtctcactctgtcacccaggctggagtgcagtggtgcaatctcggctcactgcaacctccgcctcctgggttcaagcaattctcctgcctcaacctcc

SEQ ID NO: 15308 - DNA, 201 bp, Homo sapiens
tcaccgcaacctccaccgccccccacccacccagttcaagtgattctcctgcctcagcctctcaagtagctgggattacaggtgccgccaccacgcccggstaatttttgtatttttagtggagacggggtttcaccatgttggccaggctggtctcgaactcctgacctcaggtgatccacccgccacggcctcccaaag

SEQ ID NO: 15309 - DNA, 201 bp, Homo sapiens
tatgtgcaccccaatttttggttgtatcagacattttcccatatgtatttgtcataagtgaaaaataaaataaaaaattaaaaaaggtttgagccctggcktgagaatcttgtcataatgaactcattctattatattttcttttttctttttttggagacggagtctcactctgtcacccaggctggagtgcagtggtgc

SEQ ID NO: 15310 - DNA, 201 bp, Homo sapiens
aagcgagactctgtctcaaaaaaaaaaaaaaatacgatttcattatttatgttttcttttcaccttatcattgacctagatcccctctatcagaagtaacrgtatatatatgagagagaaagaatcagaggcattgaggagaaagggaacaatgaaagttacaggaaatatctgccagaacacagttggagaagctaggga

SEQ ID NO: 15311 - DNA, 201 bp, Homo sapiens
tctcaccttcttataccagtatctttgaacaggcattagttttgtttgtttgtttgaaatggagtctcactgtgtcacccaggctggagtgcaagggtgckatcctggctcactgcaacccccatctcccaggttcaagcgattctcctgcctcagcctcccgagtagctgggattacaggtgatcaccaccacacccagc

SEQ ID NO: 15312 - DNA, 201 bp, Homo sapiens
aatcccagctactcaggaggctgaggcaggagaatcgcttgaacccgggaagtggaaggttgcagtgagctgagatcgcaccactacactccagcctgggygacagagcaagactctgtctcaaaaaaaaaaaaaaaaaaaaaaaaaaaagaactgtagtaaagccctcttaagatgataagggaattttgcttattttct

SEQ ID NO: 15313 - DNA, 201 bp, Homo sapiens
ttgttcctgttttgttttccttcttttatatcttggttatgttcactatttttgttttaggcccagctgtcaactcaagagaaagaaatggagaagcttgytcagggagatcaagataagacagagcagttagagcagctgaaaaaggaaaatgaccacctctttctcagtttaactgaacaggtagagtcatgagagaaa

SEQ ID NO: 15314 - DNA, 201 bp, Homo sapiens
ggccgaggcagatggatcgcctgagtccaggagttcaagaccagcctgggcaacatggtgaaaccctgtctctacaaaaatacaaaaattagccaggcacwtgcctagggtcccagctactccaactgaggtgagaggattgcttgagccagggatgtcaaggctgcagtgagccacattcatgccattgcactccagcct

SEQ ID NO: 15315 - DNA, 201 bp, Homo sapiens
ggtagctgacctggaatcagtgaatttttcacatagttatctccacctctacagactgaaagaacaaaaccagaagatgtcctcagaaaatgagaagatgrgaatcagagtggatcagcttcaggtaggtaatgccatatgtttgtcaaaggatattttcttagccttaccactgctccaatttggtggcctagaaagatg

SEQ ID NO: 15316 - DNA, 201 bp, Homo sapiens
tttgtcttgcggagggcagcgctgcagtgctgtgtggcagggtgggaggctcctcgggaagaagtgacacccctggcggcggcgagggtcttgaggcggcrgctgccgccccacgggtcgtggcgtcccgtcccctcccgcgggcccaggctgtggtggttccgtaatccctcgcctggatgtcatcgccgttggcttcga

SEQ ID NO: 15317 - DNA, 201 bp, Homo sapiens
cgccaacagttacagaatgcatatacttttcaggtgcacgtggaacattcaacaaaatcgaacattgatttatttttcttgtccagtatcataaaaacatytcaataaatgtttaagaaatgaaaccatggggaggatgttttctgaccaaaacataatgaaattagaaattattaacaataaggaaaaatagaatacaaa

SEQ ID NO: 15318 - DNA, 201 bp, Homo sapiens
ccaacatttcttctcctaaaatcacataatgactgtcatttttcaatttacagaaagaagaaaaaataaaaggatagatagcatttgatcagtgttgttttctcccataatttttttaaacctttggcacctgctgcagcttgtgcgttctcacagatggcaaaatgaatgaacgagcagaaaatgaatatgaacagaaaa

SEQ ID NO: 15319 - DNA, 201 bp, Homo sapiens
gccccggctgctgacagtctggggaaatgtctccctcaagaggcagctggaacgaggcctctgaaagctttctctgacaatgagggttcccagagctggggtcagccttctcacctgcatctctctctgacagcgagcctgtggatgccactatcccaggctctgttttgacgggtgttcccttggaggcctccatccccc

SEQ ID NO: 15320 - DNA, 201 bp, Homo sapiens
tctttctctgtctctctgctctatgtgcgtctctttctttctctctctctctctctcacacagatccctctctttcacagagagagagagagagagagagacatacagagcaagaagggcctgagctctgaatttgtcatgtctgcgtcagatatgaggatgagtttgttcagcatcgatcgtgttcccatccagaatagc

SEQ ID NO: 15321 - DNA, 201 bp, Homo sapiens
gtctttctctgtctctctgctctatgtgcgtctctttctttctctctctctctctctcacacagatccctctctttcacagagagagagagagagagagagacatacagagcaagaagggcctgagctctgaatttgtcatgtctgcgtcagatatgaggatgagtttgttcagcatcgatcgtgttcccatccagaatag

SEQ ID NO: 15322 - DNA, 201 bp, Homo sapiens
gcgcctggcccagagatttttttaaaggatgtatagttttccaggcagaccttgcacgttctattccctctgcctagaattcttttcctcccagcctccamctaactggttcctccttaagcaggtctccatttaaatgtcatctccagccagacatggtggctcatgcctgtaatcccaatgctttgggaggccaaggca

SEQ ID NO: 15323 - DNA, 201 bp, Homo sapiens
ttgaagggaagtgagagagcagcgtatgggaagcccaggaggctggaggaggcacagcccaggggattgcacacaggtccgggagaacccaagcaaagacrtgaaggggcatgagaggtaggcaggtgctgaaggatgaagggcctggccaccatgctgagaggagtgtcacggctaaagtccttcaagctctttcctttg

SEQ ID NO: 15324 - DNA, 201 bp, Homo sapiens
gcacacaggtccgggagaacccaagcaaagacatgaaggggcatgagaggtaggcaggtgctgaaggatgaagggcctggccaccatgctgagaggagtgkcacggctaaagtccttcaagctctttcctttgctccccaagaggctatgaagacatttcccaaaccaagggttgatttcttgagctaatgcctttctccc

SEQ ID NO: 15325 - DNA, 201 bp, Homo sapiens
acatgaaggggcatgagaggtaggcaggtgctgaaggatgaagggcctggccaccatgctgagaggagtgtcacggctaaagtccttcaagctctttcctktgctccccaagaggctatgaagacatttcccaaaccaagggttgatttcttgagctaatgcctttctccccactcattggagattcttagcctcttagca

SEQ ID NO: 15326 - DNA, 201 bp, Homo sapiens
gccaagatgaaagattttagcttcttttatcgtgatgcactttccctgccccgttatgcattctgcctattgctcctgcctcctcctacagggctcccatrtcctttctgcatattcagaaaatgcacttccctccctggccaggtagatctcaccttgtgccacctatggccaagctcttggaaaatgctgggagactgt

SEQ ID NO: 15327 - DNA, 201 bp, Homo sapiens
tagcaagtgaataataatcttgtcccccagccccagccacagaaagggggtcccaaggctgctcctgaggacagacagggagccagcataccagcacacaycacttactaacactcgccagccacaaagacagcagttcaccctgtgaagcagggccttccattacctattcctagctccatctcctgcaacaaaatccca

SEQ ID NO: 15328 - DNA, 201 bp, Homo sapiens
agaggtgagtgacagactcaaatttgcatttttgcccactgctccccaataggacgaatgctgtgtgatgatggaaatgttctgtgtccgcaatgcccagyggggtagctgctagccacatgtggccaacgagcatttgaaatgcagcctgtgactggggagtggaactgtaattttatttaatttgaatcaagttagcag

SEQ ID NO: 15329 - DNA, 201 bp, Homo sapiens
cttggaccgctcctaccagggacaggaaccaaatgaaatgactgttcaattagtcgggagtctctctgatgcttctgcctcgttccagtttagcagcttcwtaaattttttaaaaatctatagcttaaattacaatttgaactgcttcgttggatttctggcttccttttcagaaaaaaaaattagatccatttgtgatag

SEQ ID NO: 15330 - DNA, 201 bp, Homo sapiens
tcctagctccatctcctgcaacaaaatcccatttcagccaaaaggctgggttgagacagacaggcacctggagctggctgccaggctgggcttgtgctacrgtatgttcagccacagcccaagcagctgccaccccagtggggcccaatggagggaggtcccttctgcctctgcaccctcttcccggcctgaccaacccct

SEQ ID NO: 15331 - DNA, 201 bp, Homo sapiens
gtccaaaccacaaggttgaattctcagtgacttcagaggattggatcaatcaattaattagttaattaattaatggcacatgaccccagacacgggatctkggggatgtacagcagctgaagagagtgaaatgattgagcctcgctgtgagcatccattgccagaggactgggctagttgctcgcacactgttttcttgtt

SEQ ID NO: 15332 - DNA, 201 bp, Homo sapiens
aagcagtcagcacagcacctagtttatagtaagtgctcagcaagtggttccctttgcacccccagagccctccttgcttcagaaggtctcagcgtcacagmctcttctccaccctgtttctcctcccctagttgtggccctatcaaatcttccccaaattcctggcacagcctcctggctagcggtgccctgctcccatcc

SEQ ID NO: 15333 - DNA, 201 bp, Homo sapiens
caagctcagagatttttattcaattttgagaaccaaaccctgaacggggctgaaggcctccataagatcccaatgaatcaactcccatgtgacaaagaaamgcgggctcagagagggcaaggaactgctaaagcagcgggagagaatgcagccaaccctgacccgcacacagccagggcagaccctccgctgcacagaaca

SEQ ID NO: 15334 - DNA, 201 bp, Homo sapiens
acctcagccacccgagtagctgggattacaggtgccagccaccacacctggctaattttttgtattttcagtagagacgggtttcaccatgttggtcaggstggtctcaaactcctgacctcaggtgatccgcatacctcggcctcccaaagtgctgggattacaggcgtgagccaccacgcccagccagaagactgagtt

SEQ ID NO: 15335 - DNA, 201 bp, Homo sapiens
gagccccatgaagttggtagtagcaatagtgcccattatagctactgactattgtatgcctggtacgtgtcaggcactgtcaggcactttgtatttgaggyagttgaggcccagagaccaaagtcccacagctgctgagtgtcagagctgccctccaagcacttctaaccactgccctactctgcctctctttcctatagc

SEQ ID NO: 15336 - DNA, 201 bp, Homo sapiens
aactttctcaatgtgacaagcacatctaagaaaaatatattcctaatatattatggtgtaataatgaaccctccttcctaagatggaaaaagggaagataycctctctctccagttttattccaacatgatactggagtttctagctaatacagcaaggtaagaaaaagaaataaaaataataataaagactagaaaggaa

SEQ ID NO: 15337 - DNA, 201 bp, Homo sapiens
agggaggcctcacaatcatgacagaaggtaaaaggcatgtcttacgtggcggcagacaagagagaatgagagccaagcaaaaggggaaaccccttataaarccatcagatctcatgagccttattcactaccatgagaacagtatggaggaaaccgctcccatgattcaattacctcccacctagtccctcccacaacaca

SEQ ID NO: 15338 - DNA, 201 bp, Homo sapiens
tttctaaccctgcactcttggaattcatggtcttctgccccagcttgcagtcaggatcctggggccatggagagggggcagaggtatcagaaggagagaargagggaaggctgaactgtgggtggtcaaaggtgggacctgggaggtgagggccctgatggaacttcaccccaaaagcaacattgctgcatccagaaggcc

SEQ ID NO: 15339 - DNA, 201 bp, Homo sapiens
aagcaagacccccaactctacaacaaaataaaaaataaaaattagccagatgtggtggtgtgcacctgtagtcctagctatttgagaggctgaggtgggaraactgcttgagctcaggattctgaggactgcctgggcatcatagtgagaccccaattctcaaaaaaaaaaaaatagcaggaagtggtgactgagcagctg

SEQ ID NO: 15340 - DNA, 201 bp, Homo sapiens
agacctctgcaaaagtggtcccatttcaacaatttttaaagagtgacatgacagttaaaagaagcagaaggaaaacaagatcaacctacagcaaaagcccmgttcccctctctccacaatccctgcccctcactttccccagaccagtgccccttcccagctcatttctcagctgctacaatccagctactctggaccctt

SEQ ID NO: 15341 - DNA, 201 bp, Homo sapiens
ctgtggcaagccaagcaagagaaggtgatactttgaacagctgccctgcgagccctgctcacagaaagaagaatctgctcctctcttcgccagcccctccytcttgccaacactgtccccagaccccatcctgggccagcttctgctcagtgggttgagaacaaggggcactggaggaactgtgggcacattggaggagac

SEQ ID NO: 15342 - DNA, 201 bp, Homo sapiens
actgcaaggtccatctcctgggttcaaaccattctcctgcctcagcttcacgagcagctggaactacaggcgcccgccaccatgcccagctaatttttttstatttttagtagagacagggtttcaccgtgtgttagccagaatggtctcgatctcctgacctcatgatccacccacctcggcctcctaaagtgctgggat

SEQ ID NO: 15343 - DNA, 201 bp, Homo sapiens
ttttccaacggaaattaaattgaaggcagaaagggaggttgttaaaaatgaaattctgtgtagatacctctaagtaacttcaaagataaaaggaataggcrgtgggttatctaggttgcacatgagaaacctgaatcaaacaagcttaggcataaaagaaattatattgttctcagaatccaaggcaagcttcgacaacca

SEQ ID NO: 15344 - DNA, 201 bp, Homo sapiens
gggatgcatagggaaggagagaatgatgggttagctgcagcttgcaatgaggtgacatcagggaaagcttcagagaatttttttttcttttttttttttttgagatggagcctcgccctgttgcccaggctggagtgcagtggcatgatctcggctcactgcaaggtccatctcctgggttcaaaccattctcctgcctca

SEQ ID NO: 15345 - DNA, 201 bp, Homo sapiens
ccttccattacctattcctagctccatctcctgcaacaaaatcccatttcagccaaaaggctgggttgagacagacaggcacctggagctggctgccaggstgggcttgtgctacggtatgttcagccacagcccaagcagctgccaccccagtggggcccaatggagggaggtcccttctgcctctgcaccctcttcccg

SEQ ID NO: 15346 - DNA, 201 bp, Homo sapiens
atggctaaaatcaaaaaggtggacgaagtccagatttggcatggatgtagagtaatgagaattctcagacactactggtggaaatataaaatagaagaacmactttggataacagttgggcagtttcttataaagttgtgcctatacctatcttacaaaccagctgttccactgctagccatttactcaagagaaattaaa

SEQ ID NO: 15347 - DNA, 201 bp, Homo sapiens
gaaacaggactataggacccaaccctgcttgaggacaggtggaaggaggagaatctcttactaattcaatttaacatttgatgaaaccagtactcacttgkttttcaagaataaagcagtgggttggaaaaggctttggtcaaagtcagaagactgagttttgtttttgtttttgtttttgtttttattgagatggagtct

SEQ ID NO: 15348 - DNA, 201 bp, Homo sapiens
tattcctaaggctaacaggttattctagggggcatgaggttcatggggacatgaaacaggactataggacccaaccctgcttgaggacaggtggaaggagragaatctcttactaattcaatttaacatttgatgaaaccagtactcacttgtttttcaagaataaagcagtgggttggaaaaggctttggtcaaagtcag

SEQ ID NO: 15349 - DNA, 201 bp, Homo sapiens
cctgtgggtcatgagatctagtctaagcccttccaataagccatcagcttagtccccgaccccactgaatgctgaaaaatggtagctctcagagctgtgcygtgagggaaggaactgccaaaggcctggacctcccacaacaaggcccaggctccccatggagggggcgccattcagaaggtctgggttgcatctcagtct

SEQ ID NO: 15350 - DNA, 201 bp, Homo sapiens
aagaaagaaggggcaaatgcaggaagggcccaggtgcatctgccatgcccttgtatgattgactgctaccttgctgggcacttgcagtgaggcaaggaatytctaatctgagcaaggaatactgacaagtaaacagaagactgcaaaagatgaatctgggttttccagttgaagggaagtgagagagcagcgtatgggaag

SEQ ID NO: 15351 - DNA, 201 bp, Homo sapiens
ctgtgggtcatgagatctagtctaagcccttccaataagccatcagcttagtccccgaccccactgaatgctgaaaaatggtagctctcagagctgtgccrtgagggaaggaactgccaaaggcctggacctcccacaacaaggcccaggctccccatggagggggcgccattcagaaggtctgggttgcatctcagtctg

SEQ ID NO: 15352 - DNA, 201 bp, Homo sapiens
ggggagggatgaggggaagggggccagactgtgctgaggccagctccaagcccctcctgcagctgggctggaggtggtggcttcatccatgagcatgtccrcacctgcacacacactccctccacccacacacacctgccctctaggtggcccatcacctgagtcatgtcctctgtggcccagccagtcttagggaagggg

SEQ ID NO: 15353 - DNA, 201 bp, Homo sapiens
agaaccaaaccctgaacggggctgaaggcctccataagatcccaatgaatcaactcccatgtgacaaagaaaagcgggctcagagagggcaaggaactgcyaaagcagcgggagagaatgcagccaaccctgacccgcacacagccagggcagaccctccgctgcacagaacaagctctctggcataatagggaaggcagc

SEQ ID NO: 15354 - DNA, 201 bp, Homo sapiens
caaaaccccatctctgaaaaatacaaaaaattagccaggcgtggcagtgcatgcctgtagtgccagctacttgacaaaacaaaacaaaatttttgcatatmatttcaggagggttatggatccccagagcccatctgtgatcctctaggggtccacccatgctaggcaaagtcaccctgatcgagaaagtgctaaacaatc

SEQ ID NO: 15355 - DNA, 201 bp, Homo sapiens
gacgtcgcaggcaggccctgcccacaggtgtgatcctggtgggtaatgtgttccctcaggtaaagctcagcacagcccacctgagcccacaggcccaaagsaaacctcttcctccacaagctcagagatttttattcaattttgagaaccaaaccctgaacggggctgaaggcctccataagatcccaatgaatcaactcc

SEQ ID NO: 15356 - DNA, 201 bp, Homo sapiens
aaacaaaacaaaatttttgcatataatttcaggagggttatggatccccagagcccatctgtgatcctctaggggtccacccatgctaggcaaagtcaccmtgatcgagaaagtgctaaacaatcctccaaaagaacgccacagtaccacaaaatgcaaccaacatttcttctcctaaaatcacataatgactgtcatttt

SEQ ID NO: 15357 - DNA, 201 bp, Homo sapiens
gagaatggctcttggtgagctgggaaggaggacgtcgcaggcaggccctgcccacaggtgtgatcctggtgggtaatgtgttccctcaggtaaagctcagyacagcccacctgagcccacaggcccaaaggaaacctcttcctccacaagctcagagatttttattcaattttgagaaccaaaccctgaacggggctgaag

SEQ ID NO: 15358 - DNA, 201 bp, Homo sapiens
agagaagctattagacctgcttggcaaagaggaggacgaagggagccacgatgagaatgtggtaagagcagctcactgattggaagttgttctgctgctcyggcttgtaccggcagtacaaaaccagatgctggggccgggcaggaaagatgtgactcactgcacacctttccatggcttgggacatgctgtcagttccca

SEQ ID NO: 15359 - DNA, 201 bp, Homo sapiens
atgcaaccaacatttcttctcctaaaatcacataatgactgtcatttttcaatttacagaaagaagaaaaaataaaaggatagatagcatttgatcagtgktgttttctcccataatttttttaaacctttggcacctgctgcagcttgtgcgttctcacagatggcaaaatgaatgaacgagcagaaaatgaatatgaac

SEQ ID NO: 15360 - DNA, 201 bp, Homo sapiens
tgaagagagtgaaatgattgagcctcgctgtgagcatccattgccagaggactgggctagttgctcgcacactgttttcttgtttttggcagggacaggcmggagttattttattttcctcgttccagcttgaagctatttttgtgagagttttcaccatgaacgctgctagtgagaagcttgcggagccacaagcactga

SEQ ID NO: 15361 - DNA, 201 bp, Homo sapiens
ggaaagatgtgactcactgcacacctttccatggcttgggacatgctgtcagttcccaaatccaaggacactccagctgagcctcgagcctctctctgagrgtcatgccagaagccagtacggatgcagcagacaccaggaggtgcttccaaacataggaactgcctggcccaatccagcttctcccaggcagacagctgc

SEQ ID NO: 15362 - DNA, 201 bp, Homo sapiens
ccccaggcttagccatgggctgcacttcctgcaccatagccccgagggaggcccccaagagagaggtcaggactcagaccatccagccccaaagctacagwccactcagatataggtccagttacatgaggggcacctctaagagggatcaaaccagcagccaatcaaaccagggagccttctcactgccatagggggcac

SEQ ID NO: 15363 - DNA, 201 bp, Homo sapiens
catccagccccaaagctacagaccactcagatataggtccagttacatgaggggcacctctaagagggatcaaaccagcagccaatcaaaccagggagccwtctcactgccatagggggcacccaggtgtgcaatggtaaggattccattcagcctcatgcccccaagatggtaaactagcctatcagatgtctggagcag

SEQ ID NO: 15364 - DNA, 201 bp, Homo sapiens; identical to SEQ ID NO: 1165

SEQ ID NO: 15365 - DNA, 201 bp, Homo sapiens; identical to SEQ ID NO: 1167

SEQ ID NO: 15366 - DNA, 201 bp, Homo sapiens
atggtgcttcagggtcctcctgagtctttgcttacccggataaacaaatactccaacccactttcagacactcattggtaagcaagagtcggtgctgtgcrcacagtaattttccagctgctgttgtgtgtgaggcttcagagacgctgatggagcaaatgatgaaccagccacagcagggctggaggggtatctgaatca

SEQ ID NO: 15367 - DNA, 201 bp, Homo sapiens
ggcaaacagggtctggagtggacctccagaaaactccaacagacctgcagctgagggttctgacagttagaaggaaaactaacaaacagaaaggacagccrcaccaaaaccccatctgtacgtcaccatcatcaaacaccaaaggtagataaaaccacaaagatggggaaaaaacagagcagaaaaactgaaaattctaaa

SEQ ID NO: 15368 - DNA, 201 bp, Homo sapiens
gacccaaagaccccaacaagcagggacctcataccctggaggtcactgggtagaggctgtatccatcatcctgtcctctgccctatctatcctgaagagasagttttatcctccacctgccaagctcctcaatgccaggagcttcctgttctccacatgctcctcctaatagatggctcttccctctcgcatcgacaggag

SEQ ID NO: 15369 - DNA, 201 bp, Homo sapiens
tttttatgatcctcccatcaaacaagtagctatttgtgcaatcatttccttagtgtggacctggggaagtctggtggagaagggagactcagggagttgtsccattttcaggagtgacccaaaagatgacaccaaggctaggagtttggagcaatcacaagtccaaaccacaaggttgaattctcagtgacttcagaggat

SEQ ID NO: 15370 - DNA, 201 bp, Homo sapiens
taatgactgtcatttttcaatttacagaaagaagaaaaaataaaaggatagatagcatttgatcagtgttgttttctcccataatttttttaaacctttgscacctgctgcagcttgtgcgttctcacagatggcaaaatgaatgaacgagcagaaaatgaatatgaacagaaaaacttggaaacgtgatttcataaaatt

SEQ ID NO: 15371 - DNA, 201 bp, Homo sapiens
caggcttattatgaggattaaataagtttaagtgtataaaacactttctatcttttcttcttttctcttttcttcccgtagaacattgatgtttaatcttrtttggatcactgactcttaaaaataagatgaagctgtaaattctctccccccaaaattgcacatggtcacatagatatacgtaaaattttgcctacaagc

SEQ ID NO: 15372 - DNA, 201 bp, Homo sapiens
gcctcactggcctccccagtgctcactctgtccctccccaacccattctctgcaacaacatgaccgttctaaaatacagccctgctcatctccctccctcmtgaaccacaggatgaagtccaagaatctcttcacagacctctccagtctggctcctgcctctctttcagtggcctctcactctactcccccagcctccca

SEQ ID NO: 15373 - DNA, 201 bp, Homo sapiens
cccatgttcaagcgattctcctgcctcagcctcccgagtagctgggattacagtcatccaccaccatgcccggctagcttttgtatttttagcagacttgrgatttcaccatgttggccaggctggtctcaaactcctgacttcaagtgacctgcccacttcagcctcccaaagtgctgggattacaggtgtgagccccca

SEQ ID NO: 15374 - DNA, 201 bp, Homo sapiens
ctctacctcccatgttcaagcgattctcctgcctcagcctcccgagtagctgggattacagtcatccaccaccatgcccggctagcttttgtatttttagyagacttgggatttcaccatgttggccaggctggtctcaaactcctgacttcaagtgacctgcccacttcagcctcccaaagtgctgggattacaggtgtg

SEQ ID NO: 15375 - DNA, 201 bp, Homo sapiens
agagagtgtaaagttgccagaaagggtcttgtatggttttctatcactgccactgcaaataactactaccctcgtggcttaaaacagcacaaatgtattaycttacagttctataggtcaaaagtctgacacaggtctcgctgggctaaaacccagtgtcagcagggctgcatttctttctggaagctctacaggaggctg

SEQ ID NO: 15376 - DNA, 201 bp, Homo sapiens
caatttttggatgaagataataccttacctgtgtgaagggaagatgcaggaccagatgatctcctgagactcaaagtgccataacagcactgcctcccctkcccagtgggatgctcacgcccaagcatggccaggagctggcagtcctggggactgtagaaggcagctgggacagagcacccctgtgatgcctcctcccaa

SEQ ID NO: 15377 - DNA, 201 bp, Homo sapiens
acgtgtcaggcactgtcaggcactttgtatttgaggcagttgaggcccagagaccaaagtcccacagctgctgagtgtcagagctgccctccaagcacttytaaccactgccctactctgcctctctttcctatagcccgagggcagcccctctgtggctgttggtcattctgcttccaaaactcagtctactcctgggct

SEQ ID NO: 15378 - DNA, 201 bp, Homo sapiens
aataaaacccactttatgagcttgttgtgatggttaaacatgataaccccctagcccagaaaaggtccataaatagtagtttctggcacctggacaatcastatgccagggacccagggctcagctggtgtgtccaggggctggctaagcatttctacactttctccaggaggctggggactccccaccatagctcggtcc

SEQ ID NO: 15379 - DNA, 201 bp, Homo sapiens
gactttctaaaagtaaattgttaattagttgtccatggcaaatctgactttgtggcttgttgaatgtacctacccctactatgatgaattacttacttgtrttgacatctctttgctatctacattgttattagcagcagaataagtgaacaacattccttggaatccagtgtgtaacttctccccaccactagtaagggg

SEQ ID NO: 15380 - DNA, 201 bp, Homo sapiens
gttgctgccttacttggtaagtcagtgtctattgcacaaatttccacatctcatagagggtgggagggagggaggatgcacaggtggatgggaggcaagcrgacagacacatagcctcggaggagtctaaccttttgatttactaataattactccctgtttccttgcactgctcctctcccagaatggaaagaaccccag

SEQ ID NO: 15381 - DNA, 201 bp, Homo sapiens
ccaggctcctctggagaatctcatgcgtctcagcacagtgaccccaaaaccacatcagttcccatggccagattttattctgctttgtttattgacttttstggaaaactgtacacagttatggcaattgaatcacaccaggtaacagatttaagaactaccctctattgctaggagtaaaatgttatgaactcaggcatg

SEQ ID NO: 15382 - DNA, 201 bp, Homo sapiens
gcaaaaccccatctctgaaaaatacaaaaaattagccaggcgtggcagtgcatgcctgtagtgccagctacttgacaaaacaaaacaaaatttttgcatayaatttcaggagggttatggatccccagagcccatctgtgatcctctaggggtccacccatgctaggcaaagtcaccctgatcgagaaagtgctaaacaat

SEQ ID NO: 15383 - DNA, 201 bp, Homo sapiens
aaaattgcccctttccagcttacagaggagtcaggactctccctctcagtactatgtcttgaggatcccaacagcactggcaggtcagatggtggcccccsccatgaccctggcccagaaaagacaaagctgatatcctagcctgtggctggaggggctgaagaaaagctgagctctgagaggtaaagtgcctggccagcc

SEQ ID NO: 15384 - DNA, 201 bp, Homo sapiens
gttatggatccccagagcccatctgtgatcctctaggggtccacccatgctaggcaaagtcaccctgatcgagaaagtgctaaacaatcctccaaaagaaygccacagtaccacaaaatgcaaccaacatttcttctcctaaaatcacataatgactgtcatttttcaatttacagaaagaagaaaaaataaaaggataga

SEQ ID NO: 15385 - DNA, 201 bp, Homo sapiens
aatcccagatgggaactgtatcgattcctggtgagtcattcattcgctggccagtaaactttatagagcgtcctaggctaccagccctgaacacccagcayattacagtggggatgtcaggctctctgacagcagggtataaggagcttggaaaaggttcacagagagtcccaacatggctcaacctgtgtctattcccta

SEQ ID NO: 15386 - DNA, 201 bp, Homo sapiens
caccccctcagctctgggagggctgtagtctgctcatagctggatattctagaactgtgctatccagcaatgtttccactagccacatggggctatttaarcttaagttttaattaattaacattaaataaaatgaaaaattcagttcctcagtcacacaagccacctttcataactggcacctaccatgttgggcagcac

SEQ ID NO: 15387 - DNA, 201 bp, Homo sapiens
tgcagccggcataatgtaagcagccactgccatcggtatcactatgttgcctaggctggtcttgaactcctcaccttaaggaatccttcggccttgcctcycaaagtgttgggattacaggcatgagccaccatgctcagcccaacattgtatatttaaatgaaaactgagaaattttgccataagtaaacccattctaaa

SEQ ID NO: 15388 - DNA, 201 bp, Homo sapiens
acatcagttcccatggccagattttattctgctttgtttattgacttttgtggaaaactgtacacagttatggcaattgaatcacaccaggtaacagattkaagaactaccctctattgctaggagtaaaatgttatgaactcaggcatgtcctggtcttctgaattgtgtgcagtgtcaggcctagcaagtgaataataa

SEQ ID NO: 15389 - DNA, 201 bp, Homo sapiens
cctgggtctgcagctgtgggtgcagtggcatggggagctccagtcttaactcagaagggtcagggttcccactggctctacggagtgtgcagccccagctrcacagctgcacagctgcagccggcataatgtaagcagccactgccatcggtatcactatgttgcctaggctggtcttgaactcctcaccttaaggaatcc

SEQ ID NO: 15390 - DNA, 201 bp, Homo sapiens
tatataaaagagcatattcataggaaataagacttgaaggaaatcagccaaaatacccacactgggggaattatgaataatttattttcttctgtgggctytccatctctttcatgttgtggctttgttctatttattcatacagcaaatatttgctgaatacctactatgagtgaagtggtagagatacagtggtaaaca

SEQ ID NO: 15391 - DNA, 201 bp, Homo sapiens
  misc_feature (1)...(201): n = A,T,C or G, or insertion/deletion polymorphism (see Tables 1-2)
ggtttcaccgtgtgttagccagaatggtctcgatctcctgacctcatgatccacccacctcggcctcctaaagtgctgggattacaggtgtgagccaccgngcctggcccagagatttttttaaaggatgtatagttttccaggcagaccttgcacgttctattccctctgcctagaattcttttcctcccagcctccacc

SEQ ID NO: 15392 - DNA, 201 bp, Homo sapiens
attagaaatggaagcttgcccagttggtttttttcaaggcagaagagagaatttattacacatgactttagtgacttccaaatggccaaagatggagccgyataaatatggaagcatctatttccaccccatcaaagcactggagaggtgccacaaggtgagatggcccgctgtgtagacattgccttcaccatcaacagg

SEQ ID NO: 15393 - DNA, 201 bp, Homo sapiens
ctcggtccctgatgtcagttacacacagtcaactgcagcctgaaaacattaaatggaaaattccagaaataatcagttttcagttgtgcaccattctgaayagcgtgatgaaatctcgcaccatcccacttcatcccacccaggacgtgaatcagccctttgtccagcatatccacgctgcatacatacactgcccgcctg

SEQ ID NO: 15394 - DNA, 201 bp, Homo sapiens
aaaggagccctaatgtctatggactcacctactttatcttactcaggggacaagttaataaatcagaccatgctttggttggtcctgctgcccagtgtcaygttatcttttgattcatgggcagttcactgtctgaactccaaatggtgtggccttggtttctgacttttttttaaagggggaaaaagggcctatagagga

SEQ ID NO: 15395 - DNA, 201 bp, Homo sapiens
ttgaaaacaactattgcccagccatcacaactggagaagtccctgcatttgtttatgttgtgacaaacgggctggacagcccccagtaatcattctctgtkggctagtaaatcatactgcttatctgttagactgctccatccccaaaatacctctggtccctcacctactgagatctttcactctctgtctctctccctc

SEQ ID NO: 15396 - DNA, 201 bp, Homo sapiens
tgccatgaggacgtctctgtaaatgagtcttagcattccatcacggttcactgagtggagctgccattatcaaccccattgttccctgttcttagtctctsgggatccccattgtgatggtcgcaatgagtgagcaccgtgcaccagctcctttatccaggctgcctcatcacagccaccttgcaagataggcttccctgt

SEQ ID NO: 15397 - DNA, 201 bp, Homo sapiens
catcacggttcactgagtggagctgccattatcaaccccattgttccctgttcttagtctctcgggatccccattgtgatggtcgcaatgagtgagcaccrtgcaccagctcctttatccaggctgcctcatcacagccaccttgcaagataggcttccctgtgcccatcttatacatggggaaactaaggcttggtaagg

SEQ ID NO: 15398 - DNA, 201 bp, Homo sapiens
gctttgattttaaaaatacactggataagatgaacagcaaattaaacattgcagaggaaaagattagttaacttgaggagattgaaatgaaatagaaaaasaaggatttttaaaatgaagaatgtagcaatgagacaacttccagtggcctaacatactggtatttagagtctttcaagaagtatggggcaggtgggaggg

SEQ ID NO: 15399 - DNA, 201 bp, Homo sapiens
aaaaaaaagctgtcaatctaaaaatctatatctagtaaaaatgcctccaaaaattaagcaaaataagtcttctcagacatataaaagcagaagagccagcrgatccttactccagcatatctatcaccagcagatctgtattccaagagatttttcttcaaggaaaaggaaattgacatcagatggaaatatgggttcaca

SEQ ID NO: 15400 - DNA, 201 bp, Homo sapiens
aagtcttaaatcatgacctcagcttctgcattaaaaaactaaaaaaaaagaagagcaaattgagccaacactaagcatggcaaggaaaatgatgatgattscagccgaaatcaatgaaatagaaaaacaatagagaaaaacaaggaggccaaaagattttttttgatattaataaaattgataaacctctaaccagaatga

SEQ ID NO: 15401 - DNA, 201 bp, Homo sapiens
cccctgccgttgcactctctgggttgtctgagtgggcaagcatctttatttgacctcctctcggtactggctctcccaggtcagagacaaggtcttgcccrgagccctctctctccagagccccatgcagcaaatacatttagttaatcctccccttgctttgggcccaggctgctctgcaggggttgtggactactcaga

SEQ ID NO: 15402 - DNA, 201 bp, Homo sapiens
ggtggctccctactgaagtggttgaactgcactctaaagaataaagtgtggtttcttgaagccaaagttcaaggcctcctgtgatccagtttcatacttgwtgtgatgctctgtcaaaaagagctactcagtgtgccctgcagattcccatctctgaaccttgcctgcccttttatctttctcagaattccatctcctcta

SEQ ID NO: 15403 - DNA, 201 bp, Homo sapiens
gtctccagccatctgaagtcctcccaggagagtggttctcaaactctggtgggcccgagaatgcaccttacccccagcgggaacttaaaaatcccgacatycagaccccaaccgcagaggctctgattctattggcctaggtgtatccaggcagcaacactgattacaattcttccaggagagttggatgcaggggtatct

SEQ ID NO: 15404 - DNA, 201 bp, Homo sapiens
atggaagagactccgtctcaaaaaaaaaaaacaaaacagggataatgtttaatcggcaaggttgttgtgagaactaagctgtttgatgcatctatgcaatrtttcccatattggggtctgaagaactcatatccctatctcaaaaatctctgcaatggcctccagccactcactcagtaattacctctgcttcctgtggac

SEQ ID NO: 15405 - DNA, 201 bp, Homo sapiens
gaagatctgaaaggaaagcaggctgccgcccactgggggaagctggaggggctgggaagtgttggaataccaaaggatgtgggttcagggacctggcaccktgcctgtgcctatgtaagcccctgggagacccatgtgtatagaccctaaagcttatttcatgcattcatttattcatttatttcttcagcaaactattcg

SEQ ID NO: 15406 - DNA, 201 bp, Homo sapiens
atgcattttattgtatataaattatatcttctgaagttgattttaaaaaatagataccattaagaaaatgaaaaggtaagccacagactataggtggtatrgacaaaatatttacaatacatgtgtctgacaaaggacttgaatccagaatatatgaacaactcttacaacccaaaagtaaaagttaaaaaataataattt

SEQ ID NO: 15407 - DNA, 201 bp, Homo sapiens
gtgtaatctgtagcagatgacgtggtctctcttgactgaatttcctcttctggaaaatgagagtaataaccataacatgcattaggacatacaaggcccawccagaaattaagccccttacctggattttactatcaaaattcttcctagctgtaggttgatcttgagagatacgttcaagtgtgagctcgctggccatcc

SEQ ID NO: 15408 - DNA, 201 bp, Homo sapiens
catcacaaataaaaatgactttgaactcctgaggtagatggtatatttatctttccatcgcagtccttcctaattgtcaaagcattcaagattacatctakgaagggcagcatctgcccaattcccattcaaagttttcatgatgtaccccagagactttaaaaccaatgctggctagagcactggctcagccatatacaa

SEQ ID NO: 15409 - DNA, 201 bp, Homo sapiens
ctggccatccccagtttcctaaggcatgatcctcagagacgagaggccctagtgagcagtgatcaagaagctatggggctttactggttcacaaactgaartgtgcctgtccatgagagagatgagagattcttagtcagctcgaggtgccatagcaaaatgccacaggttgagtgccttaaaaaacagacacttaccttc

SEQ ID NO: 15410 - DNA, 201 bp, Homo sapiens
ctagagctctttgattatatttatgaggtaagatttgggattccccacagggaaatgaccgcatgctggtgccctcatcgtgccccaggttcagaatcatrgtagagggaaggcggtgcctctctccatgcagagcctgcttcccctcctgtccaccaatagagtcgatcactgaagcccaggctctgtggggcaagggga

SEQ ID NO: 15411 - DNA, 201 bp, Homo sapiens
tccagaggaatgatcagacagcaacatttgctgttcagcaatattcgctgttctgcagcctccgctgctgaacccacaaacccaggcaaacaggtattgamgattacccaggcaaacagggtctggagtggacctccagaaaactccaacagacctgcagctgagggttctgacagttagaaggaaaactaacaaacagaa

SEQ ID NO: 15412 - DNA, 201 bp, Homo sapiens
tggaaagaaccccagcagtggggtggaatttcaggcccaatttattccccaatcttggcttcattttccccatctatgcaatgaggacggtcagcctaaakgtctctctgggcctttctaaccctgcactcttggaattcatggtcttctgccccagcttgcagtcaggatcctggggccatggagagggggcagaggtat

SEQ ID NO: 15413 - DNA, 201 bp, Homo sapiens
ctccccggctccagtggcatctgatggatacaggcagctaatttccatcctaacccagcccaacccaaaactcacaagacccctgagagtgcacagttaarggacttgactctagagcccttctctcagctcccactcactctcaagaaaggatctgatgcctgtaaaccagaaagagaaatagctgttgtctccctgagc

SEQ ID NO: 15414 - DNA, 201 bp, Homo sapiens
tggcatctgatggatacaggcagctaatttccatcctaacccagcccaacccaaaactcacaagacccctgagagtgcacagttaagggacttgactctaragcccttctctcagctcccactcactctcaagaaaggatctgatgcctgtaaaccagaaagagaaatagctgttgtctccctgagctgaaccaggtgacg

SEQ ID NO: 15415 - DNA, 201 bp, Homo sapiens
tcacaagacccctgagagtgcacagttaagggacttgactctagagcccttctctcagctcccactcactctcaagaaaggatctgatgcctgtaaaccaraaagagaaatagctgttgtctccctgagctgaaccaggtgacgttagcattttggaaggggcaggtgcctcctacctggcttctcacaccagctatgaga

SEQ ID NO: 15416 - DNA, 201 bp, Homo sapiens
atacaaatacgtgcacacaccccagaccctggcatataccccacactataccactacagactcacactgcacacgtacatcacacacctcccccgacatayatatccattagaacacagtccccaagaagcctccattaaagacatgagagggagcggtgatgggaaaggaatgagggagagccagtttgaggccagcacc

SEQ ID NO: 15417 - DNA, 201 bp, Homo sapiens
actgacatctcagttactaatgtggaattatgaacaaagcaatgaagaaacacaaaacaacccttgttcccatacagcagtgtggttgtgctgagaagagytccaggctctggatcagactgacctctgttcaaagcccacttccatcactactagccttggtgtcctgggaaggcaggatgcttaagcctcaaaattatc

SEQ ID NO: 15418 - DNA, 201 bp, Homo sapiens
actctctggaggcttcattcacaccttagtccatatgagtagaccctcttgcagttgcgcagtgcatgctctgcatagctgtacccggcagctctgagatrgtccaattcacatagagaaaggtcacttctcctgacctcttcagattcttcagctgagggtggaagttggactcaggaattttcttagaaagatggaaat

SEQ ID NO: 15419 - DNA, 201 bp, Homo sapiens
cagagacactatgttgagtgaaagaagctagatgcaaaagagcacatagtgtaagctttcatttatatgaagtttgagaacaggcaaagccaacctatggkgagagaattcataaccgtgattacccaggtaggttggggactgattggacagggacagaaacgaactttctagggtgttttaaaatgtcctctatcttgg

SEQ ID NO: 15420 - DNA, 201 bp, Homo sapiens
ttgccatgtaaatgtcatatgtgtaatctatgttaaggggaagagtagaatgatgggaattgaagatggatgactagctaaggagcagagtcaagccccaratgacaccacagtacagggaaacaaacaattcacggctgcgcctgtgcactctctggaggcttcattcacaccttagtccatatgagtagaccctcttgc

SEQ ID NO: 15421 - DNA, 201 bp, Homo sapiens
ggggtttgagggtacatgtgaaggtttgttacatagataaacatgtcacaggggtttgttgtacatgttattacatcacctagttattaagctcaataccmaatagttatcttttctgctcctctccctcctcccacccttctccctccgattctaaatcatagaatatcaacacttgaatgggacttggtggtgtctagc

SEQ ID NO: 15422 - DNA, 201 bp, Homo sapiens
ggcactgaacttatttaatcagataaggaaactaaaagctggggctgagggatggggctgtgtagcttacccaaagtcacacagctgtctcatgaaagagwggagttcgaggttctgcatgggtcattctgctatctctcattctcaaattagaatagtagatttaaggtctatgattagacacaaaggcttaagagatca

SEQ ID NO: 15423 - DNA, 201 bp, Homo sapiens
gcacaaaggcccagaaaggttgagtgtcatgcccaagatcacactggaaatcctgaccatcggctagtcctgaactcagatgtgatttggtgctaagcccmcctcattgtagagcccatgaggaccagcatggacattctgctcctgcctggcttcagcctggttcagcagagtgcagaactcagctgacacccacagaag

SEQ ID NO: 15424 - DNA, 201 bp, Homo sapiens
aaaataaaaaatgtttattggacacatagaaggtggatgggtggggggcatgggaagatggatggatggatggttggatggatggatggatggatggatgratggatggatggatgggtagatggatgaacagatggacagataatgggtgggtgggtggatggatggacagatggaaacaaaactgcagaggctcttatg

SEQ ID NO: 15425 - DNA, 201 bp, Homo sapiens
agcctgaccaacatggtgaaaccccatctctacaaaaatacaaaaattagtttcgggtgcctgtaatctcagctacttgggaggctgaggcaggagaatckcttgaagccaggaggcggaggttgcagtgagccaagatcttaccattgcattccagcctgggtgacagagcaaggctcactctcaaaaaaaataaaaaaa

SEQ ID NO: 15426 - DNA, 201 bp, Homo sapiens
taaactcagctcaaaggtgaccaccccctccataaagtcttttccggatggcacccccaattagttggaccatgccctcctcagtgcccccactacgcctsgacattatgaccccactatagcatttgcttggttatgtgcatgtctgttcttttagactaaaccccatgggtgtaggaatcatatcttattcatcttcat

SEQ ID NO: 15427 - DNA, 201 bp, Homo sapiens
gcagaaaaactgaaaattctaaaaatcagagcgcctctcctcctccaaaggaacgcagctcctcaccatcaacggaacaaagctcgatggagaatgacttygacgagctgagagaagaaggcttcagacgatcaaacttctccgagctaaaggaggaagtgtgaacccatcgcaaagaagttaaaaaccttgaaaaaagac

SEQ ID NO: 15428 - DNA, 201 bp, Homo sapiens
catgaagaatttttgctgagcgaataataaactcccaccaacccttcccttccagagtacttgtgacacaatgccaaaccactctgaaaccatcagtcacrctgtgaacgtgcccctgcagacgaccctggggaccttggaggagattgcctgctgacacccctcgagtcacccagcactccctccaaacagaccttgagg

SEQ ID NO: 15429 - DNA, 201 bp, Homo sapiens
tgtgacaaagaaaagcgggctcagagagggcaaggaactgctaaagcagcgggagagaatgcagccaaccctgacccgcacacagccagggcagaccctcygctgcacagaacaagctctctggcataatagggaaggcagcaggggaagaaagaaggggcaaatgcaggaagggcccaggtgcatctgccatgcccttgt

SEQ ID NO: 15430 - DNA, 201 bp, Homo sapiens
atgggactctctcaaggtgaggcccaggaatctgcatttctaacaagcctccctgtaatgcagatcctcttgccattcagtgcccagggccctaatattayagcagacagccctaatttagctcatctctgctgtggcttccattcccttcccgcctccttaaacacacacactcacacacatacatacacacaccattca

SEQ ID NO: 15431 - DNA, 201 bp, Homo sapiens
ttcttcatttccctttttcttgccagtccacctccagcacaccactgaaacttttctttgtcaaggttgctcatgagatctctttggctaaacccagcctytgttgacagggacactcctcagtctttatgccacctggtttctgaacagcatgtggactgtggaccacaccctccctgagacactcctcttcactcctgc

SEQ ID NO: 15432 - DNA, 201 bp, Homo sapiens
tcctgatctgcctaaaaaaacatagtctttctaaactcagctcaaaggtgaccaccccctccataaagtcttttccggatggcacccccaattagttggaycatgccctcctcagtgcccccactacgcctggacattatgaccccactatagcatttgcttggttatgtgcatgtctgttcttttagactaaaccccatg

SEQ ID NO: 15433 - DNA, 201 bp, Homo sapiens
ttgtaccccagcccaacactcacccacatgccagccttgctgtattgcttgaggcttccccacctctttatacctctttatacctctgtatctctgcacaygcagtatcctctacccagaacacatttcccactcctgatctgcctaaaaaaacatagtctttctaaactcagctcaaaggtgaccaccccctccataaag

SEQ ID NO: 15434 - DNA, 201 bp, Homo sapiens
caggtatccaacagagacaatcaaagtttcaattccataaggctgttatgaggattcaatgagacggttctagtaaaatgcttagaacagtgcctggcacrtagtaaaggttcaacaaatatcagctatatttataccatcagttaatctacagtgagtcttttgggcaagtagtacccagtctcacagggttattgtggg

SEQ ID NO: 15435 - DNA, 201 bp, Homo sapiens
gccaaaattgcagcaaatgcattgagatgtgctctactttaagaaaacccattaagcaaatattccaacctggacccaacttccatttcaaatacacccaytgaaaaaagcaaggaaataaaaggccgctattccaaaagagatagtgaatggaagccaatttataccccaacaaacgcactcctgaccccaccccaatcc

SEQ ID NO: 15436 - DNA, 201 bp, Homo sapiens
gggattttcttgagttggataatttgagttctgttaaataaagtattgtttactaataaaactaataaaaaattgcctgtattaggcaggggaggctaacygttgtgacaatcaacccttaaatctgagtggtttaacactaatacaataagaatgtgtttctcactcacattgcaatccaatgcagttggcatttgggcg

SEQ ID NO: 15437 - DNA, 201 bp, Homo sapiens
ttaaatccttagcaatcagaaacgcttgcttcactagattttgctaactgccagtcatgttgaactgaattaatatgtcccttcttgtgaaactattaagktaaataattaacaataaagcttcctcttataaaggaaaaaaaagagtaaaggcagagtggctacaagagcctgatggtttgcaggaagatgagactggag

SEQ ID NO: 15438 - DNA, 201 bp, Homo sapiens
gcatcctgtgtggacactgatgtcacttggttgagcccctgatgaaaaggtaagagtgcatgtccttcttggggaccagcaaggaggtcagggaaacctgraagaaaataatacgtaggaccagaccctctctatcaggtgaaattgacagggaatccactctctgcagccacaccccaaagtccaggcagacagggagac

SEQ ID NO: 15439 - DNA, 201 bp, Homo sapiens
cagagagtcccaacatggctcaacctgtgtctattccctaaagaaggctgaatcctactgggccagggaggggggtggctgggaaggagctatcttccccmaaccccaaactgtcaggggttatggtcaagcaaacaacattaagcatgtccatttttaacttggacactttcacttcgattcatttccaagttctattgt

SEQ ID NO: 15440 - DNA, 201 bp, Homo sapiens
ccaggcaaacagggtctggagtggacctccagaaaactccaacagacctgcagctgagggttctgacagttagaaggaaaactaacaaacagaaaggacakccacaccaaaaccccatctgtacgtcaccatcatcaaacaccaaaggtagataaaaccacaaagatggggaaaaaacagagcagaaaaactgaaaattct

SEQ ID NO: 15441 - DNA, 201 bp, Homo sapiens
ggcccttctctcagcaccgcacggccctttctcacctcctggtgtccatgcacgtgcacgctacacacactacccacagcataccccaccccagtctgcaygcacatgcaccaaacctacaggttcatgcacccacggtggtccaggaccacacacacaaatgcacacctctacagccccacgttccaatcacacagctag

SEQ ID NO: 15442 - DNA, 201 bp, Homo sapiens
tatgagctgttattcccagcttatagacagggaaactgggccaataaatgagacagccagccccaaactgtctacctttggcacacagctaagtcttttarccacaccatgctactcccaaatattgacaaagaagtcactgtgttccattgtgccgacactctcctaggacattccattcagtctgaacagtaaatctgt

SEQ ID NO: 15443 - DNA, 201 bp, Homo sapiens
tactgcctgcagttgccctcaggtgttctgcttttattctgcccaggagaacaaggcaagctctgaggaactcagagatagaggaacctagacatggaacycaaaggccttctcctgggcagatgccgtgaggaaccccaggtgctcgggaaggaaggtcagctcagcaaatcgaagtggaaattaccaggcctggggaaa

SEQ ID NO: 15444 - DNA, 201 bp, Homo sapiens
atcaatcaatcaactaaaagagctattatttgtctggtagcatgcccccagtatactgtaaactcttacgggaaaagattaggtcttacagttcttagatrgaatgaaggatggatcgaatattgtgcaatgatctctgagggctaacttaaataatttactgtccatttaaattcttagccttcagatatggtgtaactt

SEQ ID NO: 15445 - DNA, 201 bp, Homo sapiens
ttctgctcattaatttctttctaagagcaatcccagatgggaactgtatcgattcctggtgagtcattcattcgctggccagtaaactttatagagcgtcytaggctaccagccctgaacacccagcacattacagtggggatgtcaggctctctgacagcagggtataaggagcttggaaaaggttcacagagagtccca

SEQ ID NO: 15446 - DNA, 201 bp, Homo sapiens
tccttctgatgacagcagctcactggcttgaagacaccagttcaatggggtattatattcctacataatttaatagcctattctgctcattaatttctttytaagagcaatcccagatgggaactgtatcgattcctggtgagtcattcattcgctggccagtaaactttatagagcgtcctaggctaccagccctgaaca

SEQ ID NO: 15447 - DNA, 201 bp, Homo sapiens
gaagtggtgactgagcagctgtagtcccagctactcaggtggctgagatgggatgatcacttgtgcccaggagttcgaggccgcagttagctatgactgtrccactgcactccagcctgggtgacaaaccaagactttgtctcaaaaaatatatatgttcaatcattttcaataaatacagagcccctattatgtgccatt

SEQ ID NO: 15448 - DNA, 201 bp, Homo sapiens
aaaaaaaaaaaatagcaggaagtggtgactgagcagctgtagtcccagctactcaggtggctgagatgggatgatcacttgtgcccaggagttcgaggccrcagttagctatgactgtaccactgcactccagcctgggtgacaaaccaagactttgtctcaaaaaatatatatgttcaatcattttcaataaatacagag

SEQ ID NO: 15449 - DNA, 201 bp, Homo sapiens
agcttgcctagcttcaaaatatcacctgtgagcaatcaagcctgagcttgcccgtctttgtgctgatttcggatctccttagctagagatgctgccctacagtgcctatctgtcagggaagggttggagaggaaggacaagatacacactgcccaattttagataggcagcaatttgtggattctttgtgctgtctttaga

SEQ ID NO: 15450 - DNA, 201 bp, Homo sapiens
ttctgaggactgcctgggcatcatagtgagaccccaattctcaaaaaaaaaaaaatagcaggaagtggtgactgagcagctgtagtcccagctactcaggkggctgagatgggatgatcacttgtgcccaggagttcgaggccgcagttagctatgactgtaccactgcactccagcctgggtgacaaaccaagactttgt

SEQ ID NO: 15451 - DNA, 201 bp, Homo sapiens
gaacccagcttggccacaaactccctgtgagatccacacagatccacctgcctttcagcacctcggtggcacatctgtaaaacaaggagggtgggatcctstgtctcagaggtgagttgtgcacatttgttcacttcaccaagcatttttgagttcctactgcatgccaggcactgtgattataaacataaatgaacattg

SEQ ID NO: 15452 - DNA, 201 bp, Homo sapiens
ctgaattgtgtgcagtgtcaggcctagcaagtgaataataatcttgtcccccagccccagccacagaaagggggtcccaaggctgctcctgaggacagacmgggagccagcataccagcacacaccacttactaacactcgccagccacaaagacagcagttcaccctgtgaagcagggccttccattacctattcctagc

SEQ ID NO: 15453 - DNA, 201 bp, Homo sapiens
cttagaaactatctggtccagacccctgatttagtggagcagatacattaggctgagaggttacaattcctgccccaatagtgctcttctcacaccaccarccactacattgcattgctgacaccattgtgaagaagtggtcaaactgttggatgctagcttcccagccaataatacacagacagagatcccagagaggag

SEQ ID NO: 15454 - DNA, 201 bp, Homo sapiens
ttctcccttgagggcatttcaaagttctaagggaatactggggatggagctcaaccacaaatcagcaggcattaagttaagaaaccagaaatcagtattcrgggttgccagaaaggctgaaaattggaagggaaaatcctagaaaagaggaacccacagaggaggagccctcaaatttttacacaaatctaggttgaactt

SEQ ID NO: 15455 - DNA, 201 bp, Homo sapiens
caaatcagcaggcattaagttaagaaaccagaaatcagtattcagggttgccagaaaggctgaaaattggaagggaaaatcctagaaaagaggaacccacrgaggaggagccctcaaatttttacacaaatctaggttgaactttgaactgtatgtggatagggagagagtctaaaaagcccagggggatgacaacagttg

SEQ ID NO: 15456 - DNA, 201 bp, Homo sapiens
caggggatcccacatcacttctattttaccgcatctcaatggtgagaactagtcacgtgcctctcctagattcaaggagagctgggaaaagcagtcagccyaggaagaaggtgagaattccaatactggagaactgccctagtttatctgtgcagtgaactcactgttagcacatggcattttcttactgaagatgttctg

SEQ ID NO: 15457 - DNA, 201 bp, Homo sapiens
aaagactttccagccctgcacagggagggggacccaggttgagcccagtgactccctgagtcaaggacacagagctatgagtccagaaagaccgagacaascagagttcacaggacagagcaccagagaggagaggacttcacagagacagaactccagagatctgaaaaatcctccttgaaaattcagcatattcctcat

SEQ ID NO: 15458 - DNA, 201 bp, Homo sapiens
cctgcccgccctacatcacgccctaaaataaaagcaaccgtgtaacaagttgcaagcctgcaaaaggcttttcttcccatgccgtggcataattgatcacrcccatttctcatcagggtcaataaataggacatcttaccccagtttttatatctgagtgatggtttatgagccaagtgactgaagtctaaataacgaagc

SEQ ID NO: 15459 - DNA, 201 bp, Homo sapiens
accttgcagcctcttcctctccttgccttcctgacaaagagtcaccaaaaagttctcggtccctgatgtcagttacacacagtcaactgcagcctgaaaayattaaatggaaaattccagaaataatcagttttcagttgtgcaccattctgaatagcgtgatgaaatctcgcaccatcccacttcatcccacccaggacg

SEQ ID NO: 15460 - DNA, 201 bp, Homo sapiens
agataaaattattctttattttacctccccactaccttgcagcctcttcctctccttgccttcctgacaaagagtcaccaaaaagttctcggtccctgatrtcagttacacacagtcaactgcagcctgaaaacattaaatggaaaattccagaaataatcagttttcagttgtgcaccattctgaatagcgtgatgaaat

SEQ ID NO: 15461 - DNA, 201 bp, Homo sapiens
gtagataagagtggatgaacagataagagagccagcacagaattctggaattcggggaaaattaaatgagtgagtaaatatatgtgaaactgcaaagctgsgatattcatgcggtatggggacagcaccaagctgtcttcaacgttgacatcaccaatcagactctttgctcaaaccatgattatttatttatttatttat

SEQ ID NO: 15462 - DNA, 201 bp, Homo sapiens
aggcctattcacacctccagataccacccaaaggtcatggcctttaagaagactttgctgtcttatcctgccaccttcctaggaatagttagctgctccayacaatattttgtacattcatttattccctcagcaaatattccctgagcactgaatgtgctggaaaaattaagataagcgagacctggcccctgtcttgga

SEQ ID NO: 15463 - DNA, 201 bp, Homo sapiens
gcaccgtgcaccagctcctttatccaggctgcctcatcacagccaccttgcaagataggcttccctgtgcccatcttatacatggggaaactaaggcttgstaagggagagatacaattcaaaccccgacctttcagattccaaagcctgtgctcttttcaccaccccatgctgcttctgagctcgcaggccagcaaaggg

SEQ ID NO: 15464 - DNA, 201 bp, Homo sapiens
tcacacctataatcccagcactttgggaggctgaggtgggaggatcacttgacttcaggagttcgagaccagcctgagcaacacggcaaaaccccatctcwgaaaaatacaaaaaattagccaggcgtggcagtgcatgcctgtagtgccagctacttgacaaaacaaaacaaaatttttgcatataatttcaggagggtt

SEQ ID NO: 15465 - DNA, 201 bp, Homo sapiens
caatgatgcagaaccatccaccaaacaccccatgttctttgatggcagcctctgtgcatctgctccctctgttccatctgcccttccttgtttcatctacytggcaaaggcctattcacacctccagataccacccaaaggtcatggcctttaagaagactttgctgtcttatcctgccaccttcctaggaatagttagct

SEQ ID NO: 15466 - DNA, 201 bp, Homo sapiens
gttacgtctgaggaaaccggaatccgtgtacagggagttttctaacaaattctaaaagggttcgagtgtcagaaagaccacaaataggcacctccctttcwcatctccttctatccttcatgcactccaatgaaaaacacttttttatcaaatacaatctgccctgatttccccaaatcctagtgttaattagtgttaaca

SEQ ID NO: 15467 - DNA, 201 bp, Homo sapiens
tcctcatctgcctgtggttgactaggatggaccctacatcccaatgatgcagaaccatccaccaaacaccccatgttctttgatggcagcctctgtgcatmtgctccctctgttccatctgcccttccttgtttcatctacctggcaaaggcctattcacacctccagataccacccaaaggtcatggcctttaagaagac

SEQ ID NO: 15468 - DNA, 201 bp, Homo sapiens
aagccagttataaaagaaaatgttaaaagcgtccagagaaaaataactcattacctacagaggaataaagataaggaagacagtagattcctcaccagaawcaatgcaacagagaagacagtggagcaatatctgtcaagtattggaagaaaaaaaaaagctgtcaatctaaaaatctatatctagtaaaaatgcctccaa

SEQ ID NO: 15469 - DNA, 201 bp, Homo sapiens
ttaaaatttggctcaaatgtcatctttcatctggtactgatcacagctgtttagccattttataaaatgatattctgcattaaaaacttgttgtagggcckggcacggtggttcacgcctgtaatcccagcactttgggaggccaaggcaggagaattccttgagcccagaaattcaagaccagcctgggcaacattatga

SEQ ID NO: 15470 - DNA, 201 bp, Homo sapiens
cctttctctctgcactctctctctctctctctctctttctgtccttgaatcctggtgttcatgatgtgtaaacaaatcattcactgtccagagacctacaytctttgaaggagcttagcattgaatcagttgccaataagacaaatatgaggatgtgaacaattctgtccagcaccagtttgagatgctactatcagggcg

SEQ ID NO: 15471 - DNA, 201 bp, Homo sapiens
ccacactgcacagttgtaactcaggaagactctctggagagagcgcacagggagctaatccagggagggactggctggcaggctggtcttttcctaccatkagcccaaagaaataaggctactcagtactgtggagaacaaatcagcctaggagtccagaggcctggattctagtcctgctgtgtcatgggactttggata

SEQ ID NO: 15472 - DNA, 201 bp, Homo sapiens
atcaaatatttattcaaccactttgcttatacttcttggtggtcctgggaatgaatctagagattctgggcaattagttggcccaccaacgttattgttcrggaaatttcctggaaatcttggccctgggtttatatttgacagcctcagaaacaccttggggagccagggttgaatgtcccttcccagagacttcccact

SEQ ID NO: 15473 - DNA, 201 bp, Homo sapiens
ggttacaattcctgccccaatagtgctcttctcacaccaccagccactacattgcattgctgacaccattgtgaagaagtggtcaaactgttggatgctascttcccagccaataatacacagacagagatcccagagaggagacttcattggaaccataggtcattggagtgtgtctcttcatgactgatgcaaaggcat

SEQ ID NO: 15474 - DNA, 201 bp, Homo sapiens
caatgtcccccagctaaggtggtgtcagggccaagattcaaagccagcttaatcttgaccacggagcacaggctcttaaatagtcattcccagcggaagaygagccaggatctcagacacacgggtcagtgaggaaagggaggaggccaggccaggcaaggctgaggatcctgacctccacctgggcaggaaccctcaggg

SEQ ID NO: 15475 - DNA, 201 bp, Homo sapiens
caaatctcccatccttttccagtcggcctcacctctgagcattgacaaaggaggcccaagttccaacttcaggtctgtcattgaacagctgtgcctcggtytaccagcctgccttacctacctcccaggggttattatcaggataaataagcttgtgtatatgaaaatactctgtaaaagttcaatcacttatattatctc

SEQ ID NO: 15476 - DNA, 201 bp, Homo sapiens
aacttgctatagttcacagaactgaactagacttcaacttgcctgatcccacagccccaagtatttaatcaatttgtctaggctctctctggttctgatgmtccaggtacaagaggtctgcatttctgcctctctcagaaagtccgactcacttgtctgggaaacaggcactctatctctggggagatccttaaagaggtg

SEQ ID NO: 15477 - DNA, 201 bp, Homo sapiens
aaggaaaccctgggtggctggagaagagctgaaaacgtgctcagctccttctgatgacagcagctcactggcttgaagacaccagttcaatggggtattayattcctacataatttaatagcctattctgctcattaatttctttctaagagcaatcccagatgggaactgtatcgattcctggtgagtcattcattcgct

SEQ ID NO: 15478 - DNA, 201 bp, Homo sapiens
atcccagatgggaactgtatcgattcctggtgagtcattcattcgctggccagtaaactttatagagcgtcctaggctaccagccctgaacacccagcacrttacagtggggatgtcaggctctctgacagcagggtataaggagcttggaaaaggttcacagagagtcccaacatggctcaacctgtgtctattccctaa

SEQ ID NO: 15479 - DNA, 201 bp, Homo sapiens
gacaggcaacgggctggagatcatgctggacattcagcaggatgagtacctgcccatctggggagagacaggtgagctgggcacagggaccgggcattggrtgatggtggagggttgcaggcctgactctgaaaggctggtgagctgtcttggcccaccctgtgagggactgctctccagcaaggggtttgtgacatgctg

SEQ ID NO: 15480 - DNA, 201 bp, Homo sapiens
tattaaaagcatccagattaaatccttagcaatcagaaacgcttgcttcactagattttgctaactgccagtcatgttgaactgaattaatatgtcccttyttgtgaaactattaaggtaaataattaacaataaagcttcctcttataaaggaaaaaaaagagtaaaggcagagtggctacaagagcctgatggtttgca

SEQ ID NO: 15481 - DNA, 201 bp, Homo sapiens
cagcccctacctgttgccacccctgtgccttgagtccattgactttggactctagagtctggcactcaccatacccaggcttaccaggctgctgagacagygagggcttccaccccaggaggactgactgcaaactccaggatctctcccaccacccctctctcacgaacaccccgttgcagggacgggagtgtggccatt

SEQ ID NO: 15482 - DNA, 201 bp, Homo sapiens
gaggtcttcctcaggctgagcaggcttacccgatagcattttctttcctaacattcccatctggttcaaaaagccttgccctgatccttgggaccactagsgggcaacagtgagcaggagacagatagtccagtggcacaaaagagcacaggcatgaggagtctctttccccttcctcccttccctgtcccacccaccttg

SEQ ID NO: 15483 - DNA, 201 bp, Homo sapiens
tcaccttgttaacctggctctagtcacacaggcttccctgctgcttcttgaatattccaggaacaccctcactttggggcatctgcatttgctattaaccrctatgagaattctccttgctcacatatccacatgactcactgcctccctgcatcaactcttcactcagatattaccttctcaatgaggtctcccctgact

SEQ ID NO: 15484 - DNA, 201 bp, Homo sapiens
taccccacccacacctgagcagaagtttgaggggatcccttcctggagactacaagctcaagataaaagatccacagataatgacagtcaggaagccttaraaggcctagttaggtcaccctagaatgaagtcccttgaggagtgccccctcaacacaaggaagcctttaaggaccttttacccctgaatgagccaccaaa

SEQ ID NO: 15485 - DNA, 201 bp, Homo sapiens
gctgtggctcaggcctgtaataccagcactttgggaggccaaggcgggcggatcacgaggtcaggagatcaagaccatcctggcgaacatggtgaaacccygtctctactgaaaatacaaaaaattagccgggcgtggtggtgggcgcctgtagccccagctactcgggaggctgaggcaggagaatggcgtgaacctgga

SEQ ID NO: 15486 - DNA, 201 bp, Homo sapiens
gcatctaaatatatatatattttgtttttatatatatattttttgtttatatatttttgtttatatatatattttgtgtatatatatattttgtgtgtgtrtatatacatatatatatatactgtaagcagagacattgagtgactttcccacagcctcatggctaagaagtagtagaataggatttgaatccacatcttc

SEQ ID NO: 15487 - DNA, 201 bp, Homo sapiens
agtgagccaagatcacgccattgcactccagcctgggcaacagagtgagactgcatctaaatatatatatattttgtttttatatatatattttttgtttwtatatttttgtttatatatatattttgtgtatatatatattttgtgtgtgtgtatatacatatatatatatactgtaagcagagacattgagtgactttc

SEQ ID NO: 15488 - DNA, 201 bp, Homo sapiens
agaggttgcagtgagccaagatcacgccattgcactccagcctgggcaacagagtgagactgcatctaaatatatatatattttgtttttatatatatatwttttgtttatatatttttgtttatatatatattttgtgtatatatatattttgtgtgtgtgtatatacatatatatatatactgtaagcagagacattga

SEQ ID NO: 15489 - DNA, 201 bp, Homo sapiens
cacctttcatccaagagctgggctttggggtggctccagggttccagacctttgtggccacacaggagcagagggtaagttccctgggctcccaggattgrtggtcctcagcctcccccgaccccctgcagaggcacaaggaggagaaatggaattcccactcggtcaagggctttactgtgaaactagagaaagatgttg

SEQ ID NO: 15490 - DNA, 201 bp, Homo sapiens
tcgagaccagcctggccaacatggagaaaccccgtctccactaaaaataacaaaaataacaacaacaacaaaaaaaaacctagccgggcatggtggtgcaygcctgtaatcccagctactcgggcagttgatgcaggagagtcgcttgaacctgagaggcagaggttgcagtgagccaagatcacgccattgcactccagc

SEQ ID NO: 15491 - DNA, 201 bp, Homo sapiens; identical to SEQ ID NO: 1166

SEQ ID NO: 15492 - DNA, 201 bp, Homo sapiens
ctgaggcaggtggatcgcctgaggtcaggagttcgagaccagcctggccaacatggagaaaccccgtctccactaaaaataacaaaaataacaacaacaamaaaaaaaaacctagccgggcatggtggtgcacgcctgtaatcccagctactcgggcagttgatgcaggagagtcgcttgaacctgagaggcagaggttgc

SEQ ID NO: 15493 - DNA, 201 bp, Homo sapiens
ataaggtgctttcccacattccagccactgatcctcatacactcctatgatgtagacagggcagttctagtcatttaacagattaactcattttaaaatgyggtaagcggctgggtgcggtggctcatgactataatcccagcactttgggaggctgaggcaggtggatcgcctgaggtcaggagttcgagaccagcctgg

SEQ ID NO: 15494 - DNA, 201 bp, Homo sapiens
tgttgaccaccatcaacacagaggacaccaaggagtaagttaacaaaagacaccctctttgggtagacccagccctatgggctcatggttagtgagtagamaatgactctatgaaaattatcaaaaatgtcccttcctccaggcagacaatgccccacaccaaggtgctccccttggtcacacatcttcatgtggggcacc

SEQ ID NO: 15495 - DNA, 201 bp, Homo sapiens
gtcacctcaaagctgcttatttcctaggccagtgggaggtgagtcccatgcgggtgagagagaagccaacacatctgttgaaggatgggaggtgggctctsgcaggtgagagatgcttgtctgtaaagccacctgaggaggcgcagacacacgtggctgcttggtcattgatcccgaggatgatggacacagccaggccta

SEQ ID NO: 15496 - DNA, 201 bp, Homo sapiens
cttgaggagattgaaatgaaatagaaaaagaaggatttttaaaatgaagaatgtagcaatgagacaacttccagtggcctaacatactggtatttagagtstttcaagaagtatggggcaggtgggagggcagaaacaaaaattttataaaatgatggccaaatcctttccaaattttatgaaaattataaatccacataa

SEQ ID NO: 15497 - DNA, 201 bp, Homo sapiens
tgtgagcaccgtgtcctatccctgtggcagaaggcctagtgactgacataacagaagagccaggtgggtatcaggtgagccaggtggatatctctccctgyctccctcctttttcctctctcctcatatatgctttcctgcccattccagaagcagaaaccacatactcttaggcagtttcatcatcttctcagcatccac

SEQ ID NO: 15498 - DNA, 201 bp, Homo sapiens
aacacataaaattgtgctcaaaatcatccgtcagggaaccacaaatacaaatgagatgcaaccatacacctacaaaaatggctaaaatcaaaaaggtggaygaagtccagatttggcatggatgtagagtaatgagaattctcagacactactggtggaaatataaaatagaagaaccactttggataacagttgggcagt

SEQ ID NO: 15499 - DNA, 201 bp, Homo sapiens
aactgatactcaaagaagttcactaacttgcccgaggtcaccaagctagcaggtggcaaggatgaatttcaagcttaggacatctgactccaacctcaacycagtccccagatgaggtgcttgcctacaggagtctcaagaagatgccagggagtaaatcagcttattaatattttgtaaagcttccaggaaatgacaaaa

SEQ ID NO: 15500 - DNA, 201 bp, Homo sapiens
aacataaagtttggatcccagatttcaccctggcagaatcccataaaagccacacatgttttatgcctgtaagcatccactattcccccactgaaaagatycaggaagaggacaataaaagatgaattttatggcaactgcttggtgtgcacagagcttcctgcgaggccatctcaggcgctgagggatgcagcagagcct

SEQ ID NO: 15501 - DNA, 201 bp, Homo sapiens
tcaatgattgaagaacaacataaggatgtccccaggcaggttaagggcaaacatcagcttctctctacaaaatgaaggcgactgttgagagaagctccagrcagtggagcaatgaaagacatgcaccagggtatttaatcacaaaagttctgcattccttgctctgttcataaatttaagcaattatcaaagcctccagtt

SEQ ID NO: 15502 - DNA, 201 bp, Homo sapiens
aaggctgggcatgatgactcacacctgtaaccctagtgctttaggaggcagaggcaggaggattgagaccctaacaacactccatctctaccaaaaaaaaagttcaaaaaattagctggctgtggtggcacatccctgtagtcctaactccttgggaggctgaggcgggaagatcgcttgagtccaggagttcaaggttgc

SEQ ID NO: 15503 - DNA, 201 bp, Homo sapiens
ctcatgaaagagtggagttcgaggttctgcatgggtcattctgctatctctcattctcaaattagaatagtagatttaaggtctatgattagacacaaagrcttaagagatcatggaagtcatctcatctaactgtacacccaatgcttgaatctctctctcttcccatcccagccaaatagttgtatagtttctacttga

SEQ ID NO: 15504 - DNA, 201 bp, Homo sapiens
gagactccatctcaaataaataaataaataaacaaacaaacaaacaaataaatttaaaatgtgattgcaaactttttttaatccatagaaggattggaackgagaacatctcccgaaaaggttaaacaaaaagacaaacaggtagaaagtgagagaaaaataagaaaatcagagggtccatccaggaagctattctagaac

SEQ ID NO: 15505 - DNA, 201 bp, Homo sapiens
agattcttcagctgagggtggaagttggactcaggaattttcttagaaagatggaaatgcaaccataaaaagaaaaagaggaaacggaggaggagaaggcrtgtggggagaaaatgcaggacagagatgcaatctggaatgaaaattgcccctttccagcttacagaggagtcaggactctccctctcagtactatgtctt

SEQ ID NO: 15506 - DNA, 201 bp, Homo sapiens
aacagacacttctcagaagaagacattgatgctgccaacagacacatgaaaaaatgctcatcatcactggccattagagaaatgcaaatcaaaaccacaaygagatatcatctcacaccagttagaatggtgatcattaaaaagtcaggaaacaacaggtgctggagaggatgtggagaaataggaacacttttacactgt

SEQ ID NO: 15507 - DNA, 201 bp, Homo sapiens
agcaaatattccaacctggacccaacttccatttcaaatacacccattgaaaaaagcaaggaaataaaaggccgctattccaaaagagatagtgaatggargccaatttataccccaacaaacgcactcctgaccccaccccaatcccctgcccttgtcactcatccaggaatgtctccattgccatgtaaatgtcatatg

SEQ ID NO: 15508 - DNA, 201 bp, Homo sapiens
cccatcccgcatggggacacaatgttgattttttttcttcctccagaagcttgcctagcttcaaaatatcacctgtgagcaatcaagcctgagcttgcccrtctttgtgctgatttcggatctccttagctagagatgctgccctacagtgcctatctgtcagggaagggttggagaggaaggacaagatacacactgccc

SEQ ID NO: 15509 - DNA, 201 bp, Homo sapiens
tttgcaatctactcatctgacaaaaggctaatatccaaaatctataaagaactcaaacaaatttacaagaaaaaaaacaaacaaccccatcaaaaagtggscaaaggatatgaacagacacttctcagaagaagacattgatgctgccaacagacacatgaaaaaatgctcatcatcactggccattagagaaatgcaaat

SEQ ID NO: 15510 - DNA, 201 bp, Homo sapiens
gcagtgaggcccaaaggatgggccttaatgaacaggtccccagggattaagccacatgattaaatgagcagcagagaccagaaagatatcagccacccaasacaagaatgccaaccacggcccttcaggggatggtccaggcagactttgctgcccctgcccagcccccatgcacttgtcagcctctggcctgaagtccct

SEQ ID NO: 15511 - DNA, 201 bp, Homo sapiens
cacagccaatatcatactgaatgggcaaaaactggaagcattccctttgaaaattggcacaagacaggagtgccctctctcaccactcctattcaacatastgttggaagttctggccagggcaatcaggcaagataaagaaataaagggtattcaattaggaaaagaggaagtcaaattgtccctgtttgcagatgacat

SEQ ID NO: 15512 - DNA, 201 bp, Homo sapiens
tggaaaaggttcacagagagtcccaacatggctcaacctgtgtctattccctaaagaaggctgaatcctactgggccagggaggggggtggctgggaaggrgctatcttcccccaaccccaaactgtcaggggttatggtcaagcaaacaacattaagcatgtccatttttaacttggacactttcacttcgattcatttc

SEQ ID NO: 15513 - DNA, 201 bp, Homo sapiens
agcaggcagatgtggaagatacaacagagcaagagaaagagttgctttgggtggggatggagagctgaatcttcagtgacaagtgggaagatggtcaggtrgacaaggtagaaagacattctgggcagaaggagatgcatttgtgcagagtgggtaccagtgatgcccaatccaggcagccccgcatggtgcctcgaggca

SEQ ID NO: 15514 - DNA, 201 bp, Homo sapiens
cagttgaggaacgaggagtcctggagcaggagaggaaaaggtggcaactgagctaagaggtgaagggcttccctggagtcagagtgagttgggtggccagyactgagtgggggacacccaaggaattcctgcacatgcagccatcagggccaaatcggacatatcccaggccaggcatttggcaaggaggggttgcccgaa

SEQ ID NO: 15515 - DNA, 201 bp, Homo sapiens
aaataataataaagactagaaaggaagaagtaaaactcggcaataaaagagaatgaactactgatacgtgcaaaagcatgaatgaatctcaaaaacattaygctgagagaaagaagccaaacacaaaagaatgcatactgtctgattctatttatatacaacactaacacaggcaaatctagtttataacaacagaaagca

SEQ ID NO: 15516 - DNA, 201 bp, Homo sapiens
taggaatagttagctgctccatacaatattttgtacattcatttattccctcagcaaatattccctgagcactgaatgtgctggaaaaattaagataagcragacctggcccctgtcttggagcactcacagaatgaagtgggggatttggcattttttgtcacacttccaagggtacaacagtcccatgtaggcttactt

SEQ ID NO: 15517 - DNA, 201 bp, Homo sapiens
caattttacctatggggaaactgaggcccagggagggaaagctaccttggtaactggtttggcagcgacagagtccagaagtctagtcatttgagccccaratttgggccagccctgggaaagagtaatcagtcacctacctacctccccaaaaagcttaaaggctggcaggagatgggcatgtcaggcaataaatacaat

SEQ ID NO: 15518 - DNA, 201 bp, Homo sapiens
ctacgtgacaaatgcacaagcttcagtaaccgattcgatcaactggaagaaaaggtatcaatgattgaagatcgaatgaatgaaatgaagcgagaagagargtttagagaaaaaagaataaaaagaaacgaacaaagcctccaagaaatatgggactatgtgaaaagacaaaatctacgtctgattggtgtacctgaaagt

SEQ ID NO: 15519 - DNA, 201 bp, Homo sapiens
aatgtgctggaaaaattaagataagcgagacctggcccctgtcttggagcactcacagaatgaagtgggggatttggcattttttgtcacacttccaaggrtacaacagtcccatgtaggcttacttcatgtggatcactgctcctgacacctacctctccagaactgccttcttttgcctctctcagcccttgtctctta

SEQ ID NO: 15520 - DNA, 201 bp, Homo sapiens
aaaagaataatttttcaggtctaaaaattaagaatccatgcagttagtgctcttcaagttataagctaaatttccatacaacagatatcagaggtgaattrcaatgtgctatgtagttaatagaagccatcatgctaactcagaacagacggccgcctgggattttcttgagttggataatttgagttctgttaaataaag

SEQ ID NO: 15521 - DNA, 201 bp, Homo sapiens
cctttgtgaaaatcatggatccttgaataattgaaataatgtctgccctgacccaaggttgggtgaatttcacagactggattttcttaaggcagacaaartttttctgtcctcttttgccaatgaggatctctgctatattgactgccttctatatgtcatataggcagtgcgctagattctgttcttatatctcataaa

SEQ ID NO: 15522 - DNA, 201 bp, Homo sapiens
acttcaaagaccacttcatcagagcagcaggaaagacatctgagcattttgtagttaaagtcaatattgcttacgatttcttccagtgctctttccaatgyccctgagttagggaagagggaagtgggataggcaacctaatatttttgagcacagactatatggcagaccctatacatgcaataaagacactgaggccta

SEQ ID NO: 15523 - DNA, 201 bp, Homo sapiens
agagaagggatgccgccaatacgttttgtcaaccaaacttgccctctgttactacgtctccagcatagaggtgtgttttgagaggcgagtgggagctgagraatggcctctcagtttagatctgagatctgaaaaaatttcccagcggccacgttcaggtataaagaaaacctcagcagaaggctcagcaggttacatcgt

SEQ ID NO: 15524 - DNA, 201 bp, Homo sapiens
caggtataaagaaaacctcagcagaaggctcagcaggttacatcgtctcagttgaagttcctgaggtggggctcaggtcttccgttgaggtcttcctcagkctgagcaggcttacccgatagcattttctttcctaacattcccatctggttcaaaaagccttgccctgatccttgggaccactagggggcaacagtgagc

SEQ ID NO: 15525 - DNA, 201 bp, Homo sapiens
ctgggatctgcctgggacccaccttgcatttctcatcctaatgggaaacacttcacccacttcgctgggatccaaaaggatgatgttctgggaagactctsttatttggtgcctattaagagggcaggtggaaacttctggtccagcaaccaaggcagcatcctggtatccagaagcatccagtgtttggggaatgttcat

SEQ ID NO: 15526 - DNA, 201 bp, Homo sapiens
gagccaggtggatatctctccctgtctccctcctttttcctctctcctcatatatgctttcctgcccattccagaagcagaaaccacatactcttaggcartttcatcatcttctcagcatccactcacagcagcatctaagtcaaagcctcagagtgtgggatgcagacacaaaggagggaagggcccagggagcttggc

SEQ ID NO: 15527 - DNA, 201 bp, Homo sapiens
tactcatctctatagccccagtgtctggccctgtgcctgacgcatcctaggaattaatgaagtctttatatgattaggttggaccactcagctggttgggytaacaaaagcctttctgaggcccccaacaaggtaacagcccagggcgcacccccactcctgtctctcacactttcaaaggacacgtccatcaggttgagc

SEQ ID NO: 15528 - DNA, 201 bp, Homo sapiens
tgtaatgcagatcctcttgccattcagtgcccagggccctaatattatagcagacagccctaatttagctcatctctgctgtggcttccattcccttcccrcctccttaaacacacacactcacacacatacatacacacaccattcacactgggcctgttgatgttgtggaagtaaataaataggcaagttcaaaatcta

SEQ ID NO: 15529 - DNA, 201 bp, Homo sapiens
gttctgagaggaggatggcaattaggacaggcaaagagaccagccaccatactgccatcttgaatgaaggactttcataagtgctttcctaacctaaagaytcagactcaacaaacgcatgtaaacactgtgcaaggtgcatccatgtctattgtctaatttaactctcaggaagtcctaggagttgcaaattattatctc

SEQ ID NO: 15530 - DNA, 201 bp, Homo sapiens
aaatcagtgaatccaggagctggttttttgaaaagatcaacaaaactggtagactgctagcaagactaataaagaagaaaagagagaagaatcaaatagaygcaataaaaaatgataaaggggatatcaccaccgatcccacagaaatacaaactaccatcagagaatattataaacacctctacgcaaataaactagaaa

SEQ ID NO: 15531 - DNA, 201 bp, Homo sapiens
agtgtaaaagaacagaaattataacaaactgtctctcagaccacagtgcaatcagactagaactcaggattaagaaactcactcaaaaccgctcaactacytggaaactgaacaagctgctcctgaatgactactgtgtacataacgaaatgaaggcagaaataaagatgttctttgaaaccaacaagaacaaagacacaa

SEQ ID NO: 15532 - DNA, 201 bp, Homo sapiens
actccaactgtaagggtcaatattatttcatgtgacagtaggaaagaaaaacactactaattaaactaaacacaatgctaagaggccattaatggtaagaygttatagacatgttaggatatagaaaattatgcatcttaaaatgatgaaacatagaaattctcaaacagtgagatatgagctgttattcccagcttatag

SEQ ID NO: 15533 - DNA, 201 bp, Homo sapiens
ttaaaccaacaaagatcaaaagagacaaagaaggccattacataatggtaaagggatcaattcaacaagaagagttaactgtcctaaatatatatgcacccaatacaggagcacccagattcataaagcaagtccttagagacctacaaagagacttagactcccatacaataataatgggagactttaacaccccactgt

SEQ ID NO: 15534 - DNA, 201 bp, Homo sapiens
tttaaaccaacaaagatcaaaagagacaaagaaggccattacataatggtaaagggatcaattcaacaagaagagttaactgtcctaaatatatatgcacccaatacaggagcacccagattcataaagcaagtccttagagacctacaaagagacttagactcccatacaataataatgggagactttaacaccccactg

SEQ ID NO: 15535 - DNA, 201 bp, Homo sapiens
tagatggatgaacagatggacagataatgggtgggtgggtggatggatggacagatggaaacaaaactgcagaggctcttatgacatcaaagcttaaaggrttctcgcagagctccagaggcatatctagagccagcaaggcccaagataaaagtcgtgttagaatgagtcaagttatagtctttcaaaaaaaaatcctgt

SEQ ID NO: 15536 - DNA, 201 bp, Homo sapiens
gactttaaaccaacaaagatcaaaagagacaaagaaggccattacataatggtaaagggatcaattcaacaagaagagttaactgtcctaaatatatatgsacccaatacaggagcacccagattcataaagcaagtccttagagacctacaaagagacttagactcccatacaataataatgggagactttaacacccca

SEQ ID NO: 15537 - DNA, 201 bp, Homo sapiens
cagactttaaaccaacaaagatcaaaagagacaaagaaggccattacataatggtaaagggatcaattcaacaagaagagttaactgtcctaaatatatawgcacccaatacaggagcacccagattcataaagcaagtccttagagacctacaaagagacttagactcccatacaataataatgggagactttaacaccc

SEQ ID NO: 15538 - DNA, 201 bp, Homo sapiens
gcaatagtgcccattatagctactgactattgtatgcctggtacgtgtcaggcactgtcaggcactttgtatttgaggcagttgaggcccagagaccaaartcccacagctgctgagtgtcagagctgccctccaagcacttctaaccactgccctactctgcctctctttcctatagcccgagggcagcccctctgtggc

SEQ ID NO: 15539 - DNA, 201 bp, Homo sapiens
aagacagtgattttattattgaattataccagtggattagaaagttcttccttatgttgagccagaatgtatccaatgcttataatgtgcctacctaccasagtgcctgcaacaaaaataaacgttattatcatcccacgttccgtattacaactattcttgtgtctatctttcccttgggatgccagaaaacaaatctaa

SEQ ID NO: 15540 - DNA, 201 bp, Homo sapiens
ctggaaaaattaagataagcgagacctggcccctgtcttggagcactcacagaatgaagtgggggatttggcattttttgtcacacttccaagggtacaayagtcccatgtaggcttacttcatgtggatcactgctcctgacacctacctctccagaactgccttcttttgcctctctcagcccttgtctcttatagtct

SEQ ID NO: 15541 - DNA, 201 bp, Homo sapiens
taaagggatggagaaagatctgccaagcaaatcgaaaacaaaaaaaggcaggggttgcaatcctagtcactgataaaacagactttaaaccaacaaagatsaaaagagacaaagaaggccattacataatggtaaagggatcaattcaacaagaagagttaactgtcctaaatatatatgcacccaatacaggagcaccca

SEQ ID NO: 15542 - DNA, 201 bp, Homo sapiens
atggtatttaaatgctcaataattgtttgttgattgagtaagtaaatgaatgagttactgagtctgttgaggctgactgccgccccctccttcctgtcttrcagctcacatacctgcccccaccgtggggtgagtgccgatcctcagagatgggcctcgacttttttcctgtttacagcatcaccgcctgtaggattgact

SEQ ID NO: 15543 - DNA, 201 bp, Homo sapiens
gatcgaatgaatgaaatgaagcgagaagagaagtttagagaaaaaagaataaaaagaaacgaacaaagcctccaagaaatatgggactatgtgaaaagacmaaatctacgtctgattggtgtacctgaaagtgacggggagaatggaaccaaattggaaaacactctgcaggatattatccaggatattccccaacctagc

SEQ ID NO: 15544 - DNA, 201 bp, Homo sapiens
gagagcaagtaccctgttttactcatctctatagccccagtgtctggccctgtgcctgacgcatcctaggaattaatgaagtctttatatgattaggttgraccactcagctggttgggctaacaaaagcctttctgaggcccccaacaaggtaacagcccagggcgcacccccactcctgtctctcacactttcaaagga

SEQ ID NO: 15545 - DNA, 201 bp, Homo sapiens
ctagctatttgagaggctgaggtgggaaaactgcttgagctcaggattctgaggactgcctgggcatcatagtgagaccccaattctcaaaaaaaaaaaaatagcaggaagtggtgactgagcagctgtagtcccagctactcaggtggctgagatgggatgatcacttgtgcccaggagttcgaggccgcagttagctat

SEQ ID NO: 15546 - DNA, 201 bp, Homo sapiens
tatgattaggttggaccactcagctggttgggctaacaaaagcctttctgaggcccccaacaaggtaacagcccagggcgcacccccactcctgtctctcrcactttcaaaggacacgtccatcaggttgagcactatcttgtcaatgatagagccttgctgagcaagctgaacactccttttgactatgctgtctgaaaa

SEQ ID NO: 15547 - DNA, 201 bp, Homo sapiens
ggtcctgggaatgaatctagagattctgggcaattagttggcccaccaacgttattgttcgggaaatttcctggaaatcttggccctgggtttatatttgwcagcctcagaaacaccttggggagccagggttgaatgtcccttcccagagacttcccactgtcaccaagaacctctttcactaccagctggaaaccatca

SEQ ID NO: 15548 - DNA, 201 bp, Homo sapiens
ggactcacctactttatcttactcaggggacaagttaataaatcagaccatgctttggttggtcctgctgcccagtgtcacgttatcttttgattcatgggcagttcactgtctgaactccaaatggtgtggccttggtttctgacttttttttaaagggggaaaaagggcctatagaggacacttccatgcataggccaa

SEQ ID NO: 15549 - DNA, 201 bp, Homo sapiens
ctttctgaggcccccaacaaggtaacagcccagggcgcacccccactcctgtctctcacactttcaaaggacacgtccatcaggttgagcactatcttgtsaatgatagagccttgctgagcaagctgaacactccttttgactatgctgtctgaaaaacagactgcaaaggagactttttgcctccgttcccaaggcagt

SEQ ID NO: 15550 - DNA, 201 bp, Homo sapiens; identical to SEQ ID NO: 1169

SEQ ID NO: 15551 - DNA, 201 bp, Homo sapiens
tgtgcataatgcagctatttacaaatatgttttatggtttggacccgactcctaatagacagacaggctcacataaaggaggaggggtccagcctgctccrtgtagccaggcacagcctcctacccggactgcccctgtaataccttccttagtggacagcctccatcagaccctacttctgctcctagcacttgcaagga

SEQ ID NO: 15552 - DNA, 201 bp, Homo sapiens
catttgctgtgtatctcatcaaatctaaggtaacaactccaactgtaagggtcaatattatttcatgtgacagtaggaaagaaaaacactactaattaaaytaaacacaatgctaagaggccattaatggtaagacgttatagacatgttaggatatagaaaattatgcatcttaaaatgatgaaacatagaaattctcaa

SEQ ID NO: 15553 - DNA, 201 bp, Homo sapiens
cagaccctacttctgctcctagcacttgcaaggacatagcaagaggcctatggctcagaagtttccctttttggaaaagcaacgtttgaaagatttttgtstgtttttgaagttagaattttttttttaaattacctgggattagagaccacagttcccccaaatcattgaagagggcagggcataggttctagcagtgcc

SEQ ID NO: 15554 - DNA, 201 bp, Homo sapiens
gtcttttaaccacaccatgctactcccaaatattgacaaagaagtcactgtgttccattgtgccgacactctcctaggacattccattcagtctgaacagyaaatctgtggggccgtactgctgtctcccttctacagacaaagggacagctgagaattagaatccagacctgcctaataccaaagtccacgctcttttca

SEQ ID NO: 15555 - DNA, 201 bp, Homo sapiens
gactgtctcgcccctttcctgaacacatttctggtgcttactgatggcagagcagggagaggaatctgggcttagctatattcagaacctcagtgaggagraggacaagcagggcttcccacctgtattagtccatttctcactgctgataaagacatacccgagagtgggtactttataaagaaaaaggtttaagggact

SEQ ID NO: 15556 - DNA, 201 bp, Homo sapiens
gggagacccccgtaccagggacaaagatccaaacccaacctggaactccaggccctgggatgggcccacaggacccagggagaactcccatccagggagtrctggggaaactagtcaggtttttaaggcccagggctccagacctggagcagatttcaaggactcaactgcaccacctgtgtaatctgtagcagatgacgt

SEQ ID NO: 15557 - DNA, 201 bp, Homo sapiens
tgctggctctaagccagggtcatgctggcctcgtcttgatcggtttctccagacaaagaaaaggaagaaagcatgttctgacctaaacatttagaccaccstaatcatctgagagtagcccatccacctaccaccatctgtcctggatggcagtaagtgagatatgtagactcaaagactttgaagaccctggagcttaga

SEQ ID NO: 15558 - DNA, 201 bp, Homo sapiens
agacccccgtaccagggacaaagatccaaacccaacctggaactccaggccctgggatgggcccacaggacccagggagaactcccatccagggagtactrgggaaactagtcaggtttttaaggcccagggctccagacctggagcagatttcaaggactcaactgcaccacctgtgtaatctgtagcagatgacgtggt

SEQ ID NO: 15559 - DNA, 201 bp, Homo sapiens
aggatcctgacctccacctgggcaggaaccctcagggatacccccaagcctaatggaatttggtccatgtgagcaaatgtccaatccctgtggcaccatgraacagccctgtgagcaccgtgtcctatccctgtggcagaaggcctagtgactgacataacagaagagccaggtgggtatcaggtgagccaggtggatatc

SEQ ID NO: 15560 - DNA, 201 bp, Homo sapiens
tgggcccacaggacccagggagaactcccatccagggagtactggggaaactagtcaggtttttaaggcccagggctccagacctggagcagatttcaagkactcaactgcaccacctgtgtaatctgtagcagatgacgtggtctctcttgactgaatttcctcttctggaaaatgagagtaataaccataacatgcatt

SEQ ID NO: 15561 - DNA, 201 bp, Homo sapiens
attacatctaggaagggcagcatctgcccaattcccattcaaagttttcatgatgtaccccagagactttaaaaccaatgctggctagagcactggctcarccatatacaactgaaatcatttagtggaaaagaaagcctcagccatatacaactgaaatcatttagtggaaatgaaagtactttacttgctgtaaagtaa

SEQ ID NO: 15562 - DNA, 201 bp, Homo sapiens
ttacatctaggaagggcagcatctgcccaattcccattcaaagttttcatgatgtaccccagagactttaaaaccaatgctggctagagcactggctcagycatatacaactgaaatcatttagtggaaaagaaagcctcagccatatacaactgaaatcatttagtggaaatgaaagtactttacttgctgtaaagtaag

SEQ ID NO: 15563 - DNA, 201 bp, Homo sapiens
ctctaaaaaaaaacaaaaagtggggggagggatctgtaaagtagctccgccccatgtgagacatgtgccccagtatgccaaggattgcagcatttctaggratgaggacagggaattcaccctcaactctgagagggaagggggtcaagaacataaagtttggatcccagatttcaccctggcagaatcccataaaagcca

SEQ ID NO: 15564 - DNA, 201 bp, Homo sapiens
gtgaatgtcaggcatctaagcaaatatttaattgactgctcagagcccccatttctccatctataaaacagaaatgctgatgcttagttttcaggcttatkatgaggattaaataagtttaagtgtataaaacactttctatcttttcttcttttctcttttcttcccgtagaacattgatgtttaatcttgtttggatca

SEQ ID NO: 15565 - DNA, 201 bp, Homo sapiens
tgcgaggccatctcaggcgctgagggatgcagcagagccttaatcatgcggcatcacgagtgcagggaagaaactcatccagctcttgagcctgggctccrgggttggttctgccctgtgggccccctgcccctgcagtagtgtcccaaaggaagaaggtgactggggctcattctgacgactctgcccggcctccagcgg

SEQ ID NO: 15566 - DNA, 201 bp, Homo sapiens
agccaccctgggacaagagacactccttcatttcccactcaggtgggggaaagtggattttgaatagagcaaaagccaaaattgcagcaaatgcattgagrtgtgctctactttaagaaaacccattaagcaaatattccaacctggacccaacttccatttcaaatacacccattgaaaaaagcaaggaaataaaaggcc

SEQ ID NO: 15567 - DNA, 201 bp, Homo sapiens
ttccaaattgtttaaaaggagcacaataataatcatatacaaacacacttaaatcatgcagcaggatgcaataaaaacatcaaactgaacattatggctcmaaaagcaggctctgatttgccctccaactgggtggggcaagacagaaatttgcacttatagtgggaggcaggaaaaagaggggagctgacaaggcacaag

SEQ ID NO: 15568 - DNA, 201 bp, Homo sapiens
gagcttgaggtgagccgagattgcaccactgcactccagcctgggcgatggaagagactccgtctcaaaaaaaaaaaacaaaacagggataatgtttaatyggcaaggttgttgtgagaactaagctgtttgatgcatctatgcaatatttcccatattggggtctgaagaactcatatccctatctcaaaaatctctgca

SEQ ID NO: 15569 - DNA, 201 bp, Homo sapiens
ataccccaacaaacgcactcctgaccccaccccaatcccctgcccttgtcactcatccaggaatgtctccattgccatgtaaatgtcatatgtgtaatctrtgttaaggggaagagtagaatgatgggaattgaagatggatgactagctaaggagcagagtcaagccccagatgacaccacagtacagggaaacaaacaa

SEQ ID NO: 15570 - DNA, 201 bp, Homo sapiens
tccacacaggcacatctccctctaactgtgacttctctcatgcttccctcttccatttttgaagaatttttttttttagacagagttttgctctgtcaccsaggctggggtgcagtggcatgatctcggctcactgcaacctctacctcccatgttcaagcgattctcctgcctcagcctcccgagtagctgggattacag

SEQ ID NO: 15571 - DNA, 201 bp, Homo sapiens
gcacccctgtgatgcctcctcccaagcattctcccagatggggctgccagctgttagctaagctagcttttattcttagagagtgtaaagttgccagaaarggtcttgtatggttttctatcactgccactgcaaataactactaccctcgtggcttaaaacagcacaaatgtattatcttacagttctataggtcaaaag

SEQ ID NO: 15572 - DNA, 201 bp, Homo sapiens
aggtcttcctcaggctgagcaggcttacccgatagcattttctttcctaacattcccatctggttcaaaaagccttgccctgatccttgggaccactaggrggcaacagtgagcaggagacagatagtccagtggcacaaaagagcacaggcatgaggagtctctttccccttcctcccttccctgtcccacccaccttgc

SEQ ID NO: 15573 - DNA, 201 bp, Homo sapiens
tgtagaaggcagctgggacagagcacccctgtgatgcctcctcccaagcattctcccagatggggctgccagctgttagctaagctagcttttattcttaragagtgtaaagttgccagaaagggtcttgtatggttttctatcactgccactgcaaataactactaccctcgtggcttaaaacagcacaaatgtattatc

SEQ ID NO: 15574 - DNA, 201 bp, Homo sapiens
ttgcctagccacccccgacccaaagaccccaacaagcagggacctcataccctggaggtcactgggtagaggctgtatccatcatcctgtcctctgccctrtctatcctgaagagagagttttatcctccacctgccaagctcctcaatgccaggagcttcctgttctccacatgctcctcctaatagatggctcttccct

SEQ ID NO: 15575 - DNA, 201 bp, Homo sapiens; identical to SEQ ID NO: 1168

SEQ ID NO: 15576 - DNA, 201 bp, Homo sapiens
aagggaggttgttaaaaatgaaattctgtgtagatacctctaagtaacttcaaagataaaaggaataggcagtgggttatctaggttgcacatgagaaacytgaatcaaacaagcttaggcataaaagaaattatattgttctcagaatccaaggcaagcttcgacaaccagccagcaggaggggcagggatacagcctca

SEQ ID NO: 15577 - DNA, 201 bp, Homo sapiens
gagactgtgttcttccctccaactcccaaaaagaataatttttcaggtctaaaaattaagaatccatgcagttagtgctcttcaagttataagctaaattyccatacaacagatatcagaggtgaattgcaatgtgctatgtagttaatagaagccatcatgctaactcagaacagacggccgcctgggattttcttgagt

SEQ ID NO: 15578 - DNA, 201 bp, Homo sapiens
cctccagacccgggctgggagtcaggcttcttggcttgaagccgcagctctgccactaaccagctctaactttgggcaagctgcctcacttcctgggcctscttttctccatctttccatgggaaagctgtattagatgctccctgtgaatgctgatagctctaaccatgtatggtactgactattctctctgcagagaga

SEQ ID NO: 15579 - DNA, 201 bp, Homo sapiens
tagggaattctggttaaaaaatattaaacacatttattcattgcaggaattctttaatataatacatcatgaatctccaagataggaatagccaaggcagmatttatttcccaaatgcctttgaccacagaaaccttcgttttcatggaaaagctcacagaatatagttttgaaaaagctgtcctagactgtagaagtgca

SEQ ID NO: 15580 - DNA, 201 bp, Homo sapiens
gtcccatgtaggcttacttcatgtggatcactgctcctgacacctacctctccagaactgccttcttttgcctctctcagcccttgtctcttatagtctcrgagccctctgagagcaaggattgtgtcttttggattctgtggccccagtgccttgcttatagataagatccataaatgtgagttgttggaagtacaactg

SEQ ID NO: 15581 - DNA, 201 bp, Homo sapiens
taacctgcatttgccctaaaaacaaataagtcaaggtatgccttggctgccttcctagacaaccttaagaagtgccctggttaactcagttgctgtaaaakcctctgcacaatcccaggaccaccagagacaggcagcgggataatatgctggaaggagaaatagaaccctgggaagggtagaagaataacaacagttcct

SEQ ID NO: 15582 - DNA, 201 bp, Homo sapiens
gcagtaacgacttttactgccgagatgtgtctcactcacacacctgcccaaaggagcaaagcaagccgtggtgcttctgccagaacaccccccagccagawgtaagtttgctccctacaaactttctttgacttctggcaattgacttgataatgccagagcagggcctcccaacaggaggagcttgttataaataccagt

SEQ ID NO: 15583 - DNA, 201 bp, Homo sapiens
tctgctcacactaaataaaccacactcctggtggagtagaaagagtgccacattagaactcaggagacctggcttctagcccctgctctgctcttgacttrctgtctgaccttgggcaagtcacttcccttccctggactagatcactgcccaaatgtagatgacctcagacctatatcagaatttctggaaatgcagatt

SEQ ID NO: 15584 - DNA, 201 bp, Homo sapiens
aatgaatctcaaaaacattatgctgagagaaagaagccaaacacaaaagaatgcatactgtctgattctatttatatacaacactaacacaggcaaatctrgtttataacaacagaaagcatattgggggttgcctgagggttggcagggaggcagtgactgcaaataggaaattctggggattcatggaaatgttctata

SEQ ID NO: 15585 - DNA, 201 bp, Homo sapiens
tcactcatttgttccattcaacaaacatttattgagccctgctttgtgccagctactgtgctagggacattaggggtgattacaaagaaaaagatatcccrtgccctcagcccccattcagaactccagagctatgaattaaggcatctgctcacactaaataaaccacactcctggtggagtagaaagagtgccacatta

SEQ ID NO: 15586 - DNA, 201 bp, Homo sapiens
agatgcaaacttgttcactttgaagatggaagaatgtgggtagtcgatgcatgtgggttgccagtgaatgtgggggtgacctctggaagctgggaaaggcraggaaatgaattctcccctacagccttcaaaaagaacattggcctcccacccaacaccttgattctggaccaatgagacctatatctgacttctgacctg

SEQ ID NO: 15587 - DNA, 201 bp, Homo sapiens
gttgtttttggaaaggagaaagcatattgactcttcggctccgaaaaaggatttggggaaaatgataaggaaaaaaacatggtggactttaactttagagsttggtaaaggaaaagaaaagatcctgggtttctacaaagagatcccagcaaggagaatccagtactggggaatattactcacctgatgctcagactaggc

SEQ ID NO: 15588 - DNA, 201 bp, Homo sapiens
cctggagaatgctgctcagacatggaaactatcaagaaggcctttgtgtccccctgtgatctgtctgctaccctgacccctcctgaccccatcggtgaatytgggctggacacaggccccagcatggcctccctcccacacacgagccttcctggcctccccacccccagcaaactgacctgccttgtccccccagaagcc

SEQ ID NO: 15589 - DNA, 201 bp, Homo sapiens
ctggtatctacactgtcagatacagaagaacagggatccagaggttagccttggaccgctcctaccagggacaggaaccaaatgaaatgactgttcaattrgtcgggagtctctctgatgcttctgcctcgttccagtttagcagcttcttaaattttttaaaaatctatagcttaaattacaatttgaactgcttcgttg

SEQ ID NO: 15590 - DNA, 201 bp, Homo sapiens
agcaccaagctgtcttcaacgttgacatcaccaatcagactctttgctcaaaccatgattatttatttatttatttatttatttatttatttatttatttwtttttggagacagagtctcactctgtcgcccagggtggagtgcagtggtgcaatctctgctcactgcaacctccacctcctgagttcaagcaaatctcgt

SEQ ID NO: 15591 - DNA, 201 bp, Homo sapiens
aacagttcctatcaatggagcacatgctacctgccaggcattatgctgtagggacacttgaggcacattatctcatttaatctcccacaacaaccctgcarggggggttctgatatctccactttgcagatgacaaaactgcgtggttgaataacttgttcaaggttgcgtagctaggggagcagcagggttgggcttcaa

SEQ ID NO: 15592 - DNA, 201 bp, Homo sapiens
ttagggctgcgagggctgcggaggccttgggcagctgtgcttgctgcagcgccacctactggtgtgccttaggatctttggtctgggagaggctggaaaartcaatgattgaagaacaacataaggatgtccccaggcaggttaagggcaaacatcagcttctctctacaaaatgaaggcgactgttgagagaagctccag

SEQ ID NO: 15593 - DNA, 201 bp, Homo sapiens
gctctctttgatatagcgctggggaggggacctcagctggccagctgggactgctgcatcaattctgtctgtgggtggagggaggacaggcacagcctcaygtctgaagcgagtcttacatctcaaaagggagaccttcgcaaactctcagtaaggaggcagtctcaaagcaggactgcggagagacacggactccgtttc

SEQ ID NO: 15594 - DNA, 201 bp, Homo sapiens
ccactagccacatggggctatttaaacttaagttttaattaattaacattaaataaaatgaaaaattcagttcctcagtcacacaagccacctttcataamtggcacctaccatgttgggcagcacagggaatagcacgttcccatctttgcagaaagttccactggtccgcagtgctctaaagagagcagaaaccttacc

SEQ ID NO: 15595 - DNA, 201 bp, Homo sapiens
tgggcagctgtgcttgctgcagcgccacctactggtgtgccttaggatctttggtctgggagaggctggaaaagtcaatgattgaagaacaacataaggaygtccccaggcaggttaagggcaaacatcagcttctctctacaaaatgaaggcgactgttgagagaagctccagacagtggagcaatgaaagacatgcacc

SEQ ID NO: 15596 - DNA, 201 bp, Homo sapiens
acactgatctgctgctcggaaccctgcccaaactacccaggactccagacaagggcatctccagagcacctgcttaggaaggcaagatggcggagttctcrtcaccccctcagctctgggagggctgtagtctgctcatagctggatattctagaactgtgctatccagcaatgtttccactagccacatggggctattta

SEQ ID NO: 15597 - DNA, 201 bp, Homo sapiens
ttctgacttcaaagggtgcctgtatgggttaaagaagatgatgtatagccaggcttacaaggtgcttaccaccacctccctagtctcaatcctcaaggtgwgcccacctgtcacccacgggagctggctggacctacacagaaacatgggagaagttagccatacagatcctactgtctcctgctcaacgaggtgaacagc

SEQ ID NO: 15598 - DNA, 201 bp, Homo sapiens
tcgaggttctgcatgggtcattctgctatctctcattctcaaattagaatagtagatttaaggtctatgattagacacaaaggcttaagagatcatggaartcatctcatctaactgtacacccaatgcttgaatctctctctcttcccatcccagccaaatagttgtatagtttctacttgaacagccctggtgatggag

SEQ ID NO: 15599 - DNA, 201 bp, Homo sapiens
gggccagtctacatggagggactagcatgagcaaagaggaacataaaacagcaactgatccccttggatcttgtaaaaagccagaaatactgaattcatgrtgatgatggtgatgatgacactgcaaattgttgagttattaagctaaactctgtgctaagaactttccatgcaatggctcatttaagcctcacaacagct

SEQ ID NO: 15600 - DNA, 201 bp, Homo sapiens
tacacagaaacatgggagaagttagccatacagatcctactgtctcctgctcaacgaggtgaacagcctgcccaagcttacatagcagatcagaagccagmcttccagctctggggtgcactgtgatccaaggctcccttcgaactgcccactggcaggccgctgccccttcaactgccaggaggcacccctttccctaag

SEQ ID NO: 15601 - DNA, 201 bp, Homo sapiens
aaggtgaaaattaggctaggatataaaaatattttgtaaactataaaagtcagtggttgttatttagcatattgaaagagggaaccaaaagtcatgctgaytaaagacctactatgtgccgggaatgttgttattatatttagtagctgttatttcatggttatatcatactttattcaattttacttaactaaatcctta

SEQ ID NO: 15602 - DNA, 201 bp, Homo sapiens
acaagatcaacctacagcaaaagcccagttcccctctctccacaatccctgcccctcactttccccagaccagtgccccttcccagctcatttctcagctrctacaatccagctactctggacccttagaaatcccagtgcccacacctgactaagccccacctcactctcccctccaggtctgttggcggaaaaggacag

SEQ ID NO: 15603 - DNA, 201 bp, Homo sapiens
atttaatctgttgtttttggaaaggagaaagcatattgactcttcggctccgaaaaaggatttggggaaaatgataaggaaaaaaacatggtggactttarctttagagcttggtaaaggaaaagaaaagatcctgggtttctacaaagagatcccagcaaggagaatccagtactggggaatattactcacctgatgctc

SEQ ID NO: 15604 - DNA, 201 bp, Homo sapiens
ttgtccctgccactctggcctccttgctgttcttgaagcgccccagtgtgcacctgtcccagagccttggcacttgctgttccctccacctggaacacttyctcccggatcatcccatggctcattgctcacttcattctggttactacacaaacaccctcaccttgaacaggcctttcctgactcccaaccaagcgagcc

SEQ ID NO: 15605 - DNA, 201 bp, Homo sapiens
attggaagaaaaaaaaaagctgtcaatctaaaaatctatatctagtaaaaatgcctccaaaaattaagcaaaataagtcttctcagacatataaaagcagragagccagcggatccttactccagcatatctatcaccagcagatctgtattccaagagatttttcttcaaggaaaaggaaattgacatcagatggaaata

SEQ ID NO: 15606 - DNA, 201 bp, Homo sapiens
tggggagaggaagggagggcacagatttaacaggggcgagacctgctagtgatacctaggattcacagtatcatttaacaagggtgatacctactagtgcrtgggtaggattcacattaacaattatggagaactgttcaggccctcagctggtacagtgttggggctgctccataggcaccgggcattgtaccccagccc

SEQ ID NO: 15607 - DNA, 201 bp, Homo sapiens
agaggatagacagtgggcagccaggtaggcatcagaggagcttggcaatacctcccctcacacactctgatggtgtctacatggggaggccaaggtgattytgaagtaccatctttcttctgctccattgagcctaggggaggtggaggagggctggagaggtaaagtcaggtttgcattccatgcgtgcaaatggaaaac

SEQ ID NO: 15608 - DNA, 201 bp, Homo sapiens
gcctcacctctgagcattgacaaaggaggcccaagttccaacttcaggtctgtcattgaacagctgtgcctcggtttaccagcctgccttacctacctccyaggggttattatcaggataaataagcttgtgtatatgaaaatactctgtaaaagttcaatcacttatattatctcctggtcaaaattaatttcctcgtta

SEQ ID NO: 15609 - DNA, 201 bp, Homo sapiens
ttcagcctcagtcctctgtgcccttccaaatgccccacctctaatgccagtagaagtgtgctgactctgatggcctctggagttgggctggcctatgactmtatgactgttctatgtgactgggctgacttaaccactgaggatctcagccatagctcctccccagaacttcctgccctggaggtcagccctggaggcaaa

SEQ ID NO: 15610 - DNA, 201 bp, Homo sapiens
gcttccagccatcatgttcaggtccacctccctggacagttaggaaaatgacaagcacatagagacagaagagacctaaagatcatcaagtccttcccctwgatttatagctcaggtatggaggttcagagggggtgatttcacactgctccttaccacaataatatttgaagtatagaatgaagttttcctaagctagta

SEQ ID NO: 15611 - DNA, 201 bp, Homo sapiens
ccagtccctgctgcttggcagacagtctgcaggcagtaacgacttttactgccgagatgtgtctcactcacacacctgcccaaaggagcaaagcaagccgyggtgcttctgccagaacaccccccagccagatgtaagtttgctccctacaaactttctttgacttctggcaattgacttgataatgccagagcagggcct

SEQ ID NO: 15612 - DNA, 201 bp, Homo sapiens
aaactattccaatcaatagaaaaagagggaatcctccctaactcgttttatgaggccagcatcatcctgataccaaagcctggcagagacacaacaaaaamagagaattttagaccaatatccctgatgaacatcgatgcaaaaatcctcagtaaaatactggcaaaccaaatccagcagcacatcaaaaagcttatccac

SEQ ID NO: 15613 - DNA, 201 bp, Homo sapiens
ccctccagtttcctacctggcccaccattaactgatcccaagccagagggcaacagagtccatcaagacagtctctgcaagtcaaacccgtagcacagagrgcagggtggagaagcactgggaagggggtgcaaacagaagctatcccatacccacacaaggcccttgctgcactgtgagatgccccttatatggctggcc

SEQ ID NO: 15614 - DNA, 201 bp, Homo sapiens
tggtttctccgacatctctgctcccaggaaaacctcttgtcatggtgccaggtcctaaggagctccccagaatgagaggagcaggctctggcctgagttcygagtgtccagggcacaggaacctacagcagccagctgggatgttaggctcactctcagagtgggcctctgtgctggacacagggactccacaggtgtccg

SEQ ID NO: 15615 - DNA, 201 bp, Homo sapiens
gtctggctcacagatgtatatcaggacactacatatttgttgagaggaaacacaatgctgaaattgtgtacactgccagggccagggtgagggagaagccygcattagtgagtagctactctgtgccatgaaccttcccaatcacttgctaacaaggtattagaatcctcattgtaggatgaggacacagagcccagagag

SEQ ID NO: 15616 - DNA, 201 bp, Homo sapiens
agtcaggtgcccgcccctggaccaatcagcagtgggcaggggaattagttcacctgagaccctgtaatagtcctaaagaagttgggccgatggtggttgcrgaaggcactcccaagagaactgctagacagacagccctgtggatggccacactgagtgagtgggggtgagggtgagaattgagggtgggttacgtctgag

SEQ ID NO: 15617 - DNA, 201 bp, Homo sapiens
cgccagggcaccccgagccccatcagccactctctgaggagacactttgttgatcctgtgtacttttctcaactcaatgcccttccagatgcagagggacraaggtttgtgtccgttctgatctctggcatccctgagggctggtggacagggcatcctgaggccaaccaggccctgggaccgtgggggcctgtagacaac

SEQ ID NO: 15618 - DNA, 201 bp, Homo sapiens
ttaaaaatcccgacatccagaccccaaccgcagaggctctgattctattggcctaggtgtatccaggcagcaacactgattacaattcttccaggagagtyggatgcaggggtatctgaagacaaatccagaaaactttgaataatgggggcctataaaccccagagtaagaacctcagctctagaaagagtcaaaattgc

SEQ ID NO: 15619 - DNA, 201 bp, Homo sapiens
taaaaatcccgacatccagaccccaaccgcagaggctctgattctattggcctaggtgtatccaggcagcaacactgattacaattcttccaggagagttkgatgcaggggtatctgaagacaaatccagaaaactttgaataatgggggcctataaaccccagagtaagaacctcagctctagaaagagtcaaaattgca

SEQ ID NO: 15620 - DNA, 201 bp, Homo sapiens
tggcatacaagaaagccctgcatttttatttctactgctgcatcatgttttcctcctcctgatatccccaccttcagttcatgacccagaagaaaagttartcaataaaataaaggagtttgacttatgttataatctcattctatagatttggcaactgaggcaaggagttgacctggcaaactgacctgaatttgtttc

SEQ ID NO: 15621 - DNA, 201 bp, Homo sapiens
gcagaggttgcagtgagccaagatcacgccattgcactccagcctgggcaacagagtgagactgcatctaaatatatatatattttgtttttatatatatwttttttgtttatatatttttgtttatatatatattttgtgtatatatatattttgtgtgtgtgtatatacatatatatatatactgtaagcagagacatt

SEQ ID NO: 15622 - DNA, 201 bp, Homo sapiens
atgaaatgactgttcaattagtcgggagtctctctgatgcttctgcctcgttccagtttagcagcttcttaaattttttaaaaatctatagcttaaattayaatttgaactgcttcgttggatttctggcttccttttcagaaaaaaaaattagatccatttgtgatagagcaaagaatatttagatgcatttggattgct

SEQ ID NO: 15623 - DNA, 201 bp, Homo sapiens
gagtctctctgatgcttctgcctcgttccagtttagcagcttcttaaattttttaaaaatctatagcttaaattacaatttgaactgcttcgttggatttstggcttccttttcagaaaaaaaaattagatccatttgtgatagagcaaagaatatttagatgcatttggattgcttcagggctcacagatgtctgcaccc

SEQ ID NO: 15624 - DNA, 201 bp, Homo sapiens
taataccttacctgtgtgaagggaagatgcaggaccagatgatctcctgagactcaaagtgccataacagcactgcctcccctgcccagtgggatgctcaygcccaagcatggccaggagctggcagtcctggggactgtagaaggcagctgggacagagcacccctgtgatgcctcctcccaagcattctcccagatggg

SEQ ID NO: 15625 - DNA, 201 bp, Homo sapiens
ccgagatcatgccattgcactccagcctgggcgacagagcgagactccatctcaaataaataaataaataaacaaacaaacaaacaaataaatttaaaatrtgattgcaaactttttttaatccatagaaggattggaactgagaacatctcccgaaaaggttaaacaaaaagacaaacaggtagaaagtgagagaaaaat

SEQ ID NO: 15626 - DNA, 201 bp, Homo sapiens
aaaattagatccatttgtgatagagcaaagaatatttagatgcatttggattgcttcagggctcacagatgtctgcacccatatggatttgaggattctgrctttgtccggcttaaaccaggtctacattctttacctgtttaaagaaaaaaaaaaggaaattcaagagagcaaatcaataggcagctactgattattatt

SEQ ID NO: 15627 - DNA, 201 bp, Homo sapiens
cagaagttagttatgtccctccatgacaatggtagctttcctagcctgttatcttgattcaggagcaaaagcacatgtacacacacacacacacacacacagacacacacatgcactctcagtaccagacccccatcacagacatcctcacacagcacagttccctgtgggatatggccttggtctgagcactggctgcag

SEQ ID NO: 15628 - DNA, 201 bp, Homo sapiens
acagaagttagttatgtccctccatgacaatggtagctttcctagcctgttatcttgattcaggagcaaaagcacatgtacacacacacacacacacacacagacacacacatgcactctcagtaccagacccccatcacagacatcctcacacagcacagttccctgtgggatatggccttggtctgagcactggctgca

SEQ ID NO: 15629 - DNA, 201 bp, Homo sapiens
ccagaatgatcagaaaaagaaaaagcacaagttatcattaaaagtgagagaggcaacacagcacagactccatgtgtacaaagggtgatataagaaaactrtaaataattgtatgccaatatatttaccaatttagggcttggcactgagttgcaactgcttaaattcacaatcacttattttgggtttgttttgttttgt

SEQ ID NO: 15630 - DNA, 201 bp, Homo sapiens
actcagctggttgggctaacaaaagcctttctgaggcccccaacaaggtaacagcccagggcgcacccccactcctgtctctcacactttcaaaggacacrtccatcaggttgagcactatcttgtcaatgatagagccttgctgagcaagctgaacactccttttgactatgctgtctgaaaaacagactgcaaaggaga

SEQ ID NO: 15631 - DNA, 201 bp, Homo sapiens
gaagtggtcaaactgttggatgctagcttcccagccaataatacacagacagagatcccagagaggagacttcattggaaccataggtcattggagtgtgyctcttcatgactgatgcaaaggcatggccaggtgggctccagccatcactcactgcactccctgagccaacctcctaactagggagatagaagggcaata

SEQ ID NO: 15632 - DNA, 201 bp, Homo sapiens
ttggtctgggagaggctggaaaagtcaatgattgaagaacaacataaggatgtccccaggcaggttaagggcaaacatcagcttctctctacaaaatgaargcgactgttgagagaagctccagacagtggagcaatgaaagacatgcaccagggtatttaatcacaaaagttctgcattccttgctctgttcataaattt

SEQ ID NO: 15633 - DNA, 201 bp, Homo sapiens
tggccagtaaactttatagagcgtcctaggctaccagccctgaacacccagcacattacagtggggatgtcaggctctctgacagcagggtataaggagcwtggaaaaggttcacagagagtcccaacatggctcaacctgtgtctattccctaaagaaggctgaatcctactgggccagggaggggggtggctgggaagg

SEQ ID NO: 15634 - DNA, 201 bp, Homo sapiens
ttccagctgctgttgtgtgtgaggcttcagagacgctgatggagcaaatgatgaaccagccacagcagggctggaggggtatctgaatcatgacctctgcmaaaaaaaaaaaaaaaaaaaaaagagggggaagtggctgaccctgaacaaaccttggcccatctccagagcttcaccagctacattcattgtccacccatt

SEQ ID NO: 15635 - DNA, 201 bp, Homo sapiens
acactgatgtcacttggttgagcccctgatgaaaaggtaagagtgcatgtccttcttggggaccagcaaggaggtcagggaaacctggaagaaaataataygtaggaccagaccctctctatcaggtgaaattgacagggaatccactctctgcagccacaccccaaagtccaggcagacagggagacccccgtaccaggg

SEQ ID NO: 15636 - DNA, 201 bp, Homo sapiens
aaaacccattaagcaaatattccaacctggacccaacttccatttcaaatacacccattgaaaaaagcaaggaaataaaaggccgctattccaaaagagakagtgaatggaagccaatttataccccaacaaacgcactcctgaccccaccccaatcccctgcccttgtcactcatccaggaatgtctccattgccatgta

SEQ ID NO: 15637 - DNA, 201 bp, Homo sapiens
taagtctcaccaaattagaaaatcttgatgaacaactcaggctttccattaaacccagaagtgttgttccttaggagttaagatcgcttcccaagaccagsggctaaaccccaggactaaagacaaaactaaaatatacctatctctaaacaaagccttaaataatgtctccatgaaatcaaagtagttcaccattaattt

SEQ ID NO: 15638 - DNA, 201 bp, Homo sapiens
tttggacctcaaactctctccccgtcaaatggccgaatgcctgcctacgtacgtcacctggctgttgagaggatcagatttggcaatagctatgaaagtayttcagttgtgaagcagctatgtcactcttttctgaatggagaagcaatgacacgtagtagagatgggccacctgatacaagtctactctttactttggaa

SEQ ID NO: 15639 - DNA, 201 bp, Homo sapiens
aaaatgactctctcctagtatacaatcaaaaactcctagacacatgaagagggaaaacaggaaaagaaaaataaaccaccaatagaaatagatctacatawaaccccaatgttagaattagaaaacagcaactttacaataacaatcataaacatgttaaataattgcagaaaaagatgtaaataatgagaaacttttagt

SEQ ID NO: 15640 - DNA, 201 bp, Homo sapiens
cactatgattgccccagcttatgcccttgaaagactttccagccctgcacagggagggggacccaggttgagcccagtgactccctgagtcaaggacacaragctatgagtccagaaagaccgagacaaccagagttcacaggacagagcaccagagaggagaggacttcacagagacagaactccagagatctgaaaaat

SEQ ID NO: 15641 - DNA, 201 bp, Homo sapiens
atctgcctcctgctgtcattcatggccccaaccctgctccaagttcagaggaggctccaagagcatagagaggccaggcagtgggaggagtcacccaccakcctgcagggatgggttggggtggtcccttctggggccactgagggtgcaggctgcagagatgcccagatcctgcacctgggagggcagctgcagctgtac

SEQ ID NO: 15642 - DNA, 201 bp, Homo sapiens
tactgctgtctcccttctacagacaaagggacagctgagaattagaatccagacctgcctaataccaaagtccacgctcttttcacaacatggtacaccayctgccccttcctgcctctgtgatccccaaatgatctcttctggaagcccacatggcatcctgtgtggacactgatgtcacttggttgagcccctgatgaa

SEQ ID NO: 15643 - DNA, 201 bp, Homo sapiens
aggacttcacagagacagaactccagagatctgaaaaatcctccttgaaaattcagcatattcctcattggggtaggcatgtgagaaaactacccaaaacyagagaaagaatgatttgagaagatgagaggaaacagtgcctggcagcactcacacagagctgggaatagtgcctattcctactagtcaaactggaaaccc

SEQ ID NO: 15644 - DNA, 201 bp, Homo sapiens
aaaatcttcacacgcatacacacaatcaccaggtccagatggcttcactggcaaattctatcaaacatttaagttagaaatggtaccaagtccgtacaaaytcaaaaaattgagaaagaggaaacacttgataactaattttatgaggtcagcacactcccaatacccaaacttgacaaggaggttataagaaaagtaaat

SEQ ID NO: 15645 - DNA, 201 bp, Homo sapiens
agggaagggagaaaagagaaaaaaatgggactagtagaacacatataacaaaataataggcttaaatctaacacatcaataatcacatttaatgcaaatgktttaaccacaacaatttaaggaattgccaaactggattaaaaaaagaaagtttcaactatatgctggttacccagaaaaaatgtattttaaatataaagg

SEQ ID NO: 15646 - DNA, 201 bp, Homo sapiens
aggccaaggtgattctgaagtaccatctttcttctgctccattgagcctaggggaggtggaggagggctggagaggtaaagtcaggtttgcattccatgcrtgcaaatggaaaacacaaagcacacttcttcctcctgcctgaggggcctgcggggggtctgccagttagaagacctctgctggttccccagctggaaaac

SEQ ID NO: 15647 - DNA, 201 bp, Homo sapiens
cctcaatacattcaaaaggattcaagtcatagaaagtatgtcctgtgatcataatgaaattaagttaaaacaataacagaaagatagctggaaaatctccwaatattcagaagcaaaataacacacttctaaataatccatggatgaaagaagaaatcaaaagtgaaattaaaaagaattttgaagaggttaaaatgaaaa

SEQ ID NO: 15648 - DNA, 201 bp, Homo sapiens
gctgccagtagcacaataccaacaggtaaatttacagaattaaatacctatattaggaaaagaagaaaagtcttaaatcatgacctcagcttctgcattaraaaactaaaaaaaaagaagagcaaattgagccaacactaagcatggcaaggaaaatgatgatgattccagccgaaatcaatgaaatagaaaaacaataga

SEQ ID NO: 15649 - DNA, 201 bp, Homo sapiens
tttagtagaaacggggtttctccatgttggtcaggatgatctcgaactcctgacctcaggcacaatcacttattttctattgcctctgggtgttgcctctrcagtgaccaaccatcctggcttgctcatgactgagggtctttggggaagtgagactttcaattctaaaactgaaattattggtcaacctaggcctgcatc

SEQ ID NO: 15650 - DNA, 201 bp, Homo sapiens
tcatgactgagggtctttggggaagtgagactttcaattctaaaactgaaattattggtcaacctaggcctgcatccctctgataattccacccttccacscccccaggtccagtcacctagaagcccacaaagggatctcacttaccaggttttcccctgccgttgcactctctgggttgtctgagtgggcaagcatctt

SEQ ID NO: 15651 - DNA, 201 bp, Homo sapiens
agctactcagtgtgccctgcagattcccatctctgaaccttgcctgcccttttatctttctcagaattccatctcctctagctcctcatatacaaatccarcactttcttccatgctaccatctcctctagctactcatatacaaatccaacacttccttccatgccacctcctccaggaagccttctcagatgcccacag

SEQ ID NO: 15652 - DNA, 201 bp, Homo sapiens
ccctaagcccaaagcagaggaggtgttgctgacatgaatgttcctgcctgagtaactctgtctggtgtttcttctttgcaggggatgcccctttttgtacscctgagcagcacaaggagtgtgcagagcctgccctaggtcagtactcaggggacagatggaatcatgggggccgggggcctgagactgagatcatggaaa

SEQ ID NO: 15653 - DNA, 201 bp, Homo sapiens
tttttttggccaggggatgctaaggaaaactgctaaccagggcttgatatgtttcatcacttgcgttaatacaattcaaagcagcctacaaaaagaaaagkggtggaggcgtccctctcccatcacagagtttaagtggagcgagcccttgttacatgggatcctgcctgctctctttgatatagcgctggggaggggacc

SEQ ID NO: 15654 - DNA, 201 bp, Homo sapiens
atcccgacatccagaccccaaccgcagaggctctgattctattggcctaggtgtatccaggcagcaacactgattacaattcttccaggagagttggatgmaggggtatctgaagacaaatccagaaaactttgaataatgggggcctataaaccccagagtaagaacctcagctctagaaagagtcaaaattgcacacta

SEQ ID NO: 15655 - DNA, 201 bp, Homo sapiens
cattctttacctgtttaaagaaaaaaaaaaggaaattcaagagagcaaatcaataggcagctactgattattattaattggctgttaacaaaagacacagyctaaattccagtgggtaggggagtgtttttatgatcctcccatcaaacaagtagctatttgtgcaatcatttccttagtgtggacctggggaagtctggt

SEQ ID NO: 15656 - DNA, 201 bp, Homo sapiens
gatcctcccatcaaacaagtagctatttgtgcaatcatttccttagtgtggacctggggaagtctggtggagaagggagactcagggagttgtcccatttwcaggagtgacccaaaagatgacaccaaggctaggagtttggagcaatcacaagtccaaaccacaaggttgaattctcagtgacttcagaggattggatca

SEQ ID NO: 15657 - DNA, 201 bp, Homo sapiens
caatcatttccttagtgtggacctggggaagtctggtggagaagggagactcagggagttgtcccattttcaggagtgacccaaaagatgacaccaaggcyaggagtttggagcaatcacaagtccaaaccacaaggttgaattctcagtgacttcagaggattggatcaatcaattaattagttaattaattaatggcac

SEQ ID NO: 15658 - DNA, 201 bp, Homo sapiens
aaaatcagacaccaagccctggacttgaggtttcttagtagaaatacactgccaaaggaaagatcgcttaagccctggagtttgagcttacagtgagctaygatcatgccactacactccagcctgactgacagagcaggacaagcggaaggacgagtcagaaaagctttcgggaagaggcagggcatgagaggctcatca

SEQ ID NO: 15659 - DNA, 201 bp, Homo sapiens
gcaggaagggttccagatgcagggagttgcctccagggaaagaaatgaaggaactttgcctgcatcctaacccaccaggcagagaaggtggggcactggcwatgagggagccccagcaggaagagcacagagccctgggtttcagataaaatggtctcctacatttgctttgatggtggatcattctctgtggatgagaat

SEQ ID NO: 15660 - DNA, 201 bp, Homo sapiens
cagaaggaaaacaagatcaacctacagcaaaagcccagttcccctctctccacaatccctgcccctcactttccccagaccagtgccccttcccagctcayttctcagctgctacaatccagctactctggacccttagaaatcccagtgcccacacctgactaagccccacctcactctcccctccaggtctgttggcgg

SEQ ID NO: 15661 - DNA, 201 bp, Homo sapiens
cctctcttcgccagcccctccctcttgccaacactgtccccagaccccatcctgggccagcttctgctcagtgggttgagaacaaggggcactggaggaaytgtgggcacattggaggagacaggaattgtaggggatgccagtccctgctgcttggcagacagtctgcaggcagtaacgacttttactgccgagatgtgt

SEQ ID NO: 15662 - DNA, 201 bp, Homo sapiens
gcccagaaaagacaaagctgatatcctagcctgtggctggaggggctgaagaaaagctgagctctgagaggtaaagtgcctggccagccccccattagccmagccacacctgcgtaactccaaagcccaggctccttcctgtgggtgagtccacctccccacctgcatccctggaacacttctcctccccctgtttcaatc

SEQ ID NO: 15663 - DNA, 201 bp, Homo sapiens
tctttatatgattaggttggaccactcagctggttgggctaacaaaagcctttctgaggcccccaacaaggtaacagcccagggcgcacccccactcctgyctctcacactttcaaaggacacgtccatcaggttgagcactatcttgtcaatgatagagccttgctgagcaagctgaacactccttttgactatgctgtc

SEQ ID NO: 15664 - DNA, 201 bp, Homo sapiens
cccatcaggcccttctctcagcaccgcacggccctttctcacctcctggtgtccatgcacgtgcacgctacacacactacccacagcataccccaccccartctgcacgcacatgcaccaaacctacaggttcatgcacccacggtggtccaggaccacacacacaaatgcacacctctacagccccacgttccaatcaca

SEQ ID NO: 15665 - DNA, 201 bp, Homo sapiens
aaaaacagactgcaaaggagactttttgcctccgttcccaaggcagtttttctcagagagaaggctttctgctggctctaagccagggtcatgctggcctygtcttgatcggtttctccagacaaagaaaaggaagaaagcatgttctgacctaaacatttagaccaccctaatcatctgagagtagcccatccacctacc

SEQ ID NO: 15666 - DNA, 201 bp, Homo sapiens
tttacctcccatcacagccagtcctctgctcctccaactgaaagataaaatggccacacacatgtcactgcgccagtgccatctggaagctcacctcaggygccagggcaccccgagccccatcagccactctctgaggagacactttgttgatcctgtgtacttttctcaactcaatgcccttccagatgcagagggacg

SEQ ID NO: 15667 - DNA, 201 bp, Homo sapiens
ggatcaatcaattaattagttaattaattaatggcacatgaccccagacacgggatctgggggatgtacagcagctgaagagagtgaaatgattgagcctsgctgtgagcatccattgccagaggactgggctagttgctcgcacactgttttcttgtttttggcagggacaggccggagttattttattttcctcgttcc

SEQ ID NO: 15668 - DNA, 201 bp, Homo sapiens
ttccagcttgaagctatttttgtgagagttttcaccatgaacgctgctagtgagaagcttgcggagccacaagcactgatgagggggagacagagggtctstggagaatggctcttggtgagctgggaaggaggacgtcgcaggcaggccctgcccacaggtgtgatcctggtgggtaatgtgttccctcaggtaaagctc

SEQ ID NO: 15669 - DNA, 201 bp, Homo sapiens
atgagggggagacagagggtctctggagaatggctcttggtgagctgggaaggaggacgtcgcaggcaggccctgcccacaggtgtgatcctggtgggtartgtgttccctcaggtaaagctcagcacagcccacctgagcccacaggcccaaaggaaacctcttcctccacaagctcagagatttttattcaattttgag

SEQ ID NO: 15670 - DNA, 201 bp, Homo sapiens
tccataggcaccgggcattgtaccccagcccaacactcacccacatgccagccttgctgtattgcttgaggcttccccacctctttatacctctttatacytctgtatctctgcacatgcagtatcctctacccagaacacatttcccactcctgatctgcctaaaaaaacatagtctttctaaactcagctcaaaggtga

SEQ ID NO: 15671 - DNA, 201 bp, Homo sapiens
ttagccttggaccgctcctaccagggacaggaaccaaatgaaatgactgttcaattagtcgggagtctctctgatgcttctgcctcgttccagtttagcakcttcttaaattttttaaaaatctatagcttaaattacaatttgaactgcttcgttggatttctggcttccttttcagaaaaaaaaattagatccatttgt

SEQ ID NO: 15672 - DNA, 201 bp, Homo sapiens
tcaaaggtgaccaccccctccataaagtcttttccggatggcacccccaattagttggaccatgccctcctcagtgcccccactacgcctggacattatgmccccactatagcatttgcttggttatgtgcatgtctgttcttttagactaaaccccatgggtgtaggaatcatatcttattcatcttcatagcctcaatt

SEQ ID NO: 15673 - DNA, 201 bp, Homo sapiens
caggaggcggaggttgcagtgagccaagatcttaccattgcattccagcctgggtgacagagcaaggctcactctcaaaaaaaataaaaaaataaaaaatrtttattggacacatagaaggtggatgggtggggggcatgggaagatggatggatggatggttggatggatggatggatggatggatggatggatggatgg

SEQ ID NO: 15674 - DNA, 201 bp, Homo sapiens
gggcacattggaggagacaggaattgtaggggatgccagtccctgctgcttggcagacagtctgcaggcagtaacgacttttactgccgagatgtgtctcmctcacacacctgcccaaaggagcaaagcaagccgtggtgcttctgccagaacaccccccagccagatgtaagtttgctccctacaaactttctttgactt

SEQ ID NO: 15675 - DNA, 201 bp, Homo sapiens
ggccagcaccgcgttccactgggaagagccttctccccaccatctctgttgttcacccgggcatgtgggtgctggaccccacccagccataagctgagaargagtggggcagatctgcctaccagagagttctcaggccaagaggtcaagctggcatctccaagagaactgtcctgccacccccaactgtgccccccaaac

SEQ ID NO: 15676 - DNA, 201 bp, Homo sapiens
gggattccccacagggaaatgaccgcatgctggtgccctcatcgtgccccaggttcagaatcatggtagagggaaggcggtgcctctctccatgcagagcytgcttcccctcctgtccaccaatagagtcgatcactgaagcccaggctctgtggggcaaggggatgggaggtttttggggggcggtggatgtaagagaaa

SEQ ID NO: 15677 - DNA, 201 bp, Homo sapiens; identical to SEQ ID NO: 1172

SEQ ID NO: 15678 - DNA, 201 bp, Homo sapiens; identical to SEQ ID NO: 1173

SEQ ID NO: 15679 - DNA, 201 bp, Homo sapiens; identical to SEQ ID NO: 1174

SEQ ID NO: 15680 - DNA, 201 bp, Homo sapiens; identical to SEQ ID NO: 1175

SEQ ID NO: 15681 - DNA, 201 bp, Homo sapiens
gagctttgagattattttattaggctaattttaattctttccttacgctggtttctggaaaggtgagatgactgcatcaggggtaatgagcatttgcaagkctcttgaaaaaaaatattgccaaatgtattttcccaaagattttcatgtaaaaaagagaagagagagtaggggccgaaaggaagatagatggttactgga

SEQ ID NO: 15682 - DNA, 201 bp, Homo sapiens; identical to SEQ ID NO: 1176

SEQ ID NO: 15683 - DNA, 201 bp, Homo sapiens
ccaggaatgagcgtccctgagcgtccccaggcagccaccggagctcgcagtagcttcaaccccgggtagcctgcggaggccgggccgccacactcctgccrctggagcgcggggccaatggggagccttcaagagccacaaccgaggccctcagccaatcagcgccgagccggctccgcggccaaagggaggagctctcgg

SEQ ID NO: 15684 - DNA, 201 bp, Homo sapiens
attaccggagcatggtggtgcatgcctgtagtcccagctactcaggaggctgaggcaggaggatggcttgagcccacaaggttgaggctgcagtgagctaygactgcaccactacagtctagtcttggcaacagtgagaccgcctctcaaaaaaaaaaacaaaaaaagactcaaagtgtgctccactgttccttcagtgag

SEQ ID NO: 15685 - DNA, 201 bp, Homo sapiens
ctcgatcctcccaataatcacacagaaagggcactataattatcaccattttacagatgtggcaactgaagctcaacaactagtaattttctttcttttcttttttttttttttttgagacggagtctctctctctggcccaggctggagtgcagtggccggatctcagctcactgcaagctccgcctcctgggtttaggc

SEQ ID NO: 15686 - DNA, 201 bp, Homo sapiens
gaccaccgtgttagccaggatggtctcgatctcctgacctcgtgatccacccgcctcagcctcccaaagtgctgggattacaggcgtgagccaccatcccyggcctggagttctttcatatgagatatttgtctctactcctccattatttattcaaccatttatttaatcagtatggactcatggacatttatactttgg

SEQ ID NO: 15687 - DNA, 201 bp, Homo sapiens
ccgaataggggatcatgggcttcacaaaactgccaaagcagtccacagtagaaaaaaggacgaaaacccctgcttaatagaaatattcattgtcctaactsaaaggaatgcttgactttgggtgtggtgttgtctctctgatctgagtccatctcttggtgccctaaaggggagagtctctgggactcttgtccccatagc

SEQ ID NO: 15688 - DNA, 201 bp, Homo sapiens
gactgtgggtgccttcggctgtgtgcaggtagcccccagcctcagccagcccataggtgcccagtcggatgccattcatcaggaactggtacaagagggcgggggccaggcctttctgcagggcagcaaggccatccaccttgccgatggtgatgaaggcatggaagacatttcggtagtgccgctggtatgtgccagggg

SEQ ID NO: 15689 - DNA, 201 bp, Homo sapiens
aaatacaggccaggccctgtacaagtcagtggaaagttgatggtgaaaagacagacatggacccctctctcctggtgcttagtgtgttacacagtgaggcrcctgcagtggtgacaggagcatagcagcacagcaggagccagcagttaatccacaaatgttttctggagatctgaggatgagctagctagggaagaaggg

SEQ ID NO: 15690 - DNA, 201 bp, Homo sapiens
aatcgtgtccatcagatgggtgtgtatagggcagatcagaagactccgaagcctaccagcactttcctgatgcctttccctgcttgcagtggggcagcacyctgccacctatgcccttgggaaagaacagctcctatcctacaacgaggatctgccctgaaggtcccaggcaagagccctcttcttaccatgtagatgggg

SEQ ID NO: 15691 - DNA, 201 bp, Homo sapiens
acaggtgcccgccaccacgcccggcttattttttgtatttttaatagagaccaccgtgttagccaggatggtctcgatctcctgacctcgtgatccacccrcctcagcctcccaaagtgctgggattacaggcgtgagccaccatccctggcctggagttctttcatatgagatatttgtctctactcctccattatttat

SEQ ID NO: 15692 - DNA, 201 bp, Homo sapiens
aaagacagaaggttgcaggtgggatggctcaggatggcgggcgacgggagcacgggagtagaggagggaatcgcggggttgggagatggaagccagggagkcaggaagaagaaagccagcaagtgagagaagaaaaggatccgggagaagagccggtgatttcctcgagccagcaacgagatctcgatccgagaaagaagt

SEQ ID NO: 15693 - DNA, 201 bp, Homo sapiens
tgtgcataccaccatgcccagctaattatttaaatttttggttgagatggggtctggctacattgcccaggctggtctcgaattcctgggctcaagtgatygtcccaccttaacctcccaaagtgttgggattacaggctgagccactgcgcctggcccagtcaagttctttattgtacaacatcttttaaaagggcctaa

SEQ ID NO: 15694 - DNA, 201 bp, Homo sapiens; identical to SEQ ID NO: 1191

SEQ ID NO: 15695 - DNA, 201 bp, Homo sapiens; identical to SEQ ID NO: 1190

SEQ ID NO: 15696 - DNA, 201 bp, Homo sapiens
ggtgagggaatggcccccggctggccaatggcaggggcggggtcggaccagtgggcggggcccgcggccgacggttaatccgggcggtgagaccacgcackggccgggagccaggcctgcaacttaaagatgctcccggggaggcgaccagagatgtcccttcctgaccccgcttccctactccaggtaccactttgagga

SEQ ID NO: 15697 - DNA, 201 bp, Homo sapiens
ccatggccaagacaactgcaatgccactcatcatggcagccaccagcgccaacttccagctctggggaggaaagatctaagggggtagagaggaagagcaytgtcaaccagccaactattacaccccaaggacaggacagtccctgccctggggacacagatgctggtaactgggggagcttccactgcaccagttataac

SEQ ID NO: 15698 - DNA, 201 bp, Homo sapiens; identical to SEQ ID NO: 1195

SEQ ID NO: 15699 - DNA, 201 bp, Homo sapiens
acgtaaggtgagaaggccggggcgcccaggggcggctgactgggtgggttgtgggaagagaccggggtcaaccagggtctgcctcgcctcactccagcgayctccgaccggtcccggacaatcaagaagttttctgccatcccgtgacggaccagagcctgatagtggaacttctcgagctgcaggcccacgtacggggcg

SEQ ID NO: 15700 - DNA, 201 bp, Homo sapiens
gccatggccaagacaactgcaatgccactcatcatggcagccaccagcgccaacttccagctctggggaggaaagatctaagggggtagagaggaagagcrctgtcaaccagccaactattacaccccaaggacaggacagtccctgccctggggacacagatgctggtaactgggggagcttccactgcaccagttataa

SEQ ID NO: 15701 - DNA, 201 bp, Homo sapiens; identical to SEQ ID NO: 1193

SEQ ID NO: 15702 - DNA, 201 bp, Homo sapiens
ctcaagatcagagtcctcttgcccaattcttggctgggaagtaggtgacatctagaatccatgagggtatgggtgatctcctgggttccagacatttgcaytgagtttattcaatcacttaacaatatatattaggtctgggctgggcacgctggctcacgcctgtaataatcccagcactttgggaggccaaggcaggcg

SEQ ID NO: 15703 - DNA, 201 bp, Homo sapiens
cgggtggggtcacataagttcaggtccacgccctgctcggtgccggcgccaggagagccaggaagacgcggcccggcttgcggggggtagagggacacacytgcgctgcgggaccagtctcctgaggctgcacgggttggtgcttggttaattaaatccttagtccttaggctctttatttttattttttattttttttga

SEQ ID NO: 15704 - DNA, 201 bp, Homo sapiens
ctcgatccgagaaagaagtcaggactctggccaggaatgagcgtccctgagcgtccccaggcagccaccggagctcgcagtagcttcaaccccgggtagcytgcggaggccgggccgccacactcctgccactggagcgcggggccaatggggagccttcaagagccacaaccgaggccctcagccaatcagcgccgagcc

SEQ ID NO: 15705 - DNA, 201 bp, Homo sapiens
gcacgggagtagaggagggaatcgcggggttgggagatggaagccagggaggcaggaagaagaaagccagcaagtgagagaagaaaaggatccgggagaasagccggtgatttcctcgagccagcaacgagatctcgatccgagaaagaagtcaggactctggccaggaatgagcgtccctgagcgtccccaggcagccac

SEQ ID NO: 15706 - DNA, 201 bp, Homo sapiens
caggaggatggcttgagcccacaaggttgaggctgcagtgagctatgactgcaccactacagtctagtcttggcaacagtgagaccgcctctcaaaaaaamaaacaaaaaaagactcaaagtgtgctccactgttccttcagtgaggcatcgggggctgtgtcctaaatgtctttgtatctccagcccttcacattagggc

SEQ ID NO: 15707 - DNA, 201 bp, Homo sapiens
ccccttcccgaaacagacccacccatttcccaggcagtacctcccactggctcaggaggtccttggtggatgagaaggtgcacagctgggtggaggaacckacgataactcggggcaggccgcccagagccccacgccataaccccaccagaccatgtttctggccaatctcggttagcgcctgaaacatgccctagtgtg

SEQ ID NO: 15708 - DNA, 201 bp, Homo sapiens
catggccaagacaactgcaatgccactcatcatggcagccaccagcgccaacttccagctctggggaggaaagatctaagggggtagagaggaagagcackgtcaaccagccaactattacaccccaaggacaggacagtccctgccctggggacacagatgctggtaactgggggagcttccactgcaccagttataaca

SEQ ID NO: 15709 - DNA, 201 bp, Homo sapiens
ctgcttcagcttccctgggactacaggtgtgcataccaccatgcccagctaattatttaaatttttggttgagatggggtctggctacattgcccaggctsgtctcgaattcctgggctcaagtgattgtcccaccttaacctcccaaagtgttgggattacaggctgagccactgcgcctggcccagtcaagttctttat

SEQ ID NO: 15710 - DNA, 201 bp, Homo sapiens
tcagactcaactacatccatatctgatttcttcctttgtttttttttttttttgtatgtttagtagagacagggtttgaccatgttggccaggctggtctrgaactcctgatctcaggtgatccacccacctgggcctcccaaagtgctgggattacaggtgtgagccacggcgcctggccccccaacagcattttagaga

SEQ ID NO: 15711 - DNA, 201 bp, Homo sapiens
tttcttagtctttagtcaatgagcttggataaaaatttcatctttctttttcctttttttttttttgagacggagtttagctcttgtcgcccaggctatgrtattttgagacagggtctccctctgtcacccaggctagagtgcagtggcatctcggctcaccgcagcctcaacctcccggctcaagccatcctcccacct

SEQ ID NO: 15712 - DNA, 201 bp, Homo sapiens
ccgagagctcctccctttggccgcggagccggctcggcgctgattggctgagggcctcggttgtggctcttgaaggctccccattggccccgcgctccagyggcaggagtgtggcggcccggcctccgcaggctacccggggttgaagctactgcgagctccggtggctgcctggggacgctcagggacgctcattcctgg

SEQ ID NO: 15713 - DNA, 201 bp, Homo sapiens
gcctaaacccaggaggcggagcttgcagtgagctgagatccggccactgcactccagcctgggccagagagagagactccgtctcaaaaaaaaaaaaaaaagaaaagaaagaaaattactagttgttgagcttcagttgccacatctgtaaaatggtgataattatagtgccctttctgtgtgattattgggaggatcgag

SEQ ID NO: 15714 - DNA, 201 bp, Homo sapiens
cccctggcacataccagcggcactaccgaaatgtcttccatgccttcatcaccatcggcaaggtggatggccttgctgccctgcagaaaggcctggcccccgccctcttgtaccagttcctgatgaatggcatccgactgggcacctatgggctggctgaggctgggggctacctgcacacagccgaaggcacccacagtc

SEQ ID NO: 15715 - DNA, 201 bp, Homo sapiens
tagtaactatctgaactaggaagttcatgatcaactgactacatacttcaggaggaacaaatggttattgaggtccttcaccctgggaagacaacagtacytaagacagaaattcaggaaaaactagccaaaatgtatgagactacactagatgtcatcatctttgtttgtttttgtttgtctttatgagatggagtctcc

SEQ ID NO: 15716 - DNA, 201 bp, Homo sapiens
cttagtaactatctgaactaggaagttcatgatcaactgactacatacttcaggaggaacaaatggttattgaggtccttcaccctgggaagacaacagtmcctaagacagaaattcaggaaaaactagccaaaatgtatgagactacactagatgtcatcatctttgtttgtttttgtttgtctttatgagatggagtct

SEQ ID NO: 15717 - DNA, 201 bp, Homo sapiens
ccccatctacatggtaagaagagggctcttgcctgggaccttcagggcagatcctcgttgtaggataggagctgttctttcccaagggcataggtggcagrgtgctgccccactgcaagcagggaaaggcatcaggaaagtgctggtaggcttcggagtcttctgatctgccctatacacacccatctgatggacacgatt

SEQ ID NO: 15718 - DNA, 201 bp, Homo sapiens
ataaataatggaggagtagagacaaatatctcatatgaaagaactccaggccagggatggtggctcacgcctgtaatcccagcactttgggaggctgaggygggtggatcacgaggtcaggagatcgagaccatcctggctaacacggtggtctctattaaaaatacaaaaaataagccgggcgtggtggcgggcacctgt

SEQ ID NO: 15719 - DNA, 201 bp, Homo sapiens
agtgctgggattacaagcatgagccactgcatccggcctcaatttttttttttttttttgagacagagtctcactctgtcgcccaggctggagtgcagtgrcgcgatctcggctcactgcaagctccgcctcctgggttcatgccattttcctgcctcagcctccctagtagctgggactacaggcacctgccaccacgcc

SEQ ID NO: 15720 - DNA, 201 bp, Homo sapiens; identical to SEQ ID NO: 1208

SEQ ID NO: 15721 - DNA, 201 bp, Homo sapiens
gtgtagtggcgcaatctcggctcactgcaacctctgcctcctgggttcaagtgattctcctgcctcagcctcccgagtagctgggattacaggtgcctgcyaccacacccggctaatttttgtagttttagcagagacagggtttcacaatgttggccaggctggtctcaaactcctgacctcatgtgatctgcctgcctc

SEQ ID NO: 15722 - DNA, 201 bp, Homo sapiens
tatagaaaacagattttttacaaaggaccaaaggaagaagaagaaagaagaaggagaaaaagaagaagaaggagaagaagaggaggaagaggaagaagacracgaaggaggaggaggaggaaagaagaaagaagaaaagagagaggaggatgagaagaaaccaaacccagacctcacataatttacaaaaattaactcaaa

SEQ ID NO: 15723 - DNA, 201 bp, Homo sapiens
gatagatagatagatagatagatagatagatagatagatagatgtaattttgagacagagtttaactcttgttgcccaggctggagtgcaatggcgcaatstcctgctcactgcaacctccacttccggggttcaagtgattctcctgcctcagcctcccgagtagctgggattacaggcatgcgccaccacccccagcta

SEQ ID NO: 15724 - DNA, 201 bp, Homo sapiens; identical to SEQ ID NO: 1207

SEQ ID NO: 15725 - DNA, 201 bp, Homo sapiens
catcccaaagtgtatttcctcccactcaccactgccacccttgagtccctcctgctcccatgcacagttttaaactcctccctccaaaaccaaagggaatygagagacccaattcccaggcgtctgggacccaggtgtcctgttagattcaaaggcacagagattatattgattataaagcaagtttattctgaagaggga

SEQ ID NO: 15726 - DNA, 201 bp, Homo sapiens
tcctcaaagtggtacctggagtagggaagcggggtcaggaagggacatctctggtcgcctccccgggagcatctttaagttgcaggcctggctcccggccmgtgcgtggtctcaccgcccggattaaccgtcggccgcgggccccgcccactggtccgaccccgcccctgccattggccagccgggggccattccctcacc

SEQ ID NO: 15727 - DNA, 201 bp, Homo sapiens
ggctcggcgctgattggctgagggcctcggttgtggctcttgaaggctccccattggccccgcgctccagtggcaggagtgtggcggcccggcctccgcargctacccggggttgaagctactgcgagctccggtggctgcctggggacgctcagggacgctcattcctggccagagtcctgacttctttctcggatcgag

SEQ ID NO: 15728 - DNA, 201 bp, Homo sapiens; identical to SEQ ID NO: 1205

SEQ ID NO: 15729 - DNA, 201 bp, Homo sapiens
aggtgggaggatggcttgagccgggaggttgaggctgcggtgagccgagatgccactgcactctagcctgggtgacagagggagaccctgtctcaaaataycatagcctgggcgacaagagctaaactccgtctcaaaaaaaaaaaaaggaaaaagaaagatgaaatttttatccaagctcattgactaaagactaagaaa

SEQ ID NO: 15730 - DNA, 201 bp, Homo sapiens
ttccctttttgtaagctagtttgagttggatttctgtcacttacaacaaaacaatcccttataaagggagcttctaataaaagaagtgttgagtccagctscctccggtagggccaggacttggaagtccagtagactctttcatggagcacagaacacctgggcctcatttctgtctgcaaagctgttaatgtaggtagc

SEQ ID NO: 15731 - DNA, 201 bp, Homo sapiens
tctctaaaatgctgttggggggccaggcgccgtggctcacacctgtaatcccagcactttgggaggcccaggtgggtggatcacctgagatcaggagttcyagaccagcctggccaacatggtcaaaccctgtctctactaaacatacaaaaaaaaaaaaaaacaaaggaagaaatcagatatggatgtagttgagtctga

SEQ ID NO: 15732 - DNA, 201 bp, Homo sapiens
ctcactgaaggaacagtggagcacactttgagtctttttttgtttttttttttgagaggcggtctcactgttgccaagactagactgtagtggtgcagtcrtagctcactgcagcctcaaccttgtgggctcaagccatcctcctgcctcagcctcctgagtagctgggactacaggcatgcaccaccatgctccggtaat

SEQ ID NO: 15733 - DNA, 201 bp, Homo sapiens
gctatggggacaagagtcccagagactctcccctttagggcaccaagagatggactcagatcagagagacaacaccacacccaaagtcaagcattcctttsagttaggacaatgaatatttctattaagcaggggttttcgtccttttttctactgtggactgctttggcagttttgtgaagcccatgatcccctattcgg

SEQ ID NO: 15734 - DNA, 201 bp, Homo sapiens
ccaaagtataaatgtccatgagtccatactgattaaataaatggttgaataaataatggaggagtagagacaaatatctcatatgaaagaactccaggccrgggatggtggctcacgcctgtaatcccagcactttgggaggctgaggcgggtggatcacgaggtcaggagatcgagaccatcctggctaacacggtggtc

SEQ ID NO: 15735 - DNA, 201 bp, Homo sapiens
gttataactggtgcagtggaagctcccccagttaccagcatctgtgtccccagggcagggactgtcctgtccttggggtgtaatagttggctggttgacartgctcttcctctctacccccttagatctttcctccccagagctggaagttggcgctggtggctgccatgatgagtggcattgcagttgtcttggccatgg

SEQ ID NO: 15736 - DNA, 201 bp, Homo sapiens
ggcccactcctgcttccttggaggatcccaccagtgagtctccctgttctgtccctcccagcccgattctcctgggaacccagtcatgagatacccgcccrttccttcctccttacgggggctgattgaaggtaagcaagagatcagtctggtactggggcagcctcagcaaggcctgatgaagtgtcacgtcctttgcta

SEQ ID NO: 15737 - DNA, 201 bp, Homo sapiens
cgccccgtacgtgggcctgcagctcgagaagttccactatcaggctctggtccgtcacgggatggcagaaaacttcttgattgtccgggaccggtcggagrtcgctggagtgaggcgaggcagaccctggttgaccccggtctcttcccacaacccacccagtcagccgcccctgggcgccccggccttctcaccttacgt

SEQ ID NO: 15738 - DNA, 201 bp, Homo sapiens
ttataactggtgcagtggaagctcccccagttaccagcatctgtgtccccagggcagggactgtcctgtccttggggtgtaatagttggctggttgacagygctcttcctctctacccccttagatctttcctccccagagctggaagttggcgctggtggctgccatgatgagtggcattgcagttgtcttggccatggc

SEQ ID NO: 15739 - DNA, 201 bp, Homo sapiens
gaaccgagtccccaagttctcagcaacatcatgcagtgcttcagcgcctttactggggaccaaagatgttaggatcgtgaagggtcagactggtcaccagytgttcaaagtcacccaggctccagggtgcaggtgacagattttcggggccaagagatgacctgttgtcagggcttggggtgggggaacagatggagacag

SEQ ID NO: 15740 - DNA, 201 bp, Homo sapiens
cgcctgccttggcctcccaaagtgctgggattattacaggcgtgagccagcgtgcccagcccagacctaatatatattgttaagtgattgaataaactcartgcaaatgtctggaacccaggagatcacccataccctcatggattctagatgtcacctacttcccagccaagaattgggcaagaggactctgatcttgag

SEQ ID NO: 15741 - DNA, 201 bp, Homo sapiens
tcaaaaaaaataaaaaataaaaataaagagcctaaggactaaggatttaattaaccaagcaccaacccgtgcagcctcaggagactggtcccgcagcgcargtgtgtccctctaccccccgcaagccgggccgcgtcttcctggctctcctggcgccggcaccgagcagggcgtggacctgaacttatgtgaccccacccg

SEQ ID NO: 15742 - DNA, 201 bp, Homo sapiens
catgacattcacatccaggaaaaaatggtaacagcctacaataaatcaagacagcatgatattggtcaaaggctagacacacagatcaagggaacagaagwgagggcacagaaatcgagccacacaaatatagaaaacagattttttacaaaggaccaaaggaagaagaagaaagaagaaggagaaaaagaagaagaagga

SEQ ID NO: 15743 - DNA, 201 bp, Homo sapiens
gccctaatgtgaagggctggagatacaaagacatttaggacacagcccccgatgcctcactgaaggaacagtggagcacactttgagtctttttttgtttktttttttgagaggcggtctcactgttgccaagactagactgtagtggtgcagtcatagctcactgcagcctcaaccttgtgggctcaagccatcctcctg

SEQ ID NO: 15744 - DNA, 201 bp, Homo sapiens
cacactagggcatgtttcaggcgctaaccgagattggccagaaacatggtctggtggggttatggcgtggggctctgggcggcctgccccgagttatcgtmggttcctccacccagctgtgcaccttctcatccaccaaggacctcctgagccagtgggaggtactgcctgggaaatgggtgggtctgtttcgggaagggg

SEQ ID NO: 15745 - DNA, 201 bp, Homo sapiens
tgttataactggtgcagtggaagctcccccagttaccagcatctgtgtccccagggcagggactgtcctgtccttggggtgtaatagttggctggttgacmgtgctcttcctctctacccccttagatctttcctccccagagctggaagttggcgctggtggctgccatgatgagtggcattgcagttgtcttggccatg

SEQ ID NO: 15746 - DNA, 201 bp, Homo sapiens
ctgaagtcaggagtttgagaccagcctggccaacaaggtgaaaccccatctctactaaaaatacaaaaattagccaggcatggtggtacacatctgtaatsccagctactcaggaggctgaggcaggagaatcccttgaaactgggaagcagaagttgcagtgagctgagatcgtgccactgtactccagcctgggtgaca

SEQ ID NO: 15747 - DNA, 201 bp, Homo sapiens
tgaggcaggagaatggcgtgaacccaggaggcagagtttgcagtgaaccgagatcgcgccactgcactctggcctgggcaaaagagcgagactccacctcaaaaaaaaaaaaaaatacaaaaggtagctgggtgtggtggcaggcacctgtaatcccagctacttgggaggctgaggcagcagaatcacttgaacccggcg

SEQ ID NO: 15748 - DNA, 201 bp, Homo sapiens
cagtggctcatgcctgtaatccccacactttagaggcagaggccgacggatgacttgaggtcaagagttcgagacctgcctggccaacatggtgaatcacygtctctactaaaaacacaaaaattagccaggtgtggtggcgcatgactgtaatcccagctactcagtaggctgaggcaggaggcggaggttgcagtgagc

SEQ ID NO: 15749 - DNA, 201 bp, Homo sapiens
gaggctgaggcaggagagtcgcttgaaccagggaggctgaggttgcagtgaactgagatcgcgccactgcactccagtctgggtgatagaatgagactccrtctcaaaaaaaaaaaaaccccacaaaataaatacagttaccatcacctcctcttccaggaagccctcctggctacctaggcatctcctctgactcctaca

SEQ ID NO: 15750 - DNA, 201 bp, Homo sapiens
gagagggtggatgggtatgtgtggggccccctctgtgtcttctgtgcccagcacagtgccagggacacagtagggaagcaataaactgctgggaggagagstgagtgctgtgggtccactcctgaggccagccaggggctcagcaaggcaccaatgcctcctcccaggagtgaaagatgctggaatcaccaggctcctcct

SEQ ID NO: 15751 - DNA, 201 bp, Homo sapiens
tgggtaacagagccaaaccctgtctctaaaacaaacaaaaacagaaacaaaaagtacactacttactgtcctgcttctcaccattccagcctggtagtccttttttttttttttgagacagggtcttgctcagttgctcaggctggagtgcagaagcgtaatcacagctcactgcagccttgatctccaaaaagactacca

SEQ ID NO: 15752 - DNA, 201 bp, Homo sapiens
ccttctggaggctgtcaggactcagaatgtgatactccaaagtatggctccttggcaaaaactttgtggtttttgtttttagagacagggtcttgctctgycacccaggctggggtgcagtggtacaatgatagctcactgcagcctctacctcctgggctcaagcaatcctcccacctcagcctcccaagtagctgggac

SEQ ID NO: 15753 - DNA, 201 bp, Homo sapiens
aatccggattaaatttcccttccctgggcacaagtgcctcatgagggcccggggctgctggttgggagggaaagcatccccgtttttgcagtgaggaggcyggccgagggctggggttccacttagacccttggcagaatggctgttgaggggcaggcgctgcccagtgcccacgtctggaaagctaattcccgggtggac

SEQ ID NO: 15754 - DNA, 201 bp, Homo sapiens
ggtggccgatgcctgtcatcccagcactttgggagaccaacgtcggaggatcacttgaggtcaggagttccagaccagcctgggcaacgtggtgagacccsgtctctacaaaaaaatttaaaaattagctggacaggggccaggcgcagtggcttacgcctgcaatcccatcactttgggaggccgaggcctggatgacag

SEQ ID NO: 15755 - DNA, 201 bp, Homo sapiens
cccacgcaccctgagccagcagcctcatcagcctcgaagcatttattgagcactgcctgtacatccacaggagggtgatgacaggattggcacagtgaccstcctgtccccttgttgggggtctctcctcttccccctctaggagctgagggagctgaggagcggcatgagggacagggagggggcggcagagcttcctgg

SEQ ID NO: 15756 - DNA, 201 bp, Homo sapiens
ctaagattctaagtagggaatatgaatgatacacaaggaaataaaatagggtgcttcctattttaggcaggctggaaggaagaggaggagccagccatackgagattcaggagattcaaggggagaaatgcccttttttttttttttttttttttttttgagagggagtcttcctctgttgcccaggctggagtgcagtgg

SEQ ID NO: 15757 - DNA, 201 bp, Homo sapiens
taatcctacctactcgggaggctgaggcaggaaaattgcttgaacctgggagatggaggttgcaatgagccgagatcgcgccactgcacgacagcctaggygacagagcaagactccatctcaaaaaaaaaagaaaaagaaaaaaagaagaaactctcattgatggagtgttcattgatggagcactttttgggagtgggt

SEQ ID NO: 15758 - DNA, 201 bp, Homo sapiens
aagtagctgtggactgggcacagtggctcacacctgtaatcccagcactttgggagaccaaggtgggcagatcacctgaagtcaggagtttgagaccagcytggccaacaaggtgaaaccccatctctactaaaaatacaaaaattagccaggcatggtggtacacatctgtaatcccagctactcaggaggctgaggcag

SEQ ID NO: 15759 - DNA, 201 bp, Homo sapiens; identical to SEQ ID NO: 1209

SEQ ID NO: 15760 - DNA, 201 bp, Homo sapiens
tgaagcaggagaattgcttgaacccgggaggcggagattgtagtgagttgagatcgcacaactgcactccagcctgggcaacagagcgagactccaatccaaaaaaaagaaaaaaatcccctaggacagggctgtggctgagaccctgagggctggaggcttggctggccttgcacagcagcgggtgcatgctggggtggg

SEQ ID NO: 15761 - DNA, 201 bp, Homo sapiens
cagcctctcgagtagctgggattacaggcatgtaatcccaccaccaagcccagctaattttgtatatttagtagagacagggtttctccatgttggtcagrctagtctagaactcttgacgtcagatgatccacgtgcctcggcctcccaaagtgctgggattacaggcgagagccaccgtgcccggcgcagaattctttt

SEQ ID NO: 15762 - DNA, 201 bp, Homo sapiens
aactcttgacgtcagatgatccacgtgcctcggcctcccaaagtgctgggattacaggcgagagccaccgtgcccggcgcagaattcttttttttagagaygaggtattgccatcttgcccagacttgtctcgaactcctgggctcaaacaatccacccacctcggcctcccaaagtgctgagattactgacataagccac

SEQ ID NO: 15763 - DNA, 201 bp, Homo sapiens
gagtaactgcaataacacccagtttatcaagtgcctcctatgtgtctggccctgtgctttacccctcatttgaccacctctccagtgagagtctcagtccyttttttcctggtgaggaaacaggcatggcagagaggcatgacacatcaaggttgcccttcctggctccatctagcccgttctcctctgcttcctttgttt

SEQ ID NO: 15764 - DNA, 201 bp, Homo sapiens
tgcaacctccaccgccccgattcaagccattcttctgcctcagcctcccgagtagctgggatcacaggcgccagccaccatgcccagctaatttttggtakttttagtagaagcgggcgtttcaccatattggccacatatcggccaggctggtcttgaactcctgacctcaagtgatccacctgcatcggcctcccaaag

SEQ ID NO: 15765 - DNA, 201 bp, Homo sapiens
cggtaggcctgtgggtgaccagcttccctatctgtcttcccacagtgcggctgggatccggcggccacctgcacctgcgtatctctcgggccgcccttccygaggggctccccgaggcctcccgccttcaccgggctctgttccggctgtccccgacggcgtcaaggtcgtgggacgtgacacgaccgctgcggcgtcagc

SEQ ID NO: 15766 - DNA, 201 bp, Homo sapiens; identical to SEQ ID NO: 1219

SEQ ID NO: 15767 - DNA, 201 bp, Homo sapiens
accccaaactgctccccctcccccaaattccctttctcctcctgctctttctccccgctgtgcctcccccagttacccacagaagtgcctgcctctccagygctcacagaacacacaaaaagggacaggaattggtcactgggtagtggccgtggctcctgacgatccagaccagcgtctggcccaagccattcagaggtg

SEQ ID NO: 15768 - DNA, 201 bp, Homo sapiens
ccccgtggctgtcccagtcattcaggaagtgtccactgtgggctgagccctggactggggacacagcaaggatcaggcagctgggagtacagcctggaggwccccccttgggatgagggctgcacaggcagttaaagggtccaaggatcatcccaggatatggctgagaggctgcaagaggctccatcccctagaggcccc

SEQ ID NO: 15769 - DNA, 201 bp, Homo sapiens; identical to SEQ ID NO: 1210

SEQ ID NO: 15770 - DNA, 201 bp, Homo sapiens
agcctctgtgagagggtggatgggtatgtgtggggccccctctgtgtcttctgtgcccagcacagtgccagggacacagtagggaagcaataaactgctgrgaggagaggtgagtgctgtgggtccactcctgaggccagccaggggctcagcaaggcaccaatgcctcctcccaggagtgaaagatgctggaatcaccag

SEQ ID NO: 15771 - DNA, 201 bp, Homo sapiens
gtgtcttgagggacagagtacccacttccagcagtgaggtgtatctgctgggaatgccatcacccacaggccaacctgaatgactgcaggttccccttaaygtattcagtgagtgcccactttatgccaggccccggacacagctgtaaaaagacacacaaggaccaccccactttgcggagcctggttgagtgaagggga

SEQ ID NO: 15772 - DNA, 201 bp, Homo sapiens; identical to SEQ ID NO: 1211

SEQ ID NO: 15773 - DNA, 201 bp, Homo sapiens
gtgtgtttgacaaaggcgttgataactgagagctggtagtggaggggggagattttgggagattggggccctgccaggtggacggactggcctgacctccrgcccctgtgctctgtttacttccatcccagctccacctctggggacccatggaagctgtcggtgaggaacacaggatccgacctgctgagctcatctctg

SEQ ID NO: 15774 - DNA, 201 bp, Homo sapiens
gacaaaggcgttgataactgagagctggtagtggaggggggagattttgggagattggggccctgccaggtggacggactggcctgacctccggcccctgygctctgtttacttccatcccagctccacctctggggacccatggaagctgtcggtgaggaacacaggatccgacctgctgagctcatctctggccacctg

SEQ ID NO: 15775 - DNA, 201 bp, Homo sapiens
caggcgcagtggcttacgcctgcaatcccatcactttgggaggccgaggcctggatgacagtgagagactctgtctaaaaaaaaaaggacaggtgcggtgsttcgcgcctgtaatcccaacactttgggaggccaaggcagatggatcacctgaggtcaggagttcgaaaccagcctggccaacatggtgaaaccccatct

SEQ ID NO: 15776 - DNA, 201 bp, Homo sapiens
acctgaggtcaggagttcgaaaccagcctggccaacatggtgaaaccccatctctactaaaaatacaaaaattagccaggtgtggtggcgcatgcctgtcrtcccagctacttgggaggctgaggcaggagaatcacttgaacccgggaggcagaggttgcagtgagccgagatcgtgccattgcactccaggctaggtga

SEQ ID NO: 15777 - DNA, 201 bp, Homo sapiens
gtgatactccaaagtatggctccttggcaaaaactttgtggtttttgtttttagagacagggtcttgctctgtcacccaggctggggtgcagtggtacaaygatagctcactgcagcctctacctcctgggctcaagcaatcctcccacctcagcctcccaagtagctgggactacaggcatgcgccaccacacctggcta

SEQ ID NO: 15778 - DNA, 201 bp, Homo sapiens
ggtgggcatggtggcgggcacctgtagtcccagctactcgggaggctgaggcaggagaatggcgtgaacccgggaggcggagcttgcagtgagctgagatygtgccacggcactccagcctgggcgacagagcgagaccctgtctcaaaaaaaaaataaaataaataaaataaataaataaataaataaacctgttcccca

SEQ ID NO: 15779 - DNA, 201 bp, Homo sapiens
ctctccagtgagagtctcagtcctttttttcctggtgaggaaacaggcatggcagagaggcatgacacatcaaggttgcccttcctggctccatctagccygttctcctctgcttcctttgtttttcaccatctttagcctttgaccccaaccaaaaagagaagagaggaaatcccatgggcatagacagccacctcttaa

SEQ ID NO: 15780 - DNA, 201 bp, Homo sapiens
aaaataaataaataaataaataaacctgttccccaaatatatatatgaaattaaaacatgcgtggtcatgatcaagttctaattacagacaaagacttccwtgagattggggagaacctgccttggactacggggaccacttcaactctcttgggaatgatttttctttaggtgggtgctggataggggtgtttgtgattt

SEQ ID NO: 15781 - DNA, 201 bp, Homo sapiens
ttgtctggaatttttcacatagtaacaatgtctttttttcctccaaaaagactcccaggctggaatggtgtcctcatatcgaggaagaggatactgaggcycagaaatgtgccctagctttactaggagcgcccccacctaaagatcctccccctaaatacacccccagaccccgcccagctgtggtcattggagtgttta

SEQ ID NO: 15782 - DNA, 201 bp, Homo sapiens
taaataaataaataaacctgttccccaaatatatatatgaaattaaaacatgcgtggtcatgatcaagttctaattacagacaaagacttccttgagattrgggagaacctgccttggactacggggaccacttcaactctcttgggaatgatttttctttaggtgggtgctggataggggtgtttgtgattttattatta

SEQ ID NO: 15783 - DNA, 201 bp, Homo sapiens
cctcaagcaatcctcctgctttggcctcccaaagtgctaggattacatgcctgagccactgtgttcagccagggtgtcccttttctgagactgcattcttyccaccttgcccaagtattgcaggagaaccacaggccccatgctgtgctggcgaaaatctcatctcatgctggcctgttagggtggccatatcctctcatt

SEQ ID NO: 15784 - DNA, 201 bp, Homo sapiens
gaggctgaggcaggagaatcgctggaacccgggaggcagaggctgcagtgagccaagattgcaccactgcactccagcctgagtgacagagcgaaactccrtctcagagaaaaaaaaaaaaaaaaaagatatgtccaagtcctaacgctcagtatctgtgaccttatttggaaagaaggtctttgcaaatgtaattaaact

SEQ ID NO: 15785 - DNA, 201 bp, Homo sapiens
taacgctcagtatctgtgaccttatttggaaagaaggtctttgcaaatgtaattaaactaaagatcttgtactgagatcattctgaattaagaatggaccygtggctgggcacagtggctcacacctgtaatcccagcactctgggaggctgaggtgggcagatcacctgagatcaggagttcaaaaccagcctggccaac

SEQ ID NO: 15786 - DNA, 201 bp, Homo sapiens
caaggaaataaaatagggtgcttcctattttaggcaggctggaaggaagaggaggagccagccatactgagattcaggagattcaaggggagaaatgcccytttttttttttttttttttttttttgagagggagtcttcctctgttgcccaggctggagtgcagtggcacgatcttggctcactgcaacctccaccgccc

SEQ ID NO: 15787 - DNA, 201 bp, Homo sapiens
gaaggggttctgggtggaggttaggacatcttaggctcagtgcccggggatcacgtactcctcttcatccattggggcctggcccagtgactgcaggttayagtagacaggctgggaagccaggtcgatgtccttgtagttgatgtaaaagtcattgtcctctgaagggtgagccctggggggacagacagaccaggggta

SEQ ID NO: 15788 - DNA, 201 bp, Homo sapiens; identical to SEQ ID NO: 1213

SEQ ID NO: 15789 - DNA, 201 bp, Homo sapiens; identical to SEQ ID NO: 1214

SEQ ID NO: 15790 - DNA, 201 bp, Homo sapiens
ggctgaggcaggaggcaggagaatcacttgaacccgggaggtgaaggttgcagtgagccgagatcatgccattgcactctagcctgggcgacagagcgggaaaaaaaaaaaggcaaaagggctactttgtgttaacagcatctatcagtcaattatactctagtacgaattgcccaccaacccctaagtggttgtaggggg

SEQ ID NO: 15791 - DNA, 201 bp, Homo sapiens; identical to SEQ ID NO: 1215

SEQ ID NO: 15792 - DNA, 201 bp, Homo sapiens; identical to SEQ ID NO: 1216

SEQ ID NO: 15793 - DNA, 201 bp, Homo sapiens
tgtcttgagggacagagtacccacttccagcagtgaggtgtatctgctgggaatgccatcacccacaggccaacctgaatgactgcaggttccccttaacrtattcagtgagtgcccactttatgccaggccccggacacagctgtaaaaagacacacaaggaccaccccactttgcggagcctggttgagtgaaggggac

SEQ ID NO: 15794 - DNA, 201 bp, Homo sapiens
caacctgaatgactgcaggttccccttaacgtattcagtgagtgcccactttatgccaggccccggacacagctgtaaaaagacacacaaggaccaccccmctttgcggagcctggttgagtgaaggggacaaatgagtaaatcctaagaaagtagttgattgcagtaagatttgtgctggggattcaacccatcagttca

SEQ ID NO: 15795 - DNA, 201 bp, Homo sapiens
ggcatgagggacagggagggggcggcagagcttcctggggcctcaaggacaatcctttcctgtccccattcttcagatggggaaactgaggccatggaggmgttaggacgccctgagtcacccagcagggactgaaggggttctgggtggaggttaggacatcttaggctcagtgcccggggatcacgtactcctcttcat

SEQ ID NO: 15796 - DNA, 201 bp, Homo sapiens
acgccctgagtcacccagcagggactgaaggggttctgggtggaggttaggacatcttaggctcagtgcccggggatcacgtactcctcttcatccattgrggcctggcccagtgactgcaggttacagtagacaggctgggaagccaggtcgatgtccttgtagttgatgtaaaagtcattgtcctctgaagggtgagcc

SEQ ID NO: 15797 - DNA, 201 bp, Homo sapiens
cctctgaagggtgagccctggggggacagacagaccaggggtaagtgtgggagggggaggactcaggggacaggcacatgagctttgagaaagtccagagygggccaggtgctctgactcacgcctgtaatccagcactttgggaggctgaggtgggtggatcacctgagatcatgagttcaagaccagcctggacaacat

SEQ ID NO: 15798 - DNA, 201 bp, Homo sapiens; identical to SEQ ID NO: 1220

SEQ ID NO: 15799 - DNA, 201 bp, Homo sapiens
cacatgagctttgagaaagtccagagtgggccaggtgctctgactcacgcctgtaatccagcactttgggaggctgaggtgggtggatcacctgagatcakgagttcaagaccagcctggacaacatgatgaaacctcgtctctactaaaaatacaaaaattatccaggcatggtggcacaggcctgtagtcccagctact

SEQ ID NO: 15800 - DNA, 201 bp, Homo sapiens; identical to SEQ ID NO: 1221

SEQ ID NO: 15801 - DNA, 201 bp, Homo sapiens
ggggtgcagggcactggatgaggtctgggctgtggtgggacccaggagggggcaggcagaggggcacactcttagcccgccctaaacccatctgtgccgtrtgactccggcaaacctctcacccttgctaagcctagcaactaggttaaggcaccctcaaaccccagtctccccagtctccctaacacttgtaccagcctg

SEQ ID NO: 15802 - DNA, 201 bp, Homo sapiens
agcctggcatgcagtaggtgcttcataaatacacactgtggacagtagaattatgatgggagcgagcgtgtgaactgggttgctaatgtggagcgtgaagrgggaggcccagggttactcggccaatgggttccgggcagcaagcacgtgggggaagcctcagctgaccacttcctggccagtttatgcaggaactcgcac

SEQ ID NO: 15803 - DNA, 201 bp, Homo sapiens; identical to SEQ ID NO: 1212

SEQ ID NO: 15804 - DNA, 201 bp, Homo sapiens
cccccgccctagaacttttgccagtgccttttctgaaactcctgtgtcccgggccccccaggcggagaaggatatgccggattctgcctggggctgggctytaggagaccccaaatttgacaccacagaaagcaaataaaacacttgaaatacgcatacatttcctgtgtgtccttttgtggggctggagttcagctgggt

SEQ ID NO: 15805 - DNA, 201 bp, Homo sapiens
tcccaggactgagggtacttgtctctagttctatctcccccaggttggaggattgggctgggaccagctgataggaaacccagttgaggcatgagcctgamaaaactcttgaaatacagacatctgtgagtcattaactctgcctgagaagaaaccagggacagcttctcaaaggaggtggcattgcaccagggtcttgaa

SEQ ID NO: 15806 - DNA, 201 bp, Homo sapiens
tttctaggaaaaaacccttccctgccaaaggtgactgtgttttctgccgccgaaggagggcccggtccctccaggctcagtgtggcttctccctgaccccygccctagaacttttgccagtgccttttctgaaactcctgtgtcccgggccccccaggcggagaaggatatgccggattctgcctggggctgggctctagg

SEQ ID NO: 15807 - DNA, 201 bp, Homo sapiens
aaaacaacaacaaaacccgcggacctttgttccaacacacagggaggttgaggaacttgcctgtggtaacacaggcactggggtttgagcgatgatctgcrtcaacctccagggcatacaaaatccccatcatggctgggcacggaggctcacgcctgtaatcccagcactttgggaggctgaggccggtggatcacctga

SEQ ID NO: 15808 - DNA, 201 bp, Homo sapiens
agtgaaccgagatcgcgccactgcactctggcctgggcaaaagagcgagactccacctcaaaaaaaaaaaaaaatacaaaaggtagctgggtgtggtggcrggcacctgtaatcccagctacttgggaggctgaggcagcagaatcacttgaacccggcgggtggaggtttccgtgagctgagatcacgccactgcactcc

SEQ ID NO: 15809 - DNA, 201 bp, Homo sapiens
gctctctgagaataaacttttgacaccaaagggacttggacaacagttaggaagatgtcctggagcaagtggaccccgtgggttgggggaacttcttggastcacagaggactgagggttcttgcacccccagtggaggtattcatatctgggtggtctttcccatagggtcgactcttattattgttatttaatgtagag

SEQ ID NO: 15810 - DNA, 201 bp, Homo sapiens
cgagatcgtgccattgcacttcagcctgggagacagagcaagactctatctcagaaggaaaaaaaaaaagaaagcttcagagtggctcagtccaccccgartatttacatatggggaaactggcacgggctagcgttctgactcctagccaaccccacctctctctgaggaggctgcgggagggcagtgatttagggaagg

SEQ ID NO: 15811 - DNA, 201 bp, Homo sapiens
gattacaggcacccacgaccatgcccggctaatttttgtatttttagtagagacagggtttcaccatattggccaggctggtctcgaactcctgacctcgkgatcctcctgccttggcctcccaaagtgttgggattacaggcatgagccaccgtgcccggcctaatttttgtattttttagtagaaacagggttccacca

SEQ ID NO: 15812 - DNA, 201 bp, Homo sapiens
aaagtaaaaataaatcttataaagtagctgtggactgggcacagtggctcacacctgtaatcccagcactttgggagaccaaggtgggcagatcacctgargtcaggagtttgagaccagcctggccaacaaggtgaaaccccatctctactaaaaatacaaaaattagccaggcatggtggtacacatctgtaatcccag

SEQ ID NO: 15813 - DNA, 201 bp, Homo sapiens
ccttccctgtatggtgctgataagggcgtggggaggcagagacaggcagagatagacatgatgagagacaggcagaaatggagggagagccagggagagakagacacaaagagaaaaagtggaaattctccagatattttgtttagggtgaggacacggagacacagagagggacttagccagctgaggatgacgatttgg

SEQ ID NO: 15814 - DNA, 201 bp, Homo sapiens
gcctaatttttgtattttttagtagaaacagggttccaccatgttggtcaggctggtcttgaggtcctgaccacaggtgatctgacctcgccttggcctcraaaagtgctgggattataggcatgagccaccgcaccccacaccaacctagaaaagttcaactcatttgtctaagcccagcaaaatcatccagaagccggt

SEQ ID NO: 15815 - DNA, 201 bp, Homo sapiens
cccaggcggagaaggatatgccggattctgcctggggctgggctctaggagaccccaaatttgacaccacagaaagcaaataaaacacttgaaatacgcawacatttcctgtgtgtccttttgtggggctggagttcagctgggtgcccggggatagaggggaccccgtgtcactgggtttctattctcggtggtgctggg

SEQ ID NO: 15816 - DNA, 201 bp, Homo sapiens
gctgaggcaggagaatcgcttgaacccgggaggcggaggtcacagtgagccaagatcgcaccactgcactccagcctgggcaacagtgtgagactcagtcycaaaaaacaacaacaaaacccgcggacctttgttccaacacacagggaggttgaggaacttgcctgtggtaacacaggcactggggtttgagcgatgatc

SEQ ID NO: 15817 - DNA, 201 bp, Homo sapiens
ggggccttgctgtgtgaccccctagtgagtccttgtgtctcttacccacgcatgcctgtcacatgcagacacccacacacacccagtatctgccggacagrgcagcccttcctctccgcagccaggaagctggacataggcacaagggctgacgcctggggccaggaatcctgcctgagcattaggagaaggtctggaacc

SEQ ID NO: 15818 - DNA, 201 bp, Homo sapiens
gcagtatagcgagaatccatctctaccaaaaatgtttaaaaaaaattagccagacatgatggtgtgtgcctgtagtctcagttattcaggaggctgaggcrggaggagcacttgaatccaggagattgaggctgcactgagccatgagtgccccactgcactccagcctgggtaacagcaagaccataataaataaataaa

SEQ ID NO: 15819 - DNA, 201 bp, Homo sapiens
catgttggtcaggctggtcttgagctcctgacctcaggggatccacctgcctcagcctcccaaagtgctaggattacaggcgtgagccaccgcgcccagcsaagacagttattttaaagtatttgtctagtgagtctgatgtgtgggcttccttagggatggtttctgtctgttaattttgttccttaaaatgcgccacac

SEQ ID NO: 15820 - DNA, 201 bp, Homo sapiens
cctcttccccctctaggagctgagggagctgaggagcggcatgagggacagggagggggcggcagagcttcctggggcctcaaggacaatcctttcctgtmcccattcttcagatggggaaactgaggccatggaggagttaggacgccctgagtcacccagcagggactgaaggggttctgggtggaggttaggacatct

SEQ ID NO: 15821 - DNA, 201 bp, Homo sapiens
gctgggaagccaggtcgatgtccttgtagttgatgtaaaagtcattgtcctctgaagggtgagccctggggggacagacagaccaggggtaagtgtgggasggggaggactcaggggacaggcacatgagctttgagaaagtccagagtgggccaggtgctctgactcacgcctgtaatccagcactttgggaggctgagg

SEQ ID NO: 15822 - DNA, 201 bp, Homo sapiens
cccacacacacccagtatctgccggacagggcagcccttcctctccgcagccaggaagctggacataggcacaagggctgacgcctggggccaggaatccygcctgagcattaggagaaggtctggaaccccagggggaagggcactcctggggcatcccctgcccctctaccatctggtggctggactctacaccagcct

SEQ ID NO: 15823 - DNA, 201 bp, Homo sapiens
aggtgactgtgttttctgccgccgaaggagggcccggtccctccaggctcagtgtggcttctccctgacccccgccctagaacttttgccagtgccttttytgaaactcctgtgtcccgggccccccaggcggagaaggatatgccggattctgcctggggctgggctctaggagaccccaaatttgacaccacagaaagc

SEQ ID NO: 15824 - DNA, 201 bp, Homo sapiens
caccgccccgattcaagccattcttctgcctcagcctcccgagtagctgggatcacaggcgccagccaccatgcccagctaatttttggtatttttagtaraagcgggcgtttcaccatattggccacatatcggccaggctggtcttgaactcctgacctcaagtgatccacctgcatcggcctcccaaagtgctgggat

SEQ ID NO: 15825 - DNA, 201 bp, Homo sapiens
taaaaattcaaaaattagctgggcatggtggtgcatgcctgtaatcccagctactcgggaggctaaggcaggagaatcgtttgaacccaggaggtggagaytgcagtgagtcgagatggcgccattgcactccagcctgggcaacaagagtaaatctccatctcacaaaaaaaaaaaaaaaaaaaaagcaaggcacagtgg

SEQ ID NO: 15826 - DNA, 201 bp, Homo sapiens
agagcaccagttagacaaggagagccaggaggagctgggccccaacctcatccaaaagcacaggtgagctctgagacctccacccccaggacagcccccaygtctattttctttttctttaaagatgttcttatttgggggccaggcgtggtggctcatgcctgtaatcccagcactttgggaggccgaggcaggcggatc

SEQ ID NO: 15827 - DNA, 201 bp, Homo sapiens
tcctagggccacccaatgaggagataggagggaacctcaaatccatttccaggaggaggagtttggggccatataaatgtatatatacaaatatatatatwttttttaagatggagtcagccggccgtggtggctcacgcctctaatcccaatactttgggaggccgaggccggcggatcacaaggtcaggagattgagac

SEQ ID NO: 15828 - DNA, 201 bp, Homo sapiens
cctgtgactccactgggggccttgctgtgtgaccccctagtgagtccttgtgtctcttacccacgcatgcctgtcacatgcagacacccacacacacccastatctgccggacagggcagcccttcctctccgcagccaggaagctggacataggcacaagggctgacgcctggggccaggaatcctgcctgagcattagg

SEQ ID NO: 15829 - DNA, 201 bp, Homo sapiens
agtagagacagggtttcatcatgttggtcaggctggtctcgaactcctgacctcaggtgatccgcccgccttggcctcccaaagtgctgggattacaggcrtgagccactgcacctggccaggggctagagttttaatttttaaggattttggagtgggctgaagtgtggaggtcattgcttggtgaaagagtgcaggagg

SEQ ID NO: 15830 - DNA, 201 bp, Homo sapiens
acatttgagctgagacctggaggaagaaaaggagtcggggagggggtagttgagggtggacattgcaagtaaatgcaaacagcaagtgcaaaggccctgakatgggagcaggctcacttcagtcacagcaaagctgttgaaaatgggcacctaggaggcttcaaaattaaactcaataccaaaaggcagcagatggtgtca

SEQ ID NO: 15831 - DNA, 201 bp, Homo sapiens
gtgcatcgttggacgcctcccctgggtcaagctccccatttacatcttggtgcagttgctgtctgctttctgtgcttcgggagccacctatgttctctacyatggtgacagagggaacagagggagctgtgccttgagagcacctgtgggtgggcaggggtgcctcagaatggttttggatgaatgagcaaagagggaaat

SEQ ID NO: 15832 - DNA, 201 bp, Homo sapiens
ggggctgtcgggtgcccggggacggggcagagcgggggtctgcgtacaggatgggaggatggggtgccgaaggggcgcgtggagagcaggagagcggcgcragtgccaaggagaagctcgtgcagccttggccaggggagacccgcccagagagttgttgggcgagaggagtaaccgggacccgagggtttggtgcctgga

SEQ ID NO: 15833 - DNA, 201 bp, Homo sapiens
tgatgtctgttcactgcaacctctgcccctgggttcacgcgattctcctgcctcagcatcccgaatagctgattttacaggcacctgctaccacgcctggmtaatatttgtgtttttagtggaaacggggtttcaccatgttggccaggctggtctggaattcctgacctcaagtgatccactgcctcggcctcccaaagt

SEQ ID NO: 15834 - DNA, 201 bp, Homo sapiens
ctttgaatgcatttaattggagccttgagatatgaagaagtaggatgcggttacttcatgcagagcaagagtagcatgcacccagagaaggccaggtggarctcagcatgagtgtgaaggcctcatgtcaagccatgtcaggggacacaaagatggagtattctctaacctatgtgacactcggcataagggaagtacaag

SEQ ID NO: 15835 - DNA, 201 bp, Homo sapiens
tttttgagatggagtttcactctgttgcccaggctggagagcagtggtgtgatgtctgttcactgcaacctctgcccctgggttcacgcgattctcctgcstcagcatcccgaatagctgattttacaggcacctgctaccacgcctggctaatatttgtgtttttagtggaaacggggtttcaccatgttggccaggctg

SEQ ID NO: 15836 - DNA, 201 bp, Homo sapiens
ctgtttctccagtgtctagacgtagattctttgaatgcatttaattggagccttgagatatgaagaagtaggatgcggttacttcatgcagagcaagagtrgcatgcacccagagaaggccaggtggaactcagcatgagtgtgaaggcctcatgtcaagccatgtcaggggacacaaagatggagtattctctaacctat

SEQ ID NO: 15837 - DNA, 201 bp, Homo sapiens
cccaggacagtggtagagcccacagggttacataaatcataatggtagccctcaagaacttcataaactgtatatggtattttaaaaagttgcatattgtytgtttccacctactagaacataagctctagaagggcagagactatgttttgttcaccactgtttctccagtgtctagacgtagattctttgaatgcattt

SEQ ID NO: 15838 - DNA, 201 bp, Homo sapiens
gcatcggtgtgcttgggtggagccttgagacatagtgtgttgctgtggaaaaagcagacagacctaggttccaactttggattcacagtgtcttcttcttytttttttttttttttttttctttttttttgagatggagtttcactctgttgcccaggctggagagcagtggtgtgatgtctgttcactgcaacctctgcc

SEQ ID NO: 15839 - DNA, 201 bp, Homo sapiens
ataaatcataatggtagccctcaagaacttcataaactgtatatggtattttaaaaagttgcatattgtctgtttccacctactagaacataagctctagragggcagagactatgttttgttcaccactgtttctccagtgtctagacgtagattctttgaatgcatttaattggagccttgagatatgaagaagtagga

SEQ ID NO: 15840 - DNA, 201 bp, Homo sapiens
aggcgcccaccaccatgcccggctaatttttttgtatttttaatggagacggggtttcaccatgttagccaggatggtctcaatctcctgactttgtgatyccgccttggcctcccaaagtgctaggattacaggcatgagccgccgcactcagcctgaattatttctagtgtgagatccaagaaccctctcttgggatct

SEQ ID NO: 15841 - DNA, 201 bp, Homo sapiens
catgaataatccacctcttgtttagcatatcatcaagaaacaaccataaacatgggcaaccagcagccctcggggctgctctgtctatggagtagccattsttttattcctttactttcctaataaacttgctttcactttactctatggactcgccctgaattctttttttcttttttttgaggcggagtctcgttctgt

SEQ ID NO: 15842 - DNA, 201 bp, Homo sapiens
gcctcccgagtagctgggactacaggcgtgcaccaccacgctaatttttttgtattttagtagagatggagtttcaccatgttggccaggatagtcttgawctcctgacctcgtgatctgcctgcctcggcctcccgagaaaccaagtctttactaaaaaatatcaaaattagccaggtgtgatggacctgtagtcccatc

SEQ ID NO: 15843 - DNA, 201 bp, Homo sapiens
ctttcactttactctatggactcgccctgaattctttttttcttttttttgaggcggagtctcgttctgtcacccaggctggagtgcagtggtgcgatctyggctcactgcaacctccacctcccgggttcatgccattctcctgcctcagcctcccaagtagctgggactacaggcgcccaccaccatgcccggctaatt

SEQ ID NO: 15844 - DNA, 201 bp, Homo sapiens
gccctgccatgggtttgtaccctcaaatgcctatgagttgggtaaattcttttcttttttcccacattctttccctttcttcttcctccactttccccatytcttttcccttccctccttctgcttttctccttcccttgcttgtcttctgtgctcattcatctccttggctgctcccctggccttcccaacctttctccc

SEQ ID NO: 15845 - DNA, 201 bp, Homo sapiens
gaggggctgtcgggtgcccggggacggggcagagcgggggtctgcgtacaggatgggaggatggggtgccgaaggggcgcgtggagagcaggagagcggcrcgagtgccaaggagaagctcgtgcagccttggccaggggagacccgcccagagagttgttgggcgagaggagtaaccgggacccgagggtttggtgcctg

SEQ ID NO: 15846 - DNA, 201 bp, Homo sapiens
tcctaataaacttgctttcactttactctatggactcgccctgaattctttttttcttttttttgaggcggagtctcgttctgtcacccaggctggagtgyagtggtgcgatctcggctcactgcaacctccacctcccgggttcatgccattctcctgcctcagcctcccaagtagctgggactacaggcgcccaccacc

SEQ ID NO: 15847 - DNA, 201 bp, Homo sapiens
gttccaaaattatgagaaattcctataattctaatatgacttagcgtatgttattaataattgttacataaaattttgtatgcaacagaagtaaccaaaayttcctagttaattgtggctttactagtggctgtcctaagactttttttttttttttttttgagacagattcttgctctgtcacccaggctggagtgcagt

SEQ ID NO: 15848 - DNA, 201 bp, Homo sapiens
ataccaacactttccaactgagctcctctctaccacgaatatgagagattctaagagttaggcaaaaatatcatcgcccctattcatcctgaagaacttasagaagatggaccttcgtccctctgcaacccttaggattagtgcttctcttataaaaggaaggggggaaatgtcagaggcacgtgaaccagagcaagtcta

SEQ ID NO: 15849 - DNA, 201 bp, Homo sapiens
gcagatcacaaggtcaggagttcaagactaacctggccaacatggtgaaaccccatctctactaaaaataccaaaaaattagccaggcatggtggtgcgcrcctgtaattccagctactcaggaggctgaggcagtagaatcacttgaacccaggaggcagaggttgcagtgagccgagatcatgccattgcactccagcc

SEQ ID NO: 15850 - DNA, 201 bp, Homo sapiens
ttcccttcccttcccttcccttcttttcttttctttcagatggagtttcattctttcaggctggagtgcaatggcacagtcttggctcactgcaacctccrcctcccaggttcaagagattctcctgcctcagcctcctgagtagctagggttacaggcacccgccaccacatctggctattttttttgtattttttagta

SEQ ID NO: 15851 - DNA, 201 bp, Homo sapiens
aacccgggaggcagaggctgcagtgagccgagattgagcgactgcactccagcctgggtgatggagcgagactctgactaaaaagaaacaaacaaacaaamaaaaaaaaatgtaaacatttggtctaaattatacaggtcagatattaagtttgctaaattctttaaggtcataagctgcttctttgactattaaaaattg

SEQ ID NO: 15852 - DNA, 201 bp, Homo sapiens
gggcacaaacccatggcagggctcagctttaaaaagtcttatccaagattctttctatggaacagagttccatcaaagccaattttaaaagcctacgtgamaaataattattcttgctgcactttatacaatcatcaggccaagtataataaagcacattggtcttaccataaaaatggtctttcataaaaatgggaaact

SEQ ID NO: 15853 - DNA, 201 bp, Homo sapiens
gaggctgggggaggggcagggtcagagctggagaagagggtcttcaaaagaggtctcatgaggggagggaagggttatcctcagcttcctgacctcattcrtctgtcacttcttgcagggtctcccatgggattgctgggatcttgctgggtgagatggcagtgtgtgcaaaaaagcgccccccaggtaagacaggcaagg

SEQ ID NO: 15854 - DNA, 201 bp, Homo sapiens
cccccttcctctcaactccctatcacttttcgtttttatcctctcgtctctcctaatctcctttcctctcctacttcatcatttttattcttgtcattttwattctttctttaataacaagtgtatcatagttcttgaaacataatttttctctcttcagtttcccatttttatgaaagaccattttcatggtaagaccaa

SEQ ID NO: 15855 - DNA, 201 bp, Homo sapiens
aggctgcggctcctgcagtcggggagcgggcgggggcggaaccctgggcgtgctcggcgtgtccggggccactcagcgcacgctggcatccgccggggggmatggggggcggcggcggcggcgcagctgagctcgcggtgtccccgagcgccggcggccgggaggatggcctgggctgcgggtggggcgcgcgcccgacgg

SEQ ID NO: 15856 - DNA, 201 bp, Homo sapiens
tggctcacgcttgtaatcccagcactttgggaggccaaggaaggtgaatcactagaggtcaggagtttgagaccagcctggccaacatggtgaaaccccgkcttttttttttttttttttttttttttgagacaaagtctcgctctgttgccaggctggagtgcagtggcacaatctcggctcactgcaacctccgcctcc

SEQ ID NO: 15857 - DNA, 201 bp, Homo sapiens
ctctcctcctctttccccctcccacacctgtgtttgctagcttttggggtagaggtctggggaagtataaagatgggggaggcagcctcagtctggttctsggttgggactggagactgctcattatcttctctcctactgccatagagtaactgcatcaagacctccaagtacaatattctcaccttcctgcctgtcaac

SEQ ID NO: 15858 - DNA, 201 bp, Homo sapiens
tgcctgtcaacctctttgagcagttccaggaagttgccaacacttacttcctgttcctcctcattctgcaggtaggtgacccatagtagattttttgcagytccccaaactgaataaagccaaggaagaggaaagggaatgaaggcatcagatggggcctcagaggcatacttctctttctttttttcagttgatccccca

SEQ ID NO: 15859 - DNA, 201 bp, Homo sapiens
tctgctatcgtgctgaatttttcatgccttcacctgtcagtgaagcagaatacattgacccccttgagactcccttctctcctcctctttccccctcccayacctgtgtttgctagcttttggggtagaggtctggggaagtataaagatgggggaggcagcctcagtctggttctgggttgggactggagactgctcatt

SEQ ID NO: 15860 - DNA, 201 bp, Homo sapiens
ctggagggaagaatttgatgaccccctcagttgtggagctaactccttaaaatgatattctgtggaaaaaaacagggaaccccccagcaaagtgttggtcyagacctcagtttgctcctcctgactgcagcatcattttgttgcagaagaagaaaggagggcgcgggctaatgaccgagaatacaatgagaaattccagta

SEQ ID NO: 15861 - DNA, 201 bp, Homo sapiens
aaaacagggaaccccccagcaaagtgttggtccagacctcagtttgctcctcctgactgcagcatcattttgttgcagaagaagaaaggagggcgcgggcyaatgaccgagaatacaatgagaaattccagtatgcggtaagcgactctagaccacctgttccctctctctgtttggagaggggaatggggcaaggacaac

SEQ ID NO: 15862 - DNA, 201 bp, Homo sapiens
aagggacaactggtatgggtctgagggagggtagcttacagcagcccctacccagcttgggggcagcctaggaaaccgaattcttccgcttgatcccaaarctgggttatctgccaggacagcgcagagcaccagccccacgccccgaaacacctgcagtcttatcttcgggcacctgcagctcctgctttctggcctagg

SEQ ID NO: 15863 - DNA, 201 bp, Homo sapiens
aaaaacagggaaccccccagcaaagtgttggtccagacctcagtttgctcctcctgactgcagcatcattttgttgcagaagaagaaaggagggcgcgggstaatgaccgagaatacaatgagaaattccagtatgcggtaagcgactctagaccacctgttccctctctctgtttggagaggggaatggggcaaggacaa

SEQ ID NO: 15864 - DNA, 201 bp, Homo sapiens
cccaggtaagacaggcaaggaggggagatcccgggaaccatcaagagtgggtgttgttatggctcagggagcaaaaggaaaagggacaactggtatgggtytgagggagggtagcttacagcagcccctacccagcttgggggcagcctaggaaaccgaattcttccgcttgatcccaaagctgggttatctgccaggaca

SEQ ID NO: 15865 - DNA, 201 bp, Homo sapiens
aacaataagaattgcttaaatcaaacattttatcagaaaagtaaaaagtggaataccctttatttagttcatgtgacttaagtaatctttgggaaataaawacagttttaaagattattggtaaaataaaaaatcttcaaaaatgtaaacattttgtccgggtgcggtggctcatgcttgtaatctcagcactttgggagg

SEQ ID NO: 15866 - DNA, 201 bp, Homo sapiens
gcagtgtgtgcaaaaaagcgccccccaggtaagacaggcaaggaggggagatcccgggaaccatcaagagtgggtgttgttatggctcagggagcaaaagsaaaagggacaactggtatgggtctgagggagggtagcttacagcagcccctacccagcttgggggcagcctaggaaaccgaattcttccgcttgatccca

SEQ ID NO: 15867 - DNA, 201 bp, Homo sapiens
ttttttctttttttttgagatggagtttcactctgttgcccaggctggagagcagtggtgtgatgtctgttcactgcaacctctgcccctgggttcacgcrattctcctgcctcagcatcccgaatagctgattttacaggcacctgctaccacgcctggctaatatttgtgtttttagtggaaacggggtttcaccatgt

SEQ ID NO: 15868 - DNA, 201 bp, Homo sapiens
gggcagggcaacgtggctgatgggcctgacctgctcagaaaacccaggctgtgtgagactaagaaggaaaagtgagaggggatcccagttcccaggtctcycctctcttccccttggaatgatggcccccccagaggggatgaggtctggggccaagcctgcttccagtctccccagggtctcagaggtagaacaactttc

SEQ ID NO: 15869 - DNA, 201 bp, Homo sapiens
atctctccatcctgcttcctcacactaatgcttggctcacctagacagaaatcaatggcagggcacgaagggcagctgctatcctcttgtatcccccaccygaagtcctctgggggctcatctccactcaggacctctcctgtttgtaccccagatacacactgcatcggtgtgcttgggtggagccttgagacatagtgt

SEQ ID NO: 15870 - DNA, 201 bp, Homo sapiens
tggggctgggtgacggggcagggcaacgtggctgatgggcctgacctgctcagaaaacccaggctgtgtgagactaagaaggaaaagtgagaggggatccsagttcccaggtctctcctctcttccccttggaatgatggcccccccagaggggatgaggtctggggccaagcctgcttccagtctccccagggtctcaga

SEQ ID NO: 15871 - DNA, 201 bp, Homo sapiens
tcatcagagcacgtgggatgtgcatgccagtttgtctgtctggtgatggtggaaacgcaaatccttctgtgactcgtggacattatccccttgaacagtgycccagactgaaataagcctttggccccaccagcccctcctctttctgtatctctccatcctgcttcctcacactaatgcttggctcacctagacagaaat

SEQ ID NO: 15872 - DNA, 201 bp, Homo sapiens
caagcactcaatatgtgagtttcattcccacagtctgtggtctttagcccagtctttccagatgcctattgagttcttcaagcatccaaatggtttggggwaaggcttcaggttctaaatgagaggctttgtgggttaccagctggagagtcagaaaatctggatttgaattcactcagccatgaaataattgtgtgatct

SEQ ID NO: 15873 - DNA, 201 bp, Homo sapiens
gatggagtattctctaacctatgtgacactcggcataagggaagtacaagcactcaatatgtgagtttcattcccacagtctgtggtctttagcccagtcyttccagatgcctattgagttcttcaagcatccaaatggtttggggaaaggcttcaggttctaaatgagaggctttgtgggttaccagctggagagtcaga

SEQ ID NO: 15874 - DNA, 201 bp, Homo sapiens
ggcatgtaaccttcggtgaggcatctttctgacttgaagggcattgcccaatgagggaggtagctatgtggtatcagcagctggtatttcctacatgtagygaatgggcatattggctcccaagggggaatctgggtggagcactatagtatccattaaacctagtaaagaaatattatttctttactagtcacacagatg

SEQ ID NO: 15875 - DNA, 201 bp, Homo sapiens
tgacagtgtgcctatgcagacagagggagcagtgaatagcaatagggtgtttccaccatggtcttcactcaggccccggctgaaatcatgggccacctccrgatacgcagcctcctggcccggcagtgcctggcagagtttctgggtgtgtttgtactcatggtaggtaggatcactgcgggaaggaaagaagggggttgg

SEQ ID NO: 15876 - DNA, 201 bp, Homo sapiens
tccttctatttgtcaggatgggggaggctagtcctgtgatgactgggaatgaagggtaaaagagacagaggttgggtaaactccaggctctgtgttcatarcctgctcccagacattctcttgttatctctctgtttcctagcctacacacgtgcacagacacgtagctgctgttcaggaactgagctaatggttttaaag

SEQ ID NO: 15877 - DNA, 201 bp, Homo sapiens
attatttctagtgtgagatccaagaaccctctcttgggatctggattcagacccctttcctgtaacaagattaggcaccaggagaaactgacacacatggrtgatataacagatgcctaaatggatcctatgggggaactggagctggaacagccctttagagttgtcgcaaagtgaggcaaagaggctagacttttatat

SEQ ID NO: 15878 - DNA, 201 bp, Homo sapiens
taattattcttgctgcactttatacaatcatcaggccaagtataataaagcacattggtcttaccataaaaatggtctttcataaaaatgggaaactggaragagaaaaattatgtttcaagaactatgatacacttgttattaaattccagtctcatcagttgtctttaagtttgtttctgcaatttaggctaaccctgc

SEQ ID NO: 15879 - DNA, 201 bp, Homo sapiens
agcaatctttttgcctttgcttaaaacattgctgatcctttgttttattttttagagtcaaggcaacttttcttttcagatatttacagcttttaataatygagtaaagtatactcctgtgaacaaaatttggagtatatgcatctctctacttgatttctccagaatttggaaattatttgtgtgtattcttaatttatg

SEQ ID NO: 15880 - DNA, 201 bp, Homo sapiens
acttgggaggctgaggcaggagaattgcttgaacctgggaggtggaggttgcagtaagctgagatggtgccactgcactccagcctgggggacagagcaaractctctctcagaaaaaaaaaaaaaaaaagtttgatcttggggagttctaaggcccactagcctcatctgtagaatggaagcaatagtactactttgcag

SEQ ID NO: 15881 - DNA, 201 bp, Homo sapiens
gggaagggttatcctcagcttcctgacctcattcgtctgtcacttcttgcagggtctcccatgggattgctgggatcttgctgggtgagatggcagtgtgygcaaaaaagcgccccccaggtaagacaggcaaggaggggagatcccgggaaccatcaagagtgggtgttgttatggctcagggagcaaaaggaaaaggga

SEQ ID NO: 15882 - DNA, 201 bp, Homo sapiens
tcgtgatctgcctgcctcggcctcccgagaaaccaagtctttactaaaaaatatcaaaattagccaggtgtgatggacctgtagtcccatctacttgggargctgaggcaggagaattgcttgaacctgggaggtggaggttgcagtaagctgagatggtgccactgcactccagcctgggggacagagcaagactctctc

SEQ ID NO: 15883 - DNA, 201 bp, Homo sapiens
ggagcgggtgtagactggggagcaccgggggccaagatttgggagctgcggccagacggggcggggatggcggccgactggagacgaggggctgtcgggtkcccggggacggggcagagcgggggtctgcgtacaggatgggaggatggggtgccgaaggggcgcgtggagagcaggagagcggcgcgagtgccaaggaga

SEQ ID NO: 15884 - DNA, 201 bp, Homo sapiens; identical to SEQ ID NO: 1226

SEQ ID NO: 15885 - DNA, 201 bp, Homo sapiens
gtttcaccatgttggccaggctggtctcaaactcctgacctcaaatgttccacctgcctccgcctcccaaagtgctgggattacagatgtgaaccactgcrcctggccctaagactttttatcatccacagacaattgttgtcttgttttgatcttctttagaaggtagtttataatcagccataggactttaacaggtgc

SEQ ID NO: 15886 - DNA, 201 bp, Homo sapiens
agccagatgacatggaatatttggatgagagagggcagatggagcacctggcagctgacagggaaccctctgcctctgttgactccaaggttctgggcacygggatgctgattgtggggctcttggccatcctggacagacggaacaagggagtccctgcgggtctggagcctgtggtggtggggatgctgatcctggccc

SEQ ID NO: 15887 - DNA, 201 bp, Homo sapiens
gcatcgttggacgcctcccctgggtcaagctccccatttacatcttggtgcagttgctgtctgctttctgtgcttcgggagccacctatgttctctaccayggtgacagagggaacagagggagctgtgccttgagagcacctgtgggtgggcaggggtgcctcagaatggttttggatgaatgagcaaagagggaaatcc

SEQ ID NO: 15888 - DNA, 201 bp, Homo sapiens
tatgtgagatagtgaacattaccgtggcttggcatttttgttggcttgtacctagcccaggtgaatagattatttacagtaagttttctggtatgttaaamgtagctcatccccactcttaccaactttgaggactctggaaggtttcaaggtgccagattgagagctaatcaactatttcagtttcttcatcatatagat

SEQ ID NO: 15889 - DNA, 201 bp, Homo sapiens
ttggacaagcttgcactagagcatctgagcttttgagggctcaagggatgaatacatcacagatgcacttggttttgagggcttcctacatgtcagcctcrcctgtgcttctcattcctccccagatttttggattcctggtttgcatgggggtgatcctggccattggcaatgccatctgggagcacgaggtggggatgc

SEQ ID NO: 15890 - DNA, 201 bp, Homo sapiens
gggaggttgaggcaggaaaatggcgtgaacccgggaggtggagcttgcagcagtgagccgaggtcgcgccactgcactccagcctgggcgacagagcaagrctccatctcaaaaaaaaaaaaaaaaggccatctatgtgagatagtgaacattaccgtggcttggcatttttgttggcttgtacctagcccaggtgaatag

SEQ ID NO: 15891 - DNA, 201 bp, Homo sapiens
gctacctgctgtgggaggcagagatggggtggctggaaaggcctcgtgtgaacactggggggctctgtggggccatgtggctgttcagtgtgttggtgctyatctgttcttcctggggacagacaccctgtgcagctggccacagaggcctctgcgtcagcctggtcccaggtgctgtgggtcggaggcctctgtgtcagc

SEQ ID NO: 15892 - DNA, 201 bp, Homo sapiens
ccttcctgtgccccgactgtctgctgcctgcccgccacatgccagcttgtgaaggctggggctagcctctggtgagcttgtttccgccctggctttaaagrgtgtgcggaaacccagcctggtgggcgaggttgtctatcacataagggctccagtcgccccctggtggccattgggcaccaatctcctattttgtttcaa

SEQ ID NO: 15893 - DNA, 201 bp, Homo sapiens
ctagaaatctgaactccttgttgggctctcctccccttcctgtgccccgactgtctgctgcctgcccgccacatgccagcttgtgaaggctggggctagcytctggtgagcttgtttccgccctggctttaaagggtgtgcggaaacccagcctggtgggcgaggttgtctatcacataagggctccagtcgccccctggt

SEQ ID NO: 15894 - DNA, 201 bp, Homo sapiens; identical to SEQ ID NO: 15833

SEQ ID NO: 15895 - DNA, 201 bp, Homo sapiens
ccagcgagaccaacatgaaagtacgtcaggcgattccagtcacctcagaattgggagacatcagtaagcttgccaagtttgacggtgagtaattttggagsagcagcctgaaggtagaggagtggggttgggttttgtttgggggcgttaaattatacattttcctttgggctttttgttgttattatgcaactccctgga

SEQ ID NO: 15896 - DNA, 201 bp, Homo sapiens; identical to SEQ ID NO: 15835

SEQ ID NO: 15897 - DNA, 201 bp, Homo sapiens; identical to SEQ ID NO: 15837

SEQ ID NO: 15898 - DNA, 201 bp, Homo sapiens; identical to SEQ ID NO: 15838

SEQ ID NO: 15899 - DNA, 201 bp, Homo sapiens; identical to SEQ ID NO: 15842

SEQ ID NO: 15900 - DNA, 201 bp, Homo sapiens; identical to SEQ ID NO: 15853

SEQ ID NO: 15901 - DNA, 201 bp, Homo sapiens; identical to SEQ ID NO: 15854

SEQ ID NO: 15902 - DNA, 201 bp, Homo sapiens
gaatgggtgaagtgtgccgggtgactcttgatgtgtttatgttgggggtctttgcctgtctgaatttttctggcactttcttcacctgccccattcatagkgcggaatccagaggggaagatccgactctactgcaaaggggctgacactatcctactggacagactgcaccactccactcaagagctgctcaacaccacc

SEQ ID NO: 15903 - DNA, 201 bp, Homo sapiens
gatgccactgatgactatgtgagtggttttcattcttctattttgtcccagtcacccacccctactcccagccccacccccatctcatggccaccttcatycagcacaatttcttggtgaccttgacatcccttacccggtccagctagatccatgatgtctttttgctgagcgtggggagagggaatcagggagtgaact

SEQ ID NO: 15904 - DNA, 201 bp, Homo sapiens; identical to SEQ ID NO: 15856

SEQ ID NO: 15905 - DNA, 201 bp, Homo sapiens
ccccaggactccatacttggctctaagcttttctcttctgtgcagggtccttgaaggtccccatgcaaacccatggtttaaataagatttgtttaaacaartaagatttaacaattaaatggagagtcaccattgttcacctctagattggacttcttccttccactccacgctccagacccttgtattcaattatccatt

SEQ ID NO: 15906 - DNA, 201 bp, Homo sapiens
tgaatagaggtcggtaccatggctcacgcctgtaatcccagcactttgggaggccgaggtgggcggattgcctgaggccaggagttcgagaccagtctggwcaacatggtgaaaccctgtctctattaaaaatacaaaaattattagctgggcgtggtgctgcatgcctgtaatcccagctattcaggaagctgaggcagg

SEQ ID NO: 15907 - DNA, 201 bp, Homo sapiens
agattccccaaatagccctcaactctctcccagcccccaatcttactgctggtgataataaatagaagatacagcatttctgtgctgagagaatatagttwaggcttttccagggtgtgaagaggagagttgggaggttctgggtttagtcctgcctcctcactggccatgtgacctcaggaaaatccacggtcactcagg

SEQ ID NO: 15908 - DNA, 201 bp, Homo sapiens; identical to SEQ ID NO: 15832

SEQ ID NO: 15909 - DNA, 201 bp, Homo sapiens
tctctggcttcctctccttctggtcctacatcatcatcctcaacaccgttgtgcccatttcactctatgtcaggtatgtgccttctctgacctggggtctstccagggagtcaggcggtcccatagaacttttcttttctatgaagatgaagtccttgagaagtaacgagaagtcctcttcttcctgtactgtaaacattt

SEQ ID NO: 15910 - DNA, 201 bp, Homo sapiens; identical to SEQ ID NO: 15855

SEQ ID NO: 15911 - DNA, 201 bp, Homo sapiens
cccaggtttctgtgcccaggtgtcttctccgttcttgtctctccccaggcggagggcctgcagcgaaggcccatgtgggtggggcacctcctcttcttccygacccaagcctcacctcttgtcccctgtgcagtgtggaggtcatccgtctgggccacagctacttcatcaactgggataagaagatgttctgcatgaaga

SEQ ID NO: 15912 - DNA, 201 bp, Homo sapiens
gcctcgtgactcccaaggccactgactcctcttcatccccagggaatgcccagaacaccttggcccagcccacggtgtggctgaccattgtgctcaccacrgtcgtctgcatcatgcccgtggttgccttccgattcctcaggctcaacctgaagccggatctctccgacacggtgagaagccaggctacctgctgtggga

SEQ ID NO: 15913 - DNA, 201 bp, Homo sapiens
gctcaacctgaagccggatctctccgacacggtgagaagccaggctacctgctgtgggaggcagagatggggtggctggaaaggcctcgtgtgaacactgkggggctctgtggggccatgtggctgttcagtgtgttggtgcttatctgttcttcctggggacagacaccctgtgcagctggccacagaggcctctgcgtc

SEQ ID NO: 15914 - DNA, 201 bp, Homo sapiens; identical to SEQ ID NO: 1247

SEQ ID NO: 15915 - DNA, 201 bp, Homo sapiens; identical to SEQ ID NO: 1248

SEQ ID NO: 15916 - DNA, 201 bp, Homo sapiens
aagtccagaaggcatttccaggtctgatctgacttgcaatctcttagtcatttgactgtgttggctgccttctccttgaaactctgccctctgctgacttkgttccactttctcttggtttaactgctgcctctctggttgatccttctgtctccttccttggagctccttcctctgttcttcttcctaccatgccccagg

SEQ ID NO: 15917 - DNA, 201 bp, Homo sapiens
cctctgctgactttgttccactttctcttggtttaactgctgcctctctggttgatccttctgtctccttccttggagctccttcctctgttcttcttccyaccatgccccaggactccatacttggctctaagcttttctcttctgtgcagggtccttgaaggtccccatgcaaacccatggtttaaataagatttgttt

SEQ ID NO: 15918 - DNA, 201 bp, Homo sapiens
gcctggggagggtgtagacttatcttgccgggctgagagagggaagtctttcccaatactagtctattaaaacacacactgggctgggcgcagtggctcaygcctgtaatcccagcactttgggaggccaaggcgggtggatcatctgaggtcaggagttcgagaccagcctgactaaaatggcttcaccctgtctatacg

SEQ ID NO: 15919 - DNA, 201 bp, Homo sapiens; identical to SEQ ID NO: 15862

SEQ ID NO: 15920 - DNA, 201 bp, Homo sapiens
agaggttctgtcttgtttatcactcagtcccccagggcctagctattttctggtacatactcttaaaaaatgcttattaaaggaggagagaaggagcctcrgaaaatttcttagggttctctgtatgtgacatcagctgtcttcctgtgcctgatgtgtagcaaagaaaggttgcatgctcccttgctccctgttctcttc

SEQ ID NO: 15921 - DNA, 201 bp, Homo sapiens
ttcctcatgggccactcttcatttcactcgcagccccgcagtgcacagctacaagctgggggttcatctcttcctggtcccctactaccttgggtgcagcwcttctgccagaaccttctgggcgcctgctgctgtgcctgggctccccacgcagggagggacacccctggggcggaaggcaggcagctgcatagctgagtg

SEQ ID NO: 15922 - DNA, 201 bp, Homo sapiens
cacacacacacacacacacacacacacacacacacacacacacacacacacagtggcccggcatggtggctcatgcctgtaaccccagcactttgggaggycaaggtgggcagatcgcctgaggccaggagttcgagaccagtctggccaacatggtgaaaccctgtctctactaaaaatacaaaaattagctgggtgtcc

SEQ ID NO: 15923 - DNA, 201 bp, Homo sapiens
tcctctatttcagtgagcagcacgcgatctcaccagtcaccaaagccagacacacatgtcctggagaaaaccctacaacctctgctctggggccaccacactgtaaatcatatatttcatcttctttgatgtggagcatgaaatgattaagctgcaatgtcctgagccactgtttcccagtgattgtgacccaggcagggt

SEQ ID NO: 15924 - DNA, 201 bp, Homo sapiens
acttacccaggtgtgcctttccactctgcctccaggagtacgcaggggaagggctgaggaccctggtgctggcctacaaggatctggatgaagagtactaygaggagtgggctgagcgacgcctccaggccagcctggcccaggacagccgggaggacaggctggctagcatctatgaggaggttgagaacaacatgatgg

SEQ ID NO: 15925 - DNA, 201 bp, Homo sapiens
tagttttcccacgtgaaacaggaacaggagtacttgtctcaccttttaataggatgtcttgatataagatattggcttagaagatacattttaaacttaartgactgtacagttactgggtggtagcctgctcattgtgactgttgccactcccttctgcattactatttaaatgcctttgtgcttacaacctaattttgt

SEQ ID NO: 15926 - DNA, 201 bp, Homo sapiens; identical to SEQ ID NO: 15883

SEQ ID NO: 15927 - DNA, 201 bp, Homo sapiens; identical to SEQ ID NO: 1226

SEQ ID NO: 15928 - DNA, 201 bp, Homo sapiens; identical to SEQ ID NO: 15886

SEQ ID NO: 15929 - DNA, 201 bp, Homo sapiens
gccactcttcatttcactcgcagccccgcagtgcacagctacaagctgggggttcatctcttcctggtcccctactaccttgggtgcagcacttctgccaraaccttctgggcgcctgctgctgtgcctgggctccccacgcagggagggacacccctggggcggaaggcaggcagctgcatagctgagtggctgcttcta

SEQ ID NO: 15930 - DNA, 201 bp, Homo sapiens
cagctacaagctgggggttcatctcttcctggtcccctactaccttgggtgcagcacttctgccagaaccttctgggcgcctgctgctgtgcctgggctcyccacgcagggagggacacccctggggcggaaggcaggcagctgcatagctgagtggctgcttctacaacacctggagaaccgctggggctagaagcaaac

SEQ ID NO: 15931 - DNA, 201 bp, Homo sapiens
atcctctatttcagtgagcagcacgcgatctcaccagtcaccaaagccagacacacatgtcctggagaaaaccctacaacctctgctctggggccaccacactgtaaatcatatatttcatcttctttgatgtggagcatgaaatgattaagctgcaatgtcctgagccactgtttcccagtgattgtgacccaggcaggg

SEQ ID NO: 15932 - DNA, 201 bp, Homo sapiens; identical to SEQ ID NO: 15831

SEQ ID NO: 15933 - DNA, 201 bp, Homo sapiens
cgcatcctctatttcagtgagcagcacgcgatctcaccagtcaccaaagccagacacacatgtcctggagaaaaccctacaacctctgctctggggccaccacactgtaaatcatatatttcatcttctttgatgtggagcatgaaatgattaagctgcaatgtcctgagccactgtttcccagtgattgtgacccaggca

SEQ ID NO: 15934 - DNA, 201 bp, Homo sapiens
aggtgagagtctgatttttataccaaagaggaaatgattttttttcatattttgtttgtctatattatataaatatatatatacagttatatatatatatwttattttttggttctctctcgttttttagggagggaagaaagtaccaagttgcattgagctgtaattaaggaacattataatttatgacacatttctata

SEQ ID NO: 15935 - DNA, 201 bp, Homo sapiens
ctgtaattaaggaacattataatttatgacacatttctatacttgcaaaaattatatcattttatggatataagagaaaaatgcctttttataaaatttcratttctgagaagtgtgtaatttgtctcttttctgatgtttaaccaagactggtggtgaaagtaaagacagaaactgtctcttaaatgtaattgagtgggt

SEQ ID NO: 15936 - DNA, 201 bp, Homo sapiens
tctgtctcaaaaaaaaaaaaaaaaaatggaaccaatagattgaatgtggggtccaaagaagagagagaaatgaatcaagataaaaaacaacaaaaaaacagaaattaaaaaaaaatttttacagaaatgaatcaagatccattgcagggtttttagttggagcaactgaatgggttgtggcatttcctgagttgagaaaga

SEQ ID NO: 15937 - DNA, 201 bp, Homo sapiens
ctctgtctcaaaaaaaaaaaaaaaaaatggaaccaatagattgaatgtggggtccaaagaagagagagaaatgaatcaagataaaaaacaacaaaaaaacagaaattaaaaaaaaatttttacagaaatgaatcaagatccattgcagggtttttagttggagcaactgaatgggttgtggcatttcctgagttgagaaag

SEQ ID NO: 15938 - DNA, 201 bp, Homo sapiens
ccgtgagattccagagatgttttgaaaatggaaacaacaggccgggcgcggtggctcaagcctataatcccagtactttgggaggccgaggtaggcggatyacctgaggttgggagttcaagaccagcctgacccacatggagaaaccccatctctactaaaaatacaaaattagccggacttggtggcacatgcctgtaa

SEQ ID NO: 15939 - DNA, 201 bp, Homo sapiens
cactgcaatgtctgcctcccgggttcaagcaattctcatgccttggactcctgagtagctgagactacaggcaagtgccatcaggactggctaattttttwaatgtttttagtagagacggggtttcaccatgttggccaggctggtctcaaactcctgacctcaggtgatccatccgcctcaacctcccaaaatgctggg

SEQ ID NO: 15940 - DNA, 201 bp, Homo sapiens
agtttttgaagaaagtcaaaagaatgtattctgtattctaaaaatgcattctaagtgttacagctcttttagaatttgtctagcaggttttccagttttcmctggaacccctcccccacaaaaagaaaaaaatgcattctaaaaaaaaactaaagaatgctttaggaagtattgactggcagtagtgtacagcatgaatag

SEQ ID NO: 15941 - DNA, 201 bp, Homo sapiens; identical to SEQ ID NO: 15845

SEQ ID NO: 15942 - DNA, 201 bp, Homo sapiens
gagaatcgcttgaaaccggaaggtggaggtagcagtgagccaagatcacgccactgcactctagcctgggcaacgagcgaaactgtgtctcaaaaaacaaygaaacaaacaaacaaacaaaaaagtttttgaagaaagtcaaaagaatgtattctgtattctaaaaatgcattctaagtgttacagctcttttagaatttg

SEQ ID NO: 15943 - DNA, 201 bp, Homo sapiens
agttggccagggtcttgggccaagagcaagagctggaaacatagcttgctcctgattgtggaggcttttgaatatttgcctgtggactttgtatttactaaccattaaaagttattgaaaagactgggcacggtggctcacacctgtaatcccagcactttgggaagccaaggtgggcggataacgaggtcaggaattcga

SEQ ID NO: 15944 - DNA, 201 bp, Homo sapiens
tgtactgtaaacatttgatgttatctgtttatctttgtgggcagagcaaactttttaccacagtttcctggtacttgggactgtattagagaaaaaaaaaatattgatttattcagcacctatttattacatgcctactgtgtacaaagaagtgtgctaggtgccatcacaaataaaagatgaattaggaatggatctcct

SEQ ID NO: 15945 - DNA, 201 bp, Homo sapiens
gctctgcggctgaaggaaggagctgagttctcctgcttatctctgctccagtgtcctatcttgaaggactgtgtcctgaccccagtgagaaacatgacctrtctgaccctcccaacccttcctggaaactttccagttctcagtgagttgctgggagctgccctgctggacacccgcctggggagggtgtagacttatctt

SEQ ID NO: 15946 - DNA, 201 bp, Homo sapiens
tggaaggaaaggaccatgtcccactctccactccttcctcatgggccactcttcatttcactcgcagccccgcagtgcacagctacaagctgggggttcayctcttcctggtcccctactaccttgggtgcagcacttctgccagaaccttctgggcgcctgctgctgtgcctgggctccccacgcagggagggacacccc

SEQ ID NO: 15947 - DNA, 201 bp, Homo sapiens
actcctgacctcaggtgatccatccgcctcaacctcccaaaatgctgggattacaggcttgagccactgcgcccagcccataatagttttttttttttttwtaattatttttcatttaacattcagctgttaccaaaatctcatagtgttttaagaaagtttatgaatctgtgttgggccacatgtggcccagagaccatg

SEQ ID NO: 15948 - DNA, 201 bp, Homo sapiens
aactcctgacctcaggtgatccatccgcctcaacctcccaaaatgctgggattacaggcttgagccactgcgcccagcccataatagttttttttttttttataattatttttcatttaacattcagctgttaccaaaatctcatagtgttttaagaaagtttatgaatctgtgttgggccacatgtggcccagagaccat

SEQ ID NO: 15949 - DNA, 201 bp, Homo sapiens
aattctcatgccttggactcctgagtagctgagactacaggcaagtgccatcaggactggctaattttttaaatgtttttagtagagacggggtttcaccrtgttggccaggctggtctcaaactcctgacctcaggtgatccatccgcctcaacctcccaaaatgctgggattacaggcttgagccactgcgcccagccc

SEQ ID NO: 15950 - DNA, 201 bp, Homo sapiens
cctgggccacattggaagaagaattgtcttgggccacacataaaatacactaacattaacaatagctgataagcttagaaaaaaaaaaattgcaaaaaaaatctcataaatttttttttttttttttgagacggagtctcactctgtcactaggctggagtgtagtgcaatggcattatctcggctcactgcaacctctgc

SEQ ID NO: 15951 - DNA, 201 bp, Homo sapiens; identical to SEQ ID NO: 15867

SEQ ID NO: 15952 - DNA, 201 bp, Homo sapiens
tataatcccagccacttgggaggctgaggcgggaggattgtttgagcccaggagttcgaggctttagtgagctatgattgtgcgactgcactccagcctgrgcagcagagcgagaccccatctgtgaaaaaaaacatttagaggatgaggagggagcggggactcagagatactgtccttccagcgagaccaacatgaaag

SEQ ID NO: 15953 - DNA, 201 bp, Homo sapiens; identical to SEQ ID NO: 15869

SEQ ID NO: 15954 - DNA, 201 bp, Homo sapiens; identical to SEQ ID NO: 15870

SEQ ID NO: 15955 - DNA, 201 bp, Homo sapiens; identical to SEQ ID NO: 15871

SEQ ID NO: 15956 - DNA, 201 bp, Homo sapiens
cctgccctcagcagatggtgctgcctcctacttcacggagcaaataacttctgcggctttcctctcaactacaaatctcactgcgcacaggcacgccggcyttcccctttcctttcccctgcctggggaggctggactctcctgtcccgctccctgtggccccgcccctcccctcctcccaccactgcaccttccattgtc

SEQ ID NO: 15957 - DNA, 201 bp, Homo sapiens
tcctagtgccttttctgagtgcgtggaggtgaagtctgtccgataccgcagctttgttccactgagcctgcttatctccaagggcgttcctctccactccrctaaagcagcacacacccatgggcgcccactgccgtcgggaggagctccacctctgaactctcacaattcattcagcatttggccatccatattcttcag

SEQ ID NO: 15958 - DNA, 201 bp, Homo sapiens; identical to SEQ ID NO: 15872

SEQ ID NO: 15959 - DNA, 201 bp, Homo sapiens; identical to SEQ ID NO: 15873

SEQ ID NO: 15960 - DNA, 201 bp, Homo sapiens; identical to SEQ ID NO: 15875

SEQ ID NO: 15961 - DNA, 201 bp, Homo sapiens; identical to SEQ ID NO: 15876

SEQ ID NO: 15962 - DNA, 201 bp, Homo sapiens; identical to SEQ ID NO: 1237

SEQ ID NO: 15963 - DNA, 201 bp, Homo sapiens
acccccgaaacacagaaagaagccttaatcccttgaggctggtgaggccccaagtccacccctcccacaagacaggtcttcagcactgcgctggcctcccrttgggggtctgttcagccactgggaatgtcttccttggctcctctcgctgaccctggctctcctgcacccaggatcctattatgtgtgtctgaggggcag

SEQ ID NO: 15964 - DNA, 201 bp, Homo sapiens
cagggttagtgctggcctgaggagaaagaagtatagcttcctccgccgatggccaatatcagcatgatccagccccacccgcaggctaatttccccctgasccagccagtcttcagttatggaacaatccttctcaaaaacgtagactgggtgtggtggctcaatgcctgtaatcccagcattttgcgaggctgaggcagg

SEQ ID NO: 15965 - DNA, 201 bp, Homo sapiens
ccccatctggtgctttcttgcatctacaccccagggccctgtggtggggctgcagggggaagctgtgcacctgagatgaggctggaacgggaattggcctmtctgctcccttcttcagtaagcaaggagccccgcccctcaggcccagcctctggcaagaggtggtggaatccttgtgccgggtagtagaggaggataagg

SEQ ID NO: 15966 - DNA, 201 bp, Homo sapiens
ctgcaagatgctgacggatgacatgactgaggttttcatagtcactggccatactgtcctggaggtgcgggaggagctcaggtaaacaagaagcccagggraggcggtgctgtgcgttgtgcccagggctcaggtgggggtttctggaccatttagacttgaatccctgctccccactgccgttctggaagaccacaaccg

SEQ ID NO: 15967 - DNA, 201 bp, Homo sapiens
cctgtctctcgagaaaaatccacacacaaagaagaggtccattctgtgtcccatgtcaagaagcagatcctggctgggcgcagtggatcacctgaggtcargtgttcgagaccagcttggccaacatggtgaaactccgtctctactaaaaatacaaaaaatagctgggcgtggtggcaggtgcctgttttcccagctact

SEQ ID NO: 15968 - DNA, 201 bp, Homo sapiens; identical to SEQ ID NO: 15881

SEQ ID NO: 15969 - DNA, 201 bp, Homo sapiens; identical to SEQ ID NO: 15880

SEQ ID NO: 15970 - DNA, 201 bp, Homo sapiens; identical to SEQ ID NO: 15882

SEQ ID NO: 15971 - DNA, 201 bp, Homo sapiens; identical to SEQ ID NO: 15887

SEQ ID NO: 15972 - DNA, 201 bp, Homo sapiens
aattaaatggagagtcaccattgttcacctctagattggacttcttccttccactccacgctccagacccttgtattcaattatccattggacctctccamtaggacgacccaccaccacctgttattcaacataccccacactgaacattgtttttcccaacacctgttgctcctcccgcatcctctatttcagtgagca

SEQ ID NO: 15973 - DNA, 201 bp, Homo sapiens
aactctgtctcaaaaaaaaaaaaaaaaaatggaaccaatagattgaatgtggggtccaaagaagagagagaaatgaatcaagataaaaaacaacaaaaaarcagaaattaaaaaaaaatttttacagaaatgaatcaagatccattgcagggtttttagttggagcaactgaatgggttgtggcatttcctgagttgagaa

SEQ ID NO: 15974 - DNA, 201 bp, Homo sapiens
ctcctgacctcaggtgatccactcacctcggcctcccaaagtgctgggattacaggtgtgagccaccgtgcccagctagcacagagaaatctgaataaagrgaaagggagcctgccatgtggctctctgggaactgtcaatccaggaagaggaaacagcaatataaaggccttcagccctggcctgggaggaggtcttctg

SEQ ID NO: 15975 - DNA, 201 bp, Homo sapiens
gcagtggcatgatcttggctcactgcaatgtctgcctcccgggttcaagcaattctcatgccttggactcctgagtagctgagactacaggcaagtgccaycaggactggctaattttttaaatgtttttagtagagacggggtttcaccatgttggccaggctggtctcaaactcctgacctcaggtgatccatccgcct

SEQ ID NO: 15976 - DNA, 201 bp, Homo sapiens; identical to SEQ ID NO: 15834

SEQ ID NO: 15977 - DNA, 201 bp, Homo sapiens; identical to SEQ ID NO: 15836

SEQ ID NO: 15978 - DNA, 201 bp, Homo sapiens
tacttgggaggttgaggcaggaaaatggcgtgaacccgggaggtggagcttgcagcagtgagccgaggtcgcgccactgcactccagcctgggcgacagarcaaggctccatctcaaaaaaaaaaaaaaaaggccatctatgtgagatagtgaacattaccgtggcttggcatttttgttggcttgtacctagcccaggtg

SEQ ID NO: 15979 - DNA, 201 bp, Homo sapiens
ggaaccagtgctgtagaattcgacctagagtcttctatgtgaagcttggggatacagagatgtataaggtggcctctgcctttagcagcagcagatggatmggtcgaggaggggagatctggacagtgtcagactgagataccatgtgggaggcacagggtgcccggggactgggagagtgtcgctccctaagcaggtagg

SEQ ID NO: 15980 - DNA, 201 bp, Homo sapiens; identical to SEQ ID NO: 15839

SEQ ID NO: 15981 - DNA, 201 bp, Homo sapiens
ttcatacatgtttgtacaaacaaatattaggtcatgctgcagctttttttttttttttttaaatactcctgcccaggttggagtgtagtggtgcgatctcrgctcactgcatcctctacctcccaggttcaagcgatcctcgtgcctcagcctcccgattagctagaattacaggctcccaccaccacacccggctaattt

SEQ ID NO: 15982 - DNA, 201 bp, Homo sapiens; identical to SEQ ID NO: 15844

SEQ ID NO: 15983 - DNA, 201 bp, Homo sapiens; identical to SEQ ID NO: 1246

SEQ ID NO: 15984 - DNA, 201 bp, Homo sapiens
ccaaagcggggccatctaggttgggactcaaaacacaaagaaattctgccacaaaggttcaatgtcactttccttggccccaaaagagaaactggagagaycagagtgctcagattaggtaggcagctgcagcctcccactgtagccaccctgcagagcatgagggagggactcactgataaagcaccaggactacccact

SEQ ID NO: 15985 - DNA, 201 bp, Homo sapiens
ccgattcctcaggctcaacctgaagccggatctctccgacacggtgagaagccaggctacctgctgtgggaggcagagatggggtggctggaaaggcctcrtgtgaacactggggggctctgtggggccatgtggctgttcagtgtgttggtgcttatctgttcttcctggggacagacaccctgtgcagctggccacaga

SEQ ID NO: 15986 - DNA, 201 bp, Homo sapiens
gtgcccagctagcacagagaaatctgaataaagggaaagggagcctgccatgtggctctctgggaactgtcaatccaggaagaggaaacagcaatataaakgccttcagccctggcctgggaggaggtcttctgcacgtggagctggggaggagtggaggaaatgagttggagggtgggggtgtggaatgagtcaggatta

SEQ ID NO: 15987 - DNA, 201 bp, Homo sapiens
gtaaacaagaagcccaggggaggcggtgctgtgcgttgtgcccagggctcaggtgggggtttctggaccatttagacttgaatccctgctccccactgccrttctggaagaccacaaccgtatcatttccacctcgacaggaaagcccgggagaagatgatggactcatcccgctccgtaggcaacggcttcacctatcag

SEQ ID NO: 15988 - DNA, 201 bp, Homo sapiens; identical to SEQ ID NO: 15857

SEQ ID NO: 15989 - DNA, 201 bp, Homo sapiens
atccaggaactcccctcttctctggaaggagtgagccttctgtccctggggctgccctgggcaccacagttctgtttctgggggaaggggcttttagggcrtgcgcctgcctgactatgcctactttctgcagattgggctcgacacaggctactggacggccatcaaccacttcttcatctggggaagccttgctgttta

SEQ ID NO: 15990 - DNA, 201 bp, Homo sapiens
aagctttcttcttccaagctaacttctgtcctggaggccgttgctggggagtacgccctggtcataaatggtcacagcctggtaggcatcgctatccttarcttgggcagtatctttccagtgagcacttctgtccagggcttttatatcttgttctaatttcccctgatttcagagaagactggtctcaaaggggactgg

SEQ ID NO: 15991 - DNA, 201 bp, Homo sapiens
cagcactttgggaagccaaggtgggcggataacgaggtcaggaattcgagaccagcctggccaacatgttgaaaccccgtctctactaaaaatacaaaaaytagccaggtgtggtggtggttgcctgtaatcccagctacttgggaggctaaggtaggagaatcgcttgaaaccggaaggtggaggtagcagtgagccaag

SEQ ID NO: 15992 - DNA, 201 bp, Homo sapiens
gtcctctcctgatgccctgaccctggtctcagctccaggaattaggggagctccttggctgtttgaagtgagacactggcctctgggcatcctggccaggyggaaccctgctagactctcccctgttgctgctcagggtccttgtgagtctgtggaatgtggctgtggttggacttcccagtgtggcccgtggctgtgctg

SEQ ID NO: 15993 - DNA, 201 bp, Homo sapiens
tgggcgtggtggcaggtgcctgttttcccagctactcggggggctgaggcaggagaattgcttgaatccaggaggtggaggttacagtgagccgagtttgygccattgtactccagcctgggcgacaagagtgaaagtctatcaaaaaaaaaaaaaaattagattctgagagtcctccccttgtcctctcctgatgccctg

SEQ ID NO: 15994 - DNA, 201 bp, Homo sapiens
gccacattaattgacagtcagtgtgtgctcatccacacttttcatacatgtttgtacaaacaaatattaggtcatgctgcagctttttttttttttttttwaatactcctgcccaggttggagtgtagtggtgcgatctcggctcactgcatcctctacctcccaggttcaagcgatcctcgtgcctcagcctcccgatta

SEQ ID NO: 15995 - DNA, 201 bp, Homo sapiens
gaaagggtccatcctggccaggcacggtggctcatgcctatagtcatagcactttgggaggctgaggtgggaggattgctcgagcccaggaatgcgagacmagcctgggcaacatagtgagaccacatccctacaaaaaatttaaaaattagccaggtatggtggcatgcacctgtggtctcagctggccagtgactcagg

SEQ ID NO: 15996 - DNA, 201 bp, Homo sapiens
cttataagacaaaccatacagagtgtataagaaaaagtgaatagaggtcggtaccatggctcacgcctgtaatcccagcactttgggaggccgaggtgggyggattgcctgaggccaggagttcgagaccagtctggtcaacatggtgaaaccctgtctctattaaaaatacaaaaattattagctgggcgtggtgctgca

SEQ ID NO: 15997 - DNA, 201 bp, Homo sapiens; identical to SEQ ID NO: 15858

SEQ ID NO: 15998 - DNA, 201 bp, Homo sapiens
agtggaactggggccccacagtttccttaacattggttttttcttccttcctagttgggtctgaggggcctagaagaaagggtccatcctggccaggcacrgtggctcatgcctatagtcatagcactttgggaggctgaggtgggaggattgctcgagcccaggaatgcgagaccagcctgggcaacatagtgagaccac

SEQ ID NO: 15999 - DNA, 201 bp, Homo sapiens; identical to SEQ ID NO: 15859

SEQ ID NO: 16000 - DNA, 201 bp, Homo sapiens; identical to SEQ ID NO: 15860

SEQ ID NO: 16001 - DNA, 201 bp, Homo sapiens
cggggcgttcctctgctggctgtgtgcagccggctccaccttcaggctctccttgccctttcccacccaggtttctgtgcccaggtgtcttctccgttctygtctctccccaggcggagggcctgcagcgaaggcccatgtgggtggggcacctcctcttcttcccgacccaagcctcacctcttgtcccctgtgcagtgt

SEQ ID NO: 16002 - DNA, 201 bp, Homo sapiens; identical to SEQ ID NO: 15861

SEQ ID NO: 16003 - DNA, 201 bp, Homo sapiens
aacgaattccttcgaggcgggggaaggtgtcttacctttcagttttcttcttttcagttccgccacaagagcgataaccaggtgaataaccgccagtctcrggtgctgatcaatggaatgtgagtgcctgttggagacaagagctctggggacgaagggggtcccttaggaacctctttagctcctgacagcctcttcact

SEQ ID NO: 16004 - DNA, 201 bp, Homo sapiens
cgctccctaagcaggtaggcagagagggagagatggcatttgctctgggctttgagtggtgactgggctggatgaaggtggagccacaatggagaggaggmtgagagggctggaagcaaaggtgtggagatgggagcctgggaatggcctatggaaatagttggccagggtcttgggccaagagcaagagctggaaacata

SEQ ID NO: 16005 - DNA, 201 bp, Homo sapiens; identical to SEQ ID NO: 15863

SEQ ID NO: 16006 - DNA, 201 bp, Homo sapiens; identical to SEQ ID NO: 15864

SEQ ID NO: 16007 - DNA, 201 bp, Homo sapiens
tgcaatggcattatctcggctcactgcaacctctgcctctcgggttcacgtgattctcctgcctcagcctccctagtagctgggattacaggtgcccgccrccacacccggctaatttttttgtatttttagtagagatgagagatggggtttcaccatgttggccagactggtctcgaactcctgacctcatgatctgcc

SEQ ID NO: 16008 - DNA, 201 bp, Homo sapiens; identical to SEQ ID NO: 15866

SEQ ID NO: 16009 - DNA, 201 bp, Homo sapiens
gttggcttgtacctagcccaggtgaatagattatttacagtaagttttctggtatgttaaaagtagctcatccccactcttaccaactttgaggactctgraaggtttcaaggtgccagattgagagctaatcaactatttcagtttcttcatcatatagatgaaataatggtcagacagaaggccacatgataattggtg

SEQ ID NO: 16010 - DNA, 201 bp, Homo sapiens; identical to SEQ ID NO: 15868

SEQ ID NO: 16011 - DNA, 201 bp, Homo sapiens
gggaaggcagttctttcagccggggaaggtgtggctggttctccctcctggctgcagctgatctagaactctcttgggttgctgaactaagttagtctggrggtagctggcttgaggttggttctagctgccaaagactttggaaaggaggaggcagggacagagtcagagtctgcccttggtcatccagggtcaaaacgg

SEQ ID NO: 16012 - DNA, 201 bp, Homo sapiens
gggcttttatatcttgttctaatttcccctgatttcagagaagactggtctcaaaggggactgggaggagctgagactcccaggtgtctcctggaaagacyggctctctcaggtttctctgtgctccaggcccacgcactggaggcagacatggagctggagtttctggagacagcgtgtgcctgcaaagctgtcatctgc

SEQ ID NO: 16013 - DNA, 201 bp, Homo sapiens
cttgaatccctgctccccactgccgttctggaagaccacaaccgtatcatttccacctcgacaggaaagcccgggagaagatgatggactcatcccgctcygtaggcaacggcttcacctatcaggacaagctttcttcttccaagctaacttctgtcctggaggccgttgctggggagtacgccctggtcataaatggtc

SEQ ID NO: 16014 - DNA, 201 bp, Homo sapiens
tcgcgatatagacacacgcctccacggaggctccgggcactcgggctccccgttttctcccctctgccgcaggcatccctggtcttccttccctgcgctgmctgagcacctgggctcctgtgggagtggcttccagcccctaggtccccatcgtcctagtgccttttctgagtgcgtggaggtgaagtctgtccgataccg

SEQ ID NO: 16015 - DNA, 201 bp, Homo sapiens
gaggcgggggaaggtgtcttacctttcagttttcttcttttcagttccgccacaagagcgataaccaggtgaataaccgccagtctcaggtgctgatcaayggaatgtgagtgcctgttggagacaagagctctggggacgaagggggtcccttaggaacctctttagctcctgacagcctcttcactgtcttctcgttgc

SEQ ID NO: 16016 - DNA, 201 bp, Homo sapiens
caagaccctgtctcaaaaaaaaatcttattaaaaaaaaaagaacatgctaaatttgtgttatatgaattttacctcaattaaaaaaaaaataggccaggcrtggtagcatgtgcctattatcccagctacttagggggctgaggtgggaggatcacttgaggccaggagttcaagaacagcctgggcaacaaagcaagacc

SEQ ID NO: 16017 - DNA, 201 bp, Homo sapiens; identical to SEQ ID NO: 1272

SEQ ID NO: 16018 - DNA, 201 bp, Homo sapiens
tctccctcccctctgcagtttcgtggtgggctcggacggctacgtgtacgagggacgcggctggcactgggtgggcgcccacacgctcggccacaactccyggggcttcggcgtggccatagtgggcaactacaccgcggcgctgcccaccgaggccgctctgcgcacggtgcgcgacacgctcccgagttgtgcggtgcg

SEQ ID NO: 16019 - DNA, 201 bp, Homo sapiens
agccaatgtggtaaaactccatctccactaaaaatagaaaacttagctagccttggtggtgcatgcctgtagtcccagctactctggaggctgaggcgagrgaatcacctgaacctgggaaaaaagaagagttactaagaaaatcgtatggaagaggaagtatgtttactattcattaagtagaagtgtgtcatcataaag

SEQ ID NO: 16020 - DNA, 201 bp, Homo sapiens
gcacccggccaaggggccttgatttatcctgacaagtgggcctcctgaggttgaaggaaacctggggtagaggtgattcattgtgggatttccagccttcyttctgcctcccaggcccagcccagccctgatgcattggtgtgtgagtgcctgaatgtgggtgtacatgtgtgtgtttcagatcctgaccccaaactggcc

SEQ ID NO: 16021 - DNA, 201 bp, Homo sapiens
acctgtagtcccagctactcgagagcctgaggtaggaggatcgcttgagcccaggaggttgagaatgcagtgagctgtgattgtgccactgcactccagcytggccaacagagcaagaccctgtctcaaaaaaaaatcttattaaaaaaaaaagaacatgctaaatttgtgttatatgaattttacctcaattaaaaaaaa

SEQ ID NO: 16022 - DNA, 201 bp, Homo sapiens
gcctaggcaacagagcgagactctgtctcaaaaaaaaaaaaaaaaaaaaaaaaagcctgtaatcccagcactttgagaggccaagacgggtggatcacccraggttgggagtttgagaccagcctggccaacatgctgaaatcccgtctctactaaaaatacaaaaattaactggaagtggtggacgggcacctgtaatct

SEQ ID NO: 16023 - DNA, 201 bp, Homo sapiens
caaacaaaaaaaacttaaaaaggccaggcgcagtggctcacgcctgtaatcccagcactttgggaggccgaggcgggaggatcacgaggtcagaagattgrgaccatcctggctaacacggtgaaaccccgtctctactaaaaaatacaaaaaaattagccaggcgtgatggcgggtgcctgtagtcccagctacttggga

SEQ ID NO: 16024 - DNA, 201 bp, Homo sapiens; identical to SEQ ID NO: 1281

SEQ ID NO: 16025 - DNA, 201 bp, Homo sapiens
caccacccatctctacaaacaaaaaaaacttaaaaaggccaggcgcagtggctcacgcctgtaatcccagcactttgggaggccgaggcgggaggatcacsaggtcagaagattgagaccatcctggctaacacggtgaaaccccgtctctactaaaaaatacaaaaaaattagccaggcgtgatggcgggtgcctgtagt

SEQ ID NO: 16026 - DNA, 201 bp, Homo sapiens; identical to SEQ ID NO: 1282

SEQ ID NO: 16027 - DNA, 201 bp, Homo sapiens
gattgcgtcactgtacagcagcctggagaagagagtgagagcttgtctcaaagaaaaaaaaagaaagaaaggaagaaagaaagaacgaaagaaagaggaargaagggagaaagggaggaagggaggaaggaaggaaggaaggaaggaaggaaggaaggaaggaaggaaggaaggaaaaaaaaaaaaaaagaaaaagaaaaa

SEQ ID NO: 16028 - DNA, 201 bp, Homo sapiens
  misc_feature (1)...(201): n = A,T,C or G, or insertion/deletion polymorphism (see Tables 1-2)
ttccttgcgaatttcaggatagttttgtctaattctgtgaaaaatgactttgatattttgatagagattgcattgaatctgtagattgctttgggaaatcngatttctctttttctagaaaatgaggtctcactatgttgcccaggctggtcttgaactcctgggctcaagcaatccacccacctcgcctcccaaagtgtg

SEQ ID NO: 16029 - DNA, 201 bp, Homo sapiens; identical to SEQ ID NO: 1277

SEQ ID NO: 16030 - DNA, 201 bp, Homo sapiens
gtattcccagcactttgggaggctgaggcatgaggattgcttgagcccaggagttcaagacaagcatgggcaacatagtgaggccccatctctacaaaaamcaaacaaacaaaaagttaaaaattagtcaggtagcatgcacctgtagtcccagctactcgagagcctgaggtaggaggatcgcttgagcccaggaggttg

SEQ ID NO: 16031 - DNA, 201 bp, Homo sapiens; identical to SEQ ID NO: 1269

SEQ ID NO: 16032 - DNA, 201 bp, Homo sapiens
taggtggtggactggagaagaacctagattctagaccaggagagtgtgtcgagtaagacttcctggattcaaattctactactggccaggcctgtaatccmagcactttgggagatcaaggcgggcagatcacttgagatcaggagatcgagaccagcctggccaacatggtgaaaccccatctctactaaaaataccaaa

SEQ ID NO: 16033 - DNA, 201 bp, Homo sapiens
aggataagggaaggaatctggggcctggagagcaaaagtagggaaggcttcttggaggaggagacataagagctaggctaggaagaaagagaaatgatttkggggagaagccagaaagggcattttttgcagagaagagcaaagctacacaggttaggtggtggactggagaagaacctagattctagaccaggagagtgt

SEQ ID NO: 16034 - DNA, 201 bp, Homo sapiens
aatgctacaactcatgagagccggccctgctccataatcagtggctactcttgtgacccctctagtctctctgcagcctggaggggccttgattttttttkttttttttttttttgagacagagttttgcttttgttgcccaggatggagtgcaatggcgcgatctcagctcaccgcaacctctgcctcccgggttcaagc

SEQ ID NO: 16035 - DNA, 201 bp, Homo sapiens
caatgctacaactcatgagagccggccctgctccataatcagtggctactcttgtgacccctctagtctctctgcagcctggaggggccttgatttttttwtttttttttttttttgagacagagttttgcttttgttgcccaggatggagtgcaatggcgcgatctcagctcaccgcaacctctgcctcccgggttcaag

SEQ ID NO: 16036 - DNA, 201 bp, Homo sapiens
ggcctcatcccagccttgcttaagatctagggccagaggctctgcctatctgtgccaatgctacaactcatgagagccggccctgctccataatcagtggmtactcttgtgacccctctagtctctctgcagcctggaggggccttgatttttttttttttttttttttttgagacagagttttgcttttgttgcccagga

SEQ ID NO: 16037 - DNA, 201 bp, Homo sapiens
tgccaccatagtgaacgctgtcgactctgacgttgagcccaagcccagccctgccccaagttccttctcctctggcctcatcccagccttgcttaagatcyagggccagaggctctgcctatctgtgccaatgctacaactcatgagagccggccctgctccataatcagtggctactcttgtgacccctctagtctctct

SEQ ID NO: 16038 - DNA, 201 bp, Homo sapiens
atagttagttggtccccagggaggaccaatgtggggtgagactggaccctttccaaatctgagaggaggctgagggatggtctgtatgtgcgctttaatgmgggtggaggaacaggcagagaaacagttcctgaccccagccttcaacccccttgcctgtaggatgcccggccatccacccccgctgccgctggggagcgg

SEQ ID NO: 16039 - DNA, 201 bp, Homo sapiens
agaaagaggaaagaagggagaaagggaggaagggaggaaggaaggaaggaaggaaggaaggaaggaaggaaggaaggaaggaaggaaaaaaaaaaaaaaaraaaaagaaaaaatagagaggtgaacaacccaggtaccgatgcagggaactggaggcagccagggaataatgtgttttcaagcaagtttccactgtaggca

SEQ ID NO: 16040 - DNA, 201 bp, Homo sapiens
ttgagaatgcagtgagctgtgattgtgccactgcactccagcctggccaacagagcaagaccctgtctcaaaaaaaaatcttattaaaaaaaaaagaacaygctaaatttgtgttatatgaattttacctcaattaaaaaaaaaataggccaggcatggtagcatgtgcctattatcccagctacttagggggctgaggtg

SEQ ID NO: 16041 - DNA, 201 bp, Homo sapiens
tgcctctgccacttccttcctgtgtgaccttaggcaggtaacttaacctctctgtgcttcagatgcctcatctgtaaagggacaccatcttagtccctttrtgcttctatataggccagggtacctgaaactgagtaaatttgtaaagaagagaaatttactttcttgcagttctgcaggctaggaagtcccaaatgccag

SEQ ID NO: 16042 - DNA, 201 bp, Homo sapiens
ctgtgtacctcactttcctcatctacacaaggatagtgttgggggtcatggggttatcagatggagggctgggagcattgggtagatgtggaatcaatacraggaggctcaggaatgggtggggctgggctaacacattctttcctcctgcagcctccctgcccctgctcatggactctgtcatccaggccctggctgagc

SEQ ID NO: 16043 - DNA, 201 bp, Homo sapiens
tgtagtataatttgaagtcaggtaatgtgataccaggctcgttttgcttagaattgcttttgctatttgggctcatttttggttccttgcgaatttcaggrtagttttgtctaattctgtgaaaaatgactttgatattttgatagagattgcattgaatctgtagattgctttgggaaatctgatttctctttttctaga

SEQ ID NO: 16044 - DNA, 201 bp, Homo sapiens
ggcatgcagctgtagtcccagctactcaggaggctaaggcgagaggatctcttgagcccaggagttagaggttacagagagctatgatggcaccactgcaytccagcctggatgacagacctcatctacaaaaaataataatattcatattatgtataatgtaatattatttatattactatgtaatataaatattatatt

SEQ ID NO: 16045 - DNA, 201 bp, Homo sapiens
atcccagcactttgggaggctgaggcgaggggatcacctgagctcaggagttcgaaaacaacctgggcaatagagtgaaatctcatctctgcaaaaaaaaattttcaaattatccaggcatagccaggcacggtggctcatgcctgtaatcccagcattttgggatgctgaggagggtggatcgcctgagctcaggagttc

SEQ ID NO: 16046 - DNA, 201 bp, Homo sapiens
cacttgaacctgggaagcagggctgcagtaagccaagattgcaccactacactccagcctgggtgacagagggagaccctgcctcaaaaaataataataawaaaataaaaaataaagctgggtgcagtggctcacgcctgtaatcctagcatttcgggaggccgaggcaggaggattgcttgaggccaagagtttaagacc

SEQ ID NO: 16047 - DNA, 201 bp, Homo sapiens
tggggtctcccgagggcagggaggggaaaaagaaaaaaaaaagttagatatgaggtctccctatgtcacccagactggagtgcactgcctattcacaggcrtgatcacagctcactgcagcctcgaactcctggcctcaagcgatcctcctccctcagcctcctgaatagctcagattactggcattttatggctttggtt

SEQ ID NO: 16048 - DNA, 201 bp, Homo sapiens
aaggatgaataggagttcatctcattttgttttgcttcattatatttatttgcattaatttatggggtacaagtgtaaccttgtttctcgcatagattgcrtagtggtcaagtctgggcttttaggtacccatcactccaataacatacatccacccattaagcaatctgtcatcatcctccctcctctctctccctcacc

SEQ ID NO: 16049 - DNA, 201 bp, Homo sapiens
tgggaggccgagtcgagtggatcacgaggtcaggagattgagaccatcctggctaacacggtgaaaccctgtctttactaaaaaaaaaaaaaaaaaaaaaatacaaaaaattagccgggtatagtggtgggcgcctgtagtcccagctactcgggaggctgaggcaagagcatggcatgaaccagggaggcggagcttgca

SEQ ID NO: 16050 - DNA, 201 bp, Homo sapiens
cgaggcggaaggatcacctgaggtcaggagtttgacaccagcctggccaacatggtgaatccctatctctactaaaaatacaaaaaattaggccaggcacrgtggctcacgcctgtaatcccagcactttgggaggccgagtcgagtggatcacgaggtcaggagattgagaccatcctggctaacacggtgaaaccctgt

SEQ ID NO: 16051 - DNA, 201 bp, Homo sapiens
ggcccagcaggtgtggggaacccttgtccttctacagaggctggagccagtacacctccagcttcagtgcatgagccaagaacagctggcccaggtggctrccaatgctaccaaggaattcactgaggccttcctgggtgaggaagttccccacaccctgtgatccttcccattacagacacagacgcccccaccccgtat

SEQ ID NO: 16052 - DNA, 201 bp, Homo sapiens
gctagccttggtggtgcatgcctgtagtcccagctactctggaggctgaggcgagagaatcacctgaacctgggaaaaaagaagagttactaagaaaatcrtatggaagaggaagtatgtttactattcattaagtagaagtgtgtcatcataaaggtcttcatcttcatcgtcttcatgttgaataggctgagggggagg

SEQ ID NO: 16053 - DNA, 201 bp, Homo sapiens
cagggaagcaatttacatacacaacagcccagtcatgtcaacctgccccatctgatgccagaataaaggggagatgggtccattctgcaggtctcagtcaygggcacccggagaagaggaaggacatttcactgtcagcccaggtgagtccagaagccagctcctggaacaatgccagggtcctgaacactcaagctcaac

SEQ ID NO: 16054 - DNA, 201 bp, Homo sapiens
ccaaggtgggtggatcacctgagctcaggagttcgagaccagcctggccaacatggcaaaaccctgtttctactaaaaatacaaaaaaaaaaaagtatctrggcatggtggcacatacctgtactcccagctactcaggaggctgaggcaggataatcgcttgaacccgggaggtggaggttgcagtgagctgagattgca

SEQ ID NO: 16055 - DNA, 201 bp, Homo sapiens
tcactccaataacatacatccacccattaagcaatctgtcatcatcctccctcctctctctccctcacccttctgaatctccactatctatctttccacaygctacatccatgcatacacattatttagctcccatttataagtgagaacttacggtatttgtctttctgtgtttgacttgtttcacttgagataatggcc

SEQ ID NO: 16056 - DNA, 201 bp, Homo sapiens
aaagaagggagaaagggaggaagggaggaaggaaggaaggaaggaaggaaggaaggaaggaaggaaggaaggaaggaaaaaaaaaaaaaaagaaaaagaawaaatagagaggtgaacaacccaggtaccgatgcagggaactggaggcagccagggaataatgtgttttcaagcaagtttccactgtaggcaagagagctc

SEQ ID NO: 16057 - DNA, 201 bp, Homo sapiens
ctgggaaacgagcttggaggaggacattgtctcttactcccatgggaagtgtcccccattcactctatcacttagcaccctacatcctgagcttccactaygtgcccagcttttttctgggaggtccccagaaagaggacacctgaggaggccccaggggtggcccccaggggaatcccaggcctggctcaggctggacat

SEQ ID NO: 16058 - DNA, 201 bp, Homo sapiens
ggccaacatgctgaaatcccgtctctactaaaaatacaaaaattaactggaagtggtggacgggcacctgtaatctcagctccttgggaggctgaggcagragaatcacttgaacctgggaagcagggctgcagtaagccaagattgcaccactacactccagcctgggtgacagagggagaccctgcctcaaaaaataat

SEQ ID NO: 16059 - DNA, 201 bp, Homo sapiens; identical to SEQ ID NO: 1279

SEQ ID NO: 16060 - DNA, 201 bp, Homo sapiens
taggcaacagagcgagactctgtctcaaaaaaaaaaaaaaaaaaaaaaaaagcctgtaatcccagcactttgagaggccaagacgggtggatcacccaagrttgggagtttgagaccagcctggccaacatgctgaaatcccgtctctactaaaaatacaaaaattaactggaagtggtggacgggcacctgtaatctcag

SEQ ID NO: 16061 - DNA, 201 bp, Homo sapiens
ccactacactgcagcctaggcaacagagcgagactctgtctcaaaaaaaaaaaaaaaaaaaaaaaaagcctgtaatcccagcactttgagaggccaagacrggtggatcacccaaggttgggagtttgagaccagcctggccaacatgctgaaatcccgtctctactaaaaatacaaaaattaactggaagtggtggacgg

SEQ ID NO: 16062 - DNA, 201 bp, Homo sapiens
ggctaacacattctttcctcctgcagcctccctgcccctgctcatggactctgtcatccaggccctggctgagctggagcagaaagtgccagctgccaagrccagacacacagcttctgcgtggctgatgtcagctccaaactctggcccccacaatcgcctctaccacttcctgctgggggcatggagcctcaatgctac

SEQ ID NO: 16063 - DNA, 201 bp, Homo sapiens
gggcccgggtccccctcacgccgcatggtgcttgcttctccctcccctctgcagtttcgtggtgggctcggacggctacgtgtacgagggacgcggctggyactgggtgggcgcccacacgctcggccacaactcccggggcttcggcgtggccatagtgggcaactacaccgcggcgctgcccaccgaggccgctctgcg

SEQ ID NO: 16064 - DNA, 201 bp, Homo sapiens
ctggctaatttttgtatttttattagagatggggtttcacggtgttggccaggctggccttgaactcctgatctcaggtgatccactcacctcggcctccsaaagtgctgggattacaggcctaagccaccacagccagtcccaggcatctttcaaaatacctttccctctaacatccccaatttttaacttcaattcatc

SEQ ID NO: 16065 - DNA, 201 bp, Homo sapiens; identical to SEQ ID NO: 1280

SEQ ID NO: 16066 - DNA, 201 bp, Homo sapiens
tctctccctcacccttctgaatctccactatctatctttccacacgctacatccatgcatacacattatttagctcccatttataagtgagaacttacggyatttgtctttctgtgtttgacttgtttcacttgagataatggcctccagttccatccatgttgctgcaaaagacattctttctttttttttttttttgag

SEQ ID NO: 16067 - DNA, 201 bp, Homo sapiens
gagtctcgctctgttgcccaggctggagtgcagtggcgcgatctcggctcaccgcaagctccgcctcctgggttcacgccattctcctgcctcagcctccygagcagctgggactacaggaacccgccaccatgcccagctaattgttgtatttctagtagagacagggtttcactgtgttaaccagaatggtctcgatct

SEQ ID NO: 16068 - DNA, 201 bp, Homo sapiens
agattgcaccactacactccagcctgggtgacagagggagaccctgcctcaaaaaataataataataaaataaaaaataaagctgggtgcagtggctcacrcctgtaatcctagcatttcgggaggccgaggcaggaggattgcttgaggccaagagtttaagaccaacctggccagcatatcaagactccatctttaaaa

SEQ ID NO: 16069 - DNA, 201 bp, Homo sapiens
ggaggagtcctgataggtagagcaaagttggagaggtggcgtggcttaggctaggggcggggccttaatagggaccgggaatagctaaatcatgggactcsagtcagggtagagaactagtacaggaggcgggatctgggagaggagcgggacctgtggcagagtctgggtctggggccaggcagagatggcctaaaacag

SEQ ID NO: 16070 - DNA, 201 bp, Homo sapiens
tacaggaggcgggatctgggagaggagcgggacctgtggcagagtctgggtctggggccaggcagagatggcctaaaacagacaaggaggcctggtgcggwggctcccgcctgtaatctcaccactttgggaggctgagaagagaggatcgctggagcccaggagttcgagaccagcctgagcaatataggaagacacccc

SEQ ID NO: 16071 - DNA, 201 bp, Homo sapiens
ctctgccagaaagaaagagaaaaagagaaagaaagagaagaaagagaaagaaagaaagaaagaaagaaagaaagaaagaaagaaagaaagaaagaaagaargaaggaaggaaggaaggaaggaaggaaggaaggaaggaaggaaggaaggaagaaagaaagaaagaaagaaagaaaggaagaaagaaagaaagaaaaaaga

SEQ ID NO: 16072 - DNA, 201 bp, Homo sapiens
agtcccagctactcaggaggctgagtagggagaatcacttgaatccgggaggcagagattgcagtgagccaagatcgtgccactgcacaccagcctgggasacagagcgaaactccttctcgataaataaattaattaataataataagagtaataataaatcttgccatcttccagaagccccccttgtaccctcttccc

SEQ ID NO: 16073 - DNA, 201 bp, Homo sapiens
aatctcggctcactgcaacctccacctcccatgttcaagtgattctcccgtctcagcctcccaagtagctgggattacaggcacacaccaccatgcctggstaatttttgtatttttattagagatggggtttcacggtgttggccaggctggccttgaactcctgatctcaggtgatccactcacctcggcctccgaaag

SEQ ID NO: 16074 - DNA, 201 bp, Homo sapiens; identical to SEQ ID NO: 1276

SEQ ID NO: 16075 - DNA, 201 bp, Homo sapiens; identical to SEQ ID NO: 1275

SEQ ID NO: 16076 - DNA, 201 bp, Homo sapiens
gtcactgtacagcagcctggagaagagagtgagagcttgtctcaaagaaaaaaaaagaaagaaaggaagaaagaaagaacgaaagaaagaggaaagaaggragaaagggaggaagggaggaaggaaggaaggaaggaaggaaggaaggaaggaaggaaggaaggaaggaaaaaaaaaaaaaaagaaaaagaaaaaatagag

SEQ ID NO: 16077 - DNA, 201 bp, Homo sapiens
attgtggttttaatttgcatttctctgatgattggtgatgttgagcatgttttcctttgcctattggccatgtgtatatcttcttttgaaaaatgtctattaatgtcttttgcccgctttttagtgggtttctttctttctttctttttctttctttctttctttttctttctttctttctttcttttctttcttgaattg

SEQ ID NO: 16078 - DNA, 201 bp, Homo sapiens
aacaggcagagaaacagttcctgaccccagccttcaacccccttgcctgtaggatgcccggccatccacccccgctgccgctggggagcggcgccttatcrgggccgcccgaagctgctgcagctgccgctgggattcttgtacgtgcatcacacctacgtgcctgcaccaccctgcacggacttcacgcgctgcgcagcc

SEQ ID NO: 16079 - DNA, 201 bp, Homo sapiens
gcactttgggaggccgaggagggcagataacctgaggtcaggagttcgagaccagcctggccaacatggcgaaacaccgtctctactaaaaataaaaattwaaaaaaaaattagatgggcgtggtggcgggtgcctgtaatcccagctactccggaggctgaggcaggagaatcgcttgaacccgggaggtggaggtggca

SEQ ID NO: 16080 - DNA, 201 bp, Homo sapiens
ctgaggtcaggagttcgagaccagcctggccaacatggcgaaacaccgtctctactaaaaataaaaattaaaaaaaaaattagatgggcgtggtggcgggygcctgtaatcccagctactccggaggctgaggcaggagaatcgcttgaacccgggaggtggaggtggcagtgagccgagatcgcgcccttgcacttcagc

SEQ ID NO: 16081 - DNA, 201 bp, Homo sapiens
aatcacttgaatccgggaggcagagattgcagtgagccaagatcgtgccactgcacaccagcctgggagacagagcgaaactccttctcgataaataaatyaattaataataataagagtaataataaatcttgccatcttccagaagccccccttgtaccctcttcccagccaccagtgcctccaaaagaaactgatacc

SEQ ID NO: 16082 - DNA, 201 bp, Homo sapiens
taatgtaatattatttatattactatgtaatataaatattatatttttattttatgagatctatattatttttatagacctcatttataaataataataayaataagggccgggcacggtggcttacgcctataataccagcactttgggaggccaaggcgggcagatcatttcaggtcaggagttcaagaccagcctgac

SEQ ID NO: 16083 - DNA, 201 bp, Homo sapiens
ttaattttattttattttatttattttattttatgatggagtctcactctgtcacccaggctggaatgcagtggggggttcttggctcactgcaacctccrcctcctgggttcaagcagttctcctgcctcagcctcctgagtagctggggttacaggtgtgtgccaccatgcccagctaatttttgtatttttagtagtg

SEQ ID NO: 16084 - DNA, 201 bp, Homo sapiens
gaaagaaagaaagaaagaaagaaagaaagaaagaaagaaagaaagaaagaaggaaggaaggaaggaaggaaggaaggaaggaaggaaggaaggaaggaagraagaaagaaagaaagaaagaaaggaagaaagaaagaaagaaaaaagaaagaaaggagggagggaggaaggggggagggagggaaggaaggaaggaaggag

SEQ ID NO: 16085 - DNA, 201 bp, Homo sapiens
ccaggctggtcttgaactcctgggctcaagcaatccacccacctcgcctcccaaagtgtgggattgattacaggagtgagccaccatgcctgcccccaccyccaatttttttttgggggggacagagtcttgctctgtcacccaggctggtgtgcaatagcacaatctcggctcactgcaacctccacctcccaggctcaa

SEQ ID NO: 16086 - DNA, 201 bp, Homo sapiens
aaggggttggtcttgctgtctgaggggtggcagaggtggaagaggtggaggaggtggaaggggagagaggagaggcagacacactccatgtaacttattgraaaaaatccacgagccaggtgcagtggctcatgcctgtaatcccagcactttgggaggctgaggtggatggatcacctgaggtcaggagttcgagatcag

SEQ ID NO: 16087 - DNA, 201 bp, Homo sapiens; identical to SEQ ID NO: 1271

SEQ ID NO: 16088 - DNA, 201 bp, Homo sapiens
ggctgagggggaggaagggaaggggttggtcttgctgtctgaggggtggcagaggtggaagaggtggaggaggtggaaggggagagaggagaggcagacayactccatgtaacttattggaaaaaatccacgagccaggtgcagtggctcatgcctgtaatcccagcactttgggaggctgaggtggatggatcacctgag

SEQ ID NO: 16089 - DNA, 201 bp, Homo sapiens
atcattctttagtttgttctcactgctgtatgatattctgctgtgcgaagagatcacaatttattccttctcccactaatgggtacttaggctgcttccartgtggggctattatgcattgtgctgggggggcatatctattggacgtctacctagcaatggaattgctgagtcagagaagatccagctagtagtgttagt

SEQ ID NO: 16090 - DNA, 201 bp, Homo sapiens
actcggattgctactgtggtcagacccagggacaggtgagtcagggggcagagtcctgggaccaaacctcttggctctgcagaaggcgtactgctgtcccrtctatgtcttgccctgcatggagtgaggctggagactcaagctctcaaagaagctccagcatggggacatagatattcccagctccacagagtcaaggca

SEQ ID NO: 16091 - DNA, 201 bp, Homo sapiens
tatttatattactatgtaatataaatattatatttttattttatgagatctatattatttttatagacctcatttataaataataataataataagggccrggcacggtggcttacgcctataataccagcactttgggaggccaaggcgggcagatcatttcaggtcaggagttcaagaccagcctgaccaacatggtga

SEQ ID NO: 16092 - DNA, 201 bp, Homo sapiens
ctcctgggttcaagcgattctcctgcctcagcctcccacatagctgggattacaggtacctaccaccatgcccggctaatttttgtatttttagtagagayggggtttcaccatgttggccaggctggtctcaaactcttgatctcaggtgatccacccacctcagcctccaaaattgctgggattacaggcgtgagctag

SEQ ID NO: 16093 - DNA, 201 bp, Homo sapiens
ggtaagaatttttttttttatgagcaatgcattcttgatttttctacccaatattaaaatgatttctgctctatttcattggatggtttaattaatgcagktctccttcactaactgaagaagccaatgaagtttgtctacattatatattgcacaaattggcaggatatttaaatatgtttttatttttatacgcatctg

SEQ ID NO: 16094 - DNA, 201 bp, Homo sapiens
tattaaaatgatttctgctctatttcattggatggtttaattaatgcaggtctccttcactaactgaagaagccaatgaagtttgtctacattatatattrcacaaattggcaggatatttaaatatgtttttatttttatacgcatctgtgaagaatctgaattgaacagtaagaattagaaaactatcttttgaatgac

SEQ ID NO: 16095 - DNA, 201 bp, Homo sapiens
tcttacattaggaagaatccactatctcactaatggaagaaaagattctttgagtgctgttctctgaaacacaccaaaaagatccagaaatgtttccttcmctctttaactgaaaaatgactttttttgttgtttacagtaagaaaatggcagcgtgtaatgataacttccagatctgaaaatgttaaattctaggagatg

SEQ ID NO: 16096 - DNA, 201 bp, Homo sapiens
tgctctatttcattggatggtttaattaatgcaggtctccttcactaactgaagaagccaatgaagtttgtctacattatatattgcacaaattggcaggrtatttaaatatgtttttatttttatacgcatctgtgaagaatctgaattgaacagtaagaattagaaaactatcttttgaatgactgaatatagacctat

SEQ ID NO: 16097 - DNA, 201 bp, Homo sapiens
aaactcatatagtataaaactataatactactttttcttaacttagatgtaaaccttaaagataaattcttctgtttgttaacacctttcagacttatgtrtatgaaggagtagaagccaaaaggatctttaaaaaggattgagcattattcttggcgcacagtccaaaatacaaattggacagaagatctatattgtacc

SEQ ID NO: 16098 - DNA, 201 bp, Homo sapiens
ttcttcagttccaaactccacactaaacaaagctaatacaaagactcctcttgaaccgatccactaaaactgctttcatttattgaacaaaaaataatttwaaaaaagcactatgtgccagacagcaagtatttaatgatgaacactattggtagagatatttaggtgattaagaatttcctcaaatggatacaaactctc

SEQ ID NO: 16099 - DNA, 201 bp, Homo sapiens
cacttcatcattaagaagtgcttctttaccttttgctacttgctttctctaaactatagtataagaatgccatctgctggccaaggatacagactctttcrgaggtttccaatgcagtgtctttgccgcatttcagtgtctagggagtgttccagaaaggtctgatataccgtagtctacactttaaaatgttaattatta

SEQ ID NO: 16100 - DNA, 201 bp, Homo sapiens
tctatataataagaacaattattattagtctcattttacacatgagaaaactgaggcagagagaggttatataacttgcccaaggtcaacagccataagtygctgaaccaggatttggacccaagcagttgtcctagagtccaaattcaattttacttgatgtggttatgtaggtaaattttcattcgaaatatcgtccat

SEQ ID NO: 16101 - DNA, 201 bp, Homo sapiens
aaagataaattcttctgtttgttaacacctttcagacttatgtgtatgaaggagtagaagccaaaaggatctttaaaaaggattgagcattattcttggcrcacagtccaaaatacaaattggacagaagatctatattgtaccagaactatttatttcaccccatcaagtataaggttactgattgattggtccttttat

SEQ ID NO: 16102 - DNA, 201 bp, Homo sapiens
taagtcgctgaaccaggatttggacccaagcagttgtcctagagtccaaattcaattttacttgatgtggttatgtaggtaaattttcattcgaaatatcrtccatcaaaatatatattaagcatgtcttatatgcaggcactatgtgccaggtgctgatctaggtgttacagctacaacaaagaacaagacagacaaaaa

SEQ ID NO: 16103 - DNA, 201 bp, Homo sapiens; identical to SEQ ID NO: 1302

SEQ ID NO: 16104 - DNA, 201 bp, Homo sapiens
aatacccagaaatccaacttacatgggatatgaaggacgtcttcaaggagaactacaaaccactgctcaatgaaataaaagaggatacaaacaaatggaakaacattccatgctcatgggtaggaagaatcaatatcgtgaaaatggccatcctcccaaagtaatttatagattcaatgccatccccatcaagctaccaat

SEQ ID NO: 16105 - DNA, 201 bp, Homo sapiens
caacttcagcaaagtctcaggatacaaaatcaatgtgcaaaaatcacaaacattcttatacaccaataacagacaaacagagagccaaatcatgagtgaastcccattcacaattgcttcaaagagaataaaatacccagaaatccaacttacatgggatatgaaggacgtcttcaaggagaactacaaaccactgctcaa

SEQ ID NO: 16106 - DNA, 201 bp, Homo sapiens
aaaatctccttaagctgataggcaacttcagcaaagtctcaggatacaaaatcaatgtgcaaaaatcacaaacattcttatacaccaataacagacaaacwgagagccaaatcatgagtgaagtcccattcacaattgcttcaaagagaataaaatacccagaaatccaacttacatgggatatgaaggacgtcttcaagg

SEQ ID NO: 16107 - DNA, 201 bp, Homo sapiens
tcaggcaggagaaggaaataaaggacattcaattaggaaaagaggaagccaaattgtccctgtttgcagatgacatgattgtatatctagaaaaccccatygtctcagcccaaaatctccttaagctgataggcaacttcagcaaagtctcaggatacaaaatcaatgtgcaaaaatcacaaacattcttatacaccaata

SEQ ID NO: 16108 - DNA, 201 bp, Homo sapiens
cctctctcaccactcctattcaacatagtgttggaagttctggccagggcaatcaggcaggagaaggaaataaaggacattcaattaggaaaagaggaagycaaattgtccctgtttgcagatgacatgattgtatatctagaaaaccccattgtctcagcccaaaatctccttaagctgataggcaacttcagcaaagtc

SEQ ID NO: 16109 - DNA, 201 bp, Homo sapiens
cgaaatatcgtccatcaaaatatatattaagcatgtcttatatgcaggcactatgtgccaggtgctgatctaggtgttacagctacaacaaagaacaagasagacaaaaatccctgtcatcatggaagggatacagataataaacaagagaatgaagtaaaatatatagtacattagatgatataagcgctattgagaaaa

SEQ ID NO: 16110 - DNA, 201 bp, Homo sapiens
cacaagacagggatgccctctctcaccactcctattcaacatagtgttggaagttctggccagggcaatcaggcaggagaaggaaataaaggacattcaaytaggaaaagaggaagccaaattgtccctgtttgcagatgacatgattgtatatctagaaaaccccattgtctcagcccaaaatctccttaagctgatagg

SEQ ID NO: 16111 - DNA, 201 bp, Homo sapiens
ttagcttagaatctagacatagaagacatattgaataagtaaaaattattgtgataagtattataaaggagtaacggtaggctttcatagaaatatatgcratcttgaattatactttccattgaactatttttcataagatgcttaattgtacagactttcttgaattattaaagggcctaactcacacatcagactcct

SEQ ID NO: 16112 - DNA, 201 bp, Homo sapiens
taggtattgatgggacgtatctcaaaataataagagctatctatgataaacccacagccaatatcatactgaatgggcaaaaactggaagcattccctttsaaaactggcacaagacagggatgccctctctcaccactcctattcaacatagtgttggaagttctggccagggcaatcaggcaggagaaggaaataaagg

SEQ ID NO: 16113 - DNA, 201 bp, Homo sapiens
gtggtgaacaagacaaatctattttgttcccatggaactttgaatctgcttagcttagaatctagacatagaagacatattgaataagtaaaaattattgygataagtattataaaggagtaacggtaggctttcatagaaatatatgcgatcttgaattatactttccattgaactatttttcataagatgcttaattgt

SEQ ID NO: 16114 - DNA, 201 bp, Homo sapiens
aaaaaccacatgattatctcaatagatgcagaaaaggcctttgacaaaattcaacaaccttcatgctaaaaactctcaatatattaggtattgatgggacrtatctcaaaataataagagctatctatgataaacccacagccaatatcatactgaatgggcaaaaactggaagcattccctttgaaaactggcacaagac

SEQ ID NO: 16115 - DNA, 201 bp, Homo sapiens
ggccctgaaaattatgtggcttgtcctatttctatggattgactattaataagtacaaaagatattttcctatgagcaactagagagaatggtagcaagayatctctaggcacctaaagaagggtgaatggatggatggaaaagatagttgcctgggataaaatggaagtgagataaggttatgtggtgatggggaaggga

SEQ ID NO: 16116 - DNA, 201 bp, Homo sapiens
aactagaaaatctagaagaaatggataaattcctcggcacatgcatcctcccaagactaaaccaggaagaagttgaatctctgaatagaccagtaacaggytcctaaattgaggcaataattaatagcttaccaaccaaaaaaagtccaggaccagatggattcacagccaaattctaccagaggtacaaggaggagctgg

SEQ ID NO: 16117 - DNA, 201 bp, Homo sapiens
ctcagagggccctgtgcttggtttaatgctcttttcttactgtcctaaaattctcaatactttttgaacaacttctgcattttcattttacacagggccckgaaaattatgtggcttgtcctatttctatggattgactattaataagtacaaaagatattttcctatgagcaactagagagaatggtagcaagacatctc

SEQ ID NO: 16118 - DNA, 201 bp, Homo sapiens
caccatttatatcctttctagaattaaatttccactatttattagtattggagaacagcctattatttgttaagtgacttccatttcaacaaccgtttttygggaaaaccaaccttgtcattacaccaccctgcttggccaaaagagggtccctgacccaagagcagccaatctaccacaatttggccagatcatgagctc

SEQ ID NO: 16119 - DNA, 201 bp, Homo sapiens
tataaacacctctacgcaaataaactagaaaatctagaagaaatggataaattcctcggcacatgcatcctcccaagactaaaccaggaagaagttgaatmtctgaatagaccagtaacaggctcctaaattgaggcaataattaatagcttaccaaccaaaaaaagtccaggaccagatggattcacagccaaattctac

SEQ ID NO: 16120 - DNA, 201 bp, Homo sapiens
actgtaatttaagacagaataggtatgcttctcatgttttaattcagttgaatttcagaagatctcaggaatgtacagaacgagaattaagaattaataadaataagaattaattaattgcttgacatagagtagttaggtgatttcctgaactttaagcttccacatcacagtatgaagttggttcaagataagaaatat

SEQ ID NO: 16121 - DNA, 201 bp, Homo sapiens
gaacagaagaattaaatgtaggtcttgactttcagcctagatcattatgatctatgctattactcagcctgttataaacaaaaatatattaagaaaaaaaatgtccttaattcctcagtggcacccaagaatagcactctaaatgagtcaggtcagactgtaaaataatggtgttgagtgattagacacttatctatttct

SEQ ID NO: 16122 - DNA, 201 bp, Homo sapiens; identical to SEQ ID NO: 1304

SEQ ID NO: 16123 - DNA, 201 bp, Homo sapiens
catactctgtagcccaatggcctaggttcaatcctcactctgtgactttaggtgaatcactgtgccattttacagtctcctcttctgcaaagtagagatartagtatcagtttcatagggtcaccatgaagattaaatgaaaaagtgtgtctacagaactcagaacagtgcctgacatgtgtaagaccctaataaatgcca

SEQ ID NO: 16124 - DNA, 201 bp, Homo sapiens; identical to SEQ ID NO: 1296

SEQ ID NO: 16125 - DNA, 201 bp, Homo sapiens; identical to SEQ ID NO: 1298

SEQ ID NO: 16126 - DNA, 201 bp, Homo sapiens
attagacacttatctatttctagtctcattgcaggctgacttttttcaccatttatatcctttctagaattaaatttccactatttattagtattggagarcagcctattatttgttaagtgacttccatttcaacaaccgtttttcgggaaaaccaaccttgtcattacaccaccctgcttggccaaaagagggtccctg

SEQ ID NO: 16127 - DNA, 201 bp, Homo sapiens
tccctgacccaagagcagccaatctaccacaatttggccagatcatgagctctgtgtagaaggaaaaatgacaactaactgaacctgcaagaacctctttytagggagtttgaatttgagaagtacacagttagtagttgatagcaaggaaaaaggcttaaagaggacaaatagagcagacaataagtagaagtcatgagt

SEQ ID NO: 16128 - DNA, 201 bp, Homo sapiens
agttagtagttgatagcaaggaaaaaggcttaaagaggacaaatagagcagacaataagtagaagtcatgagtacctgaaactatgaacaagcagtaaccrtagggtagatagcagaatgtcggggcagtcagaagcagttggagtagtagaagctgaaatatttacacatgcaatatggtatctgggatttgcttcaaat

SEQ ID NO: 16129 - DNA, 201 bp, Homo sapiens
atgggttttagaatcacagacttgcccaaattcttgtctgcccatttactgactaaaattcaagttctgattctctatttttctcatttgaaaaatggggwaaatgtaatgattttctgagcttgttgcaattgaggtattatgtataaaacatcgagtgtaatgcctggcatatacctggtactcaaatgtaacataaac

SEQ ID NO: 16130 - DNA, 201 bp, Homo sapiens; identical to SEQ ID NO: 1301

SEQ ID NO: 16131 - DNA, 201 bp, Homo sapiens
tgatagcaaggaaaaaggcttaaagaggacaaatagagcagacaataagtagaagtcatgagtacctgaaactatgaacaagcagtaaccatagggtagayagcagaatgtcggggcagtcagaagcagttggagtagtagaagctgaaatatttacacatgcaatatggtatctgggatttgcttcaaattgctttctcc

SEQ ID NO: 16132 - DNA, 201 bp, Homo sapiens
accttttctttgtacctttctagctaccctctataccctgaccccacatacataattgagctgtggcttctgactctactgggtttggggatgagaggcaktgagagtaaaatgaaggagtggttttaattaatggcacagctaaaactggattttgttctctctgcacatggcagatgtttaaagctcattctttctttt

SEQ ID NO: 16133 - DNA, 201 bp, Homo sapiens
caagcagtaaccatagggtagatagcagaatgtcggggcagtcagaagcagttggagtagtagaagctgaaatatttacacatgcaatatggtatctgggwtttgcttcaaattgctttctccccaatctagggttggggaggaagattgatacaagttggcaattcttgcagctgttgcaaagtgcctgacacataataa

SEQ ID NO: 16134 - DNA, 201 bp, Homo sapiens
tcactggagaaaacacctgaaagtcaaagaacagtactcttcctaaacttgaaaacaaaatgtcttttaggtaaaggagtatatgctcaatgccttcactkggttttaatttagaaacttttaaacaagattttttttaaaaaaaggatactgaagggcatcattgtgacacagaacttcctctctttaacatatacttgg

SEQ ID NO: 16135 - DNA, 201 bp, Homo sapiens
aatcttattaaggttgctcagctctaagattctataattctgtactctacttaatttttctcaagttatggaaaaacaactttaatcagttctcttgatckgattgaacctgaacttctgtagaagcaatctgaatgttcttgtgcaaaggcaatgctaccgagttttcttcccaccctcaaaataaacaaacaaaacata

SEQ ID NO: 16136 - DNA, 201 bp, Homo sapiens
tattcaatctgcttgcctgcctcctctagtttgtgagctatatgagggcaaggatagggtcttatatctataccccacactgtatccctctaacacatagyaaatattaatgattgtaatttggggcatgctgggcagccccagcctcagaaagccagctttccccattctttcttaaacccagaagatctactgagggaa

SEQ ID NO: 16137 - DNA, 201 bp, Homo sapiens
agaaaatctagaagaaatggataaattcctcggcacatgcatcctcccaagactaaaccaggaagaagttgaatctctgaatagaccagtaacaggctcckaaattgaggcaataattaatagcttaccaaccaaaaaaagtccaggaccagatggattcacagccaaattctaccagaggtacaaggaggagctggtacc

SEQ ID NO: 16138 - DNA, 201 bp, Homo sapiens
ggattacaggcaagaaccactgcaccaggcaactctttttcttttttgtttttttttgttttttgtttttttgtttttttgtttttttgttttttgagacrgagtctcgctctgtcgcccaggctggagtgcagtggcacgatctcggctcactgcaagctccgcctcccgggttcacgccattctcctgcctcagcctcc

SEQ ID NO: 16139 - DNA, 201 bp, Homo sapiens
aaaagatcaacaaaattgatggaccactagcaagactaataaagaagaaaagagagaagaatcaaatggatgcaataaaaaatgataaaggggataccacyaccaatcccacagaaatacaaactaccatcagagaatactataaacacctctacgcaaataaactagaaaatctagaagaaatggataaattcctcggca

SEQ ID NO: 16140 - DNA, 201 bp, Homo sapiens
gcaaagacttggaaccaacccaaatgtccaacaatgatagactggattaagaaaatgtggcacatatacaccatggaatactatgcagccataaaaaatgrtgagttcatgtcctttgtagggacatggatgaagctggaagccatcattctcagcaaactatcgcaaggacaaaaaaccaaagaccgcatgttctcactt

SEQ ID NO: 16141 - DNA, 201 bp, Homo sapiens
tacttccctccaagttgaaagtgtaatagagacataaaaaacccttcaaaaaatcaatgaattctggagctggttttttgaaaagatcaacaaaattgatrgaccactagcaagactaataaagaagaaaagagagaagaatcaaatggatgcaataaaaaatgataaaggggataccaccaccaatcccacagaaataca

SEQ ID NO: 16142 - DNA, 201 bp, Homo sapiens
cagcatcatcctgataccaaagcctgtcagagacacaacaaaaaaagagattttagaccaatatccctgatgaacatcgatgcaaaaatcctcaataaaayactggcaaaccaactccagcagcacatcaaaaagtttatccaccatgatcaagtgggcttcatccctgggatgcaaggctggttcaacatacacaaatca

SEQ ID NO: 16143 - DNA, 201 bp, Homo sapiens
caatcccacagaaatacaaactaccatcagagaatactataaacacctctacgcaaataaactagaaaatctagaagaaatggataaattcctcggcacaygcatcctcccaagactaaaccaggaagaagttgaatctctgaatagaccagtaacaggctcctaaattgaggcaataattaatagcttaccaaccaaaaa

SEQ ID NO: 16144 - DNA, 201 bp, Homo sapiens
ataaaggggataccaccaccaatcccacagaaatacaaactaccatcagagaatactataaacacctctacgcaaataaactagaaaatctagaagaaatrgataaattcctcggcacatgcatcctcccaagactaaaccaggaagaagttgaatctctgaatagaccagtaacaggctcctaaattgaggcaataatta

SEQ ID NO: 16145 - DNA, 201 bp, Homo sapiens
agaagaaaagagagaagaatcaaatggatgcaataaaaaatgataaaggggataccaccaccaatcccacagaaatacaaactaccatcagagaatactayaaacacctctacgcaaataaactagaaaatctagaagaaatggataaattcctcggcacatgcatcctcccaagactaaaccaggaagaagttgaatctc

SEQ ID NO: 16146 - DNA, 201 bp, Homo sapiens
ttttgttaccagccttctgtgagcccaagggctatttgctttatattgatcctatttggatccttctgcgaagcttaaaatggccatgagacacgggttargtcatggtgaaaatggtaagaagccactttagtttcttcctgccaaccttccttcttgaatcagacactttaatttcaattgctatgagatcacatagtg

SEQ ID NO: 16147 - DNA, 201 bp, Homo sapiens
tggatggtttaattaatgcaggtctccttcactaactgaagaagccaatgaagtttgtctacattatatattgcacaaattggcaggatatttaaatatgyttttatttttatacgcatctgtgaagaatctgaattgaacagtaagaattagaaaactatcttttgaatgactgaatatagacctattcataaagaaatt

SEQ ID NO: 16148 - DNA, 201 bp, Homo sapiens
agcagtaaccatagggtagatagcagaatgtcggggcagtcagaagcagttggagtagtagaagctgaaatatttacacatgcaatatggtatctgggatwtgcttcaaattgctttctccccaatctagggttggggaggaagattgatacaagttggcaattcttgcagctgttgcaaagtgcctgacacataataaca

SEQ ID NO: 16149 - DNA, 201 bp, Homo sapiens
ttctaactcctaaatctctaggagattacagatagcttacagatagctcctgatgtggtagagaggatccagaagatgttcagaggagggaaaccatattytcccttcttacattaggaagaatccactatctcactaatggaagaaaagattctttgagtgctgttctctgaaacacaccaaaaagatccagaaatgttt

SEQ ID NO: 16150 - DNA, 201 bp, Homo sapiens
ctatattcactggagaaaacacctgaaagtcaaagaacagtactcttcctaaacttgaaaacaaaatgtcttttaggtaaaggagtatatgctcaatgccytcactgggttttaatttagaaacttttaaacaagattttttttaaaaaaaggatactgaagggcatcattgtgacacagaacttcctctctttaacatat

SEQ ID NO: 16151 - DNA, 201 bp, Homo sapiens; identical to SEQ ID NO: 1306

SEQ ID NO: 16152 - DNA, 201 bp, Homo sapiens; identical to SEQ ID NO: 1307

SEQ ID NO: 16153 - DNA, 201 bp, Homo sapiens
cggggcagtcagaagcagttggagtagtagaagctgaaatatttacacatgcaatatggtatctgggatttgcttcaaattgctttctccccaatctaggrttggggaggaagattgatacaagttggcaattcttgcagctgttgcaaagtgcctgacacataataacatatgataggttcactgaataggaacacagga

SEQ ID NO: 16154 - DNA, 201 bp, Homo sapiens; identical to SEQ ID NO: 1308

SEQ ID NO: 16155 - DNA, 201 bp, Homo sapiens
acaaatcaccacagccagtcaactacctgagagactgttgagtcctcagctttaaacaaagttttctacttccctccaagttgaaagtgtaatagagacayaaaaaacccttcaaaaaatcaatgaattctggagctggttttttgaaaagatcaacaaaattgatggaccactagcaagactaataaagaagaaaagaga

SEQ ID NO: 16156 - DNA, 201 bp, Homo sapiens
tacaggtgttaatatagtgaaaaggaagcttgcagctcatgacaatttgaagctgacaattacacaagaaggaaataaattcacagtcaaagaatcaagcrcttttcgaaacattgaagttgtttttgaacttggtgtcacctttaattacaatctagcagacggaactgaactcagggtaagaatttttttttttatgag

SEQ ID NO: 16157 - DNA, 201 bp, Homo sapiens
cttcatctctttggaatgtagtttaatcatctttaaaatgagaggattgaactagatctccaaattttctttcagtgctaagattctatgatgtctgaatracatttagtgattccttcctttcttaagcagcctttttggtgtgggtcacaggggacaggacattagaacaatggaaggtaggatgggaagagggaaata

SEQ ID NO: 16158 - DNA, 201 bp, Homo sapiens
aacccaagtcaatgggtcttgtttctaaaacacatgttcttttcactctaccatacgtttatttcagtgaccagatacatgtagttttctgacctagaaakaaagattggattcattatccataggcttctgagttcacaaatcaccacagccagtcaactacctgagagactgttgagtcctcagctttaaacaaagttt

SEQ ID NO: 16159 - DNA, 201 bp, Homo sapiens
atctctttggaatgtagtttaatcatctttaaaatgagaggattgaactagatctccaaattttctttcagtgctaagattctatgatgtctgaatgacayttagtgattccttcctttcttaagcagcctttttggtgtgggtcacaggggacaggacattagaacaatggaaggtaggatgggaagagggaaatattta

SEQ ID NO: 16160 - DNA, 201 bp, Homo sapiens
tcataaagtcttactttacaagataattgctgttgtgaaaaagggaaaggtcatggtctcatttcccagatgttatttgatatatgctataaattatattrcctccaacatagtctgcactttgaacttagaaaaacaatcttcagacggcatgcattctaattcttgaaataagtatgcccacaaactgtaatttaagac

SEQ ID NO: 16161 - DNA, 201 bp, Homo sapiens
gtcacaggggacaggacattagaacaatggaaggtaggatgggaagagggaaatatttacattataaagtatggctggtttcatgggtgtatggcttgtgyaggctcagagggccctgtgcttggtttaatgctcttttcttactgtcctaaaattctcaatactttttgaacaacttctgcattttcattttacacaggg

SEQ ID NO: 16162 - DNA, 201 bp, Homo sapiens
gacgaagattctgcagagtaatgtatgtttagtcagcactgaaacccaagtcaatgggtcttgtttctaaaacacatgttcttttcactctaccatacgtytatttcagtgaccagatacatgtagttttctgacctagaaataaagattggattcattatccataggcttctgagttcacaaatcaccacagccagtcaa

SEQ ID NO: 16163 - DNA, 201 bp, Homo sapiens
tctagctaccctctataccctgaccccacatacataattgagctgtggcttctgactctactgggtttggggatgagaggcattgagagtaaaatgaaggrgtggttttaattaatggcacagctaaaactggattttgttctctctgcacatggcagatgtttaaagctcattctttcttttatgcaagtttttacacca

SEQ ID NO: 16164 - DNA, 201 bp, Homo sapiens
tcacaggggacaggacattagaacaatggaaggtaggatgggaagagggaaatatttacattataaagtatggctggtttcatgggtgtatggcttgtgcrggctcagagggccctgtgcttggtttaatgctcttttcttactgtcctaaaattctcaatactttttgaacaacttctgcattttcattttacacagggc

SEQ ID NO: 16165 - DNA, 201 bp, Homo sapiens
tcttaagactagtaattaaaactctttacttcacaccaagtttcctccccaagcttggcctgttcctggctggcagcctgaagtagggaaaggagagatayggtgaccttttctttgtacctttctagctaccctctataccctgaccccacatacataattgagctgtggcttctgactctactgggtttggggatgaga

SEQ ID NO: 16166 - DNA, 201 bp, Homo sapiens
gaaaattatgtggcttgtcctatttctatggattgactattaataagtacaaaagatattttcctatgagcaactagagagaatggtagcaagacatctcyaggcacctaaagaagggtgaatggatggatggaaaagatagttgcctgggataaaatggaagtgagataaggttatgtggtgatggggaagggaaaaagg

SEQ ID NO: 16167 - DNA, 201 bp, Homo sapiens
tgaaataatagagctagtagaaaatagtttgctttttaaagtgcttacttaataaaataaaaagtgggcaactcgaaataaaaaatcaaacaatatctaamatgtttaaaagatttttaaaaatcaaaatataaaataatatcaaaatttaaaaactgggattctgttccccaaagttctgttcaaatctgttagatttat

SEQ ID NO: 16168 - DNA, 201 bp, Homo sapiens
attatattacctccaacatagtctgcactttgaacttagaaaaacaatcttcagacggcatgcattctaattcttgaaataagtatgcccacaaactgtartttaagacagaataggtatgcttctcatgttttaattcagttgaatttcagaagatctcaggaatgtacagaacgagaattaagaattaataagaataag

SEQ ID NO: 16169 - DNA, 201 bp, Homo sapiens
gcgcccggcctctttttcttttttaatgaaataatagagctagtagaaaatagtttgctttttaaagtgcttacttaataaaataaaaagtgggcaactcraaataaaaaatcaaacaatatctaacatgtttaaaagatttttaaaaatcaaaatataaaataatatcaaaatttaaaaactgggattctgttccccaaa

SEQ ID NO: 16170 - DNA, 201 bp, Homo sapiens
acttggaaccaacccaaatgtccaacaatgatagactggattaagaaaatgtggcacatatacaccatggaatactatgcagccataaaaaatgatgagtycatgtcctttgtagggacatggatgaagctggaagccatcattctcagcaaactatcgcaaggacaaaaaaccaaagaccgcatgttctcacttataggt

SEQ ID NO: 16171 - DNA, 201 bp, Homo sapiens
gtcatgcaccctacaaagtgccaggatatttatccaaactcctggcaatgctaaacacaatgcaaaaagacatattagaaaacgaatcttattaactttarcttttcaactgtatttcatcataaagtcttactttacaagataattgctgttgtgaaaaagggaaaggtcatggtctcatttcccagatgttatttgata

SEQ ID NO: 16172 - DNA, 201 bp, Homo sapiens
ataccatctcacaccagttagaatggcaatcattaaaaagtcaggaaacaacaggtgctggagaggatgtggagaaataggaacacttttacactgttgakgggactgtaaactagttcaacccttgtggaagtcagtgtggcgattcctcagggatctagaactagaaataccatttgacccagccatcccattactggg

SEQ ID NO: 16173 - DNA, 201 bp, Homo sapiens
tatgtaatttgttcataaaatatacatatcaggtattattattgtcttcattttattgatgagaaaactgaggctcagagagattgagtaagtaatgtgaygaagattctgcagagtaatgtatgtttagtcagcactgaaacccaagtcaatgggtcttgtttctaaaacacatgttcttttcactctaccatacgttta

SEQ ID NO: 16174 - DNA, 201 bp, Homo sapiens
gcaaatccaaggcatagccagtcccaagttgatcactagtgcaaatcataaaatacctaagtaacttttaggtgactttctcataaacaccagaatgacaygggttttcttaacaaaatatcactggtttgagacctaggatgcttctaaaacattgttattgctcccagatttcctttctcagagaattaggagagaaac

SEQ ID NO: 16175 - DNA, 201 bp, Homo sapiens; identical to SEQ ID NO: 1305

SEQ ID NO: 16176 - DNA, 201 bp, Homo sapiens
gtacagaacgagaattaagaattaataagaataagaattaattaattgcttgacatagagtagttaggtgatttcctgaactttaagcttccacatcacartatgaagttggttcaagataagaaatataataaattctcgcccaaggacagacctgaatctctagctgcctagaggctgactcaactgaaatcatggcgt

SEQ ID NO: 16177 - DNA, 201 bp, Homo sapiens
aaagaccgcatgttctcacttataggtgggaattgaacaatgagaacacttagacacaggaaggggaacatcacacaccggggcctgttatggggtggggrgagggggtagggatagcattaggaggtatacctaatgttaaatgacgagttaatgggtgcagcacaccaacatggcacatgtgtacatatgtaacaaacc

SEQ ID NO: 16178 - DNA, 201 bp, Homo sapiens
atcattttcaacaaattttttaaaaactttttttagcctcaacatttttctatttaaattacatgtttgtaatgacaatttaactactgaatgttttatcrtaagttatgtctttctttaattagtaccacaatcacacaaattaaaacaagcacagagttgttaacatctccatgaaactaattttaaccatgactatat

SEQ ID NO: 16179 - DNA, 201 bp, Homo sapiens
tttttaaaaactttttttagcctcaacatttttctatttaaattacatgtttgtaatgacaatttaactactgaatgttttatcataagttatgtctttcyttaattagtaccacaatcacacaaattaaaacaagcacagagttgttaacatctccatgaaactaattttaaccatgactatatttctggacacgtaaca

SEQ ID NO: 16180 - DNA, 201 bp, Homo sapiens
catgtttgtaatgacaatttaactactgaatgttttatcataagttatgtctttctttaattagtaccacaatcacacaaattaaaacaagcacagagttrttaacatctccatgaaactaattttaaccatgactatatttctggacacgtaacatgaaagattcagaaagaagtgctgctcatctgccttaaaattcag

SEQ ID NO: 16181 - DNA, 201 bp, Homo sapiens; identical to SEQ ID NO: 1300

SEQ ID NO: 16182 - DNA, 201 bp, Homo sapiens
gacaatttaactactgaatgttttatcataagttatgtctttctttaattagtaccacaatcacacaaattaaaacaagcacagagttgttaacatctccrtgaaactaattttaaccatgactatatttctggacacgtaacatgaaagattcagaaagaagtgctgctcatctgccttaaaattcagcgtatggaaatt

SEQ ID NO: 16183 - DNA, 201 bp, Homo sapiens; identical to SEQ ID NO: 1303

SEQ ID NO: 16184 - DNA, 201 bp, Homo sapiens
tattgtctggaacagattttactggagaattgactggaaaagaagagtatgcaagacagtggcagaagatgaaagtttgaagcaaatggtggaaatcaatrgtcatggataaagcatagtgttccagagggcttctctcatccatatatatcctcattgaagattccattagaatgatggattgcgagaagtcctccctgc

SEQ ID NO: 16185 - DNA, 201 bp, Homo sapiens
aatgcctggcatatacctggtactcaaatgtaacataaacatgtacccttctcctctagagaaaatggggcaaagtatatcctgagtagatgggaaaactmttttcttaaaatacctctcatggagtctgcgtgagagagtgagccttggcctggtagatgagaatacttagttccagtccagtctgtgacataactagct

SEQ ID NO: 16186 - DNA, 201 bp, Homo sapiens
aaatgcaaatcaaaaccacaatgagataccatctcacaccagttagaatggcaatcattaaaaagtcaggaaacaacaggtgctggagaggatgtggagarataggaacacttttacactgttgaggggactgtaaactagttcaacccttgtggaagtcagtgtggcgattcctcagggatctagaactagaaataccat

SEQ ID NO: 16187 - DNA, 201 bp, Homo sapiens
cagccaaaagacacatgaaaaaatgctcatcatcactggccatcagagaaatgcaaatcaaaaccacaatgagataccatctcacaccagttagaatggcratcattaaaaagtcaggaaacaacaggtgctggagaggatgtggagaaataggaacacttttacactgttgaggggactgtaaactagttcaacccttgt

SEQ ID NO: 16188 - DNA, 201 bp, Homo sapiens
tgcagccaaaagacacatgaaaaaatgctcatcatcactggccatcagagaaatgcaaatcaaaaccacaatgagataccatctcacaccagttagaatgkcaatcattaaaaagtcaggaaacaacaggtgctggagaggatgtggagaaataggaacacttttacactgttgaggggactgtaaactagttcaaccctt

SEQ ID NO: 16189 - DNA, 201 bp, Homo sapiens; identical to SEQ ID NO: 1295

SEQ ID NO: 16190 - DNA, 201 bp, Homo sapiens
cagtaagaaaatggcagcgtgtaatgataacttccagatctgaaaatgttaaattctaggagatggaaaaacaaagaccatataagaaagtaatggaaaargttctcttaaaatttatagcgctgaataagttagatttaattctgatttcttctaacttaaaaaagttttggaataatcttgagaagctgtgtagttttc

SEQ ID NO: 16191 - DNA, 201 bp, Homo sapiens
ctcaaacaaatttacaggaaaaaaataaacaaccacatcaacaagtgggcgaaggatatgaacagacacttctcaaaagaagacatttatgcagccaaaaracacatgaaaaaatgctcatcatcactggccatcagagaaatgcaaatcaaaaccacaatgagataccatctcacaccagttagaatggcaatcattaaa

SEQ ID NO: 16192 - DNA, 201 bp, Homo sapiens
tttgcaatctactcatctgacaaagggctaatatccagaatctacaatgaactcaaacaaatttacaggaaaaaaataaacaaccacatcaacaagtgggygaaggatatgaacagacacttctcaaaagaagacatttatgcagccaaaagacacatgaaaaaatgctcatcatcactggccatcagagaaatgcaaatc

SEQ ID NO: 16193 - DNA, 201 bp, Homo sapiens
cgaaaatttttgcaatctactcatctgacaaagggctaatatccagaatctacaatgaactcaaacaaatttacaggaaaaaaataaacaaccacatcaamaagtgggcgaaggatatgaacagacacttctcaaaagaagacatttatgcagccaaaagacacatgaaaaaatgctcatcatcactggccatcagagaaa

SEQ ID NO: 16194 - DNA, 201 bp, Homo sapiens
aaactgtaatttaagacagaataggtatgcttctcatgttttaattcagttgaatttcagaagatctcaggaatgtacagaacgagaattaagaattaatwagaataagaattaattaattgcttgacatagagtagttaggtgatttcctgaactttaagcttccacatcacagtatgaagttggttcaagataagaaat

SEQ ID NO: 16195 - DNA, 201 bp, Homo sapiens
taatgataacttccagatctgaaaatgttaaattctaggagatggaaaaacaaagaccatataagaaagtaatggaaaaggttctcttaaaatttatagckctgaataagttagatttaattctgatttcttctaacttaaaaaagttttggaataatcttgagaagctgtgtagttttctccagggcgtttaatttaact

SEQ ID NO: 16196 - DNA, 201 bp, Homo sapiens
gaatgggcgaaaatttttgcaatctactcatctgacaaagggctaatatccagaatctacaatgaactcaaacaaatttacaggaaaaaaataaacaaccmcatcaacaagtgggcgaaggatatgaacagacacttctcaaaagaagacatttatgcagccaaaagacacatgaaaaaatgctcatcatcactggccatc

SEQ ID NO: 16197 - DNA, 201 bp, Homo sapiens
caacctacagaatgggcgaaaatttttgcaatctactcatctgacaaagggctaatatccagaatctacaatgaactcaaacaaatttacaggaaaaaaayaaacaaccacatcaacaagtgggcgaaggatatgaacagacacttctcaaaagaagacatttatgcagccaaaagacacatgaaaaaatgctcatcatca

SEQ ID NO: 16198 - DNA, 201 bp, Homo sapiens
gtgaacaggcaacctacagaatgggcgaaaatttttgcaatctactcatctgacaaagggctaatatccagaatctacaatgaactcaaacaaatttacargaaaaaaataaacaaccacatcaacaagtgggcgaaggatatgaacagacacttctcaaaagaagacatttatgcagccaaaagacacatgaaaaaatgc

SEQ ID NO: 16199 - DNA, 201 bp, Homo sapiens
acaaaagccaaaattgacaaatgagatctaattaaactaaagagcttctgcacagcaaaagaaactaccatcagggtgaacaggcaacctacagaatgggmgaaaatttttgcaatctactcatctgacaaagggctaatatccagaatctacaatgaactcaaacaaatttacaggaaaaaaataaacaaccacatcaac

SEQ ID NO: 16200 - DNA, 201 bp, Homo sapiens
caagcttggcctgttcctggctggcagcctgaagtagggaaaggagagatatggtgaccttttctttgtacctttctagctaccctctataccctgacccyacatacataattgagctgtggcttctgactctactgggtttggggatgagaggcattgagagtaaaatgaaggagtggttttaattaatggcacagctaa

SEQ ID NO: 16201 - DNA, 201 bp, Homo sapiens
gaaaaacaaaggggcatttaagaaaaaagaatactgtatatgtggaattaaagatgtgcttccttataaatatatgaatatacattttaatccttcatttratatttctagaatttgatttacttaacactgaaatgaacagtttgttaatcttattaaggttgctcagctctaagattctataattctgtactctactta

SEQ ID NO: 16202 - DNA, 201 bp, Homo sapiens
ttaagaattaataagaataagaattaattaattgcttgacatagagtagttaggtgatttcctgaactttaagcttccacatcacagtatgaagttggttyaagataagaaatataataaattctcgcccaaggacagacctgaatctctagctgcctagaggctgactcaactgaaatcatggcgtttgacagcacttgg

SEQ ID NO: 16203 - DNA, 201 bp, Homo sapiens
agctctaagattctataattctgtactctacttaatttttctcaagttatggaaaaacaactttaatcagttctcttgatcggattgaacctgaacttctrtagaagcaatctgaatgttcttgtgcaaaggcaatgctaccgagttttcttcccaccctcaaaataaacaaacaaaacataacttggaaaaataaacact

SEQ ID NO: 16204 - DNA, 201 bp, Homo sapiens
tgacaattacacaagaaggaaataaattcacagtcaaagaatcaagcgcttttcgaaacattgaagttgtttttgaacttggtgtcacctttaattacaayctagcagacggaactgaactcagggtaagaatttttttttttatgagcaatgcattcttgatttttctacccaatattaaaatgatttctgctctatttc

SEQ ID NO: 16205 - DNA, 201 bp, Homo sapiens
agcctgagctccgccctagctttgccagcatcttggagcgtctgcagtactgcactcaggtgtgcccccgacctaatctaacatcctggtcttgtgggtcwggagggagggccagaaaactctatgcccccctgctccctgactcttccattacaggacccggatgtgctgaattcactcctgccaatggagctggggccc

SEQ ID NO: 16206 - DNA, 201 bp, Homo sapiens
agggcatcttcacatccaagacagattcctggtgataacacccttcccctccccttccccactgttcccctcccctgaggctaatcctgtcctttccagcmacctcatgtgaggggaggctacacctgacgggcctcacttggttcccccacttgtgatgcaggtcttttggggtgctgctctgggagatcttctcactgg

SEQ ID NO: 16207 - DNA, 201 bp, Homo sapiens
agtcctggctcaggggacccccatcccaactccctccccaaggaacagcccttccacacagcttttaaggaaatagatcaggaagagcaagaacttctagrttctggcagtgattttttttgcctactctgtagggatattgccgcccggaactgcctgctgagctgcgctggacccagccgagtggccaagattggggac

SEQ ID NO: 16208 - DNA, 201 bp, Homo sapiens; identical to SEQ ID NO: 1346

SEQ ID NO: 16209 - DNA, 201 bp, Homo sapiens
agtccctgagcccactcctgcactgcactgaagagccacctgcactgtgaataaccttgcatagcacaggattcttgcatagcatagggtcatttgaaaartgggctgtcatcatgccattgcactccagcctgggcgacaagagcaaaactctgtcttaaaaaaaaggaaagtgggctgccagtcgtgctggatggcaat

SEQ ID NO: 16210 - DNA, 201 bp, Homo sapiens
ctaaggccagtcctagctagcaggttacaaaatactttttttttttttttttttttgagacaaggtctcactcccattgtccaggctggagtccagtggtrcgatcacagctaactgcatcctggacttccagggttcaggtgatcctcccacctcagcctccagagtagctgggactacagatgtgagtcaccatgcctg

SEQ ID NO: 16211 - DNA, 201 bp, Homo sapiens
ggagtgcagtagtacaaatctcagctcactgcaacctccgcctcccgggttcaagcaattctcctgcctcagcctcctgagtagctgggattataggcatrcgccaccatgcccggctaatttttgtatttttagtagagatggggtttcaccatgttggtcaggctagtctcggactcctgacctcgtaatccgcccatg

SEQ ID NO: 16212 - DNA, 201 bp, Homo sapiens
cacggcggaggtagggtggacagtgacctgctagttggaggtttcaccctcagggtaacgaagtccacgtgcgcaccgacttgcgtcttggactattccgsggggaggtccaccttgagtgcccttcaaggtggcagtagtcgccaccgagttagcccttacccggaacctcttacaccgagcggaaggcccccaaccagg

SEQ ID NO: 16213 - DNA, 201 bp, Homo sapiens
cctcgcctcattctgctggaactgatgtctggaggggacatgaagagtttcctgaggcacagtcggccacacctggtgagacccttgtcttagccccccccaggcccctctaaagaccctgtccatgtgtctgagacctacatggactgatgccccctctgcctgacccagggccagccatcacctctggtcatgcgggac

SEQ ID NO: 16214 - DNA, 201 bp, Homo sapiens
aaacagggtctcgccacgcccccgacccaccggaagcagctggggctggatgagtcattaattcattcattcactctgggaaggtttatttgtgcgcctgwgtggcgggtgctgatacaggcgcagtgaaggtgattccagcgtctccagtgagctgtcaagagcctggacttagcatctgaagcccccggtttgcgctcc

SEQ ID NO: 16215 - DNA, 201 bp, Homo sapiens
cctggccaacatggtgaaaccctgtgtctactaaaaacacaaaaaatagctgggcgttgtggcgcttgcctgtagtcccagctactcgggagactgaggcrggagaatcacttgaacccgagaggcagaggttgcagtgagccgagatcgcgctattgcactccagcctgcatgacagagtgagacttcgtttaaaaaaga

SEQ ID NO: 16216 - DNA, 201 bp, Homo sapiens
ggttgcagtgagccgagatcgcgctattgcactccagcctgcatgacagagtgagacttcgtttaaaaaagaaaaaaaatcatgactcttggagcccaggrattgcctcccgcccagggcgtctgcagggaccagggaagtcctcatcatgcactcccaccttgactctggcccgcatctgccctcttttttgccctggct

SEQ ID NO: 16217 - DNA, 201 bp, Homo sapiens; identical to SEQ ID NO: 1319

SEQ ID NO: 16218 - DNA, 201 bp, Homo sapiens
gcttcctggaacacgccgctggccccacaggtgcgcgctggcgagctggaaccgttgctggtggcggccggaggcggcggtcgggcctacctgaggccgcrggaccgaggccggactcaggcctcccccgagaaactggagaaccgctcggaggcgcccgggagcggcgggagaggcggggcggcaggtgagggcgcgggc

SEQ ID NO: 16219 - DNA, 201 bp, Homo sapiens; identical to SEQ ID NO: 1312

SEQ ID NO: 16220 - DNA, 201 bp, Homo sapiens
cacatgatctacattctcacagaaagggactgtgaggacatgggacaggaggggctcaggcaggcaggaggcatcccagccagcctcagcgaggccttcargctccagctgattaccccctcctcacctccttcactcccacttgtgaacagacagcatttgcatcatgatgctggagaagagagggccacactgggattt

SEQ ID NO: 16221 - DNA, 201 bp, Homo sapiens; identical to SEQ ID NO: 1313

SEQ ID NO: 16222 - DNA, 201 bp, Homo sapiens
tcatacatacacacatgatctacattctcacagaaagggactgtgaggacatgggacaggaggggctcaggcaggcaggaggcatcccagccagcctcagmgaggccttcaggctccagctgattaccccctcctcacctccttcactcccacttgtgaacagacagcatttgcatcatgatgctggagaagagagggcca

SEQ ID NO: 16223 - DNA, 201 bp, Homo sapiens
tcctctggcgtcctggggtctgaggtgggcgtggccagaccagctttaggtccggggagtgtctcgccagcggcagcacacccctgtaagtggtggccagrgctgccgtggcaaaatgagctgtcaactttaggttgacaggggtgtggccgcgaccgcaagggcttttgttgccgggtggacccaacagggatgggctgc

SEQ ID NO: 16224 - DNA, 201 bp, Homo sapiens
gtcaaaacaatgcaaaatggcagttaaataggaggaataccttccagaatctactgtactacatggtgactgtagttaatgacgatgtattcttgaaaatygctaagagaggcggggcgcggtggctcacgcctgtaatctcaacactttgggcggcggaggcgggtggatcttgaggtcaggagtttgaggccagcctgg

SEQ ID NO: 16225 - DNA, 201 bp, Homo sapiens
gagccgagattgcgccattgcactccagccagggcgacagagtgagactctgtctcaataaaaaaagaatatgatctggcgcctgtaatctcagcactttsggaggccaaggcaggtggatcacctgaggtcaggggttcgagaccagcctggccaacatggtgaaaccctgtgtctactaaaaacacaaaaaatagctgg

SEQ ID NO: 16226 - DNA, 201 bp, Homo sapiens
gaatcacttgaacctgggaggcggaggttgtggtgagccgagattgcgccattgcactccagccagggcgacagagtgagactctgtctcaataaaaaaaraatatgatctggcgcctgtaatctcagcactttgggaggccaaggcaggtggatcacctgaggtcaggggttcgagaccagcctggccaacatggtgaaa

SEQ ID NO: 16227 - DNA, 201 bp, Homo sapiens
gtaagggagagggaggccctgagaagctccagaaggggaagtaacttgctcaatgtcacctctccgtcccagttcttagaatatgatctctcagctgggcrtggtggctcacacctgtaatcccagaactttgggaggtcgaggcaggcaggtcacctgaggtcgggagttcgagaccagcctgaccaacatggagaaacc

SEQ ID NO: 16228 - DNA, 201 bp, Homo sapiens
gacagagtctcgctctgtcacccaggctggagtgcagtggtgcgatcttgggtcactgcaacctccgcctcccgggttcaagtgattctgcagcctcagtcgctggagtagctgggattgcaggcgtgcgccaccacacccggctaattttgtatttttagtagaggcggggttggccaggctggtcttgaacttctgacc

SEQ ID NO: 16229 - DNA, 201 bp, Homo sapiens
agtcccccagcttctctcaccacccttgtaagcttggtgctgctctttgctctaaagtcctgggctagaattaaccatgtggctggaaaaggcatgtatttatttatttatttatttatttatttatttatttatttttatttttgagacagagtctcgctctgtcacccaggctggagtgcagtggtgcgatcttgggtc

SEQ ID NO: 16230 - DNA, 201 bp, Homo sapiens
aagtcccccagcttctctcaccacccttgtaagcttggtgctgctctttgctctaaagtcctgggctagaattaaccatgtggctggaaaaggcatgtatttatttatttatttatttatttatttatttatttatttttatttttgagacagagtctcgctctgtcacccaggctggagtgcagtggtgcgatcttgggt

SEQ ID NO: 16231 - DNA, 201 bp, Homo sapiens
agaagtcccccagcttctctcaccacccttgtaagcttggtgctgctctttgctctaaagtcctgggctagaattaaccatgtggctggaaaaggcatgtatttatttatttatttatttatttatttatttatttatttttatttttgagacagagtctcgctctgtcacccaggctggagtgcagtggtgcgatcttgg

SEQ ID NO: 16232 - DNA, 201 bp, Homo sapiens
acagaagtcccccagcttctctcaccacccttgtaagcttggtgctgctctttgctctaaagtcctgggctagaattaaccatgtggctggaaaaggcatgtatttatttatttatttatttatttatttatttatttatttttatttttgagacagagtctcgctctgtcacccaggctggagtgcagtggtgcgatctt

SEQ ID NO: 16233 - DNA, 201 bp, Homo sapiens
tgaaaccctgtctgtactaaaaatacaaaaattagccgggcgtggtggcgggagcctgtaatcccagctactctggaggctgaggcaggagaattgcttgwacctgggaggcggaggttgcagtgagccgagatcactccattgcacttcagcctgggcgacgagggaaattctgtctcaaagattaaaaaaaaaacaatg

SEQ ID NO: 16234 - DNA, 201 bp, Homo sapiens
atatagggtcagctgggcatatggcaggggcaggggaggtaaagggggtactagactctctaggactcttctccaggccgcctgcccactcccttccaacrtgtcttcctgcagagccctgggccatggtgcctttggggaggtgtatgagggactggtaattggccttcctggggactccagtcccctgcaggtagctat

SEQ ID NO: 16235 - DNA, 201 bp, Homo sapiens
gggaggctgaggcaggatgatcacttgattccaggaattcaattccagcctagccaacatagtgagaccccatgtctgtctgtctgtctgtcggtcggtckgtctatctatctatctatctatctatctatctatctatctatctatttctgagacagggtcttgctctgttgcccaggctggagtgcagtggcgtgatca

SEQ ID NO: 16236 - DNA, 201 bp, Homo sapiens
ccgcctcccgggttcaagcaattctcctgcctcagcctcctgagtagctgggattataggcatgcgccaccatgcccggctaatttttgtatttttagtasagatggggtttcaccatgttggtcaggctagtctcggactcctgacctcgtaatccgcccatgtcggcctcccaaagtgctgggattacaggcgtgagcc

SEQ ID NO: 16237 - DNA, 201 bp, Homo sapiens
aagacacaaaactacctgaagggagtggctcccacatttgtagggtaccttacagagcaatttcccttcatatgattttgcaggtggtggggaaactctcmgggcagttgtggcctgtgctacatcacccattgaccagaggtgccagtactagtgctcaagatcaatcgatcgatcggtctacctacctatcatctattg

SEQ ID NO: 16238 - DNA, 201 bp, Homo sapiens
ggaggtccaccttgagtgcccttcaaggtggcagtagtcgccaccgagttagcccttacccggaacctcttacaccgagcggaaggcccccaaccagggcrgcgccaaggggtgcttgagcctccccacatttccacgaaccctcctgaaataagtgtaatatctgatttttcggtgtgcaaacctacccttcccatcccg

SEQ ID NO: 16239 - DNA, 201 bp, Homo sapiens
gcctagtatcttggagccagcctccccgctgaattctccgggtgagctttagacgcctccttcctctttcgctcaccataccagacccctctggcccagcyaggggctcgacgacccttgcctcgctccttgctctcaggcaccgaggggtcttggctgttttctacctgcggggccagcggccggcatgggcccacacag

SEQ ID NO: 16240 - DNA, 201 bp, Homo sapiens
actgctcctgtcctcaggaacctggaagcccccacctggtgtccgaggtgtggctcccactttaagcgtggggcacctcctctccggcctcaaacctaccsgagctcccagcaggctgcggcacatctgacggctggaaactagaacccctgggtggggactccttaaggctcctcccggaagcgtagggacctcgctgcc

SEQ ID NO: 16241 - DNA, 201 bp, Homo sapiens
gagtagcaatgaggttcagccttgcagtcacaaaggcaccactaaaaggcacaagtaatggcaggtaatgaggccttacttggagcagtttagagtacttmccacgtgtggtgacgcatgccacacactcaccaccaccaccactgccacaaatgaagtgcacactccactgctcctgtcctcaggaacctggaagccccc

SEQ ID NO: 16242 - DNA, 201 bp, Homo sapiens
ctaactactataacttctcttttgaagtattttgtattaaacataggtctcagactttcaagttaggattttttttttttttttttttttgagatggggckttgctcttgttgcccaggctggagtgcaatggtgcgatctcgtctctgcaacctctgcctcccaggttcaagccattctcctgcctcagcctccagagta

SEQ ID NO: 16243 - DNA, 201 bp, Homo sapiens
atgatcttggctcactgcaacctccgtttctgaggctcaagtgattctcatgcctcagcctcccgagtagcaggggctacaggcatgcaccaccacacccrgctagttttttgtatttttattagaagcggtgttttgccatgttgcccagggtggtctcagactcctaagctcaggcaatccgcccacctcagcctccta

SEQ ID NO: 16244 - DNA, 201 bp, Homo sapiens
caaaagtgctggtattacaggcatgagccactgggcccagcctttttttcttttttttttttgagacagagtcttactctgtagcccaagccagagtgtastggcatgatcttggctcactgcaacctccgtttctgaggctcaagtgattctcatgcctcagcctcccgagtagcaggggctacaggcatgcaccaccac

SEQ ID NO: 16245 - DNA, 201 bp, Homo sapiens
caccacgcctggctaatttttgtatttttagtagagatggggttttgccatgttggccaggctggtcttgaactcgaactcctgacctcatgatccgcccrcctcagccttcaaaagtgctggtattacaggcatgagccactgggcccagcctttttttcttttttttttttgagacagagtcttactctgtagcccaag

SEQ ID NO: 16246 - DNA, 201 bp, Homo sapiens
gagtgcagtagtacaaatctcagctcactgcaacctccgcctcccgggttcaagcaattctcctgcctcagcctcctgagtagctgggattataggcatgygccaccatgcccggctaatttttgtatttttagtagagatggggtttcaccatgttggtcaggctagtctcggactcctgacctcgtaatccgcccatgt

SEQ ID NO: 16247 - DNA, 201 bp, Homo sapiens
tcccaactacttgggaggctgaggcaggatgatcacttgattccaggaattcaattccagcctagccaacatagtgagaccccatgtctgtctgtctgtckgtcggtcggtctgtctatctatctatctatctatctatctatctatctatctatctatttctgagacagggtcttgctctgttgcccaggctggagtgca

SEQ ID NO: 16248 - DNA, 201 bp, Homo sapiens
ggagcaggactgctgtgagagagatggggaagaatcataagtgggaggtaaaaactttgtccacatctggagacaacaagaatgtggggcctgccaggcayagtggtacacacctgtagtcccaactacttgggaggctgaggcaggatgatcacttgattccaggaattcaattccagcctagccaacatagtgagaccc

SEQ ID NO: 16249 - DNA, 201 bp, Homo sapiens
ctgaggtagcaagtcaggggacacagagggcctctccagctttgtggagcctaaaacatggtttccgtctccctcctggtaacgggatatgtcccccaccycactcagcaagtttcgccatcagaacattgtgcggtgtgtggggctcagcctcagggccacccctcgcctcattctgctggaactgatgtctggagggga

SEQ ID NO: 16250 - DNA, 201 bp, Homo sapiens
ggccgcctgcccactcccttccaacgtgtcttcctgcagagccctgggccatggtgcctttggggaggtgtatgagggactggtaattggccttcctgggractccagtcccctgcaggtagctatcaaggtgagaggagtgggacttctggctgggggtaggagagcggaacaccctgaagggaaggacaatgactagag

SEQ ID NO: 16251 - DNA, 201 bp, Homo sapiens
aacacttgagctgagtcttgaagcgtgggtaaaacttgagggtaaaggaacagagaagaccttcccactggaggtgtctctctttctccctagacctgcayaagcccccaggccctctggttctgatggtggctgtggtggcaacctcaacactgagcctccttatggtgtgtggggtcctgattctgggtacgaagcgtc

SEQ ID NO: 16252 - DNA, 201 bp, Homo sapiens
catatgattttgcaggtggtggggaaactctcagggcagttgtggcctgtgctacatcacccattgaccagaggtgccagtactagtgctcaagatcaatygatcgatcggtctacctacctatcatctattgaccttcagtgctactaaaaacactcggatcttctaacgtctggtccagtctttcaccccatcacagtg

SEQ ID NO: 16253 - DNA, 201 bp, Homo sapiens
ttctcccaacacctttcaggcgccattctctgctctagcccggggtcccaggagacttttctgcggtcctcgcccctgccgctggcaagtcccagcccccrggacccgaaagtcagcgccccgcctagtatcttggagccagcctccccgctgaattctccgggtgagctttagacgcctccttcctctttcgctcaccat

SEQ ID NO: 16254 - DNA, 201 bp, Homo sapiens
caactgccccagcaggttccaaagtatccccagcaggatgctaccatcctgcctccctttgggggttaaatgggatgtggcctgagaaagtgctttgtgcrtggtgaagtgatgtgcagcaataaggcagtctgagttttgacttctggggaacactgagacctgcctgggggcccttctctactggatggccacctttgc

SEQ ID NO: 16255 - DNA, 201 bp, Homo sapiens
tttgtttttgtttttttggtgtgccccttatctcttctagcctccagctaatcttgagagcatcccatcctctggacctctcctcttaccacccgcaactyggcagccctgtgtcctctctgaagtacacaggttggctcatgtcaactgtgtctgccgcctccccacagaggcacttgccttttagcacagttacacatg

SEQ ID NO: 16256 - DNA, 201 bp, Homo sapiens
gggcggatcacaaggtcaagagatcaagaccatcctagccaacatggtgaaaccccgtctctactaaaaatacaaaaattagccggacatggtggcatgcrcctgtggtcccagctacttgggaggctgaggcaggagaatcgcttgaatctgggaggtggaggttgcagtgagctgtgatcgagccactgcactctagcc

SEQ ID NO: 16257 - DNA, 201 bp, Homo sapiens
cacagaaacaaacctgtacacaggcccagggcaggaaggccagcctggcagggcctggagaaagaacagggctggagaaagaaaaggctctccaagcctcycttgctatccctggattctatgcactcattagctggcaaggcccagggcacccttggtttttatctggacctagaaatcttaagccatgaaaataagatg

SEQ ID NO: 16258 - DNA, 201 bp, Homo sapiens
catgatcttggctcactgcaacctccgtttctgaggctcaagtgattctcatgcctcagcctcccgagtagcaggggctacaggcatgcaccaccacaccsggctagttttttgtatttttattagaagcggtgttttgccatgttgcccagggtggtctcagactcctaagctcaggcaatccgcccacctcagcctcct

SEQ ID NO: 16259 - DNA, 201 bp, Homo sapiens; identical to SEQ ID NO: 1367

SEQ ID NO: 16260 - DNA, 201 bp, Homo sapiens
cccctgcttcagcctcccaagtagctgggactacaagcacccaccaccatgtccagctaatttttgtattttcggtagagatggggtttcaccatgttggycaggctggtcttgaattcctaatttcgtgtgatccgcctgcctcagcctcccaagtgctgagattacaggcgtggcccactacacatggccaatttcatg

SEQ ID NO: 16261 - DNA, 201 bp, Homo sapiens
ggtcactgcaacctccgcctcccgggttcaagtgattctgcagcctcagtcgctggagtagctgggattgcaggcgtgcgccaccacacccggctaatttkgtatttttagtagaggcggggttggccaggctggtcttgaacttctgacctccggtgatccgctcaccacggcctcccaaagtgcaatgattataggcgt

SEQ ID NO: 16262 - DNA, 201 bp, Homo sapiens
acgaagtccacgtgcgcaccgacttgcgtcttggactattccgcggggaggtccaccttgagtgcccttcaaggtggcagtagtcgccaccgagttagccsttacccggaacctcttacaccgagcggaaggcccccaaccagggcggcgccaaggggtgcttgagcctccccacatttccacgaaccctcctgaaataag

SEQ ID NO: 16263 - DNA, 201 bp, Homo sapiens
tagtctttaaccctgatccttgtgctagaaggacagatgtttgtctaggacctgatctctgccctcatgatttggtttcatgtgatcgttatccacacacsttatgtatgtatatacattcctaccctccccctcagcacgtcatttcccctgtcacagttgcctgtgtccctggagtgttacacagtgcctcctgaagac

SEQ ID NO: 16264 - DNA, 201 bp, Homo sapiens
gggcccagccacttccagcttttgatcttggggccagaggccgccttacacacaccccaggtgtccatggggagcactggattgctctcccattatgagcrtccttcatctgggcagaccccccaccctgcagatgcttctaataaaaagctcttctcatcctccagcgatctgtggatgccagggaccggaactgaggaa

SEQ ID NO: 16265 - DNA, 201 bp, Homo sapiens
gccagttattaccgcaggggggaccgggccttgctcccagtcaagtggatgcccccagaggccttcctggagggcatcttcacatccaagacagattcctrgtgataacacccttcccctccccttccccactgttcccctcccctgaggctaatcctgtcctttccagccacctcatgtgaggggaggctacacctgacg

SEQ ID NO: 16266 - DNA, 201 bp, Homo sapiens; identical to SEQ ID NO: 1318

SEQ ID NO: 16267 - DNA, 201 bp, Homo sapiens
tagtacaaatctcagctcactgcaacctccgcctcccgggttcaagcaattctcctgcctcagcctcctgagtagctgggattataggcatgcgccaccaygcccggctaatttttgtatttttagtagagatggggtttcaccatgttggtcaggctagtctcggactcctgacctcgtaatccgcccatgtcggcctcc

SEQ ID NO: 16268 - DNA, 201 bp, Homo sapiens
ccaacattttgggaggccaaggtgggaggattgcttgaggccaagagtttctgaccagcttgggcaagaaagctagacaccatctctacaaaaaattattsgaaaattagccagacctggtgatttgcccgtagacccagttactcaggagcctgaggcaggaggatcacttgagctcaggaggttgaggctgccagtgag

SEQ ID NO: 16269 - DNA, 201 bp, Homo sapiens
ggaagaggacagcgtagagcagcggtacctcccagttgcaggggacggcgaggcggtgggagagggcggaggggcaggcggggcgggagcgggggatcggraaagacagcgcgcagtggggctgcggcggtgccagcgaagcgcgcctgcctcaccttgatgccctcgatgcggaagccgagggtggtgctggagctgatg

SEQ ID NO: 16270 - DNA, 201 bp, Homo sapiens
tcctcaggtctcctgctggttgttcctgagagttttatcacctatagattgtaaacaacctaagttggctataaatattgttgctaggctgatgacatcasggagggctgaagacagagggaatggcagtaaggtatgaatgaggaggaatgagttcatgttaacccaaggataaagaagatcttcgctgttgcccaataa

SEQ ID NO: 16271 - DNA, 201 bp, Homo sapiens
ggcgtgagccaccgcatccggccaatgcaattgttttcttaattccattttctgcatgttctttgctagtgcatagacatacaatttttttttttttttttgagacggagttttactcttgttgcccaggctggagtgcaatggtgcaatctcggctcacagcaacctccatctcccaggttcaagcgattctcctgtctc

SEQ ID NO: 16272 - DNA, 201 bp, Homo sapiens
aaaaattagctgagtgtggtggtgcatctgtagtcctagctttttgggagactgaggtgggaggacggcttaagcccaggaggtagaggttgcagtgagcyaagatcacgctactgcactccagcctgggtgacagagccagactctgtcacaataaattaataaagtttacaattcatggcttttagtatattcacaagg

SEQ ID NO: 16273 - DNA, 201 bp, Homo sapiens; identical to SEQ ID NO: 1346

SEQ ID NO: 16274 - DNA, 201 bp, Homo sapiens
gcatttcaccgtgttagccaggatggtctcgatcttctgacctcgtgatctgcctgccttggcctcccaaagtgctgggattacaggcgtgagccagcacrcccggccttcattcagcactattgttagttccagctatctagcttgtctacctctccatctcatcctccttcaacttttaggaggtggtcaacttcatca

SEQ ID NO: 16275 - DNA, 201 bp, Homo sapiens
gtaatcccagcactttgggaggctgaggtgggcggatcacaagatcaagacattgagaccatcctggccaacacggtgaaatcctgtctctactaaaaatmcaaaaattagctgggcgtggtggcacacgcctgtagtcccagctactcgggaggctgaggcaagaaaatcacttgaacccgggaggcggaccttgcagtg

SEQ ID NO: 16276 - DNA, 201 bp, Homo sapiens
cttcccttttaattcctacccttcctcctctttctacctccatatccccgtggagcttcccaggagccatgttggtggggaccagagagcccacgcagcasctcagccttcctgtagcctgtgtgctccctctttatgccccctacacatcggggccttctctcccttcagaaggctcagcctgcagaagcctccaaatgt

SEQ ID NO: 16277 - DNA, 201 bp, Homo sapiens
ccatattctctcaccccaactttgggtacatcattgaccaaaggaagacctttacaatcttggagacatcatttaaactgtaaacctttggaatttctagrcttgtgtgggcaaagagagataatgaagtgggaaattattaaaagacccagcatttcggcatggtctctgtctccccagtaagccccttgaacccaggga

SEQ ID NO: 16278 - DNA, 201 bp, Homo sapiens
gacacgatctcagctcactgcaacttgtacctccctagttcaagcgattttcctgcctcagcctcctgagtagctgggattacagatgtgcaccaccacayccagctaatttttttgtatttttagtagagatgggtttcaccatgttggccaggctggtcttgaactcctgacctccagcgacccatctgcctcggcctg

SEQ ID NO: 16279 - DNA, 201 bp, Homo sapiens
catatgccctgcttttttttttttttttttttttttgagacggagtctcgctctgttgtcctgggtggagtacagtgacacgatctcagctcactgcaacytgtacctccctagttcaagcgattttcctgcctcagcctcctgagtagctgggattacagatgtgcaccaccacacccagctaatttttttgtattttta

SEQ ID NO: 16280 - DNA, 201 bp, Homo sapiens
cgaaatttacatctgtagttgaagccaagaggattatagatctgctatagtgcgggaccagcagcatcacctagaaacttggtagaaatacaaattttggrgctctattagaaacctactgaatcggctgggcacggtggctcacgcctgtaatcccagcactttgggaggccaaggcgggcagatcacgaggtcaggaga

SEQ ID NO: 16281 - DNA, 201 bp, Homo sapiens
ggtctcactatattgcacaggttggtttttgttttttgttttttgttttcagagtctccctctgtcacccaggctggagtggaatggcacgatctcggctyactgcaacctctgcctcccaggttcaagtgattcttgtgcctcagccttttcagcagctggaattagaggtgtgtaccaccatgcttggctaattttttt

SEQ ID NO: 16282 - DNA, 201 bp, Homo sapiens
tgaggctgggtgtgttttccaaccttagcaggcaccaaaattaagtggaaggcttgttaaaacagaatgctggagctggggatggtggcttatgcctatartcccagcatttgggaggccagatcacctgaggtcaggagttcgtgaccaacctggccaacatggtccaaccgtgtccctactaaaaatacaaaacttagc

SEQ ID NO: 16283 - DNA, 201 bp, Homo sapiens
ataaaaatttcataaatcctcgctgggtgtggtggcatgcacctgtggtcccagctacttgggaggctgaggtgggaggatcacttgagcctaggaggtcraggctgcagtgagtcatgacagcaccactgcactccagcctcggtgacaaagcaagaccctatctcaaaaaaaaaaaaaagtaaatccttaatatcatac

SEQ ID NO: 16284 - DNA, 201 bp, Homo sapiens
tgattgctgacctgtttgttgattttttttatgttttttctttccttttttatcctctaagcctctgatcacttatcattgtcaaggttgagcagacagakaagtgcatacattctgcagcttgagtgcctaacttgagattctgtttctgacatttactgtggatttggggcaattaaattaactttctgtgtcaagtgg

SEQ ID NO: 16285 - DNA, 201 bp, Homo sapiens
ggcagatttcttgagcccaggagatcgagaccagcctgtacaacatggtgaaatcctgtctctgtaaaaaacacaaaaattgtggggcacggtggctcacrcctgtaatcccagcactttgggaggccaaggcaggtggatcatgaggtcaggagttcgagatcagcctgaccaacatggtgaaaccctgtctctactgaa

SEQ ID NO: 16286 - DNA, 201 bp, Homo sapiens
tactaaaaaaatacaaaaaattagccgggcgtggtggcaggcgcctgtaatcccagctactcgggagcctgaggcaggagaatcacttgaacccaggaggyggaggttgcagtgtgccgagatcgtgctattgcactccagcctgggcaacaagagggagaatctgtctcaaaaaaaaaaaaaaaaaaaaaaaggacagca

SEQ ID NO: 16287 - DNA, 201 bp, Homo sapiens
gcactgggctaggcgttttgcgtgtatagtcatttaaatcctcacacatttcctattatataggacctgttactcacattttacagttgtggaaatgggayttaagacagcatagaggccgcgcacggtggctcacgcctgtaatcccagcactttgggaggccgaggcgggcgggtcacctgagatcaggagttcgagac

SEQ ID NO: 16288 - DNA, 201 bp, Homo sapiens
tctttgctggaacctgcctgcgggcctttggtctgtaagggagcaactgtggcctcctctgtgcatagatctcgggcacggcccttcaacgggcggcgaargctgcgactcggtgattcctcattgtagagttgggtggtccaggaggcttaactggagcccttgacctgagcggtaagggcagtcacgcgtcccgactcg

SEQ ID NO: 16289 - DNA, 201 bp, Homo sapiens
aaaaaaaaaaaaaaaaaaaaggatgtgtgttctgggtgatggtatagagcttacgtgggggtaataaaccgccagccgcgcagcaccgcgctcaccagtcsgctgcactgaacaagcaaagcccagaatgctccgagataagaccgggagaggcggggctgggctgcggggcggaagctggaatctggcggcggcggaaac

SEQ ID NO: 16290 - DNA, 201 bp, Homo sapiens
gtttatagccaggacccacaggacaggtggagggctcctccacagggctggggtggctggagtgtaaaggggcgtgaggcagccagatcctcactgtggcmccctttggcacttttgtagtgattctgctgaggccagcctctcggccaccccttccttagtcacttggacacaggtgtctgggctccagcctcttgttga

SEQ ID NO: 16291 - DNA, 201 bp, Homo sapiens
gactttgtggcaccagaggggcctgggtcagggttgagttaagccactctctgtccagctgagagtagctggacttgagactcacagctgaccctgatccycagactgtgcccatttccagttgagcagctttgatctccggagccgcctgtgccgcatcatagctgaggctccccaagaactggccttgcccccagagga

SEQ ID NO: 16292 - DNA, 201 bp, Homo sapiens; identical to SEQ ID NO: 16212

SEQ ID NO: 16293 - DNA, 201 bp, Homo sapiens
cagttcgacaccagcctggccaacataatgaaaccccgtctctactaaaaatacaaaaattagtcgggcatggtggcgcatgcctgtagtcccagctactygggaggctgaggcaggagagtctcttgaacctgggagacagaagttgtggtgagccaagatcactccactgcactccagccagggcaacagagcaagact

SEQ ID NO: 16294 - DNA, 201 bp, Homo sapiens
ggttgaggcccagcaatctgtttcgttttgtttgaaacagagtctggctctgtggcccaatctggagtgcagtggttccatcttggctcactgcaacctcygcttcccaggttcaagtgattctcctggctcagcctcttgagtagctgggactacagatggacaccaccatgccctgctaatttttatatttttagtaga

SEQ ID NO: 16295 - DNA, 201 bp, Homo sapiens
caactcagaccggcctccgctccaggaccatcgggatgtggtgatgttggacagtgagttcccatggatgtgaggctgagaagtagagagggtacagcctygggcccctccctcttcctgttgtggttggattcagacacatcattattatttcagacactgcatagcctgtgtttctgcagccccattttacagaggaag

SEQ ID NO: 16296 - DNA, 201 bp, Homo sapiens
gtggtgcatgccggtagtcccagttacttgggaggctgaggcgggaggattgcttgagcccaggagtttgaggctgtggtgagctacgattgtgccactgyactccagcatgggtaacagagcaagaccctatctctttaaaaatatatatttacagcctgagcaacatggtaaaaccccgtctctagtaaaaatacaaaa

SEQ ID NO: 16297 - DNA, 201 bp, Homo sapiens
ctgggtggccagctcttgccatcttcttcctctctgatccagttgcttagaaatgcaacagaaatcaccaggcatgaacctgtttactggagcctgtttaytggagcctggtgcatcatataggtatactgtggtctcatgatgtaataggaggtctccctgttccctagacccagatcagaagggcttcatgcacatagg

SEQ ID NO: 16298 - DNA, 201 bp, Homo sapiens
gtacacagggtctaggagaatgaatggctgggccatcagctcagtgaattccttggtccaccagccaagctcatgcccggaggattggctccaggacatgsagcgcctgtcagaggagctgctgctgccactgctgagtcagcccacactgggcagcctgtgggattcccttaggtatgtactgtgtttggtagctggggg

SEQ ID NO: 16299 - DNA, 201 bp, Homo sapiens
tgacatcctggctgtgctcatccgcctggcccggcattccctggaatcagccacaagggtgagaaaaaagggagcagggaatgggcaaaaagcctagctgrgccttgtcttgacccacagcctcccttcctcccttttacctcctgtctcccataggtcctggagtgccctcggctgatagagactatagttcgagagttc

SEQ ID NO: 16300 - DNA, 201 bp, Homo sapiens
aaagtctatgaaattgttatagccaagaggcgcctaaggggacttgacaactaaatgtaatgtaggtctggcacagtggctcacaccagtaatcccaacastttggtaggccgagatgggaggatcccttgaggctgggagttcaagaccagcctgggcaagatggcaggactctgtctctacgaaaataaaaataaaaaa

SEQ ID NO: 16301 - DNA, 201 bp, Homo sapiens
gcgctacgtgctggaggtgacatacccaggacctgcggtggtccttgacatcctggctgtgctcatccgcctggcccggcattccctggaatcagccacargggtgagaaaaaagggagcagggaatgggcaaaaagcctagctgggccttgtcttgacccacagcctcccttcctcccttttacctcctgtctcccatag

SEQ ID NO: 16302 - DNA, 201 bp, Homo sapiens
ctggagatgaggtaccacagggataggaatggggcttgggctgggaggtgccagggtccatattcctgtttctgggcatggccccattgctaaggctttgygggcaagatgtagaatgggatggcaggcgtctccctcatctcctaaagtccctaaagcccaggaggcttgcctttatggtttttattggggagcatcctc

SEQ ID NO: 16303 - DNA, 201 bp, Homo sapiens
tccgtgctcttcgggctctgctggtggctcctggagatgaggtaccacagggataggaatggggcttgggctgggaggtgccagggtccatattcctgttyctgggcatggccccattgctaaggctttgcgggcaagatgtagaatgggatggcaggcgtctccctcatctcctaaagtccctaaagcccaggaggcttg

SEQ ID NO: 16304 - DNA, 201 bp, Homo sapiens; identical to SEQ ID NO: 1370

SEQ ID NO: 16305 - DNA, 201 bp, Homo sapiens
ggcaaacgaaggattagggcaaagcctctagataacttcagcatcttcagcaaggttttaccctcctgccctcaggcccaggctggtgagtttggggaccrgctagcaggcagtgtcttaagcctccttttggatgctggtttcctcttcctactgcgcttctccttggatgacagagtggatggggtcattgcaaccgcc

SEQ ID NO: 16306 - DNA, 201 bp, Homo sapiens
gaagatcttcgctgttgcccaataaagagaatcagggttcagttgcagagggcccatattctttcttgctcttagggatgaataagagggaacccccacayggagacactgctggagagagtcgtactggggaggcagctggagcagcaagatgctgtcgagaccgaagccaggggagtccgaggtggacctgctgcactt

SEQ ID NO: 16307 - DNA, 201 bp, Homo sapiens
attaaaagacccagcatttcggcatggtctctgtctccccagtaagccccttgaacccagggactggattttactcccatttctttatatttacagccccytgtacaccgctcagcccagagtaaactctcaaaaaattttttgataatgttcttaaggtcacaccgtcatgtgattgtttcaccatttctacccctttag

SEQ ID NO: 16308 - DNA, 201 bp, Homo sapiens
ctgccattccatgtctctcggggctgctgtgctgatttcttctggcccagctcaggccatgccttgcctccagaagtttcccagcttccctctgctcacaraataaggttctggtctcagctgggcaagatattccttctaccttttgtccctgctgaccctgctgctctgcctccttcacttcctgctacaccactctgc

SEQ ID NO: 16309 - DNA, 201 bp, Homo sapiens
gttgtgatccctggaaattgagcaaatccccttttatctctttgttccagaggccttgatataaagaggttgagaggaaagtgggatgatgagcatcagtracctgggttttctttttgccccacaggggaaatcagcaacatctggtaagagaagcatctttgcccaggaaattgcggcaaggaggatagctgaagccaa

SEQ ID NO: 16310 - DNA, 201 bp, Homo sapiens
cttcagcctcacttttatcctcttcctcacttctctctgccacgtccccttctcctgtactaggtagttccctgcttttctgtctgcaggcagcgctgcarccactgccagccacccatgctgccctctatcatggtatggccttggccctgctgagccggctgctgcccggaagtgagtacctcacccatgagctgctgc

SEQ ID NO: 16311 - DNA, 201 bp, Homo sapiens
cattcagtttcttaggctcaaaatcttgatcctctctccgtattctggtcagttgctagaatttgccgatcttctgtcacctcctcatgatgcctcctgcrctgtggccttgcttccttggtctgctcactctccatgccctccattctccgcccccctgccattccatgtctctcggggctgctgtgctgatttcttctg

SEQ ID NO: 16312 - DNA, 201 bp, Homo sapiens
tgaaaggcctgggattaaaggtggggagtgggtgtgggaaggttgctggagcccccagaccacagtcctctttctcttcccattagaggatgcaggctcgrttcagtcttcagggagaactactggcccctgacgtggacctgcccacccacctgggtctgcaccaccatggagaggaggcagaggtgaggcatgggactg

SEQ ID NO: 16313 - DNA, 201 bp, Homo sapiens
aagatgttctagggcaacagggatattggatgctcggggtgggtgaggcttatcagtggagggtgcttcagaaaggtagacttttacccctgaggtcaggwtgggggctgggttagaatcactgccctgaagggaggagggtccgtaaccccccagagtgaggttctcatcgttcagaactgggctaataggatcgggtcc

SEQ ID NO: 16314 - DNA, 201 bp, Homo sapiens; identical to SEQ ID NO: 16218

SEQ ID NO: 16315 - DNA, 201 bp, Homo sapiens
tgctgcagcctcacattcctgggatcaagctattcccccgccgctgcatcgctaggactataggtgccaccacacccagctaattaaaaaaaattttttttatagaacagggtcttcctacgttgcccgggctggtcttgaattcctggccacaagcaatactcctgcctcagcctaccaaagtgctgagattataagcat

SEQ ID NO: 16316 - DNA, 201 bp, Homo sapiens
ttctttcttgctcttagggatgaataagagggaacccccacacggagacactgctggagagagtcgtactggggaggcagctggagcagcaagatgctgtygagaccgaagccaggggagtccgaggtggacctgctgcacttccagagtcagtttctcgcagctggtgcagccccagcagtgcagctggtgaagaaagga

SEQ ID NO: 16317 - DNA, 201 bp, Homo sapiens
aacctgggttttctttttgccccacaggggaaatcagcaacatctggtaagagaagcatctttgcccaggaaattgcggcaaggaggatagctgaagccawgggcccatcagttggggaagttgtgcccaacgtgggcccaccagagggtgagccggggttgaagaggattgggcttggcctttttaaaagacacaatcat

SEQ ID NO: 16318 - DNA, 201 bp, Homo sapiens; identical to SEQ ID NO: 1312

SEQ ID NO: 16319 - DNA, 201 bp, Homo sapiens
cttgaacccgggaggtggaggttgcagtgagctgagattgcaccattgcactccagcctgggcgacatgagcgagactccgtctcaaaaaaaaaaaaattmtttttagcgacaaagtctcattctgtcactgaggctggggtgcagttgtgcaaacagcttgctgcagcctcacattcctgggatcaagctattcccccgc

SEQ ID NO: 16320 - DNA, 201 bp, Homo sapiens
ggcccatcagttggggaagttgtgcccaacgtgggcccaccagagggtgagccggggttgaagaggattgggcttggcctttttaaaagacacaatcatarggtcatttttgaagatatgtcttcctgcctcaaatgagaggtgcatttgagccatctcaagtagtctgagaatactaggtatgggaggcttgggtccata

SEQ ID NO: 16321 - DNA, 201 bp, Homo sapiens; identical to SEQ ID NO: 1313

SEQ ID NO: 16322 - DNA, 201 bp, Homo sapiens
gtggtggtgggcacctgtaatccctgctacttaggaagctaaggcaggcgaatagcttgaacccgggaggtggaggttgcagtgagctgagattgcaccaytgcactccagcctgggcgacatgagcgagactccgtctcaaaaaaaaaaaaattctttttagcgacaaagtctcattctgtcactgaggctggggtgcag

SEQ ID NO: 16323 - DNA, 201 bp, Homo sapiens; identical to SEQ ID NO: 16223

SEQ ID NO: 16324 - DNA, 201 bp, Homo sapiens
tagccgaaatttacatctgtagttgaagccaagaggattatagatctgctatagtgcgggaccagcagcatcacctagaaacttggtagaaatacaaattytggggctctattagaaacctactgaatcggctgggcacggtggctcacgcctgtaatcccagcactttgggaggccaaggcgggcagatcacgaggtcag

SEQ ID NO: 16325 - DNA, 201 bp, Homo sapiens
gcgggcgcctgtagtcccagctactcggaggctgaggcaggagaatggcgtgaacccgggaggcggagcttgcagtgagccgagatcacgccactgcactmcagactgggcgacaaagtgaaaaaaaaaattattcttttgccaggtgcagtggctcactcctgtgatcccagcactttgggaggctgaggcaggcggatc

SEQ ID NO: 16326 - DNA, 201 bp, Homo sapiens
agccctcatttttggcttttgggtcccattacagggaaagaacatcagggggtccagaggcagccgacttctctgaccagctgtcgttaggaagcagcagrgtccctcggtgtgggcaagggactctgctggctcaggcctgccaggacctccccagcatccgcaactgctacctgactcattgctcgccagcccgagcca

SEQ ID NO: 16327 - DNA, 201 bp, Homo sapiens
gcttctatacctttgcccagctctcccttctggctggaggcctatcttatccttcaaggtctggttcagtggttttcaactgggggtgatttttttctgasgtgacatttggcaatgtctggagacatttttacttgtcacaactaggggaggaggtttgatgatgacgtctagtgggtaaaagccaggaatgccgctaaa

SEQ ID NO: 16328 - DNA, 201 bp, Homo sapiens
gcagaatctgacaaagatcttatgaacatgccagaccagaagcagagaggccagtggaagcactcatttcccagaaactagattatttcattagtgattawcaaaataagaaattgaattatgagagccaggaacctcatgcccccggaggagctccaggccagctgagcaggttgggtgggggtaggcgtgaaggaggaa

SEQ ID NO: 16329 - DNA, 201 bp, Homo sapiens
tccaccttcacggctcaagcagtcctcccacttcagcctcctgtgtagctgggattataggcacacaccaccacactcagctaatttttttttttttttgsggggacagagtttcactcttgttgcctaggctggaatgcaatagcacaatctcggctcaccacaacctccgcctcccgggttcaagagattctcctacct

SEQ ID NO: 16330 - DNA, 201 bp, Homo sapiens
tttcaccatgttggccaagctggtcttgaactcctgacctcagatgatccacccacctcagcctcaaagtgctgggattacaggtgtgagccactgcgccyggccctattccctgcttctatacctttgcccagctctcccttctggctggaggcctatcttatccttcaaggtctggttcagtggttttcaactgggggt

SEQ ID NO: 16331 - DNA, 201 bp, Homo sapiens; identical to SEQ ID NO: 16235

SEQ ID NO: 16332 - DNA, 201 bp, Homo sapiens
cctgtaatcccagctactcgggaggctgaggcacaagaatcgcttgagcccgggaggcggaggttgcagtgagccgagattgcgccacagcactccagccwgtgcgacagagcaagactctgtctcaaaaaaaaaaaaaaaaaaaaggatgtgtgttctgggtgatggtatagagcttacgtgggggtaataaaccgccag

SEQ ID NO: 16333 - DNA, 201 bp, Homo sapiens
ttttttttttttttttgagatggtcttgctctgtcacccaggctggaatgcagtggcacgatctcggctcactgcaacctccaccttcacggctcaagcartcctcccacttcagcctcctgtgtagctgggattataggcacacaccaccacactcagctaatttttttttttttttggggggacagagtttcactcttg

SEQ ID NO: 16334 - DNA, 201 bp, Homo sapiens
agaaagaaaaagaaaaacctactgaatcagaaactcagaggttgaggcccagcaatctgtttcgttttgtttgaaacagagtctggctctgtggcccaatmtggagtgcagtggttccatcttggctcactgcaacctccgcttcccaggttcaagtgattctcctggctcagcctcttgagtagctgggactacagatgg

SEQ ID NO: 16335 - DNA, 201 bp, Homo sapiens
cctggaatcagccacaagggtgagaaaaaagggagcagggaatgggcaaaaagcctagctgggccttgtcttgacccacagcctcccttcctcccttttayctcctgtctcccataggtcctggagtgccctcggctgatagagactatagttcgagagttcttgcccaccagttggtctcctgtgggggcagggcctacc

SEQ ID NO: 16336 - DNA, 201 bp, Homo sapiens
ggtgacaggtgcctgtagtcccagctactcaggaggctgaggcaggagaatggtgtgaacccgggaggtgcaggttgcagtgagctgagactgcgccagtrcactccagcctgggcgacagagcgagactctgtcacaaaaaaaaaggaaacctactgaaacaggccaggtgcagtagctcatgcctgtaatcccagcact

SEQ ID NO: 16337 - DNA, 201 bp, Homo sapiens
tggtggcaccattgccaggagccattatctcgttatttcattgcgaacaattattttctactatcattcattctgcatatttggctccagttcctctcccycatcccgctgcctccataacttctgaccaggtctagtactattttggacctcaagatgactaaatcctagtagccgaaatttacatctgtagttgaagcc

SEQ ID NO: 16338 - DNA, 201 bp, Homo sapiens
cagcaagatgctgtcgagaccgaagccaggggagtccgaggtggacctgctgcacttccagagtcagtttctcgcagctggtgcagccccagcagtgcagytggtgaagaaaggaaataggggcggtggtgatgccaactcagaccggcctccgctccaggaccatcgggatgtggtgatgttggacagtgagttcccatg

SEQ ID NO: 16339 - DNA, 201 bp, Homo sapiens; identical to SEQ ID NO: 16237

SEQ ID NO: 16340 - DNA, 201 bp, Homo sapiens
gggactacagatggacaccaccatgccctgctaatttttatatttttagtagagatggggtttcaccatgttggtcaggctggtctcgaactcctgacctyaggtgatctgccagcttcagcctcccaaagtactgggattataggcatgtgccactgtgcctggccccagcaatctggtttaacaagacttccagttgat

SEQ ID NO: 16341 - DNA, 201 bp, Homo sapiens
tctcccttctggctggaggcctatcttatccttcaaggtctggttcagtggttttcaactgggggtgatttttttctgaggtgacatttggcaatgtctgsagacatttttacttgtcacaactaggggaggaggtttgatgatgacgtctagtgggtaaaagccaggaatgccgctaaacatcctacagtgcgcaggaca

SEQ ID NO: 16342 - DNA, 201 bp, Homo sapiens; identical to SEQ ID NO: 16238

SEQ ID NO: 16343 - DNA, 201 bp, Homo sapiens; identical to SEQ ID NO: 16239

SEQ ID NO: 16344 - DNA, 201 bp, Homo sapiens; identical to SEQ ID NO: 16240

SEQ ID NO: 16345 - DNA, 201 bp, Homo sapiens; identical to SEQ ID NO: 16241

SEQ ID NO: 16346 - DNA, 201 bp, Homo sapiens; identical to SEQ ID NO: 16242

SEQ ID NO: 16347 - DNA, 201 bp, Homo sapiens; identical to SEQ ID NO: 16243

SEQ ID NO: 16348 - DNA, 201 bp, Homo sapiens; identical to SEQ ID NO: 16244

SEQ ID NO: 16349 - DNA, 201 bp, Homo sapiens; identical to SEQ ID NO: 16245

SEQ ID NO: 16350 - DNA, 201 bp, Homo sapiens
tacaggcactgctcccttctctgcaacccgctgtcctgtgtgccagcccttgaagctccccccagcctcgtgtcactgggctgctcgggaggctgcccccrtctcagtctggctggctcagcctcacccttcccattcctcactgccctcctctctcttcttaataccctggcccagatccacaaggggctgtgtggccag

SEQ ID NO: 16351 - DNA, 201 bp, Homo sapiens
gatttccaagaagggagagtgggatgaacaaaggcaagattctggagaagatgataaccttgctagcaaggaagctttattccctctcttctcaccaccamtatttctgcagtgcacactggcagtgttctttccttgggcctttttcatggttaccttctagctcttccataaacacattcgtcacgttggggtgtgtgt

SEQ ID NO: 16352 - DNA, 201 bp, Homo sapiens
agaccggcctccgctccaggaccatcgggatgtggtgatgttggacagtgagttcccatggatgtgaggctgagaagtagagagggtacagcctcgggccsctccctcttcctgttgtggttggattcagacacatcattattatttcagacactgcatagcctgtgtttctgcagccccattttacagaggaagaaaatg

SEQ ID NO: 16353 - DNA, 201 bp, Homo sapiens; identical to SEQ ID NO: 16247

SEQ ID NO: 16354 - DNA, 201 bp, Homo sapiens
cccaacaaatccttggggtcagcaaggggctggagcccaggatggagtgtgtctgtcatatttgagactttcaccccagccccaggagttccagtccctgrgccatgccatttagccataaccgagggtagaagctggcagatcctggaacagaagtggatgtggcagctgctgggtgatggtggggacccctgtggatag

SEQ ID NO: 16355 - DNA, 201 bp, Homo sapiens; identical to SEQ ID NO: 16248

SEQ ID NO: 16356 - DNA, 201 bp, Homo sapiens
gtggctcctggggctgccccacacctcacacctttctctgcatgggccctgcgccatgagtaccacctgcagtacctggcactcgctctggcccagaaagyggtaggtccccctgtctgacaggttctcctgtcatcccattatctccttcctgtttctgtggaacccagcctgcttctgccaggccatgcagctcccact

SEQ ID NO: 16357 - DNA, 201 bp, Homo sapiens
gcaaggggctggagcccaggatggagtgtgtctgtcatatttgagactttcaccccagccccaggagttccagtccctgggccatgccatttagccataaycgagggtagaagctggcagatcctggaacagaagtggatgtggcagctgctgggtgatggtggggacccctgtggatagtgagctgagccgtttgggtaa

SEQ ID NO: 16358 - DNA, 201 bp, Homo sapiens
gtggctcaggcctgtaatcccagcactttgggaggccaaggcaggaggatcacttggggccaagagttcaggggccagcctggacaacatagcaagactcygtctctacaaaaaacaaaaacaaaaaattagctagatgtggtagcacatgactgtagtctcagctactcggtaggctgaggtagaaggatcacttgagct

SEQ ID NO: 16359 - DNA, 201 bp, Homo sapiens
atttgaataatagtagtaactggcccgttgcagtggctcacgcctgtaatcccagcactttgggaggcagaggcgggcagatcacctgaggtcgggagttygagaccagcctgaccaacatggagaaacccagtctctactaaaaatacaaaattagctgggcgtggtggcacatgcctataatcccagctactagggaga

SEQ ID NO: 16360 - DNA, 201 bp, Homo sapiens
agggagggctgggtgtagtggctcaggcctgtaatcccagcactttgggaggccaaggcaggaggatcacttggggccaagagttcaggggccagcctggmcaacatagcaagactctgtctctacaaaaaacaaaaacaaaaaattagctagatgtggtagcacatgactgtagtctcagctactcggtaggctgaggta

SEQ ID NO: 16361 - DNA, 201 bp, Homo sapiens
aaaaaattacagccaggtgtggaggctcacgcctgtaatcccagcactttgggaggctgaggtgggcggatcacaagatcaagacattgagaccatcctgrccaacacggtgaaatcctgtctctactaaaaatacaaaaattagctgggcgtggtggcacacgcctgtagtcccagctactcgggaggctgaggcaagaa

SEQ ID NO: 16362 - DNA, 201 bp, Homo sapiens
gatactgttctatgctatgcctcacccctagtgtctgttcaccaaaatgccaggcactcagtcaatcttgttacccactgtatactagcacctctatagastataatacgtgttagggctcagtatggtgccttgccctgtaattccagcactttgggaggttgaggtgagaggattgcttgaggccaagagtttacgacc

SEQ ID NO: 16363 - DNA, 201 bp, Homo sapiens
ccactggccttggcctcccaaagtgctggagccactgcgcctaggttttttttttttttttaagacggatttttcctcttgttgcccaggctggagtgcartggcgcaatctctgctcactgcaacctctgcctcccaggttcaagcaattctcctgtctcagcctccaaagtagctgggattacaggcgcctgccaccat

SEQ ID NO: 16364 - DNA, 201 bp, Homo sapiens
atagatctcgggcacggcccttcaacgggcggcgaaagctgcgactcggtgattcctcattgtagagttgggtggtccaggaggcttaactggagcccttracctgagcggtaagggcagtcacgcgtcccgactcgggattggatcctggctctggaggataggctgcaatgtaagagccccagagactcctcagaggcc

SEQ ID NO: 16365 - DNA, 201 bp, Homo sapiens
tattccctaacagtctcaaaaaaacagtttcaaaaatgaagatataaacaaagaccgcatttcatatgttatagtctctgcccagtgcagtggcttacacytgtaatcccagcattttgggaggctgaggtgggcaaatcacctgaggtcaggagtttgagaccagcctgaccaacatggtgaaaccctgtctctactaaa

SEQ ID NO: 16366 - DNA, 201 bp, Homo sapiens; identical to SEQ ID NO: 16252

SEQ ID NO: 16367 - DNA, 201 bp, Homo sapiens; identical to SEQ ID NO: 16253

SEQ ID NO: 16368 - DNA, 201 bp, Homo sapiens
aaagaggggccatcaatgcccagggtccagctgcatttgtcagtgggtttctctctccaactcccaggggctcctggctaccagcctgctgcctcggctgygctacgtgctggaggtgacatacccaggacctgcggtggtccttgacatcctggctgtgctcatccgcctggcccggcattccctggaatcagccacaag

SEQ ID NO: 16369 - DNA, 201 bp, Homo sapiens; identical to SEQ ID NO: 16258

SEQ ID NO: 16370 - DNA, 201 bp, Homo sapiens; identical to SEQ ID NO: 1367

SEQ ID NO: 16371 - DNA, 201 bp, Homo sapiens; identical to SEQ ID NO: 16260

SEQ ID NO: 16372 - DNA, 201 bp, Homo sapiens
cctgcctgcgggcctttggtctgtaagggagcaactgtggcctcctctgtgcatagatctcgggcacggcccttcaacgggcggcgaaagctgcgactcgrtgattcctcattgtagagttgggtggtccaggaggcttaactggagcccttgacctgagcggtaagggcagtcacgcgtcccgactcgggattggatcct

SEQ ID NO: 16373 - DNA, 201 bp, Homo sapiens
aatcccaactactcggcaggctgaggcaggagaaccggtttaacctgggaggcagaggttgcagtgagccgagatcactccatcactccactgcactccakcctgggcaacagagaatgtctcaaaaaaaaaaaaaaaaaagcattggtatctgtgaaatcacatttaaattccctgttgggggcagccttgaaggacaac

SEQ ID NO: 16374 - DNA, 201 bp, Homo sapiens
atcattagccgggcactgtggctcatgcctgtaatcccagcactttgggatgccaaggtaggcgtatcacgaagtcaggagttcgagaccatcctggccartatggtgaaaccccgtctctattaaaaatacaaaaattagccaggcgtggtggcacacacctgtaatcccaactactcggcaggctgaggcaggagaacc

SEQ ID NO: 16375 - DNA, 201 bp, Homo sapiens
agattgcagtgagccgagattgcgccactgcactccagcctgggcgacagagcgagactccatctaaaaaaataataataataaaaataaaaaaataatargggctgggtgcggtggctcacacctgtaatcccaacgttttggaaggccgaggtgggtgaatcacgaggtcagcagttcgacaccagcctggccaacata

SEQ ID NO: 16376 - DNA, 201 bp, Homo sapiens
ttggaactgtgacctgaaaccaaagggataggcataggaacctgggccagtggactgtgagggatagagggaaaggtgggcaggtgggcaggtgggcctastgaccccacaggtgtgagaaggctgggtcattgatgggccacaggagcacccagaaggctcaggcccaggctcggaagcagcttgtcctgtccttggcac

SEQ ID NO: 16377 - DNA, 201 bp, Homo sapiens
gatggaggttgcagtaagttgagattgcaccactgcactccagcccgggcgacacagcgagattccgtctcaaaaaaaaaaaaaaaaaaaaaaataaatawatatatatatatatatatatatatatatgtgtgtgtgcataaataaattagctaagagaaggaaattctttctgtaaatgccttctttttggccctagtc

SEQ ID NO: 16378 - DNA, 201 bp, Homo sapiens
ctcctgcctcagcctcccgagtagctgggaatacaggtgcccgccaccacgcccggctagttttttatatttttagtagagacggggtttcaccgtgttarccaggatggtcttgatctcctgacctcataatccacacgccttggcctcccaaagtgctgggattacaggcgtgagccaccgcatccggccaatgcaatt

SEQ ID NO: 16379 - DNA, 201 bp, Homo sapiens
atcactgcaagctccgcctcccgggttcacgccattctcctgcctcagcctcccgagtagctgggaatacaggtgcccgccaccacgcccggctagttttytatatttttagtagagacggggtttcaccgtgttaaccaggatggtcttgatctcctgacctcataatccacacgccttggcctcccaaagtgctgggat

SEQ ID NO: 16380 - DNA, 201 bp, Homo sapiens
tgtctgacaggttctcctgtcatcccattatctccttcctgtttctgtggaacccagcctgcttctgccaggccatgcagctcccactttcctccagacaygccctggacctgtgcccttcagcctcacttttatcctcttcctcacttctctctgccacgtccccttctcctgtactaggtagttccctgcttttctgtc

SEQ ID NO: 16381 - DNA, 201 bp, Homo sapiens
gcatctgtagtcctagctttttgggagactgaggtgggaggacggcttaagcccaggaggtagaggttgcagtgagccaagatcacgctactgcactccakcctgggtgacagagccagactctgtcacaataaattaataaagtttacaattcatggcttttagtatattcacaaggttgaacattttcattactccaaa

SEQ ID NO: 16382 - DNA, 201 bp, Homo sapiens; identical to SEQ ID NO: 16262

SEQ ID NO: 16383 - DNA, 201 bp, Homo sapiens
gtgaaaccccatttctactaaaaatacaaaacttagctgggcgtggttgcgggtgcctgtagtcccagctactcaggaggctgaggcaggagaatcgcttsaacccgggaagcggaggctacagtgagccgagatcgcgccactgcaccccagcccagtgacagagcaagaccctgtctcaaaaaagaaaaaaggaaaggg

SEQ ID NO: 16384 - DNA, 201 bp, Homo sapiens; identical to SEQ ID NO: 16263

SEQ ID NO: 16385 - DNA, 201 bp, Homo sapiens
tctcctgtcatcccattatctccttcctgtttctgtggaacccagcctgcttctgccaggccatgcagctcccactttcctccagacatgccctggacctstgcccttcagcctcacttttatcctcttcctcacttctctctgccacgtccccttctcctgtactaggtagttccctgcttttctgtctgcaggcagcgc

SEQ ID NO: 16386 - DNA, 201 bp, Homo sapiens
gcctgtgggattcccttaggtatgtactgtgtttggtagctgggggaagcaggggaggaggcaatttctttccttgtgggattcctgggtccagctcccakgtccatcccagggtgcaggccctcggcccgagggaaacccgagtccctagcaggcagcagtggggtgggctctgaggagtgtgagcagcactgacctcca

SEQ ID NO: 16387 - DNA, 201 bp, Homo sapiens
gccttcctgtagcctgtgtgctccctctttatgccccctacacatcggggccttctctcccttcagaaggctcagcctgcagaagcctccaaatgtgctcytttgggctgttgggatggtggcattggcctgggtacacagggtctaggagaatgaatggctgggccatcagctcagtgaattccttggtccaccagccaa

SEQ ID NO: 16388 - DNA, 201 bp, Homo sapiens; identical to SEQ ID NO: 1318

SEQ ID NO: 16389 - DNA, 201 bp, Homo sapiens
aatggccgggcgcagtggctcacgcctgtaatcccagcactttgggaggccgaggcgggtggatcacgaggtcaggagattgagaccatctggctaacacrgtgaaaccccgtctctactaaaaatacaaaaaaattagctggacatggtggcgggcgcctgtagtcccagctactcggaggctgaggcaggagaatggcg

SEQ ID NO: 16390 - DNA, 201 bp, Homo sapiens
tgtggcagctgctgggtgatggtggggacccctgtggatagtgagctgagccgtttgggtaatactatcatgctttgtctccccagctctggcattgcccrtgacccctcagaaagaatggctgcacatggacactgtcgagctggagaagctccactggacccaggacttgccccctgtccggcggcagcagacacagga

SEQ ID NO: 16391 - DNA, 201 bp, Homo sapiens
tgaggaaaaccttttcatataagtactagggaagcagtgagtggagaagccacctggagtccctgtgccagacccagtggggtctccactctgaggaaagyttgggtctatacctgtctccagggctaatagccttatagaagaaggccaaaaagcccagttagagccctggaggacagagcaatgaatgtgatcatacct

SEQ ID NO: 16392 - DNA, 201 bp, Homo sapiens; identical to SEQ ID NO: 16268

SEQ ID NO: 16393 - DNA, 201 bp, Homo sapiens
gttcctctggcaggagctcctcgacagcaccttctcttggtaccatggagctttgacgttccctctgatgcccagccaggaggacaaggaggatgaggacraggatgaagaatgcccagcaggaaaagcaaaaaggaaaagccctgaagaagaaagccggcctccacctgacctggcccgacatgatgtcatcaaggtaaa

SEQ ID NO: 16394 - DNA, 201 bp, Homo sapiens
tgggcatggccccattgctaaggctttgcgggcaagatgtagaatgggatggcaggcgtctccctcatctcctaaagtccctaaagcccaggaggcttgcmtttatggtttttattggggagcatcctctctactcctggatccatttcctggccccttcagcattgccccccaactcccgttcctctggcaggagctcct

SEQ ID NO: 16395 - DNA, 201 bp, Homo sapiens
ggtgcctggctttcctgctgagaccaggctaggagaggaataccacttattgagctaggcttactgtgagttccgggcactgtgctgagtactttaatgcyttttttttttttttttttttttttgagatggtcttgctctgtcacccaggctggaatgcagtggcacgatctcggctcactgcaacctccaccttcacgg

SEQ ID NO: 16396 - DNA, 201 bp, Homo sapiens
gttagaatcactgccctgaagggaggagggtccgtaaccccccagagtgaggttctcatcgttcagaactgggctaataggatcgggtccagcctggggaagtttctccattgtgcttcacaactttgtgctttgttgctacaggaacgagatacaagttcagtggccgtgaatctgcctgtgcccagtggtgttgctttc

SEQ ID NO: 16397 - DNA, 201 bp, Homo sapiens
cgagctggagaagctccactggacccaggacttgccccctgtccggcggcagcagacacaggaggtgaggagggccacctggcctacaaggggtgggtgakatagggcaggagaggagctgctgctcttgccctcagaactcaggcctttctattgcccagagcctgagaagcatctctcctttgctctcacccaccttta

SEQ ID NO: 16398 - DNA, 201 bp, Homo sapiens
tggtctcgaactcttggcctcccaaaaggctgtgattacattcatgaaccatggctcctggcctccccagaacgctatactagacatgtgttcaggcttayatgtggtttgtggaatggaatcttaggagcatctgcagcctatccagcctattgggctggtgacaggatgatggactcccagacaagatggtgccaattt

SEQ ID NO: 16399 - DNA, 201 bp, Homo sapiens; identical to SEQ ID NO: 13910

SEQ ID NO: 16400 - DNA, 201 bp, Homo sapiens
ttcactgggattgtgacctggacaccggggactctggctgctggcctcactactccttccagctgcaggagaagagctacaacttcaggtgaggccccacwgctcccagtgcccagctgctgggcccatcgccctctcactgtggcggccaggacagaccacacccaggcccaggcctctagatattccactacgtgtgca

SEQ ID NO: 16401 - DNA, 201 bp, Homo sapiens
gtcgatcaaaaatacagtatttggctaggcccagtggctcacaccggtaatcccatcactttgggaggctgaggtgagaggatcacttgaacccaggagtytgaggctgcagtgagctatgatcctgtcactgcacttcagcctaggtggcaaagcaagaccctgtctccaaaactactaaataaataaattaaaataagt

SEQ ID NO: 16402 - DNA, 201 bp, Homo sapiens
aacttccttgtgacgccagcccaagttcagggcagatgcccagaggtgagtttacccaggatcctcccagcgggtcccttgttcctccatcagccccaggkggccacccgtgtttccctttccccttcccaggtggctgaaggctcagcctgtgctcggtgtcccccaggcactgggctacatcttttcctgaatcattat

SEQ ID NO: 16403 - DNA, 201 bp, Homo sapiens
aggttcagctcagatctctctcaggcagggaagttcgggctcatccccacggccgtcacactgggcaccggggcagcttggctgggcgtggtgagtgcgarcactgtgggcacctgcaggctgcagtgagtgctgctgaccagggtgtgtccaatgcatgctggagcctccggtgcctgcacattgagtctcggggtgcag

SEQ ID NO: 16404 - DNA, 201 bp, Homo sapiens
gctgcagtgagtgctgctgaccagggtgtgtccaatgcatgctggagcctccggtgcctgcacattgagtctcggggtgcaggctggggaggtggcaggaragcaggctcgggggctggaacatgggttggccctgcctctcccaggtcacctttttctgtgacctgctactgctgtatgtggatagagaagcccatttct

SEQ ID NO: 16405 - DNA, 201 bp, Homo sapiens; identical to SEQ ID NO: 1450

SEQ ID NO: 16406 - DNA, 201 bp, Homo sapiens; identical to SEQ ID NO: 933

SEQ ID NO: 16407 - DNA, 201 bp, Homo sapiens
cacgtcctgcaaggaagcaagcagcttctgggaccagcctgcagccctcctgtgggggagtagagctcctcagaccccagtggcagcccttcctagcctargcacctctggcaggccgggagggccctatgggaccccaatagcagatccccacttgtgtttatcagcgacagccactgtgtcctgagtactgcattccag

SEQ ID NO: 16408 - DNA, 201 bp, Homo sapiens
agccctcctgtgggggagtagagctcctcagaccccagtggcagcccttcctagcctaggcacctctggcaggccgggagggccctatgggaccccaatascagatccccacttgtgtttatcagcgacagccactgtgtcctgagtactgcattccagtgccccacgccccaggcaggcagctatgcaacaatacacctg

SEQ ID NO: 16409 - DNA, 201 bp, Homo sapiens
cctcctgtgggggagtagagctcctcagaccccagtggcagcccttcctagcctaggcacctctggcaggccgggagggccctatgggaccccaatagcaratccccacttgtgtttatcagcgacagccactgtgtcctgagtactgcattccagtgccccacgccccaggcaggcagctatgcaacaatacacctggct

SEQ ID NO: 16410 - DNA, 201 bp, Homo sapiens; identical to SEQ ID NO: 13918

SEQ ID NO: 16411 - DNA, 201 bp, Homo sapiens
ccacagcggccacaccgaaggacaagagcacagcagggccagccacctccttggccacggcacctgtgagcacgtagagacccgagcccaccatgccaccyacgcccagaagagtcaggtccagtgtggacaggcagcgccgcagtgacgtctccatggtggagtcctccagcggcttcaggcggttcagcttctggcata

SEQ ID NO: 16412 - DNA, 201 bp, Homo sapiens; identical to SEQ ID NO: 1440

SEQ ID NO: 16413 - DNA, 201 bp, Homo sapiens
tcctccaccccacctcgcttctagtatctcccctccacagcaatggggtgtttcatttttactttccccttctccccttcagctttgttttttttttttttaagacagaatctcattctgtcacccaggctggagtgcagtggcccgacctcggctcactgtaacctctgcttcctgggttcaaccgattctccttcctca

SEQ ID NO: 16414 - DNA, 201 bp, Homo sapiens; identical to SEQ ID NO: 1441

SEQ ID NO: 16415 - DNA, 201 bp, Homo sapiens
ctttctgccaacaaccccctggctgaaggcctccccaggcctgcagagatttgaaggtctggagttcatcttttgttttctaggtgtaaaaacaggccagwgtgtggtgttcaatgggacccacaggacctgtgagatctggagttggtgccccgtggagagtggcgttgtgccctcgtaagtgtccccacaatcccctac

SEQ ID NO: 16416 - DNA, 201 bp, Homo sapiens; identical to SEQ ID NO: 13922

SEQ ID NO: 16417 - DNA, 201 bp, Homo sapiens; identical to SEQ ID NO: 1444

SEQ ID NO: 16418 - DNA, 201 bp, Homo sapiens
acctggaagaatcacttccgcatccaccagggacagaactgtcaggagggaaggggcagggtgcgttgtctcacgcctgtaatcccagcactctgggaggstgagacagaaggattgcttgaggccaggagttaaaaaccagcctggtcaacatagcaagactccatctctacaaaaaaaaaatattaaaaaatcagccag

SEQ ID NO: 16419 - DNA, 201 bp, Homo sapiens
ctcccaagtaggtgggactacaggcacacaccaccacactcggctaatttttgtatttttaatagagacagggttttgctgtgtcggccaggctggtctcraactcctgacctcaggtaatccgcccaccttggcttctcaaagtgttgggattacaggtgtgccaggccaagcagaatcttaaaaaaaggtggggagaag

SEQ ID NO: 16420 - DNA, 201 bp, Homo sapiens; identical to SEQ ID NO: 1452

SEQ ID NO: 16421 - DNA, 201 bp, Homo sapiens
ctcactcaccatgcagaaaggggtgcgggatgggtgtgtggtcctccccagccccgtgagacttgttcattctgggatggtagtgggggaaggggaggcasctgcctgggccgagtgtgagtgggtgttggctaggggaggtacctgaaataagtcttcccgatactgttgctggtgagcccccaggacaaggaggctgag

SEQ ID NO: 16422 - DNA, 201 bp, Homo sapiens; identical to SEQ ID NO: 945

SEQ ID NO: 16423 - DNA, 201 bp, Homo sapiens; identical to SEQ ID NO: 13928

SEQ ID NO: 16424 - DNA, 201 bp, Homo sapiens; identical to SEQ ID NO: 13931

SEQ ID NO: 16425 - DNA, 201 bp, Homo sapiens
ctggctgctggcctcactactccttccagctgcaggagaagagctacaacttcaggtgaggccccactgctcccagtgcccagctgctgggcccatcgccytctcactgtggcggccaggacagaccacacccaggcccaggcctctagatattccactacgtgtgcaagggggtcccaggagcaggagagagctgttctc

SEQ ID NO: 16426 - DNA, 201 bp, Homo sapiens
ggtgacaggatgatggactcccagacaagatggtgccaatttggaacattctgcctcggccagaatgccaataccttctaatatttggctggtattgtctkgaggaacttctcagatggctcccacttccggtgggatggtagcttccttaccccatccctgtgttgcctgagcagacgtcccttgtcctgaaatgtcacc

SEQ ID NO: 16427 - DNA, 201 bp, Homo sapiens
acgtcccttgtcctgaaatgtcaccacaaaagtctaggcacttcaggccagagggttaggcagatttgtaatgggagctccccaaaggccttaccaatgastgccttattgctggtgtccagtgttttggagtgttgactttttatctacctggagaaggtgtgacaccacaccctctgccacaggcaccaacatacaacg

SEQ ID NO: 16428 - DNA, 201 bp, Homo sapiens; identical to SEQ ID NO: 13935

SEQ ID NO: 16429 - DNA, 201 bp, Homo sapiens
gtcctgaggactccccagcctgtgcaggcctgcaaacccaggctgcccacaacagaaggggctctcggcttgtctggcctctctggcctcccaagcaggtrtgggagggcggggcaagtgtgggctgatcagctactccatatggccagggtcctgtgctggtgcctggctggggggctgcatagcctgcactgtctcctc

SEQ ID NO: 16430 - DNA, 201 bp, Homo sapiens; identical to SEQ ID NO: 13936

SEQ ID NO: 16431 - DNA, 201 bp, Homo sapiens
aggagaacattccagccgatgaggaaggcccacagctcgcccatggatacgtaggtgaacaggtaggcagagcccgtgcgtggcacacgtgccccaaattytgcatagcatagggctgccagcagggaggccacagcggccacaccgaaggacaagagcacagcagggccagccacctccttggccacggcacctgtgagc

SEQ ID NO: 16432 - DNA, 201 bp, Homo sapiens; identical to SEQ ID NO: 1434

SEQ ID NO: 16433 - DNA, 201 bp, Homo sapiens; identical to SEQ ID NO: 13939

SEQ ID NO: 16434 - DNA, 201 bp, Homo sapiens
cctctgcttcctgggttcaaccgattctccttcctcagcctcctgagtagctggaattacaggtgctcgccactactcccagctaatttttatattttggtagatagagatgggttttcacaatgttggccaggctggtctcaaacccctgacctcaggtgatccacccacctcagcctcccgaagggctaggattacaga

SEQ ID NO: 16435 - DNA, 201 bp, Homo sapiens; identical to SEQ ID NO: 13942

SEQ ID NO: 16436 - DNA, 201 bp, Homo sapiens; identical to SEQ ID NO: 13944

SEQ ID NO: 16437 - DNA, 201 bp, Homo sapiens; identical to SEQ ID NO: 13947

SEQ ID NO: 16438 - DNA, 201 bp, Homo sapiens; identical to SEQ ID NO: 13948

SEQ ID NO: 16439 - DNA, 201 bp, Homo sapiens; identical to SEQ ID NO: 13950

SEQ ID NO: 16440 - DNA, 201 bp, Homo sapiens
catggacagcccagcccaggtggcaggtcctatgatgggacagaggctgtaggtgggggacctagggctgcacttgagcagaatcttttttttttttttcytttttttttttttgagacagagtctcgctctgtcacccaggctggagtgcagtggcgtgatctcggctcactgcacacctccacctccttggttcaagcg

SEQ ID NO: 16441 - DNA, 201 bp, Homo sapiens; identical to SEQ ID NO: 13951

SEQ ID NO: 16442 - DNA, 201 bp, Homo sapiens; identical to SEQ ID NO: 13952

SEQ ID NO: 16443 - DNA, 201 bp, Homo sapiens
cttgttcctccatcagccccaggtggccacccgtgtttccctttccccttcccaggtggctgaaggctcagcctgtgctcggtgtcccccaggcactgggstacatcttttcctgaatcattatgttcagtcttcacatatcccctgcctggtaggaagtcctgtgatccccatttcagaggagaagactgaggctcagtg

SEQ ID NO: 16444 - DNA, 201 bp, Homo sapiens; identical to SEQ ID NO: 13954

SEQ ID NO: 16445 - DNA, 201 bp, Homo sapiens
cccaggatcctcccagcgggtcccttgttcctccatcagccccaggtggccacccgtgtttccctttccccttcccaggtggctgaaggctcagcctgtgytcggtgtcccccaggcactgggctacatcttttcctgaatcattatgttcagtcttcacatatcccctgcctggtaggaagtcctgtgatccccatttca

SEQ ID NO: 16446 - DNA, 201 bp, Homo sapiens; identical to SEQ ID NO: 13955

SEQ ID NO: 16447 - DNA, 201 bp, Homo sapiens
tgcccagaggtgagtttacccaggatcctcccagcgggtcccttgttcctccatcagccccaggtggccacccgtgtttccctttccccttcccaggtggstgaaggctcagcctgtgctcggtgtcccccaggcactgggctacatcttttcctgaatcattatgttcagtcttcacatatcccctgcctggtaggaagt

SEQ ID NO: 16448 - DNA, 201 bp, Homo sapiens; identical to SEQ ID NO: 13956

SEQ ID NO: 16449 - DNA, 201 bp, Homo sapiens; identical to SEQ ID NO: 13957

SEQ ID NO: 16450 - DNA, 201 bp, Homo sapiens
catgaacccgggaggtggagcttgcagtgagccgagattgcaccactgcactccagcctgggtggcaaagcgagactctgtctcaaaaaaaaaaaaaaaaagccaggccagagaaactgcatttccaaagactgccaacagaaaagaagggagtgtccaggactaatggcttgagcttgagagtggtgtgaggtgctgggg

SEQ ID NO: 16451 - DNA, 201 bp, Homo sapiens
gacggtagcccagctggggtgaagaggagaggcagacacaggacataggtagggacaaagaagcagagcatgtggctctgctccgacctccacccaatcabgacggccctgtctttcagaaagtcccaccgcctcattctggcttctcagaggccctcagccttccttgcgcccctggtgctggtgttcttcctgctgccc

SEQ ID NO: 16452 - DNA, 201 bp, Homo sapiens
gcatgaacccgggaggtggagcttgcagtgagccgagattgcaccactgcactccagcctgggtggcaaagcgagactctgtctcaaaaaaaaaaaaaaaaagccaggccagagaaactgcatttccaaagactgccaacagaaaagaagggagtgtccaggactaatggcttgagcttgagagtggtgtgaggtgctggg

SEQ ID NO: 16453 - DNA, 201 bp, Homo sapiens; identical to SEQ ID NO: 13958

SEQ ID NO: 16454 - DNA, 201 bp, Homo sapiens
ggtcctgcttcaatacccaagcccctgactctagggccctgatctttgtcagctatgtccccatgccgggcatcaaaaactcaccctcccaaggtatcttmaccttccctgatctgtcatccaaattggaccagaggagctagacctggaagaatcacttccgcatccaccagggacagaactgtcaggagggaaggggca

SEQ ID NO: 16455 - DNA, 201 bp, Homo sapiens
tccgtcccactggctaactgctgggtcgacgaggactgccccgaaggggagggaggcacacacagccacggtaactgtgggctctgtcttccagtgccccyagcagggtgggggccgggctgggatcctgggtggctcctgagtgcaggccctgctcgcctctgtccctgcatctctctttctgccaacaaccccctggct

SEQ ID NO: 16456 - DNA, 201 bp, Homo sapiens; identical to SEQ ID NO: 1427

SEQ ID NO: 16457 - DNA, 201 bp, Homo sapiens
cctggacaccggggactctggctgctggcctcactactccttccagctgcaggagaagagctacaacttcaggtgaggccccactgctcccagtgcccagmtgctgggcccatcgccctctcactgtggcggccaggacagaccacacccaggcccaggcctctagatattccactacgtgtgcaagggggtcccaggagc

SEQ ID NO: 16458 - DNA, 201 bp, Homo sapiens
gatggtgccaatttggaacattctgcctcggccagaatgccaataccttctaatatttggctggtattgtcttgaggaacttctcagatggctcccacttycggtgggatggtagcttccttaccccatccctgtgttgcctgagcagacgtcccttgtcctgaaatgtcaccacaaaagtctaggcacttcaggccagag

SEQ ID NO: 16459 - DNA, 201 bp, Homo sapiens; identical to SEQ ID NO: 1437

SEQ ID NO: 16460 - DNA, 201 bp, Homo sapiens
acagacagtggcggctacatacacccccgcccctgcacccgtggccaggctggggtatccgcgcgccaggcggaatgcaggggcgccctgggcccgcacayctccccatgtccgacacgccgctgctgctagagcctgctccgccgcgcccccgtccccggacacctgcgccttcgcctgttcttgggcctgagcccgtcc

SEQ ID NO: 16461 - DNA, 201 bp, Homo sapiens
ggcacctgtgagcacgtagagacccgagcccaccatgccacccacgcccagaagagtcaggtccagtgtggacaggcagcgccgcagtgacgtctccatgrtggagtcctccagcggcttcaggcggttcagcttctggcataagcgtgccaggctagcaatggtgggcagcccccgggccatggcaggtggccgagaaga

SEQ ID NO: 16462 - DNA, 201 bp, Homo sapiens
agtagctgggatgacaggtgtgcaccaccacacccaactaatttttgtatttttagtagagatggtgttttgccatgttggccaggctggtctcgaacttytgacctcaggtgatctgcccacttcagcctcccaaagtgctgggattacaggcatgagccaccaagcctgttttttttgtgttttttttttttttttttt

SEQ ID NO: 16463 - DNA, 201 bp, Homo sapiens
agagcacagcagggccagccacctccttggccacggcacctgtgagcacgtagagacccgagcccaccatgccacccacgcccagaagagtcaggtccagygtggacaggcagcgccgcagtgacgtctccatggtggagtcctccagcggcttcaggcggttcagcttctggcataagcgtgccaggctagcaatggtgg

SEQ ID NO: 16464 - DNA, 201 bp, Homo sapiens
aacggagttttcactttcttgtagtccaggctggaatgcaatggcgtggtcttggctcactgcaacctctgcctcctgggttcaggtgattttccagcctytgcctccagagtagctgggatgacaggtgtgcaccaccacacccaactaatttttgtatttttagtagagatggtgttttgccatgttggccaggctggt

SEQ ID NO: 16465 - DNA, 201 bp, Homo sapiens; identical to SEQ ID NO: 13961

SEQ ID NO: 16466 - DNA, 201 bp, Homo sapiens
aatacatagatatttttcaaccaaatgtcgatcaaaaatacagtatttggctaggcccagtggctcacaccggtaatcccatcactttgggaggctgaggygagaggatcacttgaacccaggagtctgaggctgcagtgagctatgatcctgtcactgcacttcagcctaggtggcaaagcaagaccctgtctccaaaac

SEQ ID NO: 16467 - DNA, 201 bp, Homo sapiens
gccaggaaggccgtgaggagcccgaacgccagggtgcccgccacaggcacctgtgtccgggggtgcacatgggcaaacacctggaagaagagcccatcggyggccatggcatagacaatgcgtggcagggagaagaggaggctgagcaggacggtgttcatggctgtagcagagagagtggggagggtcagcatggcggag

SEQ ID NO: 16468 - DNA, 201 bp, Homo sapiens; identical to SEQ ID NO: 1443

SEQ ID NO: 16469 - DNA, 201 bp, Homo sapiens
cgtgagccaccacgcccgacctttttttttgaaacggagttttcactttcttgtagtccaggctggaatgcaatggcgtggtcttggctcactgcaacctytgcctcctgggttcaggtgattttccagcctctgcctccagagtagctgggatgacaggtgtgcaccaccacacccaactaatttttgtatttttagtag

SEQ ID NO: 16470 - DNA, 201 bp, Homo sapiens; identical to SEQ ID NO: 1445

SEQ ID NO: 16471 - DNA, 201 bp, Homo sapiens
aaacttgattagaggaacagaagagagccacacgtgggctcagaggcagggtgctcagtttcctgcacattgggatgcaccacttgggctgctgggcatasgtggatgagggtatgggaagacgtgggggccccactggtggtcactgtggggtctagttggaggagacggtagcccagctggggtgaagaggagaggcag

SEQ ID NO: 16472 - DNA, 201 bp, Homo sapiens; identical to SEQ ID NO: 1447

SEQ ID NO: 16473 - DNA, 201 bp, Homo sapiens
aaggtctggagttcatcttttgttttctaggtgtaaaaacaggccagtgtgtggtgttcaatgggacccacaggacctgtgagatctggagttggtgcccmgtggagagtggcgttgtgccctcgtaagtgtccccacaatcccctaccccaactggcgcagggccccaggcctggcagaggctgtcacctcccttccacc

SEQ ID NO: 16474 - DNA, 201 bp, Homo sapiens
tttattgacagcaagccagtgataagcattgtttctatagattatagattaactaaaagtattccttatgggaaacaaagggatgggctctggttggttakctgcagcaggagcatgtccttaaatcacagatcgctcatgctattgtttgtggtttaagaacgcctttaagcggttttccgccctgggtgggccaggttt

SEQ ID NO: 16475 - DNA, 201 bp, Homo sapiens
tcggggagacctgaacccagcggtgctaaaggaattaaagacaaacacacataaatatagaggtgtggagtgggaaatcaggggtatcacagccttcagarctgacagcctcgaacagatttacccacatatttattgacagcaagccagtgataagcattgtttctatagattatagattaactaaaagtattccttatg

SEQ ID NO: 16476 - DNA, 201 bp, Homo sapiens
gacagaggtctggcagggccagccccacctgggggtgggcaaagcaggtcaccagagccttctttcctgcccacaggacagccactcactggtgggagcarccgggtgtggaggcccgcaccctgctcaagctctatggaatccgcttcgacatcctcgtcaccgggcaggtaggcacaggtaggggtcaggccggggatg

SEQ ID NO: 16477 - DNA, 201 bp, Homo sapiens
taaaaacaggccagtgtgtggtgttcaatgggacccacaggacctgtgagatctggagttggtgccccgtggagagtggcgttgtgccctcgtaagtgtcyccacaatcccctaccccaactggcgcagggccccaggcctggcagaggctgtcacctcccttccacctgcaggaggcccctgctggcccaggcccagaac

SEQ ID NO: 16478 - DNA, 201 bp, Homo sapiens
gcaggagaagagctacaacttcaggtgaggccccactgctcccagtgcccagctgctgggcccatcgccctctcactgtggcggccaggacagaccacacmcaggcccaggcctctagatattccactacgtgtgcaagggggtcccaggagcaggagagagctgttctcaaccccacatcctccagcacaggctccgtcc

SEQ ID NO: 16479 - DNA, 201 bp, Homo sapiens; identical to SEQ ID NO: 13964

SEQ ID NO: 16480 - DNA, 201 bp, Homo sapiens; identical to SEQ ID NO: 13965

SEQ ID NO: 16481 - DNA, 201 bp, Homo sapiens; identical to SEQ ID NO: 13966

SEQ ID NO: 16482 - DNA, 201 bp, Homo sapiens; identical to SEQ ID NO: 13967

SEQ ID NO: 16483 - DNA, 201 bp, Homo sapiens; identical to SEQ ID NO: 13968

SEQ ID NO: 16484 - DNA, 201 bp, Homo sapiens; identical to SEQ ID NO: 13969

SEQ ID NO: 16485 - DNA, 201 bp, Homo sapiens; identical to SEQ ID NO: 13970

SEQ ID NO: 16486 - DNA, 201 bp, Homo sapiens; identical to SEQ ID NO: 13971

SEQ ID NO: 16487 - DNA, 201 bp, Homo sapiens; identical to SEQ ID NO: 13972

SEQ ID NO: 16488 - DNA, 201 bp, Homo sapiens; identical to SEQ ID NO: 13973

SEQ ID NO: 16489 - DNA, 201 bp, Homo sapiens; identical to SEQ ID NO: 13974

SEQ ID NO: 16490 - DNA, 201 bp, Homo sapiens
gtttgtagaccgttctgaaatttggctggatctgtgggtctgtgtttttcagaatctgtgcaattcctctttgtctgcaaccacacttctggctcttcccrtgaaacgtcagggctgggtcgtaattatcagatctgacaacctggctttcccggaagaccagagttctgccagctcctctagggatcctggtgcctgatc

SEQ ID NO: 16491 - DNA, 201 bp, Homo sapiens; identical to SEQ ID NO: 946

SEQ ID NO: 16492 - DNA, 201 bp, Homo sapiens
gaagcccagcccctggatgaaggtcctaaggtcctgaggactccccagcctgtgcaggcctgcaaacccaggctgcccacaacagaaggggctctcggctygtctggcctctctggcctcccaagcaggtgtgggagggcggggcaagtgtgggctgatcagctactccatatggccagggtcctgtgctggtgcctggct

SEQ ID NO: 16493 - DNA, 201 bp, Homo sapiens; identical to SEQ ID NO: 1451

SEQ ID NO: 16494 - DNA, 201 bp, Homo sapiens
cagccgatgaggaaggcccacagctcgcccatggatacgtaggtgaacaggtaggcagagcccgtgcgtggcacacgtgccccaaattctgcatagcatarggctgccagcagggaggccacagcggccacaccgaaggacaagagcacagcagggccagccacctccttggccacggcacctgtgagcacgtagagaccc

SEQ ID NO: 16495 - DNA, 201 bp, Homo sapiens; identical to SEQ ID NO: 927

SEQ ID NO: 16496 - DNA, 201 bp, Homo sapiens
ctcactgcaccccgtctgatctggcttccccaacctccccagcccttcgaaaccacgtggggctggctcccacccacatcctgttcccctgacctctgtgytggcaaaccacctgtgtgcatgttccttcaggcccagcctcatgtcccctccaggaagtctaccccagttcccagggaagagtgagttcccatctctgga

SEQ ID NO: 16497 - DNA, 201 bp, Homo sapiens
acgccagcaggccacatggctggccaagcaattattattatggatcccttgggctgtgggccttcccatccaccccaccacaactgcccaggtagctggarctgatcataaacaagaaggctctgggcagagtccatggcaccagcaccagccaaggcccactcctgaagacccgaagcccagcccctggatgaaggtcct

SEQ ID NO: 16498 - DNA, 201 bp, Homo sapiens
gaacccacgtgggtctcagtgaagttgcggatgctgtggctgaacatagagtccaggtagccactccaggcacgggccacggcggcgccaccgatgatgtwttcgaggagaacattccagccgatgaggaaggcccacagctcgcccatggatacgtaggtgaacaggtaggcagagcccgtgcgtggcacacgtgcccca

SEQ ID NO: 16499 - DNA, 201 bp, Homo sapiens; identical to SEQ ID NO: 1435

SEQ ID NO: 16500 - DNA, 201 bp, Homo sapiens
aatttttttagagactgggtctcactatgctgcccgggctggtctcgaactcttggcctcccaaaaggctgtgattacattcatgaaccatggctcctggyctccccagaacgctatactagacatgtgttcaggcttacatgtggtttgtggaatggaatcttaggagcatctgcagcctatccagcctattgggctggt

SEQ ID NO: 16501 - DNA, 201 bp, Homo sapiens
gcctcctcactggaggcggcaatgacgtcgaagcccacgaaagcatagaagcaggaggcagtgccggccatgacgccggagaagccgaagggtgcaaagcygccttcgtcagcgctccagttgtgaggctgggccaggatgaagcccaggatgacaatgaagagaatgacaagcaggctgatggccgagaaggtgtgattg

SEQ ID NO: 16502 - DNA, 201 bp, Homo sapiens
agcagaatcttaaaaaaaggtggggagaagctggtgagcaggtggatttggttgaagcaggatgtcgacacagagggggcttggtgggtaaaggccctgarctgtgtgaggtgaggtgcctttagggctacctgccactgggtggagctgaagtgaagatttggactggggtgggaagaaggtagttcaggatttcagggg

SEQ ID NO: 16503 - DNA, 201 bp, Homo sapiens; identical to SEQ ID NO: 1438

SEQ ID NO: 16504 - DNA, 201 bp, Homo sapiens; identical to SEQ ID NO: 13980

SEQ ID NO: 16505 - DNA, 201 bp, Homo sapiens
  misc_feature (1)...(201): n = A,T,C or G, or insertion/deletion polymorphism (see Tables 1-2)
gagacccaggactcaggcttgggctgggggtttatagagtcaattgacaagttggacagaggtctggcagggccagccccacctgggggtgggcaaagcangtcaccagagccttctttcctgcccacaggacagccactcactggtgggagcaaccgggtgtggaggcccgcaccctgctcaagctctatggaatccgct

SEQ ID NO: 16506 - DNA, 201 bp, Homo sapiens; identical to SEQ ID NO: 13981

SEQ ID NO: 16507 - DNA, 201 bp, Homo sapiens
tgcaccaccacacccaactaatttttgtatttttagtagagatggtgttttgccatgttggccaggctggtctcgaacttctgacctcaggtgatctgccsacttcagcctcccaaagtgctgggattacaggcatgagccaccaagcctgttttttttgtgttttttttttttttttttttagatgaagttttgctcttg

SEQ ID NO: 16508 - DNA, 201 bp, Homo sapiens
tattccactacgtgtgcaagggggtcccaggagcaggagagagctgttctcaaccccacatcctccagcacaggctccgtcctgctgccccaagtcctgarccctccaccccatctgtcccaggcccctgcccagctcaggctcctcactgccagcccttcctccaccccacctcgcttctagtatctcccctccacagca

SEQ ID NO: 16509 - DNA, 201 bp, Homo sapiens
ctcgtgatccacctgcctcagcctcccatagtgctgggattacaggcgtgagccaccacgcccgacctttttttttgaaacggagttttcactttcttgtrgtccaggctggaatgcaatggcgtggtcttggctcactgcaacctctgcctcctgggttcaggtgattttccagcctctgcctccagagtagctgggatg

SEQ ID NO: 16510 - DNA, 201 bp, Homo sapiens
tacctaaactttttttttttttttgagatggagtctcactctgtcgcccaggctggagtacagtggcgggatctcagctcactgcaagttccgcttcccgkgttcacgccattctcctgcctcagcctcccaagtagctgggactacgggtgcacgcctccacgcccggctaatttttgcatttttagtagagacagggtt

SEQ ID NO: 16511 - DNA, 201 bp, Homo sapiens
ggcagctgcctgggccgagtgtgagtgggtgttggctaggggaggtacctgaaataagtcttcccgatactgttgctggtgagcccccaggacaaggaggstgagcagaaacatgacactggtgagcaggagcagcaggatgtaaccccagtgtgggaggtgcagggtcgagttcccaaagacaagcacgcagcctatggt

SEQ ID NO: 16512 - DNA, 201 bp, Homo sapiens
tgctggcctcactactccttccagctgcaggagaagagctacaacttcaggtgaggccccactgctcccagtgcccagctgctgggcccatcgccctctcmctgtggcggccaggacagaccacacccaggcccaggcctctagatattccactacgtgtgcaagggggtcccaggagcaggagagagctgttctcaaccc

SEQ ID NO: 16513 - DNA, 201 bp, Homo sapiens
tctgaccacctccttttatttgcaccctccagctttcctgtgtggccccacactcagggtactctggcggcggggtggtgaggttgtttaaggtgggaagkgggcctgtccttcccaccttgaacctccctgcctttgagactgggctgtggaggggagacatcccctgtgccattggtgactgctctctctcccacctca

SEQ ID NO: 16514 - DNA, 201 bp, Homo sapiens
aggagcaggagagagctgttctcaaccccacatcctccagcacaggctccgtcctgctgccccaagtcctgagccctccaccccatctgtcccaggcccckgcccagctcaggctcctcactgccagcccttcctccaccccacctcgcttctagtatctcccctccacagcaatggggtgtttcatttttactttcccct

SEQ ID NO: 16515 - DNA, 201 bp, Homo sapiens
gcctgggagagtgcccgatgctcaagggtgccttcgtctctggggtctgggaccccagaaagctcacctgtcctccccttctgccagagccccatagtccyatgcctctgtgcaggcattaatgtccccaggttacagaagagcgagcaggaaggagtagcctgtggtccctcagcaagggtgtggggtcctgcttcaata

SEQ ID NO: 16516 - DNA, 201 bp, Homo sapiens; identical to SEQ ID NO: 1453

SEQ ID NO: 16517 - DNA, 201 bp, Homo sapiens; identical to SEQ ID NO: 1457

SEQ ID NO: 16518 - DNA, 201 bp, Homo sapiens; identical to SEQ ID NO: 1456

SEQ ID NO: 16519 - DNA, 201 bp, Homo sapiens
tagttggaaatatgcacaaaggattgcttactctttttgtttgtttgtttttttgagatggagtcttgctcttgtccccaaggctggagttcaatggcacratctcggctcactgcaacctccgcctcctgggttcaagcagttctcctgctcaccccctgagtagctgggattacaggtgcccgccactgtgcccagcta

SEQ ID NO: 16520 - DNA, 201 bp, Homo sapiens
ggctgatggccgagaaggtgtgattgagccaggaggacacgcgggctccacaggagacaaaggcagaggccaggaggatgatgccagcagccaggaagtcygggtagtggcccaggaggggcacctgccaagaacccacgtgggtctcagtgaagttgcggatgctgtggctgaacatagagtccaggtagccactccagg

SEQ ID NO: 16521 - DNA, 201 bp, Homo sapiens; identical to SEQ ID NO: 1428

SEQ ID NO: 16522 - DNA, 201 bp, Homo sapiens
ttgctgtgtcggccaggctggtctcgaactcctgacctcaggtaatccgcccaccttggcttctcaaagtgttgggattacaggtgtgccaggccaagcaraatcttaaaaaaaggtggggagaagctggtgagcaggtggatttggttgaagcaggatgtcgacacagagggggcttggtgggtaaaggccctgagctgt

SEQ ID NO: 16523 - DNA, 201 bp, Homo sapiens
tggatcacgagattgagagtatcctggctaacacggtgaaaccccatctctattaaaaatacaaaaaattagccgggcatggtggtgggcgcctgtagtcscagctactcgggaggctggggcaggagaatggcatgaacccgggaggtggagcttgcagtgagccgagattgcaccactgcactccagcctgggtggcaa

SEQ ID NO: 16524 - DNA, 201 bp, Homo sapiens
aagtagagacggggtttcaccatgttggccaggctggtctcgaactcctggcctcaggtgacccaccagcctcggcctctcaaagtgctgggattacaggygtgagcctgccgagagcttggtcggggagacctgaacccagcggtgctaaaggaattaaagacaaacacacataaatatagaggtgtggagtgggaaatc

SEQ ID NO: 16525 - DNA, 201 bp, Homo sapiens; identical to SEQ ID NO: 949

SEQ ID NO: 16526 - DNA, 201 bp, Homo sapiens; identical to SEQ ID NO: 13990

SEQ ID NO: 16527 - DNA, 201 bp, Homo sapiens
ctcgcccatggatacgtaggtgaacaggtaggcagagcccgtgcgtggcacacgtgccccaaattctgcatagcatagggctgccagcagggaggccacascggccacaccgaaggacaagagcacagcagggccagccacctccttggccacggcacctgtgagcacgtagagacccgagcccaccatgccacccacgcc

SEQ ID NO: 16528 - DNA, 201 bp, Homo sapiens; identical to SEQ ID NO: 13997

SEQ ID NO: 16529 - DNA, 201 bp, Homo sapiens
ctccatggtggagtcctccagcggcttcaggcggttcagcttctggcataagcgtgccaggctagcaatggtgggcagcccccgggccatggcaggtggcygagaagagcaccgagccagctactggaacctgctagggccagaggggaatgacaggatgcgtagccggggcctgaccagccttccatccctcctggtctg

SEQ ID NO: 16530 - DNA, 201 bp, Homo sapiens; identical to SEQ ID NO: 14000

SEQ ID NO: 16531 - DNA, 201 bp, Homo sapiens
ctgtcccttccaagatttttcaccactacccatgccatgccatgcatgagactatggcctcctagagggtccctagatgcccctctcgcctcctcccttamtgctcggtgcacaccacgcagcagccaagctgaactttcacaccaggcatcatgagagcctgcagcgcctgcttctaccctcaggaattcccccaaccct

SEQ ID NO: 16532 - DNA, 201 bp, Homo sapiens
cccgctgggccagggggctagctaggctaaattcacaaaactccatctcccatacttcaaagaccacccacatggacagcccagcccaggtggcaggtcckatgatgggacagaggctgtaggtgggggacctagggctgcacttgagcagaatcttttttttttttttcttttttttttttttgagacagagtctcgctc

SEQ ID NO: 16533 - DNA, 201 bp, Homo sapiens
ctccagctgtgaattttgtttgaactattgggactcaggacatagtcctgaaagtttacctccacagtgacatctttaggcaagtccaacatttacgtgcytcctgggctggagggtcgttgtgcagacagctgtcccctgagccctggtggctggtcctagcacagttgctggagacatcccatgtccgtagttggaaat

SEQ ID NO: 16534 - DNA, 201 bp, Homo sapiens
ggaagaccagagttctgccagctcctctagggatcctggtgcctgatccctcccttacatgcaccatgctctttatagtgtcacctccctcagcagacacygctgagcctccccgctgggccagggggctagctaggctaaattcacaaaactccatctcccatacttcaaagaccacccacatggacagcccagcccagg

SEQ ID NO: 16535 - DNA, 201 bp, Homo sapiens; identical to SEQ ID NO: 14005

SEQ ID NO: 16536 - DNA, 201 bp, Homo sapiens
tggtggctggtcctagcacagttgctggagacatcccatgtccgtagttggaaatatgcacaaaggattgcttactctttttgtttgtttgtttttttgasatggagtcttgctcttgtccccaaggctggagttcaatggcacgatctcggctcactgcaacctccgcctcctgggttcaagcagttctcctgctcaccc

SEQ ID NO: 16537 - DNA, 201 bp, Homo sapiens
cctcccagcgggtcccttgttcctccatcagccccaggtggccacccgtgtttccctttccccttcccaggtggctgaaggctcagcctgtgctcggtgtsccccaggcactgggctacatcttttcctgaatcattatgttcagtcttcacatatcccctgcctggtaggaagtcctgtgatccccatttcagaggagaa

SEQ ID NO: 16538 - DNA, 201 bp, Homo sapiens
tgtgtaggaggttttggggtggaaaaaggggccactcaagaagccaggccagggttggacgtgctggctcacgcctgtaatcccagcactttgggaggccraggcaggtggatcacgagattgagagtatcctggctaacacggtgaaaccccatctctattaaaaatacaaaaaattagccgggcatggtggtgggcgcc

SEQ ID NO: 16539 - DNA, 201 bp, Homo sapiens; identical to SEQ ID NO: 1446

SEQ ID NO: 16540 - DNA, 201 bp, Homo sapiens; identical to SEQ ID NO: 14009

SEQ ID NO: 16541 - DNA, 201 bp, Homo sapiens
cgcccatggatacgtaggtgaacaggtaggcagagcccgtgcgtggcacacgtgccccaaattctgcatagcatagggctgccagcagggaggccacagckgccacaccgaaggacaagagcacagcagggccagccacctccttggccacggcacctgtgagcacgtagagacccgagcccaccatgccacccacgccca

SEQ ID NO: 16542 - DNA, 201 bp, Homo sapiens; identical to SEQ ID NO: 14010

SEQ ID NO: 16543 - DNA, 201 bp, Homo sapiens; identical to SEQ ID NO: 14011

SEQ ID NO: 16544 - DNA, 201 bp, Homo sapiens; identical to SEQ ID NO: 14012

SEQ ID NO: 16545 - DNA, 201 bp, Homo sapiens
tgtaggccaggagtgtgccaagggacaggaactgaaccagcgactccaggtccagcagcagtgccaggaaggccgtgaggagcccgaacgccagggtgccygccacaggcacctgtgtccgggggtgcacatgggcaaacacctggaagaagagcccatcggcggccatggcatagacaatgcgtggcagggagaagagga

SEQ ID NO: 16546 - DNA, 201 bp, Homo sapiens; identical to SEQ ID NO: 14015

SEQ ID NO: 16547 - DNA, 201 bp, Homo sapiens
catccaaattggaccagaggagctagacctggaagaatcacttccgcatccaccagggacagaactgtcaggagggaaggggcagggtgcgttgtctcacscctgtaatcccagcactctgggaggctgagacagaaggattgcttgaggccaggagttaaaaaccagcctggtcaacatagcaagactccatctctacaa

SEQ ID NO: 16548 - DNA, 201 bp, Homo sapiens; identical to SEQ ID NO: 951

SEQ ID NO: 16549 - DNA, 201 bp, Homo sapiens; identical to SEQ ID NO: 952

SEQ ID NO: 16550 - DNA, 201 bp, Homo sapiens
caggcagccacctggccacagacagacagtggcggctacatacacccccgcccctgcacccgtggccaggctggggtatccgcgcgccaggcggaatgcargggcgccctgggcccgcacacctccccatgtccgacacgccgctgctgctagagcctgctccgccgcgcccccgtccccggacacctgcgccttcgcctg

SEQ ID NO: 16551 - DNA, 201 bp, Homo sapiens
catgccatgccatgcatgagactatggcctcctagagggtccctagatgcccctctcgcctcctcccttactgctcggtgcacaccacgcagcagccaagstgaactttcacaccaggcatcatgagagcctgcagcgcctgcttctaccctcaggaattcccccaaccctgcccatgacggtgtccacactttcctccca

SEQ ID NO: 16552 - DNA, 201 bp, Homo sapiens
ctagatgcccctctcgcctcctcccttactgctcggtgcacaccacgcagcagccaagctgaactttcacaccaggcatcatgagagcctgcagcgcctgsttctaccctcaggaattcccccaaccctgcccatgacggtgtccacactttcctcccaatcctaatggctgccactcccagcaccatctggccagccctc

SEQ ID NO: 16553 - DNA, 201 bp, Homo sapiens
attttggttgagacaagagacttgtctcaagagatggacatgggcacaaggcttcctggtctcaaaaatggccagaaccactgccagcctcccatctctgsttcagtctgccttacagggggacagggttaatgacttgatggggccaacatcccttccctcataaaccaggctgccggcttccggcctttccagtcaaca

SEQ ID NO: 16554 - DNA, 201 bp, Homo sapiens
aatggtgggcagcccccgggccatggcaggtggccgagaagagcaccgagccagctactggaacctgctagggccagaggggaatgacaggatgcgtagcyggggcctgaccagccttccatccctcctggtctgaccacccccagtcctctctctgtccctgacctggggacctggacaccctcaccaggggcctgctgg

SEQ ID NO: 16555 - DNA, 201 bp, Homo sapiens
agtgctgctgaccagggtgtgtccaatgcatgctggagcctccggtgcctgcacattgagtctcggggtgcaggctggggaggtggcaggagagcaggctygggggctggaacatgggttggccctgcctctcccaggtcacctttttctgtgacctgctactgctgtatgtggatagagaagcccatttctactggagga

SEQ ID NO: 16556 - DNA, 201 bp, Homo sapiens; identical to SEQ ID NO: 14029

SEQ ID NO: 16557 - DNA, 201 bp, Homo sapiens
gagacttgtctcaagagatggacatgggcacaaggcttcctggtctcaaaaatggccagaaccactgccagcctcccatctctgcttcagtctgccttacrgggggacagggttaatgacttgatggggccaacatcccttccctcataaaccaggctgccggcttccggcctttccagtcaacacgagcccagccaggcc

SEQ ID NO: 16558 - DNA, 201 bp, Homo sapiens
ctagggagagaacgtgttcttcttggtgaccaacttccttgtgacgccagcccaagttcagggcagatgcccagaggtgagtttacccaggatcctcccarcgggtcccttgttcctccatcagccccaggtggccacccgtgtttccctttccccttcccaggtggctgaaggctcagcctgtgctcggtgtcccccagg

SEQ ID NO: 16559 - DNA, 201 bp, Homo sapiens; identical to SEQ ID NO: 14031

SEQ ID NO: 16560 - DNA, 201 bp, Homo sapiens
ttgtctcaagagatggacatgggcacaaggcttcctggtctcaaaaatggccagaaccactgccagcctcccatctctgcttcagtctgccttacaggggkacagggttaatgacttgatggggccaacatcccttccctcataaaccaggctgccggcttccggcctttccagtcaacacgagcccagccaggccaacct

SEQ ID NO: 16561 - DNA, 201 bp, Homo sapiens; identical to SEQ ID NO: 929
  misc_feature (1)...(201): n = A,T,C or G, or insertion/deletion polymorphism (see Tables 1-2)

SEQ ID NO: 16562 - DNA, 201 bp, Homo sapiens; identical to SEQ ID NO: 14036

SEQ ID NO: 16563 - DNA, 201 bp, Homo sapiens; identical to SEQ ID NO: 14045

SEQ ID NO: 16564 - DNA, 201 bp, Homo sapiens
ttggccaggctggtctcgaactcctggcctcaggtgacccaccagcctcggcctctcaaagtgctgggattacaggcgtgagcctgccgagagcttggtcrgggagacctgaacccagcggtgctaaaggaattaaagacaaacacacataaatatagaggtgtggagtgggaaatcaggggtatcacagccttcagagct

SEQ ID NO: 16565 - DNA, 201 bp, Homo sapiens
cccactcctcccaggtccaatgccttggagacctgggaccccacctattttaagcactgccgctatgaaccacaattcagcccctactgtcccgtgttccrcattggggacctcgtggccaaggctggagggaccttcgaggacctggcgttgctggtgggtcccaagttgggggcagggttcctagagggctctgggaga

SEQ ID NO: 16566 - DNA, 201 bp, Homo sapiens
attggtgactgctctctctcccacctcagcacccgtccgtcccactggctaactgctgggtcgacgaggactgccccgaaggggagggaggcacacacagycacggtaactgtgggctctgtcttccagtgcccctagcagggtgggggccgggctgggatcctgggtggctcctgagtgcaggccctgctcgcctctgtc

SEQ ID NO: 16567 - DNA, 201 bp, Homo sapiens
agtgggaaatcaggggtatcacagccttcagagctgacagcctcgaacagatttacccacatatttattgacagcaagccagtgataagcattgtttctayagattatagattaactaaaagtattccttatgggaaacaaagggatgggctctggttggttatctgcagcaggagcatgtccttaaatcacagatcgctc

SEQ ID NO: 16568 - DNA, 201 bp, Homo sapiens
gcggccaggacagaccacacccaggcccaggcctctagatattccactacgtgtgcaagggggtcccaggagcaggagagagctgttctcaaccccacatyctccagcacaggctccgtcctgctgccccaagtcctgagccctccaccccatctgtcccaggcccctgcccagctcaggctcctcactgccagcccttcc

SEQ ID NO: 16569 - DNA, 201 bp, Homo sapiens
tgggtggagctgaagtgaagatttggactggggtgggaagaaggtagttcaggatttcaggggcccctgtaagccccactaaggagctaaactgtttttgyttgtttgttttctttttctcttttcttttttttcctgtagcaatgaggtcttgctttgttgcccaggctggtctcgaactcctgagctcaggcaatccgc

SEQ ID NO: 16570 - DNA, 201 bp, Homo sapiens
tggagctgaagtgaagatttggactggggtgggaagaaggtagttcaggatttcaggggcccctgtaagccccactaaggagctaaactgtttttgtttgkttgttttctttttctcttttcttttttttcctgtagcaatgaggtcttgctttgttgcccaggctggtctcgaactcctgagctcaggcaatccgcctac

SEQ ID NO: 16571 - DNA, 201 bp, Homo sapiens
tcctctgatgcccagggtgtattcccagtgatcacctgcccagagcacagctgtcttctaggtgcacacccacatgtccaaagatcaattattttcctctmctggcatggcctctgtgacgcccactagtcatggtggctgtgacatccactagtgcctcagccagacccgtgactcaccctggaccccttcctgtccctt

SEQ ID NO: 16572 - DNA, 201 bp, Homo sapiens
gaagaaggtagttcaggatttcaggggcccctgtaagccccactaaggagctaaactgtttttgtttgtttgttttctttttctcttttcttttttttccygtagcaatgaggtcttgctttgttgcccaggctggtctcgaactcctgagctcaggcaatccgcctactttggactctcaaagtgctaggattacaggcg

SEQ ID NO: 16573 - DNA, 201 bp, Homo sapiens
agaaggtagttcaggatttcaggggcccctgtaagccccactaaggagctaaactgtttttgtttgtttgttttctttttctcttttcttttttttcctgwagcaatgaggtcttgctttgttgcccaggctggtctcgaactcctgagctcaggcaatccgcctactttggactctcaaagtgctaggattacaggcgtg

SEQ ID NO: 16574 - DNA, 201 bp, Homo sapiens; identical to SEQ ID NO: 14062

SEQ ID NO: 16575 - DNA, 201 bp, Homo sapiens
tctgcccgacctcgcaaggtcgttaccggagctcaccggggtctagggaagccctgtgactgtgactcagtcacagatggagaaggtcagaccgccggctractgactagcctaggtcagttcggggaggttaagggccacgtctgaaagtccgcagcccaccttctttctactgcagcggacacccttcttgatccctca

SEQ ID NO: 16576 - DNA, 201 bp, Homo sapiens
cttacaatggaagagactgcagccttttgagagagttctgcgaattgagggaatgcattctggctgttttgagcctgcagctaccacgtcctgcaaggaarcaagcagcttctgggaccagcctgcagccctcctgtgggggagtagagctcctcagaccccagtggcagcccttcctagcctaggcacctctggcaggcc

SEQ ID NO: 16577 - DNA, 201 bp, Homo sapiens
ggccccacctgctcacccgctcggtggccctgaggggtggggagggagcagctccagggggagcagggtgagaggctgggaacggctcagtggtggggtcycagagccaggtgaaaccgaggcttccccagagtcgagccggacccggaacaggagccgcggctctgcgtcggggcgggtgtggcccaggcagccacctgg

SEQ ID NO: 16578 - DNA, 201 bp, Homo sapiens; identical to SEQ ID NO: 950

SEQ ID NO: 16579 - DNA, 201 bp, Homo sapiens
aaattggcaccatcttgtctgggagtccatcatcctgtcaccagcccaataggctggataggctgcagatgctcctaagattccattccacaaaccacatrtaagcctgaacacatgtctagtatagcgttctggggaggccaggagccatggttcatgaatgtaatcacagccttttgggaggccaagagttcgagacca

SEQ ID NO: 16580 - DNA, 201 bp, Homo sapiens
tccagagatgggaactcactcttccctgggaactggggtagacttcctggaggggacatgaggctgggcctgaaggaacatgcacacaggtggtttgccarcacagaggtcaggggaacaggatgtgggtgggagccagccccacgtggtttcgaagggctggggaggttggggaagccagatcagacggggtgcagtgag

SEQ ID NO: 16581 - DNA, 201 bp, Homo sapiens; identical to SEQ ID NO: 1460

SEQ ID NO: 16582 - DNA, 201 bp, Homo sapiens; identical to SEQ ID NO: 1461

SEQ ID NO: 16583 - DNA, 201 bp, Homo sapiens
cctcccacccccagggctctcaggaagcctggaggaaagattccaaggggttgggctggggggttaccgaggagggatatagaaggtcctgaagaacccartgatcaccaacttagccctgccgccctctgctctctctcccagacctccatggcaaaagggctaccactggaaagcagccggtcctcataaactaagcag

SEQ ID NO: 16584 - DNA, 201 bp, Homo sapiens
accagcccaataggctggataggctgcagatgctcctaagattccattccacaaaccacatgtaagcctgaacacatgtctagtatagcgttctggggagrccaggagccatggttcatgaatgtaatcacagccttttgggaggccaagagttcgagaccagcccgggcagcatagtgagacccagtctctaaaaaaatt

SEQ ID NO: 16585 - DNA, 201 bp, Homo sapiens; identical to SEQ ID NO: 1462

SEQ ID NO: 16586 - DNA, 201 bp, Homo sapiens
tgcacacgtagtggaatatctagaggcctgggcctgggtgtggtctgtcctggccgccacagtgagagggcgatgggcccagcagctgggcactgggagcwgtggggcctcacctgaagttgtagctcttctcctgcagctggaaggagtagtgaggccagcagccagagtccccggtgtccaggtcacaatcccagtgaa

SEQ ID NO: 16587 - DNA, 201 bp, Homo sapiens
aaccagcagggaacggctacaggctcccggaatgggttggcaagtgggtgtcagaacttggacagggccatcctggtgtctgtgtctgactcccagcagcwgtggccgtgggtgcaggtgctgagctccgtctgaggcactcggccagtcgggcttgggatgcaagggccagctccctccacacagagttggcggttgctt

SEQ ID NO: 16588 - DNA, 201 bp, Homo sapiens
acttattttaatttatttatttagtagttttggagacagggtcttgctttgccacctaggctgaagtgcagtgacaggatcatagctcactgcagcctcaractcctgggttcaagtgatcctctcacctcagcctcccaaagtgatgggattaccggtgtgagccactgggcctagccaaatactgtatttttgatcgac

SEQ ID NO: 16589 - DNA, 201 bp, Homo sapiens
  misc_feature (1)...(201): n = A,T,C or G, or insertion/deletion polymorphism (see Tables 1-2)
agcggattccatagagcttgagcagggtgcgggcctccacacccggttgctcccaccagtgagtggctgtcctgtgggcaggaaagaaggctctggtgacntgctttgcccacccccaggtggggctggccctgccagacctctgtccaacttgtcaattgactctataaacccccagcccaagcctgagtcctgggtctc

SEQ ID NO: 16590 - DNA, 201 bp, Homo sapiens
caagagcaaaacttcatctaaaaaaaaaaaaaaaaaaaacacaaaaaaaacaggcttggtggctcatgcctgtaatcccagcactttgggaggctgaagtsggcagatcacctgaggtcagaagttcgagaccagcctggccaacatggcaaaacaccatctctactaaaaatacaaaaattagttgggtgtggtggtgca

SEQ ID NO: 16591 - DNA, 201 bp, Homo sapiens
catcccagctactctggaggcagaggctggaaaatcacctgaacccaggaggcagaggttgcagtgagccaagaccacgccattgcattccagcctggacyacaagaaagtgaaaactccgtttcaaaaaaaaaggtcgggcgtggtggctcacgcctgtaatcccagcactatgggaggctgaggcaggtggatcacgag

SEQ ID NO: 16592 - DNA, 201 bp, Homo sapiens
tgctgtggaggggagatactagaagcgaggtggggtggaggaagggctggcagtgaggagcctgagctgggcaggggcctgggacagatggggtggagggytcaggacttggggcagcaggacggagcctgtgctggaggatgtggggttgagaacagctctctcctgctcctgggacccccttgcacacgtagtggaata

SEQ ID NO: 16593 - DNA, 201 bp, Homo sapiens
ctgcaccccgagactcaatgtgcaggcaccggaggctccagcatgcattggacacaccctggtcagcagcactcactgcagcctgcaggtgcccacagtgytcgcactcaccacgcccagccaagctgccccggtgcccagtgtgacggccgtggggatgagcccgaacttccctgcctgagagagatctgagctgaacct

SEQ ID NO: 16594 - DNA, 201 bp, Homo sapiens
aaccctgtctctactaaaaatgcaaaaattagccgggcgtggaggcgtgcacccgtagtcccagctacttgggaggctgaggcaggagaatggcgtgaacmcgggaagcggaacttgcagtgagctgagatcccgccactgtactccagcctgggcgacagagtgagactccatctcaaaaaaaaaaaaaaagtttaggta

SEQ ID NO: 16595 - DNA, 201 bp, Homo sapiens
accataggctgcgtgcttgtctttgggaactcgaccctgcacctcccacactggggttacatcctgctgctcctgctcaccagtgtcatgtttctgctcascctccttgtcctgggggctcaccagcaacagtatcgggaagacttatttcaggtacctcccctagccaacacccactcacactcggcccaggcagctgcc

SEQ ID NO: 16596 - DNA, 201 bp, Homo sapiens
agaaatgggcttctctatccacatacagcagtagcaggtcacagaaaaaggtgacctgggagaggcagggccaacccatgttccagcccccgagcctgctytcctgccacctccccagcctgcaccccgagactcaatgtgcaggcaccggaggctccagcatgcattggacacaccctggtcagcagcactcactgcagc

SEQ ID NO: 16597 - DNA, 201 bp, Homo sapiens
gggttgagaacagctctctcctgctcctgggacccccttgcacacgtagtggaatatctagaggcctgggcctgggtgtggtctgtcctggccgccacagkgagagggcgatgggcccagcagctgggcactgggagcagtggggcctcacctgaagttgtagctcttctcctgcagctggaaggagtagtgaggccagca

SEQ ID NO: 16598 - DNA, 201 bp, Homo sapiens
gcagcaccctaccaaggtgggagtcaggggagggactgtctgctggggttcaagggtggaattctacccccaatcctccatgctggggcctcatccttgaratccccaggcagggccccgcccttcccagcccccaactctcaaccagcagggaacggctacaggctcccggaatgggttggcaagtgggtgtcagaactt

SEQ ID NO: 16599 - DNA, 201 bp, Homo sapiens
aggggaaagtaaaaatgaaacaccccattgctgtggaggggagatactagaagcgaggtggggtggaggaagggctggcagtgaggagcctgagctgggcmggggcctgggacagatggggtggagggctcaggacttggggcagcaggacggagcctgtgctggaggatgtggggttgagaacagctctctcctgctcct

SEQ ID NO: 16600 - DNA, 201 bp, Homo sapiens
caggaagagggtggctttgctggctttactccgtgactttgtccagccatgacatcagcttcctctgggccccaaggagaatcaggtgcacgtgcccctcsttggatacccaggcctcaggggccctgctctcccaccttcgcccttcagagcccacctccccatggacatggctctggagattgagaggcagcagggacc

SEQ ID NO: 16601 - DNA, 201 bp, Homo sapiens
ctgcctagaaagggcagcagggttctgagcatggcatgcacctgaggcctgcctggcacaggcacccccacggggacacatgcatccctgcaggcactacsctggggtgcatgcctgtgcgcagactgaggcgacagctgtttctgagctcgggcccaggctgcagctctcttgctgtctttgcccactcttcaagggctt

SEQ ID NO: 16602 - DNA, 201 bp, Homo sapiens
acacaggaagagggtggctttgctggctttactccgtgactttgtccagccatgacatcagcttcctctgggccccaaggagaatcaggtgcacgtgcccytccttggatacccaggcctcaggggccctgctctcccaccttcgcccttcagagcccacctccccatggacatggctctggagattgagaggcagcaggg

SEQ ID NO: 16603 - DNA, 201 bp, Homo sapiens; identical to SEQ ID NO: 1469

SEQ ID NO: 16604 - DNA, 201 bp, Homo sapiens
cagcagggttctgagcatggcatgcacctgaggcctgcctggcacaggcacccccacggggacacatgcatccctgcaggcactaccctggggtgcatgcytgtgcgcagactgaggcgacagctgtttctgagctcgggcccaggctgcagctctcttgctgtctttgcccactcttcaagggctttgaggtgaaaagag

SEQ ID NO: 16605 - DNA, 201 bp, Homo sapiens
ctggaatgcagtactcaggacacagtggctgtcgctgataaacacaagtggggatctgctattggggtcccatagggccctcccggcctgccagaggtgcytaggctaggaagggctgccactggggtctgaggagctctactcccccacaggagggctgcaggctggtcccagaagctgcttgcttccttgcaggacgtg

SEQ ID NO: 16606 - DNA, 201 bp, Homo sapiens
caggtgtattgttgcatagctgcctgcctggggcgtggggcactggaatgcagtactcaggacacagtggctgtcgctgataaacacaagtggggatctgstattggggtcccatagggccctcccggcctgccagaggtgcctaggctaggaagggctgccactggggtctgaggagctctactcccccacaggagggct

SEQ ID NO: 16607 - DNA, 201 bp, Homo sapiens
agccaggtgtattgttgcatagctgcctgcctggggcgtggggcactggaatgcagtactcaggacacagtggctgtcgctgataaacacaagtggggatytgctattggggtcccatagggccctcccggcctgccagaggtgcctaggctaggaagggctgccactggggtctgaggagctctactcccccacaggagg

SEQ ID NO: 16608 - DNA, 201 bp, Homo sapiens; identical to SEQ ID NO: 1472

SEQ ID NO: 16609 - DNA, 201 bp, Homo sapiens
cagaccaggagggatggaaggctggtcaggccccggctacgcatcctgtcattcccctctggccctagcaggttccagtagctggctcggtgctcttctcrgccacctgccatggcccgggggctgcccaccattgctagcctggcacgcttatgccagaagctgaaccgcctgaagccgctggaggactccaccatggag

SEQ ID NO: 16610 - DNA, 201 bp, Homo sapiens; identical to SEQ ID NO: 1463

SEQ ID NO: 16611 - DNA, 201 bp, Homo sapiens
tctccacgggtcaggttctgtcgccgtctcaaaacacagccgacttctatggctccctgaggcagcaccctaccaaggtgggagtcaggggagggactgtytgctggggttcaagggtggaattctacccccaatcctccatgctggggcctcatccttgagatccccaggcagggccccgcccttcccagcccccaactc

SEQ ID NO: 16612 - DNA, 201 bp, Homo sapiens
tgaggaaggagaatcggttgaacccaggaagcagaggttacagtgagccgaggtcgggccactgcactccagcctgggtgacagaatgagattctgtcttaaaaaaaaaaaaaacaaagctgaaggggagaaggggaaagtaaaaatgaaacaccccattgctgtggaggggagatactagaagcgaggtggggtggagga

SEQ ID NO: 16613 - DNA, 201 bp, Homo sapiens
cctgccacatgcagtcggagccctgcaatacaggtgcctgctgggctctcccagtctccacgggtcaggttctgtcgccgtctcaaaacacagccgacttytatggctccctgaggcagcaccctaccaaggtgggagtcaggggagggactgtctgctggggttcaagggtggaattctacccccaatcctccatgctgg

SEQ ID NO: 16614 - DNA, 201 bp, Homo sapiens
gtaggggattgtggggacacttacgagggcacaacgccactctccacggggcaccaactccagatctcacaggtcctgtgggtcccattgaacaccacacwctggcctgtttttacacctagaaaacaaaagatgaactccagaccttcaaatctctgcaggcctggggaggccttcagccagggggttgttggcagaaag

SEQ ID NO: 16615 - DNA, 201 bp, Homo sapiens
gaggagggccaggacccaggcagcaggagggtctgtgctgacagctggtaagcatacctctgctaggaacactggggacagagcactgggagagagacctycaggcccagacgcagcaggagcccctgccacatgcagtcggagccctgcaatacaggtgcctgctgggctctcccagtctccacgggtcaggttctgtcg

SEQ ID NO: 16616 - DNA, 201 bp, Homo sapiens
cagggaaccaggcaattgtctccaatccacatcaaagatgctggggctctctaaagagtaggtgccagtcctgggaccaccctgagtcagggacacaggtrggcctggatccaggtgcccagtgaagaggggagccacacacaccaggcaaggagggttccatgacaggcatggggtcaggctccccacgtctgctaggtg

SEQ ID NO: 16617 - DNA, 201 bp, Homo sapiens; identical to SEQ ID NO: 1468

SEQ ID NO: 16618 - DNA, 201 bp, Homo sapiens
gctgcacagccccatgtaggaccgatgggagggtggggtctctacctatgatgggggtgcagatgggggaggagggccaggacccaggcagcaggagggtytgtgctgacagctggtaagcatacctctgctaggaacactggggacagagcactgggagagagacctccaggcccagacgcagcaggagcccctgccaca

SEQ ID NO: 16619 - DNA, 201 bp, Homo sapiens
ctcagcctccttgtcctgggggctcaccagcaacagtatcgggaagacttatttcaggtacctcccctagccaacacccactcacactcggcccaggcagstgcctccccttcccccactaccatcccagaatgaacaagtctcacggggctggggaggaccacacacccatcccgcacccctttctgcatggtgagtgag

SEQ ID NO: 16620 - DNA, 201 bp, Homo sapiens
gtggctcatgcctgtaatcccagcactttgggaggccgaggcaggcggatcacgaggtcaggagattgagaccatcctggctaacacggtgaaaccccgtytctaccaaaaatacaaaaaaaaattagccgggcgtggtggcgggtgcctgtagtcccagctacgtgtgaggctgaggcaggagaatggcgtgaacccagg

SEQ ID NO: 16621 - DNA, 201 bp, Homo sapiens; identical to SEQ ID NO: 1470

SEQ ID NO: 16622 - DNA, 201 bp, Homo sapiens
gagaacagctctctcctgctcctgggacccccttgcacacgtagtggaatatctagaggcctgggcctgggtgtggtctgtcctggccgccacagtgagarggcgatgggcccagcagctgggcactgggagcagtggggcctcacctgaagttgtagctcttctcctgcagctggaaggagtagtgaggccagcagccag

SEQ ID NO: 16623 - DNA, 201 bp, Homo sapiens
ggtgacatttcaggacaagggacgtctgctcaggcaacacagggatggggtaaggaagctaccatcccaccggaagtgggagccatctgagaagttcctcmagacaataccagccaaatattagaaggtattggcattctggccgaggcagaatgttccaaattggcaccatcttgtctgggagtccatcatcctgtcacc

SEQ ID NO: 16624 - DNA, 201 bp, Homo sapiens
cgttgtatgttggtgcctgtggcagagggtgtggtgtcacaccttctccaggtagataaaaagtcaacactccaaaacactggacaccagcaataaggcastcattggtaaggcctttggggagctcccattacaaatctgcctaaccctctggcctgaagtgcctagacttttgtggtgacatttcaggacaagggacgt

SEQ ID NO: 16625 - DNA, 201 bp, Homo sapiens; identical to SEQ ID NO: 1473

SEQ ID NO: 16626 - DNA, 201 bp, Homo sapiens
caggcgaaggcgcaggtgtccggggacgggggcgcggcggagcaggctctagcagcagcggcgtgtcggacatggggaggtgtgcgggcccagggcgcccytgcattccgcctggcgcgcggataccccagcctggccacgggtgcaggggcgggggtgtatgtagccgccactgtctgtctgtggccaggtggctgcctg

SEQ ID NO: 16627 - DNA, 201 bp, Homo sapiens; identical to SEQ ID NO: 1459

SEQ ID NO: 16628 - DNA, 201 bp, Homo sapiens
tccagccatgacatcagcttcctctgggccccaaggagaatcaggtgcacgtgcccctccttggatacccaggcctcaggggccctgctctcccaccttcrcccttcagagcccacctccccatggacatggctctggagattgagaggcagcagggaccccaggcattttactgaggctccaggtggcaggtgattctag

SEQ ID NO: 16629 - DNA, 201 bp, Homo sapiens
tcctccagtagaaatgggcttctctatccacatacagcagtagcaggtcacagaaaaaggtgacctgggagaggcagggccaacccatgttccagcccccragcctgctctcctgccacctccccagcctgcaccccgagactcaatgtgcaggcaccggaggctccagcatgcattggacacaccctggtcagcagcact

SEQ ID NO: 16630 - DNA, 201 bp, Homo sapiens
ccagcaggcccctggtgagggtgtccaggtccccaggtcagggacagagagaggactgggggtggtcagaccaggagggatggaaggctggtcaggccccrgctacgcatcctgtcattcccctctggccctagcaggttccagtagctggctcggtgctcttctcggccacctgccatggcccgggggctgcccaccatt

SEQ ID NO: 16631 - DNA, 201 bp, Homo sapiens
tctgtaatcctagcccttcgggaggctgaggtgggtggatcacctgaggtcaggggtttgagaccagcctggccaacattgtgaaaacccatctctatctaccaaaatataaaaattagctgggagtagtggcgagcacctgtaattccagctactcaggaggctgaggaaggagaatcggttgaacccaggaagcagagg

SEQ ID NO: 16632 - DNA, 201 bp, Homo sapiens
atctgcctactccaccccattccctagattaggactctcctggggcatcacagcaccagagaagctgaaacaatccccctcccccatcactcctctttctrccttgcctttttggctccagctgcacagccccatgtaggaccgatgggagggtggggtctctacctatgatgggggtgcagatgggggaggagggccagg

SEQ ID NO: 16633 - DNA, 201 bp, Homo sapiens
gctcctgggacccccttgcacacgtagtggaatatctagaggcctgggcctgggtgtggtctgtcctggccgccacagtgagagggcgatgggcccagcakctgggcactgggagcagtggggcctcacctgaagttgtagctcttctcctgcagctggaaggagtagtgaggccagcagccagagtccccggtgtccagg

SEQ ID NO: 16634 - DNA, 201 bp, Homo sapiens
aaaactgctctgaaaactcaactttttttttttttagatacagggtcttgctatgttgcccaggctggagtgaagaggctattcacaggtatgatcaagcycactgcagccttgagcctcctaggctcaagccatcctcccaactcagccttctgagtaactgagactacaggcgtgtaccaccattcccagctaataaag

SEQ ID NO: 16635 - DNA, 201 bp, Homo sapiens
ttagatacagggtcttgctatgttgcccaggctggagtgaagaggctattcacaggtatgatcaagctcactgcagccttgagcctcctaggctcaagccrtcctcccaactcagccttctgagtaactgagactacaggcgtgtaccaccattcccagctaataaagtctatttttaaaaaatcacttgacgataaatgt

SEQ ID NO: 16636 - DNA, 201 bp, Homo sapiens
tctcccagagccctctaggaaccctgcccccaacttgggacccaccagcaacgccaggtcctcgaaggtccctccagccttggccacgaggtccccaatgyggaacacgggacagtaggggctgaattgtggttcatagcggcagtgcttaaaataggtggggtcccaggtctccaaggcattggacctgggaggagtggg

SEQ ID NO: 16637 - DNA, 201 bp, Homo sapiens
ctctggcctgaagtgcctagacttttgtggtgacatttcaggacaagggacgtctgctcaggcaacacagggatggggtaaggaagctaccatcccaccgraagtgggagccatctgagaagttcctcaagacaataccagccaaatattagaaggtattggcattctggccgaggcagaatgttccaaattggcaccatc

SEQ ID NO: 16638 - DNA, 201 bp, Homo sapiens
tgggcccaagacacatgctccgcccttgcctgggggatagggaggtggattatctgcctactccaccccattccctagattaggactctcctggggcatcwcagcaccagagaagctgaaacaatccccctcccccatcactcctctttctaccttgcctttttggctccagctgcacagccccatgtaggaccgatggga

SEQ ID NO: 16639 - DNA, 201 bp, Homo sapiens
ggaagggctggcagtgaggagcctgagctgggcaggggcctgggacagatggggtggagggctcaggacttggggcagcaggacggagcctgtgctggagratgtggggttgagaacagctctctcctgctcctgggacccccttgcacacgtagtggaatatctagaggcctgggcctgggtgtggtctgtcctggccgc

SEQ ID NO: 16640 - DNA, 201 bp, Homo sapiens
ggacgggctcaggcccaagaacaggcgaaggcgcaggtgtccggggacgggggcgcggcggagcaggctctagcagcagcggcgtgtcggacatggggagrtgtgcgggcccagggcgcccctgcattccgcctggcgcgcggataccccagcctggccacgggtgcaggggcgggggtgtatgtagccgccactgtctgt

SEQ ID NO: 16641 - DNA, 201 bp, Homo sapiens; identical to SEQ ID NO: 1464

SEQ ID NO: 16642 - DNA, 201 bp, Homo sapiens; identical to SEQ ID NO: 1465

SEQ ID NO: 16643 - DNA, 201 bp, Homo sapiens
aaaaaaaaaaaaaaaaaaacacaaaaaaaacaggcttggtggctcatgcctgtaatcccagcactttgggaggctgaagtgggcagatcacctgaggtcaraagttcgagaccagcctggccaacatggcaaaacaccatctctactaaaaatacaaaaattagttgggtgtggtggtgcacacctgtcatcccagctact

SEQ ID NO: 16644 - DNA, 201 bp, Homo sapiens
ctccgccatgctgaccctccccactctctctgctacagccatgaacaccgtcctgctcagcctcctcttctccctgccacgcattgtctatgccatggccrccgatgggctcttcttccaggtgtttgcccatgtgcacccccggacacaggtgcctgtggcgggcaccctggcgttcgggctcctcacggccttcctggc

SEQ ID NO: 16645 - DNA, 201 bp, Homo sapiens
accagcctggccaacatggcaaaacaccatctctactaaaaatacaaaaattagttgggtgtggtggtgcacacctgtcatcccagctactctggaggcaraggctggaaaatcacctgaacccaggaggcagaggttgcagtgagccaagaccacgccattgcattccagcctggactacaagaaagtgaaaactccgtt

SEQ ID NO: 16646 - DNA, 201 bp, Homo sapiens
gttttggagacagggtcttgctttgccacctaggctgaagtgcagtgacaggatcatagctcactgcagcctcagactcctgggttcaagtgatcctctcrcctcagcctcccaaagtgatgggattaccggtgtgagccactgggcctagccaaatactgtatttttgatcgacatttggttgaaaaatatctatgtatt

SEQ ID NO: 16647 - DNA, 201 bp, Homo sapiens
cattctttgtggcaccaagtcttcacctgccccagggaaccaggcaattgtctccaatccacatcaaagatgctggggctctctaaagagtaggtgccagkcctgggaccaccctgagtcagggacacaggtgggcctggatccaggtgcccagtgaagaggggagccacacacaccaggcaaggagggttccatgacagg

SEQ ID NO: 16648 - DNA, 201 bp, Homo sapiens
ctactaaaaatacaaaaattagttgggtgtggtggtgcacacctgtcatcccagctactctggaggcagaggctggaaaatcacctgaacccaggaggcaraggttgcagtgagccaagaccacgccattgcattccagcctggactacaagaaagtgaaaactccgtttcaaaaaaaaaggtcgggcgtggtggctcacg

SEQ ID NO: 16649 - DNA, 201 bp, Homo sapiens
gagctcgggcccaggctgcagctctcttgctgtctttgcccactcttcaagggctttgaggtgaaaagagtgtggccctcatgctcctacatgggtgcacragtgcccaggcctgttccagttaccttctagcccacctggtagctgcagggcctcagtcttcaggggtagggtccccaagtccaccctgcaccaccccac

SEQ ID NO: 16650 - DNA, 201 bp, Homo sapiens
atttagaaagggacaaggaaaaattttactctcctctttcaaccaggcattacagacagagatccagaagagttcactttgggctgggcgcagtggctcaygcctgtaatcccagcactttgggaggccgaggcaggcggatcacgaggtcaggagattgagaccatcctggctaacacggtgaaaccccgtctctaccaa

SEQ ID NO: 16651 - DNA, 201 bp, Homo sapiens
gactgaagtgaatttcagatgtacagcctcccacagcctcccacccccagggctctcaggaagcctggaggaaagattccaaggggttgggctggggggtyaccgaggagggatatagaaggtcctgaagaacccaatgatcaccaacttagccctgccgccctctgctctctctcccagacctccatggcaaaagggcta

SEQ ID NO: 16652 - DNA, 201 bp, Homo sapiens
ggtggaagggaggtgacagcctctgccaggcctggggccctgcgccagttggggtaggggattgtggggacacttacgagggcacaacgccactctccackgggcaccaactccagatctcacaggtcctgtgggtcccattgaacaccacacactggcctgtttttacacctagaaaacaaaagatgaactccagacctt

SEQ ID NO: 16653 - DNA, 201 bp, Homo sapiens
aaaagagttcactttggtaagaattcctacctgtgcccgcttttatttgttctcccaggatcccatctttaggcttgagaggatcccatccttgtcaccaraaactgtaggggtggcaaaactccacttccatccctagagtctcagctgggcccaagaattaaattgacataggacaggttaacagaagaaaagcacata

SEQ ID NO: 16654 - DNA, 201 bp, Homo sapiens
catccccggcctgacccctacctgtgcctacctgcccggtgacgaggatgtcgaagcggattccatagagcttgagcagggtgcgggcctccacacccggytgctcccaccagtgagtggctgtcctgtgggcaggaaagaaggctctggtgacctgctttgcccacccccaggtggggctggccctgccagacctctgtc

SEQ ID NO: 16655 - DNA, 201 bp, Homo sapiens
gttctgggcctgggccagcaggggcctcctgcaggtggaagggaggtgacagcctctgccaggcctggggccctgcgccagttggggtaggggattgtggrgacacttacgagggcacaacgccactctccacggggcaccaactccagatctcacaggtcctgtgggtcccattgaacaccacacactggcctgttttta

SEQ ID NO: 16656 - DNA, 201 bp, Homo sapiens
ggacggagcctgtgctggaggatgtggggttgagaacagctctctcctgctcctgggacccccttgcacacgtagtggaatatctagaggcctgggcctgkgtgtggtctgtcctggccgccacagtgagagggcgatgggcccagcagctgggcactgggagcagtggggcctcacctgaagttgtagctcttctcctgc

SEQ ID NO: 16657 - DNA, 201 bp, Homo sapiens
tgagggatcaagaagggtgtccgctgcagtagaaagaaggtgggctgcggactttcagacgtggcccttaacctccccgaactgacctaggctagtcagtyagccggcggtctgaccttctccatctgtgactgagtcacagtcacagggcttccctagaccccggtgagctccggtaacgaccttgcgaggtcgggcaga

SEQ ID NO: 16658 - DNA, 201 bp, Homo sapiens
ggcctgccagaggtgcctaggctaggaagggctgccactggggtctgaggagctctactcccccacaggagggctgcaggctggtcccagaagctgcttgyttccttgcaggacgtggtagctgcaggctcaaaacagccagaatgcattccctcaattcgcagaactctctcaaaaggctgcagtctcttccattgtaag

SEQ ID NO: 16659 - DNA, 201 bp, Homo sapiens
ccaggtggctgcctgggccacacccgccccgacgcagagccgcggctcctgttccgggtccggctcgactctggggaagcctcggtttcacctggctctgrgaccccaccactgagccgttcccagcctctcaccctgctccccctggagctgctccctccccacccctcagggccaccgagcgggtgagcaggtggggcc

SEQ ID NO: 16660 - DNA, 201 bp, Homo sapiens; identical to SEQ ID NO: 1471

SEQ ID NO: 16661 - DNA, 201 bp, Homo sapiens
actccacttccatccctagagtctcagctgggcccaagaattaaattgacataggacaggttaacagaagaaaagcacataaatttatttatatgctattytacatctgatttctgttctttaatcttgcgaacagagtccctaaggctagccattatatttatttataaataaggggtgctggagtgcagtggtgagatc

SEQ ID NO: 16662 - DNA, 201 bp, Homo sapiens
cacctggtagctgcagggcctcagtcttcaggggtagggtccccaagtccaccctgcaccaccccactggtctcttcatggctgtgccatgtctaccataratgccccccaactttccagtcatgcctgtaaggactacacaggaagagggtggctttgctggctttactccgtgactttgtccagccatgacatcagctt

SEQ ID NO: 16663 - DNA, 201 bp, Homo sapiens; identical to SEQ ID NO: 1474

SEQ ID NO: 16664 - DNA, 201 bp, Homo sapiens
atttttagtagagacagggtttctccatgttggtcaggctggtctcaaactccctcaggtgatctgcccacctcagcctcccaaagtgctgggattacagycgtgagccacctcgcctggccactcttaataatcttgtgaaagaaagattatccccattttccagaggtggaaactgaagctgaaaagtgaagtgggcct

SEQ ID NO: 16665 - DNA, 201 bp, Homo sapiens; identical to SEQ ID NO: 1478

SEQ ID NO: 16666 - DNA, 201 bp, Homo sapiens; identical to SEQ ID NO: 723

SEQ ID NO: 16667 - DNA, 201 bp, Homo sapiens; identical to SEQ ID NO: 7709

SEQ ID NO: 16668 - DNA, 201 bp, Homo sapiens; identical to SEQ ID NO: 7710

SEQ ID NO: 16669 - DNA, 201 bp, Homo sapiens; identical to SEQ ID NO: 7712

SEQ ID NO: 16670 - DNA, 201 bp, Homo sapiens; identical to SEQ ID NO: 7711

SEQ ID NO: 16671 - DNA, 201 bp, Homo sapiens; identical to SEQ ID NO: 7714

SEQ ID NO: 16672 - DNA, 201 bp, Homo sapiens; identical to SEQ ID NO: 7715

SEQ ID NO: 16673 - DNA, 201 bp, Homo sapiens; identical to SEQ ID NO: 7716

SEQ ID NO: 16674 - DNA, 201 bp, Homo sapiens; identical to SEQ ID NO: 7717

SEQ ID NO: 16675 - DNA, 201 bp, Homo sapiens; identical to SEQ ID NO: 7718

SEQ ID NO: 16676 - DNA, 201 bp, Homo sapiens; identical to SEQ ID NO: 7719

SEQ ID NO: 16677 - DNA, 201 bp, Homo sapiens; identical to SEQ ID NO: 7720

SEQ ID NO: 16678 - DNA, 201 bp, Homo sapiens; identical to SEQ ID NO: 7721

SEQ ID NO: 16679 - DNA, 201 bp, Homo sapiens; identical to SEQ ID NO: 7722

SEQ ID NO: 16680 - DNA, 201 bp, Homo sapiens; identical to SEQ ID NO: 1479

SEQ ID NO: 16681 - DNA, 201 bp, Homo sapiens; identical to SEQ ID NO: 7726

SEQ ID NO: 16682 - DNA, 201 bp, Homo sapiens; identical to SEQ ID NO: 7728

SEQ ID NO: 16683 - DNA, 201 bp, Homo sapiens; identical to SEQ ID NO: 7731

SEQ ID NO: 16684 - DNA, 201 bp, Homo sapiens; identical to SEQ ID NO: 727

SEQ ID NO: 16685 - DNA, 201 bp, Homo sapiens; identical to SEQ ID NO: 7734

SEQ ID NO: 16686 - DNA, 201 bp, Homo sapiens; identical to SEQ ID NO: 7732

SEQ ID NO: 16687 - DNA, 201 bp, Homo sapiens; identical to SEQ ID NO: 7735

SEQ ID NO: 16688 - DNA, 201 bp, Homo sapiens; identical to SEQ ID NO: 1480

SEQ ID NO: 16689 - DNA, 201 bp, Homo sapiens; identical to SEQ ID NO: 7737

SEQ ID NO: 16690 - DNA, 201 bp, Homo sapiens; identical to SEQ ID NO: 7740

SEQ ID NO: 16691 - DNA, 201 bp, Homo sapiens; identical to SEQ ID NO: 7741

SEQ ID NO: 16692 - DNA, 201 bp, Homo sapiens; identical to SEQ ID NO: 7742

SEQ ID NO: 16693 - DNA, 201 bp, Homo sapiens; identical to SEQ ID NO: 1475

SEQ ID NO: 16694 - DNA, 201 bp, Homo sapiens; identical to SEQ ID NO: 1481

SEQ ID NO: 16695 - DNA, 201 bp, Homo sapiens
agggtttctccatgttggtcaggctggtctcaaactccctcaggtgatctgcccacctcagcctcccaaagtgctgggattacagtcgtgagccacctcgsctggccactcttaataatcttgtgaaagaaagattatccccattttccagaggtggaaactgaagctgaaaagtgaagtgggccttgggcacgatggctc

SEQ ID NO: 16696 - DNA, 201 bp, Homo sapiens
cagggtttctccatgttggtcaggctggtctcaaactccctcaggtgatctgcccacctcagcctcccaaagtgctgggattacagtcgtgagccacctckcctggccactcttaataatcttgtgaaagaaagattatccccattttccagaggtggaaactgaagctgaaaagtgaagtgggccttgggcacgatggct

SEQ ID NO: 16697 - DNA, 201 bp, Homo sapiens
agtagtcaaaaacactttcctgccactaaagtaaccccacaacttaggactctgcagggcctaagggagagagactttgcgtaaaaacatggaaccctacaataccgactttgctccttagtaaagattaataaaactccatgagactgttgtccagaggtcctgcgtccggcccccacccccatcctcaccaacaataaa

SEQ ID NO: 16698 - DNA, 201 bp, Homo sapiens
tagtcccagctactcgggaggctgaggtgggagatctcttaaactcaggaggcataggttgcagtgagccaagattgcgccaccatgctccagcctgggtwacagagctagaccctgtctcaaaaaaaaccagaagaatcttggaaggaggggtctaaggttctagggggccagcagagctcacttttctagcctcttgaa

SEQ ID NO: 16699 - DNA, 201 bp, Homo sapiens
ccctctcccaggtgctcttcccagctctggggtagccgctgtcctgactggtagtagcttagatgagttctgtctgtgcttgatggaaatggcatcgtacrcatctgcttttacctatatagtgttttgcacacgtgttaacaaatctgtgtggcctgtactctgacggaaaataccaaaccaatgataattaagtcatga

SEQ ID NO: 16700 - DNA, 201 bp, Homo sapiens
ctgtagtcccagctactcgggaggctgaggtgggagatctcttaaactcaggaggcataggttgcagtgagccaagattgcgccaccatgctccagcctgrgtaacagagctagaccctgtctcaaaaaaaaccagaagaatcttggaaggaggggtctaaggttctagggggccagcagagctcacttttctagcctctt

SEQ ID NO: 16701 - DNA, 201 bp, Homo sapiens
tctctgatttctttaaccccaaattcatgctttattttgatcctccacctgactcttgtctagttttgtgacgtatatcacttgttctcatgttttctaartccgcaattcagacctattccaaaatgcgtttcctcatgggtctggtttgttgtctgtttctcctgctttgcaccttccagtctagagtttcatcttctg

SEQ ID NO: 16702 - DNA, 201 bp, Homo sapiens
cccaaattcatgctttattttgatcctccacctgactcttgtctagttttgtgacgtatatcacttgttctcatgttttctaaatccgcaattcagacctattccaaaatgcgtttcctcatgggtctggtttgttgtctgtttctcctgctttgcaccttccagtctagagtttcatcttctgcattgacattgttgcag

SEQ ID NO: 16703 - DNA, 201 bp, Homo sapiens
cctcccccacctgtcctgcagtctttgacttttcctttcttttttgccaccctttcaggaaccctgtatggtttttagtttaaattaaaggagtcgttatygtggtgggaatatgaaataaagtagaagaaaaggccatgagctagtctgctggtgcttgctgttggggaagggaaggtgatggtgtgttggactccaggg

SEQ ID NO: 16704 - DNA, 201 bp, Homo sapiens
agtgactgtgggaaagttatttgattatctgtgcttgagttaccttattgtagaatgttcttgagctgagaagttgggaaccacgaggctttagctctgarcaggtccatagaggagctcaggtggggaggtgggaatgcaggtgactggcagggcctggatggggctcatgctgctgcctctctgacctctgccctggcc

SEQ ID NO: 16705 - DNA, 201 bp, Homo sapiens
ccaaattcatgctttattttgatcctccacctgactcttgtctagttttgtgacgtatatcacttgttctcatgttttctaaatccgcaattcagacctattccaaaatgcgtttcctcatgggtctggtttgttgtctgtttctcctgctttgcaccttccagtctagagtttcatcttctgcattgacattgttgcagt

SEQ ID NO: 16706 - DNA, 201 bp, Homo sapiens
tactctgaccagggttcgaaggtcacacttagagcctaaggggaaatggagaagtgcaaagggacgagcagaatggctggcaccacctcaggttagcgcamtgggacgttccagttctcacaccgcccaccccaccccacccaagtccctacgcacggagccaagccgcacctctcccctcatgaggcaggagcccggagg

SEQ ID NO: 16707 - DNA, 201 bp, Homo sapiens
caaattcatgctttattttgatcctccacctgactcttgtctagttttgtgacgtatatcacttgttctcatgttttctaaatccgcaattcagacctattccaaaatgcgtttcctcatgggtctggtttgttgtctgtttctcctgctttgcaccttccagtctagagtttcatcttctgcattgacattgttgcagtt

SEQ ID NO: 16708 - DNA, 201 bp, Homo sapiens
aattcatgctttattttgatcctccacctgactcttgtctagttttgtgacgtatatcacttgttctcatgttttctaaatccgcaattcagacctattccaaaatgcgtttcctcatgggtctggtttgttgtctgtttctcctgctttgcaccttccagtctagagtttcatcttctgcattgacattgttgcagttat

SEQ ID NO: 16709 - DNA, 201 bp, Homo sapiens
gaagatgagcagctcagaggaggtgtcctggatttcctggttctgtgggctccgtggcaatgaattcttctgtgaagtgagttctcttcaacctccctacktgccagcttcacatatcttcccaccagacgttccttcacatattccacttctacactgttctcttacatgctatttgaaaacttcctatcagcaaagagt

SEQ ID NO: 16710 - DNA, 201 bp, Homo sapiens
attcatgctttattttgatcctccacctgactcttgtctagttttgtgacgtatatcacttgttctcatgttttctaaatccgcaattcagacctattccaaaatgcgtttcctcatgggtctggtttgttgtctgtttctcctgctttgcaccttccagtctagagtttcatcttctgcattgacattgttgcagttatg

SEQ ID NO: 16711 - DNA, 201 bp, Homo sapiens
gtttgggttgctttaagaaagggtggttccgaattctcccgtggttggagggccgaatgtgggaggagggaggataccagaggcagggaaggagaacttgmgctttactgacactgttctttttctagctgacgtgaagatgagcagctcagaggaggtgtcctggatttcctggttctgtgggctccgtggcaatgaatt

SEQ ID NO: 16712 - DNA, 201 bp, Homo sapiens
gaaggagggagaggtggcctgaggagcggaggggggatgtgtggattccggtgaaagggacctgacaatcgcccccaacccgtgagaaaaggaggagcccrgttcttgcttgagaatgataaacttggaaacccttgggaaaggcgtgggggtcatgcagagacttgtattggtagggagcctgagtcgaggtccctgccg

SEQ ID NO: 16713 - DNA, 201 bp, Homo sapiens
caagggtctctggcgggactgattcgcactaggggcccaacaggcaataaggacccagcggattggccgaggataggccagtcccctgggcagcagcgcckcgccgggactagaggggaacgtgaggagagctgcggaaagagatccagcctggctccctcctttccccgccctaagtcagcctcttcacccagtgagcac

SEQ ID NO: 16714 - DNA, 201 bp, Homo sapiens
ccccatcctcaccaacaataaacaccagcctctttctgaaaccactttcccaccccgtaagacataccagtaggaaaaaaaaatcagcctggccctttaaktcttccgcgatcccatttcggagtttcctcttcccaaacaaaaatagatgggtcactccctagaagatctcggggagagtctcctatacgtgttgctgtg

SEQ ID NO: 16715 - DNA, 201 bp, Homo sapiens
gtgtggtggcatgtgcttgtaatcccagctactcgggaggctgaggcagaagaatcacttgaacctgggaggcagaagttgcaatgagccaagatcacacsactgcactccagcctaggtgacagtgagactgtctcaaaaaaagagtggccttctcacccacctccttctacctgggcctggtcctttcgcagccccctt

SEQ ID NO: 16716 - DNA, 201 bp, Homo sapiens
gaggccggagaatcacttgaacctggaaggtggaggtggcgatgagccgagattgcaccattgcactccagcctgggcaacaagagtgaaactgtgtctcaaaaaaaaaaaaaaaaaaaaagggttagtgaggtttgggatccaaataggattgcagagccctctccattgcacttggcgtttgtcgcttcctctcggcct

SEQ ID NO: 16717 - DNA, 201 bp, Homo sapiens
gtggcaatgaattcttctgtgaagtgagttctcttcaacctccctacttgccagcttcacatatcttcccaccagacgttccttcacatattccacttctrcactgttctcttacatgctatttgaaaacttcctatcagcaaagagtcccccctataaaccccgacgaacctgtgctaaagtggcaaaactggggcccaa

SEQ ID NO: 16718 - DNA, 201 bp, Homo sapiens
gaattgcttgaactggggaggtggaggttgcagtgagccaagattgcgccactgcactccagcctgggtgacagagcagcaaaaaaaaaaaagacaggatyggagcaatgtcttatgggattatgggaacaagacttggggtgcagcttaggaggctgagagagtttccgtttgggagagtgctgggcccatgacaggaga

SEQ ID NO: 16719 - DNA, 201 bp, Homo sapiens
aaattctggctcagcatctgtgagactcaggcaaggttatgacctttctgcacctgtttcctcatctgtaaaatgcacatagtaataatacctgcctcagyggattgcaagtgtttagaacagtgcctagcacatattatgtgttacgtttttgctaacttaagaaaggtggggggtcggtggaagagcaggcatcgggaa

SEQ ID NO: 16720 - DNA, 201 bp, Homo sapiens
ccatctctactaaaaatacaaaaaattagctgggcgtggtggcgtgcacctttaatcccagctgcttgggagactgaggcacaagaattgcttgaactggrgaggtggaggttgcagtgagccaagattgcgccactgcactccagcctgggtgacagagcagcaaaaaaaaaaaagacaggattggagcaatgtcttatg

SEQ ID NO: 16721 - DNA, 201 bp, Homo sapiens
actgcagacagatgcggaagcagacagcttgaggacaggcaagggcacctggagatctggagggtccccgtcaaagctgcgcaccttgatagggtagaagmtattcagctacagattgaggagagaaggttagtggaagtggagacagagtgtggctctgaagaaaagggaagagaggctgggcacggtggctcacgcctg

SEQ ID NO: 16722 - DNA, 201 bp, Homo sapiens
tctccaaaaaaaaggatgaggaatagaattctgtgcagatgtcctgacttggcaattttgtgtccctgcctcactgtctccaccaacccccgcctgtcctrgtgttgttctgcctcctgtcctctcttgctctcttgtcagtctctggcttcctcggccccatttcacttcactgagtcctgacacccatctccctagggg

SEQ ID NO: 16723 - DNA, 201 bp, Homo sapiens
ctgggggtacagagtagcagtaagtgtgctgaagggcgtcaaccaagaggaagagccaaggctggggtccagtggctggagggaggcaaggagggctggtrtgagggactagaagtcctggccaagcccagatagaagtcaggaaggtggctggaaactggtggaattttacaccaaagtttgctgcagtcacactaagga

SEQ ID NO: 16724 - DNA, 201 bp, Homo sapiens
tttggtaaaacattcagaagcttgcacatatcacaagatggatttttgtaaaccacacatctgtgtaaccagccaccaaatcagcgtgaagacctttaccygcagccaagcctgcctctgttcccctctcccaggtgctcttcccagctctggggtagccgctgtcctgactggtagtagcttagatgagttctgtctgtg

SEQ ID NO: 16725 - DNA, 201 bp, Homo sapiens
ggttaatgcctggcgcagtggctcacgcctgtaatcccagcactttgggaggctgaggcaggcggatcacctgagattgggagtttgagaccagcctgacyaatatggagaaaccccatcgctactaaaaatacaaaattagccgggcttggtagcgcatacctgtaattacagctactcgggaggctgaggccggagaat

SEQ ID NO: 16726 - DNA, 201 bp, Homo sapiens
aatcccagcactttgggaggccgaggtgggcggatcacttgagattgggagtttgagaccagcctggccaacatggtaaaacccgctctctattaaaaatwgaaaaatcagctgggtgtggtggcacacctctgtaatcccagctactcaggaggctgagacaggagaatcacttgaacccgggaggcagaggttgcagtg

SEQ ID NO: 16727 - DNA, 201 bp, Homo sapiens
gatgtttgctgctgccctgcttgagagaaatgaccaaaatgcccatcaatagtgggatggggaaatcagctgtgatatgcgcatgctatggagtagtatasagcaggtcaataaaacaaggaagctgtttacaaactgatatcggaacattcagttcccctaacttaaatgtggaataatgtttacagtgggatgctacta

SEQ ID NO: 16728 - DNA, 201 bp, Homo sapiens; identical to SEQ ID NO: 1489

SEQ ID NO: 16729 - DNA, 201 bp, Homo sapiens; identical to SEQ ID NO: 1490

SEQ ID NO: 16730 - DNA, 201 bp, Homo sapiens; identical to SEQ ID NO: 1491

SEQ ID NO: 16731 - DNA, 201 bp, Homo sapiens
ttcatgctttattttgatcctccacctgactcttgtctagttttgtgacgtatatcacttgttctcatgttttctaaatccgcaattcagacctattccaaaatgcgtttcctcatgggtctggtttgttgtctgtttctcctgctttgcaccttccagtctagagtttcatcttctgcattgacattgttgcagttatgt

SEQ ID NO: 16732 - DNA, 201 bp, Homo sapiens
tcatgctttattttgatcctccacctgactcttgtctagttttgtgacgtatatcacttgttctcatgttttctaaatccgcaattcagacctattccaaaatgcgtttcctcatgggtctggtttgttgtctgtttctcctgctttgcaccttccagtctagagtttcatcttctgcattgacattgttgcagttatgta

SEQ ID NO: 16733 - DNA, 201 bp, Homo sapiens
catgttttctaaatccgcaattcagacctattccaaaatgcgtttcctcatgggtctggtttgttgtctgtttctcctgctttgcaccttccagtctagartttcatcttctgcattgacattgttgcagttatgtattgaggagggagttgggagggagagcaaggagcagaggctgaaaaggtgtgaagggaaggcaga

SEQ ID NO: 16734 - DNA, 201 bp, Homo sapiens; identical to SEQ ID NO: 1574

SEQ ID NO: 16735 - DNA, 201 bp, Homo sapiens
cttgggagactgaggcacaagaattgcttgaactggggaggtggaggttgcagtgagccaagattgcgccactgcactccagcctgggtgacagagcagcaaaaaaaaaaaagacaggattggagcaatgtcttatgggattatgggaacaagacttggggtgcagcttaggaggctgagagagtttccgtttgggagagt

SEQ ID NO: 16736 - DNA, 201 bp, Homo sapiens; identical to SEQ ID NO: 1482

SEQ ID NO: 16737 - DNA, 201 bp, Homo sapiens; identical to SEQ ID NO: 1483

SEQ ID NO: 16738 - DNA, 201 bp, Homo sapiens; identical to SEQ ID NO: 1484

SEQ ID NO: 16739 - DNA, 201 bp, Homo sapiens
agcggattggccgaggataggccagtcccctgggcagcagcgccgcgccgggactagaggggaacgtgaggagagctgcggaaagagatccagcctggctycctcctttccccgccctaagtcagcctcttcacccagtgagcacaaaactgtattgcccagactcccgggccccgaacgccatacctggcttccgcttcc

SEQ ID NO: 16740 - DNA, 201 bp, Homo sapiens; identical to SEQ ID NO: 1485

SEQ ID NO: 16741 - DNA, 201 bp, Homo sapiens
cccattttcctccacaataaactgggactgggctaaaactgtgtcacattgtttgtggggtcaggctcaggtgtgggcaggtaaacacagattaaagaggkttaatgcctggcgcagtggctcacgcctgtaatcccagcactttgggaggctgaggcaggcggatcacctgagattgggagtttgagaccagcctgacca

SEQ ID NO: 16742 - DNA, 201 bp, Homo sapiens; identical to SEQ ID NO: 1488

SEQ ID NO: 16743 - DNA, 201 bp, Homo sapiens; identical to SEQ ID NO: 1487

SEQ ID NO: 16744 - DNA, 201 bp, Homo sapiens
cttttttttctaaggttcttactatgttgcccaagctggccttgaactcctgggctcaagagattcttctgcctcagcctccaagtagctgggactacagwtgcacaccaccatgctcacctggctgatttacttattttcaaacctttttggtaaaacattcagaagcttgcacatatcacaagatggatttttgtaaac

SEQ ID NO: 16745 - DNA, 201 bp, Homo sapiens
tccctagaagatctcggggagagtctcctatacgtgttgctgtgtagcttccgtaccgcaaaatggcgccattctaatcagaagagttgacacaatcaaawagccacacggcacgaagacgcatgcgtggcgacaacaacaacaaaaaccacaacccacattacttgagggctcgggcgtgcgcaaagctccgggttcagt

SEQ ID NO: 16746 - DNA, 201 bp, Homo sapiens
aaacctgtggaatgccgagaagccgtgtaatgaaataacgtcacgcctgcccctcaccattactctgaccagggttcgaaggtcacacttagagcctaagrggaaatggagaagtgcaaagggacgagcagaatggctggcaccacctcaggttagcgcactgggacgttccagttctcacaccgcccaccccaccccacc

SEQ ID NO: 16747 - DNA, 201 bp, Homo sapiens; identical to SEQ ID NO: 1567

SEQ ID NO: 16748 - DNA, 201 bp, Homo sapiens
ctgaaaccactttcccaccccgtaagacataccagtaggaaaaaaaaatcagcctggccctttaagtcttccgcgatcccatttcggagtttcctcttccyaaacaaaaatagatgggtcactccctagaagatctcggggagagtctcctatacgtgttgctgtgtagcttccgtaccgcaaaatggcgccattctaatc

SEQ ID NO: 16749 - DNA, 201 bp, Homo sapiens
tgtttggatatctatgactgtctgtttatactgtaaggggcttaatcagcagctccatcttttagttttagttctaaaggaaaagtagcctaaagtcagtmtaactaaagggtggaacgaggtgggacaaggtccggaattgctgctcagtgatgtgtgtgtgcctgccgctggtggagctgagactgctcatctcagaag

SEQ ID NO: 16750 - DNA, 201 bp, Homo sapiens; identical to SEQ ID NO: 1569

SEQ ID NO: 16751 - DNA, 201 bp, Homo sapiens; identical to SEQ ID NO: 1493

SEQ ID NO: 16752 - DNA, 201 bp, Homo sapiens
agcccccttcccaccaacatagccctctaaacgcccctagcccccacacagctctggtctgacagcactgccgaggatgcccactaactttctggcattcrccataggagggctttcatttcctctttctctttttgtgtctagagcaaatcacataccaaggcaggacaagaggacagctcagcagagctgggggtccct

SEQ ID NO: 16753 - DNA, 201 bp, Homo sapiens
atatgggttccctcttggcttccatgtcctgacaggtggatgaagactacatccaggacaaatttaatcttactggactcaatgagcaggtccctcactaycgacaagctctagacatgatcttggacctggagcctggtgaggcaccctcagggttgttttgtgtgtgtgcgtgcactatttttctcttcaaatctctat

SEQ ID NO: 16754 - DNA, 201 bp, Homo sapiens
catccctgtgcatggtgatcaccatctattatggtaaataaggtcccaggaaggggctgctggtggggcagccaatggcttggtcttctctcctctcacaratcagggctgctccgggcatggggtacaagaagagaggaggggctgagtgcaatggctcatgcctgtaaccctagcactttgggaggctgaggcaggtgg

SEQ ID NO: 16755 - DNA, 201 bp, Homo sapiens
tttcacaaacataagtccatatactatgtgccaagaatacaggtaaagacattcccaaccctcaaagagttcacagctggagagggaaagtgccatgttaycaatttttttcttttttttttgagatgcagtttcgctctcattgcccaggctggagtgcaatggcatgatctcggctcaccacaacctctgccccccgag

SEQ ID NO: 16756 - DNA, 201 bp, Homo sapiens
actgcaacctccgcttcctgggctcaagcatattttttgtagaaagcaggctttgccgggacatggtggcatgtgcctgtaatcccggctacttgggaggytgaggcaggagaatcgctaaggtggaagttgcagtgagccaggatcatggcactgcactccaacctgggcagcagagcaagactccatctcaaaaaaaaa

SEQ ID NO: 16757 - DNA, 201 bp, Homo sapiens
tttattgttggtgaggatgggggtgggggccggacgcaggacctctggacaacagtctcatggagttttattaatctttactaaggagcaaagtcggtattgtagggttccatgtttttacgcaaagtctctctcccttaggccctgcagagtcctaagttgtggggttactttagtggcaggaaagtgtttttgactact

SEQ ID NO: 16758 - DNA, 201 bp, Homo sapiens
ttcaagaggctagaaaagtgagctctgctggccccctagaaccttagacccctccttccaagattcttctggttttttttgagacagggtctagctctgtwacccaggctggagcatggtggcgcaatcttggctcactgcaacctatgcctcctgagtttaagagatctcccacctcagcctcccgagtagctgggacta

SEQ ID NO: 16759 - DNA, 201 bp, Homo sapiens
cagaagatgaaactctagactggaaggtgcaaagcaggagaaacagacaacaaaccagacccatgaggaaacgcattttggaataggtctgaattgcggayttagaaaacatgagaacaagtgatatacgtcacaaaactagacaagagtcaggtggaggatcaaaataaagcatgaatttggggttaaagaaatcagaga

SEQ ID NO: 16760 - DNA, 201 bp, Homo sapiens
ctgcaacaatgtcaatgcagaagatgaaactctagactggaaggtgcaaagcaggagaaacagacaacaaaccagacccatgaggaaacgcattttggaataggtctgaattgcggatttagaaaacatgagaacaagtgatatacgtcacaaaactagacaagagtcaggtggaggatcaaaataaagcatgaatttggg

SEQ ID NO: 16761 - DNA, 201 bp, Homo sapiens
ctgaaaagatcctattctaccctgccagccccctctgaggcctcaactcttccccttttccttcccctgcccttaatgctttttcttctttctctgcaggkctcctactccctccctccagtactgcgagaactgtgacacccacttccaagattccaaccaccgcacatccactgctcacctgctgtcactgtcgcaggg

SEQ ID NO: 16762 - DNA, 201 bp, Homo sapiens
ggccagggcagaggtcagagaggcagcagcatgagccccatccaggccctgccagtcacctgcattcccacctccccacctgagctcctctatggacctgytcagagctaaagcctcgtggttcccaacttctcagctcaagaacattctacaataaggtaactcaagcacagataatcaaataactttcccacagtcact

SEQ ID NO: 16763 - DNA, 201 bp, Homo sapiens
actgcaacaatgtcaatgcagaagatgaaactctagactggaaggtgcaaagcaggagaaacagacaacaaaccagacccatgaggaaacgcattttggaataggtctgaattgcggatttagaaaacatgagaacaagtgatatacgtcacaaaactagacaagagtcaggtggaggatcaaaataaagcatgaatttgg

SEQ ID NO: 16764 - DNA, 201 bp, Homo sapiens
aactgcaacaatgtcaatgcagaagatgaaactctagactggaaggtgcaaagcaggagaaacagacaacaaaccagacccatgaggaaacgcattttggaataggtctgaattgcggatttagaaaacatgagaacaagtgatatacgtcacaaaactagacaagagtcaggtggaggatcaaaataaagcatgaatttg

SEQ ID NO: 16765 - DNA, 201 bp, Homo sapiens
ataactgcaacaatgtcaatgcagaagatgaaactctagactggaaggtgcaaagcaggagaaacagacaacaaaccagacccatgaggaaacgcattttggaataggtctgaattgcggatttagaaaacatgagaacaagtgatatacgtcacaaaactagacaagagtcaggtggaggatcaaaataaagcatgaatt

SEQ ID NO: 16766 - DNA, 201 bp, Homo sapiens
cataactgcaacaatgtcaatgcagaagatgaaactctagactggaaggtgcaaagcaggagaaacagacaacaaaccagacccatgaggaaacgcattttggaataggtctgaattgcggatttagaaaacatgagaacaagtgatatacgtcacaaaactagacaagagtcaggtggaggatcaaaataaagcatgaat

SEQ ID NO: 16767 - DNA, 201 bp, Homo sapiens
ctcaagggagggtgagggctgggaagaaccaaccttcagttctgagatctgtgctcccttcagtcaggtggtagatccatttccggggcacacagagcccrtctttcctgcagaggtggtggtggcaaggaggaaagaatgagcatcaccccaaccatagtgtcccagcttcttttttttttttttgagacagagtctcac

SEQ ID NO: 16768 - DNA, 201 bp, Homo sapiens
cacagcaacacgtataggagactctccccgagatcttctagggagtgacccatctatttttgtttgggaagaggaaactccgaaatgggatcgcggaagamttaaagggccaggctgatttttttttcctactggtatgtcttacggggtgggaaagtggtttcagaaagaggctggtgtttattgttggtgaggatgggg

SEQ ID NO: 16769 - DNA, 201 bp, Homo sapiens; identical to SEQ ID NO: 1510

SEQ ID NO: 16770 - DNA, 201 bp, Homo sapiens
aggcagtgtgggggaagcactgaagcctgtagtccccacttgggggctaggggtttgctcactcagcaataaataactgtgtcacatcaaatcctaaatawaccactacaaagtgagagttactgccactctgttcttactgacaccgtccagctgggagtttaggtggtagaggatccagggggaatgttgaaatgggag

SEQ ID NO: 16771 - DNA, 201 bp, Homo sapiens
agcctggatccctcactgttaagtaggaaggaaggcaatttgtcccttttttttttttttttttttttgagacaaagtctcactcatctcactctgtcgcycaggctggtgtgcaatggtgtgatttcagctcactgcaacctccgcttcctgggctcaagcatattttttgtagaaagcaggctttgccgggacatggtg

SEQ ID NO: 16772 - DNA, 201 bp, Homo sapiens
ccacacacttttcgggaggatgtggtgagcgatctggaagggcaaggtggggtcaggccagtcaaaacccctggaagcacctagctcttcctgggagggtrtcataggacccagagtgaggagttctcctgccctcccttgtttccctccaacccttcctgccttgtatccctactcactgtagaggagaaagcgctggta

SEQ ID NO: 16773 - DNA, 201 bp, Homo sapiens
aactattgaggaacaagtacatgcggcgcagctcagcaaaagacaagcccaggttcagggacagtgtgaccatggggtccaggccatcaggctccgtcccrgcatggaaattggggaggggcagggagaggttcagggcctggtagaaccactgaatctgggagtcagacagaggcagggccaggggcctgtcatggggct

SEQ ID NO: 16774 - DNA, 201 bp, Homo sapiens
cagacagaggcagggccaggggcctgtcatggggctccggcagagagctctggagttgggggcttgaccaggagttgcaataatcgtactgacagcactgrgcctgataccagtactctgcaaagtaggtgttgcgtttttcttggcagcggtaggaaatgtactgtccacagcctcgaacgatgaagcgaaccttgacat

SEQ ID NO: 16775 - DNA, 201 bp, Homo sapiens
acataactgcaacaatgtcaatgcagaagatgaaactctagactggaaggtgcaaagcaggagaaacagacaacaaaccagacccatgaggaaacgcattttggaataggtctgaattgcggatttagaaaacatgagaacaagtgatatacgtcacaaaactagacaagagtcaggtggaggatcaaaataaagcatgaa

SEQ ID NO: 16776 - DNA, 201 bp, Homo sapiens
tacataactgcaacaatgtcaatgcagaagatgaaactctagactggaaggtgcaaagcaggagaaacagacaacaaaccagacccatgaggaaacgcattttggaataggtctgaattgcggatttagaaaacatgagaacaagtgatatacgtcacaaaactagacaagagtcaggtggaggatcaaaataaagcatga

SEQ ID NO: 16777 - DNA, 201 bp, Homo sapiens
tctgccttcccttcacaccttttcagcctctgctccttgctctccctcccaactccctcctcaatacataactgcaacaatgtcaatgcagaagatgaaaytctagactggaaggtgcaaagcaggagaaacagacaacaaaccagacccatgaggaaacgcattttggaataggtctgaattgcggatttagaaaacatg

SEQ ID NO: 16778 - DNA, 201 bp, Homo sapiens
cagtgtgaccatggggtccaggccatcaggctccgtcccagcatggaaattggggaggggcagggagaggttcagggcctggtagaaccactgaatctggkagtcagacagaggcagggccaggggcctgtcatggggctccggcagagagctctggagttgggggcttgaccaggagttgcaataatcgtactgacagca

SEQ ID NO: 16779 - DNA, 201 bp, Homo sapiens
aacactcacacccccttcctctcttcctttcccaagatggtctccagtcatcctaggccatccacccaagtccctcagagcctccaccataggcttccccyaatctcagtccatacctccttcccatccacgcccagagttgtcagttgactgtgctcagggcactggtagatggagttaaggataataccatagaagtag

SEQ ID NO: 16780 - DNA, 201 bp, Homo sapiens
agaacccatcctgcctccctcaggtgacatcacagctcttagccacatccctctggtgacatcacacgagcctctttcaccctgtaacaccagaagacttkgtgagtcctaatcctgttttatgagattttaaccccttaccttgattcctaggagtcaataagaaggctttggagtccaggcaggaagtcagggacttga

SEQ ID NO: 16781 - DNA, 201 bp, Homo sapiens
gagagttactgccactctgttcttactgacaccgtccagctgggagtttaggtggtagaggatccagggggaatgttgaaatgggaggagtgggaatgacrtctggagacaaaccccagaatgagatgaggattgaaaaattatctttattatcttgagtgggagctggagctggaagtctccagcttctccctccaacaa

SEQ ID NO: 16782 - DNA, 201 bp, Homo sapiens
gcagttaaagactacacgatccaggagcacctaggacctggggccaccttcctgcccgctttattggatggagcactgcctccccagtttctgggacaccktggggtgtggccttggtgagtgaaacttggggtgctgcctgctgggaaggaaatccggaaacgcagagaggactctctggtggtgacccaggccttgtca

SEQ ID NO: 16783 - DNA, 201 bp, Homo sapiens
tgctttttcttctttctctgcaggtctcctactccctccctccagtactgcgagaactgtgacacccacttccaagattccaaccaccgcacatccactgytcacctgctgtcactgtcgcagggtcctcagcctcccaaccttccacttggggtgcccatctccagcccgggcttcaaactgctgctgagggggggctgg

SEQ ID NO: 16784 - DNA, 201 bp, Homo sapiens
gattagaatggcgccattttgcggtacggaagctacacagcaacacgtataggagactctccccgagatcttctagggagtgacccatctatttttgtttrggaagaggaaactccgaaatgggatcgcggaagacttaaagggccaggctgatttttttttcctactggtatgtcttacggggtgggaaagtggtttcag

SEQ ID NO: 16785 - DNA, 201 bp, Homo sapiens
agaatcgctaaggtggaagttgcagtgagccaggatcatggcactgcactccaacctgggcagcagagcaagactccatctcaaaaaaaaaaaaaaaaaaagcaggcgttgccattttgcccaggctggtctcaaactcctgagctcaaagccatctgcccgcctctgcctcccaaagtgttgggattacaggcgtgagcc

SEQ ID NO: 16786 - DNA, 201 bp, Homo sapiens; identical to SEQ ID NO: 1519

SEQ ID NO: 16787 - DNA, 201 bp, Homo sapiens
atagagatttgaagagaaaaatagtgcacgcacacacacaaaacaaccctgagggtgcctcaccaggctccaggtccaagatcatgtctagagcttgtcgrtagtgagggacctgctcattgagtccagtaagattaaatttgtcctggatgtagtcttcatccacctgtcaggacatggaagccaagagggaacccatat

SEQ ID NO: 16788 - DNA, 201 bp, Homo sapiens
ccacctgcctcagcctcccaaagtgctagggttacaggcatgagccattgcactcagcccctcctctcttcttgtaccccatgcccggagcagccctgatytgtgagaggagagaagaccaagccattggctgccccaccagcagccccttcctgggaccttatttaccataatagatggtgatcaccatgcacagggatg

SEQ ID NO: 16789 - DNA, 201 bp, Homo sapiens
tgtggtgagcgatctggaagggcaaggtggggtcaggccagtcaaaacccctggaagcacctagctcttcctgggagggtgtcataggacccagagtgagkagttctcctgccctcccttgtttccctccaacccttcctgccttgtatccctactcactgtagaggagaaagcgctggtaaccctggcctgtctcattca

SEQ ID NO: 16790 - DNA, 201 bp, Homo sapiens
aagaggctagaaaagtgagctctgctggccccctagaaccttagacccctccttccaagattcttctggttttttttgagacagggtctagctctgttacycaggctggagcatggtggcgcaatcttggctcactgcaacctatgcctcctgagtttaagagatctcccacctcagcctcccgagtagctgggactacag

SEQ ID NO: 16791 - DNA, 201 bp, Homo sapiens
ccctggagtccaacacaccatcaccttcccttccccaacagcaagcaccagcagactagctcatggccttttcttctactttatttcatattcccaccacrataacgactcctttaatttaaactaaaaaccatacagggttcctgaaagggtggcaaaaaagaaaggaaaagtcaaagactgcaggacaggtgggggagg

SEQ ID NO: 16792 - DNA, 201 bp, Homo sapiens
cttatcctcatgtgtaggttgacagggtagtatagtcaagtggttataaacatgagctccctggatttaaagcctgattccacttacttgggcaaacaacytaatgtctacatgttccagttttctcatcttagaaatgggggtagtaagaattgttgttaggattcaatgggttaatatatgtaaaatgctagaatagtg

SEQ ID NO: 16793 - DNA, 201 bp, Homo sapiens; identical to SEQ ID NO: 1503

SEQ ID NO: 16794 - DNA, 201 bp, Homo sapiens
actctttgctgataggaagttttcaaatagcatgtaagagaacagtgtagaagtggaatatgtgaaggaacgtctggtgggaagatatgtgaagctggcamgtagggaggttgaagagaactcacttcacagaagaattcattgccacggagcccacagaaccaggaaatccaggacacctcctctgagctgctcatcttc

SEQ ID NO: 16795 - DNA, 201 bp, Homo sapiens
aattcattgccacggagcccacagaaccaggaaatccaggacacctcctctgagctgctcatcttcacgtcagctagaaaaagaacagtgtcagtaaagckcaagttctccttccctgcctctggtatcctccctcctcccacattcggccctccaaccacgggagaattcggaaccaccctttcttaaagcaacccaaac

SEQ ID NO: 16796 - DNA, 201 bp, Homo sapiens
cggcagggacctcgactcaggctccctaccaatacaagtctctgcatgacccccacgcctttcccaagggtttccaagtttatcattctcaagcaagaacygggctcctccttttctcacgggttgggggcgattgtcaggtccctttcaccggaatccacacatcccccctccgctcctcaggccacctctccctccttc

SEQ ID NO: 16797 - DNA, 201 bp, Homo sapiens; identical to SEQ ID NO: 1506

SEQ ID NO: 16798 - DNA, 201 bp, Homo sapiens; identical to SEQ ID NO: 1507

SEQ ID NO: 16799 - DNA, 201 bp, Homo sapiens
caacctccgcttcctgggctcaagcatattttttgtagaaagcaggctttgccgggacatggtggcatgtgcctgtaatcccggctacttgggaggctgabgcaggagaatcgctaaggtggaagttgcagtgagccaggatcatggcactgcactccaacctgggcagcagagcaagactccatctcaaaaaaaaaaaaa

SEQ ID NO: 16800 - DNA, 201 bp, Homo sapiens
gcagtgtgggggaagcactgaagcctgtagtccccacttgggggctaggggtttgctcactcagcaataaataactgtgtcacatcaaatcctaaatatamcactacaaagtgagagttactgccactctgttcttactgacaccgtccagctgggagtttaggtggtagaggatccagggggaatgttgaaatgggagga

SEQ ID NO: 16801 - DNA, 201 bp, Homo sapiens; identical to SEQ ID NO: 1511

SEQ ID NO: 16802 - DNA, 201 bp, Homo sapiens
ttgggccccagttttgccactttagcacaggttcgtcggggtttataggggggactctttgctgataggaagttttcaaatagcatgtaagagaacagtgyagaagtggaatatgtgaaggaacgtctggtgggaagatatgtgaagctggcaagtagggaggttgaagagaactcacttcacagaagaattcattgccac

SEQ ID NO: 16803 - DNA, 201 bp, Homo sapiens; identical to SEQ ID NO: 1514

SEQ ID NO: 16804 - DNA, 201 bp, Homo sapiens
gagctccctggatttaaagcctgattccacttacttgggcaaacaacctaatgtctacatgttccagttttctcatcttagaaatgggggtagtaagaatygttgttaggattcaatgggttaatatatgtaaaatgctagaatagtgcatgccgcatagtatgcaatacatgaatgttagctatagtcattatgactaat

SEQ ID NO: 16805 - DNA, 201 bp, Homo sapiens
tagggtgtttgtgtttatggacagtgagggcactgctcttggattcaccagctgttatttttgcttttacttttctcccaccttcagttttttttttttttccacctccactttttaaaagcaaaaaaaaaaaaaagtatgatggtggtgaataaagaccaaagggtcctctctacctttgaaaactctcctggggtggag

SEQ ID NO: 16806 - DNA, 201 bp, Homo sapiens
cttttctgggaaagcctttcatgaagtcttggatgcgaaatggaggagtggtgggggatgtggaaaagaacccaggggcagggggctgtagggggcgaccragtttagggaagcatgagaaacccgggaaaatggggagctgggtttatattaaggtcctggtccttgctaatctcggtttggcggtccggcgcgcacaga

SEQ ID NO: 16807 - DNA, 201 bp, Homo sapiens
atcaccccaaccatagtgtcccagcttcttttttttttttttgagacagagtctcactctgttgcccaggctggagtgcagtggcgccatctcggctcacygcaagctctgcctcccgggttcacgccattctcctgcctcaacctcgtgagtagctgggactacaggtgcccaccaccatgcccagctagttttttatat

SEQ ID NO: 16808 - DNA, 201 bp, Homo sapiens
ttgctggaagaggccagtgtgataggaaggcccacgattatcaagcttgtacacttagttgaactgggaccagaactctagcccccaaatctaaactttaracttctttgttccacccatttgtctacacttttctttcccacacttccccactctcccaccacccacccccttgtcttgctcatgccgggtggtaggcac

SEQ ID NO: 16809 - DNA, 201 bp, Homo sapiens
gagacggggtttctccatgttggccaagctggtcttgaactcccgacctcaggtgatccgccggcctcggcttcccaaagtgctggggttgcaggcatgarccaccactcccggcccatgttatcaaatattataatgcagggtgataagggaagtcaaggcctctagagatgagaatgggtagggttttgctggaagagg

SEQ ID NO: 16810 - DNA, 201 bp, Homo sapiens; identical to SEQ ID NO: 1504

SEQ ID NO: 16811 - DNA, 201 bp, Homo sapiens; identical to SEQ ID NO: 1505

SEQ ID NO: 16812 - DNA, 201 bp, Homo sapiens
ggcagcctctccaggtggcatgataaggtcacctccctgccaatctgggttcactttcaggtcccagaccctcctgggagtcccccacctattctttcaasccccctggaccaagaattgcccagcttcgtgcaagtctcacttcccccaggaggagttccctgactacagccaattcactgatttcacaaacataagtcc

SEQ ID NO: 16813 - DNA, 201 bp, Homo sapiens
ctgggttcactttcaggtcccagaccctcctgggagtcccccacctattctttcaacccccctggaccaagaattgcccagcttcgtgcaagtctcacttmccccaggaggagttccctgactacagccaattcactgatttcacaaacataagtccatatactatgtgccaagaatacaggtaaagacattcccaaccct

SEQ ID NO: 16814 - DNA, 201 bp, Homo sapiens
ccatgttatcaaatattataatgcagggtgataagggaagtcaaggcctctagagatgagaatgggtagggttttgctggaagaggccagtgtgataggarggcccacgattatcaagcttgtacacttagttgaactgggaccagaactctagcccccaaatctaaactttaaacttctttgttccacccatttgtctac

SEQ ID NO: 16815 - DNA, 201 bp, Homo sapiens
ctcctcggagaattcaggaagtgactgggatagtgccccagaaaccatggaagatgtggggcatcccaagactaaggactcgggggcattgagggtttctrgggctgcttccgaaccaagcaaggaggagccccaagttgagcagctagggagcaaaagaatggattccctcaagtgggaccagcctatctctagcactca

SEQ ID NO: 16816 - DNA, 201 bp, Homo sapiens
gctcttagccacatccctctggtgacatcacacgagcctctttcaccctgtaacaccagaagacttggtgagtcctaatcctgttttatgagattttaacmccttaccttgattcctaggagtcaataagaaggctttggagtccaggcaggaagtcagggacttgaattcctccacacacttttcgggaggatgtggtga

SEQ ID NO: 16817 - DNA, 201 bp, Homo sapiens; identical to SEQ ID NO: 1508

SEQ ID NO: 16818 - DNA, 201 bp, Homo sapiens
gtagatgtaaagaagaggcaactcccttcgcagcccaacccataccactctgtcccccactcctcccacctctgtccagaggccccttctctggactagaygggctctcaaacttctgtgttgcctttcttccaattaggcaggctacaaaccatcagagccatttgttgtttgttccttgaggaagaggcagtctatcac

SEQ ID NO: 16819 - DNA, 201 bp, Homo sapiens
tagccctctaaatcaagggacgaacgctgctggctggagtttgctggacactttcattccacctcctaacaaagagaattcctattccttgaggtcccttrgggcagcagttaaagactacacgatccaggagcacctaggacctggggccaccttcctgcccgctttattggatggagcactgcctccccagtttctggg

SEQ ID NO: 16820 - DNA, 201 bp, Homo sapiens; identical to SEQ ID NO: 1512

SEQ ID NO: 16821 - DNA, 201 bp, Homo sapiens
ggaagcggaagccaggtatggcgttcggggcccgggagtctgggcaatacagttttgtgctcactgggtgaagaggctgacttagggcggggaaaggaggragccaggctggatctctttccgcagctctcctcacgttcccctctagtcccggcgcggcgctgctgcccaggggactggcctatcctcggccaatccgct

SEQ ID NO: 16822 - DNA, 201 bp, Homo sapiens
cactgaatctgggagtcagacagaggcagggccaggggcctgtcatggggctccggcagagagctctggagttgggggcttgaccaggagttgcaataatygtactgacagcactgggcctgataccagtactctgcaaagtaggtgttgcgtttttcttggcagcggtaggaaatgtactgtccacagcctcgaacgatg

SEQ ID NO: 16823 - DNA, 201 bp, Homo sapiens; identical to SEQ ID NO: 1515

SEQ ID NO: 16824 - DNA, 201 bp, Homo sapiens
ttctactttatttcatattcccaccacgataacgactcctttaatttaaactaaaaaccatacagggttcctgaaagggtggcaaaaaagaaaggaaaagwcaaagactgcaggacaggtgggggagggaatcagcgaatcgtcttgactgggctcttgaagttgctggcggcttggagctgcagctggtaggccatcgga

SEQ ID NO: 16825 - DNA, 201 bp, Homo sapiens
aggactcgggggcattgagggtttctagggctgcttccgaaccaagcaaggaggagccccaagttgagcagctagggagcaaaagaatggattccctcaastgggaccagcctatctctagcactcaagagtctgggagactggaggctggaggggccagtcccaaactcagatgggatcatgtggattcaggtggcacca

SEQ ID NO: 16826 - DNA, 201 bp, Homo sapiens; identical to SEQ ID NO: 1516

SEQ ID NO: 16827 - DNA, 201 bp, Homo sapiens
cttctgagatgagcagtctcagctccaccagcggcaggcacacacacatcactgagcagcaattccggaccttgtcccacctcgttccaccctttagttakactgactttaggctacttttcctttagaactaaaactaaaagatggagctgctgattaagccccttacagtataaacagacagtcatagatatccaaaca

SEQ ID NO: 16828 - DNA, 201 bp, Homo sapiens
tgaactattgaggaacaagtacatgcggcgcagctcagcaaaagacaagcccaggttcagggacagtgtgaccatggggtccaggccatcaggctccgtcscagcatggaaattggggaggggcagggagaggttcagggcctggtagaaccactgaatctgggagtcagacagaggcagggccaggggcctgtcatgggg

SEQ ID NO: 16829 - DNA, 201 bp, Homo sapiens
aagtccatatactatgtgccaagaatacaggtaaagacattcccaaccctcaaagagttcacagctggagagggaaagtgccatgttatcaatttttttcytttttttttgagatgcagtttcgctctcattgcccaggctggagtgcaatggcatgatctcggctcaccacaacctctgccccccgagttcaagggattc

SEQ ID NO: 16830 - DNA, 201 bp, Homo sapiens
ctcggggggcagaggttgtggtgagccgagatcatgccattgcactccagcctgggcaatgagagcgaaactgcatctcaaaaaaaaaagaaaaaaattgrtaacatggcactttccctctccagctgtgaactctttgagggttgggaatgtctttacctgtattcttggcacatagtatatggacttatgtttgtgaaa

SEQ ID NO: 16831 - DNA, 201 bp, Homo sapiens
tttttttttgagatggagtcttgctctgctgcccaggttggagtgcagtgccatgatcctggctcactgcaacttccaccttagcgattctcctgcctcarcctcccaagtagccgggattacaggcacatgccaccatgtcccggcaaagcctgctttctacaaaaaatatgcttgagcccaggaagcggaggttgcagt

SEQ ID NO: 16832 - DNA, 201 bp, Homo sapiens; identical to SEQ ID NO: 16697

SEQ ID NO: 16833 - DNA, 201 bp, Homo sapiens; identical to SEQ ID NO: 16698

SEQ ID NO: 16834 - DNA, 201 bp, Homo sapiens; identical to SEQ ID NO: 16701

SEQ ID NO: 16835 - DNA, 201 bp, Homo sapiens; identical to SEQ ID NO: 16702

SEQ ID NO: 16836 - DNA, 201 bp, Homo sapiens
ccctgcgacagtgacagcaggtgagcagtggatgtgcggtggttggaatcttggaagtgggtgtcacagttctcgcagtactggagggagggagtaggagmcctgcagagaaagaagaaaaagcattaagggcaggggaaggaaaaggggaagagttgaggcctcagagggggctggcagggtagaataggatcttttcag

SEQ ID NO: 16837 - DNA, 201 bp, Homo sapiens; identical to SEQ ID NO: 16704

SEQ ID NO: 16838 - DNA, 201 bp, Homo sapiens; identical to SEQ ID NO: 16705

SEQ ID NO: 16839 - DNA, 201 bp, Homo sapiens; identical to SEQ ID NO: 16707

SEQ ID NO: 16840 - DNA, 201 bp, Homo sapiens; identical to SEQ ID NO: 16708

SEQ ID NO: 16841 - DNA, 201 bp, Homo sapiens; identical to SEQ ID NO: 16710

SEQ ID NO: 16842 - DNA, 201 bp, Homo sapiens; identical to SEQ ID NO: 16714

SEQ ID NO: 16843 - DNA, 201 bp, Homo sapiens
ctgatgctccttctgccactgcttctgctgctggtgccttcattattcttcttttctttctctttctttctctggcaggttcagtctgagatctctgggastcaggagcgctgctctcatccccaatcagggcctcatagaaagctcgggctgcagccccatccagggtggactctggcttctcgggctgtggctgctgct

SEQ ID NO: 16844 - DNA, 201 bp, Homo sapiens; identical to SEQ ID NO: 16716

SEQ ID NO: 16845 - DNA, 201 bp, Homo sapiens
caccatgtcccggcaaagcctgctttctacaaaaaatatgcttgagcccaggaagcggaggttgcagtgagctgaaatcacaccattgcacaccagcctgrgcgacagagtgagatgagtgagactttgtctcaaaaaaaaaaaaaaaaaaaaaagggacaaattgccttccttcctacttaacagtgagggatccaggct

SEQ ID NO: 16846 - DNA, 201 bp, Homo sapiens; identical to SEQ ID NO: 16722

SEQ ID NO: 16847 - DNA, 201 bp, Homo sapiens; identical to SEQ ID NO: 16724

SEQ ID NO: 16848 - DNA, 201 bp, Homo sapiens; identical to SEQ ID NO: 16725

SEQ ID NO: 16849 - DNA, 201 bp, Homo sapiens; identical to SEQ ID NO: 16726

SEQ ID NO: 16850 - DNA, 201 bp, Homo sapiens; identical to SEQ ID NO: 1489

SEQ ID NO: 16851 - DNA, 201 bp, Homo sapiens; identical to SEQ ID NO: 1490

SEQ ID NO: 16852 - DNA, 201 bp, Homo sapiens; identical to SEQ ID NO: 1491

SEQ ID NO: 16853 - DNA, 201 bp, Homo sapiens; identical to SEQ ID NO: 16731

SEQ ID NO: 16854 - DNA, 201 bp, Homo sapiens; identical to SEQ ID NO: 16732

SEQ ID NO: 16855 - DNA, 201 bp, Homo sapiens; identical to SEQ ID NO: 16733

SEQ ID NO: 16856 - DNA, 201 bp, Homo sapiens; identical to SEQ ID NO: 1482

SEQ ID NO: 16857 - DNA, 201 bp, Homo sapiens; identical to SEQ ID NO: 1483

SEQ ID NO: 16858 - DNA, 201 bp, Homo sapiens; identical to SEQ ID NO: 1484

SEQ ID NO: 16859 - DNA, 201 bp, Homo sapiens; identical to SEQ ID NO: 1485

SEQ ID NO: 16860 - DNA, 201 bp, Homo sapiens; identical to SEQ ID NO: 16741

SEQ ID NO: 16861 - DNA, 201 bp, Homo sapiens; identical to SEQ ID NO: 1488

SEQ ID NO: 16862 - DNA, 201 bp, Homo sapiens; identical to SEQ ID NO: 16744

SEQ ID NO: 16863 - DNA, 201 bp, Homo sapiens
tgacaaggcctgggtcaccaccagagagtcctctctgcgtttccggatttccttcccagcaggcagcaccccaagtttcactcaccaaggccacaccccamggtgtcccagaaactggggaggcagtgctccatccaataaagcgggcaggaaggtggccccaggtcctaggtgctcctggatcgtgtagtctttaactgc

SEQ ID NO: 16864 - DNA, 201 bp, Homo sapiens
ccagccccccctcagcagcagtttgaagcccgggctggagatgggcaccccaagtggaaggttgggaggctgaggaccctgcgacagtgacagcaggtgarcagtggatgtgcggtggttggaatcttggaagtgggtgtcacagttctcgcagtactggagggagggagtaggagacctgcagagaaagaagaaaaagca

SEQ ID NO: 16865 - DNA, 201 bp, Homo sapiens; identical to SEQ ID NO: 16748

SEQ ID NO: 16866 - DNA, 201 bp, Homo sapiens
ggctcacgcctgtaatcccaacactttgggaggcagaggcgggcagatggctttgagctcaggagtttgagaccagcctgggcaaaatggcaacgcctgctttttttttttttttttttgagatggagtcttgctctgctgcccaggttggagtgcagtgccatgatcctggctcactgcaacttccaccttagcgattct

SEQ ID NO: 16867 - DNA, 201 bp, Homo sapiens; identical to SEQ ID NO: 1569

SEQ ID NO: 16868 - DNA, 201 bp, Homo sapiens; identical to SEQ ID NO: 16753

SEQ ID NO: 16869 - DNA, 201 bp, Homo sapiens; identical to SEQ ID NO: 16754

SEQ ID NO: 16870 - DNA, 201 bp, Homo sapiens; identical to SEQ ID NO: 16699

SEQ ID NO: 16871 - DNA, 201 bp, Homo sapiens; identical to SEQ ID NO: 16700

SEQ ID NO: 16872 - DNA, 201 bp, Homo sapiens; identical to SEQ ID NO: 16703

SEQ ID NO: 16873 - DNA, 201 bp, Homo sapiens
cactattctagcattttacatatattaacccattgaatcctaacaacaattcttactacccccatttctaagatgagaaaactggaacatgtagacattargttgtttgcccaagtaagtggaatcaggctttaaatccagggagctcatgtttataaccacttgactatactaccctgtcaacctacacatgaggataag

SEQ ID NO: 16874 - DNA, 201 bp, Homo sapiens; identical to SEQ ID NO: 16706

SEQ ID NO: 16875 - DNA, 201 bp, Homo sapiens; identical to SEQ ID NO: 16709

SEQ ID NO: 16876 - DNA, 201 bp, Homo sapiens; identical to SEQ ID NO: 16711

SEQ ID NO: 16877 - DNA, 201 bp, Homo sapiens; identical to SEQ ID NO: 16712

SEQ ID NO: 16878 - DNA, 201 bp, Homo sapiens; identical to SEQ ID NO: 16713

SEQ ID NO: 16879 - DNA, 201 bp, Homo sapiens
tcttcttttctttctctttctttctctggcaggttcagtctgagatctctgggagtcaggagcgctgctctcatccccaatcagggcctcatagaaagctmgggctgcagccccatccagggtggactctggcttctcgggctgtggctgctgctgcccatccttccagaggtcgctggggtcagtggctggggtgaaggt

SEQ ID NO: 16880 - DNA, 201 bp, Homo sapiens
tttttttttttttgagatggagtcttgctctgctgcccaggttggagtgcagtgccatgatcctggctcactgcaacttccaccttagcgattctcctgcvtcagcctcccaagtagccgggattacaggcacatgccaccatgtcccggcaaagcctgctttctacaaaaaatatgcttgagcccaggaagcggaggttg

SEQ ID NO: 16881 - DNA, 201 bp, Homo sapiens
gatcccgctcccaagccctgtctttctcctccctccttctctcctccctccagctcagtgtggccacccgagggggtctctccctcccagccacagctcgkgtatcccaagctgggaaatgtgtcactcggggctggggtgctgatctgtagcctagtccttcctggtccctcttgaggacagtggggatgggattggcac

SEQ ID NO: 16882 - DNA, 201 bp, Homo sapiens; identical to SEQ ID NO: 16717

SEQ ID NO: 16883 - DNA, 201 bp, Homo sapiens
cagcccgtctctcacgaagacagagcctattgaccaaaaacttcaggatctgcatctgagcagatcccaggaaggggaagtcaaagggcccaggtcagagrcccaagttcagacttcagcagcagactagggtcagactttaccaaagtcagaactcgaggttcatgtaagtccttagatcccgctcccaagccctgtctt

SEQ ID NO: 16884 - DNA, 201 bp, Homo sapiens
attagtcataatgactatagctaacattcatgtattgcatactatgcggcatgcactattctagcattttacatatattaacccattgaatcctaacaacrattcttactacccccatttctaagatgagaaaactggaacatgtagacattaggttgtttgcccaagtaagtggaatcaggctttaaatccagggagctc

SEQ ID NO: 16885 - DNA, 201 bp, Homo sapiens
tctgtgcgcgccggaccgccaaaccgagattagcaaggaccaggaccttaatataaacccagctccccattttcccgggtttctcatgcttccctaaactyggtcgccccctacagccccctgcccctgggttcttttccacatcccccaccactcctccatttcgcatccaagacttcatgaaaggctttcccagaaaag

SEQ ID NO: 16886 - DNA, 201 bp, Homo sapiens
gtgcctaccacccggcatgagcaagacaagggggtgggtggtgggagagtggggaagtgtgggaaagaaaagtgtagacaaatgggtggaacaaagaagtytaaagtttagatttgggggctagagttctggtcccagttcaactaagtgtacaagcttgataatcgtgggccttcctatcacactggcctcttccagcaa

SEQ ID NO: 16887 - DNA, 201 bp, Homo sapiens
cctcttccagcaaaaccctacccattctcatctctagaggccttgacttcccttatcaccctgcattataatatttgataacatgggccgggagtggtggytcatgcctgcaaccccagcactttgggaagccgaggccggcggatcacctgaggtcgggagttcaagaccagcttggccaacatggagaaaccccgtctc

SEQ ID NO: 16888 - DNA, 201 bp, Homo sapiens
gagggggtctctccctcccagccacagctcgggtatcccaagctgggaaatgtgtcactcggggctggggtgctgatctgtagcctagtccttcctggtcyctcttgaggacagtggggatgggattggcacggccctcaccccggggtcccagccccattcctggctcccagccccccctcagcagcagtttgaagcccg

SEQ ID NO: 16889 - DNA, 201 bp, Homo sapiens
aaaagtgaataaaccacaaatggttgatttatttctgactctcagcccgtctctcacgaagacagagcctattgaccaaaaacttcaggatctgcatctgrgcagatcccaggaaggggaagtcaaagggcccaggtcagaggcccaagttcagacttcagcagcagactagggtcagactttaccaaagtcagaactcga

SEQ ID NO: 16890 - DNA, 201 bp, Homo sapiens
ggacttatgtttgtgaaatcagtgaattggctgtagtcagggaactcctcctgggggaagtgagacttgcacgaagctgggcaattcttggtccagggggsttgaaagaataggtgggggactcccaggagggtctgggacctgaaagtgaacccagattggcagggaggtgaccttatcatgccacctggagaggctgcc

SEQ ID NO: 16891 - DNA, 201 bp, Homo sapiens
agggttgggaatgtctttacctgtattcttggcacatagtatatggacttatgtttgtgaaatcagtgaattggctgtagtcagggaactcctcctggggkaagtgagacttgcacgaagctgggcaattcttggtccaggggggttgaaagaataggtgggggactcccaggagggtctgggacctgaaagtgaacccag

SEQ ID NO: 16892 - DNA, 201 bp, Homo sapiens
gtagacaaatgggtggaacaaagaagtttaaagtttagatttgggggctagagttctggtcccagttcaactaagtgtacaagcttgataatcgtgggccytcctatcacactggcctcttccagcaaaaccctacccattctcatctctagaggccttgacttcccttatcaccctgcattataatatttgataacatgg

SEQ ID NO: 16893 - DNA, 201 bp, Homo sapiens
tgagtgctagagataggctggtcccacttgagggaatccattcttttgctccctagctgctcaacttggggctcctccttgcttggttcggaagcagcccyagaaaccctcaatgcccccgagtccttagtcttgggatgccccacatcttccatggtttctggggcactatcccagtcacttcctgaattctccgaggag

SEQ ID NO: 16894 - DNA, 201 bp, Homo sapiens
ggtccaccagaaggcatcccgggcgttgatattccccccagctcctcctgcctcatgcggttccagcagtctcctaagttctggcaggtccccctcctggrctgccctcagtatccggtgagtcatcttatcctcagcctcaagggatctcccttgtccatgtcttcctgatgctccttctgccactgcttctgctgctgg

SEQ ID NO: 16895 - DNA, 201 bp, Homo sapiens; identical to SEQ ID NO: 1574

SEQ ID NO: 16896 - DNA, 201 bp, Homo sapiens
cccagaaactggggaggcagtgctccatccaataaagcgggcaggaaggtggccccaggtcctaggtgctcctggatcgtgtagtctttaactgctgcccyaagggacctcaaggaataggaattctctttgttaggaggtggaatgaaagtgtccagcaaactccagccagcagcgttcgtcccttgatttagagggcta

SEQ ID NO: 16897 - DNA, 201 bp, Homo sapiens
gcacacatcagtggggtccaccagaaggcatcccgggcgttgatattccccccagctcctcctgcctcatgcggttccagcagtctcctaagttctggcargtccccctcctgggctgccctcagtatccggtgagtcatcttatcctcagcctcaagggatctcccttgtccatgtcttcctgatgctccttctgccact

SEQ ID NO: 16898 - DNA, 201 bp, Homo sapiens; identical to SEQ ID NO: 16739

SEQ ID NO: 16899 - DNA, 201 bp, Homo sapiens; identical to SEQ ID NO: 1487

SEQ ID NO: 16900 - DNA, 201 bp, Homo sapiens; identical to SEQ ID NO: 16745

SEQ ID NO: 16901 - DNA, 201 bp, Homo sapiens; identical to SEQ ID NO: 1567

SEQ ID NO: 16902 - DNA, 201 bp, Homo sapiens
tggtgccacctgaatccacatgatcccatctgagtttgggactggcccctccagcctccagtctcccagactcttgagtgctagagataggctggtcccasttgagggaatccattcttttgctccctagctgctcaacttggggctcctccttgcttggttcggaagcagccctagaaaccctcaatgcccccgagtcct

SEQ ID NO: 16903 - DNA, 201 bp, Homo sapiens; identical to SEQ ID NO: 16746

SEQ ID NO: 16904 - DNA, 201 bp, Homo sapiens; identical to SEQ ID NO: 16749

SEQ ID NO: 16905 - DNA, 201 bp, Homo sapiens; identical to SEQ ID NO: 1493

SEQ ID NO: 16906 - DNA, 201 bp, Homo sapiens
gaatcccttgaactcggggggcagaggttgtggtgagccgagatcatgccattgcactccagcctgggcaatgagagcgaaactgcatctcaaaaaaaaargaaaaaaattgataacatggcactttccctctccagctgtgaactctttgagggttgggaatgtctttacctgtattcttggcacatagtatatggactt

SEQ ID NO: 16907 - DNA, 201 bp, Homo sapiens
cccttcctgggaaggggtgggctggaactgggaactgttctgagatggctcccttttcttgggtggggagtaagtcgccccattgttggaagcaggaggaytcctttgtctgggggcctcagttttctttctccgtgaatagtgaggacctttatgttgggcaagggctttgtctctgccatcccttcacctttatcccac

SEQ ID NO: 16908 - DNA, 201 bp, Homo sapiens; identical to SEQ ID NO: 16758

SEQ ID NO: 16909 - DNA, 201 bp, Homo sapiens
gtagggtgtgaggtagaatggggtgtgagtggggtcagcacttctctgtgttctaggtaagtttgttcctgtcaattgggaaccccctcaaccacttccaytccccaaatacctgcgctgctaccgatgcctcttggagaccaaggagttagggtgccttctgggatctgacatctgcctcaccccagctggcagcagctg

SEQ ID NO: 16910 - DNA, 201 bp, Homo sapiens
tcatgacttaattatcattggtttggtattttccgtcagagtacaggccacacagatttgttaacacgtgtgcaaaacactatataggtaaaagcagatgygtacgatgccatttccatcaagcacagacagaactcatctaagctactaccagtcaggacagcggctaccccagagctgggaagagcacctgggagaggg

SEQ ID NO: 16911 - DNA, 201 bp, Homo sapiens; identical to SEQ ID NO: 16790

SEQ ID NO: 16912 - DNA, 201 bp, Homo sapiens
ccactcacctgagggctggggtctaggaggttgtgaaggcagcattgggagccatgcccccatccccacagtgcggggctagcaggagaggaggaggtagrtctcattgtacacatccgtcttctggagagaacaacctctcctaccatcccttccttctacaccttctctgcctgtcataggtggctgcaggaggggtcc

SEQ ID NO: 16913 - DNA, 201 bp, Homo sapiens
acacactcctgactttgccctttctcctgcagggggtgccattcccgcagaatgaggctaatgccatggatgtggtggtccagtttgccatccaccgcctrggcttccagccccaggacatcatcatctacgcctggtccatcggcggcttcactggtaccagcctccctcccatcccccactgtagacacattcatgacc

SEQ ID NO: 16914 - DNA, 201 bp, Homo sapiens
ctaggccttcagcccctaacctgagctttcctcaggcagcaggtccccaaacctccccggtccctgatgtgcctactgttatcacaactgtgcagcctccytggcccctcccgcctccttcttcagttcttcctgcatacaaccaccccaggagcccatggttgccccctcctgcttacggctcatgagctttctaggatc

SEQ ID NO: 16915 - DNA, 201 bp, Homo sapiens
tccccaaacctccccggtccctgatgtgcctactgttatcacaactgtgcagcctccctggcccctcccgcctccttcttcagttcttcctgcatacaacmaccccaggagcccatggttgccccctcctgcttacggctcatgagctttctaggatccgatttcacctacccagtgcttctgctggtttccaggttcaac

SEQ ID NO: 16916 - DNA, 201 bp, Homo sapiens
aacgcaatctcgagccgctcccccaacaaaccgtggccctctcccgaccgggtcatctacagccccgcccctcgtttgcctggctccattcccctaacctkggcgttctgtcctcaggccccgccttctttgtttcgtcactcggttgcttaccctcaggtatcccttaactctaggtaggagcactcagaagggacaccg

SEQ ID NO: 16917 - DNA, 201 bp, Homo sapiens
acggtaggttgaggctgcagtgagctgtgatcgtgccaccggactccagcttgggtgacagagtgagactctgtctcaaaaaaaaaaaaaaaaagcaaataggggtgcccagtctcacctcccataccctggggacaaaggacacccctccctggacatggccattagggactctgctgaactgcccctactgccactttc

SEQ ID NO: 16918 - DNA, 201 bp, Homo sapiens
aagggggctgcgaaaggaccaggcccaggtagaaggaggtgggtgagaaggccactctttttttgagacagtctcactgtcacctaggctggagtgcagtsgtgtgatcttggctcattgcaacttctgcctcccaggttcaagtgattcttctgcctcagcctcccgagtagctgggattacaagcacatgccaccacac

SEQ ID NO: 16919 - DNA, 201 bp, Homo sapiens
ctcccgggttcaagcgattctcatgcctcagcctcccgaataactgggattacaggcataagccaccaagcccagctaatttttgtatatttagtagagayggggtttcaccatgttggccaggctggtctcgaactcctgacctcaggtacctgcccgccttggcctcccaaagtgctgggattacaggcgtgagccacc

SEQ ID NO: 16920 - DNA, 201 bp, Homo sapiens
tgcaacctccacctcccgggttcaagcgattctcatgcctcagcctcccgaataactgggattacaggcataagccaccaagcccagctaatttttgtatwtttagtagagacggggtttcaccatgttggccaggctggtctcgaactcctgacctcaggtacctgcccgccttggcctcccaaagtgctgggattacag

SEQ ID NO: 16921 - DNA, 201 bp, Homo sapiens
ctgcaacctccacctcccgggttcaagcgattctcatgcctcagcctcccgaataactgggattacaggcataagccaccaagcccagctaatttttgtawatttagtagagacggggtttcaccatgttggccaggctggtctcgaactcctgacctcaggtacctgcccgccttggcctcccaaagtgctgggattaca

SEQ ID NO: 16922 - DNA, 201 bp, Homo sapiens
aggccgagaggaagcgacaaacgccaagtgcaatggagagggctctgcaatcctatttggatcccaaacctcactaaccctttttttttttttttttttttgagacacagtttcactcttgttgcccaggctggagtgcaatggtgcaatctcggctcatcgccacctccaccttccaggttcaagtgattctccggcctc

SEQ ID NO: 16923 - DNA, 201 bp, Homo sapiens
ccagtcattcatttatatttaggttaaagaccctctctctggttcctctctagaacgcaatctcgagccgctcccccaacaaaccgtggccctctcccgaycgggtcatctacagccccgcccctcgtttgcctggctccattcccctaaccttggcgttctgtcctcaggccccgccttctttgtttcgtcactcggttg

SEQ ID NO: 16924 - DNA, 201 bp, Homo sapiens
gaggatcacggtaggttgaggctgcagtgagctgtgatcgtgccaccggactccagcttgggtgacagagtgagactctgtctcaaaaaaaaaaaaaaaaagcaaataggggtgcccagtctcacctcccataccctggggacaaaggacacccctccctggacatggccattagggactctgctgaactgcccctactgc

SEQ ID NO: 16925 - DNA, 201 bp, Homo sapiens
tgaggatcacggtaggttgaggctgcagtgagctgtgatcgtgccaccggactccagcttgggtgacagagtgagactctgtctcaaaaaaaaaaaaaaaaagcaaataggggtgcccagtctcacctcccataccctggggacaaaggacacccctccctggacatggccattagggactctgctgaactgcccctactg

SEQ ID NO: 16926 - DNA, 201 bp, Homo sapiens
tctcctgtcatgggcccagcactctcccaaacggaaactctctcagcctcctaagctgcaccccaagtcttgttcccataatcccataagacattgctccratcctgtcttttttttttttgctgctctgtcacccaggctggagtgcagtggcgcaatcttggctcactgcaacctccacctccccagttcaagcaattc

SEQ ID NO: 16927 - DNA, 201 bp, Homo sapiens
ttcccgatgcctgctcttccaccgaccccccacctttcttaagttagcaaaaacgtaacacataatatgtgctaggcactgttctaaacacttgcaatccrctgaggcaggtattattactatgtgcattttacagatgaggaaacaggtgcagaaaggtcataaccttgcctgagtctcacagatgctgagccagaattt

SEQ ID NO: 16928 - DNA, 201 bp, Homo sapiens
caagctccgcctcctgggttcacgccattctcctgcctcagcctccctagtacctgggactacaggcgcctgccaccacgcctggctaattttttgtattyttagtagagacggggtttcactgtgttagccaggatggtctcgatctcctgacctcgtgatccacccgcctctgcctcccaaagtgctgggattacaggc

SEQ ID NO: 16929 - DNA, 201 bp, Homo sapiens
tgtttatagtttgtggaaagtgggggaccatcccccttctcaccactgttcctcttgcacgtttcccctcattcatgtggctgtacttaaccttctccaayatacatcctgcattacatgaatggattattcctaataattaataaaaaggtattttttctactatcaggctaattgtataacttctcaagtgtccaggga

SEQ ID NO: 16930 - DNA, 201 bp, Homo sapiens
cataagacattgctccaatcctgtcttttttttttttgctgctctgtcacccaggctggagtgcagtggcgcaatcttggctcactgcaacctccacctcyccagttcaagcaattcttgtgcctcagtctcccaagcagctgggattaaaggtgcacgccaccacgcccagctaattttttgtatttttagtagagatgg

SEQ ID NO: 16931 - DNA, 201 bp, Homo sapiens
caggcgtgagccaccgtgcccagcctctcttcccttttcttcagagccacactctgtctccacttccactaaccttctctcctcaatctgtagctgaatakcttctaccctatcaaggtgcgcagctttgacggggaccctccagatctccaggtgcccttgcctgtcctcaagctgtctgcttccgcatctgtctgcagt

SEQ ID NO: 16932 - DNA, 201 bp, Homo sapiens
cccctagggagatgggtgtcaggactcagtgaagtgaaatggggccgaggaagccagagactgacaagagagcaagagaggacaggaggcagaacaacacyaggacaggcgggggttggtggagacagtgaggcagggacacaaaattgccaagtcaggacatctgcacagaattctattcctcatccttttttttggaga

SEQ ID NO: 16933 - DNA, 201 bp, Homo sapiens
gtgaggacctttatgttgggcaagggctttgtctctgccatcccttcacctttatcccactctagggggcctggtgaccaggaccgtgaggcagcatctcwatctaaacaacgcggagcagctgtgcaggtgagggccggccagcgtccggcattgaacacctgccccccatacagctctgctgggcgctcaaaccctgaa

SEQ ID NO: 16934 - DNA, 201 bp, Homo sapiens
ggcagcactctgccctccccacatcattgctggtggacttgtctcccctactagactgtgccctgtgagggtggagactttgtgcagggttgtatccccarcatctgatgcagtgattcaataaacatctgtccaattaataggaaagacagttccttttctcattcccctattgctggtcccctgccctcaagcaggatg

SEQ ID NO: 16935 - DNA, 201 bp, Homo sapiens
agccgcttcgggctccggatgtccgctggggcccgacgcttgggtcccgacgcgcggttcgcactttccaggtttcttccccagggaacagagcttgagcsgggggccacccccccgtcctaccggagttctgaggtgcggtcaggcgcggagagcggacgcccagcgccagattctgtgggctccggagttcaggcccac

SEQ ID NO: 16936 - DNA, 201 bp, Homo sapiens; identical to SEQ ID NO: 1580

SEQ ID NO: 16937 - DNA, 201 bp, Homo sapiens
cacagacagaactcatctaagctactaccagtcaggacagcggctaccccagagctgggaagagcacctgggagaggggaacagaggcaggcttggctgcrggtaaaggtcttcacgctgatttggtggctggttacacagatgtgtggtttacaaaaatccatcttgtgatatgtgcaagcttctgaatgttttaccaaa

SEQ ID NO: 16938 - DNA, 201 bp, Homo sapiens
ccattggagggaggagaggggctgtggatttcttgaaggcgtcccactcacctgagggctggggtctaggaggttgtgaaggcagcattgggagccatgcycccatccccacagtgcggggctagcaggagaggaggaggtagatctcattgtacacatccgtcttctggagagaacaacctctcctaccatcccttcctt

SEQ ID NO: 16939 - DNA, 201 bp, Homo sapiens
attctccggcctcagcctcccgagtagctgtaattacaggtatgcgctaccaagcccggctaattttgtatttttagtagcgatggggtttctccatattrgtcaggctggtctcaaactcccaatctcaggtgatccgcctgcctcagcctcccaaagtgctgggattacaggcgtgagccactgcgccaggcattaacc

SEQ ID NO: 16940 - DNA, 201 bp, Homo sapiens
tggtcagccattggagggaggagaggggctgtggatttcttgaaggcgtcccactcacctgagggctggggtctaggaggttgtgaaggcagcattgggakccatgcccccatccccacagtgcggggctagcaggagaggaggaggtagatctcattgtacacatccgtcttctggagagaacaacctctcctaccatcc

SEQ ID NO: 16941 - DNA, 201 bp, Homo sapiens
cactgcaacctctgcctcccgggttcaagtgattctcctgtctcagcctcctgagtagctgggattacagaggtgtgccaccacacccagctgatttttcwatttttaatagagagcgggttttaccatgttggccaggctggtctcaaactcccaatctcaagtgatccgcccacctcggcctcccaaagtgctgggatt

SEQ ID NO: 16942 - DNA, 201 bp, Homo sapiens
tagtagcatcccactgtaaacattattccacatttaagttaggggaactgaatgttccgatatcagtttgtaaacagcttccttgttttattgacctgctstatactactccatagcatgcgcatatcacagctgatttccccatcccactattgatgggcattttggtcatttctctcaagcagggcagcagcaaacatc

SEQ ID NO: 16943 - DNA, 201 bp, Homo sapiens
agatatttgcactgtggaattcaggaagggtgaggtgtcaagagtccagcctggggaagaaccaaaagtcctgaactattgaggaacaagtacatgcggcrcagctcagcaaaagacaagcccaggttcagggacagtgtgaccatggggtccaggccatcaggctccgtcccagcatggaaattggggaggggcagggag

SEQ ID NO: 16944 - DNA, 201 bp, Homo sapiens; identical to SEQ ID NO: 16773

SEQ ID NO: 16945 - DNA, 201 bp, Homo sapiens
ctcattcatgtggctgtacttaaccttctccaacatacatcctgcattacatgaatggattattcctaataattaataaaaaggtattttttctactatcwggctaattgtataacttctcaagtgtccagggagccaggggcaggtagtggggagagcagaggccccaaagagctgggctttgggaaaccctaactctag

SEQ ID NO: 16946 - DNA, 201 bp, Homo sapiens; identical to SEQ ID NO: 16774

SEQ ID NO: 16947 - DNA, 201 bp, Homo sapiens
cccaggtcctgggtggggagatcagggaaagtgaatgtttcctgcccattatcttcagtgcactatctccagtgttctatccccatcctctccagatagtyccctaaccaagtgaagtaggttaagaaaaaaacaagggataacatagggggaatggggttggcctatagggtcagtgggatgagagcatgggtggtgggg

SEQ ID NO: 16948 - DNA, 201 bp, Homo sapiens
gaatggggtgtgagtggggtcagcacttctctgtgttctaggtaagtttgttcctgtcaattgggaaccccctcaaccacttccattccccaaatacctgygctgctaccgatgcctcttggagaccaaggagttagggtgccttctgggatctgacatctgcctcaccccagctggcagcagctgcatcactctccacaa

SEQ ID NO: 16949 - DNA, 201 bp, Homo sapiens
caactgggactcattatggaagaatggggtgagaggagacatgaggaaagaccctcttatttgtgattctctgtgttcatgttgctgtttatagtttgtgkaaagtgggggaccatcccccttctcaccactgttcctcttgcacgtttcccctcattcatgtggctgtacttaaccttctccaacatacatcctgcatta

SEQ ID NO: 16950 - DNA, 201 bp, Homo sapiens
gtcatctctctccctgaccagcctcaatttatagccgatgggaggtggaagaggactggtgtctgtctgtcctccgctcctaccaggcagaacacgggccygacttcccctggagcgtgggtaaggagctcctggggcaggagagagggtgggaagggcctaggaaggggatgaatacccagatgtgtggcctattttgag

SEQ ID NO: 16951 - DNA, 201 bp, Homo sapiens
agaagggacaccgtcatctgctgctgtcgccatggcgattattcaacgccctgcctcttcaccccaggaaaaccttcgcggaacccgtcaccatggaaacsaactctctggactcttagcgcgccctgggctggccctgctgggtggacaggagaggagcaaaacgcaacaaagacgggattaattactcggaggccgcgc

SEQ ID NO: 16952 - DNA, 201 bp, Homo sapiens
actctcccaaacggaaactctctcagcctcctaagctgcaccccaagtcttgttcccataatcccataagacattgctccaatcctgtcttttttttttttgctgctctgtcacccaggctggagtgcagtggcgcaatcttggctcactgcaacctccacctccccagttcaagcaattcttgtgcctcagtctcccaag

SEQ ID NO: 16953 - DNA, 201 bp, Homo sapiens; identical to SEQ ID NO: 16778

SEQ ID NO: 16954 - DNA, 201 bp, Homo sapiens
ctactcgggaggctgaggcaggagaatcgctggaacccgggaggtggaggttgtagtgagcagagatcatgccactgcactccaccctgggtgacagagcragactttgtctcaaacaaacaaaaaaacagcaccagagttcaagagagaaaattacacaaaagtcatatagatgctagtggtacaacagacggaggccta

SEQ ID NO: 16955 - DNA, 201 bp, Homo sapiens
aggaaccactgtgcctttctcaggtcagcctgtctgggcagaatccacactagagattcttttctagggggaagaacagcaccagagctcagacaggcacrgtggctcacacctgtaatcccggcactttgggaggtcgaggagggcagattacgaggtcaggagttcgagaccagcctgaccaacatggtgaaaccccgt

SEQ ID NO: 16956 - DNA, 201 bp, Homo sapiens
aggaatggaggaaccactgtgcctttctcaggtcagcctgtctgggcagaatccacactagagattcttttctagggggaagaacagcaccagagctcagmcaggcacagtggctcacacctgtaatcccggcactttgggaggtcgaggagggcagattacgaggtcaggagttcgagaccagcctgaccaacatggtga

SEQ ID NO: 16957 - DNA, 201 bp, Homo sapiens
tggtcaggctggtctcaaactcccaatctcaggtgatccgcctgcctcagcctcccaaagtgctgggattacaggcgtgagccactgcgccaggcattaamcctctttaatctgtgtttacctgcccacacctgagcctgaccccacaaacaatgtgacacagttttagcccagtcccagtttattgtggaggaaaatggg

SEQ ID NO: 16958 - DNA, 201 bp, Homo sapiens
gatttttctatttttaatagagagcgggttttaccatgttggccaggctggtctcaaactcccaatctcaagtgatccgcccacctcggcctcccaaagtkctgggattaccggcgtgagccaccatgcccggcctcctcgtccttcttgctgctagttcagtctggtactgggtcttagagacatggacaagacagggga

SEQ ID NO: 16959 - DNA, 201 bp, Homo sapiens; identical to SEQ ID NO: 16822

SEQ ID NO: 16960 - DNA, 201 bp, Homo sapiens
gtttacaaaaatccatcttgtgatatgtgcaagcttctgaatgttttaccaaaaaggtttgaaaataagtaaatcagccaggtgagcatggtggtgtgcawctgtagtcccagctacttggaggctgaggcagaagaatctcttgagcccaggagttcaaggccagcttgggcaacatagtaagaaccttagaaaaaaaag

SEQ ID NO: 16961 - DNA, 201 bp, Homo sapiens; identical to SEQ ID NO: 16828

SEQ ID NO: 16962 - DNA, 201 bp, Homo sapiens
agggacccccagctctgctgagctgtcctcttgtcctgccttggtatgtgatttgctctagacacaaaaagagaaagaggaaatgaaagccctcctatggygaatgccagaaagttagtgggcatcctcggcagtgctgtcagaccagagctgtgtgggggctaggggcgtttagagggctatgttggtgggaagggggct

SEQ ID NO: 16963 - DNA, 201 bp, Homo sapiens; identical to SEQ ID NO: 16788

SEQ ID NO: 16964 - DNA, 201 bp, Homo sapiens; identical to SEQ ID NO: 8009

SEQ ID NO: 16965 - DNA, 201 bp, Homo sapiens; identical to SEQ ID NO: 7988

SEQ ID NO: 16966 - DNA, 201 bp, Homo sapiens; identical to SEQ ID NO: 7823

SEQ ID NO: 16967 - DNA, 201 bp, Homo sapiens; identical to SEQ ID NO: 7971

SEQ ID NO: 16968 - DNA, 201 bp, Homo sapiens; identical to SEQ ID NO: 7824

SEQ ID NO: 16969 - DNA, 201 bp, Homo sapiens; identical to SEQ ID NO: 7801

SEQ ID NO: 16970 - DNA, 201 bp, Homo sapiens; identical to SEQ ID NO: 7828

SEQ ID NO: 16971 - DNA, 201 bp, Homo sapiens; identical to SEQ ID NO: 7829

SEQ ID NO: 16972 - DNA, 201 bp, Homo sapiens; identical to SEQ ID NO: 7927

SEQ ID NO: 16973 - DNA, 201 bp, Homo sapiens; identical to SEQ ID NO: 7768

SEQ ID NO: 16974 - DNA, 201 bp, Homo sapiens; identical to SEQ ID NO: 7803

SEQ ID NO: 16975 - DNA, 201 bp, Homo sapiens; identical to SEQ ID NO: 7975

SEQ ID NO: 16976 - DNA, 201 bp, Homo sapiens; identical to SEQ ID NO: 7805

SEQ ID NO: 16977 - DNA, 201 bp, Homo sapiens; identical to SEQ ID NO: 7977

SEQ ID NO: 16978 - DNA, 201 bp, Homo sapiens; identical to SEQ ID NO: 7978

SEQ ID NO: 16979 - DNA, 201 bp, Homo sapiens; identical to SEQ ID NO: 7979

SEQ ID NO: 16980 - DNA, 201 bp, Homo sapiens; identical to SEQ ID NO: 7806

SEQ ID NO: 16981 - DNA, 201 bp, Homo sapiens; identical to SEQ ID NO: 7980

SEQ ID NO: 16982 - DNA, 201 bp, Homo sapiens; identical to SEQ ID NO: 7840

SEQ ID NO: 16983 - DNA, 201 bp, Homo sapiens; identical to SEQ ID NO: 7982

SEQ ID NO: 16984 - DNA, 201 bp, Homo sapiens; identical to SEQ ID NO: 7993

SEQ ID NO: 16985 - DNA, 201 bp, Homo sapiens; identical to SEQ ID NO: 7994

SEQ ID NO: 16986 - DNA, 201 bp, Homo sapiens; identical to SEQ ID NO: 7996

SEQ ID NO: 16987 - DNA, 201 bp, Homo sapiens; identical to SEQ ID NO: 7809

SEQ ID NO: 16988 - DNA, 201 bp, Homo sapiens; identical to SEQ ID NO: 7948

SEQ ID NO: 16989 - DNA, 201 bp, Homo sapiens; identical to SEQ ID NO: 7949

SEQ ID NO: 16990 - DNA, 201 bp, Homo sapiens; identical to SEQ ID NO: 7950

SEQ ID NO: 16991 - DNA, 201 bp, Homo sapiens; identical to SEQ ID NO: 7951

SEQ ID NO: 16992 - DNA, 201 bp, Homo sapiens; identical to SEQ ID NO: 7779

SEQ ID NO: 16993 - DNA, 201 bp, Homo sapiens; identical to SEQ ID NO: 7781

SEQ ID NO: 16994 - DNA, 201 bp, Homo sapiens; identical to SEQ ID NO: 7810

SEQ ID NO: 16995 - DNA, 201 bp, Homo sapiens; identical to SEQ ID NO: 7782

SEQ ID NO: 16996 - DNA, 201 bp, Homo sapiens; identical to SEQ ID NO: 7811

SEQ ID NO: 16997 - DNA, 201 bp, Homo sapiens; identical to SEQ ID NO: 7783

SEQ ID NO: 16998 - DNA, 201 bp, Homo sapiens; identical to SEQ ID NO: 7812

SEQ ID NO: 16999 - DNA, 201 bp, Homo sapiens; identical to SEQ ID NO: 7784

SEQ ID NO: 17000 - DNA, 201 bp, Homo sapiens; identical to SEQ ID NO: 7813

SEQ ID NO: 17001 - DNA, 201 bp, Homo sapiens; identical to SEQ ID NO: 7786

SEQ ID NO: 17002 - DNA, 201 bp, Homo sapiens; identical to SEQ ID NO: 7787

SEQ ID NO: 17003 - DNA, 201 bp, Homo sapiens; identical to SEQ ID NO: 7789

SEQ ID NO: 17004 - DNA, 201 bp, Homo sapiens; identical to SEQ ID NO: 7790

SEQ ID NO: 17005 - DNA, 201 bp, Homo sapiens; identical to SEQ ID NO: 7960

SEQ ID NO: 17006 - DNA, 201 bp, Homo sapiens; identical to SEQ ID NO: 7961

SEQ ID NO: 17007 - DNA, 201 bp, Homo sapiens; identical to SEQ ID NO: 7962

SEQ ID NO: 17008 - DNA, 201 bp, Homo sapiens; identical to SEQ ID NO: 7792

SEQ ID NO: 17009 - DNA, 201 bp, Homo sapiens; identical to SEQ ID NO: 7793

SEQ ID NO: 17010 - DNA, 201 bp, Homo sapiens; identical to SEQ ID NO: 7818

SEQ ID NO: 17011 - DNA, 201 bp, Homo sapiens
gggccccagctccattggcaggagtgaattcagcacatccgggtcctgtaatggaagagtcagggagcaggggggcatagagttttctggccctccctccwgacccacaagaccaggatgttagattaggtcgggggcacacctgagtgcagtactgcagacgctccaagatgctggcaaagctagggcggagctcaggct

SEQ ID NO: 17012 - DNA, 201 bp, Homo sapiens
ctgctggtatagtagacctaaggcttgagcaagtgcctgatacaagaagaaaaggaattgcccctttttcttggcagccaggacagagacccagtgcccarcctgcttatacctccaaccctgcccatccatcgcctgacagacaggagtgcaggacaagttctcgcccctcattgccctccctacctttccagttctggc

SEQ ID NO: 17013 - DNA, 201 bp, Homo sapiens
ccagtgagaagatctcccagagcagcaccccaaaagacctgcatcacaagtgggggaaccaagtgaggcccgtcaggtgtagcctcccctcacatgaggtkgctggaaaggacaggattagcctcaggggaggggaacagtggggaaggggaggggaagggtgttatcaccaggaatctgtcttggatgtgaagatgccct

SEQ ID NO: 17014 - DNA, 201 bp, Homo sapiens
gtccccaatcttggccactcggctgggtccagcgcagctcagcaggcagttccgggcggcaatatccctacagagtaggcaaaaaaaatcactgccagaayctagaagttcttgctcttcctgatctatttccttaaaagctgtgtggaagggctgttccttggggagggagttgggatgggggtcccctgagccaggact

SEQ ID NO: 17015 - DNA, 201 bp, Homo sapiens
ttttttttgtggcactcaagaggccatcccttccacctccatactagtcagtctgattttttccacatcccttctactcaagcatcaaagactgagaaaamtgagtcataaaagaacagatgttctagggtttcaacgtttattcctggcatgactaagaggacggaagagcctgctgacctcatcctacagctatacagg

SEQ ID NO: 17016 - DNA, 201 bp, Homo sapiens
tccatactagtcagtctgattttttccacatcccttctactcaagcatcaaagactgagaaaaatgagtcataaaagaacagatgttctagggtttcaacrtttattcctggcatgactaagaggacggaagagcctgctgacctcatcctacagctatacagggactcccaggccttgccccaagacgtacccttatgtt

SEQ ID NO: 17017 - DNA, 201 bp, Homo sapiens
aggctgctctcgaactcctgacctcaagtgatgcatctgccttggcctcccaaagtgctgagattacaggtgtcagccaccgcgcctgggcttacattcayttttaaaagcgtgatgttctctgggggaggtatctccctaaggtggaaggtggcagtgatttgagttccatgacacttgcacaactcctgccatgcttgg

SEQ ID NO: 17018 - DNA, 201 bp, Homo sapiens
tagtcagtctgattttttccacatcccttctactcaagcatcaaagactgagaaaaatgagtcataaaagaacagatgttctagggtttcaacgtttattmctggcatgactaagaggacggaagagcctgctgacctcatcctacagctatacagggactcccaggccttgccccaagacgtacccttatgttttctgac

SEQ ID NO: 17019 - DNA, 201 bp, Homo sapiens
ctgggctcaaataatcctctcacctcagcctcctaagtagctgggaccacaggtgcatgccaccacactcagctttttttttttttttttttttttttttkagacaagttatcactctgttgcccaggctagagtgtggagtgtggtggtggagtgtggtggtgatctcagctcactgcagcctcgacctcccaggctcaa

SEQ ID NO: 17020 - DNA, 201 bp, Homo sapiens
acatcccattttccaggcccttttttcttccctagttttgtacctgagggtgatgtttctctagaagagatgcagccctcagtcatgataaatcctgaaattttttttttttttttttttttttgagacggggtctctcaatctgttgcccaggctggagggcaatggcttcatcacggctgactgcagcctcaacctccc

SEQ ID NO: 17021 - DNA, 201 bp, Homo sapiens
ctggcggtcaggcgcagtggctcacacctgtaatccgagcaccttgggaggctgaggcaggcagatcacctgaggtcaggagttcgagaccagcctggcccattaatgtagtgaagccctgtctctactaaaaatacaaaaaattagccaggcgtggtggcacacacctgtaatcccagctacatgggaggctgaggcagg

SEQ ID NO: 17022 - DNA, 201 bp, Homo sapiens
tggcggtcaggcgcagtggctcacacctgtaatccgagcaccttgggaggctgaggcaggcagatcacctgaggtcaggagttcgagaccagcctggcccattaatgtagtgaagccctgtctctactaaaaatacaaaaaattagccaggcgtggtggcacacacctgtaatcccagctacatgggaggctgaggcagga

SEQ ID NO: 17023 - DNA, 201 bp, Homo sapiens
ggcggtcaggcgcagtggctcacacctgtaatccgagcaccttgggaggctgaggcaggcagatcacctgaggtcaggagttcgagaccagcctggcccattaatgtagtgaagccctgtctctactaaaaatacaaaaaattagccaggcgtggtggcacacacctgtaatcccagctacatgggaggctgaggcaggaa

SEQ ID NO: 17024 - DNA, 201 bp, Homo sapiens
gcggtcaggcgcagtggctcacacctgtaatccgagcaccttgggaggctgaggcaggcagatcacctgaggtcaggagttcgagaccagcctggcccattaatgtagtgaagccctgtctctactaaaaatacaaaaaattagccaggcgtggtggcacacacctgtaatcccagctacatgggaggctgaggcaggaaa

SEQ ID NO: 17025 - DNA, 201 bp, Homo sapiens
gtggaatgtcatggctctctgcagcctcgacctcctgggctcaaataatcctctcacctcagcctcctaagtagctgggaccacaggtgcatgccaccacrctcagctttttttttttttttttttttttttttgagacaagttatcactctgttgcccaggctagagtgtggagtgtggtggtggagtgtggtggtgatc

SEQ ID NO: 17026 - DNA, 201 bp, Homo sapiens
attgccatccagcacgactggcagcccactttccttttttttaagacagagttttgctcttgtcgcccaggctggagtgcaatggcatgatgacagcccayttttcaaatgaccctatgctatgcaagaatcctgtgctatgcaaggttattcacagtgcaggtggctcttcagtgcagtgcaggagtgggctcagggact

SEQ ID NO: 17027 - DNA, 201 bp, Homo sapiens
caggcatggtgactcacatctgtagtcccagctactctggaggctgaggtgggaggatcacctgaaccctggaagtccaggatgcagttagctgtgatcgyaccactggactccagcctggacaatgggagtgagaccttgtctcaaaaaaaaaaaaaaaaaaaaagtattttgtaacctgctagctaggactggccttag

SEQ ID NO: 17028 - DNA, 201 bp, Homo sapiens
tcccctccagacatcagttccagcagaatgaggcgaggggtggccctgaggctgagccccacacaccgcacaatgttctgatggcgaaacttgctgagtgrggtgggggacatatcccgttaccaggagggagacggaaaccatgttttaggctccacaaagctggagaggccctctgtgtcccctgacttgctacctcag

SEQ ID NO: 17029 - DNA, 201 bp, Homo sapiens
ctctagtcattgtccttcccttcagggtgttccgctctcctacccccagccagaagtcccactcctctcaccttgatagctacctgcaggggactggagtycccaggaaggccaattaccagtccctcatacacctccccaaaggcaccatggcccagggctctgcaggaagacacgttggaagggagtgggcaggcggcc

SEQ ID NO: 17030 - DNA, 201 bp, Homo sapiens
gtcccgcatgaccagaggtgatggctggccctgggtcaggcagagggggcatcagtccatgtaggtctcagacacatggacagggtctttagaggggcctggggggggctaagacaagggtctcaccaggtgtggccgactgtgcctcaggaaactcttcatgtcccctccagacatcagttccagcagaatgaggcgagg

SEQ ID NO: 17031 - DNA, 201 bp, Homo sapiens
ggagcgcaaaccgggggcttcagatgctaagtccaggctcttgacagctcactggagacgctggaatcaccttcactgcgcctgtatcagcacccgccacwcaggcgcacaaataaaccttcccagagtgaatgaatgaattaatgactcatccagccccagctgcttccggtgggtcgggggcgtggcgagaccctgttt

SEQ ID NO: 17032 - DNA, 201 bp, Homo sapiens
tcttttttaaacgaagtctcactctgtcatgcaggctggagtgcaatagcgcgatctcggctcactgcaacctctgcctctcgggttcaagtgattctccygcctcagtctcccgagtagctgggactacaggcaagcgccacaacgcccagctattttttgtgtttttagtagacacagggtttcaccatgttggccagg

SEQ ID NO: 17033 - DNA, 201 bp, Homo sapiens
gacgcttcgtacccagaatcaggaccccacacaccataaggaggctcagtgttgaggttgccaccacagccaccatcagaaccagagggcctgggggcttrtgcaggtctagggagaaagagagacacctccagtgggaaggtcttctctgttcctttaccctcaagttttacccacgcttcaagactcagctcaagtgtt

SEQ ID NO: 17034 - DNA, 201 bp, Homo sapiens
acgcaggaagtcaggggacctagccaggatacactgccttttccatcaactggctgtgtgtccttaacctccctggtggagccacttaacctctttggtasttccgtaatgtgaatgaggaggatagatggatataaggccccttactgctctaagaatctatgggattggatttcagttcagcatccatttccaggtttg

SEQ ID NO: 17035 - DNA, 201 bp, Homo sapiens
cgaaggactttctttagatccacgtttcgcaagtgtccctgaggccgaggaagaggcgaggggcgcccccggcctcgggcgtctggggcctgcccataagkccgggtcggcgcggcggggcggggagagctgtggccgcgcgcctgctccgccgcacaatcggctgggacaaggcagggaagctgtggcgacctgcagggg

SEQ ID NO: 17036 - DNA, 201 bp, Homo sapiens
taggtcggggggcggatgccggggcttcccaggatgtggagtgtggggcagtgagaggccccccgccccgcctcttcggaaaagcctgagcagcagctccsggggcgcggaagctctgacacctgagagccggtgcaggcgaaagggcgcgaagcgcgggcgcgtcccgcttccctcttccgcccgcagggactcggcgaa

SEQ ID NO: 17037 - DNA, 201 bp, Homo sapiens
agccagggcaaaaaagagggcagatgcgggccagagtcaaggtgggagtgcatgatgaggacttccctggtccctgcagacgccctgggcgggaggcaatycctgggctccaagagtcatgattttttttcttttttaaacgaagtctcactctgtcatgcaggctggagtgcaatagcgcgatctcggctcactgcaacc

SEQ ID NO: 17038 - DNA, 201 bp, Homo sapiens
gtcgtgggtcacttataccttagtgcaaatcgttttataaatttaaactgattgctcttcccaccaccacgaccacagggagtgctagtttgatagggcarttggaacatggggagggtattgggctggtagagagcttcaaccagagcctggatgactggaggcagggagcaagggtgagtgccaaagacagagcactca

SEQ ID NO: 17039 - DNA, 201 bp, Homo sapiens
gcaaaggtggccatccagtagagaagggcccccaggcaggtctcagtgttccccagaagtcaaaactcagactgccttattgctgcacatcacttcaccaygcacaaagcactttctcaggccacatcccatttaacccccaaagggaggcaggatggtagcatcctgctggggatactttggaacctgctggggcagttg

SEQ ID NO: 17040 - DNA, 201 bp, Homo sapiens
catgtgtaactgtgctaaaaggcaagtgcctctgtggggaggcggcagacacagttgacatgagccaacctgtgtacttcagagaggacacagggctgccragttgcgggtggtaagaggagaggtccagaggatgggatgctctcaagattagctggaggctagaagagataaggggcacaccaaaaaaacaaaaacaaa

SEQ ID NO: 17041 - DNA, 201 bp, Homo sapiens
ccttcctatcttagaatcccagaggagtctaccacggctctgctgcggtgagtggtcttgaagtcagccccgggaccccgcagaaacccatcccagctcaytggagaggagcagccttgaatcaactgtgcctgctagacgcttcgtacccagaatcaggaccccacacaccataaggaggctcagtgttgaggttgccac

SEQ ID NO: 17042 - DNA, 201 bp, Homo sapiens
ggctagagtgcagtggctcgatcacagctcactgcaacctccacctcccagattcaagcgattctcctgcctcagcctcccaagtagctgggaccacaggygcatgccaccatgtccggctaatttttgtatttttagtagagacggggtttcaccatgttggctaggatggtcttgatctcttgaccttgtgatccgccc

SEQ ID NO: 17043 - DNA, 201 bp, Homo sapiens
catcttattttcatggcttaagatttctaggtccagataaaaaccaagggtgccctgggccttgccagctaatgagtgcatagaatccagggatagcaagrgaggcttggagagccttttctttctccagccctgttctttctccaggccctgccaggctggccttcctgccctgggcctgtgtacaggtttgtttctgtg

SEQ ID NO: 17044 - DNA, 201 bp, Homo sapiens
tggccctctcttctccagcatcatgatgcaaatgctgtctgttcacaagtgggagtgaaggaggtgaggagggggtaatcagctggagcctgaaggcctckctgaggctggctgggatgcctcctgcctgcctgagcccctcctgtcccatgtcctcacagtccctttctgtgagaatgtagatcatgtgtgtatgtatga

SEQ ID NO: 17045 - DNA, 201 bp, Homo sapiens
aaatcccagtgtggccctctcttctccagcatcatgatgcaaatgctgtctgttcacaagtgggagtgaaggaggtgaggagggggtaatcagctggagcytgaaggcctcgctgaggctggctgggatgcctcctgcctgcctgagcccctcctgtcccatgtcctcacagtccctttctgtgagaatgtagatcatgtg

SEQ ID NO: 17046 - DNA, 201 bp, Homo sapiens
ggatcaagcaatctgcccgccttgccctcccaaagtgctggggttacaagcctgagccactatgctttgccgaagattcccgtcttcccactgaaccttcytctttccttctcctgggccattcctgagccctggctgaggggagagaagggaaggaaagcccctcctgcggccatctcagcatccaaggcaatccttctg

SEQ ID NO: 17047 - DNA, 201 bp, Homo sapiens
cgtgggcctgggagctctggctgggagcggaacgcagcccacccagtgcgcgccctgcctcccatcttcccggctcgccgctcctgagcgcggcagagagsggcggtaaactgaggctgcaagggggcaggatcactctgctagtctctgcctctgatagcctgggtgttctgggaccaggtctgaccctcggaaaacaca

SEQ ID NO: 17048 - DNA, 201 bp, Homo sapiens
acgcctataatcattgcactttgggaggccgtggtgagcggatcaccggaggtcagaagttcaagaccagcctggccaaccccgcctctactaaaaatacmaaattagccgggtgtggtggcgcacgcctgcaatcccagctactccagcgactgaggctgcagaatcacttgaacccgggaggcggaggttgcagtgacc

SEQ ID NO: 17049 - DNA, 201 bp, Homo sapiens
ccagctattttttgtgtttttagtagacacagggtttcaccatgttggccaggctggtctcgaacccctgacctcaggtgatccacctgccttggcctccsaaagtgctgagattacaggcgccagatcatattctttttttattgagacagagtctcactctgtcgccctggctggagtgcaatggcgcaatctcggctc

SEQ ID NO: 17050 - DNA, 201 bp, Homo sapiens
tttcaccatgttggccaggctggtctcgaacccctgacctcaggtgatccacctgccttggcctcccaaagtgctgagattacaggcgccagatcatattytttttttattgagacagagtctcactctgtcgccctggctggagtgcaatggcgcaatctcggctcaccacaacctccgcctcccaggttcaagtgattc

SEQ ID NO: 17051 - DNA, 201 bp, Homo sapiens
ggtttctccatgttggtcaggctggtctcgaactcccgacctcaggtgacctgcctgcctcgacctcccaaagttctgggattacaggtgtgagccaccaygcccagctgagagatcatattctaagaactgggacggagaggtgacattgagcaagttacttccccttctggagcttctcagggcctccctctcccttac

SEQ ID NO: 17052 - DNA, 201 bp, Homo sapiens
ggtcagaagttcaagaccagcctggccaaccccgcctctactaaaaatacaaaattagccgggtgtggtggcgcacgcctgcaatcccagctactccagcgactgaggctgcagaatcacttgaacccgggaggcggaggttgcagtgacccaagatcgcaccactgcactccagcctgggtgacagagcgagactctgtc

SEQ ID NO: 17053 - DNA, 201 bp, Homo sapiens
gacccaagatcgcaccactgcactccagcctgggtgacagagcgagactctgtctcaaaaataaaaataaataaataaataaataaataaataaataaataaatacatgccttttccagccacatggttaattctagcccaggactttagagcaaagagcagcaccaagcttacaagggtggtgagagaagctgggggact

SEQ ID NO: 17054 - DNA, 201 bp, Homo sapiens
acccaagatcgcaccactgcactccagcctgggtgacagagcgagactctgtctcaaaaataaaaataaataaataaataaataaataaataaataaataaatacatgccttttccagccacatggttaattctagcccaggactttagagcaaagagcagcaccaagcttacaagggtggtgagagaagctgggggactt

SEQ ID NO: 17055 - DNA, 201 bp, Homo sapiens
ccaagatcgcaccactgcactccagcctgggtgacagagcgagactctgtctcaaaaataaaaataaataaataaataaataaataaataaataaataaatacatgccttttccagccacatggttaattctagcccaggactttagagcaaagagcagcaccaagcttacaagggtggtgagagaagctgggggacttct

SEQ ID NO: 17056 - DNA, 201 bp, Homo sapiens
tgggctggtagagagcttcaaccagagcctggatgactggaggcagggagcaagggtgagtgccaaagacagagcactcacccacctgctggtctgctccrgcagaagatacactgtgtatctggcatgagcaggtgtcttcaaggcttccgaatggagcttagacaaaggagggtctgaggctagtatccagccaagccc

SEQ ID NO: 17057 - DNA, 201 bp, Homo sapiens
aagatcgcaccactgcactccagcctgggtgacagagcgagactctgtctcaaaaataaaaataaataaataaataaataaataaataaataaataaatacatgccttttccagccacatggttaattctagcccaggactttagagcaaagagcagcaccaagcttacaagggtggtgagagaagctgggggacttctgt

SEQ ID NO: 17058 - DNA, 201 bp, Homo sapiens
atagctacctgcaggggactggagtccccaggaaggccaattaccagtccctcatacacctccccaaaggcaccatggcccagggctctgcaggaagacaygttggaagggagtgggcaggcggcctggagaagagtcctagagagtctagtaccccctttacctcccctgcccctgccatatgcccagctgaccctatat

SEQ ID NO: 17059 - DNA, 201 bp, Homo sapiens
cgtcaggtgtagcctcccctcacatgaggtggctggaaaggacaggattagcctcaggggaggggaacagtggggaaggggaggggaagggtgttatcacyaggaatctgtcttggatgtgaagatgccctccaggaaggcctctgggggcatccacttgactgggagcaaggcccggtcccccctgcggtaataactggc

SEQ ID NO: 17060 - DNA, 201 bp, Homo sapiens
ttcctcagttccggtccctggcatccacagatcgctggaggatgagaagagctttttattagaagcatctgcagggtggggggtctgcccagatgaaggaygctcataatgggagagcaatccagtgctccccatggacacctggggtgtgtgtaaggcggcctctggccccaagatcaaaagctggaagtggctgggccc

SEQ ID NO: 17061 - DNA, 201 bp, Homo sapiens
catcagctccagcaccaccctcggcttccgcatcgagggcatcaaggtgaggcaggcgcgcttcgctggcaccgccgcagccccactgcgcgctgtctttyccgatcccccgctcccgccccgcctgcccctccgccctctcccaccgcctcgccgtcccctgcaactgggaggtaccgctgctctacgctgtcctcttcc

SEQ ID NO: 17062 - DNA, 201 bp, Homo sapiens
gtgccatgctggtgtgcggcacccattaacttgtcatttagcattaggtatatctcctaatgctatccctcccccctccccctaccccacaacagttcccrgagtgtgatgttccccttcctgtgagcaactgctcacttctaagccaggtgtgtattttgtttcctggccaagccattgtttcataaaactttagattta

SEQ ID NO: 17063 - DNA, 201 bp, Homo sapiens
atcactattgcccatatggaagctatgatagccaacggactgtaaagtaggctgaaatctgcagttggccctcaggttttgacccactgtcatttgaattyctgctttatgtcagctctcatagggaataagacattccaaagggttacccacacaataaaggactttgtctatgttcatgtgttttggccagtttgaaaa

SEQ ID NO: 17064 - DNA, 201 bp, Homo sapiens
ttatatcttcagagaatgcaactgaggcataagctatgatttctatttactgataagtaatttttattttatgggtttgatgattgcatcaaataggtgtrtgtgtgtgtgtgtgtgtgtgtgtgtgtgtgtgtgtgtgatggttaagaatgtgagctatattaattaggtcaaatctggctcaaatctagtgtgacctgg
